United States Patent Application Publication US 2011/0177960 A1 - sequence listing, part 8

SEQ ID NO: 108963 - DNA, 25 bp, Artificial
  probe
  misc_feature (1)..(25): SEQ ID NO: 866; WAN024C94_at; Start 101; Stop 125
aacttcgtttccaagctgctactgg

SEQ ID NO: 108964 - DNA, 25 bp, Artificial
  probe
  misc_feature (1)..(25): SEQ ID NO: 866; WAN024C94_at; Start 179; Stop 203
tcaaaacagttcaatctgaagcgaa

SEQ ID NO: 108965 - DNA, 25 bp, Artificial
  probe
  misc_feature (1)..(25): SEQ ID NO: 866; WAN024C94_at; Start 126; Stop 150
tcaattggaacaaacagctcgcttg

SEQ ID NO: 108966 - DNA, 25 bp, Artificial
  probe
  misc_feature (1)..(25): SEQ ID NO: 866; WAN024C94_at; Start 55; Stop 79
gaagaactcgcgaagcgcgaaaacg

SEQ ID NO: 108967 - DNA, 25 bp, Artificial
  probe
  misc_feature (1)..(25): SEQ ID NO: 866; WAN024C94_at; Start 39; Stop 63
tcgtggtctttctcaagaagaactc

SEQ ID NO: 108968 - DNA, 25 bp, Artificial
  probe
  misc_feature (1)..(25): SEQ ID NO: 866; WAN024C94_at; Start 128; Stop 152
aattggaacaaacagctcgcttgaa

SEQ ID NO: 108969 - DNA, 25 bp, Artificial
  probe
  misc_feature (1)..(25): SEQ ID NO: 866; WAN024C94_at; Start 105; Stop 129
tcgtttccaagctgctactggtcaa

SEQ ID NO: 108970 - DNA, 25 bp, Artificial
  probe
  misc_feature (1)..(25): SEQ ID NO: 866; WAN024C94_at; Start 49; Stop 73
tctcaagaagaactcgcgaagcgcg

SEQ ID NO: 108971 - DNA, 25 bp, Artificial
  probe
  misc_feature (1)..(25): SEQ ID NO: 866; WAN024C94_at; Start 97; Stop 121
tttgaacttcgtttccaagctgcta

SEQ ID NO: 108972 - DNA, 25 bp, Artificial
  probe
  misc_feature (1)..(25): SEQ ID NO: 866; WAN024C94_at; Start 108; Stop 132
tttccaagctgctactggtcaattg

SEQ ID NO: 108973 - DNA, 25 bp, Artificial
  probe
  misc_feature (1)..(25): SEQ ID NO: 3017; WAN024C95_at; Start 230; Stop 254
aagctatcggtgtgcgtatgggatc

SEQ ID NO: 108974 - DNA, 25 bp, Artificial
  probe
  misc_feature (1)..(25): SEQ ID NO: 3017; WAN024C95_at; Start 313; Stop 337
gaaatcgctggtgtatctgaagaga

SEQ ID NO: 108975 - DNA, 25 bp, Artificial
  probe
  misc_feature (1)..(25): SEQ ID NO: 3017; WAN024C95_at; Start 114; Stop 138
tagccactggatcactaaccgccaa

SEQ ID NO: 108976 - DNA, 25 bp, Artificial
  probe
  misc_feature (1)..(25): SEQ ID NO: 3017; WAN024C95_at; Start 74; Stop 98
aagaagtagcattcggtgaatacgg

SEQ ID NO: 108977 - DNA, 25 bp, Artificial
  probe
  misc_feature (1)..(25): SEQ ID NO: 3017; WAN024C95_at; Start 202; Stop 226
atcttcccacacaaatcatacactg

SEQ ID NO: 108978 - DNA, 25 bp, Artificial
  probe
  misc_feature (1)..(25): SEQ ID NO: 3017; WAN024C95_at; Start 129; Stop 153
taaccgccaaatcgaagctgctcgt

SEQ ID NO: 108979 - DNA, 25 bp, Artificial
  probe
  misc_feature (1)..(25): SEQ ID NO: 3017; WAN024C95_at; Start 46; Stop 70
aaaatgcgcggtgaagcaaaaggtg

SEQ ID NO: 108980 - DNA, 25 bp, Artificial
  probe
  misc_feature (1)..(25): SEQ ID NO: 3017; WAN024C95_at; Start 83; Stop 107
cattcggtgaatacggtcttcaagc

SEQ ID NO: 108981 - DNA, 25 bp, Artificial
  probe
  misc_feature (1)..(25): SEQ ID NO: 3017; WAN024C95_at; Start 286; Stop 310
ccagttaaacgtggtaaagtgatgt

SEQ ID NO: 108982 - DNA, 25 bp, Artificial
  probe
  misc_feature (1)..(25): SEQ ID NO: 3017; WAN024C95_at; Start 328; Stop 352
tctgaagagattgcacgtgaagcgc

SEQ ID NO: 108983 - DNA, 25 bp, Artificial
  probe
  misc_feature (1)..(25): SEQ ID NO: 3017; WAN024C95_at; Start 21; Stop 45
taaacaccgtcgtgagttccgtgga

SEQ ID NO: 108984 - DNA, 25 bp, Artificial
  probe
  misc_feature (1)..(25): SEQ ID NO: 3017; WAN024C95_at; Start 39; Stop 63
ccgtggaaaaatgcgcggtgaagca

SEQ ID NO: 108985 - DNA, 25 bp, Artificial
  probe
  misc_feature (1)..(25): SEQ ID NO: 3017; WAN024C95_at; Start 157; Stop 181
gccatgactcgttacatgaaacgtg

SEQ ID NO: 108986 - DNA, 25 bp, Artificial
  probe
  misc_feature (1)..(25): SEQ ID NO: 3017; WAN024C95_at; Start 222; Stop 246
cactgctaaagctatcggtgtgcgt

SEQ ID NO: 108987 - DNA, 25 bp, Artificial
  probe
  misc_feature (1)..(25): SEQ ID NO: 3017; WAN024C95_at; Start 33; Stop 57
tgagttccgtggaaaaatgcgcggt

SEQ ID NO: 108988 - DNA, 25 bp, Artificial
  probe
  misc_feature (1)..(25): SEQ ID NO: 3017; WAN024C95_at; Start 268; Stop 292
cctgaaggttgggtagcaccagtta

SEQ ID NO: 108989 - DNA, 25 bp, Artificial
  probe
  misc_feature (1)..(25): SEQ ID NO: 3017; WAN024C95_at; Start 61; Stop 85
gcaaaaggtggaaaagaagtagcat

SEQ ID NO: 108990 - DNA, 25 bp, Artificial
  probe
  misc_feature (1)..(25): SEQ ID NO: 3017; WAN024C95_at; Start 94; Stop 118
tacggtcttcaagctacaactagcc

SEQ ID NO: 108991 - DNA, 25 bp, Artificial
  probe
  misc_feature (1)..(25): SEQ ID NO: 3017; WAN024C95_at; Start 103; Stop 127
caagctacaactagccactggatca

SEQ ID NO: 108992 - DNA, 25 bp, Artificial
  probe
  misc_feature (1)..(25): SEQ ID NO: 3017; WAN024C95_at; Start 277; Stop 301
tgggtagcaccagttaaacgtggta

SEQ ID NO: 108993 - DNA, 25 bp, Artificial
  probe
  misc_feature (1)..(25): SEQ ID NO: 3017; WAN024C95_at; Start 119; Stop 143
actggatcactaaccgccaaatcga

SEQ ID NO: 108994 - DNA, 25 bp, Artificial
  probe
  misc_feature (1)..(25): SEQ ID NO: 3017; WAN024C95_at; Start 164; Stop 188
ctcgttacatgaaacgtggtggtaa

SEQ ID NO: 108995 - DNA, 25 bp, Artificial
  probe
  misc_feature (1)..(25): SEQ ID NO: 3017; WAN024C95_at; Start 264; Stop 288
ggcacctgaaggttgggtagcacca

SEQ ID NO: 108996 - DNA, 25 bp, Artificial
  probe
  misc_feature (1)..(25): SEQ ID NO: 3017; WAN024C95_at; Start 385; Stop 409
tgtaaattcgtaaaacgtgaagcag

SEQ ID NO: 108997 - DNA, 25 bp, Artificial
  probe
  misc_feature (1)..(25): SEQ ID NO: 3017; WAN024C95_at; Start 246; Stop 270
tatgggatctggtaaaggggcacct

SEQ ID NO: 108998 - DNA, 25 bp, Artificial
  probe
  misc_feature (1)..(25): SEQ ID NO: 3017; WAN024C95_at; Start 365; Stop 389
gccacaaattgccagttaaatgtaa

SEQ ID NO: 108999 - DNA, 25 bp, Artificial
  probe
  misc_feature (1)..(25): SEQ ID NO: 3017; WAN024C95_at; Start 297; Stop 321
tggtaaagtgatgttcgaaatcgct

SEQ ID NO: 109000 - DNA, 25 bp, Artificial
  probe
  misc_feature (1)..(25): SEQ ID NO: 3017; WAN024C95_at; Start 393; Stop 417
cgtaaaacgtgaagcagaataacta

SEQ ID NO: 109001 - DNA, 25 bp, Artificial
  probe
  misc_feature (1)..(25): SEQ ID NO: 3017; WAN024C95_at; Start 356; Stop 380
gacttgctagccacaaattgccagt

SEQ ID NO: 109002 - DNA, 25 bp, Artificial
  probe
  misc_feature (1)..(25): SEQ ID NO: 3017; WAN024C95_at; Start 190; Stop 214
gtttggattaaaatcttcccacaca

SEQ ID NO: 109003 - DNA, 25 bp, Artificial
  probe
  misc_feature (1)..(25): SEQ ID NO: 3017; WAN024C95_at; Start 171; Stop 195
catgaaacgtggtggtaaagtttgg

SEQ ID NO: 109004 - DNA, 25 bp, Artificial
  probe
  misc_feature (1)..(25): SEQ ID NO: 3017; WAN024C95_at; Start 217; Stop 241
tcatacactgctaaagctatcggtg

SEQ ID NO: 109005 - DNA, 25 bp, Artificial
  probe
  misc_feature (1)..(25): SEQ ID NO: 3017; WAN024C95_at; Start 346; Stop 370
gaagcgcttcgacttgctagccaca

SEQ ID NO: 109006 - DNA, 25 bp, Artificial
  probe
  misc_feature (1)..(25): SEQ ID NO: 3017; WAN024C95_at; Start 334; Stop 358
gagattgcacgtgaagcgcttcgac

SEQ ID NO: 109007 - DNA, 25 bp, Artificial
  probe
  misc_feature (1)..(25): SEQ ID NO: 5165; WAN024C96_at; Start 162; Stop 186
cttgttttccagtcaatttgttaag

SEQ ID NO: 109008 - DNA, 25 bp, Artificial
  probe
  misc_feature (1)..(25): SEQ ID NO: 5165; WAN024C96_at; Start 56; Stop 80
tgtgcacgacggaaagcaacacgtt

SEQ ID NO: 109009 - DNA, 25 bp, Artificial
  probe
  misc_feature (1)..(25): SEQ ID NO: 5165; WAN024C96_at; Start 209; Stop 233
ttagcaccacctttaccgataacca

SEQ ID NO: 109010 - DNA, 25 bp, Artificial
  probe
  misc_feature (1)..(25): SEQ ID NO: 5165; WAN024C96_at; Start 27; Stop 51
cacgcattgcacgttggattgcttg

SEQ ID NO: 109011 - DNA, 25 bp, Artificial
  probe
  misc_feature (1)..(25): SEQ ID NO: 5165; WAN024C96_at; Start 81; Stop 105
gctccaattgacgagcaattccttc

SEQ ID NO: 109012 - DNA, 25 bp, Artificial
  probe
  misc_feature (1)..(25): SEQ ID NO: 5165; WAN024C96_at; Start 10; Stop 34
gattcctttagctccagcacgcatt

SEQ ID NO: 109013 - DNA, 25 bp, Artificial
  probe
  misc_feature (1)..(25): SEQ ID NO: 5165; WAN024C96_at; Start 234; Stop 258
tacctggtttagcagtgtgaagtga

SEQ ID NO: 109014 - DNA, 25 bp, Artificial
  probe
  misc_feature (1)..(25): SEQ ID NO: 5165; WAN024C96_at; Start 7; Stop 31
tttgattcctttagctccagcacgc

SEQ ID NO: 109015 - DNA, 25 bp, Artificial
  probe
  misc_feature (1)..(25): SEQ ID NO: 5165; WAN024C96_at; Start 42; Stop 66
ggattgcttgtttttgtgcacgacg

SEQ ID NO: 109016 - DNA, 25 bp, Artificial
  probe
  misc_feature (1)..(25): SEQ ID NO: 5165; WAN024C96_at; Start 196; Stop 220
gagtgcatcaacgttagcaccacct

SEQ ID NO: 109017 - DNA, 25 bp, Artificial
  probe
  misc_feature (1)..(25): SEQ ID NO: 5165; WAN024C96_at; Start 138; Stop 162
tgatttcgatgatgttgatgtgtac

SEQ ID NO: 109018 - DNA, 25 bp, Artificial
  probe
  misc_feature (1)..(25): SEQ ID NO: 5165; WAN024C96_at; Start 16; Stop 40
tttagctccagcacgcattgcacgt

SEQ ID NO: 109019 - DNA, 25 bp, Artificial
  probe
  misc_feature (1)..(25): SEQ ID NO: 5165; WAN024C96_at; Start 60; Stop 84
cacgacggaaagcaacacgttgctc

SEQ ID NO: 109020 - DNA, 25 bp, Artificial
  probe
  misc_feature (1)..(25): SEQ ID NO: 5165; WAN024C96_at; Start 174; Stop 198
tcaatttgttaagttttgcacggag

SEQ ID NO: 109021 - DNA, 25 bp, Artificial
  probe
  misc_feature (1)..(25): SEQ ID NO: 5165; WAN024C96_at; Start 107; Stop 131
cctacaaggtgagcatccaaatcag

SEQ ID NO: 109022 - DNA, 25 bp, Artificial
  probe
  misc_feature (1)..(25): SEQ ID NO: 5165; WAN024C96_at; Start 154; Stop 178
gatgtgtacttgttttccagtcaat

SEQ ID NO: 109023 - DNA, 25 bp, Artificial
  probe
  misc_feature (1)..(25): SEQ ID NO: 5165; WAN024C96_at; Start 48; Stop 72
cttgtttttgtgcacgacggaaagc

SEQ ID NO: 109024 - DNA, 25 bp, Artificial
  probe
  misc_feature (1)..(25): SEQ ID NO: 5165; WAN024C96_at; Start 53; Stop 77
ttttgtgcacgacggaaagcaacac

SEQ ID NO: 109025 - DNA, 25 bp, Artificial
  probe
  misc_feature (1)..(25): SEQ ID NO: 5165; WAN024C96_at; Start 226; Stop 250
gataaccatacctggtttagcagtg

SEQ ID NO: 109026 - DNA, 25 bp, Artificial
  probe
  misc_feature (1)..(25): SEQ ID NO: 5165; WAN024C96_at; Start 178; Stop 202
tttgttaagttttgcacggagtgca

SEQ ID NO: 109027 - DNA, 25 bp, Artificial
  probe
  misc_feature (1)..(25): SEQ ID NO: 5165; WAN024C96_at; Start 231; Stop 255
ccatacctggtttagcagtgtgaag

SEQ ID NO: 109028 - DNA, 25 bp, Artificial
  probe
  misc_feature (1)..(25): SEQ ID NO: 5165; WAN024C96_at; Start 93; Stop 117
gagcaattccttcacctacaaggtg

SEQ ID NO: 109029 - DNA, 25 bp, Artificial
  probe
  misc_feature (1)..(25): SEQ ID NO: 5165; WAN024C96_at; Start 148; Stop 172
gatgttgatgtgtacttgttttcca

SEQ ID NO: 109030 - DNA, 25 bp, Artificial
  probe
  misc_feature (1)..(25): SEQ ID NO: 5165; WAN024C96_at; Start 184; Stop 208
aagttttgcacggagtgcatcaacg

SEQ ID NO: 109031 - DNA, 25 bp, Artificial
  probe
  misc_feature (1)..(25): SEQ ID NO: 5165; WAN024C96_at; Start 123; Stop 147
ccaaatcaggttgtttgatttcgat

SEQ ID NO: 109032 - DNA, 25 bp, Artificial
  probe
  misc_feature (1)..(25): SEQ ID NO: 5165; WAN024C96_at; Start 203; Stop 227
tcaacgttagcaccacctttaccga

SEQ ID NO: 109033 - DNA, 25 bp, Artificial
  probe
  misc_feature (1)..(25): SEQ ID NO: 5165; WAN024C96_at; Start 3; Stop 27
gagttttgattcctttagctccagc

SEQ ID NO: 109034 - DNA, 25 bp, Artificial
  probe
  misc_feature (1)..(25): SEQ ID NO: 5165; WAN024C96_at; Start 71; Stop 95
gcaacacgttgctccaattgacgag

SEQ ID NO: 109035 - DNA, 25 bp, Artificial
  probe
  misc_feature (1)..(25): SEQ ID NO: 5165; WAN024C96_at; Start 116; Stop 140
tgagcatccaaatcaggttgtttga

SEQ ID NO: 109036 - DNA, 25 bp, Artificial
  probe
  misc_feature (1)..(25): SEQ ID NO: 5165; WAN024C96_at; Start 111; Stop 135
caaggtgagcatccaaatcaggttg

SEQ ID NO: 109037 - DNA, 25 bp, Artificial
  probe
  misc_feature (1)..(25): SEQ ID NO: 5165; WAN024C96_at; Start 216; Stop 240
cacctttaccgataaccatacctgg

SEQ ID NO: 109038 - DNA, 25 bp, Artificial
  probe
  misc_feature (1)..(25): SEQ ID NO: 5165; WAN024C96_at; Start 190; Stop 214
tgcacggagtgcatcaacgttagca

SEQ ID NO: 109039 - DNA, 25 bp, Artificial
  probe
  misc_feature (1)..(25): SEQ ID NO: 5165; WAN024C96_at; Start 90; Stop 114
gacgagcaattccttcacctacaag

SEQ ID NO: 109040 - DNA, 25 bp, Artificial
  probe
  misc_feature (1)..(25): SEQ ID NO: 5165; WAN024C96_at; Start 23; Stop 47
ccagcacgcattgcacgttggattg

SEQ ID NO: 109041 - DNA, 25 bp, Artificial
  probe
  misc_feature (1)..(25): SEQ ID NO: 4190; WAN024C97_at; Start 497; Stop 521
gatactctgaaggaactgttccgct

SEQ ID NO: 109042 - DNA, 25 bp, Artificial
  probe
  misc_feature (1)..(25): SEQ ID NO: 4190; WAN024C97_at; Start 70; Stop 94
gctgaaaaagaatacgcggattacc

SEQ ID NO: 109043 - DNA, 25 bp, Artificial
  probe
  misc_feature (1)..(25): SEQ ID NO: 4190; WAN024C97_at; Start 167; Stop 191
tcgaacgcgcagtaaacaaagttaa

SEQ ID NO: 109044 - DNA, 25 bp, Artificial
  probe
  misc_feature (1)..(25): SEQ ID NO: 4190; WAN024C97_at; Start 359; Stop 383
ctcgtcaattggagcaacgtgttgc

SEQ ID NO: 109045 - DNA, 25 bp, Artificial
  probe
  misc_feature (1)..(25): SEQ ID NO: 4190; WAN024C97_at; Start 273; Stop 297
caaattgactggaaaacaagtacac

SEQ ID NO: 109046 - DNA, 25 bp, Artificial
  probe
  misc_feature (1)..(25): SEQ ID NO: 4190; WAN024C97_at; Start 316; Stop 340
aaacaacctgatttggatgctcacc

SEQ ID NO: 109047 - DNA, 25 bp, Artificial
  probe
  misc_feature (1)..(25): SEQ ID NO: 4190; WAN024C97_at; Start 126; Stop 150
tcaaaaagaacttgctgacgcagca

SEQ ID NO: 109048 - DNA, 25 bp, Artificial
  probe
  misc_feature (1)..(25): SEQ ID NO: 4190; WAN024C97_at; Start 407; Stop 431
caatccaacgtgcaatgcgtgctgg

SEQ ID NO: 109049 - DNA, 25 bp, Artificial
  probe
  misc_feature (1)..(25): SEQ ID NO: 4190; WAN024C97_at; Start 623; Stop 647
cagctcgtaaaaacactaaaggagg

SEQ ID NO: 109050 - DNA, 25 bp, Artificial
  probe
  misc_feature (1)..(25): SEQ ID NO: 4190; WAN024C97_at; Start 253; Stop 277
gcactccgtgcaaaacttaacaaat

SEQ ID NO: 109051 - DNA, 25 bp, Artificial
  probe
  misc_feature (1)..(25): SEQ ID NO: 4190; WAN024C97_at; Start 600; Stop 624
gatctaccgtggtgaagttcttcca

SEQ ID NO: 109052 - DNA, 25 bp, Artificial
  probe
  misc_feature (1)..(25): SEQ ID NO: 4190; WAN024C97_at; Start 374; Stop 398
aacgtgttgctttccgtcgtgcaca

SEQ ID NO: 109053 - DNA, 25 bp, Artificial
  probe
  misc_feature (1)..(25): SEQ ID NO: 4190; WAN024C97_at; Start 100; Stop 124
gaagatcttgcaatccgtaaattcg

SEQ ID NO: 109054 - DNA, 25 bp, Artificial
  probe
  misc_feature (1)..(25): SEQ ID NO: 4190; WAN024C97_at; Start 555; Stop 579
ggaagaagcagatactacatacggt

SEQ ID NO: 109055 - DNA, 25 bp, Artificial
  probe
  misc_feature (1)..(25): SEQ ID NO: 4190; WAN024C97_at; Start 340; Stop 364
cttgtaggtgaaggaattgctcgtc

SEQ ID NO: 109056 - DNA, 25 bp, Artificial
  probe
  misc_feature (1)..(25): SEQ ID NO: 4190; WAN024C97_at; Start 440; Stop 464
gaatcaaaactcaagtatcaggtcg

SEQ ID NO: 109057 - DNA, 25 bp, Artificial
  probe
  misc_feature (1)..(25): SEQ ID NO: 4190; WAN024C97_at; Start 610; Stop 634
ggtgaagttcttccagctcgtaaaa

SEQ ID NO: 109058 - DNA, 25 bp, Artificial
  probe
  misc_feature (1)..(25): SEQ ID NO: 4190; WAN024C97_at; Start 39; Stop 63
catcatccgtgattgggatgccaaa

SEQ ID NO: 109059 - DNA, 25 bp, Artificial
  probe
  misc_feature (1)..(25): SEQ ID NO: 4190; WAN024C97_at; Start 289; Stop 313
caagtacacatcaacatcatcgaaa

SEQ ID NO: 109060 - DNA, 25 bp, Artificial
  probe
  misc_feature (1)..(25): SEQ ID NO: 4190; WAN024C97_at; Start 154; Stop 178
tcaactattgaaatcgaacgcgcag

SEQ ID NO: 109061 - DNA, 25 bp, Artificial
  probe
  misc_feature (1)..(25): SEQ ID NO: 4190; WAN024C97_at; Start 200; Stop 224
ttcacactgctaaaccaggtatggt

SEQ ID NO: 109062 - DNA, 25 bp, Artificial
  probe
  misc_feature (1)..(25): SEQ ID NO: 4190; WAN024C97_at; Start 536; Stop 560
cagatatcgattacgcttgggaaga

SEQ ID NO: 109063 - DNA, 25 bp, Artificial
  probe
  misc_feature (1)..(25): SEQ ID NO: 4190; WAN024C97_at; Start 55; Stop 79
gatgccaaatggtatgctgaaaaag

SEQ ID NO: 109064 - DNA, 25 bp, Artificial
  probe
  misc_feature (1)..(25): SEQ ID NO: 4190; WAN024C97_at; Start 389; Stop 413
gtcgtgcacaaaaacaagcaatcca

SEQ ID NO: 109065 - DNA, 25 bp, Artificial
  probe
  misc_feature (1)..(25): SEQ ID NO: 4190; WAN024C97_at; Start 139; Stop 163
gctgacgcagcagtttcaactattg

SEQ ID NO: 109066 - DNA, 25 bp, Artificial
  probe
  misc_feature (1)..(25): SEQ ID NO: 4190; WAN024C97_at; Start 82; Stop 106
tacgcggattaccttcatgaagatc

SEQ ID NO: 109067 - DNA, 25 bp, Artificial
  probe
  misc_feature (1)..(25): SEQ ID NO: 4190; WAN024C97_at; Start 482; Stop 506
tcgcccgtgctgaaggatactctga

SEQ ID NO: 109068 - DNA, 25 bp, Artificial
  probe
  misc_feature (1)..(25): SEQ ID NO: 4190; WAN024C97_at; Start 240; Stop 264
tgctaacgttgatgcactccgtgca

SEQ ID NO: 109069 - DNA, 25 bp, Artificial
  probe
  misc_feature (1)..(25): SEQ ID NO: 4190; WAN024C97_at; Start 423; Stop 447
gcgtgctggagctaaaggaatcaaa

SEQ ID NO: 109070 - DNA, 25 bp, Artificial
  probe
  misc_feature (1)..(25): SEQ ID NO: 4190; WAN024C97_at; Start 521; Stop 545
ttcacacacttcgtgcagatatcga

SEQ ID NO: 109071 - DNA, 25 bp, Artificial
  probe
  misc_feature (1)..(25): SEQ ID NO: 4190; WAN024C97_at; Start 16; Stop 40
catccaattggtatgcgtgtcggca

SEQ ID NO: 109072 - DNA, 25 bp, Artificial
  probe
  misc_feature (1)..(25): SEQ ID NO: 4190; WAN024C97_at; Start 2; Stop 26
tgggtcaaaaagtacatccaattgg

SEQ ID NO: 109073 - DNA, 25 bp, Artificial
  probe
  misc_feature (1)..(25): SEQ ID NO: 4190; WAN024C97_at; Start 219; Stop 243
tatggttatcggtaaaggtggtgct

SEQ ID NO: 109074 - DNA, 25 bp, Artificial
  probe
  misc_feature (1)..(25): SEQ ID NO: 4190; WAN024C97_at; Start 464; Stop 488
gtttgaacggtgcagatatcgcccg

SEQ ID NO: 109075 - DNA, 25 bp, Artificial
  probe
  misc_feature (1)..(25): SEQ ID NO: 5707; WAN024C98_at; Start 36; Stop 60
tcactttgatgatctcaatcacact

SEQ ID NO: 109076 - DNA, 25 bp, Artificial
  probe
  misc_feature (1)..(25): SEQ ID NO: 5707; WAN024C98_at; Start 3; Stop 27
gtcatgcaaaaaaatagaagatgtg

SEQ ID NO: 109077 - DNA, 25 bp, Artificial
  probe
  misc_feature (1)..(25): SEQ ID NO: 5707; WAN024C98_at; Start 41; Stop 65
ttgatgatctcaatcacacttccta

SEQ ID NO: 109078 - DNA, 25 bp, Artificial
  probe
  misc_feature (1)..(25): SEQ ID NO: 5707; WAN024C98_at; Start 26; Stop 50
tgatagagaatcactttgatgatct

SEQ ID NO: 109079 - DNA, 25 bp, Artificial
  probe
  misc_feature (1)..(25): SEQ ID NO: 5707; WAN024C98_at; Start 22; Stop 46
gatgtgatagagaatcactttgatg

SEQ ID NO: 109080 - DNA, 25 bp, Artificial
  probe
  misc_feature (1)..(25): SEQ ID NO: 5707; WAN024C98_at; Start 13; Stop 37
aaaatagaagatgtgatagagaatc

SEQ ID NO: 109081 - DNA, 25 bp, Artificial
  probe
  misc_feature (1)..(25): SEQ ID NO: 5707; WAN024C98_at; Start 29; Stop 53
tagagaatcactttgatgatctcaa

SEQ ID NO: 109082 - DNA, 25 bp, Artificial
  probe
  misc_feature (1)..(25): SEQ ID NO: 5707; WAN024C98_at; Start 34; Stop 58
aatcactttgatgatctcaatcaca

SEQ ID NO: 109083 - DNA, 25 bp, Artificial
  probe
  misc_feature (1)..(25): SEQ ID NO: 5707; WAN024C98_at; Start 48; Stop 72
tctcaatcacacttcctattcaagt

SEQ ID NO: 109084 - DNA, 25 bp, Artificial
  probe
  misc_feature (1)..(25): SEQ ID NO: 5707; WAN024C98_at; Start 39; Stop 63
ctttgatgatctcaatcacacttcc

SEQ ID NO: 109085 - DNA, 25 bp, Artificial
  probe
  misc_feature (1)..(25): SEQ ID NO: 5707; WAN024C98_at; Start 33; Stop 57
gaatcactttgatgatctcaatcac

SEQ ID NO: 109086 - DNA, 25 bp, Artificial
  probe
  misc_feature (1)..(25): SEQ ID NO: 5707; WAN024C98_at; Start 47; Stop 71
atctcaatcacacttcctattcaag

SEQ ID NO: 109087 - DNA, 25 bp, Artificial
  probe
  misc_feature (1)..(25): SEQ ID NO: 5707; WAN024C98_at; Start 32; Stop 56
agaatcactttgatgatctcaatca

SEQ ID NO: 109088 - DNA, 25 bp, Artificial
  probe
  misc_feature (1)..(25): SEQ ID NO: 5707; WAN024C98_at; Start 17; Stop 41
tagaagatgtgatagagaatcactt

SEQ ID NO: 109089 - DNA, 25 bp, Artificial
  probe
  misc_feature (1)..(25): SEQ ID NO: 5707; WAN024C98_at; Start 15; Stop 39
aatagaagatgtgatagagaatcac

SEQ ID NO: 109090 - DNA, 25 bp, Artificial
  probe
  misc_feature (1)..(25): SEQ ID NO: 5707; WAN024C98_at; Start 25; Stop 49
gtgatagagaatcactttgatgatc

SEQ ID NO: 109091 - DNA, 25 bp, Artificial
  probe
  misc_feature (1)..(25): SEQ ID NO: 5707; WAN024C98_at; Start 24; Stop 48
tgtgatagagaatcactttgatgat

SEQ ID NO: 109092 - DNA, 25 bp, Artificial
  probe
  misc_feature (1)..(25): SEQ ID NO: 5707; WAN024C98_at; Start 37; Stop 61
cactttgatgatctcaatcacactt

SEQ ID NO: 109093 - DNA, 25 bp, Artificial
  probe
  misc_feature (1)..(25): SEQ ID NO: 5707; WAN024C98_at; Start 19; Stop 43
gaagatgtgatagagaatcactttg

SEQ ID NO: 109094 - DNA, 25 bp, Artificial
  probe
  misc_feature (1)..(25): SEQ ID NO: 5707; WAN024C98_at; Start 30; Stop 54
agagaatcactttgatgatctcaat

SEQ ID NO: 109095 - DNA, 25 bp, Artificial
  probe
  misc_feature (1)..(25): SEQ ID NO: 5707; WAN024C98_at; Start 35; Stop 59
atcactttgatgatctcaatcacac

SEQ ID NO: 109096 - DNA, 25 bp, Artificial
  probe
  misc_feature (1)..(25): SEQ ID NO: 5707; WAN024C98_at; Start 20; Stop 44
aagatgtgatagagaatcactttga

SEQ ID NO: 109097 - DNA, 25 bp, Artificial
  probe
  misc_feature (1)..(25): SEQ ID NO: 5707; WAN024C98_at; Start 43; Stop 67
gatgatctcaatcacacttcctatt

SEQ ID NO: 109098 - DNA, 25 bp, Artificial
  probe
  misc_feature (1)..(25): SEQ ID NO: 5707; WAN024C98_at; Start 42; Stop 66
tgatgatctcaatcacacttcctat

SEQ ID NO: 109099 - DNA, 25 bp, Artificial
  probe
  misc_feature (1)..(25): SEQ ID NO: 5707; WAN024C98_at; Start 14; Stop 38
aaatagaagatgtgatagagaatca

SEQ ID NO: 109100 - DNA, 25 bp, Artificial
  probe
  misc_feature (1)..(25): SEQ ID NO: 5707; WAN024C98_at; Start 50; Stop 74
tcaatcacacttcctattcaagtag

SEQ ID NO: 109101 - DNA, 25 bp, Artificial
  probe
  misc_feature (1)..(25): SEQ ID NO: 5707; WAN024C98_at; Start 45; Stop 69
tgatctcaatcacacttcctattca

SEQ ID NO: 109102 - DNA, 25 bp, Artificial
  probe
  misc_feature (1)..(25): SEQ ID NO: 5707; WAN024C98_at; Start 38; Stop 62
actttgatgatctcaatcacacttc

SEQ ID NO: 109103 - DNA, 25 bp, Artificial
  probe
  misc_feature (1)..(25): SEQ ID NO: 5707; WAN024C98_at; Start 31; Stop 55
gagaatcactttgatgatctcaatc

SEQ ID NO: 109104 - DNA, 25 bp, Artificial
  probe
  misc_feature (1)..(25): SEQ ID NO: 5707; WAN024C98_at; Start 1; Stop 25
ttgtcatgcaaaaaaatagaagatg

SEQ ID NO: 109105 - DNA, 25 bp, Artificial
  probe
  misc_feature (1)..(25): SEQ ID NO: 5707; WAN024C98_at; Start 51; Stop 75
caatcacacttcctattcaagtagt

SEQ ID NO: 109106 - DNA, 25 bp, Artificial
  probe
  misc_feature (1)..(25): SEQ ID NO: 5707; WAN024C98_at; Start 46; Stop 70
gatctcaatcacacttcctattcaa

SEQ ID NO: 109107 - DNA, 25 bp, Artificial
  probe
  misc_feature (1)..(25): SEQ ID NO: 5707; WAN024C98_at; Start 40; Stop 64
tttgatgatctcaatcacacttcct

SEQ ID NO: 109108 - DNA, 25 bp, Artificial
  probe
  misc_feature (1)..(25): SEQ ID NO: 5707; WAN024C98_at; Start 27; Stop 51
gatagagaatcactttgatgatctc

SEQ ID NO: 109109 - DNA, 25 bp, Artificial
  probe
  misc_feature (1)..(25): SEQ ID NO: 5830; WAN024C99_at; Start 432; Stop 456
ttacgtccgtcataaactgcaatag

SEQ ID NO: 109110 - DNA, 25 bp, Artificial
  probe
  misc_feature (1)..(25): SEQ ID NO: 5830; WAN024C99_at; Start 25; Stop 49
ttcgcacgtggacggaaacgtttca

SEQ ID NO: 109111 - DNA, 25 bp, Artificial
  probe
  misc_feature (1)..(25): SEQ ID NO: 5830; WAN024C99_at; Start 269; Stop 293
tacgagccattgctttagctgaagt

SEQ ID NO: 109112 - DNA, 25 bp, Artificial
  probe
  misc_feature (1)..(25): SEQ ID NO: 5830; WAN024C99_at; Start 5; Stop 29
tgattggtgaagctgaacctttcgc

SEQ ID NO: 109113 - DNA, 25 bp, Artificial
  probe
  misc_feature (1)..(25): SEQ ID NO: 5830; WAN024C99_at; Start 98; Stop 122
tatccaaaccaaagttgttttcagc

SEQ ID NO: 109114 - DNA, 25 bp, Artificial
  probe
  misc_feature (1)..(25): SEQ ID NO: 5830; WAN024C99_at; Start 199; Stop 223
gcatcggctacgcttttaccacgga

SEQ ID NO: 109115 - DNA, 25 bp, Artificial
  probe
  misc_feature (1)..(25): SEQ ID NO: 5830; WAN024C99_at; Start 119; Stop 143
cagcgttagctacagctgagttcaa

SEQ ID NO: 109116 - DNA, 25 bp, Artificial
  probe
  misc_feature (1)..(25): SEQ ID NO: 5830; WAN024C99_at; Start 248; Stop 272
tacgaggtgaaacacgtactgtacg

SEQ ID NO: 109117 - DNA, 25 bp, Artificial
  probe
  misc_feature (1)..(25): SEQ ID NO: 5830; WAN024C99_at; Start 372; Stop 396
ggtgcaaattcaccaagtttgtggc

SEQ ID NO: 109118 - DNA, 25 bp, Artificial
  probe
  misc_feature (1)..(25): SEQ ID NO: 5830; WAN024C99_at; Start 406; Stop 430
cttcttggatgtaaacaggtacgtg

SEQ ID NO: 109119 - DNA, 25 bp, Artificial
  probe
  misc_feature (1)..(25): SEQ ID NO: 5830; WAN024C99_at; Start 186; Stop 210
caagattgcgattgcatcggctacg

SEQ ID NO: 109120 - DNA, 25 bp, Artificial
  probe
  misc_feature (1)..(25): SEQ ID NO: 5830; WAN024C99_at; Start 47; Stop 71
tcatagttggtccttcgtttgcgaa

SEQ ID NO: 109121 - DNA, 25 bp, Artificial
  probe
  misc_feature (1)..(25): SEQ ID NO: 5830; WAN024C99_at; Start 14; Stop 38
aagctgaacctttcgcacgtggacg

SEQ ID NO: 109122 - DNA, 25 bp, Artificial
  probe
  misc_feature (1)..(25): SEQ ID NO: 5830; WAN024C99_at; Start 293; Stop 317
taatttctgccatttatgttctcct

SEQ ID NO: 109123 - DNA, 25 bp, Artificial
  probe
  misc_feature (1)..(25): SEQ ID NO: 5830; WAN024C99_at; Start 161; Stop 185
cagcagctttgtttggagtgaatgt

SEQ ID NO: 109124 - DNA, 25 bp, Artificial
  probe
  misc_feature (1)..(25): SEQ ID NO: 5830; WAN024C99_at; Start 306; Stop 330
ttatgttctccttattttctacgtg

SEQ ID NO: 109125 - DNA, 25 bp, Artificial
  probe
  misc_feature (1)..(25): SEQ ID NO: 5830; WAN024C99_at; Start 260; Stop 284
cacgtactgtacgagccattgcttt

SEQ ID NO: 109126 - DNA, 25 bp, Artificial
  probe
  misc_feature (1)..(25): SEQ ID NO: 5830; WAN024C99_at; Start 381; Stop 405
tcaccaagtttgtggcctaccatgt

SEQ ID NO: 109127 - DNA, 25 bp, Artificial
  probe
  misc_feature (1)..(25): SEQ ID NO: 5830; WAN024C99_at; Start 334; Stop 358
tcttgtcgtctgcagcgtgaccttt

SEQ ID NO: 109128 - DNA, 25 bp, Artificial
  probe
  misc_feature (1)..(25): SEQ ID NO: 5830; WAN024C99_at; Start 345; Stop 369
gcagcgtgacctttgtaagtacgag

SEQ ID NO: 109129 - DNA, 25 bp, Artificial
  probe
  misc_feature (1)..(25): SEQ ID NO: 5830; WAN024C99_at; Start 129; Stop 153
tacagctgagttcaaaactttcaag

SEQ ID NO: 109130 - DNA, 25 bp, Artificial
  probe
  misc_feature (1)..(25): SEQ ID NO: 5830; WAN024C99_at; Start 218; Stop 242
cacggatgttatcaagaacaagacg

SEQ ID NO: 109131 - DNA, 25 bp, Artificial
  probe
  misc_feature (1)..(25): SEQ ID NO: 5830; WAN024C99_at; Start 421; Stop 445
caggtacgtgtttacgtccgtcata

SEQ ID NO: 109132 - DNA, 25 bp, Artificial
  probe
  misc_feature (1)..(25): SEQ ID NO: 5830; WAN024C99_at; Start 360; Stop 384
taagtacgagttggtgcaaattcac

SEQ ID NO: 109133 - DNA, 25 bp, Artificial
  probe
  misc_feature (1)..(25): SEQ ID NO: 5830; WAN024C99_at; Start 143; Stop 167
aaactttcaagatgatttcagcagc

SEQ ID NO: 109134 - DNA, 25 bp, Artificial
  probe
  misc_feature (1)..(25): SEQ ID NO: 5830; WAN024C99_at; Start 62; Stop 86
cgtttgcgaatgcttcagatactac

SEQ ID NO: 109135 - DNA, 25 bp, Artificial
  probe
  misc_feature (1)..(25): SEQ ID NO: 5830; WAN024C99_at; Start 107; Stop 131
caaagttgttttcagcgttagctac

SEQ ID NO: 109136 - DNA, 25 bp, Artificial
  probe
  misc_feature (1)..(25): SEQ ID NO: 5830; WAN024C99_at; Start 172; Stop 196
tttggagtgaatgtcaagattgcga

SEQ ID NO: 109137 - DNA, 25 bp, Artificial
  probe
  misc_feature (1)..(25): SEQ ID NO: 5830; WAN024C99_at; Start 325; Stop 349
tacgtgttttcttgtcgtctgcagc

SEQ ID NO: 109138 - DNA, 25 bp, Artificial
  probe
  misc_feature (1)..(25): SEQ ID NO: 5830; WAN024C99_at; Start 394; Stop 418
ggcctaccatgtcttcttggatgta

SEQ ID NO: 109139 - DNA, 25 bp, Artificial
  probe
  misc_feature (1)..(25): SEQ ID NO: 5830; WAN024C99_at; Start 279; Stop 303
tgctttagctgaagtaatttctgcc

SEQ ID NO: 109140 - DNA, 25 bp, Artificial
  probe
  misc_feature (1)..(25): SEQ ID NO: 5830; WAN024C99_at; Start 233; Stop 257
gaacaagacgtgatttacgaggtga

SEQ ID NO: 109141 - DNA, 25 bp, Artificial
  probe
  misc_feature (1)..(25): SEQ ID NO: 5830; WAN024C99_at; Start 31; Stop 55
cgtggacggaaacgtttcatagttg

SEQ ID NO: 109142 - DNA, 25 bp, Artificial
  probe
  misc_feature (1)..(25): SEQ ID NO: 5830; WAN024C99_at; Start 204; Stop 228
ggctacgcttttaccacggatgtta

SEQ ID NO: 109143 - DNA, 25 bp, Artificial
  probe
  misc_feature (1)..(25): SEQ ID NO: 2425; WAN024C9A_at; Start 156; Stop 180
gaaagttttgaactcagctgtagct

SEQ ID NO: 109144 - DNA, 25 bp, Artificial
  probe
  misc_feature (1)..(25): SEQ ID NO: 2425; WAN024C9A_at; Start 83; Stop 107
tccgtggtaaaagcgtagccgatgc

SEQ ID NO: 109145 - DNA, 25 bp, Artificial
  probe
  misc_feature (1)..(25): SEQ ID NO: 2425; WAN024C9A_at; Start 164; Stop 188
tgaactcagctgtagctaacgctga

SEQ ID NO: 109146 - DNA, 25 bp, Artificial
  probe
  misc_feature (1)..(25): SEQ ID NO: 2425; WAN024C9A_at; Start 270; Stop 294
tccacgtgcgaaaggttcagcttca

SEQ ID NO: 109147 - DNA, 25 bp, Artificial
  probe
  misc_feature (1)..(25): SEQ ID NO: 2425; WAN024C9A_at; Start 279; Stop 303
gaaaggttcagcttcaccaatcaac

SEQ ID NO: 109148 - DNA, 25 bp, Artificial
  probe
  misc_feature (1)..(25): SEQ ID NO: 2425; WAN024C9A_at; Start 239; Stop 263
caaacgaaggaccaactatgaaacg

SEQ ID NO: 109149 - DNA, 25 bp, Artificial
  probe
  misc_feature (1)..(25): SEQ ID NO: 2425; WAN024C9A_at; Start 65; Stop 89
gtcttgttcttgataacatccgtgg

SEQ ID NO: 109150 - DNA, 25 bp, Artificial
  probe
  misc_feature (1)..(25): SEQ ID NO: 2425; WAN024C9A_at; Start 135; Stop 159
caaagctgctgaaatcatcttgaaa

SEQ ID NO: 109151 - DNA, 25 bp, Artificial
  probe
  misc_feature (1)..(25): SEQ ID NO: 2425; WAN024C9A_at; Start 224; Stop 248
tatctgaagcattcgcaaacgaagg

SEQ ID NO: 109152 - DNA, 25 bp, Artificial
  probe
  misc_feature (1)..(25): SEQ ID NO: 2425; WAN024C9A_at; Start 229; Stop 253
gaagcattcgcaaacgaaggaccaa

SEQ ID NO: 109153 - DNA, 25 bp, Artificial
  probe
  misc_feature (1)..(25): SEQ ID NO: 2425; WAN024C9A_at; Start 313; Stop 337
gctcacatcactgtagctgttgcag

SEQ ID NO: 109154 - DNA, 25 bp, Artificial
  probe
  misc_feature (1)..(25): SEQ ID NO: 2425; WAN024C9A_at; Start 119; Stop 143
tgacattcactccaaacaaagctgc

SEQ ID NO: 109155 - DNA, 25 bp, Artificial
  probe
  misc_feature (1)..(25): SEQ ID NO: 2425; WAN024C9A_at; Start 265; Stop 289
ttccgtccacgtgcgaaaggttcag

SEQ ID NO: 109156 - DNA, 25 bp, Artificial
  probe
  misc_feature (1)..(25): SEQ ID NO: 2425; WAN024C9A_at; Start 149; Stop 173
tcatcttgaaagttttgaactcagc

SEQ ID NO: 109157 - DNA, 25 bp, Artificial
  probe
  misc_feature (1)..(25): SEQ ID NO: 2425; WAN024C9A_at; Start 88; Stop 112
ggtaaaagcgtagccgatgcaatcg

SEQ ID NO: 109158 - DNA, 25 bp, Artificial
  probe
  misc_feature (1)..(25): SEQ ID NO: 2425; WAN024C9A_at; Start 103; Stop 127
gatgcaatcgcaatcttgacattca

SEQ ID NO: 109159 - DNA, 25 bp, Artificial
  probe
  misc_feature (1)..(25): SEQ ID NO: 2425; WAN024C9A_at; Start 289; Stop 313
gcttcaccaatcaacaaacgtacag

SEQ ID NO: 109160 - DNA, 25 bp, Artificial
  probe
  misc_feature (1)..(25): SEQ ID NO: 2425; WAN024C9A_at; Start 4; Stop 28
gcagaaattacttcagctaaagcaa

SEQ ID NO: 109161 - DNA, 25 bp, Artificial
  probe
  misc_feature (1)..(25): SEQ ID NO: 2425; WAN024C9A_at; Start 95; Stop 119
gcgtagccgatgcaatcgcaatctt

SEQ ID NO: 109162 - DNA, 25 bp, Artificial
  probe
  misc_feature (1)..(25): SEQ ID NO: 2425; WAN024C9A_at; Start 235; Stop 259
ttcgcaaacgaaggaccaactatga

SEQ ID NO: 109163 - DNA, 25 bp, Artificial
  probe
  misc_feature (1)..(25): SEQ ID NO: 2425; WAN024C9A_at; Start 12; Stop 36
tacttcagctaaagcaatggctcgt

SEQ ID NO: 109164 - DNA, 25 bp, Artificial
  probe
  misc_feature (1)..(25): SEQ ID NO: 2425; WAN024C9A_at; Start 33; Stop 57
tcgtacagtacgtgtttcacctcgt

SEQ ID NO: 109165 - DNA, 25 bp, Artificial
  probe
  misc_feature (1)..(25): SEQ ID NO: 2425; WAN024C9A_at; Start 325; Stop 349
gtagctgttgcagaaaaataactaa

SEQ ID NO: 109166 - DNA, 25 bp, Artificial
  probe
  misc_feature (1)..(25): SEQ ID NO: 2425; WAN024C9A_at; Start 274; Stop 298
cgtgcgaaaggttcagcttcaccaa

SEQ ID NO: 109167 - DNA, 25 bp, Artificial
  probe
  misc_feature (1)..(25): SEQ ID NO: 2425; WAN024C9A_at; Start 52; Stop 76
cctcgtaaatcacgtcttgttcttg

SEQ ID NO: 109168 - DNA, 25 bp, Artificial
  probe
  misc_feature (1)..(25): SEQ ID NO: 2425; WAN024C9A_at; Start 299; Stop 323
tcaacaaacgtacagctcacatcac

SEQ ID NO: 109169 - DNA, 25 bp, Artificial
  probe
  misc_feature (1)..(25): SEQ ID NO: 2425; WAN024C9A_at; Start 318; Stop 342
catcactgtagctgttgcagaaaaa

SEQ ID NO: 109170 - DNA, 25 bp, Artificial
  probe
  misc_feature (1)..(25): SEQ ID NO: 2425; WAN024C9A_at; Start 78; Stop 102
taacatccgtggtaaaagcgtagcc

SEQ ID NO: 109171 - DNA, 25 bp, Artificial
  probe
  misc_feature (1)..(25): SEQ ID NO: 2425; WAN024C9A_at; Start 176; Stop 200
tagctaacgctgaaaacaactttgg

SEQ ID NO: 109172 - DNA, 25 bp, Artificial
  probe
  misc_feature (1)..(25): SEQ ID NO: 2425; WAN024C9A_at; Start 218; Stop 242
tggtagtatctgaagcattcgcaaa

SEQ ID NO: 109173 - DNA, 25 bp, Artificial
  probe
  misc_feature (1)..(25): SEQ ID NO: 2425; WAN024C9A_at; Start 46; Stop 70
gtttcacctcgtaaatcacgtcttg

SEQ ID NO: 109174 - DNA, 25 bp, Artificial
  probe
  misc_feature (1)..(25): SEQ ID NO: 2425; WAN024C9A_at; Start 255; Stop 279
tatgaaacgtttccgtccacgtgcg

SEQ ID NO: 109175 - DNA, 25 bp, Artificial
  probe
  misc_feature (1)..(25): SEQ ID NO: 2425; WAN024C9A_at; Start 21; Stop 45
taaagcaatggctcgtacagtacgt

SEQ ID NO: 109176 - DNA, 25 bp, Artificial
  probe
  misc_feature (1)..(25): SEQ ID NO: 2425; WAN024C9A_at; Start 125; Stop 149
tcactccaaacaaagctgctgaaat

SEQ ID NO: 109177 - DNA, 25 bp, Artificial
  probe
  misc_feature (1)..(25): SEQ ID NO: 2547; WAN024C9B_at; Start 169; Stop 193
cacgtacctgtttacatccaagaag

SEQ ID NO: 109178 - DNA, 25 bp, Artificial
  probe
  misc_feature (1)..(25): SEQ ID NO: 2547; WAN024C9B_at; Start 143; Stop 167
ctattgcagtttatgacggacgtaa

SEQ ID NO: 109179 - DNA, 25 bp, Artificial
  probe
  misc_feature (1)..(25): SEQ ID NO: 2547; WAN024C9B_at; Start 181; Stop 205
tacatccaagaagacatggtaggcc

SEQ ID NO: 109180 - DNA, 25 bp, Artificial
  probe
  misc_feature (1)..(25): SEQ ID NO: 2547; WAN024C9B_at; Start 44; Stop 68
tgatgaaaaaagttgaagctcaagc

SEQ ID NO: 109181 - DNA, 25 bp, Artificial
  probe
  misc_feature (1)..(25): SEQ ID NO: 2547; WAN024C9B_at; Start 200; Stop 224
taggccacaaacttggtgaatttgc

SEQ ID NO: 109182 - DNA, 25 bp, Artificial
  probe
  misc_feature (1)..(25): SEQ ID NO: 2547; WAN024C9B_at; Start 254; Stop 278
cagacgacaagaaaacacgtagaaa

SEQ ID NO: 109183 - DNA, 25 bp, Artificial
  probe
  misc_feature (1)..(25): SEQ ID NO: 2547; WAN024C9B_at; Start 241; Stop 265
aaaggtcacgctgcagacgacaaga

SEQ ID NO: 109184 - DNA, 25 bp, Artificial
  probe
  misc_feature (1)..(25): SEQ ID NO: 2547; WAN024C9B_at; Start 195; Stop 219
catggtaggccacaaacttggtgaa

SEQ ID NO: 109185 - DNA, 25 bp, Artificial
  probe
  misc_feature (1)..(25): SEQ ID NO: 2547; WAN024C9B_at; Start 147; Stop 171
tgcagtttatgacggacgtaaacac

SEQ ID NO: 109186 - DNA, 25 bp, Artificial
  probe
  misc_feature (1)..(25): SEQ ID NO: 2547; WAN024C9B_at; Start 117; Stop 141
gatcttcccaagtttcattggttac

SEQ ID NO: 109187 - DNA, 25 bp, Artificial
  probe
  misc_feature (1)..(25): SEQ ID NO: 2547; WAN024C9B_at; Start 190; Stop 214
gaagacatggtaggccacaaacttg

SEQ ID NO: 109188 - DNA, 25 bp, Artificial
  probe
  misc_feature (1)..(25): SEQ ID NO: 2547; WAN024C9B_at; Start 113; Stop 137
caacgatcttcccaagtttcattgg

SEQ ID NO: 109189 - DNA, 25 bp, Artificial
  probe
  misc_feature (1)..(25): SEQ ID NO: 2547; WAN024C9B_at; Start 246; Stop 270
tcacgctgcagacgacaagaaaaca

SEQ ID NO: 109190 - DNA, 25 bp, Artificial
  probe
  misc_feature (1)..(25): SEQ ID NO: 2547; WAN024C9B_at; Start 183; Stop 207
catccaagaagacatggtaggccac

SEQ ID NO: 109191 - DNA, 25 bp, Artificial
  probe
  misc_feature (1)..(25): SEQ ID NO: 2547; WAN024C9B_at; Start 30; Stop 54
cgtcgatgagcatttgatgaaaaaa

SEQ ID NO: 109192 - DNA, 25 bp, Artificial
  probe
  misc_feature (1)..(25): SEQ ID NO: 2547; WAN024C9B_at; Start 186; Stop 210
ccaagaagacatggtaggccacaaa

SEQ ID NO: 109193 - DNA, 25 bp, Artificial
  probe
  misc_feature (1)..(25): SEQ ID NO: 2547; WAN024C9B_at; Start 193; Stop 217
gacatggtaggccacaaacttggtg

SEQ ID NO: 109194 - DNA, 25 bp, Artificial
  probe
  misc_feature (1)..(25): SEQ ID NO: 2547; WAN024C9B_at; Start 204; Stop 228
ccacaaacttggtgaatttgcacca

SEQ ID NO: 109195 - DNA, 25 bp, Artificial
  probe
  misc_feature (1)..(25): SEQ ID NO: 2547; WAN024C9B_at; Start 47; Stop 71
tgaaaaaagttgaagctcaagctaa

SEQ ID NO: 109196 - DNA, 25 bp, Artificial
  probe
  misc_feature (1)..(25): SEQ ID NO: 2547; WAN024C9B_at; Start 17; Stop 41
aaaaaggacctttcgtcgatgagca

SEQ ID NO: 109197 - DNA, 25 bp, Artificial
  probe
  misc_feature (1)..(25): SEQ ID NO: 2547; WAN024C9B_at; Start 22; Stop 46
ggacctttcgtcgatgagcatttga

SEQ ID NO: 109198 - DNA, 25 bp, Artificial
  probe
  misc_feature (1)..(25): SEQ ID NO: 2547; WAN024C9B_at; Start 128; Stop 152
gtttcattggttacactattgcagt

SEQ ID NO: 109199 - DNA, 25 bp, Artificial
  probe
  misc_feature (1)..(25): SEQ ID NO: 2547; WAN024C9B_at; Start 222; Stop 246
tgcaccaactcgtacttacaaaggt

SEQ ID NO: 109200 - DNA, 25 bp, Artificial
  probe
  misc_feature (1)..(25): SEQ ID NO: 2547; WAN024C9B_at; Start 40; Stop 64
catttgatgaaaaaagttgaagctc

SEQ ID NO: 109201 - DNA, 25 bp, Artificial
  probe
  misc_feature (1)..(25): SEQ ID NO: 2547; WAN024C9B_at; Start 25; Stop 49
cctttcgtcgatgagcatttgatga

SEQ ID NO: 109202 - DNA, 25 bp, Artificial
  probe
  misc_feature (1)..(25): SEQ ID NO: 2547; WAN024C9B_at; Start 227; Stop 251
caactcgtacttacaaaggtcacgc

SEQ ID NO: 109203 - DNA, 25 bp, Artificial
  probe
  misc_feature (1)..(25): SEQ ID NO: 2547; WAN024C9B_at; Start 217; Stop 241
gaatttgcaccaactcgtacttaca

SEQ ID NO: 109204 - DNA, 25 bp, Artificial
  probe
  misc_feature (1)..(25): SEQ ID NO: 2547; WAN024C9B_at; Start 175; Stop 199
cctgtttacatccaagaagacatgg

SEQ ID NO: 109205 - DNA, 25 bp, Artificial
  probe
  misc_feature (1)..(25): SEQ ID NO: 2547; WAN024C9B_at; Start 154; Stop 178
tatgacggacgtaaacacgtacctg

SEQ ID NO: 109206 - DNA, 25 bp, Artificial
  probe
  misc_feature (1)..(25): SEQ ID NO: 2547; WAN024C9B_at; Start 140; Stop 164
acactattgcagtttatgacggacg

SEQ ID NO: 109207 - DNA, 25 bp, Artificial
  probe
  misc_feature (1)..(25): SEQ ID NO: 2547; WAN024C9B_at; Start 232; Stop 256
cgtacttacaaaggtcacgctgcag

SEQ ID NO: 109208 - DNA, 25 bp, Artificial
  probe
  misc_feature (1)..(25): SEQ ID NO: 2547; WAN024C9B_at; Start 237; Stop 261
ttacaaaggtcacgctgcagacgac

SEQ ID NO: 109209 - DNA, 25 bp, Artificial
  probe
  misc_feature (1)..(25): SEQ ID NO: 2547; WAN024C9B_at; Start 250; Stop 274
gctgcagacgacaagaaaacacgta

SEQ ID NO: 109210 - DNA, 25 bp, Artificial
  probe
  misc_feature (1)..(25): SEQ ID NO: 2547; WAN024C9B_at; Start 213; Stop 237
tggtgaatttgcaccaactcgtact

SEQ ID NO: 109211 - DNA, 25 bp, Artificial
  probe
  misc_feature (1)..(25): SEQ ID NO: 1725; WAN024C9C_at; Start 64; Stop 88
gtcatgcagaaaatggtacaagcat

SEQ ID NO: 109212 - DNA, 25 bp, Artificial
  probe
  misc_feature (1)..(25): SEQ ID NO: 1725; WAN024C9C_at; Start 48; Stop 72
gattaattatgaccgtgtcatgcag

SEQ ID NO: 109213 - DNA, 25 bp, Artificial
  probe
  misc_feature (1)..(25): SEQ ID NO: 1725; WAN024C9C_at; Start 52; Stop 76
aattatgaccgtgtcatgcagaaaa

SEQ ID NO: 109214 - DNA, 25 bp, Artificial
  probe
  misc_feature (1)..(25): SEQ ID NO: 1725; WAN024C9C_at; Start 7; Stop 31
gatgtagaagaaattctgtgcaaga

SEQ ID NO: 109215 - DNA, 25 bp, Artificial
  probe
  misc_feature (1)..(25): SEQ ID NO: 1725; WAN024C9C_at; Start 42; Stop 66
tcagaagattaattatgaccgtgtc

SEQ ID NO: 109216 - DNA, 25 bp, Artificial
  probe
  misc_feature (1)..(25): SEQ ID NO: 1725; WAN024C9C_at; Start 5; Stop 29
tcgatgtagaagaaattctgtgcaa

SEQ ID NO: 109217 - DNA, 25 bp, Artificial
  probe
  misc_feature (1)..(25): SEQ ID NO: 1725; WAN024C9C_at; Start 3; Stop 27
gatcgatgtagaagaaattctgtgc

SEQ ID NO: 109218 - DNA, 25 bp, Artificial
  probe
  misc_feature (1)..(25): SEQ ID NO: 1725; WAN024C9C_at; Start 58; Stop 82
gaccgtgtcatgcagaaaatggtac

SEQ ID NO: 109219 - DNA, 25 bp, Artificial
  probe
  misc_feature (1)..(25): SEQ ID NO: 1725; WAN024C9C_at; Start 36; Stop 60
ccccaatcagaagattaattatgac

SEQ ID NO: 109220 - DNA, 25 bp, Artificial
  probe
  misc_feature (1)..(25): SEQ ID NO: 1725; WAN024C9C_at; Start 60; Stop 84
ccgtgtcatgcagaaaatggtacaa

SEQ ID NO: 109221 - DNA, 25 bp, Artificial
  probe
  misc_feature (1)..(25): SEQ ID NO: 1725; WAN024C9C_at; Start 45; Stop 69
gaagattaattatgaccgtgtcatg

SEQ ID NO: 109222 - DNA, 25 bp, Artificial
  probe
  misc_feature (1)..(25): SEQ ID NO: 1725; WAN024C9C_at; Start 14; Stop 38
aagaaattctgtgcaagatgacccc

SEQ ID NO: 109223 - DNA, 25 bp, Artificial
  probe
  misc_feature (1)..(25): SEQ ID NO: 1725; WAN024C9C_at; Start 39; Stop 63
caatcagaagattaattatgaccgt

SEQ ID NO: 109224 - DNA, 25 bp, Artificial
  probe
  misc_feature (1)..(25): SEQ ID NO: 1725; WAN024C9C_at; Start 21; Stop 45
tctgtgcaagatgacccccaatcag

SEQ ID NO: 109225 - DNA, 25 bp, Artificial
  probe
  misc_feature (1)..(25): SEQ ID NO: 1725; WAN024C9C_at; Start 2; Stop 26
tgatcgatgtagaagaaattctgtg

SEQ ID NO: 109226 - DNA, 25 bp, Artificial
  probe
  misc_feature (1)..(25): SEQ ID NO: 1725; WAN024C9C_at; Start 57; Stop 81
tgaccgtgtcatgcagaaaatggta

SEQ ID NO: 109227 - DNA, 25 bp, Artificial
  probe
  misc_feature (1)..(25): SEQ ID NO: 1725; WAN024C9C_at; Start 51; Stop 75
taattatgaccgtgtcatgcagaaa

SEQ ID NO: 109228 - DNA, 25 bp, Artificial
  probe
  misc_feature (1)..(25): SEQ ID NO: 1725; WAN024C9C_at; Start 69; Stop 93
gcagaaaatggtacaagcatgggaa

SEQ ID NO: 109229 - DNA, 25 bp, Artificial
  probe
  misc_feature (1)..(25): SEQ ID NO: 1725; WAN024C9C_at; Start 43; Stop 67
cagaagattaattatgaccgtgtca

SEQ ID NO: 109230 - DNA, 25 bp, Artificial
  probe
  misc_feature (1)..(25): SEQ ID NO: 1725; WAN024C9C_at; Start 55; Stop 79
tatgaccgtgtcatgcagaaaatgg

SEQ ID NO: 109231 - DNA, 25 bp, Artificial
  probe
  misc_feature (1)..(25): SEQ ID NO: 1725; WAN024C9C_at; Start 68; Stop 92
tgcagaaaatggtacaagcatggga

SEQ ID NO: 109232 - DNA, 25 bp, Artificial
  probe
  misc_feature (1)..(25): SEQ ID NO: 1725; WAN024C9C_at; Start 61; Stop 85
cgtgtcatgcagaaaatggtacaag

SEQ ID NO: 109233 - DNA, 25 bp, Artificial
  probe
  misc_feature (1)..(25): SEQ ID NO: 1725; WAN024C9C_at; Start 13; Stop 37
gaagaaattctgtgcaagatgaccc

SEQ ID NO: 109234 - DNA, 25 bp, Artificial
  probe
  misc_feature (1)..(25): SEQ ID NO: 1725; WAN024C9C_at; Start 59; Stop 83
accgtgtcatgcagaaaatggtaca

SEQ ID NO: 109235 - DNA, 25 bp, Artificial
  probe
  misc_feature (1)..(25): SEQ ID NO: 1725; WAN024C9C_at; Start 70; Stop 94
cagaaaatggtacaagcatgggaaa

SEQ ID NO: 109236 - DNA, 25 bp, Artificial
  probe
  misc_feature (1)..(25): SEQ ID NO: 1725; WAN024C9C_at; Start 27; Stop 51
caagatgacccccaatcagaagatt

SEQ ID NO: 109237 - DNA, 25 bp, Artificial
  probe
  misc_feature (1)..(25): SEQ ID NO: 1725; WAN024C9C_at; Start 66; Stop 90
catgcagaaaatggtacaagcatgg

SEQ ID NO: 109238 - DNA, 25 bp, Artificial
  probe
  misc_feature (1)..(25): SEQ ID NO: 1725; WAN024C9C_at; Start 72; Stop 96
gaaaatggtacaagcatgggaaaaa

SEQ ID NO: 109239 - DNA, 25 bp, Artificial
  probe
  misc_feature (1)..(25): SEQ ID NO: 1725; WAN024C9C_at; Start 63; Stop 87
tgtcatgcagaaaatggtacaagca

SEQ ID NO: 109240 - DNA, 25 bp, Artificial
  probe
  misc_feature (1)..(25): SEQ ID NO: 1725; WAN024C9C_at; Start 77; Stop 101
tggtacaagcatgggaaaaaaatga

SEQ ID NO: 109241 - DNA, 25 bp, Artificial
  probe
  misc_feature (1)..(25): SEQ ID NO: 1725; WAN024C9C_at; Start 38; Stop 62
ccaatcagaagattaattatgaccg

SEQ ID NO: 109242 - DNA, 25 bp, Artificial
  probe
  misc_feature (1)..(25): SEQ ID NO: 1725; WAN024C9C_at; Start 16; Stop 40
gaaattctgtgcaagatgaccccca

SEQ ID NO: 109243 - DNA, 25 bp, Artificial
  probe
  misc_feature (1)..(25): SEQ ID NO: 1725; WAN024C9C_at; Start 23; Stop 47
tgtgcaagatgacccccaatcagaa

SEQ ID NO: 109244 - DNA, 25 bp, Artificial
  probe
  misc_feature (1)..(25): SEQ ID NO: 1725; WAN024C9C_at; Start 11; Stop 35
tagaagaaattctgtgcaagatgac

SEQ ID NO: 109245 - DNA, 25 bp, Artificial
  probe
  misc_feature (1)..(25): SEQ ID NO: 4066; WAN024C9D_at; Start 159; Stop 183
gcggacaggaaatacggttcagtac

SEQ ID NO: 109246 - DNA, 25 bp, Artificial
  probe
  misc_feature (1)..(25): SEQ ID NO: 4066; WAN024C9D_at; Start 156; Stop 180
tgagcggacaggaaatacggttcag

SEQ ID NO: 109247 - DNA, 25 bp, Artificial
  probe
  misc_feature (1)..(25): SEQ ID NO: 4066; WAN024C9D_at; Start 114; Stop 138
taagcgggtctatgtcaccaagaaa

SEQ ID NO: 109248 - DNA, 25 bp, Artificial
  probe
  misc_feature (1)..(25): SEQ ID NO: 4066; WAN024C9D_at; Start 119; Stop 143
gggtctatgtcaccaagaaatttgt

SEQ ID NO: 109249 - DNA, 25 bp, Artificial
  probe
  misc_feature (1)..(25): SEQ ID NO: 4066; WAN024C9D_at; Start 82; Stop 106
aattctaatatccatcccaaggcag

SEQ ID NO: 109250 - DNA, 25 bp, Artificial
  probe
  misc_feature (1)..(25): SEQ ID NO: 4066; WAN024C9D_at; Start 124; Stop 148
tatgtcaccaagaaatttgttagtg

SEQ ID NO: 109251 - DNA, 25 bp, Artificial
  probe
  misc_feature (1)..(25): SEQ ID NO: 4066; WAN024C9D_at; Start 109; Stop 133
taccataagcgggtctatgtcacca

SEQ ID NO: 109252 - DNA, 25 bp, Artificial
  probe
  misc_feature (1)..(25): SEQ ID NO: 4066; WAN024C9D_at; Start 64; Stop 88
gtgaccatctattttgccaattcta

SEQ ID NO: 109253 - DNA, 25 bp, Artificial
  probe
  misc_feature (1)..(25): SEQ ID NO: 4066; WAN024C9D_at; Start 45; Stop 69
tttgaccaagtatgcagatgtgacc

SEQ ID NO: 109254 - DNA, 25 bp, Artificial
  probe
  misc_feature (1)..(25): SEQ ID NO: 4066; WAN024C9D_at; Start 170; Stop 194
atacggttcagtacctagaagctcc

SEQ ID NO: 109255 - DNA, 25 bp, Artificial
  probe
  misc_feature (1)..(25): SEQ ID NO: 4066; WAN024C9D_at; Start 90; Stop 114
tatccatcccaaggcagaataccat

SEQ ID NO: 109256 - DNA, 25 bp, Artificial
  probe
  misc_feature (1)..(25): SEQ ID NO: 4066; WAN024C9D_at; Start 85; Stop 109
tctaatatccatcccaaggcagaat

SEQ ID NO: 109257 - DNA, 25 bp, Artificial
  probe
  misc_feature (1)..(25): SEQ ID NO: 4066; WAN024C9D_at; Start 129; Stop 153
caccaagaaatttgttagtgatttt

SEQ ID NO: 109258 - DNA, 25 bp, Artificial
  probe
  misc_feature (1)..(25): SEQ ID NO: 4066; WAN024C9D_at; Start 112; Stop 136
cataagcgggtctatgtcaccaaga

SEQ ID NO: 109259 - DNA, 25 bp, Artificial
  probe
  misc_feature (1)..(25): SEQ ID NO: 4066; WAN024C9D_at; Start 79; Stop 103
gccaattctaatatccatcccaagg

SEQ ID NO: 109260 - DNA, 25 bp, Artificial
  probe
  misc_feature (1)..(25): SEQ ID NO: 4066; WAN024C9D_at; Start 102; Stop 126
ggcagaataccataagcgggtctat

SEQ ID NO: 109261 - DNA, 25 bp, Artificial
  probe
  misc_feature (1)..(25): SEQ ID NO: 4066; WAN024C9D_at; Start 167; Stop 191
gaaatacggttcagtacctagaagc

SEQ ID NO: 109262 - DNA, 25 bp, Artificial
  probe
  misc_feature (1)..(25): SEQ ID NO: 4066; WAN024C9D_at; Start 51; Stop 75
caagtatgcagatgtgaccatctat

SEQ ID NO: 109263 - DNA, 25 bp, Artificial
  probe
  misc_feature (1)..(25): SEQ ID NO: 4066; WAN024C9D_at; Start 8; Stop 32
tttgctgtgccccttgtagtaccta

SEQ ID NO: 109264 - DNA, 25 bp, Artificial
  probe
  misc_feature (1)..(25): SEQ ID NO: 4066; WAN024C9D_at; Start 144; Stop 168
tagtgattttaatgagcggacagga

SEQ ID NO: 109265 - DNA, 25 bp, Artificial
  probe
  misc_feature (1)..(25): SEQ ID NO: 4066; WAN024C9D_at; Start 154; Stop 178
aatgagcggacaggaaatacggttc

SEQ ID NO: 109266 - DNA, 25 bp, Artificial
  probe
  misc_feature (1)..(25): SEQ ID NO: 4066; WAN024C9D_at; Start 151; Stop 175
tttaatgagcggacaggaaatacgg

SEQ ID NO: 109267 - DNA, 25 bp, Artificial
  probe
  misc_feature (1)..(25): SEQ ID NO: 4066; WAN024C9D_at; Start 99; Stop 123
caaggcagaataccataagcgggtc

SEQ ID NO: 109268 - DNA, 25 bp, Artificial
  probe
  misc_feature (1)..(25): SEQ ID NO: 4066; WAN024C9D_at; Start 61; Stop 85
gatgtgaccatctattttgccaatt

SEQ ID NO: 109269 - DNA, 25 bp, Artificial
  probe
  misc_feature (1)..(25): SEQ ID NO: 4066; WAN024C9D_at; Start 164; Stop 188
caggaaatacggttcagtacctaga

SEQ ID NO: 109270 - DNA, 25 bp, Artificial
  probe
  misc_feature (1)..(25): SEQ ID NO: 4066; WAN024C9D_at; Start 96; Stop 120
tcccaaggcagaataccataagcgg

SEQ ID NO: 109271 - DNA, 25 bp, Artificial
  probe
  misc_feature (1)..(25): SEQ ID NO: 4066; WAN024C9D_at; Start 27; Stop 51
tacctatacactagaatatttgacc

SEQ ID NO: 109272 - DNA, 25 bp, Artificial
  probe
  misc_feature (1)..(25): SEQ ID NO: 4066; WAN024C9D_at; Start 35; Stop 59
cactagaatatttgaccaagtatgc

SEQ ID NO: 109273 - DNA, 25 bp, Artificial
  probe
  misc_feature (1)..(25): SEQ ID NO: 4066; WAN024C9D_at; Start 16; Stop 40
gccccttgtagtacctatacactag

SEQ ID NO: 109274 - DNA, 25 bp, Artificial
  probe
  misc_feature (1)..(25): SEQ ID NO: 4066; WAN024C9D_at; Start 40; Stop 64
gaatatttgaccaagtatgcagatg

SEQ ID NO: 109275 - DNA, 25 bp, Artificial
  probe
  misc_feature (1)..(25): SEQ ID NO: 4066; WAN024C9D_at; Start 10; Stop 34
tgctgtgccccttgtagtacctata

SEQ ID NO: 109276 - DNA, 25 bp, Artificial
  probe
  misc_feature (1)..(25): SEQ ID NO: 4066; WAN024C9D_at; Start 48; Stop 72
gaccaagtatgcagatgtgaccatc

SEQ ID NO: 109277 - DNA, 25 bp, Artificial
  probe
  misc_feature (1)..(25): SEQ ID NO: 4066; WAN024C9D_at; Start 104; Stop 128
cagaataccataagcgggtctatgt

SEQ ID NO: 109278 - DNA, 25 bp, Artificial
  probe
  misc_feature (1)..(25): SEQ ID NO: 4066; WAN024C9D_at; Start 2; Stop 26
tgcatgtttgctgtgccccttgtag

SEQ ID NO: 109279 - DNA, 25 bp, Artificial
  probe
  misc_feature (1)..(25): SEQ ID NO: 3414; WAN024C9E_at; Start 162; Stop 186
tcaaggctacaaacgttcagtagag

SEQ ID NO: 109280 - DNA, 25 bp, Artificial
  probe
  misc_feature (1)..(25): SEQ ID NO: 3414; WAN024C9E_at; Start 169; Stop 193
tacaaacgttcagtagagatgtgtg

SEQ ID NO: 109281 - DNA, 25 bp, Artificial
  probe
  misc_feature (1)..(25): SEQ ID NO: 3414; WAN024C9E_at; Start 220; Stop 244
tattgtggctgcgtctatgcagccc

SEQ ID NO: 109282 - DNA, 25 bp, Artificial
  probe
  misc_feature (1)..(25): SEQ ID NO: 3414; WAN024C9E_at; Start 109; Stop 133
gatgtgcaaaaaatttacacgcccc

SEQ ID NO: 109283 - DNA, 25 bp, Artificial
  probe
  misc_feature (1)..(25): SEQ ID NO: 3414; WAN024C9E_at; Start 8; Stop 32
aaacagcgcaagtggctatggactt

SEQ ID NO: 109284 - DNA, 25 bp, Artificial
  probe
  misc_feature (1)..(25): SEQ ID NO: 3414; WAN024C9E_at; Start 85; Stop 109
caaactatcaatagcatcggaatcg

SEQ ID NO: 109285 - DNA, 25 bp, Artificial
  probe
  misc_feature (1)..(25): SEQ ID NO: 3414; WAN024C9E_at; Start 102; Stop 126
cggaatcgatgtgcaaaaaatttac

SEQ ID NO: 109286 - DNA, 25 bp, Artificial
  probe
  misc_feature (1)..(25): SEQ ID NO: 3414; WAN024C9E_at; Start 113; Stop 137
tgcaaaaaatttacacgccccacta

SEQ ID NO: 109287 - DNA, 25 bp, Artificial
  probe
  misc_feature (1)..(25): SEQ ID NO: 3414; WAN024C9E_at; Start 190; Stop 214
tgtgaggagtatgatatctatcgtc

SEQ ID NO: 109288 - DNA, 25 bp, Artificial
  probe
  misc_feature (1)..(25): SEQ ID NO: 3414; WAN024C9E_at; Start 140; Stop 164
ttcccaacgatttcaagaaaaatca

SEQ ID NO: 109289 - DNA, 25 bp, Artificial
  probe
  misc_feature (1)..(25): SEQ ID NO: 3414; WAN024C9E_at; Start 40; Stop 64
gactactttggttcagccttgacca

SEQ ID NO: 109290 - DNA, 25 bp, Artificial
  probe
  misc_feature (1)..(25): SEQ ID NO: 3414; WAN024C9E_at; Start 173; Stop 197
aacgttcagtagagatgtgtgagga

SEQ ID NO: 109291 - DNA, 25 bp, Artificial
  probe
  misc_feature (1)..(25): SEQ ID NO: 3414; WAN024C9E_at; Start 21; Stop 45
ggctatggacttgggctttgactac

SEQ ID NO: 109292 - DNA, 25 bp, Artificial
  probe
  misc_feature (1)..(25): SEQ ID NO: 3414; WAN024C9E_at; Start 177; Stop 201
ttcagtagagatgtgtgaggagtat

SEQ ID NO: 109293 - DNA, 25 bp, Artificial
  probe
  misc_feature (1)..(25): SEQ ID NO: 3414; WAN024C9E_at; Start 26; Stop 50
tggacttgggctttgactactttgg

SEQ ID NO: 109294 - DNA, 25 bp, Artificial
  probe
  misc_feature (1)..(25): SEQ ID NO: 3414; WAN024C9E_at; Start 93; Stop 117
caatagcatcggaatcgatgtgcaa

SEQ ID NO: 109295 - DNA, 25 bp, Artificial
  probe
  misc_feature (1)..(25): SEQ ID NO: 3414; WAN024C9E_at; Start 65; Stop 89
tcagtcctcataagaattctcaaac

SEQ ID NO: 109296 - DNA, 25 bp, Artificial
  probe
  misc_feature (1)..(25): SEQ ID NO: 3414; WAN024C9E_at; Start 60; Stop 84
gaccatcagtcctcataagaattct

SEQ ID NO: 109297 - DNA, 25 bp, Artificial
  probe
  misc_feature (1)..(25): SEQ ID NO: 3414; WAN024C9E_at; Start 195; Stop 219
ggagtatgatatctatcgtcaatgt

SEQ ID NO: 109298 - DNA, 25 bp, Artificial
  probe
  misc_feature (1)..(25): SEQ ID NO: 3414; WAN024C9E_at; Start 14; Stop 38
cgcaagtggctatggacttgggctt

SEQ ID NO: 109299 - DNA, 25 bp, Artificial
  probe
  misc_feature (1)..(25): SEQ ID NO: 3414; WAN024C9E_at; Start 75; Stop 99
taagaattctcaaactatcaatagc

SEQ ID NO: 109300 - DNA, 25 bp, Artificial
  probe
  misc_feature (1)..(25): SEQ ID NO: 3414; WAN024C9E_at; Start 55; Stop 79
gccttgaccatcagtcctcataaga

SEQ ID NO: 109301 - DNA, 25 bp, Artificial
  probe
  misc_feature (1)..(25): SEQ ID NO: 3414; WAN024C9E_at; Start 240; Stop 264
agcccaagcccagaatattgacctg

SEQ ID NO: 109302 - DNA, 25 bp, Artificial
  probe
  misc_feature (1)..(25): SEQ ID NO: 3414; WAN024C9E_at; Start 243; Stop 267
ccaagcccagaatattgacctggtt

SEQ ID NO: 109303 - DNA, 25 bp, Artificial
  probe
  misc_feature (1)..(25): SEQ ID NO: 3414; WAN024C9E_at; Start 6; Stop 30
taaaacagcgcaagtggctatggac

SEQ ID NO: 109304 - DNA, 25 bp, Artificial
  probe
  misc_feature (1)..(25): SEQ ID NO: 3414; WAN024C9E_at; Start 32; Stop 56
tgggctttgactactttggttcagc

SEQ ID NO: 109305 - DNA, 25 bp, Artificial
  probe
  misc_feature (1)..(25): SEQ ID NO: 3414; WAN024C9E_at; Start 213; Stop 237
tcaatgttattgtggctgcgtctat

SEQ ID NO: 109306 - DNA, 25 bp, Artificial
  probe
  misc_feature (1)..(25): SEQ ID NO: 3414; WAN024C9E_at; Start 235; Stop 259
tatgcagcccaagcccagaatattg

SEQ ID NO: 109307 - DNA, 25 bp, Artificial
  probe
  misc_feature (1)..(25): SEQ ID NO: 3414; WAN024C9E_at; Start 49; Stop 73
ggttcagccttgaccatcagtcctc

SEQ ID NO: 109308 - DNA, 25 bp, Artificial
  probe
  misc_feature (1)..(25): SEQ ID NO: 3414; WAN024C9E_at; Start 158; Stop 182
aaaatcaaggctacaaacgttcagt

SEQ ID NO: 109309 - DNA, 25 bp, Artificial
  probe
  misc_feature (1)..(25): SEQ ID NO: 3414; WAN024C9E_at; Start 208; Stop 232
tatcgtcaatgttattgtggctgcg

SEQ ID NO: 109310 - DNA, 25 bp, Artificial
  probe
  misc_feature (1)..(25): SEQ ID NO: 3414; WAN024C9E_at; Start 223; Stop 247
tgtggctgcgtctatgcagcccaag

SEQ ID NO: 109311 - DNA, 25 bp, Artificial
  probe
  misc_feature (1)..(25): SEQ ID NO: 3414; WAN024C9E_at; Start 1; Stop 25
ctggataaaacagcgcaagtggcta

SEQ ID NO: 109312 - DNA, 25 bp, Artificial
  probe
  misc_feature (1)..(25): SEQ ID NO: 3414; WAN024C9E_at; Start 238; Stop 262
gcagcccaagcccagaatattgacc

SEQ ID NO: 109313 - DNA, 25 bp, Artificial
  probe
  misc_feature (1)..(25): SEQ ID NO: 1842; WAN024C9F_at; Start 747; Stop 771
tatgtttatcgctcgaaaagaaagt

SEQ ID NO: 109314 - DNA, 25 bp, Artificial
  probe
  misc_feature (1)..(25): SEQ ID NO: 1842; WAN024C9F_at; Start 420; Stop 444
cggaggcattttttactgtgctaca

SEQ ID NO: 109315 - DNA, 25 bp, Artificial
  probe
  misc_feature (1)..(25): SEQ ID NO: 1842; WAN024C9F_at; Start 739; Stop 763
gaatatggtatgtttatcgctcgaa

SEQ ID NO: 109316 - DNA, 25 bp, Artificial
  probe
  misc_feature (1)..(25): SEQ ID NO: 1842; WAN024C9F_at; Start 584; Stop 608
tctatgatgatgagttacaggtaac

SEQ ID NO: 109317 - DNA, 25 bp, Artificial
  probe
  misc_feature (1)..(25): SEQ ID NO: 1842; WAN024C9F_at; Start 240; Stop 264
tatggtaaaatcaacgaagtcagtg

SEQ ID NO: 109318 - DNA, 25 bp, Artificial
  probe
  misc_feature (1)..(25): SEQ ID NO: 1842; WAN024C9F_at; Start 126; Stop 150
cactgatgaagtaaaggttctagaa

SEQ ID NO: 109319 - DNA, 25 bp, Artificial
  probe
  misc_feature (1)..(25): SEQ ID NO: 1842; WAN024C9F_at; Start 220; Stop 244
gttacagatttttctaaagatatgg

SEQ ID NO: 109320 - DNA, 25 bp, Artificial
  probe
  misc_feature (1)..(25): SEQ ID NO: 1842; WAN024C9F_at; Start 598; Stop 622
ttacaggtaactagtatagatgacc

SEQ ID NO: 109321 - DNA, 25 bp, Artificial
  probe
  misc_feature (1)..(25): SEQ ID NO: 1842; WAN024C9F_at; Start 498; Stop 522
taatcaagatttagaaaatagaacg

SEQ ID NO: 109322 - DNA, 25 bp, Artificial
  probe
  misc_feature (1)..(25): SEQ ID NO: 1842; WAN024C9F_at; Start 668; Stop 692
cactagaagaggaaataatacgtaa

SEQ ID NO: 109323 - DNA, 25 bp, Artificial
  probe
  misc_feature (1)..(25): SEQ ID NO: 1842; WAN024C9F_at; Start 618; Stop 642
tgacctagttaaatacatccaatcg

SEQ ID NO: 109324 - DNA, 25 bp, Artificial
  probe
  misc_feature (1)..(25): SEQ ID NO: 1842; WAN024C9F_at; Start 655; Stop 679
tcagaaataggttcactagaagagg

SEQ ID NO: 109325 - DNA, 25 bp, Artificial
  probe
  misc_feature (1)..(25): SEQ ID NO: 1842; WAN024C9F_at; Start 144; Stop 168
tctagaattgggatgtggtacagga

SEQ ID NO: 109326 - DNA, 25 bp, Artificial
  probe
  misc_feature (1)..(25): SEQ ID NO: 1842; WAN024C9F_at; Start 565; Stop 589
aactctgtcgatacattactctatg

SEQ ID NO: 109327 - DNA, 25 bp, Artificial
  probe
  misc_feature (1)..(25): SEQ ID NO: 1842; WAN024C9F_at; Start 633; Stop 657
catccaatcgtttaaaggaatttca

SEQ ID NO: 109328 - DNA, 25 bp, Artificial
  probe
  misc_feature (1)..(25): SEQ ID NO: 1842; WAN024C9F_at; Start 360; Stop 384
tctacatcatgtgaatgatattcct

SEQ ID NO: 109329 - DNA, 25 bp, Artificial
  probe
  misc_feature (1)..(25): SEQ ID NO: 1842; WAN024C9F_at; Start 349; Stop 373
gctaatatgcttctacatcatgtga

SEQ ID NO: 109330 - DNA, 25 bp, Artificial
  probe
  misc_feature (1)..(25): SEQ ID NO: 1842; WAN024C9F_at; Start 710; Stop 734
ttaataatggtatgttgatcattcc

SEQ ID NO: 109331 - DNA, 25 bp, Artificial
  probe
  misc_feature (1)..(25): SEQ ID NO: 1842; WAN024C9F_at; Start 190; Stop 214
gattctatagataaaatgaagcagt

SEQ ID NO: 109332 - DNA, 25 bp, Artificial
  probe
  misc_feature (1)..(25): SEQ ID NO: 1842; WAN024C9F_at; Start 722; Stop 746
tgttgatcattcctaaagaatatgg

SEQ ID NO: 109333 - DNA, 25 bp, Artificial
  probe
  misc_feature (1)..(25): SEQ ID NO: 1842; WAN024C9F_at; Start 549; Stop 573
cctgagtaggtattttaactctgtc

SEQ ID NO: 109334 - DNA, 25 bp, Artificial
  probe
  misc_feature (1)..(25): SEQ ID NO: 1842; WAN024C9F_at; Start 203; Stop 227
aaatgaagcagttgattgttacaga

SEQ ID NO: 109335 - DNA, 25 bp, Artificial
  probe
  misc_feature (1)..(25): SEQ ID NO: 1842; WAN024C9F_at; Start 316; Stop 340
tcttttgagaatgaaacttttgata

SEQ ID NO: 109336 - DNA, 25 bp, Artificial
  probe
  misc_feature (1)..(25): SEQ ID NO: 1842; WAN024C9F_at; Start 255; Stop 279
gaagtcagtgattggaaatagaaac

SEQ ID NO: 109337 - DNA, 25 bp, Artificial
  probe
  misc_feature (1)..(25): SEQ ID NO: 1842; WAN024C9F_at; Start 273; Stop 297
tagaaacaatgtcaattatgagata

SEQ ID NO: 109338 - DNA, 25 bp, Artificial
  probe
  misc_feature (1)..(25): SEQ ID NO: 1842; WAN024C9F_at; Start 159; Stop 183
tggtacaggagaattgtggaaaagt

SEQ ID NO: 109339 - DNA, 25 bp, Artificial
  probe
  misc_feature (1)..(25): SEQ ID NO: 1842; WAN024C9F_at; Start 435; Stop 459
ctgtgctacatttggtgaaaatgga

SEQ ID NO: 109340 - DNA, 25 bp, Artificial
  probe
  misc_feature (1)..(25): SEQ ID NO: 1842; WAN024C9F_at; Start 36; Stop 60
tgataatcttgatattcgagtagaa

SEQ ID NO: 109341 - DNA, 25 bp, Artificial
  probe
  misc_feature (1)..(25): SEQ ID NO: 1842; WAN024C9F_at; Start 112; Stop 136
tctaactaccaaatcactgatgaag

SEQ ID NO: 109342 - DNA, 25 bp, Artificial
  probe
  misc_feature (1)..(25): SEQ ID NO: 1842; WAN024C9F_at; Start 391; Stop 415
ctctctgaggtgaatagggtcttaa

SEQ ID NO: 109343 - DNA, 25 bp, Artificial
  probe
  misc_feature (1)..(25): SEQ ID NO: 1842; WAN024C9F_at; Start 51; Stop 75
tcgagtagaattgcataagaagtat

SEQ ID NO: 109344 - DNA, 25 bp, Artificial
  probe
  misc_feature (1)..(25): SEQ ID NO: 1842; WAN024C9F_at; Start 473; Stop 497
tggcaagtttatttaaagatgaggt

SEQ ID NO: 109345 - DNA, 25 bp, Artificial
  probe
  misc_feature (1)..(25): SEQ ID NO: 1842; WAN024C9F_at; Start 294; Stop 318
gataatggatattcaaaagatttct

SEQ ID NO: 109346 - DNA, 25 bp, Artificial
  probe
  misc_feature (1)..(25): SEQ ID NO: 1842; WAN024C9F_at; Start 375; Stop 399
tgatattcctaaagctctctctgag

SEQ ID NO: 109347 - DNA, 25 bp, Artificial
  probe
  misc_feature (1)..(25): SEQ ID NO: 3840; WAN024C9G_at; Start 307; Stop 331
tttgagaagagtgggaaaaaactca

SEQ ID NO: 109348 - DNA, 25 bp, Artificial
  probe
  misc_feature (1)..(25): SEQ ID NO: 3840; WAN024C9G_at; Start 204; Stop 228
taaaagatcggagcgtgatgatttt

SEQ ID NO: 109349 - DNA, 25 bp, Artificial
  probe
  misc_feature (1)..(25): SEQ ID NO: 3840; WAN024C9G_at; Start 202; Stop 226
tataaaagatcggagcgtgatgatt

SEQ ID NO: 109350 - DNA, 25 bp, Artificial
  probe
  misc_feature (1)..(25): SEQ ID NO: 3840; WAN024C9G_at; Start 12; Stop 36
cggagaagcttttcgatattttaga

SEQ ID NO: 109351 - DNA, 25 bp, Artificial
  probe
  misc_feature (1)..(25): SEQ ID NO: 3840; WAN024C9G_at; Start 115; Stop 139
gaaaatgaaatttctctttcaacat

SEQ ID NO: 109352 - DNA, 25 bp, Artificial
  probe
  misc_feature (1)..(25): SEQ ID NO: 3840; WAN024C9G_at; Start 52; Stop 76
tctttagagtatgctgcagctgatt

SEQ ID NO: 109353 - DNA, 25 bp, Artificial
  probe
  misc_feature (1)..(25): SEQ ID NO: 3840; WAN024C9G_at; Start 239; Stop 263
tatctccaaatttttatagtttgaa

SEQ ID NO: 109354 - DNA, 25 bp, Artificial
  probe
  misc_feature (1)..(25): SEQ ID NO: 3840; WAN024C9G_at; Start 310; Stop 334
gagaagagtgggaaaaaactcataa

SEQ ID NO: 109355 - DNA, 25 bp, Artificial
  probe
  misc_feature (1)..(25): SEQ ID NO: 3840; WAN024C9G_at; Start 260; Stop 284
tgaatattaaaggattggaggtaat

SEQ ID NO: 109356 - DNA, 25 bp, Artificial
  probe
  misc_feature (1)..(25): SEQ ID NO: 3840; WAN024C9G_at; Start 196; Stop 220
gaatattataaaagatcggagcgtg

SEQ ID NO: 109357 - DNA, 25 bp, Artificial
  probe
  misc_feature (1)..(25): SEQ ID NO: 3840; WAN024C9G_at; Start 60; Stop 84
gtatgctgcagctgattttatatca

SEQ ID NO: 109358 - DNA, 25 bp, Artificial
  probe
  misc_feature (1)..(25): SEQ ID NO: 3840; WAN024C9G_at; Start 47; Stop 71
gatattctttagagtatgctgcagc

SEQ ID NO: 109359 - DNA, 25 bp, Artificial
  probe
  misc_feature (1)..(25): SEQ ID NO: 3840; WAN024C9G_at; Start 175; Stop 199
gagaatttttgtaatcacttagaat

SEQ ID NO: 109360 - DNA, 25 bp, Artificial
  probe
  misc_feature (1)..(25): SEQ ID NO: 3840; WAN024C9G_at; Start 77; Stop 101
ttatatcaaaatctcaactttctag

SEQ ID NO: 109361 - DNA, 25 bp, Artificial
  probe
  misc_feature (1)..(25): SEQ ID NO: 3840; WAN024C9G_at; Start 148; Stop 172
ttattatcaaatatcaatgtttcga

SEQ ID NO: 109362 - DNA, 25 bp, Artificial
  probe
  misc_feature (1)..(25): SEQ ID NO: 3840; WAN024C9G_at; Start 155; Stop 179
caaatatcaatgtttcgatagagaa

SEQ ID NO: 109363 - DNA, 25 bp, Artificial
  probe
  misc_feature (1)..(25): SEQ ID NO: 3840; WAN024C9G_at; Start 255; Stop 279
tagtttgaatattaaaggattggag

SEQ ID NO: 109364 - DNA, 25 bp, Artificial
  probe
  misc_feature (1)..(25): SEQ ID NO: 3840; WAN024C9G_at; Start 209; Stop 233
gatcggagcgtgatgattttttggt

SEQ ID NO: 109365 - DNA, 25 bp, Artificial
  probe
  misc_feature (1)..(25): SEQ ID NO: 3840; WAN024C9G_at; Start 56; Stop 80
tagagtatgctgcagctgattttat

SEQ ID NO: 109366 - DNA, 25 bp, Artificial
  probe
  misc_feature (1)..(25): SEQ ID NO: 3840; WAN024C9G_at; Start 170; Stop 194
cgatagagaatttttgtaatcactt

SEQ ID NO: 109367 - DNA, 25 bp, Artificial
  probe
  misc_feature (1)..(25): SEQ ID NO: 3840; WAN024C9G_at; Start 41; Stop 65
taaacggatattctttagagtatgc

SEQ ID NO: 109368 - DNA, 25 bp, Artificial
  probe
  misc_feature (1)..(25): SEQ ID NO: 3840; WAN024C9G_at; Start 222; Stop 246
tgattttttggttaatttatctcca

SEQ ID NO: 109369 - DNA, 25 bp, Artificial
  probe
  misc_feature (1)..(25): SEQ ID NO: 3840; WAN024C9G_at; Start 88; Stop 112
tctcaactttctagatttgaaaggg

SEQ ID NO: 109370 - DNA, 25 bp, Artificial
  probe
  misc_feature (1)..(25): SEQ ID NO: 3840; WAN024C9G_at; Start 190; Stop 214
cacttagaatattataaaagatcgg

SEQ ID NO: 109371 - DNA, 25 bp, Artificial
  probe
  misc_feature (1)..(25): SEQ ID NO: 3840; WAN024C9G_at; Start 213; Stop 237
ggagcgtgatgattttttggttaat

SEQ ID NO: 109372 - DNA, 25 bp, Artificial
  probe
  misc_feature (1)..(25): SEQ ID NO: 3840; WAN024C9G_at; Start 295; Stop 319
caacaaaaactttttgagaagagtg

SEQ ID NO: 109373 - DNA, 25 bp, Artificial
  probe
  misc_feature (1)..(25): SEQ ID NO: 3840; WAN024C9G_at; Start 199; Stop 223
tattataaaagatcggagcgtgatg

SEQ ID NO: 109374 - DNA, 25 bp, Artificial
  probe
  misc_feature (1)..(25): SEQ ID NO: 3840; WAN024C9G_at; Start 6; Stop 30
aaattacggagaagcttttcgatat

SEQ ID NO: 109375 - DNA, 25 bp, Artificial
  probe
  misc_feature (1)..(25): SEQ ID NO: 3840; WAN024C9G_at; Start 49; Stop 73
tattctttagagtatgctgcagctg

SEQ ID NO: 109376 - DNA, 25 bp, Artificial
  probe
  misc_feature (1)..(25): SEQ ID NO: 3840; WAN024C9G_at; Start 64; Stop 88
gctgcagctgattttatatcaaaat

SEQ ID NO: 109377 - DNA, 25 bp, Artificial
  probe
  misc_feature (1)..(25): SEQ ID NO: 3840; WAN024C9G_at; Start 111; Stop 135
gggagaaaatgaaatttctctttca

SEQ ID NO: 109378 - DNA, 25 bp, Artificial
  probe
  misc_feature (1)..(25): SEQ ID NO: 3840; WAN024C9G_at; Start 275; Stop 299
tggaggtaataaaaaataagcaaca

SEQ ID NO: 109379 - DNA, 25 bp, Artificial
  probe
  misc_feature (1)..(25): SEQ ID NO: 3840; WAN024C9G_at; Start 14; Stop 38
gagaagcttttcgatattttagaaa

SEQ ID NO: 109380 - DNA, 25 bp, Artificial
  probe
  misc_feature (1)..(25): SEQ ID NO: 3840; WAN024C9G_at; Start 194; Stop 218
tagaatattataaaagatcggagcg

SEQ ID NO: 109381 - DNA, 25 bp, Artificial
  probe
  misc_feature (1)..(25): SEQ ID NO: 5839; WAN024C9H_at; Start 80; Stop 104
gctttagaatcagctgtaagtgtga

SEQ ID NO: 109382 - DNA, 25 bp, Artificial
  probe
  misc_feature (1)..(25): SEQ ID NO: 5839; WAN024C9H_at; Start 249; Stop 273
cacgagtgtcaacttcaaatacata

SEQ ID NO: 109383 - DNA, 25 bp, Artificial
  probe
  misc_feature (1)..(25): SEQ ID NO: 5839; WAN024C9H_at; Start 92; Stop 116
gctgtaagtgtgatgatagcttttt

SEQ ID NO: 109384 - DNA, 25 bp, Artificial
  probe
  misc_feature (1)..(25): SEQ ID NO: 5839; WAN024C9H_at; Start 87; Stop 111
aatcagctgtaagtgtgatgatagc

SEQ ID NO: 109385 - DNA, 25 bp, Artificial
  probe
  misc_feature (1)..(25): SEQ ID NO: 5839; WAN024C9H_at; Start 136; Stop 160
agtgtaacgtccaacacgtttagct

SEQ ID NO: 109386 - DNA, 25 bp, Artificial
  probe
  misc_feature (1)..(25): SEQ ID NO: 5839; WAN024C9H_at; Start 22; Stop 46
gaattcccacgatatttcctcctta

SEQ ID NO: 109387 - DNA, 25 bp, Artificial
  probe
  misc_feature (1)..(25): SEQ ID NO: 5839; WAN024C9H_at; Start 134; Stop 158
ccagtgtaacgtccaacacgtttag

SEQ ID NO: 109388 - DNA, 25 bp, Artificial
  probe
  misc_feature (1)..(25): SEQ ID NO: 5839; WAN024C9H_at; Start 212; Stop 236
gcagcttcaacagcttgcttgatca

SEQ ID NO: 109389 - DNA, 25 bp, Artificial
  probe
  misc_feature (1)..(25): SEQ ID NO: 5839; WAN024C9H_at; Start 56; Stop 80
gcttcagcagcaaacaactcgattg

SEQ ID NO: 109390 - DNA, 25 bp, Artificial
  probe
  misc_feature (1)..(25): SEQ ID NO: 5839; WAN024C9H_at; Start 235; Stop 259
caaaagtttgtgtgcacgagtgtca

SEQ ID NO: 109391 - DNA, 25 bp, Artificial
  probe
  misc_feature (1)..(25): SEQ ID NO: 5839; WAN024C9H_at; Start 241; Stop 265
tttgtgtgcacgagtgtcaacttca

SEQ ID NO: 109392 - DNA, 25 bp, Artificial
  probe
  misc_feature (1)..(25): SEQ ID NO: 5839; WAN024C9H_at; Start 75; Stop 99
cgattgctttagaatcagctgtaag

SEQ ID NO: 109393 - DNA, 25 bp, Artificial
  probe
  misc_feature (1)..(25): SEQ ID NO: 5839; WAN024C9H_at; Start 11; Stop 35
tttataaacacgaattcccacgata

SEQ ID NO: 109394 - DNA, 25 bp, Artificial
  probe
  misc_feature (1)..(25): SEQ ID NO: 5839; WAN024C9H_at; Start 276; Stop 300
ttcctgcttcaagttgagccattga

SEQ ID NO: 109395 - DNA, 25 bp, Artificial
  probe
  misc_feature (1)..(25): SEQ ID NO: 5839; WAN024C9H_at; Start 245; Stop 269
tgtgcacgagtgtcaacttcaaata

SEQ ID NO: 109396 - DNA, 25 bp, Artificial
  probe
  misc_feature (1)..(25): SEQ ID NO: 5839; WAN024C9H_at; Start 52; Stop 76
ttcagcttcagcagcaaacaactcg

SEQ ID NO: 109397 - DNA, 25 bp, Artificial
  probe
  misc_feature (1)..(25): SEQ ID NO: 5839; WAN024C9H_at; Start 15; Stop 39
taaacacgaattcccacgatatttc

SEQ ID NO: 109398 - DNA, 25 bp, Artificial
  probe
  misc_feature (1)..(25): SEQ ID NO: 5839; WAN024C9H_at; Start 193; Stop 217
aactttaacaccttcgaaagcagct

SEQ ID NO: 109399 - DNA, 25 bp, Artificial
  probe
  misc_feature (1)..(25): SEQ ID NO: 5839; WAN024C9H_at; Start 42; Stop 66
ccttagattattcagcttcagcagc

SEQ ID NO: 109400 - DNA, 25 bp, Artificial
  probe
  misc_feature (1)..(25): SEQ ID NO: 5839; WAN024C9H_at; Start 198; Stop 222
taacaccttcgaaagcagcttcaac

SEQ ID NO: 109401 - DNA, 25 bp, Artificial
  probe
  misc_feature (1)..(25): SEQ ID NO: 5839; WAN024C9H_at; Start 215; Stop 239
gcttcaacagcttgcttgatcaaaa

SEQ ID NO: 109402 - DNA, 25 bp, Artificial
  probe
  misc_feature (1)..(25): SEQ ID NO: 5839; WAN024C9H_at; Start 264; Stop 288
caaatacatattttcctgcttcaag

SEQ ID NO: 109403 - DNA, 25 bp, Artificial
  probe
  misc_feature (1)..(25): SEQ ID NO: 5839; WAN024C9H_at; Start 27; Stop 51
cccacgatatttcctccttagatta

SEQ ID NO: 109404 - DNA, 25 bp, Artificial
  probe
  misc_feature (1)..(25): SEQ ID NO: 5839; WAN024C9H_at; Start 222; Stop 246
cagcttgcttgatcaaaagtttgtg

SEQ ID NO: 109405 - DNA, 25 bp, Artificial
  probe
  misc_feature (1)..(25): SEQ ID NO: 5839; WAN024C9H_at; Start 175; Stop 199
gattgtgttaacattggcaacttta

SEQ ID NO: 109406 - DNA, 25 bp, Artificial
  probe
  misc_feature (1)..(25): SEQ ID NO: 5839; WAN024C9H_at; Start 157; Stop 181
agcttttggttttacgttgattgtg

SEQ ID NO: 109407 - DNA, 25 bp, Artificial
  probe
  misc_feature (1)..(25): SEQ ID NO: 5839; WAN024C9H_at; Start 180; Stop 204
tgttaacattggcaactttaacacc

SEQ ID NO: 109408 - DNA, 25 bp, Artificial
  probe
  misc_feature (1)..(25): SEQ ID NO: 5839; WAN024C9H_at; Start 47; Stop 71
gattattcagcttcagcagcaaaca

SEQ ID NO: 109409 - DNA, 25 bp, Artificial
  probe
  misc_feature (1)..(25): SEQ ID NO: 5839; WAN024C9H_at; Start 206; Stop 230
tcgaaagcagcttcaacagcttgct

SEQ ID NO: 109410 - DNA, 25 bp, Artificial
  probe
  misc_feature (1)..(25): SEQ ID NO: 5839; WAN024C9H_at; Start 169; Stop 193
tacgttgattgtgttaacattggca

SEQ ID NO: 109411 - DNA, 25 bp, Artificial
  probe
  misc_feature (1)..(25): SEQ ID NO: 5839; WAN024C9H_at; Start 69; Stop 93
acaactcgattgctttagaatcagc

SEQ ID NO: 109412 - DNA, 25 bp, Artificial
  probe
  misc_feature (1)..(25): SEQ ID NO: 5839; WAN024C9H_at; Start 62; Stop 86
gcagcaaacaactcgattgctttag

SEQ ID NO: 109413 - DNA, 25 bp, Artificial
  probe
  misc_feature (1)..(25): SEQ ID NO: 5839; WAN024C9H_at; Start 272; Stop 296
tattttcctgcttcaagttgagcca

SEQ ID NO: 109414 - DNA, 25 bp, Artificial
  probe
  misc_feature (1)..(25): SEQ ID NO: 5839; WAN024C9H_at; Start 237; Stop 261
aaagtttgtgtgcacgagtgtcaac

SEQ ID NO: 109415 - DNA, 25 bp, Artificial
  probe
  misc_feature (1)..(25): SEQ ID NO: 5042; WAN024C9I_at; Start 100; Stop 124
gattgttttaacaactgcttcaacg

SEQ ID NO: 109416 - DNA, 25 bp, Artificial
  probe
  misc_feature (1)..(25): SEQ ID NO: 5042; WAN024C9I_at; Start 28; Stop 52
gatgatgtatgctttcacaccgtca

SEQ ID NO: 109417 - DNA, 25 bp, Artificial
  probe
  misc_feature (1)..(25): SEQ ID NO: 5042; WAN024C9I_at; Start 179; Stop 203
ccttggtgacgaactgtgatacgac

SEQ ID NO: 109418 - DNA, 25 bp, Artificial
  probe
  misc_feature (1)..(25): SEQ ID NO: 5042; WAN024C9I_at; Start 200; Stop 224
cgaccgttgttgttacgaccagcct

SEQ ID NO: 109419 - DNA, 25 bp, Artificial
  probe
  misc_feature (1)..(25): SEQ ID NO: 5042; WAN024C9I_at; Start 50; Stop 74
tcagtgtagtgtacaagagcgatgt

SEQ ID NO: 109420 - DNA, 25 bp, Artificial
  probe
  misc_feature (1)..(25): SEQ ID NO: 5042; WAN024C9I_at; Start 17; Stop 41
ccttttggagcgatgatgtatgctt

SEQ ID NO: 109421 - DNA, 25 bp, Artificial
  probe
  misc_feature (1)..(25): SEQ ID NO: 5042; WAN024C9I_at; Start 162; Stop 186
aacgtttgtgtccaccaccttggtg

SEQ ID NO: 109422 - DNA, 25 bp, Artificial
  probe
  misc_feature (1)..(25): SEQ ID NO: 5042; WAN024C9I_at; Start 90; Stop 114
gatcgtactcgattgttttaacaac

SEQ ID NO: 109423 - DNA, 25 bp, Artificial
  probe
  misc_feature (1)..(25): SEQ ID NO: 5042; WAN024C9I_at; Start 174; Stop 198
caccaccttggtgacgaactgtgat

SEQ ID NO: 109424 - DNA, 25 bp, Artificial
  probe
  misc_feature (1)..(25): SEQ ID NO: 5042; WAN024C9I_at; Start 45; Stop 69
caccgtcagtgtagtgtacaagagc

SEQ ID NO: 109425 - DNA, 25 bp, Artificial
  probe
  misc_feature (1)..(25): SEQ ID NO: 5042; WAN024C9I_at; Start 225; Stop 249
tgctcttcaatgcaacaagcaatga

SEQ ID NO: 109426 - DNA, 25 bp, Artificial
  probe
  misc_feature (1)..(25): SEQ ID NO: 5042; WAN024C9I_at; Start 7; Stop 31
tacttcaagaccttttggagcgatg

SEQ ID NO: 109427 - DNA, 25 bp, Artificial
  probe
  misc_feature (1)..(25): SEQ ID NO: 5042; WAN024C9I_at; Start 38; Stop 62
gctttcacaccgtcagtgtagtgta

SEQ ID NO: 109428 - DNA, 25 bp, Artificial
  probe
  misc_feature (1)..(25): SEQ ID NO: 5042; WAN024C9I_at; Start 63; Stop 87
caagagcgatgtttgcagaacggtt

SEQ ID NO: 109429 - DNA, 25 bp, Artificial
  probe
  misc_feature (1)..(25): SEQ ID NO: 5042; WAN024C9I_at; Start 61; Stop 85
tacaagagcgatgtttgcagaacgg

SEQ ID NO: 109430 - DNA, 25 bp, Artificial
  probe
  misc_feature (1)..(25): SEQ ID NO: 5042; WAN024C9I_at; Start 182; Stop 206
tggtgacgaactgtgatacgaccgt

SEQ ID NO: 109431 - DNA, 25 bp, Artificial
  probe
  misc_feature (1)..(25): SEQ ID NO: 5042; WAN024C9I_at; Start 24; Stop 48
gagcgatgatgtatgctttcacacc

SEQ ID NO: 109432 - DNA, 25 bp, Artificial
  probe
  misc_feature (1)..(25): SEQ ID NO: 5042; WAN024C9I_at; Start 166; Stop 190
tttgtgtccaccaccttggtgacga

SEQ ID NO: 109433 - DNA, 25 bp, Artificial
  probe
  misc_feature (1)..(25): SEQ ID NO: 5042; WAN024C9I_at; Start 76; Stop 100
tgcagaacggtttggatcgtactcg

SEQ ID NO: 109434 - DNA, 25 bp, Artificial
  probe
  misc_feature (1)..(25): SEQ ID NO: 5042; WAN024C9I_at; Start 128; Stop 152
tctttattacgtttgaagtcaacca

SEQ ID NO: 109435 - DNA, 25 bp, Artificial
  probe
  misc_feature (1)..(25): SEQ ID NO: 5042; WAN024C9I_at; Start 67; Stop 91
agcgatgtttgcagaacggtttgga

SEQ ID NO: 109436 - DNA, 25 bp, Artificial
  probe
  misc_feature (1)..(25): SEQ ID NO: 5042; WAN024C9I_at; Start 31; Stop 55
gatgtatgctttcacaccgtcagtg

SEQ ID NO: 109437 - DNA, 25 bp, Artificial
  probe
  misc_feature (1)..(25): SEQ ID NO: 5042; WAN024C9I_at; Start 54; Stop 78
tgtagtgtacaagagcgatgtttgc

SEQ ID NO: 109438 - DNA, 25 bp, Artificial
  probe
  misc_feature (1)..(25): SEQ ID NO: 5042; WAN024C9I_at; Start 103; Stop 127
tgttttaacaactgcttcaacgttg

SEQ ID NO: 109439 - DNA, 25 bp, Artificial
  probe
  misc_feature (1)..(25): SEQ ID NO: 5042; WAN024C9I_at; Start 186; Stop 210
gacgaactgtgatacgaccgttgtt

SEQ ID NO: 109440 - DNA, 25 bp, Artificial
  probe
  misc_feature (1)..(25): SEQ ID NO: 5042; WAN024C9I_at; Start 207; Stop 231
tgttgttacgaccagccttgctctt

SEQ ID NO: 109441 - DNA, 25 bp, Artificial
  probe
  misc_feature (1)..(25): SEQ ID NO: 5042; WAN024C9I_at; Start 196; Stop 220
gatacgaccgttgttgttacgacca

SEQ ID NO: 109442 - DNA, 25 bp, Artificial
  probe
  misc_feature (1)..(25): SEQ ID NO: 5042; WAN024C9I_at; Start 80; Stop 104
gaacggtttggatcgtactcgattg

SEQ ID NO: 109443 - DNA, 25 bp, Artificial
  probe
  misc_feature (1)..(25): SEQ ID NO: 5042; WAN024C9I_at; Start 34; Stop 58
gtatgctttcacaccgtcagtgtag

SEQ ID NO: 109444 - DNA, 25 bp, Artificial
  probe
  misc_feature (1)..(25): SEQ ID NO: 5042; WAN024C9I_at; Start 113; Stop 137
actgcttcaacgttgtctttattac

SEQ ID NO: 109445 - DNA, 25 bp, Artificial
  probe
  misc_feature (1)..(25): SEQ ID NO: 5042; WAN024C9I_at; Start 213; Stop 237
tacgaccagccttgctcttcaatgc

SEQ ID NO: 109446 - DNA, 25 bp, Artificial
  probe
  misc_feature (1)..(25): SEQ ID NO: 5042; WAN024C9I_at; Start 12; Stop 36
caagaccttttggagcgatgatgta

SEQ ID NO: 109447 - DNA, 25 bp, Artificial
  probe
  misc_feature (1)..(25): SEQ ID NO: 5042; WAN024C9I_at; Start 205; Stop 229
gttgttgttacgaccagccttgctc

SEQ ID NO: 109448 - DNA, 25 bp, Artificial
  probe
  misc_feature (1)..(25): SEQ ID NO: 5042; WAN024C9I_at; Start 219; Stop 243
cagccttgctcttcaatgcaacaag

SEQ ID NO: 109449 - DNA, 25 bp, Artificial
  probe
  misc_feature (1)..(25): SEQ ID NO: 1284; WAN024C9J_at; Start 243; Stop 267
cacacttacagctgattctaaagca

SEQ ID NO: 109450 - DNA, 25 bp, Artificial
  probe
  misc_feature (1)..(25): SEQ ID NO: 1284; WAN024C9J_at; Start 30; Stop 54
tgtcatcactgaaagctcaatggct

SEQ ID NO: 109451 - DNA, 25 bp, Artificial
  probe
  misc_feature (1)..(25): SEQ ID NO: 1284; WAN024C9J_at; Start 232; Stop 256
aaagctatcatcacacttacagctg

SEQ ID NO: 109452 - DNA, 25 bp, Artificial
  probe
  misc_feature (1)..(25): SEQ ID NO: 1284; WAN024C9J_at; Start 187; Stop 211
gctaaacgtgttggacgttacactg

SEQ ID NO: 109453 - DNA, 25 bp, Artificial
  probe
  misc_feature (1)..(25): SEQ ID NO: 1284; WAN024C9J_at; Start 165; Stop 189
cacaatcaacgtaaaaccaaaagct

SEQ ID NO: 109454 - DNA, 25 bp, Artificial
  probe
  misc_feature (1)..(25): SEQ ID NO: 1284; WAN024C9J_at; Start 275; Stop 299
tgtttgctgctgaagctgaataact

SEQ ID NO: 109455 - DNA, 25 bp, Artificial
  probe
  misc_feature (1)..(25): SEQ ID NO: 1284; WAN024C9J_at; Start 154; Stop 178
gccaatgttaacacaatcaacgtaa

SEQ ID NO: 109456 - DNA, 25 bp, Artificial
  probe
  misc_feature (1)..(25): SEQ ID NO: 1284; WAN024C9J_at; Start 111; Stop 135
gatcaagcaagctgttgaagctgct

SEQ ID NO: 109457 - DNA, 25 bp, Artificial
  probe
  misc_feature (1)..(25): SEQ ID NO: 1284; WAN024C9J_at; Start 249; Stop 273
tacagctgattctaaagcaatcgag

SEQ ID NO: 109458 - DNA, 25 bp, Artificial
  probe
  misc_feature (1)..(25): SEQ ID NO: 1284; WAN024C9J_at; Start 107; Stop 131
ttttgatcaagcaagctgttgaagc

SEQ ID NO: 109459 - DNA, 25 bp, Artificial
  probe
  misc_feature (1)..(25): SEQ ID NO: 1284; WAN024C9J_at; Start 16; Stop 40
gttatcaaaaaacctgtcatcactg

SEQ ID NO: 109460 - DNA, 25 bp, Artificial
  probe
  misc_feature (1)..(25): SEQ ID NO: 1284; WAN024C9J_at; Start 147; Stop 171
taaagttgccaatgttaacacaatc

SEQ ID NO: 109461 - DNA, 25 bp, Artificial
  probe
  misc_feature (1)..(25): SEQ ID NO: 1284; WAN024C9J_at; Start 77; Stop 101
tatttgaagttgacactcgtgcaca

SEQ ID NO: 109462 - DNA, 25 bp, Artificial
  probe
  misc_feature (1)..(25): SEQ ID NO: 1284; WAN024C9J_at; Start 126; Stop 150
tgaagctgctttcgaaggtgttaaa

SEQ ID NO: 109463 - DNA, 25 bp, Artificial
  probe
  misc_feature (1)..(25): SEQ ID NO: 1284; WAN024C9J_at; Start 219; Stop 243
taacaaaactaaaaaagctatcatc

SEQ ID NO: 109464 - DNA, 25 bp, Artificial
  probe
  misc_feature (1)..(25): SEQ ID NO: 1284; WAN024C9J_at; Start 39; Stop 63
tgaaagctcaatggctcaacttgaa

SEQ ID NO: 109465 - DNA, 25 bp, Artificial
  probe
  misc_feature (1)..(25): SEQ ID NO: 1284; WAN024C9J_at; Start 235; Stop 259
gctatcatcacacttacagctgatt

SEQ ID NO: 109466 - DNA, 25 bp, Artificial
  probe
  misc_feature (1)..(25): SEQ ID NO: 1284; WAN024C9J_at; Start 71; Stop 95
aatatgtatttgaagttgacactcg

SEQ ID NO: 109467 - DNA, 25 bp, Artificial
  probe
  misc_feature (1)..(25): SEQ ID NO: 1284; WAN024C9J_at; Start 270; Stop 294
cgagttgtttgctgctgaagctgaa

SEQ ID NO: 109468 - DNA, 25 bp, Artificial
  probe
  misc_feature (1)..(25): SEQ ID NO: 1284; WAN024C9J_at; Start 24; Stop 48
aaaacctgtcatcactgaaagctca

SEQ ID NO: 109469 - DNA, 25 bp, Artificial
  probe
  misc_feature (1)..(25): SEQ ID NO: 1284; WAN024C9J_at; Start 100; Stop 124
cacaaacttttgatcaagcaagctg

SEQ ID NO: 109470 - DNA, 25 bp, Artificial
  probe
  misc_feature (1)..(25): SEQ ID NO: 1284; WAN024C9J_at; Start 118; Stop 142
caagctgttgaagctgctttcgaag

SEQ ID NO: 109471 - DNA, 25 bp, Artificial
  probe
  misc_feature (1)..(25): SEQ ID NO: 1284; WAN024C9J_at; Start 129; Stop 153
agctgctttcgaaggtgttaaagtt

SEQ ID NO: 109472 - DNA, 25 bp, Artificial
  probe
  misc_feature (1)..(25): SEQ ID NO: 1284; WAN024C9J_at; Start 278; Stop 302
ttgctgctgaagctgaataactaat

SEQ ID NO: 109473 - DNA, 25 bp, Artificial
  probe
  misc_feature (1)..(25): SEQ ID NO: 1284; WAN024C9J_at; Start 159; Stop 183
tgttaacacaatcaacgtaaaacca

SEQ ID NO: 109474 - DNA, 25 bp, Artificial
  probe
  misc_feature (1)..(25): SEQ ID NO: 1284; WAN024C9J_at; Start 44; Stop 68
gctcaatggctcaacttgaagcagg

SEQ ID NO: 109475 - DNA, 25 bp, Artificial
  probe
  misc_feature (1)..(25): SEQ ID NO: 1284; WAN024C9J_at; Start 33; Stop 57
catcactgaaagctcaatggctcaa

SEQ ID NO: 109476 - DNA, 25 bp, Artificial
  probe
  misc_feature (1)..(25): SEQ ID NO: 1284; WAN024C9J_at; Start 81; Stop 105
tgaagttgacactcgtgcacacaaa

SEQ ID NO: 109477 - DNA, 25 bp, Artificial
  probe
  misc_feature (1)..(25): SEQ ID NO: 1284; WAN024C9J_at; Start 266; Stop 290
caatcgagttgtttgctgctgaagc

SEQ ID NO: 109478 - DNA, 25 bp, Artificial
  probe
  misc_feature (1)..(25): SEQ ID NO: 1284; WAN024C9J_at; Start 253; Stop 277
gctgattctaaagcaatcgagttgt

SEQ ID NO: 109479 - DNA, 25 bp, Artificial
  probe
  misc_feature (1)..(25): SEQ ID NO: 1284; WAN024C9J_at; Start 20; Stop 44
tcaaaaaacctgtcatcactgaaag

SEQ ID NO: 109480 - DNA, 25 bp, Artificial
  probe
  misc_feature (1)..(25): SEQ ID NO: 1284; WAN024C9J_at; Start 88; Stop 112
gacactcgtgcacacaaacttttga

SEQ ID NO: 109481 - DNA, 25 bp, Artificial
  probe
  misc_feature (1)..(25): SEQ ID NO: 1284; WAN024C9J_at; Start 93; Stop 117
tcgtgcacacaaacttttgatcaag

SEQ ID NO: 109482 - DNA, 25 bp, Artificial
  probe
  misc_feature (1)..(25): SEQ ID NO: 1284; WAN024C9J_at; Start 10; Stop 34
tatgatgttatcaaaaaacctgtca

SEQ ID NO: 109483 - DNA, 25 bp, Artificial
  probe
  misc_feature (1)..(25): SEQ ID NO: 4172; WAN024C9K_at; Start 595; Stop 619
caacatggacttgtaaaccttggta

SEQ ID NO: 109484 - DNA, 25 bp, Artificial
  probe
  misc_feature (1)..(25): SEQ ID NO: 4172; WAN024C9K_at; Start 412; Stop 436
ggtactttgattcacaacatcgagt

SEQ ID NO: 109485 - DNA, 25 bp, Artificial
  probe
  misc_feature (1)..(25): SEQ ID NO: 4172; WAN024C9K_at; Start 516; Stop 540
tcttgttcgtcttcaatcaggtgaa

SEQ ID NO: 109486 - DNA, 25 bp, Artificial
  probe
  misc_feature (1)..(25): SEQ ID NO: 4172; WAN024C9K_at; Start 392; Stop 416
cacttgctaacatcccagttggtac

SEQ ID NO: 109487 - DNA, 25 bp, Artificial
  probe
  misc_feature (1)..(25): SEQ ID NO: 4172; WAN024C9K_at; Start 464; Stop 488
tacgtgctgctggtgcatctgctca

SEQ ID NO: 109488 - DNA, 25 bp, Artificial
  probe
  misc_feature (1)..(25): SEQ ID NO: 4172; WAN024C9K_at; Start 106; Stop 130
gcattgaagagcaaggctggtcgta

SEQ ID NO: 109489 - DNA, 25 bp, Artificial
  probe
  misc_feature (1)..(25): SEQ ID NO: 4172; WAN024C9K_at; Start 814; Stop 838
cgtcgtcgcaacgagaaataactaa

SEQ ID NO: 109490 - DNA, 25 bp, Artificial
  probe
  misc_feature (1)..(25): SEQ ID NO: 4172; WAN024C9K_at; Start 549; Stop 573
gattcttggaacttgccgtgctaca

SEQ ID NO: 109491 - DNA, 25 bp, Artificial
  probe
  misc_feature (1)..(25): SEQ ID NO: 4172; WAN024C9K_at; Start 727; Stop 751
cgtaaagcaccatctactccatggg

SEQ ID NO: 109492 - DNA, 25 bp, Artificial
  probe
  misc_feature (1)..(25): SEQ ID NO: 4172; WAN024C9K_at; Start 355; Stop 379
ggtccagaagcagatatcaaagtcg

SEQ ID NO: 109493 - DNA, 25 bp, Artificial
  probe
  misc_feature (1)..(25): SEQ ID NO: 4172; WAN024C9K_at; Start 121; Stop 145
gctggtcgtaacaacaacggtcgta

SEQ ID NO: 109494 - DNA, 25 bp, Artificial
  probe
  misc_feature (1)..(25): SEQ ID NO: 4172; WAN024C9K_at; Start 750; Stop 774
gggcaaacctgctcttggtcttaaa

SEQ ID NO: 109495 - DNA, 25 bp, Artificial
  probe
  misc_feature (1)..(25): SEQ ID NO: 4172; WAN024C9K_at; Start 681; Stop 705
taacgatcacccacacggtggtggt

SEQ ID NO: 109496 - DNA, 25 bp, Artificial
  probe
  misc_feature (1)..(25): SEQ ID NO: 4172; WAN024C9K_at; Start 292; Stop 316
gacggtgtgaaagcatacatcatcg

SEQ ID NO: 109497 - DNA, 25 bp, Artificial
  probe
  misc_feature (1)..(25): SEQ ID NO: 4172; WAN024C9K_at; Start 242; Stop 266
tcgagtacgatccaaaccgttctgc

SEQ ID NO: 109498 - DNA, 25 bp, Artificial
  probe
  misc_feature (1)..(25): SEQ ID NO: 4172; WAN024C9K_at; Start 369; Stop 393
tatcaaagtcggaaacgctcttcca

SEQ ID NO: 109499 - DNA, 25 bp, Artificial
  probe
  misc_feature (1)..(25): SEQ ID NO: 4172; WAN024C9K_at; Start 157; Stop 181
caccaaggtggtggacacaaacgtt

SEQ ID NO: 109500 - DNA, 25 bp, Artificial
  probe
  misc_feature (1)..(25): SEQ ID NO: 4172; WAN024C9K_at; Start 641; Stop 665
aaggtatccgcccaacagttcgtgg

SEQ ID NO: 109501 - DNA, 25 bp, Artificial
  probe
  misc_feature (1)..(25): SEQ ID NO: 4172; WAN024C9K_at; Start 258; Stop 282
ccgttctgcaaacatcgctcttgta

SEQ ID NO: 109502 - DNA, 25 bp, Artificial
  probe
  misc_feature (1)..(25): SEQ ID NO: 4172; WAN024C9K_at; Start 64; Stop 88
gctgaaatcacaacaagcactcctg

SEQ ID NO: 109503 - DNA, 25 bp, Artificial
  probe
  misc_feature (1)..(25): SEQ ID NO: 4172; WAN024C9K_at; Start 140; Stop 164
gtcgtatcacagttcgtcaccaagg

SEQ ID NO: 109504 - DNA, 25 bp, Artificial
  probe
  misc_feature (1)..(25): SEQ ID NO: 4172; WAN024C9K_at; Start 307; Stop 331
tacatcatcgctccaaaaggtcttg

SEQ ID NO: 109505 - DNA, 25 bp, Artificial
  probe
  misc_feature (1)..(25): SEQ ID NO: 4172; WAN024C9K_at; Start 29; Stop 53
caaacggtcgccgtaatatgacttc

SEQ ID NO: 109506 - DNA, 25 bp, Artificial
  probe
  misc_feature (1)..(25): SEQ ID NO: 4172; WAN024C9K_at; Start 320; Stop 344
caaaaggtcttgaagtaggtcaacg

SEQ ID NO: 109507 - DNA, 25 bp, Artificial
  probe
  misc_feature (1)..(25): SEQ ID NO: 4172; WAN024C9K_at; Start 777; Stop 801
tcgtaacaagaaagcgaaatctgac

SEQ ID NO: 109508 - DNA, 25 bp, Artificial
  probe
  misc_feature (1)..(25): SEQ ID NO: 4172; WAN024C9K_at; Start 612; Stop 636
ccttggtaaagcaggacgtagccgt

SEQ ID NO: 109509 - DNA, 25 bp, Artificial
  probe
  misc_feature (1)..(25): SEQ ID NO: 4172; WAN024C9K_at; Start 630; Stop 654
tagccgttggaaaggtatccgccca

SEQ ID NO: 109510 - DNA, 25 bp, Artificial
  probe
  misc_feature (1)..(25): SEQ ID NO: 4172; WAN024C9K_at; Start 274; Stop 298
gctcttgtacactacactgacggtg

SEQ ID NO: 109511 - DNA, 25 bp, Artificial
  probe
  misc_feature (1)..(25): SEQ ID NO: 4172; WAN024C9K_at; Start 705; Stop 729
tgaaggtaaagcaccagttggtcgt

SEQ ID NO: 109512 - DNA, 25 bp, Artificial
  probe
  misc_feature (1)..(25): SEQ ID NO: 4172; WAN024C9K_at; Start 582; Stop 606
tgtcggaaacgaacaacatggactt

SEQ ID NO: 109513 - DNA, 25 bp, Artificial
  probe
  misc_feature (1)..(25): SEQ ID NO: 4172; WAN024C9K_at; Start 568; Stop 592
gctacagttggtgttgtcggaaacg

SEQ ID NO: 109514 - DNA, 25 bp, Artificial
  probe
  misc_feature (1)..(25): SEQ ID NO: 4172; WAN024C9K_at; Start 429; Stop 453
catcgagttgaaaccaggtcgtggt

SEQ ID NO: 109515 - DNA, 25 bp, Artificial
  probe
  misc_feature (1)..(25): SEQ ID NO: 4172; WAN024C9K_at; Start 799; Stop 823
gacaaacttatcgttcgtcgtcgca

SEQ ID NO: 109516 - DNA, 25 bp, Artificial
  probe
  misc_feature (1)..(25): SEQ ID NO: 4172; WAN024C9K_at; Start 340; Stop 364
caacgtatcgtttcaggtccagaag

SEQ ID NO: 109517 - DNA, 25 bp, Artificial
  probe
  misc_feature (1)..(25): SEQ ID NO: 3628; WAN024C9L_at; Start 584; Stop 608
tactgatgcttgtcggtattggaac

SEQ ID NO: 109518 - DNA, 25 bp, Artificial
  probe
  misc_feature (1)..(25): SEQ ID NO: 3628; WAN024C9L_at; Start 91; Stop 115
ttacttggatttgctgagatgattg

SEQ ID NO: 109519 - DNA, 25 bp, Artificial
  probe
  misc_feature (1)..(25): SEQ ID NO: 3628; WAN024C9L_at; Start 85; Stop 109
ctggtattacttggatttgctgaga

SEQ ID NO: 109520 - DNA, 25 bp, Artificial
  probe
  misc_feature (1)..(25): SEQ ID NO: 3628; WAN024C9L_at; Start 457; Stop 481
tcgattttatccgttgttgaagaaa

SEQ ID NO: 109521 - DNA, 25 bp, Artificial
  probe
  misc_feature (1)..(25): SEQ ID NO: 3628; WAN024C9L_at; Start 399; Stop 423
gacaaatggcctgatttatatcttg

SEQ ID NO: 109522 - DNA, 25 bp, Artificial
  probe
  misc_feature (1)..(25): SEQ ID NO: 3628; WAN024C9L_at; Start 327; Stop 351
gaaactgactcgtttacttagaata

SEQ ID NO: 109523 - DNA, 25 bp, Artificial
  probe
  misc_feature (1)..(25): SEQ ID NO: 3628; WAN024C9L_at; Start 663; Stop 687
tgaacagataaaacttgataaactc

SEQ ID NO: 109524 - DNA, 25 bp, Artificial
  probe
  misc_feature (1)..(25): SEQ ID NO: 3628; WAN024C9L_at; Start 488; Stop 512
tctcagatagtctttggtgggctct

SEQ ID NO: 109525 - DNA, 25 bp, Artificial
  probe
  misc_feature (1)..(25): SEQ ID NO: 3628; WAN024C9L_at; Start 314; Stop 338
taacaaaattactgaaactgactcg

SEQ ID NO: 109526 - DNA, 25 bp, Artificial
  probe
  misc_feature (1)..(25): SEQ ID NO: 3628; WAN024C9L_at; Start 647; Stop 671
taaaggataatccagatgaacagat

SEQ ID NO: 109527 - DNA, 25 bp, Artificial
  probe
  misc_feature (1)..(25): SEQ ID NO: 3628; WAN024C9L_at; Start 115; Stop 139
gatttggacaatccgccttatagta

SEQ ID NO: 109528 - DNA, 25 bp, Artificial
  probe
  misc_feature (1)..(25): SEQ ID NO: 3628; WAN024C9L_at; Start 354; Stop 378
tggacttacaggtaaattagaaaga

SEQ ID NO: 109529 - DNA, 25 bp, Artificial
  probe
  misc_feature (1)..(25): SEQ ID NO: 3628; WAN024C9L_at; Start 75; Stop 99
ctctgttattctggtattacttgga

SEQ ID NO: 109530 - DNA, 25 bp, Artificial
  probe
  misc_feature (1)..(25): SEQ ID NO: 3628; WAN024C9L_at; Start 108; Stop 132
gatgattgatttggacaatccgcct

SEQ ID NO: 109531 - DNA, 25 bp, Artificial
  probe
  misc_feature (1)..(25): SEQ ID NO: 3628; WAN024C9L_at; Start 168; Stop 192
tgtaattgattatagttggcgcttt

SEQ ID NO: 109532 - DNA, 25 bp, Artificial
  probe
  misc_feature (1)..(25): SEQ ID NO: 3628; WAN024C9L_at; Start 509; Stop 533
ctcttgtgacagtaactactgttgg

SEQ ID NO: 109533 - DNA, 25 bp, Artificial
  probe
  misc_feature (1)..(25): SEQ ID NO: 3628; WAN024C9L_at; Start 64; Stop 88
cttgctttaatctctgttattctgg

SEQ ID NO: 109534 - DNA, 25 bp, Artificial
  probe
  misc_feature (1)..(25): SEQ ID NO: 3628; WAN024C9L_at; Start 282; Stop 306
tcgattagggcgtatctttcgttta

SEQ ID NO: 109535 - DNA, 25 bp, Artificial
  probe
  misc_feature (1)..(25): SEQ ID NO: 3628; WAN024C9L_at; Start 45; Stop 69
tgatacaacaattattttacttgct

SEQ ID NO: 109536 - DNA, 25 bp, Artificial
  probe
  misc_feature (1)..(25): SEQ ID NO: 3628; WAN024C9L_at; Start 238; Stop 262
gatttattggctattctccctttaa

SEQ ID NO: 109537 - DNA, 25 bp, Artificial
  probe
  misc_feature (1)..(25): SEQ ID NO: 3628; WAN024C9L_at; Start 341; Stop 365
tacttagaataattggacttacagg

SEQ ID NO: 109538 - DNA, 25 bp, Artificial
  probe
  misc_feature (1)..(25): SEQ ID NO: 3628; WAN024C9L_at; Start 475; Stop 499
gaagaaaaatccttctcagatagtc

SEQ ID NO: 109539 - DNA, 25 bp, Artificial
  probe
  misc_feature (1)..(25): SEQ ID NO: 3628; WAN024C9L_at; Start 429; Stop 453
taatatctttattgttctagtaggg

SEQ ID NO: 109540 - DNA, 25 bp, Artificial
  probe
  misc_feature (1)..(25): SEQ ID NO: 3628; WAN024C9L_at; Start 591; Stop 615
gcttgtcggtattggaacaataggg

SEQ ID NO: 109541 - DNA, 25 bp, Artificial
  probe
  misc_feature (1)..(25): SEQ ID NO: 3628; WAN024C9L_at; Start 127; Stop 151
ccgccttatagtattattgatttag

SEQ ID NO: 109542 - DNA, 25 bp, Artificial
  probe
  misc_feature (1)..(25): SEQ ID NO: 3628; WAN024C9L_at; Start 444; Stop 468
tctagtagggagttcgattttatcc

SEQ ID NO: 109543 - DNA, 25 bp, Artificial
  probe
  misc_feature (1)..(25): SEQ ID NO: 3628; WAN024C9L_at; Start 120; Stop 144
ggacaatccgccttatagtattatt

SEQ ID NO: 109544 - DNA, 25 bp, Artificial
  probe
  misc_feature (1)..(25): SEQ ID NO: 3628; WAN024C9L_at; Start 498; Stop 522
tctttggtgggctcttgtgacagta

SEQ ID NO: 109545 - DNA, 25 bp, Artificial
  probe
  misc_feature (1)..(25): SEQ ID NO: 3628; WAN024C9L_at; Start 206; Stop 230
gaaaatggcgctttattcttgaaaa

SEQ ID NO: 109546 - DNA, 25 bp, Artificial
  probe
  misc_feature (1)..(25): SEQ ID NO: 3628; WAN024C9L_at; Start 657; Stop 681
tccagatgaacagataaaacttgat

SEQ ID NO: 109547 - DNA, 25 bp, Artificial
  probe
  misc_feature (1)..(25): SEQ ID NO: 3628; WAN024C9L_at; Start 759; Stop 783
gatacaagatttgattgaaaaaaca

SEQ ID NO: 109548 - DNA, 25 bp, Artificial
  probe
  misc_feature (1)..(25): SEQ ID NO: 3628; WAN024C9L_at; Start 505; Stop 529
tgggctcttgtgacagtaactactg

SEQ ID NO: 109549 - DNA, 25 bp, Artificial
  probe
  misc_feature (1)..(25): SEQ ID NO: 3628; WAN024C9L_at; Start 742; Stop 766
gaagaactacataaaatgatacaag

SEQ ID NO: 109550 - DNA, 25 bp, Artificial
  probe
  misc_feature (1)..(25): SEQ ID NO: 3628; WAN024C9L_at; Start 246; Stop 270
ggctattctccctttaaatgctatt

SEQ ID NO: 109551 - DNA, 25 bp, Artificial
  probe
  misc_feature (1)..(25): SEQ ID NO: 661; WAN024C9M_at; Start 749; Stop 773
tgtttttcgctcaactcttcgcagt

SEQ ID NO: 109552 - DNA, 25 bp, Artificial
  probe
  misc_feature (1)..(25): SEQ ID NO: 661; WAN024C9M_at; Start 141; Stop 165
tcagcatgttgctacacgcttggaa

SEQ ID NO: 109553 - DNA, 25 bp, Artificial
  probe
  misc_feature (1)..(25): SEQ ID NO: 661; WAN024C9M_at; Start 686; Stop 710
aatccctaatgaccataggagcagg

SEQ ID NO: 109554 - DNA, 25 bp, Artificial
  probe
  misc_feature (1)..(25): SEQ ID NO: 661; WAN024C9M_at; Start 296; Stop 320
tagaagatgctcaaagtagtagtgt

SEQ ID NO: 109555 - DNA, 25 bp, Artificial
  probe
  misc_feature (1)..(25): SEQ ID NO: 661; WAN024C9M_at; Start 1059; Stop 1083
tctggctgtttcagaacaaaaggct

SEQ ID NO: 109556 - DNA, 25 bp, Artificial
  probe
  misc_feature (1)..(25): SEQ ID NO: 661; WAN024C9M_at; Start 111; Stop 135
tgtacatgattcttcccctgaaaca

SEQ ID NO: 109557 - DNA, 25 bp, Artificial
  probe
  misc_feature (1)..(25): SEQ ID NO: 661; WAN024C9M_at; Start 768; Stop 792
cgcagttgggataaaaaagatacac

SEQ ID NO: 109558 - DNA, 25 bp, Artificial
  probe
  misc_feature (1)..(25): SEQ ID NO: 661; WAN024C9M_at; Start 955; Stop 979
caggaaaggcaactgattaccctat

SEQ ID NO: 109559 - DNA, 25 bp, Artificial
  probe
  misc_feature (1)..(25): SEQ ID NO: 661; WAN024C9M_at; Start 192; Stop 216
tattgcgattcaacaccaagatcct

SEQ ID NO: 109560 - DNA, 25 bp, Artificial
  probe
  misc_feature (1)..(25): SEQ ID NO: 661; WAN024C9M_at; Start 916; Stop 940
gcctggcaacagcatcggattggac

SEQ ID NO: 109561 - DNA, 25 bp, Artificial
  probe
  misc_feature (1)..(25): SEQ ID NO: 661; WAN024C9M_at; Start 1024; Stop 1048
caaaggaaactcagaacttggtatc

SEQ ID NO: 109562 - DNA, 25 bp, Artificial
  probe
  misc_feature (1)..(25): SEQ ID NO: 661; WAN024C9M_at; Start 357; Stop 381
tattcacttgctaagggaggagcta

SEQ ID NO: 109563 - DNA, 25 bp, Artificial
  probe
  misc_feature (1)..(25): SEQ ID NO: 661; WAN024C9M_at; Start 995; Stop 1019
gaacgagtcctggttttgatgaaca

SEQ ID NO: 109564 - DNA, 25 bp, Artificial
  probe
  misc_feature (1)..(25): SEQ ID NO: 661; WAN024C9M_at; Start 411; Stop 435
gacaattccatctaaactatctacg

SEQ ID NO: 109565 - DNA, 25 bp, Artificial
  probe
  misc_feature (1)..(25): SEQ ID NO: 661; WAN024C9M_at; Start 589; Stop 613
agaccagttggtgaggatttgaaag

SEQ ID NO: 109566 - DNA, 25 bp, Artificial
  probe
  misc_feature (1)..(25): SEQ ID NO: 661; WAN024C9M_at; Start 17; Stop 41
tactcatatccaacctgcttgctag

SEQ ID NO: 109567 - DNA, 25 bp, Artificial
  probe
  misc_feature (1)..(25): SEQ ID NO: 661; WAN024C9M_at; Start 66; Stop 90
catttggactgatacatatgtctcc

SEQ ID NO: 109568 - DNA, 25 bp, Artificial
  probe
  misc_feature (1)..(25): SEQ ID NO: 661; WAN024C9M_at; Start 797; Stop 821
tgcagattataaaagggcaagtgcc

SEQ ID NO: 109569 - DNA, 25 bp, Artificial
  probe
  misc_feature (1)..(25): SEQ ID NO: 661; WAN024C9M_at; Start 1077; Stop 1101
aaaggctttcttatctagacaccag

SEQ ID NO: 109570 - DNA, 25 bp, Artificial
  probe
  misc_feature (1)..(25): SEQ ID NO: 661; WAN024C9M_at; Start 155; Stop 179
cacgcttggaaaaactagcagaaga

SEQ ID NO: 109571 - DNA, 25 bp, Artificial
  probe
  misc_feature (1)..(25): SEQ ID NO: 661; WAN024C9M_at; Start 1011; Stop 1035
tgatgaacaagctcaaaggaaactc

SEQ ID NO: 109572 - DNA, 25 bp, Artificial
  probe
  misc_feature (1)..(25): SEQ ID NO: 661; WAN024C9M_at; Start 812; Stop 836
ggcaagtgcctgtcagaggaatcat

SEQ ID NO: 109573 - DNA, 25 bp, Artificial
  probe
  misc_feature (1)..(25): SEQ ID NO: 661; WAN024C9M_at; Start 555; Stop 579
catttcaggagagaaacggtggtcc

SEQ ID NO: 109574 - DNA, 25 bp, Artificial
  probe
  misc_feature (1)..(25): SEQ ID NO: 661; WAN024C9M_at; Start 211; Stop 235
gatcctaactcagaaggtactacag

SEQ ID NO: 109575 - DNA, 25 bp, Artificial
  probe
  misc_feature (1)..(25): SEQ ID NO: 661; WAN024C9M_at; Start 541; Stop 565
tcgggcattcgcctcatttcaggag

SEQ ID NO: 109576 - DNA, 25 bp, Artificial
  probe
  misc_feature (1)..(25): SEQ ID NO: 661; WAN024C9M_at; Start 843; Stop 867
gattttaatcggtcaactattagcg

SEQ ID NO: 109577 - DNA, 25 bp, Artificial
  probe
  misc_feature (1)..(25): SEQ ID NO: 661; WAN024C9M_at; Start 980; Stop 1004
caatcagccgtgaaggaacgagtcc

SEQ ID NO: 109578 - DNA, 25 bp, Artificial
  probe
  misc_feature (1)..(25): SEQ ID NO: 661; WAN024C9M_at; Start 624; Stop 648
tggtttcagtttagctggcgtgctc

SEQ ID NO: 109579 - DNA, 25 bp, Artificial
  probe
  misc_feature (1)..(25): SEQ ID NO: 661; WAN024C9M_at; Start 520; Stop 544
caaattagccaattacggtcgtcgg

SEQ ID NO: 109580 - DNA, 25 bp, Artificial
  probe
  misc_feature (1)..(25): SEQ ID NO: 661; WAN024C9M_at; Start 899; Stop 923
gcttaaagtattcccaagcctggca

SEQ ID NO: 109581 - DNA, 25 bp, Artificial
  probe
  misc_feature (1)..(25): SEQ ID NO: 661; WAN024C9M_at; Start 373; Stop 397
gaggagctaagtcaacttggcttga

SEQ ID NO: 109582 - DNA, 25 bp, Artificial
  probe
  misc_feature (1)..(25): SEQ ID NO: 661; WAN024C9M_at; Start 328; Stop 352
aactattttgtattcgatggacacc

SEQ ID NO: 109583 - DNA, 25 bp, Artificial
  probe
  misc_feature (1)..(25): SEQ ID NO: 661; WAN024C9M_at; Start 343; Stop 367
gatggacacctagatattcacttgc

SEQ ID NO: 109584 - DNA, 25 bp, Artificial
  probe
  misc_feature (1)..(25): SEQ ID NO: 661; WAN024C9M_at; Start 660; Stop 684
gcaaaaaattctgtcgcttccaacg

SEQ ID NO: 109585 - DNA, 25 bp, Artificial
  probe
  misc_feature (1)..(25): SEQ ID NO: 5728; WAN024C9N_at; Start 54; Stop 78
cacgtttggaaggttacgagctgaa

SEQ ID NO: 109586 - DNA, 25 bp, Artificial
  probe
  misc_feature (1)..(25): SEQ ID NO: 5728; WAN024C9N_at; Start 26; Stop 50
cacttgcagttgtagcagttgcaac

SEQ ID NO: 109587 - DNA, 25 bp, Artificial
  probe
  misc_feature (1)..(25): SEQ ID NO: 5728; WAN024C9N_at; Start 116; Stop 140
gaactttagaatcgatgctcaatgc

SEQ ID NO: 109588 - DNA, 25 bp, Artificial
  probe
  misc_feature (1)..(25): SEQ ID NO: 5728; WAN024C9N_at; Start 113; Stop 137
caagaactttagaatcgatgctcaa

SEQ ID NO: 109589 - DNA, 25 bp, Artificial
  probe
  misc_feature (1)..(25): SEQ ID NO: 5728; WAN024C9N_at; Start 209; Stop 233
tgttttcagcaactttttcagagta

SEQ ID NO: 109590 - DNA, 25 bp, Artificial
  probe
  misc_feature (1)..(25): SEQ ID NO: 5728; WAN024C9N_at; Start 173; Stop 197
gagctgtaaatgaaagagcgtctac

SEQ ID NO: 109591 - DNA, 25 bp, Artificial
  probe
  misc_feature (1)..(25): SEQ ID NO: 5728; WAN024C9N_at; Start 161; Stop 185
cagcagtttttggagctgtaaatga

SEQ ID NO: 109592 - DNA, 25 bp, Artificial
  probe
  misc_feature (1)..(25): SEQ ID NO: 5728; WAN024C9N_at; Start 23; Stop 47
gaacacttgcagttgtagcagttgc

SEQ ID NO: 109593 - DNA, 25 bp, Artificial
  probe
  misc_feature (1)..(25): SEQ ID NO: 5728; WAN024C9N_at; Start 96; Stop 120
tccttcttcaaggataacaagaact

SEQ ID NO: 109594 - DNA, 25 bp, Artificial
  probe
  misc_feature (1)..(25): SEQ ID NO: 5728; WAN024C9N_at; Start 1; Stop 25
ttgtcgctatttgcgatgtcaagaa

SEQ ID NO: 109595 - DNA, 25 bp, Artificial
  probe
  misc_feature (1)..(25): SEQ ID NO: 5728; WAN024C9N_at; Start 32; Stop 56
cagttgtagcagttgcaactttcac

SEQ ID NO: 109596 - DNA, 25 bp, Artificial
  probe
  misc_feature (1)..(25): SEQ ID NO: 5728; WAN024C9N_at; Start 63; Stop 87
aaggttacgagctgaaagagctgcg

SEQ ID NO: 109597 - DNA, 25 bp, Artificial
  probe
  misc_feature (1)..(25): SEQ ID NO: 5728; WAN024C9N_at; Start 40; Stop 64
gcagttgcaactttcacgtttggaa

SEQ ID NO: 109598 - DNA, 25 bp, Artificial
  probe
  misc_feature (1)..(25): SEQ ID NO: 5728; WAN024C9N_at; Start 8; Stop 32
tatttgcgatgtcaagaacacttgc

SEQ ID NO: 109599 - DNA, 25 bp, Artificial
  probe
  misc_feature (1)..(25): SEQ ID NO: 5728; WAN024C9N_at; Start 77; Stop 101
aaagagctgcgaattcatttccttc

SEQ ID NO: 109600 - DNA, 25 bp, Artificial
  probe
  misc_feature (1)..(25): SEQ ID NO: 5728; WAN024C9N_at; Start 183; Stop 207
tgaaagagcgtctacagctacgaat

SEQ ID NO: 109601 - DNA, 25 bp, Artificial
  probe
  misc_feature (1)..(25): SEQ ID NO: 5728; WAN024C9N_at; Start 155; Stop 179
caaattcagcagtttttggagctgt

SEQ ID NO: 109602 - DNA, 25 bp, Artificial
  probe
  misc_feature (1)..(25): SEQ ID NO: 5728; WAN024C9N_at; Start 124; Stop 148
gaatcgatgctcaatgctgcaagaa

SEQ ID NO: 109603 - DNA, 25 bp, Artificial
  probe
  misc_feature (1)..(25): SEQ ID NO: 5728; WAN024C9N_at; Start 85; Stop 109
gcgaattcatttccttcttcaagga

SEQ ID NO: 109604 - DNA, 25 bp, Artificial
  probe
  misc_feature (1)..(25): SEQ ID NO: 5728; WAN024C9N_at; Start 100; Stop 124
tcttcaaggataacaagaactttag

SEQ ID NO: 109605 - DNA, 25 bp, Artificial
  probe
  misc_feature (1)..(25): SEQ ID NO: 5728; WAN024C9N_at; Start 68; Stop 92
tacgagctgaaagagctgcgaattc

SEQ ID NO: 109606 - DNA, 25 bp, Artificial
  probe
  misc_feature (1)..(25): SEQ ID NO: 5728; WAN024C9N_at; Start 59; Stop 83
ttggaaggttacgagctgaaagagc

SEQ ID NO: 109607 - DNA, 25 bp, Artificial
  probe
  misc_feature (1)..(25): SEQ ID NO: 5728; WAN024C9N_at; Start 45; Stop 69
tgcaactttcacgtttggaaggtta

SEQ ID NO: 109608 - DNA, 25 bp, Artificial
  probe
  misc_feature (1)..(25): SEQ ID NO: 5728; WAN024C9N_at; Start 143; Stop 167
caagaacttttgcaaattcagcagt

SEQ ID NO: 109609 - DNA, 25 bp, Artificial
  probe
  misc_feature (1)..(25): SEQ ID NO: 5728; WAN024C9N_at; Start 197; Stop 221
cagctacgaatttgttttcagcaac

SEQ ID NO: 109610 - DNA, 25 bp, Artificial
  probe
  misc_feature (1)..(25): SEQ ID NO: 5728; WAN024C9N_at; Start 122; Stop 146
tagaatcgatgctcaatgctgcaag

SEQ ID NO: 109611 - DNA, 25 bp, Artificial
  probe
  misc_feature (1)..(25): SEQ ID NO: 5728; WAN024C9N_at; Start 132; Stop 156
gctcaatgctgcaagaacttttgca

SEQ ID NO: 109612 - DNA, 25 bp, Artificial
  probe
  misc_feature (1)..(25): SEQ ID NO: 5728; WAN024C9N_at; Start 5; Stop 29
cgctatttgcgatgtcaagaacact

SEQ ID NO: 109613 - DNA, 25 bp, Artificial
  probe
  misc_feature (1)..(25): SEQ ID NO: 5728; WAN024C9N_at; Start 188; Stop 212
gagcgtctacagctacgaatttgtt

SEQ ID NO: 109614 - DNA, 25 bp, Artificial
  probe
  misc_feature (1)..(25): SEQ ID NO: 5728; WAN024C9N_at; Start 127; Stop 151
tcgatgctcaatgctgcaagaactt

SEQ ID NO: 109615 - DNA, 25 bp, Artificial
  probe
  misc_feature (1)..(25): SEQ ID NO: 5728; WAN024C9N_at; Start 180; Stop 204
aaatgaaagagcgtctacagctacg

SEQ ID NO: 109616 - DNA, 25 bp, Artificial
  probe
  misc_feature (1)..(25): SEQ ID NO: 5728; WAN024C9N_at; Start 13; Stop 37
gcgatgtcaagaacacttgcagttg

SEQ ID NO: 109617 - DNA, 25 bp, Artificial
  probe
  misc_feature (1)..(25): SEQ ID NO: 5728; WAN024C9N_at; Start 19; Stop 43
tcaagaacacttgcagttgtagcag

SEQ ID NO: 109618 - DNA, 25 bp, Artificial
  probe
  misc_feature (1)..(25): SEQ ID NO: 5728; WAN024C9N_at; Start 71; Stop 95
gagctgaaagagctgcgaattcatt

SEQ ID NO: 109619 - DNA, 25 bp, Artificial
  probe
  misc_feature (1)..(25): SEQ ID NO: 1796; WAN024C9O_at; Start 8; Stop 32
catcaaacacaactgattcatttgg

SEQ ID NO: 109620 - DNA, 25 bp, Artificial
  probe
  misc_feature (1)..(25): SEQ ID NO: 1796; WAN024C9O_at; Start 59; Stop 83
gaacaacttggccagcttctttacc

SEQ ID NO: 109621 - DNA, 25 bp, Artificial
  probe
  misc_feature (1)..(25): SEQ ID NO: 1796; WAN024C9O_at; Start 148; Stop 172
gctttaactgctgatttgatagtga

SEQ ID NO: 109622 - DNA, 25 bp, Artificial
  probe
  misc_feature (1)..(25): SEQ ID NO: 1796; WAN024C9O_at; Start 67; Stop 91
tggccagcttctttaccagtttggt

SEQ ID NO: 109623 - DNA, 25 bp, Artificial
  probe
  misc_feature (1)..(25): SEQ ID NO: 1796; WAN024C9O_at; Start 221; Stop 245
tcttttctggaacaacttgtacaac

SEQ ID NO: 109624 - DNA, 25 bp, Artificial
  probe
  misc_feature (1)..(25): SEQ ID NO: 1796; WAN024C9O_at; Start 99; Stop 123
tgttacgtttgccattgtgactgat

SEQ ID NO: 109625 - DNA, 25 bp, Artificial
  probe
  misc_feature (1)..(25): SEQ ID NO: 1796; WAN024C9O_at; Start 207; Stop 231
gataaggataacgttcttttctgga

SEQ ID NO: 109626 - DNA, 25 bp, Artificial
  probe
  misc_feature (1)..(25): SEQ ID NO: 1796; WAN024C9O_at; Start 184; Stop 208
ttagcacctggtacgttacctttga

SEQ ID NO: 109627 - DNA, 25 bp, Artificial
  probe
  misc_feature (1)..(25): SEQ ID NO: 1796; WAN024C9O_at; Start 174; Stop 198
aagagatttcttagcacctggtacg

SEQ ID NO: 109628 - DNA, 25 bp, Artificial
  probe
  misc_feature (1)..(25): SEQ ID NO: 1796; WAN024C9O_at; Start 176; Stop 200
gagatttcttagcacctggtacgtt

SEQ ID NO: 109629 - DNA, 25 bp, Artificial
  probe
  misc_feature (1)..(25): SEQ ID NO: 1796; WAN024C9O_at; Start 108; Stop 132
tgccattgtgactgatttccccttt

SEQ ID NO: 109630 - DNA, 25 bp, Artificial
  probe
  misc_feature (1)..(25): SEQ ID NO: 1796; WAN024C9O_at; Start 192; Stop 216
tggtacgttacctttgataaggata

SEQ ID NO: 109631 - DNA, 25 bp, Artificial
  probe
  misc_feature (1)..(25): SEQ ID NO: 1796; WAN024C9O_at; Start 155; Stop 179
ctgctgatttgatagtgataagaga

SEQ ID NO: 109632 - DNA, 25 bp, Artificial
  probe
  misc_feature (1)..(25): SEQ ID NO: 1796; WAN024C9O_at; Start 54; Stop 78
gctaagaacaacttggccagcttct

SEQ ID NO: 109633 - DNA, 25 bp, Artificial
  probe
  misc_feature (1)..(25): SEQ ID NO: 1796; WAN024C9O_at; Start 81; Stop 105
accagtttggtcaaataatgttacg

SEQ ID NO: 109634 - DNA, 25 bp, Artificial
  probe
  misc_feature (1)..(25): SEQ ID NO: 1796; WAN024C9O_at; Start 2; Stop 26
tgattacatcaaacacaactgattc

SEQ ID NO: 109635 - DNA, 25 bp, Artificial
  probe
  misc_feature (1)..(25): SEQ ID NO: 1796; WAN024C9O_at; Start 170; Stop 194
tgataagagatttcttagcacctgg

SEQ ID NO: 109636 - DNA, 25 bp, Artificial
  probe
  misc_feature (1)..(25): SEQ ID NO: 1796; WAN024C9O_at; Start 62; Stop 86
caacttggccagcttctttaccagt

SEQ ID NO: 109637 - DNA, 25 bp, Artificial
  probe
  misc_feature (1)..(25): SEQ ID NO: 1796; WAN024C9O_at; Start 30; Stop 54
tggttcgataccaaatactgcatcg

SEQ ID NO: 109638 - DNA, 25 bp, Artificial
  probe
  misc_feature (1)..(25): SEQ ID NO: 1796; WAN024C9O_at; Start 178; Stop 202
gatttcttagcacctggtacgttac

SEQ ID NO: 109639 - DNA, 25 bp, Artificial
  probe
  misc_feature (1)..(25): SEQ ID NO: 1796; WAN024C9O_at; Start 228; Stop 252
tggaacaacttgtacaacttcaagg

SEQ ID NO: 109640 - DNA, 25 bp, Artificial
  probe
  misc_feature (1)..(25): SEQ ID NO: 1796; WAN024C9O_at; Start 114; Stop 138
tgtgactgatttcccctttctttat

SEQ ID NO: 109641 - DNA, 25 bp, Artificial
  probe
  misc_feature (1)..(25): SEQ ID NO: 1796; WAN024C9O_at; Start 187; Stop 211
gcacctggtacgttacctttgataa

SEQ ID NO: 109642 - DNA, 25 bp, Artificial
  probe
  misc_feature (1)..(25): SEQ ID NO: 1796; WAN024C9O_at; Start 49; Stop 73
gcatcgctaagaacaacttggccag

SEQ ID NO: 109643 - DNA, 25 bp, Artificial
  probe
  misc_feature (1)..(25): SEQ ID NO: 1796; WAN024C9O_at; Start 36; Stop 60
gataccaaatactgcatcgctaaga

SEQ ID NO: 109644 - DNA, 25 bp, Artificial
  probe
  misc_feature (1)..(25): SEQ ID NO: 1796; WAN024C9O_at; Start 45; Stop 69
tactgcatcgctaagaacaacttgg

SEQ ID NO: 109645 - DNA, 25 bp, Artificial
  probe
  misc_feature (1)..(25): SEQ ID NO: 1796; WAN024C9O_at; Start 136; Stop 160
tattatttaccagctttaactgctg

SEQ ID NO: 109646 - DNA, 25 bp, Artificial
  probe
  misc_feature (1)..(25): SEQ ID NO: 1796; WAN024C9O_at; Start 41; Stop 65
caaatactgcatcgctaagaacaac

SEQ ID NO: 109647 - DNA, 25 bp, Artificial
  probe
  misc_feature (1)..(25): SEQ ID NO: 1796; WAN024C9O_at; Start 104; Stop 128
cgtttgccattgtgactgatttccc

SEQ ID NO: 109648 - DNA, 25 bp, Artificial
  probe
  misc_feature (1)..(25): SEQ ID NO: 1796; WAN024C9O_at; Start 233; Stop 257
caacttgtacaacttcaaggttttg

SEQ ID NO: 109649 - DNA, 25 bp, Artificial
  probe
  misc_feature (1)..(25): SEQ ID NO: 1796; WAN024C9O_at; Start 71; Stop 95
cagcttctttaccagtttggtcaaa

SEQ ID NO: 109650 - DNA, 25 bp, Artificial
  probe
  misc_feature (1)..(25): SEQ ID NO: 1796; WAN024C9O_at; Start 17; Stop 41
caactgattcatttggttcgatacc

SEQ ID NO: 109651 - DNA, 25 bp, Artificial
  probe
  misc_feature (1)..(25): SEQ ID NO: 1796; WAN024C9O_at; Start 89; Stop 113
ggtcaaataatgttacgtttgccat

SEQ ID NO: 109652 - DNA, 25 bp, Artificial
  probe
  misc_feature (1)..(25): SEQ ID NO: 1796; WAN024C9O_at; Start 52; Stop 76
tcgctaagaacaacttggccagctt

SEQ ID NO: 109653 - DNA, 25 bp, Artificial
  probe
  misc_feature (1)..(25): SEQ ID NO: 4165; WAN024C9P_at; Start 144; Stop 168
taggagccgtgttagctttcgctac

SEQ ID NO: 109654 - DNA, 25 bp, Artificial
  probe
  misc_feature (1)..(25): SEQ ID NO: 4165; WAN024C9P_at; Start 304; Stop 328
gatcaattcgccagcttcagtgaag

SEQ ID NO: 109655 - DNA, 25 bp, Artificial
  probe
  misc_feature (1)..(25): SEQ ID NO: 4165; WAN024C9P_at; Start 202; Stop 226
gcgtttgtcatcgaaaccaacttgg

SEQ ID NO: 109656 - DNA, 25 bp, Artificial
  probe
  misc_feature (1)..(25): SEQ ID NO: 4165; WAN024C9P_at; Start 53; Stop 77
tcaacaacgtctccagctgcgaatg

SEQ ID NO: 109657 - DNA, 25 bp, Artificial
  probe
  misc_feature (1)..(25): SEQ ID NO: 4165; WAN024C9P_at; Start 65; Stop 89
ccagctgcgaatgtttcaactgtaa

SEQ ID NO: 109658 - DNA, 25 bp, Artificial
  probe
  misc_feature (1)..(25): SEQ ID NO: 4165; WAN024C9P_at; Start 109; Stop 133
gccttcaacgtttttgaattcacga

SEQ ID NO: 109659 - DNA, 25 bp, Artificial
  probe
  misc_feature (1)..(25): SEQ ID NO: 4165; WAN024C9P_at; Start 248; Stop 272
tcaacagttttaacttgaagaacaa

SEQ ID NO: 109660 - DNA, 25 bp, Artificial
  probe
  misc_feature (1)..(25): SEQ ID NO: 4165; WAN024C9P_at; Start 217; Stop 241
accaacttggatagcgttgtatccg

SEQ ID NO: 109661 - DNA, 25 bp, Artificial
  probe
  misc_feature (1)..(25): SEQ ID NO: 4165; WAN024C9P_at; Start 298; Stop 322
tacagggatcaattcgccagcttca

SEQ ID NO: 109662 - DNA, 25 bp, Artificial
  probe
  misc_feature (1)..(25): SEQ ID NO: 4165; WAN024C9P_at; Start 85; Stop 109
tgtaatttcagcaccaacttccaag

SEQ ID NO: 109663 - DNA, 25 bp, Artificial
  probe
  misc_feature (1)..(25): SEQ ID NO: 4165; WAN024C9P_at; Start 332; Stop 356
tgagtcattcccacttttttcccta

SEQ ID NO: 109664 - DNA, 25 bp, Artificial
  probe
  misc_feature (1)..(25): SEQ ID NO: 4165; WAN024C9P_at; Start 59; Stop 83
acgtctccagctgcgaatgtttcaa

SEQ ID NO: 109665 - DNA, 25 bp, Artificial
  probe
  misc_feature (1)..(25): SEQ ID NO: 4165; WAN024C9P_at; Start 209; Stop 233
tcatcgaaaccaacttggatagcgt

SEQ ID NO: 109666 - DNA, 25 bp, Artificial
  probe
  misc_feature (1)..(25): SEQ ID NO: 4165; WAN024C9P_at; Start 89; Stop 113
atttcagcaccaacttccaagcctt

SEQ ID NO: 109667 - DNA, 25 bp, Artificial
  probe
  misc_feature (1)..(25): SEQ ID NO: 4165; WAN024C9P_at; Start 180; Stop 204
caggtttgttgctcaatacttcgcg

SEQ ID NO: 109668 - DNA, 25 bp, Artificial
  probe
  misc_feature (1)..(25): SEQ ID NO: 4165; WAN024C9P_at; Start 232; Stop 256
gttgtatccgtctgtttcaacagtt

SEQ ID NO: 109669 - DNA, 25 bp, Artificial
  probe
  misc_feature (1)..(25): SEQ ID NO: 4165; WAN024C9P_at; Start 163; Stop 187
cgctacatgtcctttagcaggtttg

SEQ ID NO: 109670 - DNA, 25 bp, Artificial
  probe
  misc_feature (1)..(25): SEQ ID NO: 4165; WAN024C9P_at; Start 127; Stop 151
ttcacgaatgaagcgcttaggagcc

SEQ ID NO: 109671 - DNA, 25 bp, Artificial
  probe
  misc_feature (1)..(25): SEQ ID NO: 4165; WAN024C9P_at; Start 292; Stop 316
aactgttacagggatcaattcgcca

SEQ ID NO: 109672 - DNA, 25 bp, Artificial
  probe
  misc_feature (1)..(25): SEQ ID NO: 4165; WAN024C9P_at; Start 193; Stop 217
caatacttcgcgtttgtcatcgaaa

SEQ ID NO: 109673 - DNA, 25 bp, Artificial
  probe
  misc_feature (1)..(25): SEQ ID NO: 4165; WAN024C9P_at; Start 73; Stop 97
gaatgtttcaactgtaatttcagca

SEQ ID NO: 109674 - DNA, 25 bp, Artificial
  probe
  misc_feature (1)..(25): SEQ ID NO: 4165; WAN024C9P_at; Start 270; Stop 294
caacgtttggagttgcttcaataac

SEQ ID NO: 109675 - DNA, 25 bp, Artificial
  probe
  misc_feature (1)..(25): SEQ ID NO: 4165; WAN024C9P_at; Start 170; Stop 194
tgtcctttagcaggtttgttgctca

SEQ ID NO: 109676 - DNA, 25 bp, Artificial
  probe
  misc_feature (1)..(25): SEQ ID NO: 4165; WAN024C9P_at; Start 47; Stop 71
gttacgtcaacaacgtctccagctg

SEQ ID NO: 109677 - DNA, 25 bp, Artificial
  probe
  misc_feature (1)..(25): SEQ ID NO: 4165; WAN024C9P_at; Start 136; Stop 160
gaagcgcttaggagccgtgttagct

SEQ ID NO: 109678 - DNA, 25 bp, Artificial
  probe
  misc_feature (1)..(25): SEQ ID NO: 4165; WAN024C9P_at; Start 261; Stop 285
cttgaagaacaacgtttggagttgc

SEQ ID NO: 109679 - DNA, 25 bp, Artificial
  probe
  misc_feature (1)..(25): SEQ ID NO: 4165; WAN024C9P_at; Start 2; Stop 26
tggcgtttgataacaccttggaaac

SEQ ID NO: 109680 - DNA, 25 bp, Artificial
  probe
  misc_feature (1)..(25): SEQ ID NO: 4165; WAN024C9P_at; Start 226; Stop 250
gatagcgttgtatccgtctgtttca

SEQ ID NO: 109681 - DNA, 25 bp, Artificial
  probe
  misc_feature (1)..(25): SEQ ID NO: 4165; WAN024C9P_at; Start 119; Stop 143
tttttgaattcacgaatgaagcgct

SEQ ID NO: 109682 - DNA, 25 bp, Artificial
  probe
  misc_feature (1)..(25): SEQ ID NO: 4165; WAN024C9P_at; Start 155; Stop 179
ttagctttcgctacatgtcctttag

SEQ ID NO: 109683 - DNA, 25 bp, Artificial
  probe
  misc_feature (1)..(25): SEQ ID NO: 4165; WAN024C9P_at; Start 131; Stop 155
cgaatgaagcgcttaggagccgtgt

SEQ ID NO: 109684 - DNA, 25 bp, Artificial
  probe
  misc_feature (1)..(25): SEQ ID NO: 4165; WAN024C9P_at; Start 279; Stop 303
gagttgcttcaataactgttacagg

SEQ ID NO: 109685 - DNA, 25 bp, Artificial
  probe
  misc_feature (1)..(25): SEQ ID NO: 4165; WAN024C9P_at; Start 311; Stop 335
tcgccagcttcagtgaagatttgag

SEQ ID NO: 109686 - DNA, 25 bp, Artificial
  probe
  misc_feature (1)..(25): SEQ ID NO: 4165; WAN024C9P_at; Start 321; Stop 345
cagtgaagatttgagtcattcccac

SEQ ID NO: 109687 - DNA, 25 bp, Artificial
  probe
  misc_feature (1)..(25): SEQ ID NO: 1312; WAN024C9Q_at; Start 214; Stop 238
gctaacacggctcctaagcgcttca

SEQ ID NO: 109688 - DNA, 25 bp, Artificial
  probe
  misc_feature (1)..(25): SEQ ID NO: 1312; WAN024C9Q_at; Start 57; Stop 81
tggcgaattgatccctgtaacagtt

SEQ ID NO: 109689 - DNA, 25 bp, Artificial
  probe
  misc_feature (1)..(25): SEQ ID NO: 1312; WAN024C9Q_at; Start 163; Stop 187
gacaaacgcgaagtattgagcaaca

SEQ ID NO: 109690 - DNA, 25 bp, Artificial
  probe
  misc_feature (1)..(25): SEQ ID NO: 1312; WAN024C9Q_at; Start 222; Stop 246
ggctcctaagcgcttcattcgtgaa

SEQ ID NO: 109691 - DNA, 25 bp, Artificial
  probe
  misc_feature (1)..(25): SEQ ID NO: 1312; WAN024C9Q_at; Start 186; Stop 210
caaacctgctaaaggacatgtagcg

SEQ ID NO: 109692 - DNA, 25 bp, Artificial
  probe
  misc_feature (1)..(25): SEQ ID NO: 1312; WAN024C9Q_at; Start 122; Stop 146
ttgaaacagacggatacaacgctat

SEQ ID NO: 109693 - DNA, 25 bp, Artificial
  probe
  misc_feature (1)..(25): SEQ ID NO: 1312; WAN024C9Q_at; Start 108; Stop 132
tcaagttaaaactgttgaaacagac

SEQ ID NO: 109694 - DNA, 25 bp, Artificial
  probe
  misc_feature (1)..(25): SEQ ID NO: 1312; WAN024C9Q_at; Start 442; Stop 466
gcacctaaccgcgtattcaaaggta

SEQ ID NO: 109695 - DNA, 25 bp, Artificial
  probe
  misc_feature (1)..(25): SEQ ID NO: 1312; WAN024C9Q_at; Start 287; Stop 311
cagttgaaacattcgcagctggaga

SEQ ID NO: 109696 - DNA, 25 bp, Artificial
  probe
  misc_feature (1)..(25): SEQ ID NO: 1312; WAN024C9Q_at; Start 409; Stop 433
taccaccgtcgtccaggttctatgg

SEQ ID NO: 109697 - DNA, 25 bp, Artificial
  probe
  misc_feature (1)..(25): SEQ ID NO: 1312; WAN024C9Q_at; Start 136; Stop 160
tacaacgctatccaagttggtttcg

SEQ ID NO: 109698 - DNA, 25 bp, Artificial
  probe
  misc_feature (1)..(25): SEQ ID NO: 1312; WAN024C9Q_at; Start 567; Stop 591
cgtaccaggtgctaagaaatctctt

SEQ ID NO: 109699 - DNA, 25 bp, Artificial
  probe
  misc_feature (1)..(25): SEQ ID NO: 1312; WAN024C9Q_at; Start 228; Stop 252
taagcgcttcattcgtgaattcaaa

SEQ ID NO: 109700 - DNA, 25 bp, Artificial
  probe
  misc_feature (1)..(25): SEQ ID NO: 1312; WAN024C9Q_at; Start 17; Stop 41
tagggaaaaaagtgggaatgactca

SEQ ID NO: 109701 - DNA, 25 bp, Artificial
  probe
  misc_feature (1)..(25): SEQ ID NO: 1312; WAN024C9Q_at; Start 172; Stop 196
gaagtattgagcaacaaacctgcta

SEQ ID NO: 109702 - DNA, 25 bp, Artificial
  probe
  misc_feature (1)..(25): SEQ ID NO: 1312; WAN024C9Q_at; Start 462; Stop 486
aggtaaaaaccttgcaggacgtatg

SEQ ID NO: 109703 - DNA, 25 bp, Artificial
  probe
  misc_feature (1)..(25): SEQ ID NO: 1312; WAN024C9Q_at; Start 88; Stop 112
gcaactccaaacgttgttcttcaag

SEQ ID NO: 109704 - DNA, 25 bp, Artificial
  probe
  misc_feature (1)..(25): SEQ ID NO: 1312; WAN024C9Q_at; Start 69; Stop 93
ccctgtaacagttattgaagcaact

SEQ ID NO: 109705 - DNA, 25 bp, Artificial
  probe
  misc_feature (1)..(25): SEQ ID NO: 1312; WAN024C9Q_at; Start 554; Stop 578
ttatcaaaggtaacgtaccaggtgc

SEQ ID NO: 109706 - DNA, 25 bp, Artificial
  probe
  misc_feature (1)..(25): SEQ ID NO: 1312; WAN024C9Q_at; Start 392; Stop 416
tggctcacggttctcgttaccaccg

SEQ ID NO: 109707 - DNA, 25 bp, Artificial
  probe
  misc_feature (1)..(25): SEQ ID NO: 1312; WAN024C9Q_at; Start 534; Stop 558
tccagaaaagaacgttatccttatc

SEQ ID NO: 109708 - DNA, 25 bp, Artificial
  probe
  misc_feature (1)..(25): SEQ ID NO: 1312; WAN024C9Q_at; Start 517; Stop 541
gaagttgtacaagttgttccagaaa

SEQ ID NO: 109709 - DNA, 25 bp, Artificial
  probe
  misc_feature (1)..(25): SEQ ID NO: 1312; WAN024C9Q_at; Start 46; Stop 70
ttcactgaagctggcgaattgatcc

SEQ ID NO: 109710 - DNA, 25 bp, Artificial
  probe
  misc_feature (1)..(25): SEQ ID NO: 1312; WAN024C9Q_at; Start 32; Stop 56
gaatgactcaaatcttcactgaagc

SEQ ID NO: 109711 - DNA, 25 bp, Artificial
  probe
  misc_feature (1)..(25): SEQ ID NO: 1312; WAN024C9Q_at; Start 148; Stop 172
caagttggtttcgatgacaaacgcg

SEQ ID NO: 109712 - DNA, 25 bp, Artificial
  probe
  misc_feature (1)..(25): SEQ ID NO: 1312; WAN024C9Q_at; Start 436; Stop 460
cctgttgcacctaaccgcgtattca

SEQ ID NO: 109713 - DNA, 25 bp, Artificial
  probe
  misc_feature (1)..(25): SEQ ID NO: 1312; WAN024C9Q_at; Start 195; Stop 219
taaaggacatgtagcgaaagctaac

SEQ ID NO: 109714 - DNA, 25 bp, Artificial
  probe
  misc_feature (1)..(25): SEQ ID NO: 1312; WAN024C9Q_at; Start 204; Stop 228
tgtagcgaaagctaacacggctcct

SEQ ID NO: 109715 - DNA, 25 bp, Artificial
  probe
  misc_feature (1)..(25): SEQ ID NO: 1312; WAN024C9Q_at; Start 605; Stop 629
cagcagttaaagctggtaaataact

SEQ ID NO: 109716 - DNA, 25 bp, Artificial
  probe
  misc_feature (1)..(25): SEQ ID NO: 1312; WAN024C9Q_at; Start 597; Stop 621
tatcaaatcagcagttaaagctggt

SEQ ID NO: 109717 - DNA, 25 bp, Artificial
  probe
  misc_feature (1)..(25): SEQ ID NO: 1312; WAN024C9Q_at; Start 241; Stop 265
cgtgaattcaaaaacgttgaaggct

SEQ ID NO: 109718 - DNA, 25 bp, Artificial
  probe
  misc_feature (1)..(25): SEQ ID NO: 1312; WAN024C9Q_at; Start 586; Stop 610
tctcttatcactatcaaatcagcag

SEQ ID NO: 109719 - DNA, 25 bp, Artificial
  probe
  misc_feature (1)..(25): SEQ ID NO: 1312; WAN024C9Q_at; Start 467; Stop 491
aaaaccttgcaggacgtatgggtgg

SEQ ID NO: 109720 - DNA, 25 bp, Artificial
  probe
  misc_feature (1)..(25): SEQ ID NO: 1312; WAN024C9Q_at; Start 79; Stop 103
gttattgaagcaactccaaacgttg

SEQ ID NO: 109721 - DNA, 25 bp, Artificial
  probe
  misc_feature (1)..(25): SEQ ID NO: 2388; WAN024C9R_at; Start 118; Stop 142
caacgcgcaagccttcgtcaaggaa

SEQ ID NO: 109722 - DNA, 25 bp, Artificial
  probe
  misc_feature (1)..(25): SEQ ID NO: 2388; WAN024C9R_at; Start 397; Stop 421
gctccaaaaactgctgaatttgcaa

SEQ ID NO: 109723 - DNA, 25 bp, Artificial
  probe
  misc_feature (1)..(25): SEQ ID NO: 2388; WAN024C9R_at; Start 271; Stop 295
ggaccaactccacgttcatacggct

SEQ ID NO: 109724 - DNA, 25 bp, Artificial
  probe
  misc_feature (1)..(25): SEQ ID NO: 2388; WAN024C9R_at; Start 198; Stop 222
tcaaaaaggaactggacgtgctcgt

SEQ ID NO: 109725 - DNA, 25 bp, Artificial
  probe
  misc_feature (1)..(25): SEQ ID NO: 2388; WAN024C9R_at; Start 430; Stop 454
gcagcattgagcatcgattctaaag

SEQ ID NO: 109726 - DNA, 25 bp, Artificial
  probe
  misc_feature (1)..(25): SEQ ID NO: 2388; WAN024C9R_at; Start 379; Stop 403
gacgctctttcatttacagctccaa

SEQ ID NO: 109727 - DNA, 25 bp, Artificial
  probe
  misc_feature (1)..(25): SEQ ID NO: 2388; WAN024C9R_at; Start 130; Stop 154
cttcgtcaaggaacacacgctgtta

SEQ ID NO: 109728 - DNA, 25 bp, Artificial
  probe
  misc_feature (1)..(25): SEQ ID NO: 2388; WAN024C9R_at; Start 472; Stop 496
gaaggaaatgaattcgcagctcttt

SEQ ID NO: 109729 - DNA, 25 bp, Artificial
  probe
  misc_feature (1)..(25): SEQ ID NO: 2388; WAN024C9R_at; Start 9; Stop 33
cgtaacattatttgaccaaactggt

SEQ ID NO: 109730 - DNA, 25 bp, Artificial
  probe
  misc_feature (1)..(25): SEQ ID NO: 2388; WAN024C9R_at; Start 167; Stop 191
cagtatcaggtggtggacgcaaacc

SEQ ID NO: 109731 - DNA, 25 bp, Artificial
  probe
  misc_feature (1)..(25): SEQ ID NO: 2388; WAN024C9R_at; Start 212; Stop 236
gacgtgctcgtcaaggttctatccg

SEQ ID NO: 109732 - DNA, 25 bp, Artificial
  probe
  misc_feature (1)..(25): SEQ ID NO: 2388; WAN024C9R_at; Start 363; Stop 387
caaattcgtagctgtagacgctctt

SEQ ID NO: 109733 - DNA, 25 bp, Artificial
  probe
  misc_feature (1)..(25): SEQ ID NO: 2388; WAN024C9R_at; Start 526; Stop 550
gcaactgctacaactgcaagtgttc

SEQ ID NO: 109734 - DNA, 25 bp, Artificial
  probe
  misc_feature (1)..(25): SEQ ID NO: 2388; WAN024C9R_at; Start 103; Stop 127
gatgtaatcatcagccaacgcgcaa

SEQ ID NO: 109735 - DNA, 25 bp, Artificial
  probe
  misc_feature (1)..(25): SEQ ID NO: 2388; WAN024C9R_at; Start 155; Stop 179
aaaaccgctctgcagtatcaggtgg

SEQ ID NO: 109736 - DNA, 25 bp, Artificial
  probe
  misc_feature (1)..(25): SEQ ID NO: 2388; WAN024C9R_at; Start 496; Stop 520
tcagctcgtaaccttccaaacgtga

SEQ ID NO: 109737 - DNA, 25 bp, Artificial
  probe
  misc_feature (1)..(25): SEQ ID NO: 2388; WAN024C9R_at; Start 284; Stop 308
gttcatacggctacaaacttccaca

SEQ ID NO: 109738 - DNA, 25 bp, Artificial
  probe
  misc_feature (1)..(25): SEQ ID NO: 2388; WAN024C9R_at; Start 557; Stop 581
tcgcaaatagcgacaaacttcttgt

SEQ ID NO: 109739 - DNA, 25 bp, Artificial
  probe
  misc_feature (1)..(25): SEQ ID NO: 2388; WAN024C9R_at; Start 510; Stop 534
tccaaacgtgaaagttgcaactgct

SEQ ID NO: 109740 - DNA, 25 bp, Artificial
  probe
  misc_feature (1)..(25): SEQ ID NO: 2388; WAN024C9R_at; Start 350; Stop 374
aagttgctgaaaacaaattcgtagc

SEQ ID NO: 109741 - DNA, 25 bp, Artificial
  probe
  misc_feature (1)..(25): SEQ ID NO: 2388; WAN024C9R_at; Start 229; Stop 253
tctatccgctcaccacaatggcgtg

SEQ ID NO: 109742 - DNA, 25 bp, Artificial
  probe
  misc_feature (1)..(25): SEQ ID NO: 2388; WAN024C9R_at; Start 256; Stop 280
ggtggtgttgtcttcggaccaactc

SEQ ID NO: 109743 - DNA, 25 bp, Artificial
  probe
  misc_feature (1)..(25): SEQ ID NO: 2388; WAN024C9R_at; Start 576; Stop 600
tcttgtcacacaagcagctatctct

SEQ ID NO: 109744 - DNA, 25 bp, Artificial
  probe
  misc_feature (1)..(25): SEQ ID NO: 2388; WAN024C9R_at; Start 25; Stop 49
caaactggtaaagaagctggccaag

SEQ ID NO: 109745 - DNA, 25 bp, Artificial
  probe
  misc_feature (1)..(25): SEQ ID NO: 2388; WAN024C9R_at; Start 605; Stop 629
tcgaggaggttcttgcataactaat

SEQ ID NO: 109746 - DNA, 25 bp, Artificial
  probe
  misc_feature (1)..(25): SEQ ID NO: 2388; WAN024C9R_at; Start 73; Stop 97
ggtatcgaaccaaatgaatcagttg

SEQ ID NO: 109747 - DNA, 25 bp, Artificial
  probe
  misc_feature (1)..(25): SEQ ID NO: 2388; WAN024C9R_at; Start 145; Stop 169
cacgctgttaaaaaccgctctgcag

SEQ ID NO: 109748 - DNA, 25 bp, Artificial
  probe
  misc_feature (1)..(25): SEQ ID NO: 2388; WAN024C9R_at; Start 541; Stop 565
gcaagtgttcttgacatcgcaaata

SEQ ID NO: 109749 - DNA, 25 bp, Artificial
  probe
  misc_feature (1)..(25): SEQ ID NO: 2388; WAN024C9R_at; Start 448; Stop 472
tctaaagttcttgttatccttgaag

SEQ ID NO: 109750 - DNA, 25 bp, Artificial
  probe
  misc_feature (1)..(25): SEQ ID NO: 2388; WAN024C9R_at; Start 590; Stop 614
cagctatctctaaaatcgaggaggt

SEQ ID NO: 109751 - DNA, 25 bp, Artificial
  probe
  misc_feature (1)..(25): SEQ ID NO: 2388; WAN024C9R_at; Start 418; Stop 442
gcaaaagttcttgcagcattgagca

SEQ ID NO: 109752 - DNA, 25 bp, Artificial
  probe
  misc_feature (1)..(25): SEQ ID NO: 2388; WAN024C9R_at; Start 60; Stop 84
cgatgcagtatttggtatcgaacca

SEQ ID NO: 109753 - DNA, 25 bp, Artificial
  probe
  misc_feature (1)..(25): SEQ ID NO: 2388; WAN024C9R_at; Start 481; Stop 505
gaattcgcagctctttcagctcgta

SEQ ID NO: 109754 - DNA, 25 bp, Artificial
  probe
  misc_feature (1)..(25): SEQ ID NO: 2388; WAN024C9R_at; Start 335; Stop 359
cagtttactctgaaaaagttgctga

SEQ ID NO: 109755 - DNA, 25 bp, Artificial
  probe
  misc_feature (1)..(25): SEQ ID NO: 1200; WAN024C9S_at; Start 1151; Stop 1175
aaaattttatctctgcagagggagc

SEQ ID NO: 109756 - DNA, 25 bp, Artificial
  probe
  misc_feature (1)..(25): SEQ ID NO: 1200; WAN024C9S_at; Start 532; Stop 556
ggagttgagcacactactgtttctg

SEQ ID NO: 109757 - DNA, 25 bp, Artificial
  probe
  misc_feature (1)..(25): SEQ ID NO: 1200; WAN024C9S_at; Start 805; Stop 829
tctccaatgaacgaaccagttgttg

SEQ ID NO: 109758 - DNA, 25 bp, Artificial
  probe
  misc_feature (1)..(25): SEQ ID NO: 1200; WAN024C9S_at; Start 1969; Stop 1993
gagtcgtttacttctcgaaagagag

SEQ ID NO: 109759 - DNA, 25 bp, Artificial
  probe
  misc_feature (1)..(25): SEQ ID NO: 1200; WAN024C9S_at; Start 1433; Stop 1457
taggattaggtcgtgtagctggaac

SEQ ID NO: 109760 - DNA, 25 bp, Artificial
  probe
  misc_feature (1)..(25): SEQ ID NO: 1200; WAN024C9S_at; Start 2005; Stop 2029
ttaaatccatctaatcctcagtggg

SEQ ID NO: 109761 - DNA, 25 bp, Artificial
  probe
  misc_feature (1)..(25): SEQ ID NO: 1200; WAN024C9S_at; Start 1517; Stop 1541
ttagccgagaagaagcgaaggcttt

SEQ ID NO: 109762 - DNA, 25 bp, Artificial
  probe
  misc_feature (1)..(25): SEQ ID NO: 1200; WAN024C9S_at; Start 2059; Stop 2083
aaaagcggtgatggacaaggagtac

SEQ ID NO: 109763 - DNA, 25 bp, Artificial
  probe
  misc_feature (1)..(25): SEQ ID NO: 1200; WAN024C9S_at; Start 1884; Stop 1908
gcatgccgaagataccccaggatat

SEQ ID NO: 109764 - DNA, 25 bp, Artificial
  probe
  misc_feature (1)..(25): SEQ ID NO: 1200; WAN024C9S_at; Start 937; Stop 961
gggacagctgtgacttctttaatcg

SEQ ID NO: 109765 - DNA, 25 bp, Artificial
  probe
  misc_feature (1)..(25): SEQ ID NO: 1200; WAN024C9S_at; Start 1448; Stop 1472
tagctggaacaagttttgcggcacc

SEQ ID NO: 109766 - DNA, 25 bp, Artificial
  probe
  misc_feature (1)..(25): SEQ ID NO: 1200; WAN024C9S_at; Start 660; Stop 684
gaccacggtcttgcttgatgaaaaa

SEQ ID NO: 109767 - DNA, 25 bp, Artificial
  probe
  misc_feature (1)..(25): SEQ ID NO: 1200; WAN024C9S_at; Start 645; Stop 669
taatatcatgaatcagaccacggtc

SEQ ID NO: 109768 - DNA, 25 bp, Artificial
  probe
  misc_feature (1)..(25): SEQ ID NO: 1200; WAN024C9S_at; Start 1950; Stop 1974
taatgtcaagcatattggagagtcg

SEQ ID NO: 109769 - DNA, 25 bp, Artificial
  probe
  misc_feature (1)..(25): SEQ ID NO: 1200; WAN024C9S_at; Start 2183; Stop 2207
tgcaagtagaagctcaagtagacct

SEQ ID NO: 109770 - DNA, 25 bp, Artificial
  probe
  misc_feature (1)..(25): SEQ ID NO: 1200; WAN024C9S_at; Start 1217; Stop 1241
tcatagctgggacaaatgcttcagt

SEQ ID NO: 109771 - DNA, 25 bp, Artificial
  probe
  misc_feature (1)..(25): SEQ ID NO: 1200; WAN024C9S_at; Start 898; Stop 922
tcacctgatattagcaaagatagcc

SEQ ID NO: 109772 - DNA, 25 bp, Artificial
  probe
  misc_feature (1)..(25): SEQ ID NO: 1200; WAN024C9S_at; Start 1165; Stop 1189
gcagagggagcattattagacgaaa

SEQ ID NO: 109773 - DNA, 25 bp, Artificial
  probe
  misc_feature (1)..(25): SEQ ID NO: 1200; WAN024C9S_at; Start 1017; Stop 1041
gaggcattttggtgtgtcactacaa

SEQ ID NO: 109774 - DNA, 25 bp, Artificial
  probe
  misc_feature (1)..(25): SEQ ID NO: 1200; WAN024C9S_at; Start 1899; Stop 1923
cccaggatatgtgagagaaaacgct

SEQ ID NO: 109775 - DNA, 25 bp, Artificial
  probe
  misc_feature (1)..(25): SEQ ID NO: 1200; WAN024C9S_at; Start 921; Stop 945
ccaagattacaagcatgggacagct

SEQ ID NO: 109776 - DNA, 25 bp, Artificial
  probe
  misc_feature (1)..(25): SEQ ID NO: 1200; WAN024C9S_at; Start 706; Stop 730
aaagcgccctatcttgtctccatga

SEQ ID NO: 109777 - DNA, 25 bp, Artificial
  probe
  misc_feature (1)..(25): SEQ ID NO: 1200; WAN024C9S_at; Start 968; Stop 992
gagccaatttgaaccctaatctgga

SEQ ID NO: 109778 - DNA, 25 bp, Artificial
  probe
  misc_feature (1)..(25): SEQ ID NO: 1200; WAN024C9S_at; Start 2146; Stop 2170
cagcaagctgaattacgcggttggc

SEQ ID NO: 109779 - DNA, 25 bp, Artificial
  probe
  misc_feature (1)..(25): SEQ ID NO: 1200; WAN024C9S_at; Start 265; Stop 289
cctaatgatactattgtgggagcaa

SEQ ID NO: 109780 - DNA, 25 bp, Artificial
  probe
  misc_feature (1)..(25): SEQ ID NO: 1200; WAN024C9S_at; Start 1500; Stop 1524
cattcatattatgggacttagccga

SEQ ID NO: 109781 - DNA, 25 bp, Artificial
  probe
  misc_feature (1)..(25): SEQ ID NO: 1200; WAN024C9S_at; Start 1324; Stop 1348
caatcagtgtcatattcacgagagg

SEQ ID NO: 109782 - DNA, 25 bp, Artificial
  probe
  misc_feature (1)..(25): SEQ ID NO: 1200; WAN024C9S_at; Start 240; Stop 264
caatgtaggaggagggaatccattc

SEQ ID NO: 109783 - DNA, 25 bp, Artificial
  probe
  misc_feature (1)..(25): SEQ ID NO: 1200; WAN024C9S_at; Start 1868; Stop 1892
taaataaagacaaccagcatgccga

SEQ ID NO: 109784 - DNA, 25 bp, Artificial
  probe
  misc_feature (1)..(25): SEQ ID NO: 1200; WAN024C9S_at; Start 1542; Stop 1566
gctaattgatgcagcaataccctgg

SEQ ID NO: 109785 - DNA, 25 bp, Artificial
  probe
  misc_feature (1)..(25): SEQ ID NO: 1200; WAN024C9S_at; Start 691; Stop 715
gaattgctactatcaaaagcgccct

SEQ ID NO: 109786 - DNA, 25 bp, Artificial
  probe
  misc_feature (1)..(25): SEQ ID NO: 1200; WAN024C9S_at; Start 1464; Stop 1488
tgcggcaccttttattgcaaggaaa

SEQ ID NO: 109787 - DNA, 25 bp, Artificial
  probe
  misc_feature (1)..(25): SEQ ID NO: 1200; WAN024C9S_at; Start 2045; Stop 2069
caatcgaacgtttgaaaagcggtga

SEQ ID NO: 109788 - DNA, 25 bp, Artificial
  probe
  misc_feature (1)..(25): SEQ ID NO: 1200; WAN024C9S_at; Start 1256; Stop 1280
gcaaaagaataggtgctcctgctga

SEQ ID NO: 109789 - DNA, 25 bp, Artificial
  probe
  misc_feature (1)..(25): SEQ ID NO: 1218; WAN024C9T_at; Start 304; Stop 328
tatctacgcatacaacaagaaaaaa

SEQ ID NO: 109790 - DNA, 25 bp, Artificial
  probe
  misc_feature (1)..(25): SEQ ID NO: 1218; WAN024C9T_at; Start 94; Stop 118
tatataagtaggacagagaacgagg

SEQ ID NO: 109791 - DNA, 25 bp, Artificial
  probe
  misc_feature (1)..(25): SEQ ID NO: 1218; WAN024C9T_at; Start 52; Stop 76
aaaacaagatatagggatttctacg

SEQ ID NO: 109792 - DNA, 25 bp, Artificial
  probe
  misc_feature (1)..(25): SEQ ID NO: 1218; WAN024C9T_at; Start 331; Stop 355
cttgagaaaggtaatgcaattgact

SEQ ID NO: 109793 - DNA, 25 bp, Artificial
  probe
  misc_feature (1)..(25): SEQ ID NO: 1218; WAN024C9T_at; Start 34; Stop 58
gatttgcaatatggtttgaaaacaa

SEQ ID NO: 109794 - DNA, 25 bp, Artificial
  probe
  misc_feature (1)..(25): SEQ ID NO: 1218; WAN024C9T_at; Start 61; Stop 85
tatagggatttctacgaattccaaa

SEQ ID NO: 109795 - DNA, 25 bp, Artificial
  probe
  misc_feature (1)..(25): SEQ ID NO: 1218; WAN024C9T_at; Start 380; Stop 404
ggacctctctccctgtaattaatca

SEQ ID NO: 109796 - DNA, 25 bp, Artificial
  probe
  misc_feature (1)..(25): SEQ ID NO: 1218; WAN024C9T_at; Start 215; Stop 239
caaaagataacgacctcatctcctc

SEQ ID NO: 109797 - DNA, 25 bp, Artificial
  probe
  misc_feature (1)..(25): SEQ ID NO: 1218; WAN024C9T_at; Start 634; Stop 658
tcaaatagttttgatgaagaacaaa

SEQ ID NO: 109798 - DNA, 25 bp, Artificial
  probe
  misc_feature (1)..(25): SEQ ID NO: 1218; WAN024C9T_at; Start 185; Stop 209
cagattttgaattgtcaattggtaa

SEQ ID NO: 109799 - DNA, 25 bp, Artificial
  probe
  misc_feature (1)..(25): SEQ ID NO: 1218; WAN024C9T_at; Start 236; Stop 260
cctcaagtatagaaataaaggagaa

SEQ ID NO: 109800 - DNA, 25 bp, Artificial
  probe
  misc_feature (1)..(25): SEQ ID NO: 1218; WAN024C9T_at; Start 724; Stop 748
gatattataaaaaattctgacatca

SEQ ID NO: 109801 - DNA, 25 bp, Artificial
  probe
  misc_feature (1)..(25): SEQ ID NO: 1218; WAN024C9T_at; Start 324; Stop 348
aaaaaatcttgagaaaggtaatgca

SEQ ID NO: 109802 - DNA, 25 bp, Artificial
  probe
  misc_feature (1)..(25): SEQ ID NO: 1218; WAN024C9T_at; Start 139; Stop 163
tatgagtctctattttctgataaag

SEQ ID NO: 109803 - DNA, 25 bp, Artificial
  probe
  misc_feature (1)..(25): SEQ ID NO: 1218; WAN024C9T_at; Start 177; Stop 201
aaattggtcagattttgaattgtca

SEQ ID NO: 109804 - DNA, 25 bp, Artificial
  probe
  misc_feature (1)..(25): SEQ ID NO: 1218; WAN024C9T_at; Start 220; Stop 244
gataacgacctcatctcctcaagta

SEQ ID NO: 109805 - DNA, 25 bp, Artificial
  probe
  misc_feature (1)..(25): SEQ ID NO: 1218; WAN024C9T_at; Start 23; Stop 47
gaaatggtttggatttgcaatatgg

SEQ ID NO: 109806 - DNA, 25 bp, Artificial
  probe
  misc_feature (1)..(25): SEQ ID NO: 1218; WAN024C9T_at; Start 346; Stop 370
gcaattgactttataagcactctag

SEQ ID NO: 109807 - DNA, 25 bp, Artificial
  probe
  misc_feature (1)..(25): SEQ ID NO: 1218; WAN024C9T_at; Start 391; Stop 415
cctgtaattaatcaacctgctatcg

SEQ ID NO: 109808 - DNA, 25 bp, Artificial
  probe
  misc_feature (1)..(25): SEQ ID NO: 1218; WAN024C9T_at; Start 98; Stop 122
taagtaggacagagaacgaggaaaa

SEQ ID NO: 109809 - DNA, 25 bp, Artificial
  probe
  misc_feature (1)..(25): SEQ ID NO: 1218; WAN024C9T_at; Start 226; Stop 250
gacctcatctcctcaagtatagaaa

SEQ ID NO: 109810 - DNA, 25 bp, Artificial
  probe
  misc_feature (1)..(25): SEQ ID NO: 1218; WAN024C9T_at; Start 87; Stop 111
taaggtttatataagtaggacagag

SEQ ID NO: 109811 - DNA, 25 bp, Artificial
  probe
  misc_feature (1)..(25): SEQ ID NO: 1218; WAN024C9T_at; Start 824; Stop 848
gttctgttcctgtcataatttacca

SEQ ID NO: 109812 - DNA, 25 bp, Artificial
  probe
  misc_feature (1)..(25): SEQ ID NO: 1218; WAN024C9T_at; Start 399; Stop 423
taatcaacctgctatcgataaaaaa

SEQ ID NO: 109813 - DNA, 25 bp, Artificial
  probe
  misc_feature (1)..(25): SEQ ID NO: 1218; WAN024C9T_at; Start 124; Stop 148
tattcaaatttcatttatgagtctc

SEQ ID NO: 109814 - DNA, 25 bp, Artificial
  probe
  misc_feature (1)..(25): SEQ ID NO: 1218; WAN024C9T_at; Start 105; Stop 129
gacagagaacgaggaaaaatattca

SEQ ID NO: 109815 - DNA, 25 bp, Artificial
  probe
  misc_feature (1)..(25): SEQ ID NO: 1218; WAN024C9T_at; Start 11; Stop 35
cttatatagttggaaatggtttgga

SEQ ID NO: 109816 - DNA, 25 bp, Artificial
  probe
  misc_feature (1)..(25): SEQ ID NO: 1218; WAN024C9T_at; Start 164; Stop 188
taaatgattatgaaaattggtcaga

SEQ ID NO: 109817 - DNA, 25 bp, Artificial
  probe
  misc_feature (1)..(25): SEQ ID NO: 1218; WAN024C9T_at; Start 289; Stop 313
gatgatttaagagaatatctacgca

SEQ ID NO: 109818 - DNA, 25 bp, Artificial
  probe
  misc_feature (1)..(25): SEQ ID NO: 1218; WAN024C9T_at; Start 59; Stop 83
gatatagggatttctacgaattcca

SEQ ID NO: 109819 - DNA, 25 bp, Artificial
  probe
  misc_feature (1)..(25): SEQ ID NO: 1218; WAN024C9T_at; Start 279; Stop 303
tgaagtagttgatgatttaagagaa

SEQ ID NO: 109820 - DNA, 25 bp, Artificial
  probe
  misc_feature (1)..(25): SEQ ID NO: 1218; WAN024C9T_at; Start 264; Stop 288
tatagatgattttagtgaagtagtt

SEQ ID NO: 109821 - DNA, 25 bp, Artificial
  probe
  misc_feature (1)..(25): SEQ ID NO: 1218; WAN024C9T_at; Start 375; Stop 399
tatgaggacctctctccctgtaatt

SEQ ID NO: 109822 - DNA, 25 bp, Artificial
  probe
  misc_feature (1)..(25): SEQ ID NO: 1218; WAN024C9T_at; Start 298; Stop 322
agagaatatctacgcatacaacaag

SEQ ID NO: 109823 - DNA, 25 bp, Artificial
  probe
  misc_feature (1)..(25): SEQ ID NO: 3042; WAN024C9U_at; Start 39; Stop 63
cctgtggaaagcgactatgaatttc

SEQ ID NO: 109824 - DNA, 25 bp, Artificial
  probe
  misc_feature (1)..(25): SEQ ID NO: 3042; WAN024C9U_at; Start 26; Stop 50
taaatcttaattccctgtggaaagc

SEQ ID NO: 109825 - DNA, 25 bp, Artificial
  probe
  misc_feature (1)..(25): SEQ ID NO: 3042; WAN024C9U_at; Start 202; Stop 226
gacgaagagagttggcaaaattgta

SEQ ID NO: 109826 - DNA, 25 bp, Artificial
  probe
  misc_feature (1)..(25): SEQ ID NO: 3042; WAN024C9U_at; Start 110; Stop 134
ggtgtcacatccataaccttgtcag

SEQ ID NO: 109827 - DNA, 25 bp, Artificial
  probe
  misc_feature (1)..(25): SEQ ID NO: 3042; WAN024C9U_at; Start 41; Stop 65
tgtggaaagcgactatgaatttctg

SEQ ID NO: 109828 - DNA, 25 bp, Artificial
  probe
  misc_feature (1)..(25): SEQ ID NO: 3042; WAN024C9U_at; Start 113; Stop 137
gtcacatccataaccttgtcagccg

SEQ ID NO: 109829 - DNA, 25 bp, Artificial
  probe
  misc_feature (1)..(25): SEQ ID NO: 3042; WAN024C9U_at; Start 162; Stop 186
tgtccacatcaaatacaacacgtct

SEQ ID NO: 109830 - DNA, 25 bp, Artificial
  probe
  misc_feature (1)..(25): SEQ ID NO: 3042; WAN024C9U_at; Start 147; Stop 171
gagccttgtcaatcttgtccacatc

SEQ ID NO: 109831 - DNA, 25 bp, Artificial
  probe
  misc_feature (1)..(25): SEQ ID NO: 3042; WAN024C9U_at; Start 109; Stop 133
gggtgtcacatccataaccttgtca

SEQ ID NO: 109832 - DNA, 25 bp, Artificial
  probe
  misc_feature (1)..(25): SEQ ID NO: 3042; WAN024C9U_at; Start 173; Stop 197
aatacaacacgtctcccatctcgtt

SEQ ID NO: 109833 - DNA, 25 bp, Artificial
  probe
  misc_feature (1)..(25): SEQ ID NO: 3042; WAN024C9U_at; Start 64; Stop 88
tgtaataattcgctcagtcagatca

SEQ ID NO: 109834 - DNA, 25 bp, Artificial
  probe
  misc_feature (1)..(25): SEQ ID NO: 3042; WAN024C9U_at; Start 145; Stop 169
gagagccttgtcaatcttgtccaca

SEQ ID NO: 109835 - DNA, 25 bp, Artificial
  probe
  misc_feature (1)..(25): SEQ ID NO: 3042; WAN024C9U_at; Start 37; Stop 61
tccctgtggaaagcgactatgaatt

SEQ ID NO: 109836 - DNA, 25 bp, Artificial
  probe
  misc_feature (1)..(25): SEQ ID NO: 3042; WAN024C9U_at; Start 159; Stop 183
tcttgtccacatcaaatacaacacg

SEQ ID NO: 109837 - DNA, 25 bp, Artificial
  probe
  misc_feature (1)..(25): SEQ ID NO: 3042; WAN024C9U_at; Start 200; Stop 224
tcgacgaagagagttggcaaaattg

SEQ ID NO: 109838 - DNA, 25 bp, Artificial
  probe
  misc_feature (1)..(25): SEQ ID NO: 3042; WAN024C9U_at; Start 23; Stop 47
tcgtaaatcttaattccctgtggaa

SEQ ID NO: 109839 - DNA, 25 bp, Artificial
  probe
  misc_feature (1)..(25): SEQ ID NO: 3042; WAN024C9U_at; Start 99; Stop 123
tttcaaccaggggtgtcacatccat

SEQ ID NO: 109840 - DNA, 25 bp, Artificial
  probe
  misc_feature (1)..(25): SEQ ID NO: 3042; WAN024C9U_at; Start 186; Stop 210
tcccatctcgtttctcgacgaagag

SEQ ID NO: 109841 - DNA, 25 bp, Artificial
  probe
  misc_feature (1)..(25): SEQ ID NO: 3042; WAN024C9U_at; Start 67; Stop 91
aataattcgctcagtcagatcattg

SEQ ID NO: 109842 - DNA, 25 bp, Artificial
  probe
  misc_feature (1)..(25): SEQ ID NO: 3042; WAN024C9U_at; Start 1; Stop 25
atgttctacgatattttgaatttcg

SEQ ID NO: 109843 - DNA, 25 bp, Artificial
  probe
  misc_feature (1)..(25): SEQ ID NO: 3042; WAN024C9U_at; Start 141; Stop 165
tgtggagagccttgtcaatcttgtc

SEQ ID NO: 109844 - DNA, 25 bp, Artificial
  probe
  misc_feature (1)..(25): SEQ ID NO: 3042; WAN024C9U_at; Start 167; Stop 191
acatcaaatacaacacgtctcccat

SEQ ID NO: 109845 - DNA, 25 bp, Artificial
  probe
  misc_feature (1)..(25): SEQ ID NO: 3042; WAN024C9U_at; Start 71; Stop 95
attcgctcagtcagatcattgaggc

SEQ ID NO: 109846 - DNA, 25 bp, Artificial
  probe
  misc_feature (1)..(25): SEQ ID NO: 3042; WAN024C9U_at; Start 195; Stop 219
gtttctcgacgaagagagttggcaa

SEQ ID NO: 109847 - DNA, 25 bp, Artificial
  probe
  misc_feature (1)..(25): SEQ ID NO: 3042; WAN024C9U_at; Start 198; Stop 222
tctcgacgaagagagttggcaaaat

SEQ ID NO: 109848 - DNA, 25 bp, Artificial
  probe
  misc_feature (1)..(25): SEQ ID NO: 3042; WAN024C9U_at; Start 44; Stop 68
ggaaagcgactatgaatttctgtaa

SEQ ID NO: 109849 - DNA, 25 bp, Artificial
  probe
  misc_feature (1)..(25): SEQ ID NO: 3042; WAN024C9U_at; Start 57; Stop 81
gaatttctgtaataattcgctcagt

SEQ ID NO: 109850 - DNA, 25 bp, Artificial
  probe
  misc_feature (1)..(25): SEQ ID NO: 3042; WAN024C9U_at; Start 188; Stop 212
ccatctcgtttctcgacgaagagag

SEQ ID NO: 109851 - DNA, 25 bp, Artificial
  probe
  misc_feature (1)..(25): SEQ ID NO: 3042; WAN024C9U_at; Start 193; Stop 217
tcgtttctcgacgaagagagttggc

SEQ ID NO: 109852 - DNA, 25 bp, Artificial
  probe
  misc_feature (1)..(25): SEQ ID NO: 3042; WAN024C9U_at; Start 205; Stop 229
gaagagagttggcaaaattgtaatt

SEQ ID NO: 109853 - DNA, 25 bp, Artificial
  probe
  misc_feature (1)..(25): SEQ ID NO: 3042; WAN024C9U_at; Start 7; Stop 31
tacgatattttgaatttcgtaaatc

SEQ ID NO: 109854 - DNA, 25 bp, Artificial
  probe
  misc_feature (1)..(25): SEQ ID NO: 3042; WAN024C9U_at; Start 33; Stop 57
taattccctgtggaaagcgactatg

SEQ ID NO: 109855 - DNA, 25 bp, Artificial
  probe
  misc_feature (1)..(25): SEQ ID NO: 3042; WAN024C9U_at; Start 30; Stop 54
tcttaattccctgtggaaagcgact

SEQ ID NO: 109856 - DNA, 25 bp, Artificial
  probe
  misc_feature (1)..(25): SEQ ID NO: 3042; WAN024C9U_at; Start 191; Stop 215
tctcgtttctcgacgaagagagttg

SEQ ID NO: 109857 - DNA, 25 bp, Artificial
  probe
  misc_feature (1)..(25): SEQ ID NO: 2058; WAN024C9V_at; Start 711; Stop 735
tggctgttcagctgaccgtatcgat

SEQ ID NO: 109858 - DNA, 25 bp, Artificial
  probe
  misc_feature (1)..(25): SEQ ID NO: 2058; WAN024C9V_at; Start 983; Stop 1007
taaacattcgcatcaagggtcttgg

SEQ ID NO: 109859 - DNA, 25 bp, Artificial
  probe
  misc_feature (1)..(25): SEQ ID NO: 2058; WAN024C9V_at; Start 1003; Stop 1027
cttggttcagaacaccgtacggcta

SEQ ID NO: 109860 - DNA, 25 bp, Artificial
  probe
  misc_feature (1)..(25): SEQ ID NO: 2058; WAN024C9V_at; Start 87; Stop 111
tgtggacaagattgacaaggctctc

SEQ ID NO: 109861 - DNA, 25 bp, Artificial
  probe
  misc_feature (1)..(25): SEQ ID NO: 2058; WAN024C9V_at; Start 279; Stop 303
tgcgctggctgaggagtatattact

SEQ ID NO: 109862 - DNA, 25 bp, Artificial
  probe
  misc_feature (1)..(25): SEQ ID NO: 2058; WAN024C9V_at; Start 1381; Stop 1405
taccgtgtcgaacgcactaaagagg

SEQ ID NO: 109863 - DNA, 25 bp, Artificial
  probe
  misc_feature (1)..(25): SEQ ID NO: 2058; WAN024C9V_at; Start 311; Stop 335
cacagagggattttgagcgctcaaa

SEQ ID NO: 109864 - DNA, 25 bp, Artificial
  probe
  misc_feature (1)..(25): SEQ ID NO: 2058; WAN024C9V_at; Start 260; Stop 284
tccttgaagccaaagaatatgcgct

SEQ ID NO: 109865 - DNA, 25 bp, Artificial
  probe
  misc_feature (1)..(25): SEQ ID NO: 2058; WAN024C9V_at; Start 1971; Stop 1995
gattgaccgttgctacaagtgtgac

SEQ ID NO: 109866 - DNA, 25 bp, Artificial
  probe
  misc_feature (1)..(25): SEQ ID NO: 2058; WAN024C9V_at; Start 295; Stop 319
tatattacttatcggacacagaggg

SEQ ID NO: 109867 - DNA, 25 bp, Artificial
  probe
  misc_feature (1)..(25): SEQ ID NO: 2058; WAN024C9V_at; Start 1873; Stop 1897
tattgtgagtatccagtccttcagc

SEQ ID NO: 109868 - DNA, 25 bp, Artificial
  probe
  misc_feature (1)..(25): SEQ ID NO: 2058; WAN024C9V_at; Start 726; Stop 750
ccgtatcgatgaaattttggcgcct

SEQ ID NO: 109869 - DNA, 25 bp, Artificial
  probe
  misc_feature (1)..(25): SEQ ID NO: 2058; WAN024C9V_at; Start 1579; Stop 1603
ccagatgctaaggaattcacgctag

SEQ ID NO: 109870 - DNA, 25 bp, Artificial
  probe
  misc_feature (1)..(25): SEQ ID NO: 2058; WAN024C9V_at; Start 1694; Stop 1718
tgacagaccgtttctgccgactaga

SEQ ID NO: 109871 - DNA, 25 bp, Artificial
  probe
  misc_feature (1)..(25): SEQ ID NO: 2058; WAN024C9V_at; Start 132; Stop 156
tatggatgtgacacccctggttgaa

SEQ ID NO: 109872 - DNA, 25 bp, Artificial
  probe
  misc_feature (1)..(25): SEQ ID NO: 2058; WAN024C9V_at; Start 1677; Stop 1701
aacaccatccgaaagtctgacagac

SEQ ID NO: 109873 - DNA, 25 bp, Artificial
  probe
  misc_feature (1)..(25): SEQ ID NO: 2058; WAN024C9V_at; Start 429; Stop 453
cactcagcgtgatttgacagcaggg

SEQ ID NO: 109874 - DNA, 25 bp, Artificial
  probe
  misc_feature (1)..(25): SEQ ID NO: 2058; WAN024C9V_at; Start 245; Stop 269
tcgtagaacatgaactccttgaagc

SEQ ID NO: 109875 - DNA, 25 bp, Artificial
  probe
  misc_feature (1)..(25): SEQ ID NO: 2058; WAN024C9V_at; Start 2173; Stop 2197
ggttcaacgattaaaatagctgggc

SEQ ID NO: 109876 - DNA, 25 bp, Artificial
  probe
  misc_feature (1)..(25): SEQ ID NO: 2058; WAN024C9V_at; Start 2147; Stop 2171
tcgctgcgcgtgtcaaacatatgaa

SEQ ID NO: 109877 - DNA, 25 bp, Artificial
  probe
  misc_feature (1)..(25): SEQ ID NO: 2058; WAN024C9V_at; Start 195; Stop 219
aattcatagtcgctttccacaggga

SEQ ID NO: 109878 - DNA, 25 bp, Artificial
  probe
  misc_feature (1)..(25): SEQ ID NO: 2058; WAN024C9V_at; Start 1847; Stop 1871
caggtgcgtcaggtggtttcatcca

SEQ ID NO: 109879 - DNA, 25 bp, Artificial
  probe
  misc_feature (1)..(25): SEQ ID NO: 2058; WAN024C9V_at; Start 461; Stop 485
ggaaatcaatcggactgcaaatgct

SEQ ID NO: 109880 - DNA, 25 bp, Artificial
  probe
  misc_feature (1)..(25): SEQ ID NO: 2058; WAN024C9V_at; Start 1524; Stop 1548
tatcggcttgtatgaagtagcgaca

SEQ ID NO: 109881 - DNA, 25 bp, Artificial
  probe
  misc_feature (1)..(25): SEQ ID NO: 2058; WAN024C9V_at; Start 1464; Stop 1488
taaagaagaaagtgttgaccagctc

SEQ ID NO: 109882 - DNA, 25 bp, Artificial
  probe
  misc_feature (1)..(25): SEQ ID NO: 2058; WAN024C9V_at; Start 681; Stop 705
cattgccaacgttgcttctagccag

SEQ ID NO: 109883 - DNA, 25 bp, Artificial
  probe
  misc_feature (1)..(25): SEQ ID NO: 2058; WAN024C9V_at; Start 646; Stop 670
tctatccagactgcgacagcacaga

SEQ ID NO: 109884 - DNA, 25 bp, Artificial
  probe
  misc_feature (1)..(25): SEQ ID NO: 2058; WAN024C9V_at; Start 1626; Stop 1650
ccgtgtagaagagtggtcagaccaa

SEQ ID NO: 109885 - DNA, 25 bp, Artificial
  probe
  misc_feature (1)..(25): SEQ ID NO: 2058; WAN024C9V_at; Start 1939; Stop 1963
gaccgtgtaggctatctaggcacca

SEQ ID NO: 109886 - DNA, 25 bp, Artificial
  probe
  misc_feature (1)..(25): SEQ ID NO: 2058; WAN024C9V_at; Start 1366; Stop 1390
gaagatgctcttgtttaccgtgtcg

SEQ ID NO: 109887 - DNA, 25 bp, Artificial
  probe
  misc_feature (1)..(25): SEQ ID NO: 2058; WAN024C9V_at; Start 1441; Stop 1465
ggtgcttttggccatcgtctaggta

SEQ ID NO: 109888 - DNA, 25 bp, Artificial
  probe
  misc_feature (1)..(25): SEQ ID NO: 2058; WAN024C9V_at; Start 620; Stop 644
gaaatgcagaggtagagagtcccaa

SEQ ID NO: 109889 - DNA, 25 bp, Artificial
  probe
  misc_feature (1)..(25): SEQ ID NO: 2058; WAN024C9V_at; Start 1331; Stop 1355
tctgggaaatcttcaacgagcgaat

SEQ ID NO: 109890 - DNA, 25 bp, Artificial
  probe
  misc_feature (1)..(25): SEQ ID NO: 2058; WAN024C9V_at; Start 1904; Stop 1928
caaaggccttggaagctgtctggga

SEQ ID NO: 109891 - DNA, 25 bp, Artificial
  probe
  misc_feature (1)..(25): SEQ ID NO: 2686; WAN024C9W_at; Start 182; Stop 206
gcgcatcgcggaaagcttggtctga

SEQ ID NO: 109892 - DNA, 25 bp, Artificial
  probe
  misc_feature (1)..(25): SEQ ID NO: 2686; WAN024C9W_at; Start 134; Stop 158
ggaagttggcaatctcaatttcagt

SEQ ID NO: 109893 - DNA, 25 bp, Artificial
  probe
  misc_feature (1)..(25): SEQ ID NO: 2686; WAN024C9W_at; Start 247; Stop 271
tccttaatcatacgaagaccttcca

SEQ ID NO: 109894 - DNA, 25 bp, Artificial
  probe
  misc_feature (1)..(25): SEQ ID NO: 2686; WAN024C9W_at; Start 71; Stop 95
cgctagctaggatcgtatcaaaaga

SEQ ID NO: 109895 - DNA, 25 bp, Artificial
  probe
  misc_feature (1)..(25): SEQ ID NO: 2686; WAN024C9W_at; Start 214; Stop 238
caagccttgcgaatcgctgcaatct

SEQ ID NO: 109896 - DNA, 25 bp, Artificial
  probe
  misc_feature (1)..(25): SEQ ID NO: 2686; WAN024C9W_at; Start 9; Stop 33
ggcttctcccaactccactggtttg

SEQ ID NO: 109897 - DNA, 25 bp, Artificial
  probe
  misc_feature (1)..(25): SEQ ID NO: 2686; WAN024C9W_at; Start 120; Stop 144
catgcggaaatcaaggaagttggca

SEQ ID NO: 109898 - DNA, 25 bp, Artificial
  probe
  misc_feature (1)..(25): SEQ ID NO: 2686; WAN024C9W_at; Start 222; Stop 246
gcgaatcgctgcaatctctgcctca

SEQ ID NO: 109899 - DNA, 25 bp, Artificial
  probe
  misc_feature (1)..(25): SEQ ID NO: 2686; WAN024C9W_at; Start 126; Stop 150
gaaatcaaggaagttggcaatctca

SEQ ID NO: 109900 - DNA, 25 bp, Artificial
  probe
  misc_feature (1)..(25): SEQ ID NO: 2686; WAN024C9W_at; Start 102; Stop 126
agatgctcccaactcacgcatgcgg

SEQ ID NO: 109901 - DNA, 25 bp, Artificial
  probe
  misc_feature (1)..(25): SEQ ID NO: 2686; WAN024C9W_at; Start 168; Stop 192
tttgataaagtcaagcgcatcgcgg

SEQ ID NO: 109902 - DNA, 25 bp, Artificial
  probe
  misc_feature (1)..(25): SEQ ID NO: 2686; WAN024C9W_at; Start 188; Stop 212
cgcggaaagcttggtctgagataga

SEQ ID NO: 109903 - DNA, 25 bp, Artificial
  probe
  misc_feature (1)..(25): SEQ ID NO: 2686; WAN024C9W_at; Start 255; Stop 279
catacgaagaccttccacaaactga

SEQ ID NO: 109904 - DNA, 25 bp, Artificial
  probe
  misc_feature (1)..(25): SEQ ID NO: 2686; WAN024C9W_at; Start 240; Stop 264
tgcctcatccttaatcatacgaaga

SEQ ID NO: 109905 - DNA, 25 bp, Artificial
  probe
  misc_feature (1)..(25): SEQ ID NO: 2686; WAN024C9W_at; Start 199; Stop 223
tggtctgagatagaacaagccttgc

SEQ ID NO: 109906 - DNA, 25 bp, Artificial
  probe
  misc_feature (1)..(25): SEQ ID NO: 2686; WAN024C9W_at; Start 18; Stop 42
caactccactggtttgtgcattgga

SEQ ID NO: 109907 - DNA, 25 bp, Artificial
  probe
  misc_feature (1)..(25): SEQ ID NO: 2686; WAN024C9W_at; Start 25; Stop 49
actggtttgtgcattggatgggcat

SEQ ID NO: 109908 - DNA, 25 bp, Artificial
  probe
  misc_feature (1)..(25): SEQ ID NO: 2686; WAN024C9W_at; Start 95; Stop 119
ataagccagatgctcccaactcacg

SEQ ID NO: 109909 - DNA, 25 bp, Artificial
  probe
  misc_feature (1)..(25): SEQ ID NO: 2686; WAN024C9W_at; Start 111; Stop 135
caactcacgcatgcggaaatcaagg

SEQ ID NO: 109910 - DNA, 25 bp, Artificial
  probe
  misc_feature (1)..(25): SEQ ID NO: 2686; WAN024C9W_at; Start 77; Stop 101
ctaggatcgtatcaaaagataagcc

SEQ ID NO: 109911 - DNA, 25 bp, Artificial
  probe
  misc_feature (1)..(25): SEQ ID NO: 2686; WAN024C9W_at; Start 23; Stop 47
ccactggtttgtgcattggatgggc

SEQ ID NO: 109912 - DNA, 25 bp, Artificial
  probe
  misc_feature (1)..(25): SEQ ID NO: 2686; WAN024C9W_at; Start 173; Stop 197
taaagtcaagcgcatcgcggaaagc

SEQ ID NO: 109913 - DNA, 25 bp, Artificial
  probe
  misc_feature (1)..(25): SEQ ID NO: 2686; WAN024C9W_at; Start 61; Stop 85
gaattgataccgctagctaggatcg

SEQ ID NO: 109914 - DNA, 25 bp, Artificial
  probe
  misc_feature (1)..(25): SEQ ID NO: 2686; WAN024C9W_at; Start 143; Stop 167
caatctcaatttcagtttttcctgg

SEQ ID NO: 109915 - DNA, 25 bp, Artificial
  probe
  misc_feature (1)..(25): SEQ ID NO: 2686; WAN024C9W_at; Start 116; Stop 140
cacgcatgcggaaatcaaggaagtt

SEQ ID NO: 109916 - DNA, 25 bp, Artificial
  probe
  misc_feature (1)..(25): SEQ ID NO: 2686; WAN024C9W_at; Start 52; Stop 76
ggtttagaagaattgataccgctag

SEQ ID NO: 109917 - DNA, 25 bp, Artificial
  probe
  misc_feature (1)..(25): SEQ ID NO: 2686; WAN024C9W_at; Start 209; Stop 233
tagaacaagccttgcgaatcgctgc

SEQ ID NO: 109918 - DNA, 25 bp, Artificial
  probe
  misc_feature (1)..(25): SEQ ID NO: 2686; WAN024C9W_at; Start 68; Stop 92
taccgctagctaggatcgtatcaaa

SEQ ID NO: 109919 - DNA, 25 bp, Artificial
  probe
  misc_feature (1)..(25): SEQ ID NO: 2686; WAN024C9W_at; Start 89; Stop 113
caaaagataagccagatgctcccaa

SEQ ID NO: 109920 - DNA, 25 bp, Artificial
  probe
  misc_feature (1)..(25): SEQ ID NO: 2686; WAN024C9W_at; Start 86; Stop 110
tatcaaaagataagccagatgctcc

SEQ ID NO: 109921 - DNA, 25 bp, Artificial
  probe
  misc_feature (1)..(25): SEQ ID NO: 2686; WAN024C9W_at; Start 161; Stop 185
ttcctggtttgataaagtcaagcgc

SEQ ID NO: 109922 - DNA, 25 bp, Artificial
  probe
  misc_feature (1)..(25): SEQ ID NO: 2686; WAN024C9W_at; Start 232; Stop 256
gcaatctctgcctcatccttaatca

SEQ ID NO: 109923 - DNA, 25 bp, Artificial
  probe
  misc_feature (1)..(25): SEQ ID NO: 2686; WAN024C9W_at; Start 58; Stop 82
gaagaattgataccgctagctagga

SEQ ID NO: 109924 - DNA, 25 bp, Artificial
  probe
  misc_feature (1)..(25): SEQ ID NO: 2686; WAN024C9W_at; Start 202; Stop 226
tctgagatagaacaagccttgcgaa

SEQ ID NO: 109925 - DNA, 25 bp, Artificial
  probe
  misc_feature (1)..(25): SEQ ID NO: 1166; WAN024C9X_at; Start 369; Stop 393
tcttcgtatgattaaggatgaggca

SEQ ID NO: 109926 - DNA, 25 bp, Artificial
  probe
  misc_feature (1)..(25): SEQ ID NO: 1166; WAN024C9X_at; Start 349; Stop 373
caaactcagtttgtggaaggtcttc

SEQ ID NO: 109927 - DNA, 25 bp, Artificial
  probe
  misc_feature (1)..(25): SEQ ID NO: 1166; WAN024C9X_at; Start 6; Stop 30
taaacgcgtacaagcatttctagct

SEQ ID NO: 109928 - DNA, 25 bp, Artificial
  probe
  misc_feature (1)..(25): SEQ ID NO: 1166; WAN024C9X_at; Start 969; Stop 993
caaatatggcgttcgtatcgaggat

SEQ ID NO: 109929 - DNA, 25 bp, Artificial
  probe
  misc_feature (1)..(25): SEQ ID NO: 1166; WAN024C9X_at; Start 175; Stop 199
gcagctaagcaagaaaccagtggtt

SEQ ID NO: 109930 - DNA, 25 bp, Artificial
  probe
  misc_feature (1)..(25): SEQ ID NO: 1166; WAN024C9X_at; Start 301; Stop 325
tattaccaccgtatgcaggcagctt

SEQ ID NO: 109931 - DNA, 25 bp, Artificial
  probe
  misc_feature (1)..(25): SEQ ID NO: 1166; WAN024C9X_at; Start 211; Stop 235
gctgatcgtgatgaattggctgtca

SEQ ID NO: 109932 - DNA, 25 bp, Artificial
  probe
  misc_feature (1)..(25): SEQ ID NO: 1166; WAN024C9X_at; Start 523; Stop 547
ggagcatctggcttatcttttgata

SEQ ID NO: 109933 - DNA, 25 bp, Artificial
  probe
  misc_feature (1)..(25): SEQ ID NO: 1166; WAN024C9X_at; Start 586; Stop 610
gcccatccaatgcacaaaccagtgg

SEQ ID NO: 109934 - DNA, 25 bp, Artificial
  probe
  misc_feature (1)..(25): SEQ ID NO: 1166; WAN024C9X_at; Start 540; Stop 564
ttttgatacgatcctagctagcggt

SEQ ID NO: 109935 - DNA, 25 bp, Artificial
  probe
  misc_feature (1)..(25): SEQ ID NO: 1166; WAN024C9X_at; Start 786; Stop 810
tgactttgacaaaatccctcgtgat

SEQ ID NO: 109936 - DNA, 25 bp, Artificial
  probe
  misc_feature (1)..(25): SEQ ID NO: 1166; WAN024C9X_at; Start 388; Stop 412
gaggcagagattgcagcgattcgca

SEQ ID NO: 109937 - DNA, 25 bp, Artificial
  probe
  misc_feature (1)..(25): SEQ ID NO: 1166; WAN024C9X_at; Start 991; Stop 1015
gatgatatcctgattacagagacag

SEQ ID NO: 109938 - DNA, 25 bp, Artificial
  probe
  misc_feature (1)..(25): SEQ ID NO: 1166; WAN024C9X_at; Start 633; Stop 657
ggacttcggctgtctctatgaccac

SEQ ID NO: 109939 - DNA, 25 bp, Artificial
  probe
  misc_feature (1)..(25): SEQ ID NO: 1166; WAN024C9X_at; Start 135; Stop 159
tgaccgtcaggtcttagtgacagac

SEQ ID NO: 109940 - DNA, 25 bp, Artificial
  probe
  misc_feature (1)..(25): SEQ ID NO: 1166; WAN024C9X_at; Start 562; Stop 586
ggtatcaattcttctaaaccccatg

SEQ ID NO: 109941 - DNA, 25 bp, Artificial
  probe
  misc_feature (1)..(25): SEQ ID NO: 1166; WAN024C9X_at; Start 191; Stop 215
ccagtggttttgagattgtggctga

SEQ ID NO: 109942 - DNA, 25 bp, Artificial
  probe
  misc_feature (1)..(25): SEQ ID NO: 1166; WAN024C9X_at; Start 841; Stop 865
tttactcacggcattggccacggta

SEQ ID NO: 109943 - DNA, 25 bp, Artificial
  probe
  misc_feature (1)..(25): SEQ ID NO: 1166; WAN024C9X_at; Start 105; Stop 129
gggctcaaacggaacagtctttatc

SEQ ID NO: 109944 - DNA, 25 bp, Artificial
  probe
  misc_feature (1)..(25): SEQ ID NO: 1166; WAN024C9X_at; Start 440; Stop 464
tccgcgatgcgcttgactttatcaa

SEQ ID NO: 109945 - DNA, 25 bp, Artificial
  probe
  misc_feature (1)..(25): SEQ ID NO: 1166; WAN024C9X_at; Start 857; Stop 881
gccacggtattggtctggatatcca

SEQ ID NO: 109946 - DNA, 25 bp, Artificial
  probe
  misc_feature (1)..(25): SEQ ID NO: 1166; WAN024C9X_at; Start 669; Stop 693
tatgacccggactatctatctaggg

SEQ ID NO: 109947 - DNA, 25 bp, Artificial
  probe
  misc_feature (1)..(25): SEQ ID NO: 1166; WAN024C9X_at; Start 506; Stop 530
tccgcatgcgtgagttgggagcatc

SEQ ID NO: 109948 - DNA, 25 bp, Artificial
  probe
  misc_feature (1)..(25): SEQ ID NO: 1166; WAN024C9X_at; Start 410; Stop 434
gcaaggcttgttctatctcagacca

SEQ ID NO: 109949 - DNA, 25 bp, Artificial
  probe
  misc_feature (1)..(25): SEQ ID NO: 1166; WAN024C9X_at; Start 655; Stop 679
cactatgtcagtgatatgacccgga

SEQ ID NO: 109950 - DNA, 25 bp, Artificial
  probe
  misc_feature (1)..(25): SEQ ID NO: 1166; WAN024C9X_at; Start 705; Stop 729
tgagcaggcagagatttacaatacg

SEQ ID NO: 109951 - DNA, 25 bp, Artificial
  probe
  misc_feature (1)..(25): SEQ ID NO: 1166; WAN024C9X_at; Start 233; Stop 257
tcattgcaggaattgttaaggacat

SEQ ID NO: 109952 - DNA, 25 bp, Artificial
  probe
  misc_feature (1)..(25): SEQ ID NO: 1166; WAN024C9X_at; Start 730; Stop 754
gttctaaaagctaaccaagccttga

SEQ ID NO: 109953 - DNA, 25 bp, Artificial
  probe
  misc_feature (1)..(25): SEQ ID NO: 1166; WAN024C9X_at; Start 425; Stop 449
tctcagaccaagctttccgcgatgc

SEQ ID NO: 109954 - DNA, 25 bp, Artificial
  probe
  misc_feature (1)..(25): SEQ ID NO: 1166; WAN024C9X_at; Start 153; Stop 177
gacagactctcgctatatcatcgca

SEQ ID NO: 109955 - DNA, 25 bp, Artificial
  probe
  misc_feature (1)..(25): SEQ ID NO: 1166; WAN024C9X_at; Start 765; Stop 789
taaggcaggcttaggtttccgtgac

SEQ ID NO: 109956 - DNA, 25 bp, Artificial
  probe
  misc_feature (1)..(25): SEQ ID NO: 1166; WAN024C9X_at; Start 600; Stop 624
caaaccagtggagttgggagaagcc

SEQ ID NO: 109957 - DNA, 25 bp, Artificial
  probe
  misc_feature (1)..(25): SEQ ID NO: 1166; WAN024C9X_at; Start 685; Stop 709
tatctagggcatgttagcgatgagc

SEQ ID NO: 109958 - DNA, 25 bp, Artificial
  probe
  misc_feature (1)..(25): SEQ ID NO: 1166; WAN024C9X_at; Start 750; Stop 774
cttgattgaccaagctaaggcaggc

SEQ ID NO: 109959 - DNA, 25 bp, Artificial
  probe
  misc_feature (1)..(25): SEQ ID NO: 2078; WAN024C9Y_at; Start 221; Stop 245
tacccgtctttctgaaccttctcga

SEQ ID NO: 109960 - DNA, 25 bp, Artificial
  probe
  misc_feature (1)..(25): SEQ ID NO: 2078; WAN024C9Y_at; Start 134; Stop 158
acgacatcgatattgtgttgcttgc

SEQ ID NO: 109961 - DNA, 25 bp, Artificial
  probe
  misc_feature (1)..(25): SEQ ID NO: 2078; WAN024C9Y_at; Start 55; Stop 79
ttctgcaatacgaagggcagcctca

SEQ ID NO: 109962 - DNA, 25 bp, Artificial
  probe
  misc_feature (1)..(25): SEQ ID NO: 2078; WAN024C9Y_at; Start 172; Stop 196
tggcacttcggtcacatcatagact

SEQ ID NO: 109963 - DNA, 25 bp, Artificial
  probe
  misc_feature (1)..(25): SEQ ID NO: 2078; WAN024C9Y_at; Start 166; Stop 190
caactctggcacttcggtcacatca

SEQ ID NO: 109964 - DNA, 25 bp, Artificial
  probe
  misc_feature (1)..(25): SEQ ID NO: 2078; WAN024C9Y_at; Start 102; Stop 126
gaatgccctccttgataacaatacg

SEQ ID NO: 109965 - DNA, 25 bp, Artificial
  probe
  misc_feature (1)..(25): SEQ ID NO: 2078; WAN024C9Y_at; Start 255; Stop 279
tatgttggccttttttcttgcggat

SEQ ID NO: 109966 - DNA, 25 bp, Artificial
  probe
  misc_feature (1)..(25): SEQ ID NO: 2078; WAN024C9Y_at; Start 142; Stop 166
gatattgtgttgcttgctcttagac

SEQ ID NO: 109967 - DNA, 25 bp, Artificial
  probe
  misc_feature (1)..(25): SEQ ID NO: 2078; WAN024C9Y_at; Start 93; Stop 117
gacgactacgaatgccctccttgat

SEQ ID NO: 109968 - DNA, 25 bp, Artificial
  probe
  misc_feature (1)..(25): SEQ ID NO: 2078; WAN024C9Y_at; Start 289; Stop 313
caagatctgcaagcgctggcgttca

SEQ ID NO: 109969 - DNA, 25 bp, Artificial
  probe
  misc_feature (1)..(25): SEQ ID NO: 2078; WAN024C9Y_at; Start 211; Stop 235
gacacgaacatacccgtctttctga

SEQ ID NO: 109970 - DNA, 25 bp, Artificial
  probe
  misc_feature (1)..(25): SEQ ID NO: 2078; WAN024C9Y_at; Start 152; Stop 176
tgcttgctcttagacaactctggca

SEQ ID NO: 109971 - DNA, 25 bp, Artificial
  probe
  misc_feature (1)..(25): SEQ ID NO: 2078; WAN024C9Y_at; Start 78; Stop 102
caatggaatcaaagagacgactacg

SEQ ID NO: 109972 - DNA, 25 bp, Artificial
  probe
  misc_feature (1)..(25): SEQ ID NO: 2078; WAN024C9Y_at; Start 234; Stop 258
gaaccttctcgataacactcttatg

SEQ ID NO: 109973 - DNA, 25 bp, Artificial
  probe
  misc_feature (1)..(25): SEQ ID NO: 2078; WAN024C9Y_at; Start 159; Stop 183
tcttagacaactctggcacttcggt

SEQ ID NO: 109974 - DNA, 25 bp, Artificial
  probe
  misc_feature (1)..(25): SEQ ID NO: 2078; WAN024C9Y_at; Start 42; Stop 66
taatgacataaccttctgcaatacg

SEQ ID NO: 109975 - DNA, 25 bp, Artificial
  probe
  misc_feature (1)..(25): SEQ ID NO: 2078; WAN024C9Y_at; Start 207; Stop 231
cacggacacgaacatacccgtcttt

SEQ ID NO: 109976 - DNA, 25 bp, Artificial
  probe
  misc_feature (1)..(25): SEQ ID NO: 2078; WAN024C9Y_at; Start 242; Stop 266
tcgataacactcttatgttggcctt

SEQ ID NO: 109977 - DNA, 25 bp, Artificial
  probe
  misc_feature (1)..(25): SEQ ID NO: 2078; WAN024C9Y_at; Start 272; Stop 296
ttgcggatgacaggagccaagatct

SEQ ID NO: 109978 - DNA, 25 bp, Artificial
  probe
  misc_feature (1)..(25): SEQ ID NO: 2078; WAN024C9Y_at; Start 279; Stop 303
tgacaggagccaagatctgcaagcg

SEQ ID NO: 109979 - DNA, 25 bp, Artificial
  probe
  misc_feature (1)..(25): SEQ ID NO: 2078; WAN024C9Y_at; Start 65; Stop 89
cgaagggcagcctcaatggaatcaa

SEQ ID NO: 109980 - DNA, 25 bp, Artificial
  probe
  misc_feature (1)..(25): SEQ ID NO: 2078; WAN024C9Y_at; Start 179; Stop 203
tcggtcacatcatagacttccccat

SEQ ID NO: 109981 - DNA, 25 bp, Artificial
  probe
  misc_feature (1)..(25): SEQ ID NO: 2078; WAN024C9Y_at; Start 23; Stop 47
gagtcgtccatggtgtcgataatga

SEQ ID NO: 109982 - DNA, 25 bp, Artificial
  probe
  misc_feature (1)..(25): SEQ ID NO: 2078; WAN024C9Y_at; Start 69; Stop 93
gggcagcctcaatggaatcaaagag

SEQ ID NO: 109983 - DNA, 25 bp, Artificial
  probe
  misc_feature (1)..(25): SEQ ID NO: 2078; WAN024C9Y_at; Start 190; Stop 214
atagacttccccatccacacggaca

SEQ ID NO: 109984 - DNA, 25 bp, Artificial
  probe
  misc_feature (1)..(25): SEQ ID NO: 2078; WAN024C9Y_at; Start 50; Stop 74
taaccttctgcaatacgaagggcag

SEQ ID NO: 109985 - DNA, 25 bp, Artificial
  probe
  misc_feature (1)..(25): SEQ ID NO: 2078; WAN024C9Y_at; Start 126; Stop 150
ggtcaaccacgacatcgatattgtg

SEQ ID NO: 109986 - DNA, 25 bp, Artificial
  probe
  misc_feature (1)..(25): SEQ ID NO: 2078; WAN024C9Y_at; Start 120; Stop 144
caatacggtcaaccacgacatcgat

SEQ ID NO: 109987 - DNA, 25 bp, Artificial
  probe
  misc_feature (1)..(25): SEQ ID NO: 2078; WAN024C9Y_at; Start 267; Stop 291
ttttcttgcggatgacaggagccaa

SEQ ID NO: 109988 - DNA, 25 bp, Artificial
  probe
  misc_feature (1)..(25): SEQ ID NO: 2078; WAN024C9Y_at; Start 30; Stop 54
ccatggtgtcgataatgacataacc

SEQ ID NO: 109989 - DNA, 25 bp, Artificial
  probe
  misc_feature (1)..(25): SEQ ID NO: 2078; WAN024C9Y_at; Start 294; Stop 318
tctgcaagcgctggcgttcaggtaa

SEQ ID NO: 109990 - DNA, 25 bp, Artificial
  probe
  misc_feature (1)..(25): SEQ ID NO: 2078; WAN024C9Y_at; Start 112; Stop 136
cttgataacaatacggtcaaccacg

SEQ ID NO: 109991 - DNA, 25 bp, Artificial
  probe
  misc_feature (1)..(25): SEQ ID NO: 2078; WAN024C9Y_at; Start 86; Stop 110
tcaaagagacgactacgaatgccct

SEQ ID NO: 109992 - DNA, 25 bp, Artificial
  probe
  misc_feature (1)..(25): SEQ ID NO: 2078; WAN024C9Y_at; Start 260; Stop 284
tggccttttttcttgcggatgacag

SEQ ID NO: 109993 - DNA, 25 bp, Artificial
  probe
  misc_feature (1)..(25): SEQ ID NO: 2959; WAN024C9Z_at; Start 34; Stop 58
caaggcctggtcattgagacgatag

SEQ ID NO: 109994 - DNA, 25 bp, Artificial
  probe
  misc_feature (1)..(25): SEQ ID NO: 2959; WAN024C9Z_at; Start 1; Stop 25
atgtggcccttgctggccgcccaca

SEQ ID NO: 109995 - DNA, 25 bp, Artificial
  probe
  misc_feature (1)..(25): SEQ ID NO: 2959; WAN024C9Z_at; Start 165; Stop 189
cctcaaacggaatgtcgatatcgcg

SEQ ID NO: 109996 - DNA, 25 bp, Artificial
  probe
  misc_feature (1)..(25): SEQ ID NO: 2959; WAN024C9Z_at; Start 204; Stop 228
cattctcatagtggaaatggaattc

SEQ ID NO: 109997 - DNA, 25 bp, Artificial
  probe
  misc_feature (1)..(25): SEQ ID NO: 2959; WAN024C9Z_at; Start 88; Stop 112
catgtagagacgcatctgagtgcga

SEQ ID NO: 109998 - DNA, 25 bp, Artificial
  probe
  misc_feature (1)..(25): SEQ ID NO: 2959; WAN024C9Z_at; Start 168; Stop 192
caaacggaatgtcgatatcgcgcac

SEQ ID NO: 109999 - DNA, 25 bp, Artificial
  probe
  misc_feature (1)..(25): SEQ ID NO: 2959; WAN024C9Z_at; Start 172; Stop 196
cggaatgtcgatatcgcgcacgcca

SEQ ID NO: 110000 - DNA, 25 bp, Artificial
  probe
  misc_feature (1)..(25): SEQ ID NO: 2959; WAN024C9Z_at; Start 120; Stop 144
cgctattggtttcatggtaacgacg

SEQ ID NO: 110001 - DNA, 25 bp, Artificial
  probe
  misc_feature (1)..(25): SEQ ID NO: 2959; WAN024C9Z_at; Start 126; Stop 150
tggtttcatggtaacgacgtttgat

SEQ ID NO: 110002 - DNA, 25 bp, Artificial
  probe
  misc_feature (1)..(25): SEQ ID NO: 2959; WAN024C9Z_at; Start 63; Stop 87
gacaggttccgcaggtcagctcatt

SEQ ID NO: 110003 - DNA, 25 bp, Artificial
  probe
  misc_feature (1)..(25): SEQ ID NO: 2959; WAN024C9Z_at; Start 39; Stop 63
cctggtcattgagacgatagccttg

SEQ ID NO: 110004 - DNA, 25 bp, Artificial
  probe
  misc_feature (1)..(25): SEQ ID NO: 2959; WAN024C9Z_at; Start 54; Stop 78
gatagccttgacaggttccgcaggt

SEQ ID NO: 110005 - DNA, 25 bp, Artificial
  probe
  misc_feature (1)..(25): SEQ ID NO: 2959; WAN024C9Z_at; Start 32; Stop 56
gacaaggcctggtcattgagacgat

SEQ ID NO: 110006 - DNA, 25 bp, Artificial
  probe
  misc_feature (1)..(25): SEQ ID NO: 2959; WAN024C9Z_at; Start 67; Stop 91
ggttccgcaggtcagctcattcatg

SEQ ID NO: 110007 - DNA, 25 bp, Artificial
  probe
  misc_feature (1)..(25): SEQ ID NO: 2959; WAN024C9Z_at; Start 210; Stop 234
catagtggaaatggaattccttacc

SEQ ID NO: 110008 - DNA, 25 bp, Artificial
  probe
  misc_feature (1)..(25): SEQ ID NO: 2959; WAN024C9Z_at; Start 157; Stop 181
gataactccctcaaacggaatgtcg

SEQ ID NO: 110009 - DNA, 25 bp, Artificial
  probe
  misc_feature (1)..(25): SEQ ID NO: 2959; WAN024C9Z_at; Start 100; Stop 124
catctgagtgcgagtgtaatcgcta

SEQ ID NO: 110010 - DNA, 25 bp, Artificial
  probe
  misc_feature (1)..(25): SEQ ID NO: 2959; WAN024C9Z_at; Start 70; Stop 94
tccgcaggtcagctcattcatgtag

SEQ ID NO: 110011 - DNA, 25 bp, Artificial
  probe
  misc_feature (1)..(25): SEQ ID NO: 2959; WAN024C9Z_at; Start 45; Stop 69
cattgagacgatagccttgacaggt

SEQ ID NO: 110012 - DNA, 25 bp, Artificial
  probe
  misc_feature (1)..(25): SEQ ID NO: 2959; WAN024C9Z_at; Start 49; Stop 73
gagacgatagccttgacaggttccg

SEQ ID NO: 110013 - DNA, 25 bp, Artificial
  probe
  misc_feature (1)..(25): SEQ ID NO: 2959; WAN024C9Z_at; Start 135; Stop 159
ggtaacgacgtttgatattattgat

SEQ ID NO: 110014 - DNA, 25 bp, Artificial
  probe
  misc_feature (1)..(25): SEQ ID NO: 2959; WAN024C9Z_at; Start 183; Stop 207
tatcgcgcacgccaccaaattcatt

SEQ ID NO: 110015 - DNA, 25 bp, Artificial
  probe
  misc_feature (1)..(25): SEQ ID NO: 2959; WAN024C9Z_at; Start 77; Stop 101
gtcagctcattcatgtagagacgca

SEQ ID NO: 110016 - DNA, 25 bp, Artificial
  probe
  misc_feature (1)..(25): SEQ ID NO: 2959; WAN024C9Z_at; Start 28; Stop 52
gacagacaaggcctggtcattgaga

SEQ ID NO: 110017 - DNA, 25 bp, Artificial
  probe
  misc_feature (1)..(25): SEQ ID NO: 2959; WAN024C9Z_at; Start 59; Stop 83
ccttgacaggttccgcaggtcagct

SEQ ID NO: 110018 - DNA, 25 bp, Artificial
  probe
  misc_feature (1)..(25): SEQ ID NO: 2959; WAN024C9Z_at; Start 195; Stop 219
caccaaattcattctcatagtggaa

SEQ ID NO: 110019 - DNA, 25 bp, Artificial
  probe
  misc_feature (1)..(25): SEQ ID NO: 2959; WAN024C9Z_at; Start 92; Stop 116
tagagacgcatctgagtgcgagtgt

SEQ ID NO: 110020 - DNA, 25 bp, Artificial
  probe
  misc_feature (1)..(25): SEQ ID NO: 2959; WAN024C9Z_at; Start 150; Stop 174
tattattgataactccctcaaacgg

SEQ ID NO: 110021 - DNA, 25 bp, Artificial
  probe
  misc_feature (1)..(25): SEQ ID NO: 2959; WAN024C9Z_at; Start 73; Stop 97
gcaggtcagctcattcatgtagaga

SEQ ID NO: 110022 - DNA, 25 bp, Artificial
  probe
  misc_feature (1)..(25): SEQ ID NO: 2959; WAN024C9Z_at; Start 83; Stop 107
tcattcatgtagagacgcatctgag

SEQ ID NO: 110023 - DNA, 25 bp, Artificial
  probe
  misc_feature (1)..(25): SEQ ID NO: 2959; WAN024C9Z_at; Start 24; Stop 48
cacggacagacaaggcctggtcatt

SEQ ID NO: 110024 - DNA, 25 bp, Artificial
  probe
  misc_feature (1)..(25): SEQ ID NO: 2959; WAN024C9Z_at; Start 14; Stop 38
tggccgcccacacggacagacaagg

SEQ ID NO: 110025 - DNA, 25 bp, Artificial
  probe
  misc_feature (1)..(25): SEQ ID NO: 2959; WAN024C9Z_at; Start 216; Stop 240
ggaaatggaattccttaccatctga

SEQ ID NO: 110026 - DNA, 25 bp, Artificial
  probe
  misc_feature (1)..(25): SEQ ID NO: 2959; WAN024C9Z_at; Start 108; Stop 132
tgcgagtgtaatcgctattggtttc

SEQ ID NO: 110027 - DNA, 25 bp, Artificial
  probe
  misc_feature (1)..(25): SEQ ID NO: 2892; WAN024CA2_at; Start 169; Stop 193
catatttcccaagaactgacgagcg

SEQ ID NO: 110028 - DNA, 25 bp, Artificial
  probe
  misc_feature (1)..(25): SEQ ID NO: 2892; WAN024CA2_at; Start 126; Stop 150
tagctgggctgagaccatcaatggc

SEQ ID NO: 110029 - DNA, 25 bp, Artificial
  probe
  misc_feature (1)..(25): SEQ ID NO: 2892; WAN024CA2_at; Start 215; Stop 239
tagcgacgttgtccctccgcataga

SEQ ID NO: 110030 - DNA, 25 bp, Artificial
  probe
  misc_feature (1)..(25): SEQ ID NO: 2892; WAN024CA2_at; Start 22; Stop 46
cgtccccacacgtgcgtagaggaga

SEQ ID NO: 110031 - DNA, 25 bp, Artificial
  probe
  misc_feature (1)..(25): SEQ ID NO: 2892; WAN024CA2_at; Start 238; Stop 262
gagagtatcaaaagccagactggac

SEQ ID NO: 110032 - DNA, 25 bp, Artificial
  probe
  misc_feature (1)..(25): SEQ ID NO: 2892; WAN024CA2_at; Start 224; Stop 248
tgtccctccgcatagagagtatcaa

SEQ ID NO: 110033 - DNA, 25 bp, Artificial
  probe
  misc_feature (1)..(25): SEQ ID NO: 2892; WAN024CA2_at; Start 246; Stop 270
caaaagccagactggacttccctga

SEQ ID NO: 110034 - DNA, 25 bp, Artificial
  probe
  misc_feature (1)..(25): SEQ ID NO: 2892; WAN024CA2_at; Start 196; Stop 220
ggcggacaaactctctacatagcga

SEQ ID NO: 110035 - DNA, 25 bp, Artificial
  probe
  misc_feature (1)..(25): SEQ ID NO: 2892; WAN024CA2_at; Start 130; Stop 154
tgggctgagaccatcaatggcatct

SEQ ID NO: 110036 - DNA, 25 bp, Artificial
  probe
  misc_feature (1)..(25): SEQ ID NO: 2892; WAN024CA2_at; Start 230; Stop 254
tccgcatagagagtatcaaaagcca

SEQ ID NO: 110037 - DNA, 25 bp, Artificial
  probe
  misc_feature (1)..(25): SEQ ID NO: 2892; WAN024CA2_at; Start 99; Stop 123
tactagtcgttttctggtcgatgga

SEQ ID NO: 110038 - DNA, 25 bp, Artificial
  probe
  misc_feature (1)..(25): SEQ ID NO: 2892; WAN024CA2_at; Start 199; Stop 223
ggacaaactctctacatagcgacgt

SEQ ID NO: 110039 - DNA, 25 bp, Artificial
  probe
  misc_feature (1)..(25): SEQ ID NO: 2892; WAN024CA2_at; Start 11; Stop 35
atacagtaaggcgtccccacacgtg

SEQ ID NO: 110040 - DNA, 25 bp, Artificial
  probe
  misc_feature (1)..(25): SEQ ID NO: 2892; WAN024CA2_at; Start 158; Stop 182
tctggtttttccatatttcccaaga

SEQ ID NO: 110041 - DNA, 25 bp, Artificial
  probe
  misc_feature (1)..(25): SEQ ID NO: 2892; WAN024CA2_at; Start 2; Stop 26
tgtccgttgatacagtaaggcgtcc

SEQ ID NO: 110042 - DNA, 25 bp, Artificial
  probe
  misc_feature (1)..(25): SEQ ID NO: 2892; WAN024CA2_at; Start 118; Stop 142
gatggaaatagctgggctgagacca

SEQ ID NO: 110043 - DNA, 25 bp, Artificial
  probe
  misc_feature (1)..(25): SEQ ID NO: 2892; WAN024CA2_at; Start 76; Stop 100
tcccaccgtcgagcgaggattttta

SEQ ID NO: 110044 - DNA, 25 bp, Artificial
  probe
  misc_feature (1)..(25): SEQ ID NO: 2892; WAN024CA2_at; Start 178; Stop 202
caagaactgacgagcgtaggcggac

SEQ ID NO: 110045 - DNA, 25 bp, Artificial
  probe
  misc_feature (1)..(25): SEQ ID NO: 2892; WAN024CA2_at; Start 188; Stop 212
cgagcgtaggcggacaaactctcta

SEQ ID NO: 110046 - DNA, 25 bp, Artificial
  probe
  misc_feature (1)..(25): SEQ ID NO: 2892; WAN024CA2_at; Start 7; Stop 31
gttgatacagtaaggcgtccccaca

SEQ ID NO: 110047 - DNA, 25 bp, Artificial
  probe
  misc_feature (1)..(25): SEQ ID NO: 2892; WAN024CA2_at; Start 85; Stop 109
cgagcgaggatttttactagtcgtt

SEQ ID NO: 110048 - DNA, 25 bp, Artificial
  probe
  misc_feature (1)..(25): SEQ ID NO: 2892; WAN024CA2_at; Start 111; Stop 135
tctggtcgatggaaatagctgggct

SEQ ID NO: 110049 - DNA, 25 bp, Artificial
  probe
  misc_feature (1)..(25): SEQ ID NO: 2892; WAN024CA2_at; Start 144; Stop 168
caatggcatctacatctggtttttc

SEQ ID NO: 110050 - DNA, 25 bp, Artificial
  probe
  misc_feature (1)..(25): SEQ ID NO: 2892; WAN024CA2_at; Start 38; Stop 62
tagaggagacgcagatagtcattga

SEQ ID NO: 110051 - DNA, 25 bp, Artificial
  probe
  misc_feature (1)..(25): SEQ ID NO: 2892; WAN024CA2_at; Start 148; Stop 172
ggcatctacatctggtttttccata

SEQ ID NO: 110052 - DNA, 25 bp, Artificial
  probe
  misc_feature (1)..(25): SEQ ID NO: 2892; WAN024CA2_at; Start 219; Stop 243
gacgttgtccctccgcatagagagt

SEQ ID NO: 110053 - DNA, 25 bp, Artificial
  probe
  misc_feature (1)..(25): SEQ ID NO: 2892; WAN024CA2_at; Start 243; Stop 267
tatcaaaagccagactggacttccc

SEQ ID NO: 110054 - DNA, 25 bp, Artificial
  probe
  misc_feature (1)..(25): SEQ ID NO: 2892; WAN024CA2_at; Start 209; Stop 233
tctacatagcgacgttgtccctccg

SEQ ID NO: 110055 - DNA, 25 bp, Artificial
  probe
  misc_feature (1)..(25): SEQ ID NO: 2892; WAN024CA2_at; Start 173; Stop 197
tttcccaagaactgacgagcgtagg

SEQ ID NO: 110056 - DNA, 25 bp, Artificial
  probe
  misc_feature (1)..(25): SEQ ID NO: 2892; WAN024CA2_at; Start 48; Stop 72
gcagatagtcattgatttcagtcgt

SEQ ID NO: 110057 - DNA, 25 bp, Artificial
  probe
  misc_feature (1)..(25): SEQ ID NO: 2892; WAN024CA2_at; Start 82; Stop 106
cgtcgagcgaggatttttactagtc

SEQ ID NO: 110058 - DNA, 25 bp, Artificial
  probe
  misc_feature (1)..(25): SEQ ID NO: 2892; WAN024CA2_at; Start 28; Stop 52
cacacgtgcgtagaggagacgcaga

SEQ ID NO: 110059 - DNA, 25 bp, Artificial
  probe
  misc_feature (1)..(25): SEQ ID NO: 2892; WAN024CA2_at; Start 183; Stop 207
actgacgagcgtaggcggacaaact

SEQ ID NO: 110060 - DNA, 25 bp, Artificial
  probe
  misc_feature (1)..(25): SEQ ID NO: 2892; WAN024CA2_at; Start 138; Stop 162
gaccatcaatggcatctacatctgg

SEQ ID NO: 110061 - DNA, 25 bp, Artificial
  probe
  misc_feature (1)..(25): SEQ ID NO: 5741; WAN024CA3_at; Start 104; Stop 128
ttcctagtggaaagcgagccgtgac

SEQ ID NO: 110062 - DNA, 25 bp, Artificial
  probe
  misc_feature (1)..(25): SEQ ID NO: 5741; WAN024CA3_at; Start 204; Stop 228
tgggatgacacgtttgcctgacaag

SEQ ID NO: 110063 - DNA, 25 bp, Artificial
  probe
  misc_feature (1)..(25): SEQ ID NO: 5741; WAN024CA3_at; Start 146; Stop 170
cacgcgctcctatcacttcaataaa

SEQ ID NO: 110064 - DNA, 25 bp, Artificial
  probe
  misc_feature (1)..(25): SEQ ID NO: 5741; WAN024CA3_at; Start 201; Stop 225
tactgggatgacacgtttgcctgac

SEQ ID NO: 110065 - DNA, 25 bp, Artificial
  probe
  misc_feature (1)..(25): SEQ ID NO: 5741; WAN024CA3_at; Start 134; Stop 158
gcaagttgttctcacgcgctcctat

SEQ ID NO: 110066 - DNA, 25 bp, Artificial
  probe
  misc_feature (1)..(25): SEQ ID NO: 5741; WAN024CA3_at; Start 117; Stop 141
gcgagccgtgacattttgcaagttg

SEQ ID NO: 110067 - DNA, 25 bp, Artificial
  probe
  misc_feature (1)..(25): SEQ ID NO: 5741; WAN024CA3_at; Start 188; Stop 212
ggcgctcttctggtactgggatgac

SEQ ID NO: 110068 - DNA, 25 bp, Artificial
  probe
  misc_feature (1)..(25): SEQ ID NO: 5741; WAN024CA3_at; Start 184; Stop 208
acacggcgctcttctggtactggga

SEQ ID NO: 110069 - DNA, 25 bp, Artificial
  probe
  misc_feature (1)..(25): SEQ ID NO: 5741; WAN024CA3_at; Start 98; Stop 122
taaattttcctagtggaaagcgagc

SEQ ID NO: 110070 - DNA, 25 bp, Artificial
  probe
  misc_feature (1)..(25): SEQ ID NO: 5741; WAN024CA3_at; Start 60; Stop 84
agtcgatttccctgaacccgacaca

SEQ ID NO: 110071 - DNA, 25 bp, Artificial
  probe
  misc_feature (1)..(25): SEQ ID NO: 5741; WAN024CA3_at; Start 207; Stop 231
gatgacacgtttgcctgacaagtac

SEQ ID NO: 110072 - DNA, 25 bp, Artificial
  probe
  misc_feature (1)..(25): SEQ ID NO: 5741; WAN024CA3_at; Start 108; Stop 132
tagtggaaagcgagccgtgacattt

SEQ ID NO: 110073 - DNA, 25 bp, Artificial
  probe
  misc_feature (1)..(25): SEQ ID NO: 5741; WAN024CA3_at; Start 79; Stop 103
gacacacctgtcactgcgataaatt

SEQ ID NO: 110074 - DNA, 25 bp, Artificial
  probe
  misc_feature (1)..(25): SEQ ID NO: 5741; WAN024CA3_at; Start 169; Stop 193
aaacgaccatttccgacacggcgct

SEQ ID NO: 110075 - DNA, 25 bp, Artificial
  probe
  misc_feature (1)..(25): SEQ ID NO: 5741; WAN024CA3_at; Start 136; Stop 160
aagttgttctcacgcgctcctatca

SEQ ID NO: 110076 - DNA, 25 bp, Artificial
  probe
  misc_feature (1)..(25): SEQ ID NO: 5741; WAN024CA3_at; Start 164; Stop 188
caataaaacgaccatttccgacacg

SEQ ID NO: 110077 - DNA, 25 bp, Artificial
  probe
  misc_feature (1)..(25): SEQ ID NO: 5741; WAN024CA3_at; Start 54; Stop 78
gattagagtcgatttccctgaaccc

SEQ ID NO: 110078 - DNA, 25 bp, Artificial
  probe
  misc_feature (1)..(25): SEQ ID NO: 5741; WAN024CA3_at; Start 191; Stop 215
gctcttctggtactgggatgacacg

SEQ ID NO: 110079 - DNA, 25 bp, Artificial
  probe
  misc_feature (1)..(25): SEQ ID NO: 5741; WAN024CA3_at; Start 196; Stop 220
tctggtactgggatgacacgtttgc

SEQ ID NO: 110080 - DNA, 25 bp, Artificial
  probe
  misc_feature (1)..(25): SEQ ID NO: 5741; WAN024CA3_at; Start 57; Stop 81
tagagtcgatttccctgaacccgac

SEQ ID NO: 110081 - DNA, 25 bp, Artificial
  probe
  misc_feature (1)..(25): SEQ ID NO: 5741; WAN024CA3_at; Start 7; Stop 31
gaattacggttgagcttctgggcaa

SEQ ID NO: 110082 - DNA, 25 bp, Artificial
  probe
  misc_feature (1)..(25): SEQ ID NO: 5741; WAN024CA3_at; Start 26; Stop 50
gggcaatggcttttttgagaatgct

SEQ ID NO: 110083 - DNA, 25 bp, Artificial
  probe
  misc_feature (1)..(25): SEQ ID NO: 5741; WAN024CA3_at; Start 113; Stop 137
gaaagcgagccgtgacattttgcaa

SEQ ID NO: 110084 - DNA, 25 bp, Artificial
  probe
  misc_feature (1)..(25): SEQ ID NO: 5741; WAN024CA3_at; Start 14; Stop 38
ggttgagcttctgggcaatggcttt

SEQ ID NO: 110085 - DNA, 25 bp, Artificial
  probe
  misc_feature (1)..(25): SEQ ID NO: 5741; WAN024CA3_at; Start 210; Stop 234
gacacgtttgcctgacaagtactga

SEQ ID NO: 110086 - DNA, 25 bp, Artificial
  probe
  misc_feature (1)..(25): SEQ ID NO: 5741; WAN024CA3_at; Start 128; Stop 152
cattttgcaagttgttctcacgcgc

SEQ ID NO: 110087 - DNA, 25 bp, Artificial
  probe
  misc_feature (1)..(25): SEQ ID NO: 5741; WAN024CA3_at; Start 20; Stop 44
gcttctgggcaatggcttttttgag

SEQ ID NO: 110088 - DNA, 25 bp, Artificial
  probe
  misc_feature (1)..(25): SEQ ID NO: 5741; WAN024CA3_at; Start 1; Stop 25
ttgtctgaattacggttgagcttct

SEQ ID NO: 110089 - DNA, 25 bp, Artificial
  probe
  misc_feature (1)..(25): SEQ ID NO: 5741; WAN024CA3_at; Start 159; Stop 183
cacttcaataaaacgaccatttccg

SEQ ID NO: 110090 - DNA, 25 bp, Artificial
  probe
  misc_feature (1)..(25): SEQ ID NO: 5741; WAN024CA3_at; Start 131; Stop 155
tttgcaagttgttctcacgcgctcc

SEQ ID NO: 110091 - DNA, 25 bp, Artificial
  probe
  misc_feature (1)..(25): SEQ ID NO: 5741; WAN024CA3_at; Start 11; Stop 35
tacggttgagcttctgggcaatggc

SEQ ID NO: 110092 - DNA, 25 bp, Artificial
  probe
  misc_feature (1)..(25): SEQ ID NO: 5741; WAN024CA3_at; Start 47; Stop 71
tgctgttgattagagtcgatttccc

SEQ ID NO: 110093 - DNA, 25 bp, Artificial
  probe
  misc_feature (1)..(25): SEQ ID NO: 5741; WAN024CA3_at; Start 41; Stop 65
tgagaatgctgttgattagagtcga

SEQ ID NO: 110094 - DNA, 25 bp, Artificial
  probe
  misc_feature (1)..(25): SEQ ID NO: 5741; WAN024CA3_at; Start 85; Stop 109
cctgtcactgcgataaattttccta

SEQ ID NO: 110095 - DNA, 25 bp, Artificial
  probe
  misc_feature (1)..(25): SEQ ID NO: 2623; WAN024CA4_at; Start 2403; Stop 2427
tatgacggtcaacgatgcggtagaa

SEQ ID NO: 110096 - DNA, 25 bp, Artificial
  probe
  misc_feature (1)..(25): SEQ ID NO: 2623; WAN024CA4_at; Start 398; Stop 422
tcaacggacatggagctatcaatgc

SEQ ID NO: 110097 - DNA, 25 bp, Artificial
  probe
  misc_feature (1)..(25): SEQ ID NO: 2623; WAN024CA4_at; Start 2093; Stop 2117
atattgaccagagccctatcggacg

SEQ ID NO: 110098 - DNA, 25 bp, Artificial
  probe
  misc_feature (1)..(25): SEQ ID NO: 2623; WAN024CA4_at; Start 1886; Stop 1910
gagcgcgtgagaacaacttgcaaaa

SEQ ID NO: 110099 - DNA, 25 bp, Artificial
  probe
  misc_feature (1)..(25): SEQ ID NO: 2623; WAN024CA4_at; Start 1827; Stop 1851
tgtcatcccagtaccagaagagcgc

SEQ ID NO: 110100 - DNA, 25 bp, Artificial
  probe
  misc_feature (1)..(25): SEQ ID NO: 2623; WAN024CA4_at; Start 2591; Stop 2615
tctacattctggatgagccgacgac

SEQ ID NO: 110101 - DNA, 25 bp, Artificial
  probe
  misc_feature (1)..(25): SEQ ID NO: 2623; WAN024CA4_at; Start 309; Stop 333
taaaaatcctcgctcgacggtggga

SEQ ID NO: 110102 - DNA, 25 bp, Artificial
  probe
  misc_feature (1)..(25): SEQ ID NO: 2623; WAN024CA4_at; Start 1585; Stop 1609
tcaatcggtcttcaccagagggaca

SEQ ID NO: 110103 - DNA, 25 bp, Artificial
  probe
  misc_feature (1)..(25): SEQ ID NO: 2623; WAN024CA4_at; Start 382; Stop 406
gggacgccttactgtatcaacggac

SEQ ID NO: 110104 - DNA, 25 bp, Artificial
  probe
  misc_feature (1)..(25): SEQ ID NO: 2623; WAN024CA4_at; Start 1653; Stop 1677
caatactcttatcgtggtggaacac

SEQ ID NO: 110105 - DNA, 25 bp, Artificial
  probe
  misc_feature (1)..(25): SEQ ID NO: 2623; WAN024CA4_at; Start 1258; Stop 1282
caaggctatcgtctcaatgaccagg

SEQ ID NO: 110106 - DNA, 25 bp, Artificial
  probe
  misc_feature (1)..(25): SEQ ID NO: 2623; WAN024CA4_at; Start 2226; Stop 2250
cagtttcaacgtcaagggaggtcgc

SEQ ID NO: 110107 - DNA, 25 bp, Artificial
  probe
  misc_feature (1)..(25): SEQ ID NO: 2623; WAN024CA4_at; Start 256; Stop 280
gatgccattgatggtctcagcccag

SEQ ID NO: 110108 - DNA, 25 bp, Artificial
  probe
  misc_feature (1)..(25): SEQ ID NO: 2623; WAN024CA4_at; Start 2490; Stop 2514
ctatgtgaccttgggacagccagct

SEQ ID NO: 110109 - DNA, 25 bp, Artificial
  probe
  misc_feature (1)..(25): SEQ ID NO: 2623; WAN024CA4_at; Start 168; Stop 192
tctctatgcggagggacaacgtcgc

SEQ ID NO: 110110 - DNA, 25 bp, Artificial
  probe
  misc_feature (1)..(25): SEQ ID NO: 2623; WAN024CA4_at; Start 1911; Stop 1935
tgtcacggctcgctttccactagga

SEQ ID NO: 110111 - DNA, 25 bp, Artificial
  probe
  misc_feature (1)..(25): SEQ ID NO: 2623; WAN024CA4_at; Start 2733; Stop 2757
tatcattgacttgggacctgagggc

SEQ ID NO: 110112 - DNA, 25 bp, Artificial
  probe
  misc_feature (1)..(25): SEQ ID NO: 2623; WAN024CA4_at; Start 2797; Stop 2821
gaagaagtagctgccaacgaagcca

SEQ ID NO: 110113 - DNA, 25 bp, Artificial
  probe
  misc_feature (1)..(25): SEQ ID NO: 2623; WAN024CA4_at; Start 1749; Stop 1773
gattgttgcagcaggtacacctaag

SEQ ID NO: 110114 - DNA, 25 bp, Artificial
  probe
  misc_feature (1)..(25): SEQ ID NO: 2623; WAN024CA4_at; Start 2769; Stop 2793
tggaaccatcatcgtaacaggaact

SEQ ID NO: 110115 - DNA, 25 bp, Artificial
  probe
  misc_feature (1)..(25): SEQ ID NO: 2623; WAN024CA4_at; Start 134; Stop 158
caggttcagggaagtccagtctggc

SEQ ID NO: 110116 - DNA, 25 bp, Artificial
  probe
  misc_feature (1)..(25): SEQ ID NO: 2623; WAN024CA4_at; Start 2629; Stop 2653
gaggacattgctcgcctgctcaagg

SEQ ID NO: 110117 - DNA, 25 bp, Artificial
  probe
  misc_feature (1)..(25): SEQ ID NO: 2623; WAN024CA4_at; Start 495; Stop 519
tgtcatccgcaagaaaaaaggccaa

SEQ ID NO: 110118 - DNA, 25 bp, Artificial
  probe
  misc_feature (1)..(25): SEQ ID NO: 2623; WAN024CA4_at; Start 212; Stop 236
cctacgctcgtcagttcttgggaaa

SEQ ID NO: 110119 - DNA, 25 bp, Artificial
  probe
  misc_feature (1)..(25): SEQ ID NO: 2623; WAN024CA4_at; Start 1515; Stop 1539
tcagcgcattcgtttggcaacccag

SEQ ID NO: 110120 - DNA, 25 bp, Artificial
  probe
  misc_feature (1)..(25): SEQ ID NO: 2623; WAN024CA4_at; Start 1234; Stop 1258
aatgagctgacctgcggaacctgtc

SEQ ID NO: 110121 - DNA, 25 bp, Artificial
  probe
  misc_feature (1)..(25): SEQ ID NO: 2623; WAN024CA4_at; Start 979; Stop 1003
tatccaaacatgttagagcaggcca

SEQ ID NO: 110122 - DNA, 25 bp, Artificial
  probe
  misc_feature (1)..(25): SEQ ID NO: 2623; WAN024CA4_at; Start 2610; Stop 2634
gacgacagggcttcatacagaggac

SEQ ID NO: 110123 - DNA, 25 bp, Artificial
  probe
  misc_feature (1)..(25): SEQ ID NO: 2623; WAN024CA4_at; Start 2322; Stop 2346
tgaagtttgccacggaacccgctat

SEQ ID NO: 110124 - DNA, 25 bp, Artificial
  probe
  misc_feature (1)..(25): SEQ ID NO: 2623; WAN024CA4_at; Start 2058; Stop 2082
tattacagggattgagcatgtcgac

SEQ ID NO: 110125 - DNA, 25 bp, Artificial
  probe
  misc_feature (1)..(25): SEQ ID NO: 2623; WAN024CA4_at; Start 1770; Stop 1794
taagcaagtggctcgcaacagcaag

SEQ ID NO: 110126 - DNA, 25 bp, Artificial
  probe
  misc_feature (1)..(25): SEQ ID NO: 2623; WAN024CA4_at; Start 586; Stop 610
tatgatgtgaccgaagtgccagagt

SEQ ID NO: 110127 - DNA, 25 bp, Artificial
  probe
  misc_feature (1)..(25): SEQ ID NO: 2623; WAN024CA4_at; Start 2710; Stop 2734
gatgttatcaagacggcagaccata

SEQ ID NO: 110128 - DNA, 25 bp, Artificial
  probe
  misc_feature (1)..(25): SEQ ID NO: 2623; WAN024CA4_at; Start 465; Stop 489
tgaacgccagcgcttgcagatcttg

SEQ ID NO: 110129 - DNA, 25 bp, Artificial
  probe
  misc_feature (1)..(25): SEQ ID NO: 2148; WAN024CA5_at; Start 35; Stop 59
gaaaataccaaaatgaaaatctaga

SEQ ID NO: 110130 - DNA, 25 bp, Artificial
  probe
  misc_feature (1)..(25): SEQ ID NO: 2148; WAN024CA5_at; Start 208; Stop 232
gcatctacctgccagtttctcagct

SEQ ID NO: 110131 - DNA, 25 bp, Artificial
  probe
  misc_feature (1)..(25): SEQ ID NO: 2148; WAN024CA5_at; Start 50; Stop 74
aaaatctagaacttatcgatgtccg

SEQ ID NO: 110132 - DNA, 25 bp, Artificial
  probe
  misc_feature (1)..(25): SEQ ID NO: 2148; WAN024CA5_at; Start 252; Stop 276
caacgtagaaggtggtatgaatgct

SEQ ID NO: 110133 - DNA, 25 bp, Artificial
  probe
  misc_feature (1)..(25): SEQ ID NO: 2148; WAN024CA5_at; Start 88; Stop 112
ttccaagcaggacatgcaccaggtg

SEQ ID NO: 110134 - DNA, 25 bp, Artificial
  probe
  misc_feature (1)..(25): SEQ ID NO: 2148; WAN024CA5_at; Start 180; Stop 204
tgtcatttgtcaaggaggagtccgc

SEQ ID NO: 110135 - DNA, 25 bp, Artificial
  probe
  misc_feature (1)..(25): SEQ ID NO: 2148; WAN024CA5_at; Start 67; Stop 91
gatgtccgtgaagcacatgaattcc

SEQ ID NO: 110136 - DNA, 25 bp, Artificial
  probe
  misc_feature (1)..(25): SEQ ID NO: 2148; WAN024CA5_at; Start 15; Stop 39
cagcatggctgacttttatggaaaa

SEQ ID NO: 110137 - DNA, 25 bp, Artificial
  probe
  misc_feature (1)..(25): SEQ ID NO: 2148; WAN024CA5_at; Start 172; Stop 196
gaatactatgtcatttgtcaaggag

SEQ ID NO: 110138 - DNA, 25 bp, Artificial
  probe
  misc_feature (1)..(25): SEQ ID NO: 2148; WAN024CA5_at; Start 76; Stop 100
gaagcacatgaattccaagcaggac

SEQ ID NO: 110139 - DNA, 25 bp, Artificial
  probe
  misc_feature (1)..(25): SEQ ID NO: 2148; WAN024CA5_at; Start 221; Stop 245
agtttctcagctcccaaggcctcac

SEQ ID NO: 110140 - DNA, 25 bp, Artificial
  probe
  misc_feature (1)..(25): SEQ ID NO: 2148; WAN024CA5_at; Start 92; Stop 116
aagcaggacatgcaccaggtgccaa

SEQ ID NO: 110141 - DNA, 25 bp, Artificial
  probe
  misc_feature (1)..(25): SEQ ID NO: 2148; WAN024CA5_at; Start 2; Stop 26
tggaaactagtatcagcatggctga

SEQ ID NO: 110142 - DNA, 25 bp, Artificial
  probe
  misc_feature (1)..(25): SEQ ID NO: 2148; WAN024CA5_at; Start 183; Stop 207
catttgtcaaggaggagtccgctct

SEQ ID NO: 110143 - DNA, 25 bp, Artificial
  probe
  misc_feature (1)..(25): SEQ ID NO: 2148; WAN024CA5_at; Start 58; Stop 82
gaacttatcgatgtccgtgaagcac

SEQ ID NO: 110144 - DNA, 25 bp, Artificial
  probe
  misc_feature (1)..(25): SEQ ID NO: 2148; WAN024CA5_at; Start 148; Stop 172
tacaaagaactcaaacctgaccatg

SEQ ID NO: 110145 - DNA, 25 bp, Artificial
  probe
  misc_feature (1)..(25): SEQ ID NO: 2148; WAN024CA5_at; Start 22; Stop 46
gctgacttttatggaaaataccaaa

SEQ ID NO: 110146 - DNA, 25 bp, Artificial
  probe
  misc_feature (1)..(25): SEQ ID NO: 2148; WAN024CA5_at; Start 264; Stop 288
tggtatgaatgcttggcccggtcaa

SEQ ID NO: 110147 - DNA, 25 bp, Artificial
  probe
  misc_feature (1)..(25): SEQ ID NO: 2148; WAN024CA5_at; Start 123; Stop 147
tccattaagtaccttagagcaaggc

SEQ ID NO: 110148 - DNA, 25 bp, Artificial
  probe
  misc_feature (1)..(25): SEQ ID NO: 2148; WAN024CA5_at; Start 241; Stop 265
ctcaccgttaccaacgtagaaggtg

SEQ ID NO: 110149 - DNA, 25 bp, Artificial
  probe
  misc_feature (1)..(25): SEQ ID NO: 2148; WAN024CA5_at; Start 194; Stop 218
gaggagtccgctctgcatctacctg

SEQ ID NO: 110150 - DNA, 25 bp, Artificial
  probe
  misc_feature (1)..(25): SEQ ID NO: 2148; WAN024CA5_at; Start 85; Stop 109
gaattccaagcaggacatgcaccag

SEQ ID NO: 110151 - DNA, 25 bp, Artificial
  probe
  misc_feature (1)..(25): SEQ ID NO: 2148; WAN024CA5_at; Start 189; Stop 213
tcaaggaggagtccgctctgcatct

SEQ ID NO: 110152 - DNA, 25 bp, Artificial
  probe
  misc_feature (1)..(25): SEQ ID NO: 2148; WAN024CA5_at; Start 102; Stop 126
tgcaccaggtgccaaaaatcttcca

SEQ ID NO: 110153 - DNA, 25 bp, Artificial
  probe
  misc_feature (1)..(25): SEQ ID NO: 2148; WAN024CA5_at; Start 266; Stop 290
gtatgaatgcttggcccggtcaagt

SEQ ID NO: 110154 - DNA, 25 bp, Artificial
  probe
  misc_feature (1)..(25): SEQ ID NO: 2148; WAN024CA5_at; Start 63; Stop 87
tatcgatgtccgtgaagcacatgaa

SEQ ID NO: 110155 - DNA, 25 bp, Artificial
  probe
  misc_feature (1)..(25): SEQ ID NO: 2148; WAN024CA5_at; Start 71; Stop 95
tccgtgaagcacatgaattccaagc

SEQ ID NO: 110156 - DNA, 25 bp, Artificial
  probe
  misc_feature (1)..(25): SEQ ID NO: 2148; WAN024CA5_at; Start 159; Stop 183
caaacctgaccatgaatactatgtc

SEQ ID NO: 110157 - DNA, 25 bp, Artificial
  probe
  misc_feature (1)..(25): SEQ ID NO: 2148; WAN024CA5_at; Start 154; Stop 178
gaactcaaacctgaccatgaatact

SEQ ID NO: 110158 - DNA, 25 bp, Artificial
  probe
  misc_feature (1)..(25): SEQ ID NO: 2148; WAN024CA5_at; Start 258; Stop 282
agaaggtggtatgaatgcttggccc

SEQ ID NO: 110159 - DNA, 25 bp, Artificial
  probe
  misc_feature (1)..(25): SEQ ID NO: 2148; WAN024CA5_at; Start 141; Stop 165
gcaaggctacaaagaactcaaacct

SEQ ID NO: 110160 - DNA, 25 bp, Artificial
  probe
  misc_feature (1)..(25): SEQ ID NO: 2148; WAN024CA5_at; Start 109; Stop 133
ggtgccaaaaatcttccattaagta

SEQ ID NO: 110161 - DNA, 25 bp, Artificial
  probe
  misc_feature (1)..(25): SEQ ID NO: 2148; WAN024CA5_at; Start 136; Stop 160
ttagagcaaggctacaaagaactca

SEQ ID NO: 110162 - DNA, 25 bp, Artificial
  probe
  misc_feature (1)..(25): SEQ ID NO: 2148; WAN024CA5_at; Start 128; Stop 152
taagtaccttagagcaaggctacaa

SEQ ID NO: 110163 - DNA, 25 bp, Artificial
  probe
  misc_feature (1)..(25): SEQ ID NO: 813; WAN024CA6_at; Start 865; Stop 889
gccttctggttaatcgtctttatcg

SEQ ID NO: 110164 - DNA, 25 bp, Artificial
  probe
  misc_feature (1)..(25): SEQ ID NO: 813; WAN024CA6_at; Start 40; Stop 64
gagatcgatacgcttgaaccgggta

SEQ ID NO: 110165 - DNA, 25 bp, Artificial
  probe
  misc_feature (1)..(25): SEQ ID NO: 813; WAN024CA6_at; Start 307; Stop 331
tgtttggaaccactacctgtccttg

SEQ ID NO: 110166 - DNA, 25 bp, Artificial
  probe
  misc_feature (1)..(25): SEQ ID NO: 813; WAN024CA6_at; Start 779; Stop 803
tcgtcatgtccatcccaaccatggt

SEQ ID NO: 110167 - DNA, 25 bp, Artificial
  probe
  misc_feature (1)..(25): SEQ ID NO: 813; WAN024CA6_at; Start 265; Stop 289
ccgcttggtattatcatcactgagg

SEQ ID NO: 110168 - DNA, 25 bp, Artificial
  probe
  misc_feature (1)..(25): SEQ ID NO: 813; WAN024CA6_at; Start 625; Stop 649
gaagacctgcttgaagacaccctga

SEQ ID NO: 110169 - DNA, 25 bp, Artificial
  probe
  misc_feature (1)..(25): SEQ ID NO: 813; WAN024CA6_at; Start 55; Stop 79
gaaccgggtacttggatcaatctcg

SEQ ID NO: 110170 - DNA, 25 bp, Artificial
  probe
  misc_feature (1)..(25): SEQ ID NO: 813; WAN024CA6_at; Start 672; Stop 696
gatggcagatatttatggaaacgtc

SEQ ID NO: 110171 - DNA, 25 bp, Artificial
  probe
  misc_feature (1)..(25): SEQ ID NO: 813; WAN024CA6_at; Start 795; Stop 819
aaccatggtcttttctgcctacggg

SEQ ID NO: 110172 - DNA, 25 bp, Artificial
  probe
  misc_feature (1)..(25): SEQ ID NO: 813; WAN024CA6_at; Start 648; Stop 672
gattgaaacccaacaggccatcgag

SEQ ID NO: 110173 - DNA, 25 bp, Artificial
  probe
  misc_feature (1)..(25): SEQ ID NO: 813; WAN024CA6_at; Start 808; Stop 832
tctgcctacgggatgaactttaagg

SEQ ID NO: 110174 - DNA, 25 bp, Artificial
  probe
  misc_feature (1)..(25): SEQ ID NO: 813; WAN024CA6_at; Start 564; Stop 588
tgagcgcgtgattaagaaattgacc

SEQ ID NO: 110175 - DNA, 25 bp, Artificial
  probe
  misc_feature (1)..(25): SEQ ID NO: 813; WAN024CA6_at; Start 159; Stop 183
tgcggaagaaatgtctcgtattacc

SEQ ID NO: 110176 - DNA, 25 bp, Artificial
  probe
  misc_feature (1)..(25): SEQ ID NO: 813; WAN024CA6_at; Start 547; Stop 571
gcctccctcaaaacaaatgagcgcg

SEQ ID NO: 110177 - DNA, 25 bp, Artificial
  probe
  misc_feature (1)..(25): SEQ ID NO: 813; WAN024CA6_at; Start 513; Stop 537
catggaattggaaaaaactatcgtc

SEQ ID NO: 110178 - DNA, 25 bp, Artificial
  probe
  misc_feature (1)..(25): SEQ ID NO: 813; WAN024CA6_at; Start 285; Stop 309
tgaggaaaccattatcactacgtgt

SEQ ID NO: 110179 - DNA, 25 bp, Artificial
  probe
  misc_feature (1)..(25): SEQ ID NO: 813; WAN024CA6_at; Start 753; Stop 777
catgaaaaccttggcccttgtgacc

SEQ ID NO: 110180 - DNA, 25 bp, Artificial
  probe
  misc_feature (1)..(25): SEQ ID NO: 813; WAN024CA6_at; Start 250; Stop 274
tactacgtaaccatcccgcttggta

SEQ ID NO: 110181 - DNA, 25 bp, Artificial
  probe
  misc_feature (1)..(25): SEQ ID NO: 813; WAN024CA6_at; Start 457; Stop 481
gaacaaatcgaaagtcaactgcatc

SEQ ID NO: 110182 - DNA, 25 bp, Artificial
  probe
  misc_feature (1)..(25): SEQ ID NO: 813; WAN024CA6_at; Start 218; Stop 242
tgccggtcacggaggaaagaaataa

SEQ ID NO: 110183 - DNA, 25 bp, Artificial
  probe
  misc_feature (1)..(25): SEQ ID NO: 813; WAN024CA6_at; Start 585; Stop 609
gaccagttcaaccagcaatatcaag

SEQ ID NO: 110184 - DNA, 25 bp, Artificial
  probe
  misc_feature (1)..(25): SEQ ID NO: 813; WAN024CA6_at; Start 394; Stop 418
caaattctttatcgcaatgcagagc

SEQ ID NO: 110185 - DNA, 25 bp, Artificial
  probe
  misc_feature (1)..(25): SEQ ID NO: 813; WAN024CA6_at; Start 609; Stop 633
gaaataccttgaggacgaagacctg

SEQ ID NO: 110186 - DNA, 25 bp, Artificial
  probe
  misc_feature (1)..(25): SEQ ID NO: 813; WAN024CA6_at; Start 180; Stop 204
taccattgaagacgagtataccctg

SEQ ID NO: 110187 - DNA, 25 bp, Artificial
  probe
  misc_feature (1)..(25): SEQ ID NO: 813; WAN024CA6_at; Start 144; Stop 168
tcgagcaccgctcgatgcggaagaa

SEQ ID NO: 110188 - DNA, 25 bp, Artificial
  probe
  misc_feature (1)..(25): SEQ ID NO: 813; WAN024CA6_at; Start 848; Stop 872
taaacggagagccaaatgccttctg

SEQ ID NO: 110189 - DNA, 25 bp, Artificial
  probe
  misc_feature (1)..(25): SEQ ID NO: 813; WAN024CA6_at; Start 885; Stop 909
tatcgcctttgctatgagtgtctcg

SEQ ID NO: 110190 - DNA, 25 bp, Artificial
  probe
  misc_feature (1)..(25): SEQ ID NO: 813; WAN024CA6_at; Start 408; Stop 432
caatgcagagctttacctaacagcc

SEQ ID NO: 110191 - DNA, 25 bp, Artificial
  probe
  misc_feature (1)..(25): SEQ ID NO: 813; WAN024CA6_at; Start 331; Stop 355
gatgtctttatcaaccgtcgattgc

SEQ ID NO: 110192 - DNA, 25 bp, Artificial
  probe
  misc_feature (1)..(25): SEQ ID NO: 813; WAN024CA6_at; Start 531; Stop 555
tatcgtctatttcaaggcctccctc

SEQ ID NO: 110193 - DNA, 25 bp, Artificial
  probe
  misc_feature (1)..(25): SEQ ID NO: 813; WAN024CA6_at; Start 75; Stop 99
tctcgtcaatccgactcaaaatgaa

SEQ ID NO: 110194 - DNA, 25 bp, Artificial
  probe
  misc_feature (1)..(25): SEQ ID NO: 813; WAN024CA6_at; Start 689; Stop 713
gaaacgtcttgcattctatgacaga

SEQ ID NO: 110195 - DNA, 25 bp, Artificial
  probe
  misc_feature (1)..(25): SEQ ID NO: 813; WAN024CA6_at; Start 91; Stop 115
caaaatgaatcactcgaaatcgcca

SEQ ID NO: 110196 - DNA, 25 bp, Artificial
  probe
  misc_feature (1)..(25): SEQ ID NO: 813; WAN024CA6_at; Start 203; Stop 227
tgattatcgtagacgtgccggtcac

SEQ ID NO: 110197 - DNA, 25 bp, Artificial
  probe
  misc_feature (1)..(25): SEQ ID NO: 4060; WAN024CA7_at; Start 30; Stop 54
gaaaacgataaaagcaactgcaggt

SEQ ID NO: 110198 - DNA, 25 bp, Artificial
  probe
  misc_feature (1)..(25): SEQ ID NO: 4060; WAN024CA7_at; Start 43; Stop 67
gcaactgcaggtgcggttgcttttt

SEQ ID NO: 110199 - DNA, 25 bp, Artificial
  probe
  misc_feature (1)..(25): SEQ ID NO: 4060; WAN024CA7_at; Start 38; Stop 62
taaaagcaactgcaggtgcggttgc

SEQ ID NO: 110200 - DNA, 25 bp, Artificial
  probe
  misc_feature (1)..(25): SEQ ID NO: 4060; WAN024CA7_at; Start 17; Stop 41
ctatcaagaataagaaaacgataaa

SEQ ID NO: 110201 - DNA, 25 bp, Artificial
  probe
  misc_feature (1)..(25): SEQ ID NO: 4060; WAN024CA7_at; Start 31; Stop 55
aaaacgataaaagcaactgcaggtg

SEQ ID NO: 110202 - DNA, 25 bp, Artificial
  probe
  misc_feature (1)..(25): SEQ ID NO: 4060; WAN024CA7_at; Start 45; Stop 69
aactgcaggtgcggttgctttttca

SEQ ID NO: 110203 - DNA, 25 bp, Artificial
  probe
  misc_feature (1)..(25): SEQ ID NO: 4060; WAN024CA7_at; Start 15; Stop 39
cgctatcaagaataagaaaacgata

SEQ ID NO: 110204 - DNA, 25 bp, Artificial
  probe
  misc_feature (1)..(25): SEQ ID NO: 4060; WAN024CA7_at; Start 36; Stop 60
gataaaagcaactgcaggtgcggtt

SEQ ID NO: 110205 - DNA, 25 bp, Artificial
  probe
  misc_feature (1)..(25): SEQ ID NO: 4060; WAN024CA7_at; Start 44; Stop 68
caactgcaggtgcggttgctttttc

SEQ ID NO: 110206 - DNA, 25 bp, Artificial
  probe
  misc_feature (1)..(25): SEQ ID NO: 4060; WAN024CA7_at; Start 49; Stop 73
gcaggtgcggttgctttttcactta

SEQ ID NO: 110207 - DNA, 25 bp, Artificial
  probe
  misc_feature (1)..(25): SEQ ID NO: 4060; WAN024CA7_at; Start 35; Stop 59
cgataaaagcaactgcaggtgcggt

SEQ ID NO: 110208 - DNA, 25 bp, Artificial
  probe
  misc_feature (1)..(25): SEQ ID NO: 4060; WAN024CA7_at; Start 46; Stop 70
actgcaggtgcggttgctttttcac

SEQ ID NO: 110209 - DNA, 25 bp, Artificial
  probe
  misc_feature (1)..(25): SEQ ID NO: 4060; WAN024CA7_at; Start 26; Stop 50
ataagaaaacgataaaagcaactgc

SEQ ID NO: 110210 - DNA, 25 bp, Artificial
  probe
  misc_feature (1)..(25): SEQ ID NO: 4060; WAN024CA7_at; Start 51; Stop 75
aggtgcggttgctttttcacttact

SEQ ID NO: 110211 - DNA, 25 bp, Artificial
  probe
  misc_feature (1)..(25): SEQ ID NO: 4060; WAN024CA7_at; Start 32; Stop 56
aaacgataaaagcaactgcaggtgc

SEQ ID NO: 110212 - DNA, 25 bp, Artificial
  probe
  misc_feature (1)..(25): SEQ ID NO: 4060; WAN024CA7_at; Start 42; Stop 66
agcaactgcaggtgcggttgctttt

SEQ ID NO: 110213 - DNA, 25 bp, Artificial
  probe
  misc_feature (1)..(25): SEQ ID NO: 4060; WAN024CA7_at; Start 18; Stop 42
tatcaagaataagaaaacgataaaa

SEQ ID NO: 110214 - DNA, 25 bp, Artificial
  probe
  misc_feature (1)..(25): SEQ ID NO: 4060; WAN024CA7_at; Start 39; Stop 63
aaaagcaactgcaggtgcggttgct

SEQ ID NO: 110215 - DNA, 25 bp, Artificial
  probe
  misc_feature (1)..(25): SEQ ID NO: 4060; WAN024CA7_at; Start 50; Stop 74
caggtgcggttgctttttcacttac

SEQ ID NO: 110216 - DNA, 25 bp, Artificial
  probe
  misc_feature (1)..(25): SEQ ID NO: 4060; WAN024CA7_at; Start 16; Stop 40
gctatcaagaataagaaaacgataa

SEQ ID NO: 110217 - DNA, 25 bp, Artificial
  probe
  misc_feature (1)..(25): SEQ ID NO: 4060; WAN024CA7_at; Start 25; Stop 49
aataagaaaacgataaaagcaactg

SEQ ID NO: 110218 - DNA, 25 bp, Artificial
  probe
  misc_feature (1)..(25): SEQ ID NO: 4060; WAN024CA7_at; Start 28; Stop 52
aagaaaacgataaaagcaactgcag

SEQ ID NO: 110219 - DNA, 25 bp, Artificial
  probe
  misc_feature (1)..(25): SEQ ID NO: 4060; WAN024CA7_at; Start 20; Stop 44
tcaagaataagaaaacgataaaagc

SEQ ID NO: 110220 - DNA, 25 bp, Artificial
  probe
  misc_feature (1)..(25): SEQ ID NO: 4060; WAN024CA7_at; Start 37; Stop 61
ataaaagcaactgcaggtgcggttg

SEQ ID NO: 110221 - DNA, 25 bp, Artificial
  probe
  misc_feature (1)..(25): SEQ ID NO: 4060; WAN024CA7_at; Start 19; Stop 43
atcaagaataagaaaacgataaaag

SEQ ID NO: 110222 - DNA, 25 bp, Artificial
  probe
  misc_feature (1)..(25): SEQ ID NO: 4060; WAN024CA7_at; Start 40; Stop 64
aaagcaactgcaggtgcggttgctt

SEQ ID NO: 110223 - DNA, 25 bp, Artificial
  probe
  misc_feature (1)..(25): SEQ ID NO: 4060; WAN024CA7_at; Start 41; Stop 65
aagcaactgcaggtgcggttgcttt

SEQ ID NO: 110224 - DNA, 25 bp, Artificial
  probe
  misc_feature (1)..(25): SEQ ID NO: 4060; WAN024CA7_at; Start 48; Stop 72
tgcaggtgcggttgctttttcactt

SEQ ID NO: 110225 - DNA, 25 bp, Artificial
  probe
  misc_feature (1)..(25): SEQ ID NO: 4060; WAN024CA7_at; Start 34; Stop 58
acgataaaagcaactgcaggtgcgg

SEQ ID NO: 110226 - DNA, 25 bp, Artificial
  probe
  misc_feature (1)..(25): SEQ ID NO: 4060; WAN024CA7_at; Start 21; Stop 45
caagaataagaaaacgataaaagca

SEQ ID NO: 110227 - DNA, 25 bp, Artificial
  probe
  misc_feature (1)..(25): SEQ ID NO: 4060; WAN024CA7_at; Start 27; Stop 51
taagaaaacgataaaagcaactgca

SEQ ID NO: 110228 - DNA, 25 bp, Artificial
  probe
  misc_feature (1)..(25): SEQ ID NO: 4060; WAN024CA7_at; Start 29; Stop 53
agaaaacgataaaagcaactgcagg

SEQ ID NO: 110229 - DNA, 25 bp, Artificial
  probe
  misc_feature (1)..(25): SEQ ID NO: 4060; WAN024CA7_at; Start 33; Stop 57
aacgataaaagcaactgcaggtgcg

SEQ ID NO: 110230 - DNA, 25 bp, Artificial
  probe
  misc_feature (1)..(25): SEQ ID NO: 4060; WAN024CA7_at; Start 47; Stop 71
ctgcaggtgcggttgctttttcact

SEQ ID NO: 110231 - DNA, 25 bp, Artificial
  probe
  misc_feature (1)..(25): SEQ ID NO: 2706; WAN024CA8_at; Start 648; Stop 672
caagaaacgcttgaatatccgtagt

SEQ ID NO: 110232 - DNA, 25 bp, Artificial
  probe
  misc_feature (1)..(25): SEQ ID NO: 2706; WAN024CA8_at; Start 543; Stop 567
tgtcttctttgcaacaagcttccta

SEQ ID NO: 110233 - DNA, 25 bp, Artificial
  probe
  misc_feature (1)..(25): SEQ ID NO: 2706; WAN024CA8_at; Start 421; Stop 445
gccttctacttgatgtactactttg

SEQ ID NO: 110234 - DNA, 25 bp, Artificial
  probe
  misc_feature (1)..(25): SEQ ID NO: 2706; WAN024CA8_at; Start 93; Stop 117
catcaaagatgggaaaacagacgct

SEQ ID NO: 110235 - DNA, 25 bp, Artificial
  probe
  misc_feature (1)..(25): SEQ ID NO: 2706; WAN024CA8_at; Start 570; Stop 594
agctagccttaacccagtactggat

SEQ ID NO: 110236 - DNA, 25 bp, Artificial
  probe
  misc_feature (1)..(25): SEQ ID NO: 2706; WAN024CA8_at; Start 629; Stop 653
tagcccttcgcttctatctcaagaa

SEQ ID NO: 110237 - DNA, 25 bp, Artificial
  probe
  misc_feature (1)..(25): SEQ ID NO: 2706; WAN024CA8_at; Start 525; Stop 549
tatgttcctttggttgcttgtcttc

SEQ ID NO: 110238 - DNA, 25 bp, Artificial
  probe
  misc_feature (1)..(25): SEQ ID NO: 2706; WAN024CA8_at; Start 278; Stop 302
caaaactgatgattatggactcagc

SEQ ID NO: 110239 - DNA, 25 bp, Artificial
  probe
  misc_feature (1)..(25): SEQ ID NO: 2706; WAN024CA8_at; Start 194; Stop 218
tatacggcgcaccaactcattgggc

SEQ ID NO: 110240 - DNA, 25 bp, Artificial
  probe
  misc_feature (1)..(25): SEQ ID NO: 2706; WAN024CA8_at; Start 468; Stop 492
tatggatcgcagtcaacgtccacct

SEQ ID NO: 110241 - DNA, 25 bp, Artificial
  probe
  misc_feature (1)..(25): SEQ ID NO: 2706; WAN024CA8_at; Start 224; Stop 248
gcttcactgtcaaagagcagtacga

SEQ ID NO: 110242 - DNA, 25 bp, Artificial
  probe
  misc_feature (1)..(25): SEQ ID NO: 2706; WAN024CA8_at; Start 61; Stop 85
caagagtttgtccacattgctaccc

SEQ ID NO: 110243 - DNA, 25 bp, Artificial
  probe
  misc_feature (1)..(25): SEQ ID NO: 2706; WAN024CA8_at; Start 112; Stop 136
gacgctgaaatccagactatttttg

SEQ ID NO: 110244 - DNA, 25 bp, Artificial
  probe
  misc_feature (1)..(25): SEQ ID NO: 2706; WAN024CA8_at; Start 311; Stop 335
tcactagcctctttgcccttgtcag

SEQ ID NO: 110245 - DNA, 25 bp, Artificial
  probe
  misc_feature (1)..(25): SEQ ID NO: 2706; WAN024CA8_at; Start 364; Stop 388
caagctttcggctatggattgatta

SEQ ID NO: 110246 - DNA, 25 bp, Artificial
  probe
  misc_feature (1)..(25): SEQ ID NO: 2706; WAN024CA8_at; Start 139; Stop 163
gaagtcattccccaaatccttgagg

SEQ ID NO: 110247 - DNA, 25 bp, Artificial
  probe
  misc_feature (1)..(25): SEQ ID NO: 2706; WAN024CA8_at; Start 2; Stop 26
tggttctaagaggagttcctatgtc

SEQ ID NO: 110248 - DNA, 25 bp, Artificial
  probe
  misc_feature (1)..(25): SEQ ID NO: 2706; WAN024CA8_at; Start 211; Stop 235
cattgggctcatagcttcactgtca

SEQ ID NO: 110249 - DNA, 25 bp, Artificial
  probe
  misc_feature (1)..(25): SEQ ID NO: 2706; WAN024CA8_at; Start 238; Stop 262
gagcagtacgaaaaagagcatccaa

SEQ ID NO: 110250 - DNA, 25 bp, Artificial
  probe
  misc_feature (1)..(25): SEQ ID NO: 2706; WAN024CA8_at; Start 557; Stop 581
caagcttcctaccagctagccttaa

SEQ ID NO: 110251 - DNA, 25 bp, Artificial
  probe
  misc_feature (1)..(25): SEQ ID NO: 2706; WAN024CA8_at; Start 150; Stop 174
ccaaatccttgaggagcaatctaaa

SEQ ID NO: 110252 - DNA, 25 bp, Artificial
  probe
  misc_feature (1)..(25): SEQ ID NO: 2706; WAN024CA8_at; Start 293; Stop 317
tggactcagctcttttcatcactag

SEQ ID NO: 110253 - DNA, 25 bp, Artificial
  probe
  misc_feature (1)..(25): SEQ ID NO: 2706; WAN024CA8_at; Start 105; Stop 129
gaaaacagacgctgaaatccagact

SEQ ID NO: 110254 - DNA, 25 bp, Artificial
  probe
  misc_feature (1)..(25): SEQ ID NO: 2706; WAN024CA8_at; Start 126; Stop 150
gactatttttgaggaagtcattccc

SEQ ID NO: 110255 - DNA, 25 bp, Artificial
  probe
  misc_feature (1)..(25): SEQ ID NO: 2706; WAN024CA8_at; Start 595; Stop 619
ccattgccactagctattattggag

SEQ ID NO: 110256 - DNA, 25 bp, Artificial
  probe
  misc_feature (1)..(25): SEQ ID NO: 2706; WAN024CA8_at; Start 584; Stop 608
cagtactggatccattgccactagc

SEQ ID NO: 110257 - DNA, 25 bp, Artificial
  probe
  misc_feature (1)..(25): SEQ ID NO: 2706; WAN024CA8_at; Start 439; Stop 463
tactttgtttaccaatactatggac

SEQ ID NO: 110258 - DNA, 25 bp, Artificial
  probe
  misc_feature (1)..(25): SEQ ID NO: 2706; WAN024CA8_at; Start 79; Stop 103
gctacccaacaattcatcaaagatg

SEQ ID NO: 110259 - DNA, 25 bp, Artificial
  probe
  misc_feature (1)..(25): SEQ ID NO: 2706; WAN024CA8_at; Start 404; Stop 428
gactggttggtggatttgccttcta

SEQ ID NO: 110260 - DNA, 25 bp, Artificial
  probe
  misc_feature (1)..(25): SEQ ID NO: 2706; WAN024CA8_at; Start 490; Stop 514
cctttctggaaatctgtactagtta

SEQ ID NO: 110261 - DNA, 25 bp, Artificial
  probe
  misc_feature (1)..(25): SEQ ID NO: 2706; WAN024CA8_at; Start 11; Stop 35
gaggagttcctatgtctcaaattga

SEQ ID NO: 110262 - DNA, 25 bp, Artificial
  probe
  misc_feature (1)..(25): SEQ ID NO: 2706; WAN024CA8_at; Start 476; Stop 500
gcagtcaacgtccacctttctggaa

SEQ ID NO: 110263 - DNA, 25 bp, Artificial
  probe
  misc_feature (1)..(25): SEQ ID NO: 2706; WAN024CA8_at; Start 372; Stop 396
cggctatggattgattactcttcta

SEQ ID NO: 110264 - DNA, 25 bp, Artificial
  probe
  misc_feature (1)..(25): SEQ ID NO: 2706; WAN024CA8_at; Start 165; Stop 189
gcaatctaaaggtacaactgcccgt

SEQ ID NO: 110265 - DNA, 25 bp, Artificial
  probe
  misc_feature (1)..(25): SEQ ID NO: 6699; WAN024CA9_at; Start 3; Stop 27
gcaacatgaggtggttcatggttgt

SEQ ID NO: 110266 - DNA, 25 bp, Artificial
  probe
  misc_feature (1)..(25): SEQ ID NO: 6699; WAN024CA9_at; Start 11; Stop 35
aggtggttcatggttgtatccgaga

SEQ ID NO: 110267 - DNA, 25 bp, Artificial
  probe
  misc_feature (1)..(25): SEQ ID NO: 6699; WAN024CA9_at; Start 14; Stop 38
tggttcatggttgtatccgagaagc

SEQ ID NO: 110268 - DNA, 25 bp, Artificial
  probe
  misc_feature (1)..(25): SEQ ID NO: 6699; WAN024CA9_at; Start 17; Stop 41
ttcatggttgtatccgagaagccaa

SEQ ID NO: 110269 - DNA, 25 bp, Artificial
  probe
  misc_feature (1)..(25): SEQ ID NO: 6699; WAN024CA9_at; Start 67; Stop 91
ttggagttggtcattttcaaaaaga

SEQ ID NO: 110270 - DNA, 25 bp, Artificial
  probe
  misc_feature (1)..(25): SEQ ID NO: 6699; WAN024CA9_at; Start 57; Stop 81
tgataaccttttggagttggtcatt

SEQ ID NO: 110271 - DNA, 25 bp, Artificial
  probe
  misc_feature (1)..(25): SEQ ID NO: 6699; WAN024CA9_at; Start 12; Stop 36
ggtggttcatggttgtatccgagaa

SEQ ID NO: 110272 - DNA, 25 bp, Artificial
  probe
  misc_feature (1)..(25): SEQ ID NO: 6699; WAN024CA9_at; Start 23; Stop 47
gttgtatccgagaagccaagaaaaa

SEQ ID NO: 110273 - DNA, 25 bp, Artificial
  probe
  misc_feature (1)..(25): SEQ ID NO: 6699; WAN024CA9_at; Start 4; Stop 28
caacatgaggtggttcatggttgta

SEQ ID NO: 110274 - DNA, 25 bp, Artificial
  probe
  misc_feature (1)..(25): SEQ ID NO: 6699; WAN024CA9_at; Start 22; Stop 46
ggttgtatccgagaagccaagaaaa

SEQ ID NO: 110275 - DNA, 25 bp, Artificial
  probe
  misc_feature (1)..(25): SEQ ID NO: 6699; WAN024CA9_at; Start 68; Stop 92
tggagttggtcattttcaaaaagat

SEQ ID NO: 110276 - DNA, 25 bp, Artificial
  probe
  misc_feature (1)..(25): SEQ ID NO: 6699; WAN024CA9_at; Start 56; Stop 80
ttgataaccttttggagttggtcat

SEQ ID NO: 110277 - DNA, 25 bp, Artificial
  probe
  misc_feature (1)..(25): SEQ ID NO: 6699; WAN024CA9_at; Start 70; Stop 94
gagttggtcattttcaaaaagataa

SEQ ID NO: 110278 - DNA, 25 bp, Artificial
  probe
  misc_feature (1)..(25): SEQ ID NO: 6699; WAN024CA9_at; Start 1; Stop 25
atgcaacatgaggtggttcatggtt

SEQ ID NO: 110279 - DNA, 25 bp, Artificial
  probe
  misc_feature (1)..(25): SEQ ID NO: 6699; WAN024CA9_at; Start 8; Stop 32
atgaggtggttcatggttgtatccg

SEQ ID NO: 110280 - DNA, 25 bp, Artificial
  probe
  misc_feature (1)..(25): SEQ ID NO: 6699; WAN024CA9_at; Start 7; Stop 31
catgaggtggttcatggttgtatcc

SEQ ID NO: 110281 - DNA, 25 bp, Artificial
  probe
  misc_feature (1)..(25): SEQ ID NO: 6699; WAN024CA9_at; Start 55; Stop 79
tttgataaccttttggagttggtca

SEQ ID NO: 110282 - DNA, 25 bp, Artificial
  probe
  misc_feature (1)..(25): SEQ ID NO: 6699; WAN024CA9_at; Start 19; Stop 43
catggttgtatccgagaagccaaga

SEQ ID NO: 110283 - DNA, 25 bp, Artificial
  probe
  misc_feature (1)..(25): SEQ ID NO: 6699; WAN024CA9_at; Start 21; Stop 45
tggttgtatccgagaagccaagaaa

SEQ ID NO: 110284 - DNA, 25 bp, Artificial
  probe
  misc_feature (1)..(25): SEQ ID NO: 6699; WAN024CA9_at; Start 15; Stop 39
ggttcatggttgtatccgagaagcc

SEQ ID NO: 110285 - DNA, 25 bp, Artificial
  probe
  misc_feature (1)..(25): SEQ ID NO: 6699; WAN024CA9_at; Start 20; Stop 44
atggttgtatccgagaagccaagaa

SEQ ID NO: 110286 - DNA, 25 bp, Artificial
  probe
  misc_feature (1)..(25): SEQ ID NO: 6699; WAN024CA9_at; Start 71; Stop 95
agttggtcattttcaaaaagataag

SEQ ID NO: 110287 - DNA, 25 bp, Artificial
  probe
  misc_feature (1)..(25): SEQ ID NO: 6699; WAN024CA9_at; Start 13; Stop 37
gtggttcatggttgtatccgagaag

SEQ ID NO: 110288 - DNA, 25 bp, Artificial
  probe
  misc_feature (1)..(25): SEQ ID NO: 6699; WAN024CA9_at; Start 69; Stop 93
ggagttggtcattttcaaaaagata

SEQ ID NO: 110289 - DNA, 25 bp, Artificial
  probe
  misc_feature (1)..(25): SEQ ID NO: 6699; WAN024CA9_at; Start 16; Stop 40
gttcatggttgtatccgagaagcca

SEQ ID NO: 110290 - DNA, 25 bp, Artificial
  probe
  misc_feature (1)..(25): SEQ ID NO: 6699; WAN024CA9_at; Start 9; Stop 33
tgaggtggttcatggttgtatccga

SEQ ID NO: 110291 - DNA, 25 bp, Artificial
  probe
  misc_feature (1)..(25): SEQ ID NO: 6699; WAN024CA9_at; Start 18; Stop 42
tcatggttgtatccgagaagccaag

SEQ ID NO: 110292 - DNA, 25 bp, Artificial
  probe
  misc_feature (1)..(25): SEQ ID NO: 6699; WAN024CA9_at; Start 10; Stop 34
gaggtggttcatggttgtatccgag

SEQ ID NO: 110293 - DNA, 25 bp, Artificial
  probe
  misc_feature (1)..(25): SEQ ID NO: 6699; WAN024CA9_at; Start 5; Stop 29
aacatgaggtggttcatggttgtat

SEQ ID NO: 110294 - DNA, 25 bp, Artificial
  probe
  misc_feature (1)..(25): SEQ ID NO: 6699; WAN024CA9_at; Start 2; Stop 26
tgcaacatgaggtggttcatggttg

SEQ ID NO: 110295 - DNA, 25 bp, Artificial
  probe
  misc_feature (1)..(25): SEQ ID NO: 6699; WAN024CA9_at; Start 6; Stop 30
acatgaggtggttcatggttgtatc

SEQ ID NO: 110296 - DNA, 25 bp, Artificial
  probe
  misc_feature (1)..(25): SEQ ID NO: 2726; WAN024CAA_at; Start 609; Stop 633
gaaaatcctcggtggttgcctcgaa

SEQ ID NO: 110297 - DNA, 25 bp, Artificial
  probe
  misc_feature (1)..(25): SEQ ID NO: 2726; WAN024CAA_at; Start 833; Stop 857
gactcttggtcggaaaacctatgga

SEQ ID NO: 110298 - DNA, 25 bp, Artificial
  probe
  misc_feature (1)..(25): SEQ ID NO: 2726; WAN024CAA_at; Start 941; Stop 965
gccacgcaactccaagagcaattgt

SEQ ID NO: 110299 - DNA, 25 bp, Artificial
  probe
  misc_feature (1)..(25): SEQ ID NO: 2726; WAN024CAA_at; Start 154; Stop 178
aaggaccatcctgaagctcgtgcag

SEQ ID NO: 110300 - DNA, 25 bp, Artificial
  probe
  misc_feature (1)..(25): SEQ ID NO: 2726; WAN024CAA_at; Start 713; Stop 737
tgtcagactgggaagggaaaatcct

SEQ ID NO: 110301 - DNA, 25 bp, Artificial
  probe
  misc_feature (1)..(25): SEQ ID NO: 2726; WAN024CAA_at; Start 56; Stop 80
ttgtcaaacacgaagtggacttggg

SEQ ID NO: 110302 - DNA, 25 bp, Artificial
  probe
  misc_feature (1)..(25): SEQ ID NO: 2726; WAN024CAA_at; Start 534; Stop 558
ggccctgggaacacctcgtgtcagt

SEQ ID NO: 110303 - DNA, 25 bp, Artificial
  probe
  misc_feature (1)..(25): SEQ ID NO: 2726; WAN024CAA_at; Start 241; Stop 265
gacgatacctatcgcttgctacctt

SEQ ID NO: 110304 - DNA, 25 bp, Artificial
  probe
  misc_feature (1)..(25): SEQ ID NO: 2726; WAN024CAA_at; Start 169; Stop 193
gctcgtgcagaggatttgattcatg

SEQ ID NO: 110305 - DNA, 25 bp, Artificial
  probe
  misc_feature (1)..(25): SEQ ID NO: 2726; WAN024CAA_at; Start 813; Stop 837
catattcgcggtcatcaatggactc

SEQ ID NO: 110306 - DNA, 25 bp, Artificial
  probe
  misc_feature (1)..(25): SEQ ID NO: 2726; WAN024CAA_at; Start 654; Stop 678
caactctcgatacgcagatagcacg

SEQ ID NO: 110307 - DNA, 25 bp, Artificial
  probe
  misc_feature (1)..(25): SEQ ID NO: 2726; WAN024CAA_at; Start 517; Stop 541
actgattttagtcccacggccctgg

SEQ ID NO: 110308 - DNA, 25 bp, Artificial
  probe
  misc_feature (1)..(25): SEQ ID NO: 2726; WAN024CAA_at; Start 883; Stop 907
gaggcactattggatatcattgaca

SEQ ID NO: 110309 - DNA, 25 bp, Artificial
  probe
  misc_feature (1)..(25): SEQ ID NO: 2726; WAN024CAA_at; Start 622; Stop 646
ggttgcctcgaatccctctacgata

SEQ ID NO: 110310 - DNA, 25 bp, Artificial
  probe
  misc_feature (1)..(25): SEQ ID NO: 2726; WAN024CAA_at; Start 42; Stop 66
tatcggagaggattttgtcaaacac

SEQ ID NO: 110311 - DNA, 25 bp, Artificial
  probe
  misc_feature (1)..(25): SEQ ID NO: 2726; WAN024CAA_at; Start 979; Stop 1003
catgctcatgtagatgcacaggaac

SEQ ID NO: 110312 - DNA, 25 bp, Artificial
  probe
  misc_feature (1)..(25): SEQ ID NO: 2726; WAN024CAA_at; Start 192; Stop 216
tgccttttctgatgatagcatcgac

SEQ ID NO: 110313 - DNA, 25 bp, Artificial
  probe
  misc_feature (1)..(25): SEQ ID NO: 2726; WAN024CAA_at; Start 122; Stop 146
tgccccattcgttaaaaggattaga

SEQ ID NO: 110314 - DNA, 25 bp, Artificial
  probe
  misc_feature (1)..(25): SEQ ID NO: 2726; WAN024CAA_at; Start 473; Stop 497
gaatttcagaaatccgccctagtga

SEQ ID NO: 110315 - DNA, 25 bp, Artificial
  probe
  misc_feature (1)..(25): SEQ ID NO: 2726; WAN024CAA_at; Start 549; Stop 573
tcgtgtcagtcatacaaatacaggt

SEQ ID NO: 110316 - DNA, 25 bp, Artificial
  probe
  misc_feature (1)..(25): SEQ ID NO: 2726; WAN024CAA_at; Start 458; Stop 482
tgattgagacgggaagaatttcaga

SEQ ID NO: 110317 - DNA, 25 bp, Artificial
  probe
  misc_feature (1)..(25): SEQ ID NO: 2726; WAN024CAA_at; Start 207; Stop 231
tagcatcgacatgatcctatgtgcc

SEQ ID NO: 110318 - DNA, 25 bp, Artificial
  probe
  misc_feature (1)..(25): SEQ ID NO: 2726; WAN024CAA_at; Start 728; Stop 752
ggaaaatcctcttgctcgaaacaag

SEQ ID NO: 110319 - DNA, 25 bp, Artificial
  probe
  misc_feature (1)..(25): SEQ ID NO: 2726; WAN024CAA_at; Start 567; Stop 591
tacaggttttgacttgttgcaagga

SEQ ID NO: 110320 - DNA, 25 bp, Artificial
  probe
  misc_feature (1)..(25): SEQ ID NO: 2726; WAN024CAA_at; Start 798; Stop 822
tttaaaggacactggcatattcgcg

SEQ ID NO: 110321 - DNA, 25 bp, Artificial
  probe
  misc_feature (1)..(25): SEQ ID NO: 2726; WAN024CAA_at; Start 140; Stop 164
gattagactttatcaaggaccatcc

SEQ ID NO: 110322 - DNA, 25 bp, Artificial
  probe
  misc_feature (1)..(25): SEQ ID NO: 2726; WAN024CAA_at; Start 486; Stop 510
ccgccctagtgacgtttggtatgag

SEQ ID NO: 110323 - DNA, 25 bp, Artificial
  probe
  misc_feature (1)..(25): SEQ ID NO: 2726; WAN024CAA_at; Start 318; Stop 342
tggcttctcggatacaaccatgaac

SEQ ID NO: 110324 - DNA, 25 bp, Artificial
  probe
  misc_feature (1)..(25): SEQ ID NO: 2726; WAN024CAA_at; Start 769; Stop 793
ccagaagacttcaaaaagatgttgc

SEQ ID NO: 110325 - DNA, 25 bp, Artificial
  probe
  misc_feature (1)..(25): SEQ ID NO: 2726; WAN024CAA_at; Start 866; Stop 890
tccatgacgactataaagaggcact

SEQ ID NO: 110326 - DNA, 25 bp, Artificial
  probe
  misc_feature (1)..(25): SEQ ID NO: 2726; WAN024CAA_at; Start 408; Stop 432
tgaattagacaaagaaatgctagcc

SEQ ID NO: 110327 - DNA, 25 bp, Artificial
  probe
  misc_feature (1)..(25): SEQ ID NO: 2726; WAN024CAA_at; Start 29; Stop 53
tatctagtggcattatcggagagga

SEQ ID NO: 110328 - DNA, 25 bp, Artificial
  probe
  misc_feature (1)..(25): SEQ ID NO: 2726; WAN024CAA_at; Start 73; Stop 97
gacttgggtatccaacgtctcaagg

SEQ ID NO: 110329 - DNA, 25 bp, Artificial
  probe
  misc_feature (1)..(25): SEQ ID NO: 2726; WAN024CAA_at; Start 379; Stop 403
tatggtcaatcctttttagcagaca

SEQ ID NO: 110330 - DNA, 25 bp, Artificial
  probe
  misc_feature (1)..(25): SEQ ID NO: 1764; WAN024CAB_at; Start 493; Stop 517
gctctgactcatatgcacagtttgg

SEQ ID NO: 110331 - DNA, 25 bp, Artificial
  probe
  misc_feature (1)..(25): SEQ ID NO: 1764; WAN024CAB_at; Start 75; Stop 99
taaattgctggcttctttaatgcca

SEQ ID NO: 110332 - DNA, 25 bp, Artificial
  probe
  misc_feature (1)..(25): SEQ ID NO: 1764; WAN024CAB_at; Start 223; Stop 247
gtcttaacaggatggctctttctca

SEQ ID NO: 110333 - DNA, 25 bp, Artificial
  probe
  misc_feature (1)..(25): SEQ ID NO: 1764; WAN024CAB_at; Start 325; Stop 349
cagtctaatattcaaagtacctttc

SEQ ID NO: 110334 - DNA, 25 bp, Artificial
  probe
  misc_feature (1)..(25): SEQ ID NO: 1764; WAN024CAB_at; Start 158; Stop 182
tcaaggatagattgatccaacaatg

SEQ ID NO: 110335 - DNA, 25 bp, Artificial
  probe
  misc_feature (1)..(25): SEQ ID NO: 1764; WAN024CAB_at; Start 539; Stop 563
cagttggttacttaggtggaggcct

SEQ ID NO: 110336 - DNA, 25 bp, Artificial
  probe
  misc_feature (1)..(25): SEQ ID NO: 1764; WAN024CAB_at; Start 418; Stop 442
cgtcaggtcttattgcattacttgc

SEQ ID NO: 110337 - DNA, 25 bp, Artificial
  probe
  misc_feature (1)..(25): SEQ ID NO: 1764; WAN024CAB_at; Start 62; Stop 86
tgtttgatggcgttaaattgctggc

SEQ ID NO: 110338 - DNA, 25 bp, Artificial
  probe
  misc_feature (1)..(25): SEQ ID NO: 1764; WAN024CAB_at; Start 163; Stop 187
gatagattgatccaacaatggaagg

SEQ ID NO: 110339 - DNA, 25 bp, Artificial
  probe
  misc_feature (1)..(25): SEQ ID NO: 1764; WAN024CAB_at; Start 232; Stop 256
ggatggctctttctcattctgatga

SEQ ID NO: 110340 - DNA, 25 bp, Artificial
  probe
  misc_feature (1)..(25): SEQ ID NO: 1764; WAN024CAB_at; Start 589; Stop 613
gaaaaagagaatatctactatcccc

SEQ ID NO: 110341 - DNA, 25 bp, Artificial
  probe
  misc_feature (1)..(25): SEQ ID NO: 1764; WAN024CAB_at; Start 302; Stop 326
gactagatggacaaggtctaaatca

SEQ ID NO: 110342 - DNA, 25 bp, Artificial
  probe
  misc_feature (1)..(25): SEQ ID NO: 1764; WAN024CAB_at; Start 410; Stop 434
tatttttccgtcaggtcttattgca

SEQ ID NO: 110343 - DNA, 25 bp, Artificial
  probe
  misc_feature (1)..(25): SEQ ID NO: 1764; WAN024CAB_at; Start 455; Stop 479
caggtttactaagcattattctggt

SEQ ID NO: 110344 - DNA, 25 bp, Artificial
  probe
  misc_feature (1)..(25): SEQ ID NO: 1764; WAN024CAB_at; Start 371; Stop 395
ctgtttttgcttgtgtcattggacc

SEQ ID NO: 110345 - DNA, 25 bp, Artificial
  probe
  misc_feature (1)..(25): SEQ ID NO: 1764; WAN024CAB_at; Start 647; Stop 671
taatcattttagctatcagtatagt

SEQ ID NO: 110346 - DNA, 25 bp, Artificial
  probe
  misc_feature (1)..(25): SEQ ID NO: 1764; WAN024CAB_at; Start 550; Stop 574
ttaggtggaggccttgccttttcta

SEQ ID NO: 110347 - DNA, 25 bp, Artificial
  probe
  misc_feature (1)..(25): SEQ ID NO: 1764; WAN024CAB_at; Start 356; Stop 380
aaccactactgatagctgtttttgc

SEQ ID NO: 110348 - DNA, 25 bp, Artificial
  probe
  misc_feature (1)..(25): SEQ ID NO: 1764; WAN024CAB_at; Start 464; Stop 488
taagcattattctggtaggacttgt

SEQ ID NO: 110349 - DNA, 25 bp, Artificial
  probe
  misc_feature (1)..(25): SEQ ID NO: 1764; WAN024CAB_at; Start 336; Stop 360
tcaaagtacctttcaagaacaacca

SEQ ID NO: 110350 - DNA, 25 bp, Artificial
  probe
  misc_feature (1)..(25): SEQ ID NO: 1764; WAN024CAB_at; Start 246; Stop 270
cattctgatgactgttgtctttgaa

SEQ ID NO: 110351 - DNA, 25 bp, Artificial
  probe
  misc_feature (1)..(25): SEQ ID NO: 1764; WAN024CAB_at; Start 27; Stop 51
tctgatttttgcgattctctataca

SEQ ID NO: 110352 - DNA, 25 bp, Artificial
  probe
  misc_feature (1)..(25): SEQ ID NO: 1764; WAN024CAB_at; Start 634; Stop 658
aacagcctctccttaatcattttag

SEQ ID NO: 110353 - DNA, 25 bp, Artificial
  probe
  misc_feature (1)..(25): SEQ ID NO: 1764; WAN024CAB_at; Start 268; Stop 292
gaatttgtatcagagatgttgaagc

SEQ ID NO: 110354 - DNA, 25 bp, Artificial
  probe
  misc_feature (1)..(25): SEQ ID NO: 1764; WAN024CAB_at; Start 310; Stop 334
ggacaaggtctaaatcagtctaata

SEQ ID NO: 110355 - DNA, 25 bp, Artificial
  probe
  misc_feature (1)..(25): SEQ ID NO: 1764; WAN024CAB_at; Start 520; Stop 544
ctatcagagtggattggtgcagttg

SEQ ID NO: 110356 - DNA, 25 bp, Artificial
  probe
  misc_feature (1)..(25): SEQ ID NO: 1764; WAN024CAB_at; Start 275; Stop 299
tatcagagatgttgaagcagtttgt

SEQ ID NO: 110357 - DNA, 25 bp, Artificial
  probe
  misc_feature (1)..(25): SEQ ID NO: 1764; WAN024CAB_at; Start 618; Stop 642
tgttcacatgttaagcaacagcctc

SEQ ID NO: 110358 - DNA, 25 bp, Artificial
  probe
  misc_feature (1)..(25): SEQ ID NO: 1764; WAN024CAB_at; Start 255; Stop 279
gactgttgtctttgaatttgtatca

SEQ ID NO: 110359 - DNA, 25 bp, Artificial
  probe
  misc_feature (1)..(25): SEQ ID NO: 1764; WAN024CAB_at; Start 479; Stop 503
taggacttgtttttgctctgactca

SEQ ID NO: 110360 - DNA, 25 bp, Artificial
  probe
  misc_feature (1)..(25): SEQ ID NO: 1764; WAN024CAB_at; Start 382; Stop 406
tgtgtcattggacctctggtagaag

SEQ ID NO: 110361 - DNA, 25 bp, Artificial
  probe
  misc_feature (1)..(25): SEQ ID NO: 1764; WAN024CAB_at; Start 390; Stop 414
tggacctctggtagaagaattattt

SEQ ID NO: 110362 - DNA, 25 bp, Artificial
  probe
  misc_feature (1)..(25): SEQ ID NO: 1764; WAN024CAB_at; Start 428; Stop 452
tattgcattacttgcaggaacggtt

SEQ ID NO: 110363 - DNA, 25 bp, Artificial
  probe
  misc_feature (1)..(25): SEQ ID NO: 1764; WAN024CAB_at; Start 349; Stop 373
caagaacaaccactactgatagctg

SEQ ID NO: 110364 - DNA, 25 bp, Artificial
  probe
  misc_feature (1)..(25): SEQ ID NO: 5503; WAN024CAC_at; Start 26; Stop 50
gacaggaaacttggcactgcctcca

SEQ ID NO: 110365 - DNA, 25 bp, Artificial
  probe
  misc_feature (1)..(25): SEQ ID NO: 5503; WAN024CAC_at; Start 228; Stop 252
cagccatgattttgatatagcttca

SEQ ID NO: 110366 - DNA, 25 bp, Artificial
  probe
  misc_feature (1)..(25): SEQ ID NO: 5503; WAN024CAC_at; Start 37; Stop 61
tggcactgcctccaaaaatttttgg

SEQ ID NO: 110367 - DNA, 25 bp, Artificial
  probe
  misc_feature (1)..(25): SEQ ID NO: 5503; WAN024CAC_at; Start 73; Stop 97
ttttcagctcatcaacaatttgttg

SEQ ID NO: 110368 - DNA, 25 bp, Artificial
  probe
  misc_feature (1)..(25): SEQ ID NO: 5503; WAN024CAC_at; Start 142; Stop 166
ggctatcaatctgcatgtttcctag

SEQ ID NO: 110369 - DNA, 25 bp, Artificial
  probe
  misc_feature (1)..(25): SEQ ID NO: 5503; WAN024CAC_at; Start 88; Stop 112
caatttgttgttccaaagcactcca

SEQ ID NO: 110370 - DNA, 25 bp, Artificial
  probe
  misc_feature (1)..(25): SEQ ID NO: 5503; WAN024CAC_at; Start 251; Stop 275
cattttatttttgtcttcagaggaa

SEQ ID NO: 110371 - DNA, 25 bp, Artificial
  probe
  misc_feature (1)..(25): SEQ ID NO: 5503; WAN024CAC_at; Start 48; Stop 72
ccaaaaatttttggtgcaatatata

SEQ ID NO: 110372 - DNA, 25 bp, Artificial
  probe
  misc_feature (1)..(25): SEQ ID NO: 5503; WAN024CAC_at; Start 149; Stop 173
aatctgcatgtttcctagatgttgc

SEQ ID NO: 110373 - DNA, 25 bp, Artificial
  probe
  misc_feature (1)..(25): SEQ ID NO: 5503; WAN024CAC_at; Start 154; Stop 178
gcatgtttcctagatgttgcattaa

SEQ ID NO: 110374 - DNA, 25 bp, Artificial
  probe
  misc_feature (1)..(25): SEQ ID NO: 5503; WAN024CAC_at; Start 208; Stop 232
tctttatggaaagtatttcacagcc

SEQ ID NO: 110375 - DNA, 25 bp, Artificial
  probe
  misc_feature (1)..(25): SEQ ID NO: 5503; WAN024CAC_at; Start 17; Stop 41
ttcacctccgacaggaaacttggca

SEQ ID NO: 110376 - DNA, 25 bp, Artificial
  probe
  misc_feature (1)..(25): SEQ ID NO: 5503; WAN024CAC_at; Start 264; Stop 288
tcttcagaggaagtggcaatgtaag

SEQ ID NO: 110377 - DNA, 25 bp, Artificial
  probe
  misc_feature (1)..(25): SEQ ID NO: 5503; WAN024CAC_at; Start 63; Stop 87
gcaatatatattttcagctcatcaa

SEQ ID NO: 110378 - DNA, 25 bp, Artificial
  probe
  misc_feature (1)..(25): SEQ ID NO: 5503; WAN024CAC_at; Start 6; Stop 30
aaagaaatgccttcacctccgacag

SEQ ID NO: 110379 - DNA, 25 bp, Artificial
  probe
  misc_feature (1)..(25): SEQ ID NO: 5503; WAN024CAC_at; Start 119; Stop 143
tagactgcccccttctagaactagg

SEQ ID NO: 110380 - DNA, 25 bp, Artificial
  probe
  misc_feature (1)..(25): SEQ ID NO: 5503; WAN024CAC_at; Start 93; Stop 117
tgttgttccaaagcactccaattca

SEQ ID NO: 110381 - DNA, 25 bp, Artificial
  probe
  misc_feature (1)..(25): SEQ ID NO: 5503; WAN024CAC_at; Start 127; Stop 151
ccccttctagaactaggctatcaat

SEQ ID NO: 110382 - DNA, 25 bp, Artificial
  probe
  misc_feature (1)..(25): SEQ ID NO: 5503; WAN024CAC_at; Start 178; Stop 202
aactcgataagtctatatgattgcc

SEQ ID NO: 110383 - DNA, 25 bp, Artificial
  probe
  misc_feature (1)..(25): SEQ ID NO: 5503; WAN024CAC_at; Start 9; Stop 33
gaaatgccttcacctccgacaggaa

SEQ ID NO: 110384 - DNA, 25 bp, Artificial
  probe
  misc_feature (1)..(25): SEQ ID NO: 5503; WAN024CAC_at; Start 161; Stop 185
tcctagatgttgcattaaactcgat

SEQ ID NO: 110385 - DNA, 25 bp, Artificial
  probe
  misc_feature (1)..(25): SEQ ID NO: 5503; WAN024CAC_at; Start 193; Stop 217
tatgattgccttttttctttatgga

SEQ ID NO: 110386 - DNA, 25 bp, Artificial
  probe
  misc_feature (1)..(25): SEQ ID NO: 5503; WAN024CAC_at; Start 101; Stop 125
caaagcactccaattcattagactg

SEQ ID NO: 110387 - DNA, 25 bp, Artificial
  probe
  misc_feature (1)..(25): SEQ ID NO: 5503; WAN024CAC_at; Start 23; Stop 47
tccgacaggaaacttggcactgcct

SEQ ID NO: 110388 - DNA, 25 bp, Artificial
  probe
  misc_feature (1)..(25): SEQ ID NO: 5503; WAN024CAC_at; Start 214; Stop 238
tggaaagtatttcacagccatgatt

SEQ ID NO: 110389 - DNA, 25 bp, Artificial
  probe
  misc_feature (1)..(25): SEQ ID NO: 5503; WAN024CAC_at; Start 256; Stop 280
tatttttgtcttcagaggaagtggc

SEQ ID NO: 110390 - DNA, 25 bp, Artificial
  probe
  misc_feature (1)..(25): SEQ ID NO: 5503; WAN024CAC_at; Start 270; Stop 294
gaggaagtggcaatgtaagttttaa

SEQ ID NO: 110391 - DNA, 25 bp, Artificial
  probe
  misc_feature (1)..(25): SEQ ID NO: 5503; WAN024CAC_at; Start 97; Stop 121
gttccaaagcactccaattcattag

SEQ ID NO: 110392 - DNA, 25 bp, Artificial
  probe
  misc_feature (1)..(25): SEQ ID NO: 5503; WAN024CAC_at; Start 134; Stop 158
tagaactaggctatcaatctgcatg

SEQ ID NO: 110393 - DNA, 25 bp, Artificial
  probe
  misc_feature (1)..(25): SEQ ID NO: 5503; WAN024CAC_at; Start 104; Stop 128
agcactccaattcattagactgccc

SEQ ID NO: 110394 - DNA, 25 bp, Artificial
  probe
  misc_feature (1)..(25): SEQ ID NO: 5503; WAN024CAC_at; Start 166; Stop 190
gatgttgcattaaactcgataagtc

SEQ ID NO: 110395 - DNA, 25 bp, Artificial
  probe
  misc_feature (1)..(25): SEQ ID NO: 5503; WAN024CAC_at; Start 30; Stop 54
ggaaacttggcactgcctccaaaaa

SEQ ID NO: 110396 - DNA, 25 bp, Artificial
  probe
  misc_feature (1)..(25): SEQ ID NO: 5503; WAN024CAC_at; Start 224; Stop 248
ttcacagccatgattttgatatagc

SEQ ID NO: 110397 - DNA, 25 bp, Artificial
  probe
  misc_feature (1)..(25): SEQ ID NO: 5503; WAN024CAC_at; Start 2; Stop 26
tggcaaagaaatgccttcacctccg

SEQ ID NO: 110398 - DNA, 25 bp, Artificial
  probe
  misc_feature (1)..(25): SEQ ID NO: 3596; WAN024CAD_at; Start 1057; Stop 1081
gactatctcatagaaagtgaagtga

SEQ ID NO: 110399 - DNA, 25 bp, Artificial
  probe
  misc_feature (1)..(25): SEQ ID NO: 3596; WAN024CAD_at; Start 299; Stop 323
gaagcctagactgtaatcctattgt

SEQ ID NO: 110400 - DNA, 25 bp, Artificial
  probe
  misc_feature (1)..(25): SEQ ID NO: 3596; WAN024CAD_at; Start 599; Stop 623
aagacgatcctttgctgacatgtag

SEQ ID NO: 110401 - DNA, 25 bp, Artificial
  probe
  misc_feature (1)..(25): SEQ ID NO: 3596; WAN024CAD_at; Start 419; Stop 443
gaaagtatattacccagcatgtacc

SEQ ID NO: 110402 - DNA, 25 bp, Artificial
  probe
  misc_feature (1)..(25): SEQ ID NO: 3596; WAN024CAD_at; Start 116; Stop 140
tcggacaaggttatcatgagttttt

SEQ ID NO: 110403 - DNA, 25 bp, Artificial
  probe
  misc_feature (1)..(25): SEQ ID NO: 3596; WAN024CAD_at; Start 832; Stop 856
ttaatgcaacatctaggaaacatgc

SEQ ID NO: 110404 - DNA, 25 bp, Artificial
  probe
  misc_feature (1)..(25): SEQ ID NO: 3596; WAN024CAD_at; Start 658; Stop 682
tgcgatacacatttacgaactcctc

SEQ ID NO: 110405 - DNA, 25 bp, Artificial
  probe
  misc_feature (1)..(25): SEQ ID NO: 3596; WAN024CAD_at; Start 467; Stop 491
tgtcaatggatggaaaaatagccac

SEQ ID NO: 110406 - DNA, 25 bp, Artificial
  probe
  misc_feature (1)..(25): SEQ ID NO: 3596; WAN024CAD_at; Start 204; Stop 228
gctttatgtaacacttgaaccctgt

SEQ ID NO: 110407 - DNA, 25 bp, Artificial
  probe
  misc_feature (1)..(25): SEQ ID NO: 3596; WAN024CAD_at; Start 1012; Stop 1036
gacgctattagattgaaaccttatg

SEQ ID NO: 110408 - DNA, 25 bp, Artificial
  probe
  misc_feature (1)..(25): SEQ ID NO: 3596; WAN024CAD_at; Start 724; Stop 748
tacattgccacttcctctgaagaca

SEQ ID NO: 110409 - DNA, 25 bp, Artificial
  probe
  misc_feature (1)..(25): SEQ ID NO: 3596; WAN024CAD_at; Start 435; Stop 459
gcatgtaccctatgtttttatgaaa

SEQ ID NO: 110410 - DNA, 25 bp, Artificial
  probe
  misc_feature (1)..(25): SEQ ID NO: 3596; WAN024CAD_at; Start 1; Stop 25
gagatgagcgattcaaaatatatga

SEQ ID NO: 110411 - DNA, 25 bp, Artificial
  probe
  misc_feature (1)..(25): SEQ ID NO: 3596; WAN024CAD_at; Start 485; Stop 509
tagccactaaaacaaatcaatccaa

SEQ ID NO: 110412 - DNA, 25 bp, Artificial
  probe
  misc_feature (1)..(25): SEQ ID NO: 3596; WAN024CAD_at; Start 913; Stop 937
caacaaattgttgatgagctgaaaa

SEQ ID NO: 110413 - DNA, 25 bp, Artificial
  probe
  misc_feature (1)..(25): SEQ ID NO: 3596; WAN024CAD_at; Start 316; Stop 340
cctattgtatctggaaaaggagtaa

SEQ ID NO: 110414 - DNA, 25 bp, Artificial
  probe
  misc_feature (1)..(25): SEQ ID NO: 3596; WAN024CAD_at; Start 584; Stop 608
tcaatactgttattcaagacgatcc

SEQ ID NO: 110415 - DNA, 25 bp, Artificial
  probe
  misc_feature (1)..(25): SEQ ID NO: 3596; WAN024CAD_at; Start 149; Stop 173
cacatgctgagagaaatgctcttaa

SEQ ID NO: 110416 - DNA, 25 bp, Artificial
  probe
  misc_feature (1)..(25): SEQ ID NO: 3596; WAN024CAD_at; Start 758; Stop 782
tgaagctatatcaaaatcatggctg

SEQ ID NO: 110417 - DNA, 25 bp, Artificial
  probe
  misc_feature (1)..(25): SEQ ID NO: 3596; WAN024CAD_at; Start 998; Stop 1022
tttctttgccaaatgacgctattag

SEQ ID NO: 110418 - DNA, 25 bp, Artificial
  probe
  misc_feature (1)..(25): SEQ ID NO: 3596; WAN024CAD_at; Start 1042; Stop 1066
tctcaaataggaaatgactatctca

SEQ ID NO: 110419 - DNA, 25 bp, Artificial
  probe
  misc_feature (1)..(25): SEQ ID NO: 3596; WAN024CAD_at; Start 567; Stop 591
tgcaattatggtgggagtcaatact

SEQ ID NO: 110420 - DNA, 25 bp, Artificial
  probe
  misc_feature (1)..(25): SEQ ID NO: 3596; WAN024CAD_at; Start 284; Stop 308
caagagtagtcattggaagcctaga

SEQ ID NO: 110421 - DNA, 25 bp, Artificial
  probe
  misc_feature (1)..(25): SEQ ID NO: 3596; WAN024CAD_at; Start 969; Stop 993
tgccaagtttcctgtcggaggtgaa

SEQ ID NO: 110422 - DNA, 25 bp, Artificial
  probe
  misc_feature (1)..(25): SEQ ID NO: 3596; WAN024CAD_at; Start 684; Stop 708
tacctctaaaatcgtaaaaacagca

SEQ ID NO: 110423 - DNA, 25 bp, Artificial
  probe
  misc_feature (1)..(25): SEQ ID NO: 3596; WAN024CAD_at; Start 894; Stop 918
gaattggagtgctttggaacaacaa

SEQ ID NO: 110424 - DNA, 25 bp, Artificial
  probe
  misc_feature (1)..(25): SEQ ID NO: 3596; WAN024CAD_at; Start 506; Stop 530
ccaaatggattactgaagaagaagc

SEQ ID NO: 110425 - DNA, 25 bp, Artificial
  probe
  misc_feature (1)..(25): SEQ ID NO: 3596; WAN024CAD_at; Start 1075; Stop 1099
gaagtgatttatccatgttcacagg

SEQ ID NO: 110426 - DNA, 25 bp, Artificial
  probe
  misc_feature (1)..(25): SEQ ID NO: 3596; WAN024CAD_at; Start 270; Stop 294
cgatagtggtattacaagagtagtc

SEQ ID NO: 110427 - DNA, 25 bp, Artificial
  probe
  misc_feature (1)..(25): SEQ ID NO: 3596; WAN024CAD_at; Start 772; Stop 796
aatcatggctgtgaaatactttcca

SEQ ID NO: 110428 - DNA, 25 bp, Artificial
  probe
  misc_feature (1)..(25): SEQ ID NO: 3596; WAN024CAD_at; Start 806; Stop 830
aaggcaatcatatagacttatcgag

SEQ ID NO: 110429 - DNA, 25 bp, Artificial
  probe
  misc_feature (1)..(25): SEQ ID NO: 3596; WAN024CAD_at; Start 219; Stop 243
tgaaccctgttgtcacttcgggaaa

SEQ ID NO: 110430 - DNA, 25 bp, Artificial
  probe
  misc_feature (1)..(25): SEQ ID NO: 3596; WAN024CAD_at; Start 187; Stop 211
tcccctgtcggagcgacgctttatg

SEQ ID NO: 110431 - DNA, 25 bp, Artificial
  probe
  misc_feature (1)..(25): SEQ ID NO: 3596; WAN024CAD_at; Start 848; Stop 872
gaaacatgcagattgatagcctagt

SEQ ID NO: 110432 - DNA, 25 bp, Artificial
  probe
  misc_feature (1)..(25): SEQ ID NO: 4386; WAN024CAE_at; Start 183; Stop 207
aacatgtgtcctggcctgcgaaaat

SEQ ID NO: 110433 - DNA, 25 bp, Artificial
  probe
  misc_feature (1)..(25): SEQ ID NO: 4386; WAN024CAE_at; Start 41; Stop 65
tgttctcatcattttgccatcatga

SEQ ID NO: 110434 - DNA, 25 bp, Artificial
  probe
  misc_feature (1)..(25): SEQ ID NO: 4386; WAN024CAE_at; Start 150; Stop 174
tctaggacaccacctttttttgcaa

SEQ ID NO: 110435 - DNA, 25 bp, Artificial
  probe
  misc_feature (1)..(25): SEQ ID NO: 4386; WAN024CAE_at; Start 254; Stop 278
tctttcctcggcagaaatacctgtg

SEQ ID NO: 110436 - DNA, 25 bp, Artificial
  probe
  misc_feature (1)..(25): SEQ ID NO: 4386; WAN024CAE_at; Start 285; Stop 309
tctttataatcaattgaaactgtaa

SEQ ID NO: 110437 - DNA, 25 bp, Artificial
  probe
  misc_feature (1)..(25): SEQ ID NO: 4386; WAN024CAE_at; Start 81; Stop 105
cataggccacactcttttagtccag

SEQ ID NO: 110438 - DNA, 25 bp, Artificial
  probe
  misc_feature (1)..(25): SEQ ID NO: 4386; WAN024CAE_at; Start 113; Stop 137
taataaatcaacagttgcttctgtg

SEQ ID NO: 110439 - DNA, 25 bp, Artificial
  probe
  misc_feature (1)..(25): SEQ ID NO: 4386; WAN024CAE_at; Start 64; Stop 88
gattcattatttcacaacataggcc

SEQ ID NO: 110440 - DNA, 25 bp, Artificial
  probe
  misc_feature (1)..(25): SEQ ID NO: 4386; WAN024CAE_at; Start 142; Stop 166
catttctttctaggacaccaccttt

SEQ ID NO: 110441 - DNA, 25 bp, Artificial
  probe
  misc_feature (1)..(25): SEQ ID NO: 4386; WAN024CAE_at; Start 222; Stop 246
tcttcagctacacacatacgtgcgg

SEQ ID NO: 110442 - DNA, 25 bp, Artificial
  probe
  misc_feature (1)..(25): SEQ ID NO: 4386; WAN024CAE_at; Start 124; Stop 148
cagttgcttctgtgtgtccatttct

SEQ ID NO: 110443 - DNA, 25 bp, Artificial
  probe
  misc_feature (1)..(25): SEQ ID NO: 4386; WAN024CAE_at; Start 19; Stop 43
tcgagaactgaattaaatcatctgt

SEQ ID NO: 110444 - DNA, 25 bp, Artificial
  probe
  misc_feature (1)..(25): SEQ ID NO: 4386; WAN024CAE_at; Start 118; Stop 142
aatcaacagttgcttctgtgtgtcc

SEQ ID NO: 110445 - DNA, 25 bp, Artificial
  probe
  misc_feature (1)..(25): SEQ ID NO: 4386; WAN024CAE_at; Start 196; Stop 220
gcctgcgaaaatcagagggtgttat

SEQ ID NO: 110446 - DNA, 25 bp, Artificial
  probe
  misc_feature (1)..(25): SEQ ID NO: 4386; WAN024CAE_at; Start 187; Stop 211
tgtgtcctggcctgcgaaaatcaga

SEQ ID NO: 110447 - DNA, 25 bp, Artificial
  probe
  misc_feature (1)..(25): SEQ ID NO: 4386; WAN024CAE_at; Start 133; Stop 157
ctgtgtgtccatttctttctaggac

SEQ ID NO: 110448 - DNA, 25 bp, Artificial
  probe
  misc_feature (1)..(25): SEQ ID NO: 4386; WAN024CAE_at; Start 168; Stop 192
tttgcaattaaaggaaacatgtgtc

SEQ ID NO: 110449 - DNA, 25 bp, Artificial
  probe
  misc_feature (1)..(25): SEQ ID NO: 4386; WAN024CAE_at; Start 50; Stop 74
cattttgccatcatgattcattatt

SEQ ID NO: 110450 - DNA, 25 bp, Artificial
  probe
  misc_feature (1)..(25): SEQ ID NO: 4386; WAN024CAE_at; Start 258; Stop 282
tcctcggcagaaatacctgtggtcg

SEQ ID NO: 110451 - DNA, 25 bp, Artificial
  probe
  misc_feature (1)..(25): SEQ ID NO: 4386; WAN024CAE_at; Start 176; Stop 200
taaaggaaacatgtgtcctggcctg

SEQ ID NO: 110452 - DNA, 25 bp, Artificial
  probe
  misc_feature (1)..(25): SEQ ID NO: 4386; WAN024CAE_at; Start 262; Stop 286
cggcagaaatacctgtggtcgtttc

SEQ ID NO: 110453 - DNA, 25 bp, Artificial
  probe
  misc_feature (1)..(25): SEQ ID NO: 4386; WAN024CAE_at; Start 210; Stop 234
gagggtgttatatcttcagctacac

SEQ ID NO: 110454 - DNA, 25 bp, Artificial
  probe
  misc_feature (1)..(25): SEQ ID NO: 4386; WAN024CAE_at; Start 98; Stop 122
tagtccagctaattttaataaatca

SEQ ID NO: 110455 - DNA, 25 bp, Artificial
  probe
  misc_feature (1)..(25): SEQ ID NO: 4386; WAN024CAE_at; Start 273; Stop 297
cctgtggtcgtttctttataatcaa

SEQ ID NO: 110456 - DNA, 25 bp, Artificial
  probe
  misc_feature (1)..(25): SEQ ID NO: 4386; WAN024CAE_at; Start 225; Stop 249
tcagctacacacatacgtgcggtca

SEQ ID NO: 110457 - DNA, 25 bp, Artificial
  probe
  misc_feature (1)..(25): SEQ ID NO: 4386; WAN024CAE_at; Start 85; Stop 109
ggccacactcttttagtccagctaa

SEQ ID NO: 110458 - DNA, 25 bp, Artificial
  probe
  misc_feature (1)..(25): SEQ ID NO: 4386; WAN024CAE_at; Start 71; Stop 95
tatttcacaacataggccacactct

SEQ ID NO: 110459 - DNA, 25 bp, Artificial
  probe
  misc_feature (1)..(25): SEQ ID NO: 4386; WAN024CAE_at; Start 191; Stop 215
tcctggcctgcgaaaatcagagggt

SEQ ID NO: 110460 - DNA, 25 bp, Artificial
  probe
  misc_feature (1)..(25): SEQ ID NO: 4386; WAN024CAE_at; Start 230; Stop 254
tacacacatacgtgcggtcagtcct

SEQ ID NO: 110461 - DNA, 25 bp, Artificial
  probe
  misc_feature (1)..(25): SEQ ID NO: 4386; WAN024CAE_at; Start 245; Stop 269
ggtcagtcctctttcctcggcagaa

SEQ ID NO: 110462 - DNA, 25 bp, Artificial
  probe
  misc_feature (1)..(25): SEQ ID NO: 4386; WAN024CAE_at; Start 34; Stop 58
aatcatctgttctcatcattttgcc

SEQ ID NO: 110463 - DNA, 25 bp, Artificial
  probe
  misc_feature (1)..(25): SEQ ID NO: 4386; WAN024CAE_at; Start 236; Stop 260
catacgtgcggtcagtcctctttcc

SEQ ID NO: 110464 - DNA, 25 bp, Artificial
  probe
  misc_feature (1)..(25): SEQ ID NO: 4386; WAN024CAE_at; Start 181; Stop 205
gaaacatgtgtcctggcctgcgaaa

SEQ ID NO: 110465 - DNA, 25 bp, Artificial
  probe
  misc_feature (1)..(25): SEQ ID NO: 4386; WAN024CAE_at; Start 205; Stop 229
aatcagagggtgttatatcttcagc

SEQ ID NO: 110466 - DNA, 25 bp, Artificial
  probe
  misc_feature (1)..(25): SEQ ID NO: 2371; WAN024CAF_at; Start 312; Stop 336
gaccacaggtatttctgccgaggaa

SEQ ID NO: 110467 - DNA, 25 bp, Artificial
  probe
  misc_feature (1)..(25): SEQ ID NO: 2371; WAN024CAF_at; Start 1190; Stop 1214
caaagaaaaatcgaatgggtcacat

SEQ ID NO: 110468 - DNA, 25 bp, Artificial
  probe
  misc_feature (1)..(25): SEQ ID NO: 2371; WAN024CAF_at; Start 768; Stop 792
caatgtattatgtcgggtccactcc

SEQ ID NO: 110469 - DNA, 25 bp, Artificial
  probe
  misc_feature (1)..(25): SEQ ID NO: 2371; WAN024CAF_at; Start 241; Stop 265
tcacctatggttgaaaacaatacag

SEQ ID NO: 110470 - DNA, 25 bp, Artificial
  probe
  misc_feature (1)..(25): SEQ ID NO: 2371; WAN024CAF_at; Start 1090; Stop 1114
cctgacaaggttgaacagttagaaa

SEQ ID NO: 110471 - DNA, 25 bp, Artificial
  probe
  misc_feature (1)..(25): SEQ ID NO: 2371; WAN024CAF_at; Start 1075; Stop 1099
ttactgacaaataatcctgacaagg

SEQ ID NO: 110472 - DNA, 25 bp, Artificial
  probe
  misc_feature (1)..(25): SEQ ID NO: 2371; WAN024CAF_at; Start 124; Stop 148
gacttaatttgttctgcacaagcag

SEQ ID NO: 110473 - DNA, 25 bp, Artificial
  probe
  misc_feature (1)..(25): SEQ ID NO: 2371; WAN024CAF_at; Start 529; Stop 553
catgatggcaaaatgatgagaacag

SEQ ID NO: 110474 - DNA, 25 bp, Artificial
  probe
  misc_feature (1)..(25): SEQ ID NO: 2371; WAN024CAF_at; Start 1046; Stop 1070
ttaaagatctgggacttcagtcact

SEQ ID NO: 110475 - DNA, 25 bp, Artificial
  probe
  misc_feature (1)..(25): SEQ ID NO: 2371; WAN024CAF_at; Start 77; Stop 101
gacgacttgttcttgttatagacga

SEQ ID NO: 110476 - DNA, 25 bp, Artificial
  probe
  misc_feature (1)..(25): SEQ ID NO: 2371; WAN024CAF_at; Start 727; Stop 751
catcatcttgctcttattatgggaa

SEQ ID NO: 110477 - DNA, 25 bp, Artificial
  probe
  misc_feature (1)..(25): SEQ ID NO: 2371; WAN024CAF_at; Start 388; Stop 412
tttcgcaggccaggacacatgtttc

SEQ ID NO: 110478 - DNA, 25 bp, Artificial
  probe
  misc_feature (1)..(25): SEQ ID NO: 2371; WAN024CAF_at; Start 59; Stop 83
tagaagcattgcagaagggacgact

SEQ ID NO: 110479 - DNA, 25 bp, Artificial
  probe
  misc_feature (1)..(25): SEQ ID NO: 2371; WAN024CAF_at; Start 297; Stop 321
tgattataaagaaacgaccacaggt

SEQ ID NO: 110480 - DNA, 25 bp, Artificial
  probe
  misc_feature (1)..(25): SEQ ID NO: 2371; WAN024CAF_at; Start 803; Stop 827
caggagatgttttaggctctttacg

SEQ ID NO: 110481 - DNA, 25 bp, Artificial
  probe
  misc_feature (1)..(25): SEQ ID NO: 2371; WAN024CAF_at; Start 971; Stop 995
tggatacgcttgatgccaatcttgc

SEQ ID NO: 110482 - DNA, 25 bp, Artificial
  probe
  misc_feature (1)..(25): SEQ ID NO: 2371; WAN024CAF_at; Start 783; Stop 807
ggtccactccgaatgtttaacagga

SEQ ID NO: 110483 - DNA, 25 bp, Artificial
  probe
  misc_feature (1)..(25): SEQ ID NO: 2371; WAN024CAF_at; Start 649; Stop 673
cgagtttcaactgtcaatatgccta

SEQ ID NO: 110484 - DNA, 25 bp, Artificial
  probe
  misc_feature (1)..(25): SEQ ID NO: 2371; WAN024CAF_at; Start 374; Stop 398
taacaccctctgattttcgcaggcc

SEQ ID NO: 110485 - DNA, 25 bp, Artificial
  probe
  misc_feature (1)..(25): SEQ ID NO: 2371; WAN024CAF_at; Start 985; Stop 1009
gccaatcttgcattaggctttgaag

SEQ ID NO: 110486 - DNA, 25 bp, Artificial
  probe
  misc_feature (1)..(25): SEQ ID NO: 2371; WAN024CAF_at; Start 174; Stop 198
ggctacttatgccaaaggattaatt

SEQ ID NO: 110487 - DNA, 25 bp, Artificial
  probe
  misc_feature (1)..(25): SEQ ID NO: 2371; WAN024CAF_at; Start 345; Stop 369
gaccgcacgtatgtgtgtagctgaa

SEQ ID NO: 110488 - DNA, 25 bp, Artificial
  probe
  misc_feature (1)..(25): SEQ ID NO: 2371; WAN024CAF_at; Start 325; Stop 349
tctgccgaggaaagaggactgaccg

SEQ ID NO: 110489 - DNA, 25 bp, Artificial
  probe
  misc_feature (1)..(25): SEQ ID NO: 2371; WAN024CAF_at; Start 102; Stop 126
caaggatagagaaaatgaaggagac

SEQ ID NO: 110490 - DNA, 25 bp, Artificial
  probe
  misc_feature (1)..(25): SEQ ID NO: 2371; WAN024CAF_at; Start 360; Stop 384
tgtagctgaagatataacaccctct

SEQ ID NO: 110491 - DNA, 25 bp, Artificial
  probe
  misc_feature (1)..(25): SEQ ID NO: 2371; WAN024CAF_at; Start 820; Stop 844
tctttacgttgcgattgtggacagc

SEQ ID NO: 110492 - DNA, 25 bp, Artificial
  probe
  misc_feature (1)..(25): SEQ ID NO: 2371; WAN024CAF_at; Start 634; Stop 658
gatcagctggtagaacgagtttcaa

SEQ ID NO: 110493 - DNA, 25 bp, Artificial
  probe
  misc_feature (1)..(25): SEQ ID NO: 2371; WAN024CAF_at; Start 883; Stop 907
tcgggtgtcttactttacttgcgac

SEQ ID NO: 110494 - DNA, 25 bp, Artificial
  probe
  misc_feature (1)..(25): SEQ ID NO: 2371; WAN024CAF_at; Start 139; Stop 163
gcacaagcagctacaacagaaaatg

SEQ ID NO: 110495 - DNA, 25 bp, Artificial
  probe
  misc_feature (1)..(25): SEQ ID NO: 2371; WAN024CAF_at; Start 440; Stop 464
tagaaagaaatggacacacagaagc

SEQ ID NO: 110496 - DNA, 25 bp, Artificial
  probe
  misc_feature (1)..(25): SEQ ID NO: 2371; WAN024CAF_at; Start 1142; Stop 1166
tatcaatcgaaatagaagccaatcc

SEQ ID NO: 110497 - DNA, 25 bp, Artificial
  probe
  misc_feature (1)..(25): SEQ ID NO: 2371; WAN024CAF_at; Start 6; Stop 30
ttttagcagaaaggataatcagtca

SEQ ID NO: 110498 - DNA, 25 bp, Artificial
  probe
  misc_feature (1)..(25): SEQ ID NO: 2371; WAN024CAF_at; Start 190; Stop 214
ggattaatttgtatgcctatgagcg

SEQ ID NO: 110499 - DNA, 25 bp, Artificial
  probe
  misc_feature (1)..(25): SEQ ID NO: 2371; WAN024CAF_at; Start 484; Stop 508
ttagctggactaaaagagtgtggcc

SEQ ID NO: 110500 - DNA, 25 bp, Artificial
  probe
  misc_feature (1)..(25): SEQ ID NO: 1374; WAN024CAG_at; Start 111; Stop 135
ctcgtttacattctctcttttgaga

SEQ ID NO: 110501 - DNA, 25 bp, Artificial
  probe
  misc_feature (1)..(25): SEQ ID NO: 1374; WAN024CAG_at; Start 69; Stop 93
tatttcaaaagctcctggaacccag

SEQ ID NO: 110502 - DNA, 25 bp, Artificial
  probe
  misc_feature (1)..(25): SEQ ID NO: 1374; WAN024CAG_at; Start 55; Stop 79
gatgcaatcagtggtatttcaaaag

SEQ ID NO: 110503 - DNA, 25 bp, Artificial
  probe
  misc_feature (1)..(25): SEQ ID NO: 1374; WAN024CAG_at; Start 36; Stop 60
tttactttttgccatttttgatgca

SEQ ID NO: 110504 - DNA, 25 bp, Artificial
  probe
  misc_feature (1)..(25): SEQ ID NO: 1374; WAN024CAG_at; Start 48; Stop 72
catttttgatgcaatcagtggtatt

SEQ ID NO: 110505 - DNA, 25 bp, Artificial
  probe
  misc_feature (1)..(25): SEQ ID NO: 1374; WAN024CAG_at; Start 63; Stop 87
cagtggtatttcaaaagctcctgga

SEQ ID NO: 110506 - DNA, 25 bp, Artificial
  probe
  misc_feature (1)..(25): SEQ ID NO: 1374; WAN024CAG_at; Start 76; Stop 100
aaagctcctggaacccaggctacct

SEQ ID NO: 110507 - DNA, 25 bp, Artificial
  probe
  misc_feature (1)..(25): SEQ ID NO: 1374; WAN024CAG_at; Start 104; Stop 128
tatctttctcgtttacattctctct

SEQ ID NO: 110508 - DNA, 25 bp, Artificial
  probe
  misc_feature (1)..(25): SEQ ID NO: 1374; WAN024CAG_at; Start 199; Stop 223
cctattttaatattgtttgctacta

SEQ ID NO: 110509 - DNA, 25 bp, Artificial
  probe
  misc_feature (1)..(25): SEQ ID NO: 1374; WAN024CAG_at; Start 7; Stop 31
gctcccaagcagataattgcatcat

SEQ ID NO: 110510 - DNA, 25 bp, Artificial
  probe
  misc_feature (1)..(25): SEQ ID NO: 1374; WAN024CAG_at; Start 10; Stop 34
cccaagcagataattgcatcatatt

SEQ ID NO: 110511 - DNA, 25 bp, Artificial
  probe
  misc_feature (1)..(25): SEQ ID NO: 1374; WAN024CAG_at; Start 66; Stop 90
tggtatttcaaaagctcctggaacc

SEQ ID NO: 110512 - DNA, 25 bp, Artificial
  probe
  misc_feature (1)..(25): SEQ ID NO: 1374; WAN024CAG_at; Start 183; Stop 207
tctcgctacaacaatacctatttta

SEQ ID NO: 110513 - DNA, 25 bp, Artificial
  probe
  misc_feature (1)..(25): SEQ ID NO: 1374; WAN024CAG_at; Start 179; Stop 203
taaatctcgctacaacaatacctat

SEQ ID NO: 110514 - DNA, 25 bp, Artificial
  probe
  misc_feature (1)..(25): SEQ ID NO: 1374; WAN024CAG_at; Start 73; Stop 97
tcaaaagctcctggaacccaggcta

SEQ ID NO: 110515 - DNA, 25 bp, Artificial
  probe
  misc_feature (1)..(25): SEQ ID NO: 1374; WAN024CAG_at; Start 145; Stop 169
gctccagataataattttgaagtta

SEQ ID NO: 110516 - DNA, 25 bp, Artificial
  probe
  misc_feature (1)..(25): SEQ ID NO: 1374; WAN024CAG_at; Start 163; Stop 187
gaagttataaattcattaaatctcg

SEQ ID NO: 110517 - DNA, 25 bp, Artificial
  probe
  misc_feature (1)..(25): SEQ ID NO: 1374; WAN024CAG_at; Start 46; Stop 70
gccatttttgatgcaatcagtggta

SEQ ID NO: 110518 - DNA, 25 bp, Artificial
  probe
  misc_feature (1)..(25): SEQ ID NO: 1374; WAN024CAG_at; Start 170; Stop 194
taaattcattaaatctcgctacaac

SEQ ID NO: 110519 - DNA, 25 bp, Artificial
  probe
  misc_feature (1)..(25): SEQ ID NO: 1374; WAN024CAG_at; Start 57; Stop 81
tgcaatcagtggtatttcaaaagct

SEQ ID NO: 110520 - DNA, 25 bp, Artificial
  probe
  misc_feature (1)..(25): SEQ ID NO: 1374; WAN024CAG_at; Start 209; Stop 233
tattgtttgctactaaattaccttc

SEQ ID NO: 110521 - DNA, 25 bp, Artificial
  probe
  misc_feature (1)..(25): SEQ ID NO: 1374; WAN024CAG_at; Start 131; Stop 155
tgagattatctagtgctccagataa

SEQ ID NO: 110522 - DNA, 25 bp, Artificial
  probe
  misc_feature (1)..(25): SEQ ID NO: 1374; WAN024CAG_at; Start 176; Stop 200
cattaaatctcgctacaacaatacc

SEQ ID NO: 110523 - DNA, 25 bp, Artificial
  probe
  misc_feature (1)..(25): SEQ ID NO: 1374; WAN024CAG_at; Start 5; Stop 29
cagctcccaagcagataattgcatc

SEQ ID NO: 110524 - DNA, 25 bp, Artificial
  probe
  misc_feature (1)..(25): SEQ ID NO: 1374; WAN024CAG_at; Start 62; Stop 86
tcagtggtatttcaaaagctcctgg

SEQ ID NO: 110525 - DNA, 25 bp, Artificial
  probe
  misc_feature (1)..(25): SEQ ID NO: 1374; WAN024CAG_at; Start 71; Stop 95
tttcaaaagctcctggaacccaggc

SEQ ID NO: 110526 - DNA, 25 bp, Artificial
  probe
  misc_feature (1)..(25): SEQ ID NO: 1374; WAN024CAG_at; Start 212; Stop 236
tgtttgctactaaattaccttcata

SEQ ID NO: 110527 - DNA, 25 bp, Artificial
  probe
  misc_feature (1)..(25): SEQ ID NO: 1374; WAN024CAG_at; Start 126; Stop 150
tcttttgagattatctagtgctcca

SEQ ID NO: 110528 - DNA, 25 bp, Artificial
  probe
  misc_feature (1)..(25): SEQ ID NO: 1374; WAN024CAG_at; Start 3; Stop 27
gacagctcccaagcagataattgca

SEQ ID NO: 110529 - DNA, 25 bp, Artificial
  probe
  misc_feature (1)..(25): SEQ ID NO: 1374; WAN024CAG_at; Start 128; Stop 152
ttttgagattatctagtgctccaga

SEQ ID NO: 110530 - DNA, 25 bp, Artificial
  probe
  misc_feature (1)..(25): SEQ ID NO: 1374; WAN024CAG_at; Start 16; Stop 40
cagataattgcatcatattttttac

SEQ ID NO: 110531 - DNA, 25 bp, Artificial
  probe
  misc_feature (1)..(25): SEQ ID NO: 1374; WAN024CAG_at; Start 68; Stop 92
gtatttcaaaagctcctggaaccca

SEQ ID NO: 110532 - DNA, 25 bp, Artificial
  probe
  misc_feature (1)..(25): SEQ ID NO: 1374; WAN024CAG_at; Start 59; Stop 83
caatcagtggtatttcaaaagctcc

SEQ ID NO: 110533 - DNA, 25 bp, Artificial
  probe
  misc_feature (1)..(25): SEQ ID NO: 1374; WAN024CAG_at; Start 2; Stop 26
tgacagctcccaagcagataattgc

SEQ ID NO: 110534 - DNA, 25 bp, Artificial
  probe
  misc_feature (1)..(25): SEQ ID NO: 1019; WAN024CAH_at; Start 333; Stop 357
tatgtttggtgtgctaacgacagat

SEQ ID NO: 110535 - DNA, 25 bp, Artificial
  probe
  misc_feature (1)..(25): SEQ ID NO: 1019; WAN024CAH_at; Start 295; Stop 319
ggaatcgcccaaatcagtttaaata

SEQ ID NO: 110536 - DNA, 25 bp, Artificial
  probe
  misc_feature (1)..(25): SEQ ID NO: 1019; WAN024CAH_at; Start 411; Stop 435
tgagtgtgcacaaggagctattgaa

SEQ ID NO: 110537 - DNA, 25 bp, Artificial
  probe
  misc_feature (1)..(25): SEQ ID NO: 1019; WAN024CAH_at; Start 176; Stop 200
taccactgattgcatcaaaaatggc

SEQ ID NO: 110538 - DNA, 25 bp, Artificial
  probe
  misc_feature (1)..(25): SEQ ID NO: 1019; WAN024CAH_at; Start 39; Stop 63
taaaataggtattgttgtagcgaga

SEQ ID NO: 110539 - DNA, 25 bp, Artificial
  probe
  misc_feature (1)..(25): SEQ ID NO: 1019; WAN024CAH_at; Start 12; Stop 36
tgaaggtaatttagtagcaaacaat

SEQ ID NO: 110540 - DNA, 25 bp, Artificial
  probe
  misc_feature (1)..(25): SEQ ID NO: 1019; WAN024CAH_at; Start 365; Stop 389
aacaagccatagaacgagctggtac

SEQ ID NO: 110541 - DNA, 25 bp, Artificial
  probe
  misc_feature (1)..(25): SEQ ID NO: 1019; WAN024CAH_at; Start 164; Stop 188
gagcttttgaaataccactgattgc

SEQ ID NO: 110542 - DNA, 25 bp, Artificial
  probe
  misc_feature (1)..(25): SEQ ID NO: 1019; WAN024CAH_at; Start 340; Stop 364
ggtgtgctaacgacagatacaattg

SEQ ID NO: 110543 - DNA, 25 bp, Artificial
  probe
  misc_feature (1)..(25): SEQ ID NO: 1019; WAN024CAH_at; Start 44; Stop 68
taggtattgttgtagcgagatttaa

SEQ ID NO: 110544 - DNA, 25 bp, Artificial
  probe
  misc_feature (1)..(25): SEQ ID NO: 1019; WAN024CAH_at; Start 56; Stop 80
tagcgagatttaatgaatttataac

SEQ ID NO: 110545 - DNA, 25 bp, Artificial
  probe
  misc_feature (1)..(25): SEQ ID NO: 1019; WAN024CAH_at; Start 6; Stop 30
cacttatgaaggtaatttagtagca

SEQ ID NO: 110546 - DNA, 25 bp, Artificial
  probe
  misc_feature (1)..(25): SEQ ID NO: 1019; WAN024CAH_at; Start 265; Stop 289
tatgattatgtatgtagcgaggtat

SEQ ID NO: 110547 - DNA, 25 bp, Artificial
  probe
  misc_feature (1)..(25): SEQ ID NO: 1019; WAN024CAH_at; Start 362; Stop 386
ttgaacaagccatagaacgagctgg

SEQ ID NO: 110548 - DNA, 25 bp, Artificial
  probe
  misc_feature (1)..(25): SEQ ID NO: 1019; WAN024CAH_at; Start 179; Stop 203
cactgattgcatcaaaaatggcaaa

SEQ ID NO: 110549 - DNA, 25 bp, Artificial
  probe
  misc_feature (1)..(25): SEQ ID NO: 1019; WAN024CAH_at; Start 198; Stop 222
ggcaaaaagtaaaaaatatgatgca

SEQ ID NO: 110550 - DNA, 25 bp, Artificial
  probe
  misc_feature (1)..(25): SEQ ID NO: 1019; WAN024CAH_at; Start 77; Stop 101
taacttcaaaattattatctggagc

SEQ ID NO: 110551 - DNA, 25 bp, Artificial
  probe
  misc_feature (1)..(25): SEQ ID NO: 1019; WAN024CAH_at; Start 156; Stop 180
ggttccaggagcttttgaaatacca

SEQ ID NO: 110552 - DNA, 25 bp, Artificial
  probe
  misc_feature (1)..(25): SEQ ID NO: 1019; WAN024CAH_at; Start 308; Stop 332
tcagtttaaatagcgaaattcctgt

SEQ ID NO: 110553 - DNA, 25 bp, Artificial
  probe
  misc_feature (1)..(25): SEQ ID NO: 1019; WAN024CAH_at; Start 422; Stop 446
aaggagctattgaaatggtcaacct

SEQ ID NO: 110554 - DNA, 25 bp, Artificial
  probe
  misc_feature (1)..(25): SEQ ID NO: 1019; WAN024CAH_at; Start 111; Stop 135
tctcaaaagagagaatgtaaacgag

SEQ ID NO: 110555 - DNA, 25 bp, Artificial
  probe
  misc_feature (1)..(25): SEQ ID NO: 1019; WAN024CAH_at; Start 146; Stop 170
aggtagcctgggttccaggagcttt

SEQ ID NO: 110556 - DNA, 25 bp, Artificial
  probe
  misc_feature (1)..(25): SEQ ID NO: 1019; WAN024CAH_at; Start 119; Stop 143
gagagaatgtaaacgagaaagatat

SEQ ID NO: 110557 - DNA, 25 bp, Artificial
  probe
  misc_feature (1)..(25): SEQ ID NO: 1019; WAN024CAH_at; Start 23; Stop 47
tagtagcaaacaatattaaaatagg

SEQ ID NO: 110558 - DNA, 25 bp, Artificial
  probe
  misc_feature (1)..(25): SEQ ID NO: 1019; WAN024CAH_at; Start 92; Stop 116
tatctggagcactagataatctcaa

SEQ ID NO: 110559 - DNA, 25 bp, Artificial
  probe
  misc_feature (1)..(25): SEQ ID NO: 1019; WAN024CAH_at; Start 400; Stop 424
aataagggttctgagtgtgcacaag

SEQ ID NO: 110560 - DNA, 25 bp, Artificial
  probe
  misc_feature (1)..(25): SEQ ID NO: 1019; WAN024CAH_at; Start 322; Stop 346
gaaattcctgttatgtttggtgtgc

SEQ ID NO: 110561 - DNA, 25 bp, Artificial
  probe
  misc_feature (1)..(25): SEQ ID NO: 1019; WAN024CAH_at; Start 152; Stop 176
cctgggttccaggagcttttgaaat

SEQ ID NO: 110562 - DNA, 25 bp, Artificial
  probe
  misc_feature (1)..(25): SEQ ID NO: 1019; WAN024CAH_at; Start 97; Stop 121
ggagcactagataatctcaaaagag

SEQ ID NO: 110563 - DNA, 25 bp, Artificial
  probe
  misc_feature (1)..(25): SEQ ID NO: 1019; WAN024CAH_at; Start 262; Stop 286
cattatgattatgtatgtagcgagg

SEQ ID NO: 110564 - DNA, 25 bp, Artificial
  probe
  misc_feature (1)..(25): SEQ ID NO: 1019; WAN024CAH_at; Start 347; Stop 371
taacgacagatacaattgaacaagc

SEQ ID NO: 110565 - DNA, 25 bp, Artificial
  probe
  misc_feature (1)..(25): SEQ ID NO: 1019; WAN024CAH_at; Start 395; Stop 419
caggaaataagggttctgagtgtgc

SEQ ID NO: 110566 - DNA, 25 bp, Artificial
  probe
  misc_feature (1)..(25): SEQ ID NO: 1019; WAN024CAH_at; Start 406; Stop 430
ggttctgagtgtgcacaaggagcta

SEQ ID NO: 110567 - DNA, 25 bp, Artificial
  probe
  misc_feature (1)..(25): SEQ ID NO: 1019; WAN024CAH_at; Start 301; Stop 325
gcccaaatcagtttaaatagcgaaa

SEQ ID NO: 110568 - DNA, 25 bp, Artificial
  probe
  misc_feature (1)..(25): SEQ ID NO: 5529; WAN024CAI_at; Start 102; Stop 126
tatcaatgatatgagacaactccgc

SEQ ID NO: 110569 - DNA, 25 bp, Artificial
  probe
  misc_feature (1)..(25): SEQ ID NO: 5529; WAN024CAI_at; Start 66; Stop 90
aaatctcaggatgggccaagcccag

SEQ ID NO: 110570 - DNA, 25 bp, Artificial
  probe
  misc_feature (1)..(25): SEQ ID NO: 5529; WAN024CAI_at; Start 9; Stop 33
attgaccagtccctgctgtccgcgt

SEQ ID NO: 110571 - DNA, 25 bp, Artificial
  probe
  misc_feature (1)..(25): SEQ ID NO: 5529; WAN024CAI_at; Start 214; Stop 238
tgggatgacttcctcaacttcaccc

SEQ ID NO: 110572 - DNA, 25 bp, Artificial
  probe
  misc_feature (1)..(25): SEQ ID NO: 5529; WAN024CAI_at; Start 118; Stop 142
caactccgcttgctggctcttcata

SEQ ID NO: 110573 - DNA, 25 bp, Artificial
  probe
  misc_feature (1)..(25): SEQ ID NO: 5529; WAN024CAI_at; Start 22; Stop 46
tgctgtccgcgtcatttccttgcca

SEQ ID NO: 110574 - DNA, 25 bp, Artificial
  probe
  misc_feature (1)..(25): SEQ ID NO: 5529; WAN024CAI_at; Start 58; Stop 82
gctaaaagaaatctcaggatgggcc

SEQ ID NO: 110575 - DNA, 25 bp, Artificial
  probe
  misc_feature (1)..(25): SEQ ID NO: 5529; WAN024CAI_at; Start 188; Stop 212
accttggttcccacaggactagtcg

SEQ ID NO: 110576 - DNA, 25 bp, Artificial
  probe
  misc_feature (1)..(25): SEQ ID NO: 5529; WAN024CAI_at; Start 71; Stop 95
tcaggatgggccaagcccagacggt

SEQ ID NO: 110577 - DNA, 25 bp, Artificial
  probe
  misc_feature (1)..(25): SEQ ID NO: 5529; WAN024CAI_at; Start 131; Stop 155
tggctcttcatatacttgagacggg

SEQ ID NO: 110578 - DNA, 25 bp, Artificial
  probe
  misc_feature (1)..(25): SEQ ID NO: 5529; WAN024CAI_at; Start 211; Stop 235
cgctgggatgacttcctcaacttca

SEQ ID NO: 110579 - DNA, 25 bp, Artificial
  probe
  misc_feature (1)..(25): SEQ ID NO: 5529; WAN024CAI_at; Start 1; Stop 25
ttggcgcaattgaccagtccctgct

SEQ ID NO: 110580 - DNA, 25 bp, Artificial
  probe
  misc_feature (1)..(25): SEQ ID NO: 5529; WAN024CAI_at; Start 192; Stop 216
tggttcccacaggactagtcgctgg

SEQ ID NO: 110581 - DNA, 25 bp, Artificial
  probe
  misc_feature (1)..(25): SEQ ID NO: 5529; WAN024CAI_at; Start 109; Stop 133
gatatgagacaactccgcttgctgg

SEQ ID NO: 110582 - DNA, 25 bp, Artificial
  probe
  misc_feature (1)..(25): SEQ ID NO: 5529; WAN024CAI_at; Start 158; Stop 182
ggcgtgttgaaaaagagatcctcca

SEQ ID NO: 110583 - DNA, 25 bp, Artificial
  probe
  misc_feature (1)..(25): SEQ ID NO: 5529; WAN024CAI_at; Start 205; Stop 229
actagtcgctgggatgacttcctca

SEQ ID NO: 110584 - DNA, 25 bp, Artificial
  probe
  misc_feature (1)..(25): SEQ ID NO: 5529; WAN024CAI_at; Start 139; Stop 163
catatacttgagacgggcaggcgtg

SEQ ID NO: 110585 - DNA, 25 bp, Artificial
  probe
  misc_feature (1)..(25): SEQ ID NO: 5529; WAN024CAI_at; Start 201; Stop 225
caggactagtcgctgggatgacttc

SEQ ID NO: 110586 - DNA, 25 bp, Artificial
  probe
  misc_feature (1)..(25): SEQ ID NO: 5529; WAN024CAI_at; Start 185; Stop 209
caaaccttggttcccacaggactag

SEQ ID NO: 110587 - DNA, 25 bp, Artificial
  probe
  misc_feature (1)..(25): SEQ ID NO: 5529; WAN024CAI_at; Start 42; Stop 66
tgccatcactaatcaagctaaaaga

SEQ ID NO: 110588 - DNA, 25 bp, Artificial
  probe
  misc_feature (1)..(25): SEQ ID NO: 5529; WAN024CAI_at; Start 125; Stop 149
gcttgctggctcttcatatacttga

SEQ ID NO: 110589 - DNA, 25 bp, Artificial
  probe
  misc_feature (1)..(25): SEQ ID NO: 5529; WAN024CAI_at; Start 154; Stop 178
ggcaggcgtgttgaaaaagagatcc

SEQ ID NO: 110590 - DNA, 25 bp, Artificial
  probe
  misc_feature (1)..(25): SEQ ID NO: 5529; WAN024CAI_at; Start 137; Stop 161
ttcatatacttgagacgggcaggcg

SEQ ID NO: 110591 - DNA, 25 bp, Artificial
  probe
  misc_feature (1)..(25): SEQ ID NO: 5529; WAN024CAI_at; Start 162; Stop 186
tgttgaaaaagagatcctccacaca

SEQ ID NO: 110592 - DNA, 25 bp, Artificial
  probe
  misc_feature (1)..(25): SEQ ID NO: 5529; WAN024CAI_at; Start 6; Stop 30
gcaattgaccagtccctgctgtccg

SEQ ID NO: 110593 - DNA, 25 bp, Artificial
  probe
  misc_feature (1)..(25): SEQ ID NO: 5529; WAN024CAI_at; Start 114; Stop 138
gagacaactccgcttgctggctctt

SEQ ID NO: 110594 - DNA, 25 bp, Artificial
  probe
  misc_feature (1)..(25): SEQ ID NO: 5529; WAN024CAI_at; Start 111; Stop 135
tatgagacaactccgcttgctggct

SEQ ID NO: 110595 - DNA, 25 bp, Artificial
  probe
  misc_feature (1)..(25): SEQ ID NO: 5529; WAN024CAI_at; Start 172; Stop 196
gagatcctccacacaaaccttggtt

SEQ ID NO: 110596 - DNA, 25 bp, Artificial
  probe
  misc_feature (1)..(25): SEQ ID NO: 5529; WAN024CAI_at; Start 78; Stop 102
gggccaagcccagacggttgacaat

SEQ ID NO: 110597 - DNA, 25 bp, Artificial
  probe
  misc_feature (1)..(25): SEQ ID NO: 5529; WAN024CAI_at; Start 29; Stop 53
cgcgtcatttccttgccatcactaa

SEQ ID NO: 110598 - DNA, 25 bp, Artificial
  probe
  misc_feature (1)..(25): SEQ ID NO: 5529; WAN024CAI_at; Start 87; Stop 111
ccagacggttgacaatatcaatgat

SEQ ID NO: 110599 - DNA, 25 bp, Artificial
  probe
  misc_feature (1)..(25): SEQ ID NO: 5529; WAN024CAI_at; Start 63; Stop 87
aagaaatctcaggatgggccaagcc

SEQ ID NO: 110600 - DNA, 25 bp, Artificial
  probe
  misc_feature (1)..(25): SEQ ID NO: 5529; WAN024CAI_at; Start 82; Stop 106
caagcccagacggttgacaatatca

SEQ ID NO: 110601 - DNA, 25 bp, Artificial
  probe
  misc_feature (1)..(25): SEQ ID NO: 5529; WAN024CAI_at; Start 198; Stop 222
ccacaggactagtcgctgggatgac

SEQ ID NO: 110602 - DNA, 25 bp, Artificial
  probe
  misc_feature (1)..(25): SEQ ID NO: 2464; WAN024CAJ_at; Start 106; Stop 130
actagagcccgcgtcaatggcattt

SEQ ID NO: 110603 - DNA, 25 bp, Artificial
  probe
  misc_feature (1)..(25): SEQ ID NO: 2464; WAN024CAJ_at; Start 72; Stop 96
tgagaccagcttcctcaatctcaat

SEQ ID NO: 110604 - DNA, 25 bp, Artificial
  probe
  misc_feature (1)..(25): SEQ ID NO: 2464; WAN024CAJ_at; Start 136; Stop 160
caactctttgaccacactggcagga

SEQ ID NO: 110605 - DNA, 25 bp, Artificial
  probe
  misc_feature (1)..(25): SEQ ID NO: 2464; WAN024CAJ_at; Start 216; Stop 240
taatatgagacatctttcagcccct

SEQ ID NO: 110606 - DNA, 25 bp, Artificial
  probe
  misc_feature (1)..(25): SEQ ID NO: 2464; WAN024CAJ_at; Start 140; Stop 164
tctttgaccacactggcaggacgtt

SEQ ID NO: 110607 - DNA, 25 bp, Artificial
  probe
  misc_feature (1)..(25): SEQ ID NO: 2464; WAN024CAJ_at; Start 108; Stop 132
tagagcccgcgtcaatggcattttc

SEQ ID NO: 110608 - DNA, 25 bp, Artificial
  probe
  misc_feature (1)..(25): SEQ ID NO: 2464; WAN024CAJ_at; Start 55; Stop 79
cgtgatttgaaccttcttgagacca

SEQ ID NO: 110609 - DNA, 25 bp, Artificial
  probe
  misc_feature (1)..(25): SEQ ID NO: 2464; WAN024CAJ_at; Start 182; Stop 206
gcgatttggtttgccagcatctctg

SEQ ID NO: 110610 - DNA, 25 bp, Artificial
  probe
  misc_feature (1)..(25): SEQ ID NO: 2464; WAN024CAJ_at; Start 17; Stop 41
aactccacctcatcgtgggcaattc

SEQ ID NO: 110611 - DNA, 25 bp, Artificial
  probe
  misc_feature (1)..(25): SEQ ID NO: 2464; WAN024CAJ_at; Start 218; Stop 242
atatgagacatctttcagccccttt

SEQ ID NO: 110612 - DNA, 25 bp, Artificial
  probe
  misc_feature (1)..(25): SEQ ID NO: 2464; WAN024CAJ_at; Start 124; Stop 148
ggcattttctaccaactctttgacc

SEQ ID NO: 110613 - DNA, 25 bp, Artificial
  probe
  misc_feature (1)..(25): SEQ ID NO: 2464; WAN024CAJ_at; Start 32; Stop 56
tgggcaattccatgaccgttatccg

SEQ ID NO: 110614 - DNA, 25 bp, Artificial
  probe
  misc_feature (1)..(25): SEQ ID NO: 2464; WAN024CAJ_at; Start 185; Stop 209
atttggtttgccagcatctctggca

SEQ ID NO: 110615 - DNA, 25 bp, Artificial
  probe
  misc_feature (1)..(25): SEQ ID NO: 2464; WAN024CAJ_at; Start 196; Stop 220
cagcatctctggcaattcaataata

SEQ ID NO: 110616 - DNA, 25 bp, Artificial
  probe
  misc_feature (1)..(25): SEQ ID NO: 2464; WAN024CAJ_at; Start 110; Stop 134
gagcccgcgtcaatggcattttcta

SEQ ID NO: 110617 - DNA, 25 bp, Artificial
  probe
  misc_feature (1)..(25): SEQ ID NO: 2464; WAN024CAJ_at; Start 100; Stop 124
aatctgactagagcccgcgtcaatg

SEQ ID NO: 110618 - DNA, 25 bp, Artificial
  probe
  misc_feature (1)..(25): SEQ ID NO: 2464; WAN024CAJ_at; Start 150; Stop 174
cactggcaggacgttcaatgacctc

SEQ ID NO: 110619 - DNA, 25 bp, Artificial
  probe
  misc_feature (1)..(25): SEQ ID NO: 2464; WAN024CAJ_at; Start 20; Stop 44
tccacctcatcgtgggcaattccat

SEQ ID NO: 110620 - DNA, 25 bp, Artificial
  probe
  misc_feature (1)..(25): SEQ ID NO: 2464; WAN024CAJ_at; Start 26; Stop 50
tcatcgtgggcaattccatgaccgt

SEQ ID NO: 110621 - DNA, 25 bp, Artificial
  probe
  misc_feature (1)..(25): SEQ ID NO: 2464; WAN024CAJ_at; Start 148; Stop 172
cacactggcaggacgttcaatgacc

SEQ ID NO: 110622 - DNA, 25 bp, Artificial
  probe
  misc_feature (1)..(25): SEQ ID NO: 2464; WAN024CAJ_at; Start 62; Stop 86
tgaaccttcttgagaccagcttcct

SEQ ID NO: 110623 - DNA, 25 bp, Artificial
  probe
  misc_feature (1)..(25): SEQ ID NO: 2464; WAN024CAJ_at; Start 203; Stop 227
tctggcaattcaataatatgagaca

SEQ ID NO: 110624 - DNA, 25 bp, Artificial
  probe
  misc_feature (1)..(25): SEQ ID NO: 2464; WAN024CAJ_at; Start 235; Stop 259
gcccctttctgtatctattttccta

SEQ ID NO: 110625 - DNA, 25 bp, Artificial
  probe
  misc_feature (1)..(25): SEQ ID NO: 2464; WAN024CAJ_at; Start 142; Stop 166
tttgaccacactggcaggacgttca

SEQ ID NO: 110626 - DNA, 25 bp, Artificial
  probe
  misc_feature (1)..(25): SEQ ID NO: 2464; WAN024CAJ_at; Start 145; Stop 169
gaccacactggcaggacgttcaatg

SEQ ID NO: 110627 - DNA, 25 bp, Artificial
  probe
  misc_feature (1)..(25): SEQ ID NO: 2464; WAN024CAJ_at; Start 41; Stop 65
ccatgaccgttatccgtgatttgaa

SEQ ID NO: 110628 - DNA, 25 bp, Artificial
  probe
  misc_feature (1)..(25): SEQ ID NO: 2464; WAN024CAJ_at; Start 156; Stop 180
caggacgttcaatgacctctccagc

SEQ ID NO: 110629 - DNA, 25 bp, Artificial
  probe
  misc_feature (1)..(25): SEQ ID NO: 2464; WAN024CAJ_at; Start 153; Stop 177
tggcaggacgttcaatgacctctcc

SEQ ID NO: 110630 - DNA, 25 bp, Artificial
  probe
  misc_feature (1)..(25): SEQ ID NO: 2464; WAN024CAJ_at; Start 98; Stop 122
ataatctgactagagcccgcgtcaa

SEQ ID NO: 110631 - DNA, 25 bp, Artificial
  probe
  misc_feature (1)..(25): SEQ ID NO: 2464; WAN024CAJ_at; Start 44; Stop 68
tgaccgttatccgtgatttgaacct

SEQ ID NO: 110632 - DNA, 25 bp, Artificial
  probe
  misc_feature (1)..(25): SEQ ID NO: 2464; WAN024CAJ_at; Start 131; Stop 155
tctaccaactctttgaccacactgg

SEQ ID NO: 110633 - DNA, 25 bp, Artificial
  probe
  misc_feature (1)..(25): SEQ ID NO: 2464; WAN024CAJ_at; Start 35; Stop 59
gcaattccatgaccgttatccgtga

SEQ ID NO: 110634 - DNA, 25 bp, Artificial
  probe
  misc_feature (1)..(25): SEQ ID NO: 2464; WAN024CAJ_at; Start 58; Stop 82
gatttgaaccttcttgagaccagct

SEQ ID NO: 110635 - DNA, 25 bp, Artificial
  probe
  misc_feature (1)..(25): SEQ ID NO: 2464; WAN024CAJ_at; Start 51; Stop 75
tatccgtgatttgaaccttcttgag

SEQ ID NO: 110636 - DNA, 25 bp, Artificial
  probe
  misc_feature (1)..(25): SEQ ID NO: 1315; WAN024CAK-3_at; Start 124; Stop 148
ctcaggaacgggtcaagtacgagga

SEQ ID NO: 110637 - DNA, 25 bp, Artificial
  probe
  misc_feature (1)..(25): SEQ ID NO: 1315; WAN024CAK-3_at; Start 531; Stop 555
tataactgtcctcacggacgtcctg

SEQ ID NO: 110638 - DNA, 25 bp, Artificial
  probe
  misc_feature (1)..(25): SEQ ID NO: 1315; WAN024CAK-3_at; Start 537; Stop 561
tgtcctcacggacgtcctgttttgg

SEQ ID NO: 110639 - DNA, 25 bp, Artificial
  probe
  misc_feature (1)..(25): SEQ ID NO: 1315; WAN024CAK-3_at; Start 137; Stop 161
caagtacgaggagtaccgtgaaagc

SEQ ID NO: 110640 - DNA, 25 bp, Artificial
  probe
  misc_feature (1)..(25): SEQ ID NO: 1315; WAN024CAK-3_at; Start 2; Stop 26
tgacaaactggagcgagaagaagca

SEQ ID NO: 110641 - DNA, 25 bp, Artificial
  probe
  misc_feature (1)..(25): SEQ ID NO: 1315; WAN024CAK-3_at; Start 543; Stop 567
cacggacgtcctgttttggtgcatt

SEQ ID NO: 110642 - DNA, 25 bp, Artificial
  probe
  misc_feature (1)..(25): SEQ ID NO: 1315; WAN024CAK-3_at; Start 109; Stop 133
tagatcagcacgctgctcaggaacg

SEQ ID NO: 110643 - DNA, 25 bp, Artificial
  probe
  misc_feature (1)..(25): SEQ ID NO: 1315; WAN024CAK-3_at; Start 80; Stop 104
tgcccaagggcgagatggactttac

SEQ ID NO: 110644 - DNA, 25 bp, Artificial
  probe
  misc_feature (1)..(25): SEQ ID NO: 1315; WAN024CAK-3_at; Start 59; Stop 83
aatgcacgggacttatctctttgcc

SEQ ID NO: 110645 - DNA, 25 bp, Artificial
  probe
  misc_feature (1)..(25): SEQ ID NO: 1315; WAN024CAK-3_at; Start 523; Stop 547
acaatccctataactgtcctcacgg

SEQ ID NO: 110646 - DNA, 25 bp, Artificial
  probe
  misc_feature (1)..(25): SEQ ID NO: 1315; WAN024CAK-3_at; Start 119; Stop 143
cgctgctcaggaacgggtcaagtac

SEQ ID NO: 110647 - DNA, 25 bp, Artificial
  probe
  misc_feature (1)..(25): SEQ ID NO: 1315; WAN024CAK-3_at; Start 147; Stop 171
gagtaccgtgaaagcattggcaatg

SEQ ID NO: 110648 - DNA, 25 bp, Artificial
  probe
  misc_feature (1)..(25): SEQ ID NO: 1315; WAN024CAK-3_at; Start 100; Stop 124
tttacatcatagatcagcacgctgc

SEQ ID NO: 110649 - DNA, 25 bp, Artificial
  probe
  misc_feature (1)..(25): SEQ ID NO: 1315; WAN024CAK-3_at; Start 598; Stop 622
gacgtattcaggaaaatcacaccag

SEQ ID NO: 110650 - DNA, 25 bp, Artificial
  probe
  misc_feature (1)..(25): SEQ ID NO: 1315; WAN024CAK-3_at; Start 96; Stop 120
ggactttacatcatagatcagcacg

SEQ ID NO: 110651 - DNA, 25 bp, Artificial
  probe
  misc_feature (1)..(25): SEQ ID NO: 1315; WAN024CAK-3_at; Start 49; Stop 73
ttttcggacaaatgcacgggactta

SEQ ID NO: 110652 - DNA, 25 bp, Artificial
  probe
  misc_feature (1)..(25): SEQ ID NO: 1315; WAN024CAK-3_at; Start 572; Stop 596
caagtcggatatggaaaagatgttc

SEQ ID NO: 110653 - DNA, 25 bp, Artificial
  probe
  misc_feature (1)..(25): SEQ ID NO: 1315; WAN024CAK-3_at; Start 602; Stop 626
tattcaggaaaatcacaccagtctc

SEQ ID NO: 110654 - DNA, 25 bp, Artificial
  probe
  misc_feature (1)..(25): SEQ ID NO: 1315; WAN024CAK-3_at; Start 608; Stop 632
ggaaaatcacaccagtctccgtgag

SEQ ID NO: 110655 - DNA, 25 bp, Artificial
  probe
  misc_feature (1)..(25): SEQ ID NO: 1315; WAN024CAK-3_at; Start 613; Stop 637
atcacaccagtctccgtgagttggg

SEQ ID NO: 110656 - DNA, 25 bp, Artificial
  probe
  misc_feature (1)..(25): SEQ ID NO: 1315; WAN024CAK-3_at; Start 84; Stop 108
caagggcgagatggactttacatca

SEQ ID NO: 110657 - DNA, 25 bp, Artificial
  probe
  misc_feature (1)..(25): SEQ ID NO: 1315; WAN024CAK-3_at; Start 16; Stop 40
gagaagaagcatccagcttcccaga

SEQ ID NO: 110658 - DNA, 25 bp, Artificial
  probe
  misc_feature (1)..(25): SEQ ID NO: 1315; WAN024CAK-3_at; Start 115; Stop 139
agcacgctgctcaggaacgggtcaa

SEQ ID NO: 110659 - DNA, 25 bp, Artificial
  probe
  misc_feature (1)..(25): SEQ ID NO: 1315; WAN024CAK-3_at; Start 68; Stop 92
gacttatctctttgcccaagggcga

SEQ ID NO: 110660 - DNA, 25 bp, Artificial
  probe
  misc_feature (1)..(25): SEQ ID NO: 1315; WAN024CAK-3_at; Start 547; Stop 571
gacgtcctgttttggtgcattttac

SEQ ID NO: 110661 - DNA, 25 bp, Artificial
  probe
  misc_feature (1)..(25): SEQ ID NO: 1315; WAN024CAK-3_at; Start 52; Stop 76
tcggacaaatgcacgggacttatct

SEQ ID NO: 110662 - DNA, 25 bp, Artificial
  probe
  misc_feature (1)..(25): SEQ ID NO: 1315; WAN024CAK-3_at; Start 143; Stop 167
cgaggagtaccgtgaaagcattggc

SEQ ID NO: 110663 - DNA, 25 bp, Artificial
  probe
  misc_feature (1)..(25): SEQ ID NO: 1315; WAN024CAK-3_at; Start 153; Stop 177
cgtgaaagcattggcaatgttgacc

SEQ ID NO: 110664 - DNA, 25 bp, Artificial
  probe
  misc_feature (1)..(25): SEQ ID NO: 1315; WAN024CAK-3_at; Start 586; Stop 610
aaaagatgttccgacgtattcagga

SEQ ID NO: 110665 - DNA, 25 bp, Artificial
  probe
  misc_feature (1)..(25): SEQ ID NO: 1315; WAN024CAK-3_at; Start 43; Stop 67
tggagtttttcggacaaatgcacgg

SEQ ID NO: 110666 - DNA, 25 bp, Artificial
  probe
  misc_feature (1)..(25): SEQ ID NO: 1315; WAN024CAK-3_at; Start 5; Stop 29
caaactggagcgagaagaagcatcc

SEQ ID NO: 110667 - DNA, 25 bp, Artificial
  probe
  misc_feature (1)..(25): SEQ ID NO: 1315; WAN024CAK-3_at; Start 514; Stop 538
ctcaatgtgacaatccctataactg

SEQ ID NO: 110668 - DNA, 25 bp, Artificial
  probe
  misc_feature (1)..(25): SEQ ID NO: 1315; WAN024CAK-3_at; Start 562; Stop 586
tgcattttaccaagtcggatatgga

SEQ ID NO: 110669 - DNA, 25 bp, Artificial
  probe
  misc_feature (1)..(25): SEQ ID NO: 1315; WAN024CAK-3_at; Start 10; Stop 34
tggagcgagaagaagcatccagctt

SEQ ID NO: 110670 - DNA, 25 bp, Artificial
  probe
  misc_feature (1)..(25): SEQ ID NO: 2927; WAN024CAK-5_at; Start 484; Stop 508
aagagccagcaagcggagttgtctc

SEQ ID NO: 110671 - DNA, 25 bp, Artificial
  probe
  misc_feature (1)..(25): SEQ ID NO: 2927; WAN024CAK-5_at; Start 513; Stop 537
cattgatattgtcaaccgtctgggc

SEQ ID NO: 110672 - DNA, 25 bp, Artificial
  probe
  misc_feature (1)..(25): SEQ ID NO: 2927; WAN024CAK-5_at; Start 536; Stop 560
gcttggcccatcctgagatttcttt

SEQ ID NO: 110673 - DNA, 25 bp, Artificial
  probe
  misc_feature (1)..(25): SEQ ID NO: 2927; WAN024CAK-5_at; Start 469; Stop 493
cgtctcaagtatatgaagagccagc

SEQ ID NO: 110674 - DNA, 25 bp, Artificial
  probe
  misc_feature (1)..(25): SEQ ID NO: 2927; WAN024CAK-5_at; Start 522; Stop 546
tgtcaaccgtctgggcttggcccat

SEQ ID NO: 110675 - DNA, 25 bp, Artificial
  probe
  misc_feature (1)..(25): SEQ ID NO: 2927; WAN024CAK-5_at; Start 496; Stop 520
gcggagttgtctcatatcattgata

SEQ ID NO: 110676 - DNA, 25 bp, Artificial
  probe
  misc_feature (1)..(25): SEQ ID NO: 2927; WAN024CAK-5_at; Start 419; Stop 443
ctgtgggaaccaaggtttgtgtgga

SEQ ID NO: 110677 - DNA, 25 bp, Artificial
  probe
  misc_feature (1)..(25): SEQ ID NO: 2927; WAN024CAK-5_at; Start 133; Stop 157
attgagattgaggaagctggtctca

SEQ ID NO: 110678 - DNA, 25 bp, Artificial
  probe
  misc_feature (1)..(25): SEQ ID NO: 2927; WAN024CAK-5_at; Start 2; Stop 26
tgtctcatattattgaattgccaga

SEQ ID NO: 110679 - DNA, 25 bp, Artificial
  probe
  misc_feature (1)..(25): SEQ ID NO: 2927; WAN024CAK-5_at; Start 628; Stop 652
gcagggatttacggtttggtcagtg

SEQ ID NO: 110680 - DNA, 25 bp, Artificial
  probe
  misc_feature (1)..(25): SEQ ID NO: 2927; WAN024CAK-5_at; Start 137; Stop 161
agattgaggaagctggtctcaagaa

SEQ ID NO: 110681 - DNA, 25 bp, Artificial
  probe
  misc_feature (1)..(25): SEQ ID NO: 2927; WAN024CAK-5_at; Start 23; Stop 47
cagagatgctggcaaaccaaatcgc

SEQ ID NO: 110682 - DNA, 25 bp, Artificial
  probe
  misc_feature (1)..(25): SEQ ID NO: 2927; WAN024CAK-5_at; Start 55; Stop 79
gaggtcattgaacgtcctgccagtg

SEQ ID NO: 110683 - DNA, 25 bp, Artificial
  probe
  misc_feature (1)..(25): SEQ ID NO: 2927; WAN024CAK-5_at; Start 488; Stop 512
gccagcaagcggagttgtctcatat

SEQ ID NO: 110684 - DNA, 25 bp, Artificial
  probe
  misc_feature (1)..(25): SEQ ID NO: 2927; WAN024CAK-5_at; Start 97; Stop 121
gaaaatgccattgacgcgggctcta

SEQ ID NO: 110685 - DNA, 25 bp, Artificial
  probe
  misc_feature (1)..(25): SEQ ID NO: 2927; WAN024CAK-5_at; Start 16; Stop 40
gaattgccagagatgctggcaaacc

SEQ ID NO: 110686 - DNA, 25 bp, Artificial
  probe
  misc_feature (1)..(25): SEQ ID NO: 2927; WAN024CAK-5_at; Start 475; Stop 499
aagtatatgaagagccagcaagcgg

SEQ ID NO: 110687 - DNA, 25 bp, Artificial
  probe
  misc_feature (1)..(25): SEQ ID NO: 2927; WAN024CAK-5_at; Start 526; Stop 550
aaccgtctgggcttggcccatcctg

SEQ ID NO: 110688 - DNA, 25 bp, Artificial
  probe
  misc_feature (1)..(25): SEQ ID NO: 2927; WAN024CAK-5_at; Start 480; Stop 504
tatgaagagccagcaagcggagttg

SEQ ID NO: 110689 - DNA, 25 bp, Artificial
  probe
  misc_feature (1)..(25): SEQ ID NO: 2927; WAN024CAK-5_at; Start 490; Stop 514
cagcaagcggagttgtctcatatca

SEQ ID NO: 110690 - DNA, 25 bp, Artificial
  probe
  misc_feature (1)..(25): SEQ ID NO: 2927; WAN024CAK-5_at; Start 516; Stop 540
tgatattgtcaaccgtctgggcttg

SEQ ID NO: 110691 - DNA, 25 bp, Artificial
  probe
  misc_feature (1)..(25): SEQ ID NO: 2927; WAN024CAK-5_at; Start 12; Stop 36
tattgaattgccagagatgctggca

SEQ ID NO: 110692 - DNA, 25 bp, Artificial
  probe
  misc_feature (1)..(25): SEQ ID NO: 2927; WAN024CAK-5_at; Start 57; Stop 81
ggtcattgaacgtcctgccagtgtg

SEQ ID NO: 110693 - DNA, 25 bp, Artificial
  probe
  misc_feature (1)..(25): SEQ ID NO: 2927; WAN024CAK-5_at; Start 107; Stop 131
ttgacgcgggctctagtcagattat

SEQ ID NO: 110694 - DNA, 25 bp, Artificial
  probe
  misc_feature (1)..(25): SEQ ID NO: 2927; WAN024CAK-5_at; Start 482; Stop 506
tgaagagccagcaagcggagttgtc

SEQ ID NO: 110695 - DNA, 25 bp, Artificial
  probe
  misc_feature (1)..(25): SEQ ID NO: 2927; WAN024CAK-5_at; Start 508; Stop 532
catatcattgatattgtcaaccgtc

SEQ ID NO: 110696 - DNA, 25 bp, Artificial
  probe
  misc_feature (1)..(25): SEQ ID NO: 2927; WAN024CAK-5_at; Start 519; Stop 543
tattgtcaaccgtctgggcttggcc

SEQ ID NO: 110697 - DNA, 25 bp, Artificial
  probe
  misc_feature (1)..(25): SEQ ID NO: 2927; WAN024CAK-5_at; Start 534; Stop 558
gggcttggcccatcctgagatttct

SEQ ID NO: 110698 - DNA, 25 bp, Artificial
  probe
  misc_feature (1)..(25): SEQ ID NO: 2927; WAN024CAK-5_at; Start 493; Stop 517
caagcggagttgtctcatatcattg

SEQ ID NO: 110699 - DNA, 25 bp, Artificial
  probe
  misc_feature (1)..(25): SEQ ID NO: 2927; WAN024CAK-5_at; Start 9; Stop 33
tattattgaattgccagagatgctg

SEQ ID NO: 110700 - DNA, 25 bp, Artificial
  probe
  misc_feature (1)..(25): SEQ ID NO: 2927; WAN024CAK-5_at; Start 473; Stop 497
tcaagtatatgaagagccagcaagc

SEQ ID NO: 110701 - DNA, 25 bp, Artificial
  probe
  misc_feature (1)..(25): SEQ ID NO: 2927; WAN024CAK-5_at; Start 99; Stop 123
aaatgccattgacgcgggctctagt

SEQ ID NO: 110702 - DNA, 25 bp, Artificial
  probe
  misc_feature (1)..(25): SEQ ID NO: 2927; WAN024CAK-5_at; Start 95; Stop 119
tagaaaatgccattgacgcgggctc

SEQ ID NO: 110703 - DNA, 25 bp, Artificial
  probe
  misc_feature (1)..(25): SEQ ID NO: 2927; WAN024CAK-5_at; Start 478; Stop 502
tatatgaagagccagcaagcggagt

SEQ ID NO: 110704 - DNA, 25 bp, Artificial
  probe
  misc_feature (1)..(25): SEQ ID NO: 3677; WAN024CAK-M_at; Start 622; Stop 646
gagttagatcttgctagcatcgata

SEQ ID NO: 110705 - DNA, 25 bp, Artificial
  probe
  misc_feature (1)..(25): SEQ ID NO: 3677; WAN024CAK-M_at; Start 461; Stop 485
gacctagtcaaactgaagtagctga

SEQ ID NO: 110706 - DNA, 25 bp, Artificial
  probe
  misc_feature (1)..(25): SEQ ID NO: 3677; WAN024CAK-M_at; Start 458; Stop 482
caagacctagtcaaactgaagtagc

SEQ ID NO: 110707 - DNA, 25 bp, Artificial
  probe
  misc_feature (1)..(25): SEQ ID NO: 3677; WAN024CAK-M_at; Start 490; Stop 514
caggtagaattgactgatgaagggc

SEQ ID NO: 110708 - DNA, 25 bp, Artificial
  probe
  misc_feature (1)..(25): SEQ ID NO: 3677; WAN024CAK-M_at; Start 611; Stop 635
tagaccatccagagttagatcttgc

SEQ ID NO: 110709 - DNA, 25 bp, Artificial
  probe
  misc_feature (1)..(25): SEQ ID NO: 3677; WAN024CAK-M_at; Start 481; Stop 505
gctgattatcaggtagaattgactg

SEQ ID NO: 110710 - DNA, 25 bp, Artificial
  probe
  misc_feature (1)..(25): SEQ ID NO: 3677; WAN024CAK-M_at; Start 494; Stop 518
tagaattgactgatgaagggcagga

SEQ ID NO: 110711 - DNA, 25 bp, Artificial
  probe
  misc_feature (1)..(25): SEQ ID NO: 3677; WAN024CAK-M_at; Start 503; Stop 527
ctgatgaagggcaggatttgaccct

SEQ ID NO: 110712 - DNA, 25 bp, Artificial
  probe
  misc_feature (1)..(25): SEQ ID NO: 3677; WAN024CAK-M_at; Start 444; Stop 468
gaaaactgagccgtcaagacctagt

SEQ ID NO: 110713 - DNA, 25 bp, Artificial
  probe
  misc_feature (1)..(25): SEQ ID NO: 3677; WAN024CAK-M_at; Start 75; Stop 99
gactcgggctaaccgcaattatatc

SEQ ID NO: 110714 - DNA, 25 bp, Artificial
  probe
  misc_feature (1)..(25): SEQ ID NO: 3677; WAN024CAK-M_at; Start 29; Stop 53
ctgacctagatttcgaaatttcagg

SEQ ID NO: 110715 - DNA, 25 bp, Artificial
  probe
  misc_feature (1)..(25): SEQ ID NO: 3677; WAN024CAK-M_at; Start 374; Stop 398
cgaccgtgcgcaatcgtgagaaggt

SEQ ID NO: 110716 - DNA, 25 bp, Artificial
  probe
  misc_feature (1)..(25): SEQ ID NO: 3677; WAN024CAK-M_at; Start 357; Stop 381
ggaaaatcttgccaaatcgaccgtg

SEQ ID NO: 110717 - DNA, 25 bp, Artificial
  probe
  misc_feature (1)..(25): SEQ ID NO: 3677; WAN024CAK-M_at; Start 555; Stop 579
gaccaagccagcaaaactgcatttt

SEQ ID NO: 110718 - DNA, 25 bp, Artificial
  probe
  misc_feature (1)..(25): SEQ ID NO: 3677; WAN024CAK-M_at; Start 574; Stop 598
cattttgcagagagaaagcctgcta

SEQ ID NO: 110719 - DNA, 25 bp, Artificial
  probe
  misc_feature (1)..(25): SEQ ID NO: 3677; WAN024CAK-M_at; Start 563; Stop 587
cagcaaaactgcattttgcagagag

SEQ ID NO: 110720 - DNA, 25 bp, Artificial
  probe
  misc_feature (1)..(25): SEQ ID NO: 3677; WAN024CAK-M_at; Start 551; Stop 575
gattgaccaagccagcaaaactgca

SEQ ID NO: 110721 - DNA, 25 bp, Artificial
  probe
  misc_feature (1)..(25): SEQ ID NO: 3677; WAN024CAK-M_at; Start 36; Stop 60
agatttcgaaatttcaggttttgtg

SEQ ID NO: 110722 - DNA, 25 bp, Artificial
  probe
  misc_feature (1)..(25): SEQ ID NO: 3677; WAN024CAK-M_at; Start 72; Stop 96
gttgactcgggctaaccgcaattat

SEQ ID NO: 110723 - DNA, 25 bp, Artificial
  probe
  misc_feature (1)..(25): SEQ ID NO: 3677; WAN024CAK-M_at; Start 346; Stop 370
ccagatgccttggaaaatcttgcca

SEQ ID NO: 110724 - DNA, 25 bp, Artificial
  probe
  misc_feature (1)..(25): SEQ ID NO: 3677; WAN024CAK-M_at; Start 616; Stop 640
catccagagttagatcttgctagca

SEQ ID NO: 110725 - DNA, 25 bp, Artificial
  probe
  misc_feature (1)..(25): SEQ ID NO: 3677; WAN024CAK-M_at; Start 380; Stop 404
tgcgcaatcgtgagaaggtggagca

SEQ ID NO: 110726 - DNA, 25 bp, Artificial
  probe
  misc_feature (1)..(25): SEQ ID NO: 3677; WAN024CAK-M_at; Start 469; Stop 493
caaactgaagtagctgattatcagg

SEQ ID NO: 110727 - DNA, 25 bp, Artificial
  probe
  misc_feature (1)..(25): SEQ ID NO: 3677; WAN024CAK-M_at; Start 441; Stop 465
tgagaaaactgagccgtcaagacct

SEQ ID NO: 110728 - DNA, 25 bp, Artificial
  probe
  misc_feature (1)..(25): SEQ ID NO: 3677; WAN024CAK-M_at; Start 594; Stop 618
tgctaactacgaccagctagaccat

SEQ ID NO: 110729 - DNA, 25 bp, Artificial
  probe
  misc_feature (1)..(25): SEQ ID NO: 3677; WAN024CAK-M_at; Start 517; Stop 541
gatttgaccctgtttgccaaggaaa

SEQ ID NO: 110730 - DNA, 25 bp, Artificial
  probe
  misc_feature (1)..(25): SEQ ID NO: 3677; WAN024CAK-M_at; Start 587; Stop 611
gaaagcctgctaactacgaccagct

SEQ ID NO: 110731 - DNA, 25 bp, Artificial
  probe
  misc_feature (1)..(25): SEQ ID NO: 3677; WAN024CAK-M_at; Start 583; Stop 607
gagagaaagcctgctaactacgacc

SEQ ID NO: 110732 - DNA, 25 bp, Artificial
  probe
  misc_feature (1)..(25): SEQ ID NO: 3677; WAN024CAK-M_at; Start 514; Stop 538
caggatttgaccctgtttgccaagg

SEQ ID NO: 110733 - DNA, 25 bp, Artificial
  probe
  misc_feature (1)..(25): SEQ ID NO: 3677; WAN024CAK-M_at; Start 434; Stop 458
tctactatgagaaaactgagccgtc

SEQ ID NO: 110734 - DNA, 25 bp, Artificial
  probe
  misc_feature (1)..(25): SEQ ID NO: 3677; WAN024CAK-M_at; Start 360; Stop 384
aaatcttgccaaatcgaccgtgcgc

SEQ ID NO: 110735 - DNA, 25 bp, Artificial
  probe
  misc_feature (1)..(25): SEQ ID NO: 3677; WAN024CAK-M_at; Start 603; Stop 627
cgaccagctagaccatccagagtta

SEQ ID NO: 110736 - DNA, 25 bp, Artificial
  probe
  misc_feature (1)..(25): SEQ ID NO: 3677; WAN024CAK-M_at; Start 451; Stop 475
gagccgtcaagacctagtcaaactg

SEQ ID NO: 110737 - DNA, 25 bp, Artificial
  probe
  misc_feature (1)..(25): SEQ ID NO: 3677; WAN024CAK-M_at; Start 369; Stop 393
caaatcgaccgtgcgcaatcgtgag

SEQ ID NO: 110738 - DNA, 25 bp, Artificial
  probe
  misc_feature (1)..(25): SEQ ID NO: 921; WAN024CAL_at; Start 295; Stop 319
tcccaatcagaaatcatcaatatcg

SEQ ID NO: 110739 - DNA, 25 bp, Artificial
  probe
  misc_feature (1)..(25): SEQ ID NO: 921; WAN024CAL_at; Start 368; Stop 392
tcttgaaaaacgaaagcttcaccta

SEQ ID NO: 110740 - DNA, 25 bp, Artificial
  probe
  misc_feature (1)..(25): SEQ ID NO: 921; WAN024CAL_at; Start 185; Stop 209
tctatatcgagaatcggaaggttct

SEQ ID NO: 110741 - DNA, 25 bp, Artificial
  probe
  misc_feature (1)..(25): SEQ ID NO: 921; WAN024CAL_at; Start 280; Stop 304
aattttatccaaatttcccaatcag

SEQ ID NO: 110742 - DNA, 25 bp, Artificial
  probe
  misc_feature (1)..(25): SEQ ID NO: 921; WAN024CAL_at; Start 90; Stop 114
catcgagttcgcagaaaatctggac

SEQ ID NO: 110743 - DNA, 25 bp, Artificial
  probe
  misc_feature (1)..(25): SEQ ID NO: 921; WAN024CAL_at; Start 315; Stop 339
tatcgattccatctctcacctcaag

SEQ ID NO: 110744 - DNA, 25 bp, Artificial
  probe
  misc_feature (1)..(25): SEQ ID NO: 921; WAN024CAL_at; Start 234; Stop 258
cagcattgatttgcgactctatcag

SEQ ID NO: 110745 - DNA, 25 bp, Artificial
  probe
  misc_feature (1)..(25): SEQ ID NO: 921; WAN024CAL_at; Start 84; Stop 108
gaaagtcatcgagttcgcagaaaat

SEQ ID NO: 110746 - DNA, 25 bp, Artificial
  probe
  misc_feature (1)..(25): SEQ ID NO: 921; WAN024CAL_at; Start 377; Stop 401
acgaaagcttcacctactcttcacg

SEQ ID NO: 110747 - DNA, 25 bp, Artificial
  probe
  misc_feature (1)..(25): SEQ ID NO: 921; WAN024CAL_at; Start 41; Stop 65
aaaagctgattgtccaagcacctca

SEQ ID NO: 110748 - DNA, 25 bp, Artificial
  probe
  misc_feature (1)..(25): SEQ ID NO: 921; WAN024CAL_at; Start 213; Stop 237
agaaaccgcgagtcagacctacagc

SEQ ID NO: 110749 - DNA, 25 bp, Artificial
  probe
  misc_feature (1)..(25): SEQ ID NO: 921; WAN024CAL_at; Start 206; Stop 230
ttctagcagaaaccgcgagtcagac

SEQ ID NO: 110750 - DNA, 25 bp, Artificial
  probe
  misc_feature (1)..(25): SEQ ID NO: 921; WAN024CAL_at; Start 99; Stop 123
cgcagaaaatctggaccaaagagaa

SEQ ID NO: 110751 - DNA, 25 bp, Artificial
  probe
  misc_feature (1)..(25): SEQ ID NO: 921; WAN024CAL_at; Start 414; Stop 438
aaccatcaaggagaaattagaacta

SEQ ID NO: 110752 - DNA, 25 bp, Artificial
  probe
  misc_feature (1)..(25): SEQ ID NO: 921; WAN024CAL_at; Start 403; Stop 427
cgttatctaaaaaccatcaaggaga

SEQ ID NO: 110753 - DNA, 25 bp, Artificial
  probe
  misc_feature (1)..(25): SEQ ID NO: 921; WAN024CAL_at; Start 3; Stop 27
gaaagtagaactacagattagtgag

SEQ ID NO: 110754 - DNA, 25 bp, Artificial
  probe
  misc_feature (1)..(25): SEQ ID NO: 921; WAN024CAL_at; Start 201; Stop 225
gaaggttctagcagaaaccgcgagt

SEQ ID NO: 110755 - DNA, 25 bp, Artificial
  probe
  misc_feature (1)..(25): SEQ ID NO: 921; WAN024CAL_at; Start 342; Stop 366
cacgccaaacggtctggtagaaatt

SEQ ID NO: 110756 - DNA, 25 bp, Artificial
  probe
  misc_feature (1)..(25): SEQ ID NO: 921; WAN024CAL_at; Start 163; Stop 187
gagattggcaagattcagcgcttct

SEQ ID NO: 110757 - DNA, 25 bp, Artificial
  probe
  misc_feature (1)..(25): SEQ ID NO: 921; WAN024CAL_at; Start 148; Stop 172
caggtctatctagttgagattggca

SEQ ID NO: 110758 - DNA, 25 bp, Artificial
  probe
  misc_feature (1)..(25): SEQ ID NO: 921; WAN024CAL_at; Start 31; Stop 55
tacgaggaggaaaagctgattgtcc

SEQ ID NO: 110759 - DNA, 25 bp, Artificial
  probe
  misc_feature (1)..(25): SEQ ID NO: 921; WAN024CAL_at; Start 226; Stop 250
cagacctacagcattgatttgcgac

SEQ ID NO: 110760 - DNA, 25 bp, Artificial
  probe
  misc_feature (1)..(25): SEQ ID NO: 921; WAN024CAL_at; Start 24; Stop 48
tgagacttacgaggaggaaaagctg

SEQ ID NO: 110761 - DNA, 25 bp, Artificial
  probe
  misc_feature (1)..(25): SEQ ID NO: 921; WAN024CAL_at; Start 219; Stop 243
cgcgagtcagacctacagcattgat

SEQ ID NO: 110762 - DNA, 25 bp, Artificial
  probe
  misc_feature (1)..(25): SEQ ID NO: 921; WAN024CAL_at; Start 109; Stop 133
ctggaccaaagagaaaaaatcaaag

SEQ ID NO: 110763 - DNA, 25 bp, Artificial
  probe
  misc_feature (1)..(25): SEQ ID NO: 921; WAN024CAL_at; Start 177; Stop 201
tcagcgcttctatatcgagaatcgg

SEQ ID NO: 110764 - DNA, 25 bp, Artificial
  probe
  misc_feature (1)..(25): SEQ ID NO: 921; WAN024CAL_at; Start 245; Stop 269
tgcgactctatcaggttcttaaact

SEQ ID NO: 110765 - DNA, 25 bp, Artificial
  probe
  misc_feature (1)..(25): SEQ ID NO: 921; WAN024CAL_at; Start 14; Stop 38
tacagattagtgagacttacgagga

SEQ ID NO: 110766 - DNA, 25 bp, Artificial
  probe
  misc_feature (1)..(25): SEQ ID NO: 921; WAN024CAL_at; Start 195; Stop 219
gaatcggaaggttctagcagaaacc

SEQ ID NO: 110767 - DNA, 25 bp, Artificial
  probe
  misc_feature (1)..(25): SEQ ID NO: 921; WAN024CAL_at; Start 171; Stop 195
caagattcagcgcttctatatcgag

SEQ ID NO: 110768 - DNA, 25 bp, Artificial
  probe
  misc_feature (1)..(25): SEQ ID NO: 921; WAN024CAL_at; Start 253; Stop 277
tatcaggttcttaaactcttgccaa

SEQ ID NO: 110769 - DNA, 25 bp, Artificial
  probe
  misc_feature (1)..(25): SEQ ID NO: 921; WAN024CAL_at; Start 335; Stop 359
tcaagctcacgccaaacggtctggt

SEQ ID NO: 110770 - DNA, 25 bp, Artificial
  probe
  misc_feature (1)..(25): SEQ ID NO: 921; WAN024CAL_at; Start 136; Stop 160
aaaatcgatgatcaggtctatctag

SEQ ID NO: 110771 - DNA, 25 bp, Artificial
  probe
  misc_feature (1)..(25): SEQ ID NO: 921; WAN024CAL_at; Start 394; Stop 418
tcttcacgccgttatctaaaaacca

SEQ ID NO: 110772 - DNA, 25 bp, Artificial
  probe
  misc_feature (1)..(25): SEQ ID NO: 7444; WAN024CAM_at; Start 24; Stop 48
gctcggtaagcatggcatctatgaa

SEQ ID NO: 110773 - DNA, 25 bp, Artificial
  probe
  misc_feature (1)..(25): SEQ ID NO: 7444; WAN024CAM_at; Start 126; Stop 150
gcccctttatttccctatgctagat

SEQ ID NO: 110774 - DNA, 25 bp, Artificial
  probe
  misc_feature (1)..(25): SEQ ID NO: 7444; WAN024CAM_at; Start 135; Stop 159
tttccctatgctagataattctgca

SEQ ID NO: 110775 - DNA, 25 bp, Artificial
  probe
  misc_feature (1)..(25): SEQ ID NO: 7444; WAN024CAM_at; Start 75; Stop 99
cattttcatttcctgccatctatta

SEQ ID NO: 110776 - DNA, 25 bp, Artificial
  probe
  misc_feature (1)..(25): SEQ ID NO: 7444; WAN024CAM_at; Start 5; Stop 29
catgctttgtctatcgttggctcgg

SEQ ID NO: 110777 - DNA, 25 bp, Artificial
  probe
  misc_feature (1)..(25): SEQ ID NO: 7444; WAN024CAM_at; Start 202; Stop 226
catgctgtactaaatcaatcttatc

SEQ ID NO: 110778 - DNA, 25 bp, Artificial
  probe
  misc_feature (1)..(25): SEQ ID NO: 7444; WAN024CAM_at; Start 104; Stop 128
ctcattatcaaaataaagggttgcc

SEQ ID NO: 110779 - DNA, 25 bp, Artificial
  probe
  misc_feature (1)..(25): SEQ ID NO: 7444; WAN024CAM_at; Start 184; Stop 208
tgccctcaacaatcatttcatgctg

SEQ ID NO: 110780 - DNA, 25 bp, Artificial
  probe
  misc_feature (1)..(25): SEQ ID NO: 7444; WAN024CAM_at; Start 15; Stop 39
ctatcgttggctcggtaagcatggc

SEQ ID NO: 110781 - DNA, 25 bp, Artificial
  probe
  misc_feature (1)..(25): SEQ ID NO: 7444; WAN024CAM_at; Start 89; Stop 113
gccatctattacctcctcattatca

SEQ ID NO: 110782 - DNA, 25 bp, Artificial
  probe
  misc_feature (1)..(25): SEQ ID NO: 7444; WAN024CAM_at; Start 34; Stop 58
catggcatctatgaatttaatttgc

SEQ ID NO: 110783 - DNA, 25 bp, Artificial
  probe
  misc_feature (1)..(25): SEQ ID NO: 7444; WAN024CAM_at; Start 150; Stop 174
taattctgcaattctgcatccattg

SEQ ID NO: 110784 - DNA, 25 bp, Artificial
  probe
  misc_feature (1)..(25): SEQ ID NO: 7444; WAN024CAM_at; Start 141; Stop 165
tatgctagataattctgcaattctg

SEQ ID NO: 110785 - DNA, 25 bp, Artificial
  probe
  misc_feature (1)..(25): SEQ ID NO: 7444; WAN024CAM_at; Start 3; Stop 27
gacatgctttgtctatcgttggctc

SEQ ID NO: 110786 - DNA, 25 bp, Artificial
  probe
  misc_feature (1)..(25): SEQ ID NO: 7444; WAN024CAM_at; Start 20; Stop 44
gttggctcggtaagcatggcatcta

SEQ ID NO: 110787 - DNA, 25 bp, Artificial
  probe
  misc_feature (1)..(25): SEQ ID NO: 7444; WAN024CAM_at; Start 18; Stop 42
tcgttggctcggtaagcatggcatc

SEQ ID NO: 110788 - DNA, 25 bp, Artificial
  probe
  misc_feature (1)..(25): SEQ ID NO: 7444; WAN024CAM_at; Start 157; Stop 181
gcaattctgcatccattgcctctga

SEQ ID NO: 110789 - DNA, 25 bp, Artificial
  probe
  misc_feature (1)..(25): SEQ ID NO: 7444; WAN024CAM_at; Start 8; Stop 32
gctttgtctatcgttggctcggtaa

SEQ ID NO: 110790 - DNA, 25 bp, Artificial
  probe
  misc_feature (1)..(25): SEQ ID NO: 7444; WAN024CAM_at; Start 62; Stop 86
gacgtaaggttatcattttcatttc

SEQ ID NO: 110791 - DNA, 25 bp, Artificial
  probe
  misc_feature (1)..(25): SEQ ID NO: 7444; WAN024CAM_at; Start 170; Stop 194
cattgcctctgaattgccctcaaca

SEQ ID NO: 110792 - DNA, 25 bp, Artificial
  probe
  misc_feature (1)..(25): SEQ ID NO: 7444; WAN024CAM_at; Start 162; Stop 186
tctgcatccattgcctctgaattgc

SEQ ID NO: 110793 - DNA, 25 bp, Artificial
  probe
  misc_feature (1)..(25): SEQ ID NO: 7444; WAN024CAM_at; Start 177; Stop 201
tctgaattgccctcaacaatcattt

SEQ ID NO: 110794 - DNA, 25 bp, Artificial
  probe
  misc_feature (1)..(25): SEQ ID NO: 7444; WAN024CAM_at; Start 11; Stop 35
ttgtctatcgttggctcggtaagca

SEQ ID NO: 110795 - DNA, 25 bp, Artificial
  probe
  misc_feature (1)..(25): SEQ ID NO: 7444; WAN024CAM_at; Start 123; Stop 147
gttgcccctttatttccctatgcta

SEQ ID NO: 110796 - DNA, 25 bp, Artificial
  probe
  misc_feature (1)..(25): SEQ ID NO: 7444; WAN024CAM_at; Start 165; Stop 189
gcatccattgcctctgaattgccct

SEQ ID NO: 110797 - DNA, 25 bp, Artificial
  probe
  misc_feature (1)..(25): SEQ ID NO: 7444; WAN024CAM_at; Start 69; Stop 93
ggttatcattttcatttcctgccat

SEQ ID NO: 110798 - DNA, 25 bp, Artificial
  probe
  misc_feature (1)..(25): SEQ ID NO: 7444; WAN024CAM_at; Start 27; Stop 51
cggtaagcatggcatctatgaattt

SEQ ID NO: 110799 - DNA, 25 bp, Artificial
  probe
  misc_feature (1)..(25): SEQ ID NO: 7444; WAN024CAM_at; Start 210; Stop 234
actaaatcaatcttatctccgttaa

SEQ ID NO: 110800 - DNA, 25 bp, Artificial
  probe
  misc_feature (1)..(25): SEQ ID NO: 7444; WAN024CAM_at; Start 207; Stop 231
tgtactaaatcaatcttatctccgt

SEQ ID NO: 110801 - DNA, 25 bp, Artificial
  probe
  misc_feature (1)..(25): SEQ ID NO: 7444; WAN024CAM_at; Start 57; Stop 81
gcttggacgtaaggttatcattttc

SEQ ID NO: 110802 - DNA, 25 bp, Artificial
  probe
  misc_feature (1)..(25): SEQ ID NO: 7444; WAN024CAM_at; Start 190; Stop 214
caacaatcatttcatgctgtactaa

SEQ ID NO: 110803 - DNA, 25 bp, Artificial
  probe
  misc_feature (1)..(25): SEQ ID NO: 7444; WAN024CAM_at; Start 146; Stop 170
tagataattctgcaattctgcatcc

SEQ ID NO: 110804 - DNA, 25 bp, Artificial
  probe
  misc_feature (1)..(25): SEQ ID NO: 7444; WAN024CAM_at; Start 52; Stop 76
aatttgcttggacgtaaggttatca

SEQ ID NO: 110805 - DNA, 25 bp, Artificial
  probe
  misc_feature (1)..(25): SEQ ID NO: 7444; WAN024CAM_at; Start 45; Stop 69
tgaatttaatttgcttggacgtaag

SEQ ID NO: 110806 - DNA, 25 bp, Artificial
  probe
  misc_feature (1)..(25): SEQ ID NO: 7547; WAN024CAN_at; Start 123; Stop 147
tccttcaacaataataaactctggc

SEQ ID NO: 110807 - DNA, 25 bp, Artificial
  probe
  misc_feature (1)..(25): SEQ ID NO: 7547; WAN024CAN_at; Start 345; Stop 369
cattgagtacagaaacagcgttaga

SEQ ID NO: 110808 - DNA, 25 bp, Artificial
  probe
  misc_feature (1)..(25): SEQ ID NO: 7547; WAN024CAN_at; Start 275; Stop 299
gattgttcaagtatagcctttgctg

SEQ ID NO: 110809 - DNA, 25 bp, Artificial
  probe
  misc_feature (1)..(25): SEQ ID NO: 7547; WAN024CAN_at; Start 348; Stop 372
tgagtacagaaacagcgttagatga

SEQ ID NO: 110810 - DNA, 25 bp, Artificial
  probe
  misc_feature (1)..(25): SEQ ID NO: 7547; WAN024CAN_at; Start 261; Stop 285
catgggtcttataagattgttcaag

SEQ ID NO: 110811 - DNA, 25 bp, Artificial
  probe
  misc_feature (1)..(25): SEQ ID NO: 7547; WAN024CAN_at; Start 17; Stop 41
taataactggcacttcccactcacg

SEQ ID NO: 110812 - DNA, 25 bp, Artificial
  probe
  misc_feature (1)..(25): SEQ ID NO: 7547; WAN024CAN_at; Start 137; Stop 161
taaactctggcatatttctattact

SEQ ID NO: 110813 - DNA, 25 bp, Artificial
  probe
  misc_feature (1)..(25): SEQ ID NO: 7547; WAN024CAN_at; Start 108; Stop 132
ccctaagtcattgtttccttcaaca

SEQ ID NO: 110814 - DNA, 25 bp, Artificial
  probe
  misc_feature (1)..(25): SEQ ID NO: 7547; WAN024CAN_at; Start 230; Stop 254
tcttcaatctgccttactactccaa

SEQ ID NO: 110815 - DNA, 25 bp, Artificial
  probe
  misc_feature (1)..(25): SEQ ID NO: 7547; WAN024CAN_at; Start 252; Stop 276
caaaaatttcatgggtcttataaga

SEQ ID NO: 110816 - DNA, 25 bp, Artificial
  probe
  misc_feature (1)..(25): SEQ ID NO: 7547; WAN024CAN_at; Start 174; Stop 198
gagttcttgtaactctttgatttcc

SEQ ID NO: 110817 - DNA, 25 bp, Artificial
  probe
  misc_feature (1)..(25): SEQ ID NO: 7547; WAN024CAN_at; Start 85; Stop 109
tcgccatctatttggaaaaattccc

SEQ ID NO: 110818 - DNA, 25 bp, Artificial
  probe
  misc_feature (1)..(25): SEQ ID NO: 7547; WAN024CAN_at; Start 10; Stop 34
tcatcaataataactggcacttccc

SEQ ID NO: 110819 - DNA, 25 bp, Artificial
  probe
  misc_feature (1)..(25): SEQ ID NO: 7547; WAN024CAN_at; Start 127; Stop 151
tcaacaataataaactctggcatat

SEQ ID NO: 110820 - DNA, 25 bp, Artificial
  probe
  misc_feature (1)..(25): SEQ ID NO: 7547; WAN024CAN_at; Start 342; Stop 366
tatcattgagtacagaaacagcgtt

SEQ ID NO: 110821 - DNA, 25 bp, Artificial
  probe
  misc_feature (1)..(25): SEQ ID NO: 7547; WAN024CAN_at; Start 317; Stop 341
gggttgaccttactgtccatcataa

SEQ ID NO: 110822 - DNA, 25 bp, Artificial
  probe
  misc_feature (1)..(25): SEQ ID NO: 7547; WAN024CAN_at; Start 299; Stop 323
gcttgagttcttataaacgggttga

SEQ ID NO: 110823 - DNA, 25 bp, Artificial
  probe
  misc_feature (1)..(25): SEQ ID NO: 7547; WAN024CAN_at; Start 153; Stop 177
tctattacttaataactccttgagt

SEQ ID NO: 110824 - DNA, 25 bp, Artificial
  probe
  misc_feature (1)..(25): SEQ ID NO: 7547; WAN024CAN_at; Start 314; Stop 338
aacgggttgaccttactgtccatca

SEQ ID NO: 110825 - DNA, 25 bp, Artificial
  probe
  misc_feature (1)..(25): SEQ ID NO: 7547; WAN024CAN_at; Start 65; Stop 89
gttcattatcactaaatagctcgcc

SEQ ID NO: 110826 - DNA, 25 bp, Artificial
  probe
  misc_feature (1)..(25): SEQ ID NO: 7547; WAN024CAN_at; Start 295; Stop 319
tgctgcttgagttcttataaacggg

SEQ ID NO: 110827 - DNA, 25 bp, Artificial
  probe
  misc_feature (1)..(25): SEQ ID NO: 7547; WAN024CAN_at; Start 165; Stop 189
taactccttgagttcttgtaactct

SEQ ID NO: 110828 - DNA, 25 bp, Artificial
  probe
  misc_feature (1)..(25): SEQ ID NO: 7547; WAN024CAN_at; Start 54; Stop 78
gttttctaaaagttcattatcacta

SEQ ID NO: 110829 - DNA, 25 bp, Artificial
  probe
  misc_feature (1)..(25): SEQ ID NO: 7547; WAN024CAN_at; Start 68; Stop 92
cattatcactaaatagctcgccatc

SEQ ID NO: 110830 - DNA, 25 bp, Artificial
  probe
  misc_feature (1)..(25): SEQ ID NO: 7547; WAN024CAN_at; Start 282; Stop 306
caagtatagcctttgctgcttgagt

SEQ ID NO: 110831 - DNA, 25 bp, Artificial
  probe
  misc_feature (1)..(25): SEQ ID NO: 7547; WAN024CAN_at; Start 240; Stop 264
gccttactactccaaaaatttcatg

SEQ ID NO: 110832 - DNA, 25 bp, Artificial
  probe
  misc_feature (1)..(25): SEQ ID NO: 7547; WAN024CAN_at; Start 244; Stop 268
tactactccaaaaatttcatgggtc

SEQ ID NO: 110833 - DNA, 25 bp, Artificial
  probe
  misc_feature (1)..(25): SEQ ID NO: 7547; WAN024CAN_at; Start 2; Stop 26
tgcaccaatcatcaataataactgg

SEQ ID NO: 110834 - DNA, 25 bp, Artificial
  probe
  misc_feature (1)..(25): SEQ ID NO: 7547; WAN024CAN_at; Start 27; Stop 51
cacttcccactcacgccatttttta

SEQ ID NO: 110835 - DNA, 25 bp, Artificial
  probe
  misc_feature (1)..(25): SEQ ID NO: 7547; WAN024CAN_at; Start 81; Stop 105
tagctcgccatctatttggaaaaat

SEQ ID NO: 110836 - DNA, 25 bp, Artificial
  probe
  misc_feature (1)..(25): SEQ ID NO: 7547; WAN024CAN_at; Start 203; Stop 227
gatacttcctcaatttccaacctca

SEQ ID NO: 110837 - DNA, 25 bp, Artificial
  probe
  misc_feature (1)..(25): SEQ ID NO: 7547; WAN024CAN_at; Start 327; Stop 351
tactgtccatcataatatcattgag

SEQ ID NO: 110838 - DNA, 25 bp, Artificial
  probe
  misc_feature (1)..(25): SEQ ID NO: 7547; WAN024CAN_at; Start 217; Stop 241
ttccaacctcaattcttcaatctgc

SEQ ID NO: 110839 - DNA, 25 bp, Artificial
  probe
  misc_feature (1)..(25): SEQ ID NO: 7547; WAN024CAN_at; Start 191; Stop 215
tgatttcctttagatacttcctcaa

SEQ ID NO: 110840 - DNA, 25 bp, Artificial
  probe
  misc_feature (1)..(25): SEQ ID NO: 3024; WAN024CAO_at; Start 11; Stop 35
gtctgaaagcgaatgattttcagaa

SEQ ID NO: 110841 - DNA, 25 bp, Artificial
  probe
  misc_feature (1)..(25): SEQ ID NO: 3024; WAN024CAO_at; Start 60; Stop 84
agatagagtaacacttatctcaaag

SEQ ID NO: 110842 - DNA, 25 bp, Artificial
  probe
  misc_feature (1)..(25): SEQ ID NO: 3024; WAN024CAO_at; Start 20; Stop 44
cgaatgattttcagaaaaatttaag

SEQ ID NO: 110843 - DNA, 25 bp, Artificial
  probe
  misc_feature (1)..(25): SEQ ID NO: 3024; WAN024CAO_at; Start 49; Stop 73
aatagtaaaatagatagagtaacac

SEQ ID NO: 110844 - DNA, 25 bp, Artificial
  probe
  misc_feature (1)..(25): SEQ ID NO: 3024; WAN024CAO_at; Start 10; Stop 34
tgtctgaaagcgaatgattttcaga

SEQ ID NO: 110845 - DNA, 25 bp, Artificial
  probe
  misc_feature (1)..(25): SEQ ID NO: 3024; WAN024CAO_at; Start 58; Stop 82
atagatagagtaacacttatctcaa

SEQ ID NO: 110846 - DNA, 25 bp, Artificial
  probe
  misc_feature (1)..(25): SEQ ID NO: 3024; WAN024CAO_at; Start 62; Stop 86
atagagtaacacttatctcaaagga

SEQ ID NO: 110847 - DNA, 25 bp, Artificial
  probe
  misc_feature (1)..(25): SEQ ID NO: 3024; WAN024CAO_at; Start 21; Stop 45
gaatgattttcagaaaaatttaaga

SEQ ID NO: 110848 - DNA, 25 bp, Artificial
  probe
  misc_feature (1)..(25): SEQ ID NO: 3024; WAN024CAO_at; Start 16; Stop 40
aaagcgaatgattttcagaaaaatt

SEQ ID NO: 110849 - DNA, 25 bp, Artificial
  probe
  misc_feature (1)..(25): SEQ ID NO: 3024; WAN024CAO_at; Start 5; Stop 29
tcaactgtctgaaagcgaatgattt

SEQ ID NO: 110850 - DNA, 25 bp, Artificial
  probe
  misc_feature (1)..(25): SEQ ID NO: 3024; WAN024CAO_at; Start 14; Stop 38
tgaaagcgaatgattttcagaaaaa

SEQ ID NO: 110851 - DNA, 25 bp, Artificial
  probe
  misc_feature (1)..(25): SEQ ID NO: 3024; WAN024CAO_at; Start 4; Stop 28
ttcaactgtctgaaagcgaatgatt

SEQ ID NO: 110852 - DNA, 25 bp, Artificial
  probe
  misc_feature (1)..(25): SEQ ID NO: 3024; WAN024CAO_at; Start 55; Stop 79
aaaatagatagagtaacacttatct

SEQ ID NO: 110853 - DNA, 25 bp, Artificial
  probe
  misc_feature (1)..(25): SEQ ID NO: 3024; WAN024CAO_at; Start 56; Stop 80
aaatagatagagtaacacttatctc

SEQ ID NO: 110854 - DNA, 25 bp, Artificial
  probe
  misc_feature (1)..(25): SEQ ID NO: 3024; WAN024CAO_at; Start 57; Stop 81
aatagatagagtaacacttatctca

SEQ ID NO: 110855 - DNA, 25 bp, Artificial
  probe
  misc_feature (1)..(25): SEQ ID NO: 3024; WAN024CAO_at; Start 7; Stop 31
aactgtctgaaagcgaatgattttc

SEQ ID NO: 110856 - DNA, 25 bp, Artificial
  probe
  misc_feature (1)..(25): SEQ ID NO: 3024; WAN024CAO_at; Start 15; Stop 39
gaaagcgaatgattttcagaaaaat

SEQ ID NO: 110857 - DNA, 25 bp, Artificial
  probe
  misc_feature (1)..(25): SEQ ID NO: 3024; WAN024CAO_at; Start 1; Stop 25
atgttcaactgtctgaaagcgaatg

SEQ ID NO: 110858 - DNA, 25 bp, Artificial
  probe
  misc_feature (1)..(25): SEQ ID NO: 3024; WAN024CAO_at; Start 54; Stop 78
taaaatagatagagtaacacttatc

SEQ ID NO: 110859 - DNA, 25 bp, Artificial
  probe
  misc_feature (1)..(25): SEQ ID NO: 3024; WAN024CAO_at; Start 59; Stop 83
tagatagagtaacacttatctcaaa

SEQ ID NO: 110860 - DNA, 25 bp, Artificial
  probe
  misc_feature (1)..(25): SEQ ID NO: 3024; WAN024CAO_at; Start 6; Stop 30
caactgtctgaaagcgaatgatttt

SEQ ID NO: 110861 - DNA, 25 bp, Artificial
  probe
  misc_feature (1)..(25): SEQ ID NO: 3024; WAN024CAO_at; Start 53; Stop 77
gtaaaatagatagagtaacacttat

SEQ ID NO: 110862 - DNA, 25 bp, Artificial
  probe
  misc_feature (1)..(25): SEQ ID NO: 3024; WAN024CAO_at; Start 19; Stop 43
gcgaatgattttcagaaaaatttaa

SEQ ID NO: 110863 - DNA, 25 bp, Artificial
  probe
  misc_feature (1)..(25): SEQ ID NO: 3024; WAN024CAO_at; Start 3; Stop 27
gttcaactgtctgaaagcgaatgat

SEQ ID NO: 110864 - DNA, 25 bp, Artificial
  probe
  misc_feature (1)..(25): SEQ ID NO: 3024; WAN024CAO_at; Start 9; Stop 33
ctgtctgaaagcgaatgattttcag

SEQ ID NO: 110865 - DNA, 25 bp, Artificial
  probe
  misc_feature (1)..(25): SEQ ID NO: 3024; WAN024CAO_at; Start 2; Stop 26
tgttcaactgtctgaaagcgaatga

SEQ ID NO: 110866 - DNA, 25 bp, Artificial
  probe
  misc_feature (1)..(25): SEQ ID NO: 3024; WAN024CAO_at; Start 63; Stop 87
tagagtaacacttatctcaaaggag

SEQ ID NO: 110867 - DNA, 25 bp, Artificial
  probe
  misc_feature (1)..(25): SEQ ID NO: 3024; WAN024CAO_at; Start 51; Stop 75
tagtaaaatagatagagtaacactt

SEQ ID NO: 110868 - DNA, 25 bp, Artificial
  probe
  misc_feature (1)..(25): SEQ ID NO: 3024; WAN024CAO_at; Start 17; Stop 41
aagcgaatgattttcagaaaaattt

SEQ ID NO: 110869 - DNA, 25 bp, Artificial
  probe
  misc_feature (1)..(25): SEQ ID NO: 3024; WAN024CAO_at; Start 52; Stop 76
agtaaaatagatagagtaacactta

SEQ ID NO: 110870 - DNA, 25 bp, Artificial
  probe
  misc_feature (1)..(25): SEQ ID NO: 3024; WAN024CAO_at; Start 50; Stop 74
atagtaaaatagatagagtaacact

SEQ ID NO: 110871 - DNA, 25 bp, Artificial
  probe
  misc_feature (1)..(25): SEQ ID NO: 3024; WAN024CAO_at; Start 13; Stop 37
ctgaaagcgaatgattttcagaaaa

SEQ ID NO: 110872 - DNA, 25 bp, Artificial
  probe
  misc_feature (1)..(25): SEQ ID NO: 3024; WAN024CAO_at; Start 12; Stop 36
tctgaaagcgaatgattttcagaaa

SEQ ID NO: 110873 - DNA, 25 bp, Artificial
  probe
  misc_feature (1)..(25): SEQ ID NO: 3024; WAN024CAO_at; Start 61; Stop 85
gatagagtaacacttatctcaaagg

SEQ ID NO: 110874 - DNA, 25 bp, Artificial
  probe
  misc_feature (1)..(25): SEQ ID NO: 4288; WAN024CAP_at; Start 138; Stop 162
tgccatttgccaaggtgtcttctcg

SEQ ID NO: 110875 - DNA, 25 bp, Artificial
  probe
  misc_feature (1)..(25): SEQ ID NO: 4288; WAN024CAP_at; Start 82; Stop 106
gaaatttcaataggagccggcatcc

SEQ ID NO: 110876 - DNA, 25 bp, Artificial
  probe
  misc_feature (1)..(25): SEQ ID NO: 4288; WAN024CAP_at; Start 245; Stop 269
tccatttgaccatgccgtctaaaag

SEQ ID NO: 110877 - DNA, 25 bp, Artificial
  probe
  misc_feature (1)..(25): SEQ ID NO: 4288; WAN024CAP_at; Start 218; Stop 242
cagtcgcaatggttaaggcagacat

SEQ ID NO: 110878 - DNA, 25 bp, Artificial
  probe
  misc_feature (1)..(25): SEQ ID NO: 4288; WAN024CAP_at; Start 145; Stop 169
tgccaaggtgtcttctcgacaaaat

SEQ ID NO: 110879 - DNA, 25 bp, Artificial
  probe
  misc_feature (1)..(25): SEQ ID NO: 4288; WAN024CAP_at; Start 173; Stop 197
aactgtattctggatgcttgaccgc

SEQ ID NO: 110880 - DNA, 25 bp, Artificial
  probe
  misc_feature (1)..(25): SEQ ID NO: 4288; WAN024CAP_at; Start 252; Stop 276
gaccatgccgtctaaaagtttgtag

SEQ ID NO: 110881 - DNA, 25 bp, Artificial
  probe
  misc_feature (1)..(25): SEQ ID NO: 4288; WAN024CAP_at; Start 134; Stop 158
gagctgccatttgccaaggtgtctt

SEQ ID NO: 110882 - DNA, 25 bp, Artificial
  probe
  misc_feature (1)..(25): SEQ ID NO: 4288; WAN024CAP_at; Start 17; Stop 41
gagcgtcttctgtgttaaagttgac

SEQ ID NO: 110883 - DNA, 25 bp, Artificial
  probe
  misc_feature (1)..(25): SEQ ID NO: 4288; WAN024CAP_at; Start 101; Stop 125
gcatccatcctaggagggagacgat

SEQ ID NO: 110884 - DNA, 25 bp, Artificial
  probe
  misc_feature (1)..(25): SEQ ID NO: 4288; WAN024CAP_at; Start 158; Stop 182
tctcgacaaaatcagaactgtattc

SEQ ID NO: 110885 - DNA, 25 bp, Artificial
  probe
  misc_feature (1)..(25): SEQ ID NO: 4288; WAN024CAP_at; Start 148; Stop 172
caaggtgtcttctcgacaaaatcag

SEQ ID NO: 110886 - DNA, 25 bp, Artificial
  probe
  misc_feature (1)..(25): SEQ ID NO: 4288; WAN024CAP_at; Start 153; Stop 177
tgtcttctcgacaaaatcagaactg

SEQ ID NO: 110887 - DNA, 25 bp, Artificial
  probe
  misc_feature (1)..(25): SEQ ID NO: 4288; WAN024CAP_at; Start 231; Stop 255
taaggcagacataatccatttgacc

SEQ ID NO: 110888 - DNA, 25 bp, Artificial
  probe
  misc_feature (1)..(25): SEQ ID NO: 4288; WAN024CAP_at; Start 22; Stop 46
tcttctgtgttaaagttgacggtct

SEQ ID NO: 110889 - DNA, 25 bp, Artificial
  probe
  misc_feature (1)..(25): SEQ ID NO: 4288; WAN024CAP_at; Start 131; Stop 155
gcagagctgccatttgccaaggtgt

SEQ ID NO: 110890 - DNA, 25 bp, Artificial
  probe
  misc_feature (1)..(25): SEQ ID NO: 4288; WAN024CAP_at; Start 39; Stop 63
gacggtctttctcttttcagctgac

SEQ ID NO: 110891 - DNA, 25 bp, Artificial
  probe
  misc_feature (1)..(25): SEQ ID NO: 4288; WAN024CAP_at; Start 121; Stop 145
acgatgaagggcagagctgccattt

SEQ ID NO: 110892 - DNA, 25 bp, Artificial
  probe
  misc_feature (1)..(25): SEQ ID NO: 4288; WAN024CAP_at; Start 1; Stop 25
gtgttaaagtcaaacagagcgtctt

SEQ ID NO: 110893 - DNA, 25 bp, Artificial
  probe
  misc_feature (1)..(25): SEQ ID NO: 4288; WAN024CAP_at; Start 6; Stop 30
aaagtcaaacagagcgtcttctgtg

SEQ ID NO: 110894 - DNA, 25 bp, Artificial
  probe
  misc_feature (1)..(25): SEQ ID NO: 4288; WAN024CAP_at; Start 79; Stop 103
gctgaaatttcaataggagccggca

SEQ ID NO: 110895 - DNA, 25 bp, Artificial
  probe
  misc_feature (1)..(25): SEQ ID NO: 4288; WAN024CAP_at; Start 56; Stop 80
cagctgaccaaagtgaattgatggc

SEQ ID NO: 110896 - DNA, 25 bp, Artificial
  probe
  misc_feature (1)..(25): SEQ ID NO: 4288; WAN024CAP_at; Start 141; Stop 165
catttgccaaggtgtcttctcgaca

SEQ ID NO: 110897 - DNA, 25 bp, Artificial
  probe
  misc_feature (1)..(25): SEQ ID NO: 4288; WAN024CAP_at; Start 25; Stop 49
tctgtgttaaagttgacggtctttc

SEQ ID NO: 110898 - DNA, 25 bp, Artificial
  probe
  misc_feature (1)..(25): SEQ ID NO: 4288; WAN024CAP_at; Start 63; Stop 87
ccaaagtgaattgatggctgaaatt

SEQ ID NO: 110899 - DNA, 25 bp, Artificial
  probe
  misc_feature (1)..(25): SEQ ID NO: 4288; WAN024CAP_at; Start 85; Stop 109
atttcaataggagccggcatccatc

SEQ ID NO: 110900 - DNA, 25 bp, Artificial
  probe
  misc_feature (1)..(25): SEQ ID NO: 4288; WAN024CAP_at; Start 48; Stop 72
tctcttttcagctgaccaaagtgaa

SEQ ID NO: 110901 - DNA, 25 bp, Artificial
  probe
  misc_feature (1)..(25): SEQ ID NO: 4288; WAN024CAP_at; Start 95; Stop 119
gagccggcatccatcctaggaggga

SEQ ID NO: 110902 - DNA, 25 bp, Artificial
  probe
  misc_feature (1)..(25): SEQ ID NO: 4288; WAN024CAP_at; Start 224; Stop 248
caatggttaaggcagacataatcca

SEQ ID NO: 110903 - DNA, 25 bp, Artificial
  probe
  misc_feature (1)..(25): SEQ ID NO: 4288; WAN024CAP_at; Start 126; Stop 150
gaagggcagagctgccatttgccaa

SEQ ID NO: 110904 - DNA, 25 bp, Artificial
  probe
  misc_feature (1)..(25): SEQ ID NO: 4288; WAN024CAP_at; Start 215; Stop 239
gaacagtcgcaatggttaaggcaga

SEQ ID NO: 110905 - DNA, 25 bp, Artificial
  probe
  misc_feature (1)..(25): SEQ ID NO: 4288; WAN024CAP_at; Start 92; Stop 116
taggagccggcatccatcctaggag

SEQ ID NO: 110906 - DNA, 25 bp, Artificial
  probe
  misc_feature (1)..(25): SEQ ID NO: 4288; WAN024CAP_at; Start 238; Stop 262
gacataatccatttgaccatgccgt

SEQ ID NO: 110907 - DNA, 25 bp, Artificial
  probe
  misc_feature (1)..(25): SEQ ID NO: 4288; WAN024CAP_at; Start 104; Stop 128
tccatcctaggagggagacgatgaa

SEQ ID NO: 110908 - DNA, 25 bp, Artificial
  probe
  misc_feature (1)..(25): SEQ ID NO: 2120; WAN024CAQ_at; Start 157; Stop 181
gaattgttcgtaagtcgcataaaga

SEQ ID NO: 110909 - DNA, 25 bp, Artificial
  probe
  misc_feature (1)..(25): SEQ ID NO: 2120; WAN024CAQ_at; Start 162; Stop 186
gttcgtaagtcgcataaagagcttg

SEQ ID NO: 110910 - DNA, 25 bp, Artificial
  probe
  misc_feature (1)..(25): SEQ ID NO: 2120; WAN024CAQ_at; Start 37; Stop 61
actttctggaacaaaattcgctgcg

SEQ ID NO: 110911 - DNA, 25 bp, Artificial
  probe
  misc_feature (1)..(25): SEQ ID NO: 2120; WAN024CAQ_at; Start 74; Stop 98
cgagcactcttgtagttacgaactt

SEQ ID NO: 110912 - DNA, 25 bp, Artificial
  probe
  misc_feature (1)..(25): SEQ ID NO: 2120; WAN024CAQ_at; Start 104; Stop 128
cggtaattttgcaccttaacattgg

SEQ ID NO: 110913 - DNA, 25 bp, Artificial
  probe
  misc_feature (1)..(25): SEQ ID NO: 2120; WAN024CAQ_at; Start 101; Stop 125
gcacggtaattttgcaccttaacat

SEQ ID NO: 110914 - DNA, 25 bp, Artificial
  probe
  misc_feature (1)..(25): SEQ ID NO: 2120; WAN024CAQ_at; Start 174; Stop 198
cataaagagcttgataggcaccacg

SEQ ID NO: 110915 - DNA, 25 bp, Artificial
  probe
  misc_feature (1)..(25): SEQ ID NO: 2120; WAN024CAQ_at; Start 41; Stop 65
tctggaacaaaattcgctgcgaggg

SEQ ID NO: 110916 - DNA, 25 bp, Artificial
  probe
  misc_feature (1)..(25): SEQ ID NO: 2120; WAN024CAQ_at; Start 9; Stop 33
gaactgctgctaccaaattgtcata

SEQ ID NO: 110917 - DNA, 25 bp, Artificial
  probe
  misc_feature (1)..(25): SEQ ID NO: 2120; WAN024CAQ_at; Start 178; Stop 202
aagagcttgataggcaccacggcga

SEQ ID NO: 110918 - DNA, 25 bp, Artificial
  probe
  misc_feature (1)..(25): SEQ ID NO: 2120; WAN024CAQ_at; Start 184; Stop 208
ttgataggcaccacggcgaacctca

SEQ ID NO: 110919 - DNA, 25 bp, Artificial
  probe
  misc_feature (1)..(25): SEQ ID NO: 2120; WAN024CAQ_at; Start 63; Stop 87
gggctgcatgacgagcactcttgta

SEQ ID NO: 110920 - DNA, 25 bp, Artificial
  probe
  misc_feature (1)..(25): SEQ ID NO: 2120; WAN024CAQ_at; Start 60; Stop 84
cgagggctgcatgacgagcactctt

SEQ ID NO: 110921 - DNA, 25 bp, Artificial
  probe
  misc_feature (1)..(25): SEQ ID NO: 2120; WAN024CAQ_at; Start 22; Stop 46
caaattgtcataaacactttctgga

SEQ ID NO: 110922 - DNA, 25 bp, Artificial
  probe
  misc_feature (1)..(25): SEQ ID NO: 2120; WAN024CAQ_at; Start 69; Stop 93
catgacgagcactcttgtagttacg

SEQ ID NO: 110923 - DNA, 25 bp, Artificial
  probe
  misc_feature (1)..(25): SEQ ID NO: 2120; WAN024CAQ_at; Start 113; Stop 137
tgcaccttaacattggtttgcaagg

SEQ ID NO: 110924 - DNA, 25 bp, Artificial
  probe
  misc_feature (1)..(25): SEQ ID NO: 2120; WAN024CAQ_at; Start 120; Stop 144
taacattggtttgcaaggttttggc

SEQ ID NO: 110925 - DNA, 25 bp, Artificial
  probe
  misc_feature (1)..(25): SEQ ID NO: 2120; WAN024CAQ_at; Start 1; Stop 25
atgcttgcgaactgctgctaccaaa

SEQ ID NO: 110926 - DNA, 25 bp, Artificial
  probe
  misc_feature (1)..(25): SEQ ID NO: 2120; WAN024CAQ_at; Start 144; Stop 168
cataggtgtgttggaattgttcgta

SEQ ID NO: 110927 - DNA, 25 bp, Artificial
  probe
  misc_feature (1)..(25): SEQ ID NO: 2120; WAN024CAQ_at; Start 221; Stop 245
tccatcaaacgtgtgtaagtcccat

SEQ ID NO: 110928 - DNA, 25 bp, Artificial
  probe
  misc_feature (1)..(25): SEQ ID NO: 2120; WAN024CAQ_at; Start 84; Stop 108
tgtagttacgaactttagcacggta

SEQ ID NO: 110929 - DNA, 25 bp, Artificial
  probe
  misc_feature (1)..(25): SEQ ID NO: 2120; WAN024CAQ_at; Start 167; Stop 191
taagtcgcataaagagcttgatagg

SEQ ID NO: 110930 - DNA, 25 bp, Artificial
  probe
  misc_feature (1)..(25): SEQ ID NO: 2120; WAN024CAQ_at; Start 215; Stop 239
ttagactccatcaaacgtgtgtaag

SEQ ID NO: 110931 - DNA, 25 bp, Artificial
  probe
  misc_feature (1)..(25): SEQ ID NO: 2120; WAN024CAQ_at; Start 211; Stop 235
ttttttagactccatcaaacgtgtg

SEQ ID NO: 110932 - DNA, 25 bp, Artificial
  probe
  misc_feature (1)..(25): SEQ ID NO: 2120; WAN024CAQ_at; Start 228; Stop 252
aacgtgtgtaagtcccatgagatag

SEQ ID NO: 110933 - DNA, 25 bp, Artificial
  probe
  misc_feature (1)..(25): SEQ ID NO: 2120; WAN024CAQ_at; Start 92; Stop 116
cgaactttagcacggtaattttgca

SEQ ID NO: 110934 - DNA, 25 bp, Artificial
  probe
  misc_feature (1)..(25): SEQ ID NO: 2120; WAN024CAQ_at; Start 6; Stop 30
tgcgaactgctgctaccaaattgtc

SEQ ID NO: 110935 - DNA, 25 bp, Artificial
  probe
  misc_feature (1)..(25): SEQ ID NO: 2120; WAN024CAQ_at; Start 129; Stop 153
tttgcaaggttttggcataggtgtg

SEQ ID NO: 110936 - DNA, 25 bp, Artificial
  probe
  misc_feature (1)..(25): SEQ ID NO: 2120; WAN024CAQ_at; Start 151; Stop 175
gtgttggaattgttcgtaagtcgca

SEQ ID NO: 110937 - DNA, 25 bp, Artificial
  probe
  misc_feature (1)..(25): SEQ ID NO: 2120; WAN024CAQ_at; Start 14; Stop 38
gctgctaccaaattgtcataaacac

SEQ ID NO: 110938 - DNA, 25 bp, Artificial
  probe
  misc_feature (1)..(25): SEQ ID NO: 2120; WAN024CAQ_at; Start 226; Stop 250
caaacgtgtgtaagtcccatgagat

SEQ ID NO: 110939 - DNA, 25 bp, Artificial
  probe
  misc_feature (1)..(25): SEQ ID NO: 2120; WAN024CAQ_at; Start 204; Stop 228
cctcacgttttttagactccatcaa

SEQ ID NO: 110940 - DNA, 25 bp, Artificial
  probe
  misc_feature (1)..(25): SEQ ID NO: 2120; WAN024CAQ_at; Start 46; Stop 70
aacaaaattcgctgcgagggctgca

SEQ ID NO: 110941 - DNA, 25 bp, Artificial
  probe
  misc_feature (1)..(25): SEQ ID NO: 2120; WAN024CAQ_at; Start 50; Stop 74
aaattcgctgcgagggctgcatgac

SEQ ID NO: 110942 - DNA, 25 bp, Artificial
  probe
  misc_feature (1)..(25): SEQ ID NO: 4990; WAN024CAR_at; Start 146; Stop 170
gacctccccattttgatctgcttgg

SEQ ID NO: 110943 - DNA, 25 bp, Artificial
  probe
  misc_feature (1)..(25): SEQ ID NO: 4990; WAN024CAR_at; Start 162; Stop 186
tctgcttggtgaatggcgtgttcaa

SEQ ID NO: 110944 - DNA, 25 bp, Artificial
  probe
  misc_feature (1)..(25): SEQ ID NO: 4990; WAN024CAR_at; Start 190; Stop 214
cagcaaattgagtttggcggaaaac

SEQ ID NO: 110945 - DNA, 25 bp, Artificial
  probe
  misc_feature (1)..(25): SEQ ID NO: 4990; WAN024CAR_at; Start 44; Stop 68
gcgagcccactcgtattggatttca

SEQ ID NO: 110946 - DNA, 25 bp, Artificial
  probe
  misc_feature (1)..(25): SEQ ID NO: 4990; WAN024CAR_at; Start 172; Stop 196
gaatggcgtgttcaaactcagcaaa

SEQ ID NO: 110947 - DNA, 25 bp, Artificial
  probe
  misc_feature (1)..(25): SEQ ID NO: 4990; WAN024CAR_at; Start 27; Stop 51
tagtagaagtgtggaatgcgagccc

SEQ ID NO: 110948 - DNA, 25 bp, Artificial
  probe
  misc_feature (1)..(25): SEQ ID NO: 4990; WAN024CAR_at; Start 131; Stop 155
gaaatcgcttgtcaagacctcccca

SEQ ID NO: 110949 - DNA, 25 bp, Artificial
  probe
  misc_feature (1)..(25): SEQ ID NO: 4990; WAN024CAR_at; Start 48; Stop 72
gcccactcgtattggatttcaggat

SEQ ID NO: 110950 - DNA, 25 bp, Artificial
  probe
  misc_feature (1)..(25): SEQ ID NO: 4990; WAN024CAR_at; Start 222; Stop 246
cggaaaccatctaggaagttattga

SEQ ID NO: 110951 - DNA, 25 bp, Artificial
  probe
  misc_feature (1)..(25): SEQ ID NO: 4990; WAN024CAR_at; Start 30; Stop 54
tagaagtgtggaatgcgagcccact

SEQ ID NO: 110952 - DNA, 25 bp, Artificial
  probe
  misc_feature (1)..(25): SEQ ID NO: 4990; WAN024CAR_at; Start 176; Stop 200
ggcgtgttcaaactcagcaaattga

SEQ ID NO: 110953 - DNA, 25 bp, Artificial
  probe
  misc_feature (1)..(25): SEQ ID NO: 4990; WAN024CAR_at; Start 32; Stop 56
gaagtgtggaatgcgagcccactcg

SEQ ID NO: 110954 - DNA, 25 bp, Artificial
  probe
  misc_feature (1)..(25): SEQ ID NO: 4990; WAN024CAR_at; Start 151; Stop 175
ccccattttgatctgcttggtgaat

SEQ ID NO: 110955 - DNA, 25 bp, Artificial
  probe
  misc_feature (1)..(25): SEQ ID NO: 4990; WAN024CAR_at; Start 16; Stop 40
catagtagttatagtagaagtgtgg

SEQ ID NO: 110956 - DNA, 25 bp, Artificial
  probe
  misc_feature (1)..(25): SEQ ID NO: 4990; WAN024CAR_at; Start 96; Stop 120
tactcttggttcaagtctgcgtaga

SEQ ID NO: 110957 - DNA, 25 bp, Artificial
  probe
  misc_feature (1)..(25): SEQ ID NO: 4990; WAN024CAR_at; Start 107; Stop 131
caagtctgcgtagagtttatttagg

SEQ ID NO: 110958 - DNA, 25 bp, Artificial
  probe
  misc_feature (1)..(25): SEQ ID NO: 4990; WAN024CAR_at; Start 70; Stop 94
gattgtcttccttactcaaaccata

SEQ ID NO: 110959 - DNA, 25 bp, Artificial
  probe
  misc_feature (1)..(25): SEQ ID NO: 4990; WAN024CAR_at; Start 80; Stop 104
cttactcaaaccataatactcttgg

SEQ ID NO: 110960 - DNA, 25 bp, Artificial
  probe
  misc_feature (1)..(25): SEQ ID NO: 4990; WAN024CAR_at; Start 198; Stop 222
tgagtttggcggaaaactgttccac

SEQ ID NO: 110961 - DNA, 25 bp, Artificial
  probe
  misc_feature (1)..(25): SEQ ID NO: 4990; WAN024CAR_at; Start 36; Stop 60
tgtggaatgcgagcccactcgtatt

SEQ ID NO: 110962 - DNA, 25 bp, Artificial
  probe
  misc_feature (1)..(25): SEQ ID NO: 4990; WAN024CAR_at; Start 128; Stop 152
taggaaatcgcttgtcaagacctcc

SEQ ID NO: 110963 - DNA, 25 bp, Artificial
  probe
  misc_feature (1)..(25): SEQ ID NO: 4990; WAN024CAR_at; Start 137; Stop 161
gcttgtcaagacctccccattttga

SEQ ID NO: 110964 - DNA, 25 bp, Artificial
  probe
  misc_feature (1)..(25): SEQ ID NO: 4990; WAN024CAR_at; Start 169; Stop 193
ggtgaatggcgtgttcaaactcagc

SEQ ID NO: 110965 - DNA, 25 bp, Artificial
  probe
  misc_feature (1)..(25): SEQ ID NO: 4990; WAN024CAR_at; Start 157; Stop 181
tttgatctgcttggtgaatggcgtg

SEQ ID NO: 110966 - DNA, 25 bp, Artificial
  probe
  misc_feature (1)..(25): SEQ ID NO: 4990; WAN024CAR_at; Start 215; Stop 239
tgttccacggaaaccatctaggaag

SEQ ID NO: 110967 - DNA, 25 bp, Artificial
  probe
  misc_feature (1)..(25): SEQ ID NO: 4990; WAN024CAR_at; Start 66; Stop 90
tcaggattgtcttccttactcaaac

SEQ ID NO: 110968 - DNA, 25 bp, Artificial
  probe
  misc_feature (1)..(25): SEQ ID NO: 4990; WAN024CAR_at; Start 55; Stop 79
cgtattggatttcaggattgtcttc

SEQ ID NO: 110969 - DNA, 25 bp, Artificial
  probe
  misc_feature (1)..(25): SEQ ID NO: 4990; WAN024CAR_at; Start 212; Stop 236
aactgttccacggaaaccatctagg

SEQ ID NO: 110970 - DNA, 25 bp, Artificial
  probe
  misc_feature (1)..(25): SEQ ID NO: 4990; WAN024CAR_at; Start 218; Stop 242
tccacggaaaccatctaggaagtta

SEQ ID NO: 110971 - DNA, 25 bp, Artificial
  probe
  misc_feature (1)..(25): SEQ ID NO: 4990; WAN024CAR_at; Start 124; Stop 148
tatttaggaaatcgcttgtcaagac

SEQ ID NO: 110972 - DNA, 25 bp, Artificial
  probe
  misc_feature (1)..(25): SEQ ID NO: 4990; WAN024CAR_at; Start 115; Stop 139
cgtagagtttatttaggaaatcgct

SEQ ID NO: 110973 - DNA, 25 bp, Artificial
  probe
  misc_feature (1)..(25): SEQ ID NO: 4990; WAN024CAR_at; Start 91; Stop 115
cataatactcttggttcaagtctgc

SEQ ID NO: 110974 - DNA, 25 bp, Artificial
  probe
  misc_feature (1)..(25): SEQ ID NO: 4990; WAN024CAR_at; Start 99; Stop 123
tcttggttcaagtctgcgtagagtt

SEQ ID NO: 110975 - DNA, 25 bp, Artificial
  probe
  misc_feature (1)..(25): SEQ ID NO: 4990; WAN024CAR_at; Start 40; Stop 64
gaatgcgagcccactcgtattggat

SEQ ID NO: 110976 - DNA, 25 bp, Artificial
  probe
  misc_feature (1)..(25): SEQ ID NO: 2588; WAN024CAS_at; Start 210; Stop 234
cggcgttcaaagactgcaaaggcat

SEQ ID NO: 110977 - DNA, 25 bp, Artificial
  probe
  misc_feature (1)..(25): SEQ ID NO: 2588; WAN024CAS_at; Start 109; Stop 133
gacgacaggacgacgcatgttatgg

SEQ ID NO: 110978 - DNA, 25 bp, Artificial
  probe
  misc_feature (1)..(25): SEQ ID NO: 2588; WAN024CAS_at; Start 46; Stop 70
ttctttcaagaaacctgtgacctgc

SEQ ID NO: 110979 - DNA, 25 bp, Artificial
  probe
  misc_feature (1)..(25): SEQ ID NO: 2588; WAN024CAS_at; Start 104; Stop 128
tctttgacgacaggacgacgcatgt

SEQ ID NO: 110980 - DNA, 25 bp, Artificial
  probe
  misc_feature (1)..(25): SEQ ID NO: 2588; WAN024CAS_at; Start 137; Stop 161
gcattcttactatacgattcaacca

SEQ ID NO: 110981 - DNA, 25 bp, Artificial
  probe
  misc_feature (1)..(25): SEQ ID NO: 2588; WAN024CAS_at; Start 129; Stop 153
tatggttagcattcttactatacga

SEQ ID NO: 110982 - DNA, 25 bp, Artificial
  probe
  misc_feature (1)..(25): SEQ ID NO: 2588; WAN024CAS_at; Start 187; Stop 211
caagggcttcaaactcatttaaacg

SEQ ID NO: 110983 - DNA, 25 bp, Artificial
  probe
  misc_feature (1)..(25): SEQ ID NO: 2588; WAN024CAS_at; Start 96; Stop 120
caatttcttctttgacgacaggacg

SEQ ID NO: 110984 - DNA, 25 bp, Artificial
  probe
  misc_feature (1)..(25): SEQ ID NO: 2588; WAN024CAS_at; Start 9; Stop 33
taataggaatattttccttgcgggc

SEQ ID NO: 110985 - DNA, 25 bp, Artificial
  probe
  misc_feature (1)..(25): SEQ ID NO: 2588; WAN024CAS_at; Start 119; Stop 143
cgacgcatgttatggttagcattct

SEQ ID NO: 110986 - DNA, 25 bp, Artificial
  probe
  misc_feature (1)..(25): SEQ ID NO: 2588; WAN024CAS_at; Start 184; Stop 208
caacaagggcttcaaactcatttaa

SEQ ID NO: 110987 - DNA, 25 bp, Artificial
  probe
  misc_feature (1)..(25): SEQ ID NO: 2588; WAN024CAS_at; Start 64; Stop 88
gacctgcttttgacgctgacgcatc

SEQ ID NO: 110988 - DNA, 25 bp, Artificial
  probe
  misc_feature (1)..(25): SEQ ID NO: 2588; WAN024CAS_at; Start 167; Stop 191
tgccaatcctaatttttcaacaagg

SEQ ID NO: 110989 - DNA, 25 bp, Artificial
  probe
  misc_feature (1)..(25): SEQ ID NO: 2588; WAN024CAS_at; Start 147; Stop 171
tatacgattcaaccattttatgcca

SEQ ID NO: 110990 - DNA, 25 bp, Artificial
  probe
  misc_feature (1)..(25): SEQ ID NO: 2588; WAN024CAS_at; Start 31; Stop 55
ggcaaagtcttccaattctttcaag

SEQ ID NO: 110991 - DNA, 25 bp, Artificial
  probe
  misc_feature (1)..(25): SEQ ID NO: 2588; WAN024CAS_at; Start 155; Stop 179
tcaaccattttatgccaatcctaat

SEQ ID NO: 110992 - DNA, 25 bp, Artificial
  probe
  misc_feature (1)..(25): SEQ ID NO: 2588; WAN024CAS_at; Start 206; Stop 230
taaacggcgttcaaagactgcaaag

SEQ ID NO: 110993 - DNA, 25 bp, Artificial
  probe
  misc_feature (1)..(25): SEQ ID NO: 2588; WAN024CAS_at; Start 15; Stop 39
gaatattttccttgcgggcaaagtc

SEQ ID NO: 110994 - DNA, 25 bp, Artificial
  probe
  misc_feature (1)..(25): SEQ ID NO: 2588; WAN024CAS_at; Start 216; Stop 240
tcaaagactgcaaaggcatcgttga

SEQ ID NO: 110995 - DNA, 25 bp, Artificial
  probe
  misc_feature (1)..(25): SEQ ID NO: 2588; WAN024CAS_at; Start 27; Stop 51
tgcgggcaaagtcttccaattcttt

SEQ ID NO: 110996 - DNA, 25 bp, Artificial
  probe
  misc_feature (1)..(25): SEQ ID NO: 2588; WAN024CAS_at; Start 195; Stop 219
tcaaactcatttaaacggcgttcaa

SEQ ID NO: 110997 - DNA, 25 bp, Artificial
  probe
  misc_feature (1)..(25): SEQ ID NO: 2588; WAN024CAS_at; Start 75; Stop 99
gacgctgacgcatcaagtctacaat

SEQ ID NO: 110998 - DNA, 25 bp, Artificial
  probe
  misc_feature (1)..(25): SEQ ID NO: 2588; WAN024CAS_at; Start 55; Stop 79
gaaacctgtgacctgcttttgacgc

SEQ ID NO: 110999 - DNA, 25 bp, Artificial
  probe
  misc_feature (1)..(25): SEQ ID NO: 2588; WAN024CAS_at; Start 213; Stop 237
cgttcaaagactgcaaaggcatcgt

SEQ ID NO: 111000 - DNA, 25 bp, Artificial
  probe
  misc_feature (1)..(25): SEQ ID NO: 2588; WAN024CAS_at; Start 114; Stop 138
caggacgacgcatgttatggttagc

SEQ ID NO: 111001 - DNA, 25 bp, Artificial
  probe
  misc_feature (1)..(25): SEQ ID NO: 2588; WAN024CAS_at; Start 61; Stop 85
tgtgacctgcttttgacgctgacgc

SEQ ID NO: 111002 - DNA, 25 bp, Artificial
  probe
  misc_feature (1)..(25): SEQ ID NO: 2588; WAN024CAS_at; Start 58; Stop 82
acctgtgacctgcttttgacgctga

SEQ ID NO: 111003 - DNA, 25 bp, Artificial
  probe
  misc_feature (1)..(25): SEQ ID NO: 2588; WAN024CAS_at; Start 51; Stop 75
tcaagaaacctgtgacctgcttttg

SEQ ID NO: 111004 - DNA, 25 bp, Artificial
  probe
  misc_feature (1)..(25): SEQ ID NO: 2588; WAN024CAS_at; Start 122; Stop 146
cgcatgttatggttagcattcttac

SEQ ID NO: 111005 - DNA, 25 bp, Artificial
  probe
  misc_feature (1)..(25): SEQ ID NO: 2588; WAN024CAS_at; Start 173; Stop 197
tcctaatttttcaacaagggcttca

SEQ ID NO: 111006 - DNA, 25 bp, Artificial
  probe
  misc_feature (1)..(25): SEQ ID NO: 2588; WAN024CAS_at; Start 101; Stop 125
tcttctttgacgacaggacgacgca

SEQ ID NO: 111007 - DNA, 25 bp, Artificial
  probe
  misc_feature (1)..(25): SEQ ID NO: 2588; WAN024CAS_at; Start 68; Stop 92
tgcttttgacgctgacgcatcaagt

SEQ ID NO: 111008 - DNA, 25 bp, Artificial
  probe
  misc_feature (1)..(25): SEQ ID NO: 2588; WAN024CAS_at; Start 81; Stop 105
gacgcatcaagtctacaatttcttc

SEQ ID NO: 111009 - DNA, 25 bp, Artificial
  probe
  misc_feature (1)..(25): SEQ ID NO: 2588; WAN024CAS_at; Start 23; Stop 47
tccttgcgggcaaagtcttccaatt

SEQ ID NO: 111010 - DNA, 25 bp, Artificial
  probe
  misc_feature (1)..(25): SEQ ID NO: 1986; WAN024CAT_at; Start 61; Stop 85
ggcgagctatttagtgataatgaac

SEQ ID NO: 111011 - DNA, 25 bp, Artificial
  probe
  misc_feature (1)..(25): SEQ ID NO: 1986; WAN024CAT_at; Start 192; Stop 216
tactcatgaggataagatgaactat

SEQ ID NO: 111012 - DNA, 25 bp, Artificial
  probe
  misc_feature (1)..(25): SEQ ID NO: 1986; WAN024CAT_at; Start 99; Stop 123
taaaaaatggcgtgagtgggaagtg

SEQ ID NO: 111013 - DNA, 25 bp, Artificial
  probe
  misc_feature (1)..(25): SEQ ID NO: 1986; WAN024CAT_at; Start 177; Stop 201
aatactatactttcctactcatgag

SEQ ID NO: 111014 - DNA, 25 bp, Artificial
  probe
  misc_feature (1)..(25): SEQ ID NO: 1986; WAN024CAT_at; Start 204; Stop 228
taagatgaactatattagggtggaa

SEQ ID NO: 111015 - DNA, 25 bp, Artificial
  probe
  misc_feature (1)..(25): SEQ ID NO: 1986; WAN024CAT_at; Start 41; Stop 65
gggaatttttccaaatagatggcga

SEQ ID NO: 111016 - DNA, 25 bp, Artificial
  probe
  misc_feature (1)..(25): SEQ ID NO: 1986; WAN024CAT_at; Start 230; Stop 254
aagatttagaacctttgtatcatac

SEQ ID NO: 111017 - DNA, 25 bp, Artificial
  probe
  misc_feature (1)..(25): SEQ ID NO: 1986; WAN024CAT_at; Start 267; Stop 291
ctatgcaactatttctaaaagtgag

SEQ ID NO: 111018 - DNA, 25 bp, Artificial
  probe
  misc_feature (1)..(25): SEQ ID NO: 1986; WAN024CAT_at; Start 153; Stop 177
tatcctaaacgaggatgaaacggaa

SEQ ID NO: 111019 - DNA, 25 bp, Artificial
  probe
  misc_feature (1)..(25): SEQ ID NO: 1986; WAN024CAT_at; Start 160; Stop 184
aacgaggatgaaacggaaatactat

SEQ ID NO: 111020 - DNA, 25 bp, Artificial
  probe
  misc_feature (1)..(25): SEQ ID NO: 1986; WAN024CAT_at; Start 139; Stop 163
gattggtgcaatcgtatcctaaacg

SEQ ID NO: 111021 - DNA, 25 bp, Artificial
  probe
  misc_feature (1)..(25): SEQ ID NO: 1986; WAN024CAT_at; Start 261; Stop 285
caagatctatgcaactatttctaaa

SEQ ID NO: 111022 - DNA, 25 bp, Artificial
  probe
  misc_feature (1)..(25): SEQ ID NO: 1986; WAN024CAT_at; Start 116; Stop 140
gggaagtgccagttattattgatga

SEQ ID NO: 111023 - DNA, 25 bp, Artificial
  probe
  misc_feature (1)..(25): SEQ ID NO: 1986; WAN024CAT_at; Start 3; Stop 27
gccagagtttattattgttgaagga

SEQ ID NO: 111024 - DNA, 25 bp, Artificial
  probe
  misc_feature (1)..(25): SEQ ID NO: 1986; WAN024CAT_at; Start 209; Stop 233
tgaactatattagggtggaaaaaga

SEQ ID NO: 111025 - DNA, 25 bp, Artificial
  probe
  misc_feature (1)..(25): SEQ ID NO: 1986; WAN024CAT_at; Start 145; Stop 169
tgcaatcgtatcctaaacgaggatg

SEQ ID NO: 111026 - DNA, 25 bp, Artificial
  probe
  misc_feature (1)..(25): SEQ ID NO: 1986; WAN024CAT_at; Start 238; Stop 262
gaacctttgtatcatacatcgaaca

SEQ ID NO: 111027 - DNA, 25 bp, Artificial
  probe
  misc_feature (1)..(25): SEQ ID NO: 1986; WAN024CAT_at; Start 163; Stop 187
gaggatgaaacggaaatactatact

SEQ ID NO: 111028 - DNA, 25 bp, Artificial
  probe
  misc_feature (1)..(25): SEQ ID NO: 1986; WAN024CAT_at; Start 18; Stop 42
tgttgaaggaaacaatgacttaggg

SEQ ID NO: 111029 - DNA, 25 bp, Artificial
  probe
  misc_feature (1)..(25): SEQ ID NO: 1986; WAN024CAT_at; Start 179; Stop 203
tactatactttcctactcatgagga

SEQ ID NO: 111030 - DNA, 25 bp, Artificial
  probe
  misc_feature (1)..(25): SEQ ID NO: 1986; WAN024CAT_at; Start 256; Stop 280
tcgaacaagatctatgcaactattt

SEQ ID NO: 111031 - DNA, 25 bp, Artificial
  probe
  misc_feature (1)..(25): SEQ ID NO: 1986; WAN024CAT_at; Start 252; Stop 276
tacatcgaacaagatctatgcaact

SEQ ID NO: 111032 - DNA, 25 bp, Artificial
  probe
  misc_feature (1)..(25): SEQ ID NO: 1986; WAN024CAT_at; Start 72; Stop 96
tagtgataatgaacttttagaaaac

SEQ ID NO: 111033 - DNA, 25 bp, Artificial
  probe
  misc_feature (1)..(25): SEQ ID NO: 1986; WAN024CAT_at; Start 285; Stop 309
aagtgagtggttagaattgttaaat

SEQ ID NO: 111034 - DNA, 25 bp, Artificial
  probe
  misc_feature (1)..(25): SEQ ID NO: 1986; WAN024CAT_at; Start 142; Stop 166
tggtgcaatcgtatcctaaacgagg

SEQ ID NO: 111035 - DNA, 25 bp, Artificial
  probe
  misc_feature (1)..(25): SEQ ID NO: 1986; WAN024CAT_at; Start 46; Stop 70
tttttccaaatagatggcgagctat

SEQ ID NO: 111036 - DNA, 25 bp, Artificial
  probe
  misc_feature (1)..(25): SEQ ID NO: 1986; WAN024CAT_at; Start 245; Stop 269
tgtatcatacatcgaacaagatcta

SEQ ID NO: 111037 - DNA, 25 bp, Artificial
  probe
  misc_feature (1)..(25): SEQ ID NO: 1986; WAN024CAT_at; Start 109; Stop 133
cgtgagtgggaagtgccagttatta

SEQ ID NO: 111038 - DNA, 25 bp, Artificial
  probe
  misc_feature (1)..(25): SEQ ID NO: 1986; WAN024CAT_at; Start 43; Stop 67
gaatttttccaaatagatggcgagc

SEQ ID NO: 111039 - DNA, 25 bp, Artificial
  probe
  misc_feature (1)..(25): SEQ ID NO: 1986; WAN024CAT_at; Start 275; Stop 299
ctatttctaaaagtgagtggttaga

SEQ ID NO: 111040 - DNA, 25 bp, Artificial
  probe
  misc_feature (1)..(25): SEQ ID NO: 1986; WAN024CAT_at; Start 150; Stop 174
tcgtatcctaaacgaggatgaaacg

SEQ ID NO: 111041 - DNA, 25 bp, Artificial
  probe
  misc_feature (1)..(25): SEQ ID NO: 1986; WAN024CAT_at; Start 190; Stop 214
cctactcatgaggataagatgaact

SEQ ID NO: 111042 - DNA, 25 bp, Artificial
  probe
  misc_feature (1)..(25): SEQ ID NO: 1986; WAN024CAT_at; Start 124; Stop 148
ccagttattattgatgattggtgca

SEQ ID NO: 111043 - DNA, 25 bp, Artificial
  probe
  misc_feature (1)..(25): SEQ ID NO: 1986; WAN024CAT_at; Start 56; Stop 80
tagatggcgagctatttagtgataa

SEQ ID NO: 111044 - DNA, 25 bp, Artificial
  probe
  misc_feature (1)..(25): SEQ ID NO: 1456; WAN024CAU_at; Start 504; Stop 528
gctagtacatttccttgatagaaaa

SEQ ID NO: 111045 - DNA, 25 bp, Artificial
  probe
  misc_feature (1)..(25): SEQ ID NO: 1456; WAN024CAU_at; Start 111; Stop 135
taagctaaaagctcaagatgggcaa

SEQ ID NO: 111046 - DNA, 25 bp, Artificial
  probe
  misc_feature (1)..(25): SEQ ID NO: 1456; WAN024CAU_at; Start 313; Stop 337
gatgatgcagctgaactaagtttat

SEQ ID NO: 111047 - DNA, 25 bp, Artificial
  probe
  misc_feature (1)..(25): SEQ ID NO: 1456; WAN024CAU_at; Start 429; Stop 453
tatggataatgatactacccttgct

SEQ ID NO: 111048 - DNA, 25 bp, Artificial
  probe
  misc_feature (1)..(25): SEQ ID NO: 1456; WAN024CAU_at; Start 565; Stop 589
gataagattgatttagtacagcatg

SEQ ID NO: 111049 - DNA, 25 bp, Artificial
  probe
  misc_feature (1)..(25): SEQ ID NO: 1456; WAN024CAU_at; Start 40; Stop 64
gagaaaggctttgttttatactcaa

SEQ ID NO: 111050 - DNA, 25 bp, Artificial
  probe
  misc_feature (1)..(25): SEQ ID NO: 1456; WAN024CAU_at; Start 171; Stop 195
tgcagagcaagaacttttaaaatat

SEQ ID NO: 111051 - DNA, 25 bp, Artificial
  probe
  misc_feature (1)..(25): SEQ ID NO: 1456; WAN024CAU_at; Start 247; Stop 271
caactagaaaaagagaaaaatgctg

SEQ ID NO: 111052 - DNA, 25 bp, Artificial
  probe
  misc_feature (1)..(25): SEQ ID NO: 1456; WAN024CAU_at; Start 444; Stop 468
tacccttgcttatatcgaaattgac

SEQ ID NO: 111053 - DNA, 25 bp, Artificial
  probe
  misc_feature (1)..(25): SEQ ID NO: 1456; WAN024CAU_at; Start 267; Stop 291
tgctgaactagcaaaccatgaatca

SEQ ID NO: 111054 - DNA, 25 bp, Artificial
  probe
  misc_feature (1)..(25): SEQ ID NO: 1456; WAN024CAU_at; Start 489; Stop 513
gcaacgccttgaaaagctagtacat

SEQ ID NO: 111055 - DNA, 25 bp, Artificial
  probe
  misc_feature (1)..(25): SEQ ID NO: 1456; WAN024CAU_at; Start 523; Stop 547
agaaaaattgattatttccacggtg

SEQ ID NO: 111056 - DNA, 25 bp, Artificial
  probe
  misc_feature (1)..(25): SEQ ID NO: 1456; WAN024CAU_at; Start 610; Stop 634
tcagaggcaatggatgcagaattgc

SEQ ID NO: 111057 - DNA, 25 bp, Artificial
  probe
  misc_feature (1)..(25): SEQ ID NO: 1456; WAN024CAU_at; Start 206; Stop 230
gcgaaaactattcccaaaatactgc

SEQ ID NO: 111058 - DNA, 25 bp, Artificial
  probe
  misc_feature (1)..(25): SEQ ID NO: 1456; WAN024CAU_at; Start 124; Stop 148
caagatgggcaattagtttataagg

SEQ ID NO: 111059 - DNA, 25 bp, Artificial
  probe
  misc_feature (1)..(25): SEQ ID NO: 1456; WAN024CAU_at; Start 2; Stop 26
tgactgaaaacaaggatgataaatt

SEQ ID NO: 111060 - DNA, 25 bp, Artificial
  probe
  misc_feature (1)..(25): SEQ ID NO: 1456; WAN024CAU_at; Start 340; Stop 364
tctagtatcaaattaacagtggcag

SEQ ID NO: 111061 - DNA, 25 bp, Artificial
  probe
  misc_feature (1)..(25): SEQ ID NO: 1456; WAN024CAU_at; Start 597; Stop 621
tgttgagggcaattcagaggcaatg

SEQ ID NO: 111062 - DNA, 25 bp, Artificial
  probe
  misc_feature (1)..(25): SEQ ID NO: 1456; WAN024CAU_at; Start 298; Stop 322
gagcctattacagcagatgatgcag

SEQ ID NO: 111063 - DNA, 25 bp, Artificial
  probe
  misc_feature (1)..(25): SEQ ID NO: 1456; WAN024CAU_at; Start 81; Stop 105
gtatattgaaattccagagcatggg

SEQ ID NO: 111064 - DNA, 25 bp, Artificial
  probe
  misc_feature (1)..(25): SEQ ID NO: 1456; WAN024CAU_at; Start 94; Stop 118
ccagagcatgggagtattaagctaa

SEQ ID NO: 111065 - DNA, 25 bp, Artificial
  probe
  misc_feature (1)..(25): SEQ ID NO: 1456; WAN024CAU_at; Start 583; Stop 607
cagcatgaaatgattgttgagggca

SEQ ID NO: 111066 - DNA, 25 bp, Artificial
  probe
  misc_feature (1)..(25): SEQ ID NO: 1456; WAN024CAU_at; Start 156; Stop 180
tatcgggaaagtgtatgcagagcaa

SEQ ID NO: 111067 - DNA, 25 bp, Artificial
  probe
  misc_feature (1)..(25): SEQ ID NO: 1456; WAN024CAU_at; Start 400; Stop 424
cctctagctcttagaaaattagaag

SEQ ID NO: 111068 - DNA, 25 bp, Artificial
  probe
  misc_feature (1)..(25): SEQ ID NO: 1456; WAN024CAU_at; Start 625; Stop 649
gcagaattgcagaattatctagcac

SEQ ID NO: 111069 - DNA, 25 bp, Artificial
  probe
  misc_feature (1)..(25): SEQ ID NO: 1456; WAN024CAU_at; Start 474; Stop 498
gcaattcagccaacagcaacgcctt

SEQ ID NO: 111070 - DNA, 25 bp, Artificial
  probe
  misc_feature (1)..(25): SEQ ID NO: 1456; WAN024CAU_at; Start 286; Stop 310
gaatcaaaagaagagcctattacag

SEQ ID NO: 111071 - DNA, 25 bp, Artificial
  probe
  misc_feature (1)..(25): SEQ ID NO: 1456; WAN024CAU_at; Start 142; Stop 166
tataaggaagtgattatcgggaaag

SEQ ID NO: 111072 - DNA, 25 bp, Artificial
  probe
  misc_feature (1)..(25): SEQ ID NO: 1456; WAN024CAU_at; Start 26; Stop 50
tattaaaaatgatggagaaaggctt

SEQ ID NO: 111073 - DNA, 25 bp, Artificial
  probe
  misc_feature (1)..(25): SEQ ID NO: 1456; WAN024CAU_at; Start 214; Stop 238
tattcccaaaatactgctcagctat

SEQ ID NO: 111074 - DNA, 25 bp, Artificial
  probe
  misc_feature (1)..(25): SEQ ID NO: 1456; WAN024CAU_at; Start 229; Stop 253
gctcagctattgtatcagcaactag

SEQ ID NO: 111075 - DNA, 25 bp, Artificial
  probe
  misc_feature (1)..(25): SEQ ID NO: 1456; WAN024CAU_at; Start 390; Stop 414
taaaaataaacctctagctcttaga

SEQ ID NO: 111076 - DNA, 25 bp, Artificial
  probe
  misc_feature (1)..(25): SEQ ID NO: 1456; WAN024CAU_at; Start 356; Stop 380
cagtggcagaaatgagagaatacct

SEQ ID NO: 111077 - DNA, 25 bp, Artificial
  probe
  misc_feature (1)..(25): SEQ ID NO: 1456; WAN024CAU_at; Start 460; Stop 484
gaaattgacatggagcaattcagcc

SEQ ID NO: 111078 - DNA, 25 bp, Artificial
  probe
  misc_feature (1)..(25): SEQ ID NO: 2132; WAN024CAV_at; Start 44; Stop 68
tgaaaccttatcttcatctcgcgct

SEQ ID NO: 111079 - DNA, 25 bp, Artificial
  probe
  misc_feature (1)..(25): SEQ ID NO: 2132; WAN024CAV_at; Start 57; Stop 81
tcatctcgcgcttgtcccttaccct

SEQ ID NO: 111080 - DNA, 25 bp, Artificial
  probe
  misc_feature (1)..(25): SEQ ID NO: 2132; WAN024CAV_at; Start 53; Stop 77
atcttcatctcgcgcttgtccctta

SEQ ID NO: 111081 - DNA, 25 bp, Artificial
  probe
  misc_feature (1)..(25): SEQ ID NO: 2132; WAN024CAV_at; Start 75; Stop 99
ttaccctgcttttccgattgcgagt

SEQ ID NO: 111082 - DNA, 25 bp, Artificial
  probe
  misc_feature (1)..(25): SEQ ID NO: 2132; WAN024CAV_at; Start 78; Stop 102
ccctgcttttccgattgcgagtgcg

SEQ ID NO: 111083 - DNA, 25 bp, Artificial
  probe
  misc_feature (1)..(25): SEQ ID NO: 2132; WAN024CAV_at; Start 42; Stop 66
aatgaaaccttatcttcatctcgcg

SEQ ID NO: 111084 - DNA, 25 bp, Artificial
  probe
  misc_feature (1)..(25): SEQ ID NO: 2132; WAN024CAV_at; Start 32; Stop 56
tttctcttgaaatgaaaccttatct

SEQ ID NO: 111085 - DNA, 25 bp, Artificial
  probe
  misc_feature (1)..(25): SEQ ID NO: 2132; WAN024CAV_at; Start 60; Stop 84
tctcgcgcttgtcccttaccctgct

SEQ ID NO: 111086 - DNA, 25 bp, Artificial
  probe
  misc_feature (1)..(25): SEQ ID NO: 2132; WAN024CAV_at; Start 55; Stop 79
cttcatctcgcgcttgtcccttacc

SEQ ID NO: 111087 - DNA, 25 bp, Artificial
  probe
  misc_feature (1)..(25): SEQ ID NO: 2132; WAN024CAV_at; Start 74; Stop 98
cttaccctgcttttccgattgcgag

SEQ ID NO: 111088 - DNA, 25 bp, Artificial
  probe
  misc_feature (1)..(25): SEQ ID NO: 2132; WAN024CAV_at; Start 35; Stop 59
ctcttgaaatgaaaccttatcttca

SEQ ID NO: 111089 - DNA, 25 bp, Artificial
  probe
  misc_feature (1)..(25): SEQ ID NO: 2132; WAN024CAV_at; Start 43; Stop 67
atgaaaccttatcttcatctcgcgc

SEQ ID NO: 111090 - DNA, 25 bp, Artificial
  probe
  misc_feature (1)..(25): SEQ ID NO: 2132; WAN024CAV_at; Start 31; Stop 55
ttttctcttgaaatgaaaccttatc

SEQ ID NO: 111091 - DNA, 25 bp, Artificial
  probe
  misc_feature (1)..(25): SEQ ID NO: 2132; WAN024CAV_at; Start 37; Stop 61
cttgaaatgaaaccttatcttcatc

SEQ ID NO: 111092 - DNA, 25 bp, Artificial
  probe
  misc_feature (1)..(25): SEQ ID NO: 2132; WAN024CAV_at; Start 12; Stop 36
catagaaatatttgctgaattttct

SEQ ID NO: 111093 - DNA, 25 bp, Artificial
  probe
  misc_feature (1)..(25): SEQ ID NO: 2132; WAN024CAV_at; Start 36; Stop 60
tcttgaaatgaaaccttatcttcat

SEQ ID NO: 111094 - DNA, 25 bp, Artificial
  probe
  misc_feature (1)..(25): SEQ ID NO: 2132; WAN024CAV_at; Start 6; Stop 30
ttttatcatagaaatatttgctgaa

SEQ ID NO: 111095 - DNA, 25 bp, Artificial
  probe
  misc_feature (1)..(25): SEQ ID NO: 2132; WAN024CAV_at; Start 46; Stop 70
aaaccttatcttcatctcgcgcttg

SEQ ID NO: 111096 - DNA, 25 bp, Artificial
  probe
  misc_feature (1)..(25): SEQ ID NO: 2132; WAN024CAV_at; Start 59; Stop 83
atctcgcgcttgtcccttaccctgc

SEQ ID NO: 111097 - DNA, 25 bp, Artificial
  probe
  misc_feature (1)..(25): SEQ ID NO: 2132; WAN024CAV_at; Start 41; Stop 65
aaatgaaaccttatcttcatctcgc

SEQ ID NO: 111098 - DNA, 25 bp, Artificial
  probe
  misc_feature (1)..(25): SEQ ID NO: 2132; WAN024CAV_at; Start 51; Stop 75
ttatcttcatctcgcgcttgtccct

SEQ ID NO: 111099 - DNA, 25 bp, Artificial
  probe
  misc_feature (1)..(25): SEQ ID NO: 2132; WAN024CAV_at; Start 33; Stop 57
ttctcttgaaatgaaaccttatctt

SEQ ID NO: 111100 - DNA, 25 bp, Artificial
  probe
  misc_feature (1)..(25): SEQ ID NO: 2132; WAN024CAV_at; Start 76; Stop 100
taccctgcttttccgattgcgagtg

SEQ ID NO: 111101 - DNA, 25 bp, Artificial
  probe
  misc_feature (1)..(25): SEQ ID NO: 2132; WAN024CAV_at; Start 73; Stop 97
ccttaccctgcttttccgattgcga

SEQ ID NO: 111102 - DNA, 25 bp, Artificial
  probe
  misc_feature (1)..(25): SEQ ID NO: 2132; WAN024CAV_at; Start 4; Stop 28
ctttttatcatagaaatatttgctg

SEQ ID NO: 111103 - DNA, 25 bp, Artificial
  probe
  misc_feature (1)..(25): SEQ ID NO: 2132; WAN024CAV_at; Start 47; Stop 71
aaccttatcttcatctcgcgcttgt

SEQ ID NO: 111104 - DNA, 25 bp, Artificial
  probe
  misc_feature (1)..(25): SEQ ID NO: 2132; WAN024CAV_at; Start 40; Stop 64
gaaatgaaaccttatcttcatctcg

SEQ ID NO: 111105 - DNA, 25 bp, Artificial
  probe
  misc_feature (1)..(25): SEQ ID NO: 2132; WAN024CAV_at; Start 62; Stop 86
tcgcgcttgtcccttaccctgcttt

SEQ ID NO: 111106 - DNA, 25 bp, Artificial
  probe
  misc_feature (1)..(25): SEQ ID NO: 2132; WAN024CAV_at; Start 48; Stop 72
accttatcttcatctcgcgcttgtc

SEQ ID NO: 111107 - DNA, 25 bp, Artificial
  probe
  misc_feature (1)..(25): SEQ ID NO: 2132; WAN024CAV_at; Start 2; Stop 26
tgctttttatcatagaaatatttgc

SEQ ID NO: 111108 - DNA, 25 bp, Artificial
  probe
  misc_feature (1)..(25): SEQ ID NO: 2132; WAN024CAV_at; Start 34; Stop 58
tctcttgaaatgaaaccttatcttc

SEQ ID NO: 111109 - DNA, 25 bp, Artificial
  probe
  misc_feature (1)..(25): SEQ ID NO: 2132; WAN024CAV_at; Start 56; Stop 80
ttcatctcgcgcttgtcccttaccc

SEQ ID NO: 111110 - DNA, 25 bp, Artificial
  probe
  misc_feature (1)..(25): SEQ ID NO: 2132; WAN024CAV_at; Start 11; Stop 35
tcatagaaatatttgctgaattttc

SEQ ID NO: 111111 - DNA, 25 bp, Artificial
  probe
  misc_feature (1)..(25): SEQ ID NO: 2132; WAN024CAV_at; Start 45; Stop 69
gaaaccttatcttcatctcgcgctt

SEQ ID NO: 111112 - DNA, 25 bp, Artificial
  probe
  misc_feature (1)..(25): SEQ ID NO: 2430; WAN024CAW_at; Start 133; Stop 157
aaagttgcagcggttaaaaagacat

SEQ ID NO: 111113 - DNA, 25 bp, Artificial
  probe
  misc_feature (1)..(25): SEQ ID NO: 2430; WAN024CAW_at; Start 313; Stop 337
tataagacccatgaaatttttggag

SEQ ID NO: 111114 - DNA, 25 bp, Artificial
  probe
  misc_feature (1)..(25): SEQ ID NO: 2430; WAN024CAW_at; Start 13; Stop 37
gaaaatgataaccttacgtccaagc

SEQ ID NO: 111115 - DNA, 25 bp, Artificial
  probe
  misc_feature (1)..(25): SEQ ID NO: 2430; WAN024CAW_at; Start 77; Stop 101
tagacaaagcatgtcaaaaagcagg

SEQ ID NO: 111116 - DNA, 25 bp, Artificial
  probe
  misc_feature (1)..(25): SEQ ID NO: 2430; WAN024CAW_at; Start 233; Stop 257
tactcaatgatattatgatggacag

SEQ ID NO: 111117 - DNA, 25 bp, Artificial
  probe
  misc_feature (1)..(25): SEQ ID NO: 2430; WAN024CAW_at; Start 168; Stop 192
gcaagatgagatgatggataaaaca

SEQ ID NO: 111118 - DNA, 25 bp, Artificial
  probe
  misc_feature (1)..(25): SEQ ID NO: 2430; WAN024CAW_at; Start 48; Stop 72
catagatgccatgcttaccgagcca

SEQ ID NO: 111119 - DNA, 25 bp, Artificial
  probe
  misc_feature (1)..(25): SEQ ID NO: 2430; WAN024CAW_at; Start 345; Stop 369
gcagattgaagaattgaggttggaa

SEQ ID NO: 111120 - DNA, 25 bp, Artificial
  probe
  misc_feature (1)..(25): SEQ ID NO: 2430; WAN024CAW_at; Start 322; Stop 346
catgaaatttttggagtagtaaggc

SEQ ID NO: 111121 - DNA, 25 bp, Artificial
  probe
  misc_feature (1)..(25): SEQ ID NO: 2430; WAN024CAW_at; Start 121; Stop 145
cataagtatctaaaagttgcagcgg

SEQ ID NO: 111122 - DNA, 25 bp, Artificial
  probe
  misc_feature (1)..(25): SEQ ID NO: 2430; WAN024CAW_at; Start 109; Stop 133
cgcgcaacaggtcataagtatctaa

SEQ ID NO: 111123 - DNA, 25 bp, Artificial
  probe
  misc_feature (1)..(25): SEQ ID NO: 2430; WAN024CAW_at; Start 25; Stop 49
cttacgtccaagcaaattaaattca

SEQ ID NO: 111124 - DNA, 25 bp, Artificial
  probe
  misc_feature (1)..(25): SEQ ID NO: 2430; WAN024CAW_at; Start 280; Stop 304
actcaagcagcaaaggctatacttg

SEQ ID NO: 111125 - DNA, 25 bp, Artificial
  probe
  misc_feature (1)..(25): SEQ ID NO: 2430; WAN024CAW_at; Start 301; Stop 325
cttgaacaatcttataagacccatg

SEQ ID NO: 111126 - DNA, 25 bp, Artificial
  probe
  misc_feature (1)..(25): SEQ ID NO: 2430; WAN024CAW_at; Start 37; Stop 61
caaattaaattcatagatgccatgc

SEQ ID NO: 111127 - DNA, 25 bp, Artificial
  probe
  misc_feature (1)..(25): SEQ ID NO: 2430; WAN024CAW_at; Start 407; Stop 431
gaactcaaggagttattaagctaac

SEQ ID NO: 111128 - DNA, 25 bp, Artificial
  probe
  misc_feature (1)..(25): SEQ ID NO: 2430; WAN024CAW_at; Start 371; Stop 395
ttgaggaagtatctaaaggaaatca

SEQ ID NO: 111129 - DNA, 25 bp, Artificial
  probe
  misc_feature (1)..(25): SEQ ID NO: 2430; WAN024CAW_at; Start 180; Stop 204
gatggataaaacaactcaaatgctt

SEQ ID NO: 111130 - DNA, 25 bp, Artificial
  probe
  misc_feature (1)..(25): SEQ ID NO: 2430; WAN024CAW_at; Start 359; Stop 383
tgaggttggaaattgaggaagtatc

SEQ ID NO: 111131 - DNA, 25 bp, Artificial
  probe
  misc_feature (1)..(25): SEQ ID NO: 2430; WAN024CAW_at; Start 66; Stop 90
cgagccaacgatagacaaagcatgt

SEQ ID NO: 111132 - DNA, 25 bp, Artificial
  probe
  misc_feature (1)..(25): SEQ ID NO: 2430; WAN024CAW_at; Start 287; Stop 311
cagcaaaggctatacttgaacaatc

SEQ ID NO: 111133 - DNA, 25 bp, Artificial
  probe
  misc_feature (1)..(25): SEQ ID NO: 2430; WAN024CAW_at; Start 153; Stop 177
gacattgaggataaagcaagatgag

SEQ ID NO: 111134 - DNA, 25 bp, Artificial
  probe
  misc_feature (1)..(25): SEQ ID NO: 2430; WAN024CAW_at; Start 263; Stop 287
tcaacccgtttataagaactcaagc

SEQ ID NO: 111135 - DNA, 25 bp, Artificial
  probe
  misc_feature (1)..(25): SEQ ID NO: 2430; WAN024CAW_at; Start 140; Stop 164
cagcggttaaaaagacattgaggat

SEQ ID NO: 111136 - DNA, 25 bp, Artificial
  probe
  misc_feature (1)..(25): SEQ ID NO: 2430; WAN024CAW_at; Start 394; Stop 418
caaagagttacaagaactcaaggag

SEQ ID NO: 111137 - DNA, 25 bp, Artificial
  probe
  misc_feature (1)..(25): SEQ ID NO: 2430; WAN024CAW_at; Start 268; Stop 292
ccgtttataagaactcaagcagcaa

SEQ ID NO: 111138 - DNA, 25 bp, Artificial
  probe
  misc_feature (1)..(25): SEQ ID NO: 2430; WAN024CAW_at; Start 1; Stop 25
atggcaggaaatgaaaatgataacc

SEQ ID NO: 111139 - DNA, 25 bp, Artificial
  probe
  misc_feature (1)..(25): SEQ ID NO: 2430; WAN024CAW_at; Start 101; Stop 125
gggtatcacgcgcaacaggtcataa

SEQ ID NO: 111140 - DNA, 25 bp, Artificial
  probe
  misc_feature (1)..(25): SEQ ID NO: 2430; WAN024CAW_at; Start 57; Stop 81
catgcttaccgagccaacgatagac

SEQ ID NO: 111141 - DNA, 25 bp, Artificial
  probe
  misc_feature (1)..(25): SEQ ID NO: 2430; WAN024CAW_at; Start 383; Stop 407
ctaaaggaaatcaaagagttacaag

SEQ ID NO: 111142 - DNA, 25 bp, Artificial
  probe
  misc_feature (1)..(25): SEQ ID NO: 2430; WAN024CAW_at; Start 218; Stop 242
ctaacgctgtttctgtactcaatga

SEQ ID NO: 111143 - DNA, 25 bp, Artificial
  probe
  misc_feature (1)..(25): SEQ ID NO: 2430; WAN024CAW_at; Start 248; Stop 272
tgatggacagtaaggtcaacccgtt

SEQ ID NO: 111144 - DNA, 25 bp, Artificial
  probe
  misc_feature (1)..(25): SEQ ID NO: 2430; WAN024CAW_at; Start 201; Stop 225
gctttatttagcatcatctaacgct

SEQ ID NO: 111145 - DNA, 25 bp, Artificial
  probe
  misc_feature (1)..(25): SEQ ID NO: 2430; WAN024CAW_at; Start 331; Stop 355
tttggagtagtaaggcagattgaag

SEQ ID NO: 111146 - DNA, 25 bp, Artificial
  probe
  misc_feature (1)..(25): SEQ ID NO: 2709; WAN024CAX_at; Start 39; Stop 63
gcgtcgtcctgtcgtcaaagaagaa

SEQ ID NO: 111147 - DNA, 25 bp, Artificial
  probe
  misc_feature (1)..(25): SEQ ID NO: 2709; WAN024CAX_at; Start 2; Stop 26
tggttgaatcgtatagtaagaatgc

SEQ ID NO: 111148 - DNA, 25 bp, Artificial
  probe
  misc_feature (1)..(25): SEQ ID NO: 2709; WAN024CAX_at; Start 623; Stop 647
cagaactcaccgcaacattagtgcc

SEQ ID NO: 111149 - DNA, 25 bp, Artificial
  probe
  misc_feature (1)..(25): SEQ ID NO: 2709; WAN024CAX_at; Start 249; Stop 273
tctcttgatggctgaacatgcgcca

SEQ ID NO: 111150 - DNA, 25 bp, Artificial
  probe
  misc_feature (1)..(25): SEQ ID NO: 2709; WAN024CAX_at; Start 448; Stop 472
aaatacatcgtctttctgccagaaa

SEQ ID NO: 111151 - DNA, 25 bp, Artificial
  probe
  misc_feature (1)..(25): SEQ ID NO: 2709; WAN024CAX_at; Start 670; Stop 694
cttcgtaaaaatgtagcagatgttc

SEQ ID NO: 111152 - DNA, 25 bp, Artificial
  probe
  misc_feature (1)..(25): SEQ ID NO: 2709; WAN024CAX_at; Start 379; Stop 403
gatgcggtggatgtcttatctacac

SEQ ID NO: 111153 - DNA, 25 bp, Artificial
  probe
  misc_feature (1)..(25): SEQ ID NO: 2709; WAN024CAX_at; Start 638; Stop 662
cattagtgcctttaggagatggtat

SEQ ID NO: 111154 - DNA, 25 bp, Artificial
  probe
  misc_feature (1)..(25): SEQ ID NO: 2709; WAN024CAX_at; Start 330; Stop 354
aaattttgcccagtttgacagtcgc

SEQ ID NO: 111155 - DNA, 25 bp, Artificial
  probe
  misc_feature (1)..(25): SEQ ID NO: 2709; WAN024CAX_at; Start 99; Stop 123
cacaggtttcttgaaagaattggaa

SEQ ID NO: 111156 - DNA, 25 bp, Artificial
  probe
  misc_feature (1)..(25): SEQ ID NO: 2709; WAN024CAX_at; Start 115; Stop 139
gaattggaagactttgcccgcaagg

SEQ ID NO: 111157 - DNA, 25 bp, Artificial
  probe
  misc_feature (1)..(25): SEQ ID NO: 2709; WAN024CAX_at; Start 62; Stop 86
aaattgtagacttgatgcgtcagcg

SEQ ID NO: 111158 - DNA, 25 bp, Artificial
  probe
  misc_feature (1)..(25): SEQ ID NO: 2709; WAN024CAX_at; Start 353; Stop 377
gcaagcaaatcactctcctagaggg

SEQ ID NO: 111159 - DNA, 25 bp, Artificial
  probe
  misc_feature (1)..(25): SEQ ID NO: 2709; WAN024CAX_at; Start 401; Stop 425
cactgacagagtcttatgatttcgt

SEQ ID NO: 111160 - DNA, 25 bp, Artificial
  probe
  misc_feature (1)..(25): SEQ ID NO: 2709; WAN024CAX_at; Start 186; Stop 210
tcttatggaaaccatgcagcctaaa

SEQ ID NO: 111161 - DNA, 25 bp, Artificial
  probe
  misc_feature (1)..(25): SEQ ID NO: 2709; WAN024CAX_at; Start 224; Stop 248
ttgggacggctatcggtttttcagc

SEQ ID NO: 111162 - DNA, 25 bp, Artificial
  probe
  misc_feature (1)..(25): SEQ ID NO: 2709; WAN024CAX_at; Start 387; Stop 411
ggatgtcttatctacactgacagag

SEQ ID NO: 111163 - DNA, 25 bp, Artificial
  probe
  misc_feature (1)..(25): SEQ ID NO: 2709; WAN024CAX_at; Start 17; Stop 41
gtaagaatgctaaccataacatgcg

SEQ ID NO: 111164 - DNA, 25 bp, Artificial
  probe
  misc_feature (1)..(25): SEQ ID NO: 2709; WAN024CAX_at; Start 344; Stop 368
ttgacagtcgcaagcaaatcactct

SEQ ID NO: 111165 - DNA, 25 bp, Artificial
  probe
  misc_feature (1)..(25): SEQ ID NO: 2709; WAN024CAX_at; Start 293; Stop 317
ttgatcgtaatccagaaatgattgg

SEQ ID NO: 111166 - DNA, 25 bp, Artificial
  probe
  misc_feature (1)..(25): SEQ ID NO: 2709; WAN024CAX_at; Start 433; Stop 457
gattctgccaagtctaaatacatcg

SEQ ID NO: 111167 - DNA, 25 bp, Artificial
  probe
  misc_feature (1)..(25): SEQ ID NO: 2709; WAN024CAX_at; Start 305; Stop 329
cagaaatgattggttttgccaagga

SEQ ID NO: 111168 - DNA, 25 bp, Artificial
  probe
  misc_feature (1)..(25): SEQ ID NO: 2709; WAN024CAX_at; Start 27; Stop 51
taaccataacatgcgtcgtcctgtc

SEQ ID NO: 111169 - DNA, 25 bp, Artificial
  probe
  misc_feature (1)..(25): SEQ ID NO: 2709; WAN024CAX_at; Start 150; Stop 174
tattattccccatgaaacggttgct

SEQ ID NO: 111170 - DNA, 25 bp, Artificial
  probe
  misc_feature (1)..(25): SEQ ID NO: 2709; WAN024CAX_at; Start 198; Stop 222
catgcagcctaaaaatattctggaa

SEQ ID NO: 111171 - DNA, 25 bp, Artificial
  probe
  misc_feature (1)..(25): SEQ ID NO: 2709; WAN024CAX_at; Start 655; Stop 679
gatggtattctcatgcttcgtaaaa

SEQ ID NO: 111172 - DNA, 25 bp, Artificial
  probe
  misc_feature (1)..(25): SEQ ID NO: 2709; WAN024CAX_at; Start 126; Stop 150
ctttgcccgcaaggaaaatattcct

SEQ ID NO: 111173 - DNA, 25 bp, Artificial
  probe
  misc_feature (1)..(25): SEQ ID NO: 2709; WAN024CAX_at; Start 362; Stop 386
tcactctcctagagggagatgcggt

SEQ ID NO: 111174 - DNA, 25 bp, Artificial
  probe
  misc_feature (1)..(25): SEQ ID NO: 2709; WAN024CAX_at; Start 236; Stop 260
tcggtttttcagctctcttgatggc

SEQ ID NO: 111175 - DNA, 25 bp, Artificial
  probe
  misc_feature (1)..(25): SEQ ID NO: 2709; WAN024CAX_at; Start 262; Stop 286
gaacatgcgccaaatgctaagatta

SEQ ID NO: 111176 - DNA, 25 bp, Artificial
  probe
  misc_feature (1)..(25): SEQ ID NO: 2709; WAN024CAX_at; Start 475; Stop 499
ctcaaacatttggaagttggtggtg

SEQ ID NO: 111177 - DNA, 25 bp, Artificial
  probe
  misc_feature (1)..(25): SEQ ID NO: 2709; WAN024CAX_at; Start 277; Stop 301
gctaagattacaactattgatcgta

SEQ ID NO: 111178 - DNA, 25 bp, Artificial
  probe
  misc_feature (1)..(25): SEQ ID NO: 2709; WAN024CAX_at; Start 213; Stop 237
tattctggaaattgggacggctatc

SEQ ID NO: 111179 - DNA, 25 bp, Artificial
  probe
  misc_feature (1)..(25): SEQ ID NO: 2709; WAN024CAX_at; Start 158; Stop 182
cccatgaaacggttgcttatttccg

SEQ ID NO: 111180 - DNA, 25 bp, Artificial
  probe
  misc_feature (1)..(25): SEQ ID NO: 3323; WAN024CAY_at; Start 876; Stop 900
tcttggcgaatggtcccgttacttg

SEQ ID NO: 111181 - DNA, 25 bp, Artificial
  probe
  misc_feature (1)..(25): SEQ ID NO: 3323; WAN024CAY_at; Start 804; Stop 828
tcctacagggcaggcggttgaagct

SEQ ID NO: 111182 - DNA, 25 bp, Artificial
  probe
  misc_feature (1)..(25): SEQ ID NO: 3323; WAN024CAY_at; Start 163; Stop 187
ggttggtctctacttctcttggtca

SEQ ID NO: 111183 - DNA, 25 bp, Artificial
  probe
  misc_feature (1)..(25): SEQ ID NO: 3323; WAN024CAY_at; Start 359; Stop 383
tgtgctcagctatcatcgccagtgc

SEQ ID NO: 111184 - DNA, 25 bp, Artificial
  probe
  misc_feature (1)..(25): SEQ ID NO: 3323; WAN024CAY_at; Start 619; Stop 643
gtctccctcctaggatggatgccgg

SEQ ID NO: 111185 - DNA, 25 bp, Artificial
  probe
  misc_feature (1)..(25): SEQ ID NO: 3323; WAN024CAY_at; Start 861; Stop 885
catgtatgcctctgttcttggcgaa

SEQ ID NO: 111186 - DNA, 25 bp, Artificial
  probe
  misc_feature (1)..(25): SEQ ID NO: 3323; WAN024CAY_at; Start 745; Stop 769
tatattggaacagctatcctagccg

SEQ ID NO: 111187 - DNA, 25 bp, Artificial
  probe
  misc_feature (1)..(25): SEQ ID NO: 3323; WAN024CAY_at; Start 69; Stop 93
caagctaaaagcaatgggacctgga

SEQ ID NO: 111188 - DNA, 25 bp, Artificial
  probe
  misc_feature (1)..(25): SEQ ID NO: 3323; WAN024CAY_at; Start 679; Stop 703
tcagctgaaaagagaaagaccgtca

SEQ ID NO: 111189 - DNA, 25 bp, Artificial
  probe
  misc_feature (1)..(25): SEQ ID NO: 3323; WAN024CAY_at; Start 974; Stop 998
aggaatctctccgactgctaatcag

SEQ ID NO: 111190 - DNA, 25 bp, Artificial
  probe
  misc_feature (1)..(25): SEQ ID NO: 3323; WAN024CAY_at; Start 952; Stop 976
gatggctattctcgcgttaatcagg

SEQ ID NO: 111191 - DNA, 25 bp, Artificial
  probe
  misc_feature (1)..(25): SEQ ID NO: 3323; WAN024CAY_at; Start 466; Stop 490
tacaaacttttagacggcatggtca

SEQ ID NO: 111192 - DNA, 25 bp, Artificial
  probe
  misc_feature (1)..(25): SEQ ID NO: 3323; WAN024CAY_at; Start 495; Stop 519
gattatgtctgccttaaccattgcg

SEQ ID NO: 111193 - DNA, 25 bp, Artificial
  probe
  misc_feature (1)..(25): SEQ ID NO: 3323; WAN024CAY_at; Start 585; Stop 609
gacaccttggcaaatggcagctctg

SEQ ID NO: 111194 - DNA, 25 bp, Artificial
  probe
  misc_feature (1)..(25): SEQ ID NO: 3323; WAN024CAY_at; Start 1261; Stop 1285
tacgcactcgcaatcggaaaagcag

SEQ ID NO: 111195 - DNA, 25 bp, Artificial
  probe
  misc_feature (1)..(25): SEQ ID NO: 3323; WAN024CAY_at; Start 773; Stop 797
tctttgtggcactgggagcactgat

SEQ ID NO: 111196 - DNA, 25 bp, Artificial
  probe
  misc_feature (1)..(25): SEQ ID NO: 3323; WAN024CAY_at; Start 636; Stop 660
gatgccggctcctattgaaatttca

SEQ ID NO: 111197 - DNA, 25 bp, Artificial
  probe
  misc_feature (1)..(25): SEQ ID NO: 3323; WAN024CAY_at; Start 440; Stop 464
tttgggctatgctactctttggagg

SEQ ID NO: 111198 - DNA, 25 bp, Artificial
  probe
  misc_feature (1)..(25): SEQ ID NO: 3323; WAN024CAY_at; Start 14; Stop 38
aaggagtatttatcatgtcgcaagc

SEQ ID NO: 111199 - DNA, 25 bp, Artificial
  probe
  misc_feature (1)..(25): SEQ ID NO: 3323; WAN024CAY_at; Start 239; Stop 263
cagctgatactggaaagactttggt

SEQ ID NO: 111200 - DNA, 25 bp, Artificial
  probe
  misc_feature (1)..(25): SEQ ID NO: 3323; WAN024CAY_at; Start 104; Stop 128
caactgccgctgttggaggttccca

SEQ ID NO: 111201 - DNA, 25 bp, Artificial
  probe
  misc_feature (1)..(25): SEQ ID NO: 3323; WAN024CAY_at; Start 1068; Stop 1092
tatcaagttcttcgctggtcaggtt

SEQ ID NO: 111202 - DNA, 25 bp, Artificial
  probe
  misc_feature (1)..(25): SEQ ID NO: 3323; WAN024CAY_at; Start 544; Stop 568
gcggtcaagcatccagaatacagtt

SEQ ID NO: 111203 - DNA, 25 bp, Artificial
  probe
  misc_feature (1)..(25): SEQ ID NO: 3323; WAN024CAY_at; Start 1199; Stop 1223
ggctcaaacaccttgccattgcggg

SEQ ID NO: 111204 - DNA, 25 bp, Artificial
  probe
  misc_feature (1)..(25): SEQ ID NO: 3323; WAN024CAY_at; Start 412; Stop 436
cagtggtccctcattctcgttgcaa

SEQ ID NO: 111205 - DNA, 25 bp, Artificial
  probe
  misc_feature (1)..(25): SEQ ID NO: 3323; WAN024CAY_at; Start 1087; Stop 1111
caggtttcaaccatgctccgctttg

SEQ ID NO: 111206 - DNA, 25 bp, Artificial
  probe
  misc_feature (1)..(25): SEQ ID NO: 3323; WAN024CAY_at; Start 375; Stop 399
cgccagtgccttcccaatgattgga

SEQ ID NO: 111207 - DNA, 25 bp, Artificial
  probe
  misc_feature (1)..(25): SEQ ID NO: 3323; WAN024CAY_at; Start 339; Stop 363
cacggctggtgttgccattctgtgc

SEQ ID NO: 111208 - DNA, 25 bp, Artificial
  probe
  misc_feature (1)..(25): SEQ ID NO: 3323; WAN024CAY_at; Start 838; Stop 862
aaatacatctctcaattcgtgggca

SEQ ID NO: 111209 - DNA, 25 bp, Artificial
  probe
  misc_feature (1)..(25): SEQ ID NO: 3323; WAN024CAY_at; Start 86; Stop 110
gacctggaatcctaatggcaactgc

SEQ ID NO: 111210 - DNA, 25 bp, Artificial
  probe
  misc_feature (1)..(25): SEQ ID NO: 3323; WAN024CAY_at; Start 571; Stop 595
gattttgtcgagaagacaccttggc

SEQ ID NO: 111211 - DNA, 25 bp, Artificial
  probe
  misc_feature (1)..(25): SEQ ID NO: 3323; WAN024CAY_at; Start 49; Stop 73
aatcaatcaacctgggcaagcaagc

SEQ ID NO: 111212 - DNA, 25 bp, Artificial
  probe
  misc_feature (1)..(25): SEQ ID NO: 3323; WAN024CAY_at; Start 323; Stop 347
tttcggctatggtcaacacggctgg

SEQ ID NO: 111213 - DNA, 25 bp, Artificial
  probe
  misc_feature (1)..(25): SEQ ID NO: 3323; WAN024CAY_at; Start 132; Stop 156
tgtatcctcaactcaagctggcggt

SEQ ID NO: 111214 - DNA, 25 bp, Artificial
  probe
  misc_feature (1)..(25): SEQ ID NO: 2647; WAN024CAZ_at; Start 1283; Stop 1307
tattggaagaagtggaagacgacgc

SEQ ID NO: 111215 - DNA, 25 bp, Artificial
  probe
  misc_feature (1)..(25): SEQ ID NO: 2647; WAN024CAZ_at; Start 1720; Stop 1744
gactacctcaacgatgcctttgcag

SEQ ID NO: 111216 - DNA, 25 bp, Artificial
  probe
  misc_feature (1)..(25): SEQ ID NO: 2647; WAN024CAZ_at; Start 1623; Stop 1647
agaagaccgtgaccgctatatcgac

SEQ ID NO: 111217 - DNA, 25 bp, Artificial
  probe
  misc_feature (1)..(25): SEQ ID NO: 2647; WAN024CAZ_at; Start 1608; Stop 1632
tgtccatggtagtcaagaagaccgt

SEQ ID NO: 111218 - DNA, 25 bp, Artificial
  probe
  misc_feature (1)..(25): SEQ ID NO: 2647; WAN024CAZ_at; Start 983; Stop 1007
tcttgggtgaggattacttgagccg

SEQ ID NO: 111219 - DNA, 25 bp, Artificial
  probe
  misc_feature (1)..(25): SEQ ID NO: 2647; WAN024CAZ_at; Start 54; Stop 78
gatctacccaactgaccaggcttgg

SEQ ID NO: 111220 - DNA, 25 bp, Artificial
  probe
  misc_feature (1)..(25): SEQ ID NO: 2647; WAN024CAZ_at; Start 1386; Stop 1410
tgaacacgccattcaccaagcagat

SEQ ID NO: 111221 - DNA, 25 bp, Artificial
  probe
  misc_feature (1)..(25): SEQ ID NO: 2647; WAN024CAZ_at; Start 1446; Stop 1470
taaactctacgcagacttgaaccaa

SEQ ID NO: 111222 - DNA, 25 bp, Artificial
  probe
  misc_feature (1)..(25): SEQ ID NO: 2647; WAN024CAZ_at; Start 136; Stop 160
catctcttggatagtgcggataacc

SEQ ID NO: 111223 - DNA, 25 bp, Artificial
  probe
  misc_feature (1)..(25): SEQ ID NO: 2647; WAN024CAZ_at; Start 1186; Stop 1210
tatactcgtgaaactcagccttatg

SEQ ID NO: 111224 - DNA, 25 bp, Artificial
  probe
  misc_feature (1)..(25): SEQ ID NO: 2647; WAN024CAZ_at; Start 802; Stop 826
gacaatttggtagcagcagttcgca

SEQ ID NO: 111225 - DNA, 25 bp, Artificial
  probe
  misc_feature (1)..(25): SEQ ID NO: 2647; WAN024CAZ_at; Start 1705; Stop 1729
gatatggagaaggaagactacctca

SEQ ID NO: 111226 - DNA, 25 bp, Artificial
  probe
  misc_feature (1)..(25): SEQ ID NO: 2647; WAN024CAZ_at; Start 1650; Stop 1674
cctcaaggcaggtaagtcggactat

SEQ ID NO: 111227 - DNA, 25 bp, Artificial
  probe
  misc_feature (1)..(25): SEQ ID NO: 2647; WAN024CAZ_at; Start 1297; Stop 1321
gaagacgacgcaacacgctttgcta

SEQ ID NO: 111228 - DNA, 25 bp, Artificial
  probe
  misc_feature (1)..(25): SEQ ID NO: 2647; WAN024CAZ_at; Start 1588; Stop 1612
tcagccttggctgaaaaaattgtcc

SEQ ID NO: 111229 - DNA, 25 bp, Artificial
  probe
  misc_feature (1)..(25): SEQ ID NO: 2647; WAN024CAZ_at; Start 1500; Stop 1524
tcctgaaatccaatacgagtgggct

SEQ ID NO: 111230 - DNA, 25 bp, Artificial
  probe
  misc_feature (1)..(25): SEQ ID NO: 2647; WAN024CAZ_at; Start 1059; Stop 1083
caagcgttcaggtgcctactctggt

SEQ ID NO: 111231 - DNA, 25 bp, Artificial
  probe
  misc_feature (1)..(25): SEQ ID NO: 2647; WAN024CAZ_at; Start 1023; Stop 1047
cagcgagcgttggattgatgtttac

SEQ ID NO: 111232 - DNA, 25 bp, Artificial
  probe
  misc_feature (1)..(25): SEQ ID NO: 2647; WAN024CAZ_at; Start 1043; Stop 1067
tttacgaaaatcaaggcaagcgttc

SEQ ID NO: 111233 - DNA, 25 bp, Artificial
  probe
  misc_feature (1)..(25): SEQ ID NO: 2647; WAN024CAZ_at; Start 894; Stop 918
gatgtacgatgtctacacaccgctt

SEQ ID NO: 111234 - DNA, 25 bp, Artificial
  probe
  misc_feature (1)..(25): SEQ ID NO: 2647; WAN024CAZ_at; Start 1371; Stop 1395
tcaatttgctgagtttgaacacgcc

SEQ ID NO: 111235 - DNA, 25 bp, Artificial
  probe
  misc_feature (1)..(25): SEQ ID NO: 2647; WAN024CAZ_at; Start 1329; Stop 1353
taacttcctagatggtttccgtgga

SEQ ID NO: 111236 - DNA, 25 bp, Artificial
  probe
  misc_feature (1)..(25): SEQ ID NO: 2647; WAN024CAZ_at; Start 234; Stop 258
gaatgaccaggatacacgtgaagct

SEQ ID NO: 111237 - DNA, 25 bp, Artificial
  probe
  misc_feature (1)..(25): SEQ ID NO: 2647; WAN024CAZ_at; Start 427; Stop 451
caaggcaaggatcacgttctttcac

SEQ ID NO: 111238 - DNA, 25 bp, Artificial
  probe
  misc_feature (1)..(25): SEQ ID NO: 2647; WAN024CAZ_at; Start 1735; Stop 1759
gcctttgcagtctttgaacgccgtt

SEQ ID NO: 111239 - DNA, 25 bp, Artificial
  probe
  misc_feature (1)..(25): SEQ ID NO: 2647; WAN024CAZ_at; Start 933; Stop 957
cagttttacctaccaagaagccttg

SEQ ID NO: 111240 - DNA, 25 bp, Artificial
  probe
  misc_feature (1)..(25): SEQ ID NO: 2647; WAN024CAZ_at; Start 768; Stop 792
cctcgcagcgaattttgttccagaa

SEQ ID NO: 111241 - DNA, 25 bp, Artificial
  probe
  misc_feature (1)..(25): SEQ ID NO: 2647; WAN024CAZ_at; Start 374; Stop 398
tagaagctcaaccaaagctgcaggt

SEQ ID NO: 111242 - DNA, 25 bp, Artificial
  probe
  misc_feature (1)..(25): SEQ ID NO: 2647; WAN024CAZ_at; Start 745; Stop 769
tacaagagtgctcgtcatgcagccc

SEQ ID NO: 111243 - DNA, 25 bp, Artificial
  probe
  misc_feature (1)..(25): SEQ ID NO: 2647; WAN024CAZ_at; Start 588; Stop 612
tgggacttacacacgtttgatggag

SEQ ID NO: 111244 - DNA, 25 bp, Artificial
  probe
  misc_feature (1)..(25): SEQ ID NO: 2647; WAN024CAZ_at; Start 1161; Stop 1185
aacaggtcacagtatgcattcaagc

SEQ ID NO: 111245 - DNA, 25 bp, Artificial
  probe
  misc_feature (1)..(25): SEQ ID NO: 2647; WAN024CAZ_at; Start 646; Stop 670
caagctctttatgcgacttacgaac

SEQ ID NO: 111246 - DNA, 25 bp, Artificial
  probe
  misc_feature (1)..(25): SEQ ID NO: 2647; WAN024CAZ_at; Start 262; Stop 286
tatcaagagtactatgccaaggcca

SEQ ID NO: 111247 - DNA, 25 bp, Artificial
  probe
  misc_feature (1)..(25): SEQ ID NO: 2647; WAN024CAZ_at; Start 627; Stop 651
ggttcgccgtggtgcctatcaagct

SEQ ID NO: 111248 - DNA, 25 bp, Artificial
  probe
  misc_feature (1)..(25): SEQ ID NO: 5360; WAN024CB2_at; Start 149; Stop 173
tgctctgcagactctatagtaatgg

SEQ ID NO: 111249 - DNA, 25 bp, Artificial
  probe
  misc_feature (1)..(25): SEQ ID NO: 5360; WAN024CB2_at; Start 186; Stop 210
caaaatagagcacaaaacgctcgtg

SEQ ID NO: 111250 - DNA, 25 bp, Artificial
  probe
  misc_feature (1)..(25): SEQ ID NO: 5360; WAN024CB2_at; Start 10; Stop 34
cctccatatcccacttatcaaaggg

SEQ ID NO: 111251 - DNA, 25 bp, Artificial
  probe
  misc_feature (1)..(25): SEQ ID NO: 5360; WAN024CB2_at; Start 246; Stop 270
tgtagctggcttggtgttcaaaata

SEQ ID NO: 111252 - DNA, 25 bp, Artificial
  probe
  misc_feature (1)..(25): SEQ ID NO: 5360; WAN024CB2_at; Start 198; Stop 222
caaaacgctcgtgtacattgacaat

SEQ ID NO: 111253 - DNA, 25 bp, Artificial
  probe
  misc_feature (1)..(25): SEQ ID NO: 5360; WAN024CB2_at; Start 20; Stop 44
ccacttatcaaagggaatcaaacgc

SEQ ID NO: 111254 - DNA, 25 bp, Artificial
  probe
  misc_feature (1)..(25): SEQ ID NO: 5360; WAN024CB2_at; Start 165; Stop 189
tagtaatggcatagcggtctccaaa

SEQ ID NO: 111255 - DNA, 25 bp, Artificial
  probe
  misc_feature (1)..(25): SEQ ID NO: 5360; WAN024CB2_at; Start 49; Stop 73
gaccttctgtcaccatgtactcatc

SEQ ID NO: 111256 - DNA, 25 bp, Artificial
  probe
  misc_feature (1)..(25): SEQ ID NO: 5360; WAN024CB2_at; Start 108; Stop 132
tctactcatcttgaattgtaatacg

SEQ ID NO: 111257 - DNA, 25 bp, Artificial
  probe
  misc_feature (1)..(25): SEQ ID NO: 5360; WAN024CB2_at; Start 163; Stop 187
tatagtaatggcatagcggtctcca

SEQ ID NO: 111258 - DNA, 25 bp, Artificial
  probe
  misc_feature (1)..(25): SEQ ID NO: 5360; WAN024CB2_at; Start 243; Stop 267
cactgtagctggcttggtgttcaaa

SEQ ID NO: 111259 - DNA, 25 bp, Artificial
  probe
  misc_feature (1)..(25): SEQ ID NO: 5360; WAN024CB2_at; Start 235; Stop 259
cctttgatcactgtagctggcttgg

SEQ ID NO: 111260 - DNA, 25 bp, Artificial
  probe
  misc_feature (1)..(25): SEQ ID NO: 5360; WAN024CB2_at; Start 172; Stop 196
ggcatagcggtctccaaaatagagc

SEQ ID NO: 111261 - DNA, 25 bp, Artificial
  probe
  misc_feature (1)..(25): SEQ ID NO: 5360; WAN024CB2_at; Start 226; Stop 250
gatagactgcctttgatcactgtag

SEQ ID NO: 111262 - DNA, 25 bp, Artificial
  probe
  misc_feature (1)..(25): SEQ ID NO: 5360; WAN024CB2_at; Start 176; Stop 200
tagcggtctccaaaatagagcacaa

SEQ ID NO: 111263 - DNA, 25 bp, Artificial
  probe
  misc_feature (1)..(25): SEQ ID NO: 5360; WAN024CB2_at; Start 61; Stop 85
ccatgtactcatcatctactaataa

SEQ ID NO: 111264 - DNA, 25 bp, Artificial
  probe
  misc_feature (1)..(25): SEQ ID NO: 5360; WAN024CB2_at; Start 93; Stop 117
tacattttctccctttctactcatc

SEQ ID NO: 111265 - DNA, 25 bp, Artificial
  probe
  misc_feature (1)..(25): SEQ ID NO: 5360; WAN024CB2_at; Start 126; Stop 150
taatacgatactgaacaccggcttg

SEQ ID NO: 111266 - DNA, 25 bp, Artificial
  probe
  misc_feature (1)..(25): SEQ ID NO: 5360; WAN024CB2_at; Start 54; Stop 78
tctgtcaccatgtactcatcatcta

SEQ ID NO: 111267 - DNA, 25 bp, Artificial
  probe
  misc_feature (1)..(25): SEQ ID NO: 5360; WAN024CB2_at; Start 191; Stop 215
tagagcacaaaacgctcgtgtacat

SEQ ID NO: 111268 - DNA, 25 bp, Artificial
  probe
  misc_feature (1)..(25): SEQ ID NO: 5360; WAN024CB2_at; Start 25; Stop 49
tatcaaagggaatcaaacgcttcag

SEQ ID NO: 111269 - DNA, 25 bp, Artificial
  probe
  misc_feature (1)..(25): SEQ ID NO: 5360; WAN024CB2_at; Start 28; Stop 52
caaagggaatcaaacgcttcagacc

SEQ ID NO: 111270 - DNA, 25 bp, Artificial
  probe
  misc_feature (1)..(25): SEQ ID NO: 5360; WAN024CB2_at; Start 33; Stop 57
ggaatcaaacgcttcagaccttctg

SEQ ID NO: 111271 - DNA, 25 bp, Artificial
  probe
  misc_feature (1)..(25): SEQ ID NO: 5360; WAN024CB2_at; Start 143; Stop 167
ccggcttgctctgcagactctatag

SEQ ID NO: 111272 - DNA, 25 bp, Artificial
  probe
  misc_feature (1)..(25): SEQ ID NO: 5360; WAN024CB2_at; Start 217; Stop 241
gacaatcccgatagactgcctttga

SEQ ID NO: 111273 - DNA, 25 bp, Artificial
  probe
  misc_feature (1)..(25): SEQ ID NO: 5360; WAN024CB2_at; Start 156; Stop 180
cagactctatagtaatggcatagcg

SEQ ID NO: 111274 - DNA, 25 bp, Artificial
  probe
  misc_feature (1)..(25): SEQ ID NO: 5360; WAN024CB2_at; Start 43; Stop 67
gcttcagaccttctgtcaccatgta

SEQ ID NO: 111275 - DNA, 25 bp, Artificial
  probe
  misc_feature (1)..(25): SEQ ID NO: 5360; WAN024CB2_at; Start 230; Stop 254
gactgcctttgatcactgtagctgg

SEQ ID NO: 111276 - DNA, 25 bp, Artificial
  probe
  misc_feature (1)..(25): SEQ ID NO: 5360; WAN024CB2_at; Start 129; Stop 153
tacgatactgaacaccggcttgctc

SEQ ID NO: 111277 - DNA, 25 bp, Artificial
  probe
  misc_feature (1)..(25): SEQ ID NO: 5360; WAN024CB2_at; Start 204; Stop 228
gctcgtgtacattgacaatcccgat

SEQ ID NO: 111278 - DNA, 25 bp, Artificial
  probe
  misc_feature (1)..(25): SEQ ID NO: 5360; WAN024CB2_at; Start 123; Stop 147
ttgtaatacgatactgaacaccggc

SEQ ID NO: 111279 - DNA, 25 bp, Artificial
  probe
  misc_feature (1)..(25): SEQ ID NO: 5360; WAN024CB2_at; Start 182; Stop 206
tctccaaaatagagcacaaaacgct

SEQ ID NO: 111280 - DNA, 25 bp, Artificial
  probe
  misc_feature (1)..(25): SEQ ID NO: 5360; WAN024CB2_at; Start 211; Stop 235
tacattgacaatcccgatagactgc

SEQ ID NO: 111281 - DNA, 25 bp, Artificial
  probe
  misc_feature (1)..(25): SEQ ID NO: 5360; WAN024CB2_at; Start 137; Stop 161
tgaacaccggcttgctctgcagact

SEQ ID NO: 111282 - DNA, 25 bp, Artificial
  probe
  misc_feature (1)..(25): SEQ ID NO: 5968; WAN024CB3_at; Start 666; Stop 690
gagtctctttgcctattacgaaccg

SEQ ID NO: 111283 - DNA, 25 bp, Artificial
  probe
  misc_feature (1)..(25): SEQ ID NO: 5968; WAN024CB3_at; Start 133; Stop 157
caggaaaatcctgtcgatgtcatca

SEQ ID NO: 111284 - DNA, 25 bp, Artificial
  probe
  misc_feature (1)..(25): SEQ ID NO: 5968; WAN024CB3_at; Start 324; Stop 348
taaggtagagctgggaaatctgctg

SEQ ID NO: 111285 - DNA, 25 bp, Artificial
  probe
  misc_feature (1)..(25): SEQ ID NO: 5968; WAN024CB3_at; Start 949; Stop 973
caataccgtatgaatgaaaatgtgg

SEQ ID NO: 111286 - DNA, 25 bp, Artificial
  probe
  misc_feature (1)..(25): SEQ ID NO: 5968; WAN024CB3_at; Start 167; Stop 191
tcaatatgccagacaaaacagggct

SEQ ID NO: 111287 - DNA, 25 bp, Artificial
  probe
  misc_feature (1)..(25): SEQ ID NO: 5968; WAN024CB3_at; Start 612; Stop 636
gctgaatgctgagaaaaccctcttt

SEQ ID NO: 111288 - DNA, 25 bp, Artificial
  probe
  misc_feature (1)..(25): SEQ ID NO: 5968; WAN024CB3_at; Start 350; Stop 374
agaagattgcaggtcagctcggcga

SEQ ID NO: 111289 - DNA, 25 bp, Artificial
  probe
  misc_feature (1)..(25): SEQ ID NO: 5968; WAN024CB3_at; Start 1047; Stop 1071
tatcaatcctgtctatctagggcag

SEQ ID NO: 111290 - DNA, 25 bp, Artificial
  probe
  misc_feature (1)..(25): SEQ ID NO: 5968; WAN024CB3_at; Start 1014; Stop 1038
gctttccctcaaggatatcagtaag

SEQ ID NO: 111291 - DNA, 25 bp, Artificial
  probe
  misc_feature (1)..(25): SEQ ID NO: 5968; WAN024CB3_at; Start 560; Stop 584
tagtcgttacaccttttgaagctcc

SEQ ID NO: 111292 - DNA, 25 bp, Artificial
  probe
  misc_feature (1)..(25): SEQ ID NO: 5968; WAN024CB3_at; Start 155; Stop 179
tcatttccgatgtcaatatgccaga

SEQ ID NO: 111293 - DNA, 25 bp, Artificial
  probe
  misc_feature (1)..(25): SEQ ID NO: 5968; WAN024CB3_at; Start 226; Stop 250
gatgctgcctatatcctgctctcag

SEQ ID NO: 111294 - DNA, 25 bp, Artificial
  probe
  misc_feature (1)..(25): SEQ ID NO: 5968; WAN024CB3_at; Start 195; Stop 219
tatgattcgggagatgaaagagatc

SEQ ID NO: 111295 - DNA, 25 bp, Artificial
  probe
  misc_feature (1)..(25): SEQ ID NO: 5968; WAN024CB3_at; Start 105; Stop 129
tcatgccgatgaagctctagaatat

SEQ ID NO: 111296 - DNA, 25 bp, Artificial
  probe
  misc_feature (1)..(25): SEQ ID NO: 5968; WAN024CB3_at; Start 1060; Stop 1084
tatctagggcagttgattaagcgtg

SEQ ID NO: 111297 - DNA, 25 bp, Artificial
  probe
  misc_feature (1)..(25): SEQ ID NO: 5968; WAN024CB3_at; Start 41; Stop 65
cagaaggtctgaagcgtttgattcc

SEQ ID NO: 111298 - DNA, 25 bp, Artificial
  probe
  misc_feature (1)..(25): SEQ ID NO: 5968; WAN024CB3_at; Start 372; Stop 396
cgagagagggaagaaaagtcagact

SEQ ID NO: 111299 - DNA, 25 bp, Artificial
  probe
  misc_feature (1)..(25): SEQ ID NO: 5968; WAN024CB3_at; Start 1115; Stop 1139
acaaacaacgtattaaggctgccca

SEQ ID NO: 111300 - DNA, 25 bp, Artificial
  probe
  misc_feature (1)..(25): SEQ ID NO: 5968; WAN024CB3_at; Start 598; Stop 622
tttgaacgctggaagctgaatgctg

SEQ ID NO: 111301 - DNA, 25 bp, Artificial
  probe
  misc_feature (1)..(25): SEQ ID NO: 5968; WAN024CB3_at; Start 709; Stop 733
cagggaaatctcaatcaaatcgtag

SEQ ID NO: 111302 - DNA, 25 bp, Artificial
  probe
  misc_feature (1)..(25): SEQ ID NO: 5968; WAN024CB3_at; Start 996; Stop 1020
tcgtgattaccaaaaagagctttcc

SEQ ID NO: 111303 - DNA, 25 bp, Artificial
  probe
  misc_feature (1)..(25): SEQ ID NO: 5968; WAN024CB3_at; Start 694; Stop 718
tatagggttatcattcagggaaatc

SEQ ID NO: 111304 - DNA, 25 bp, Artificial
  probe
  misc_feature (1)..(25): SEQ ID NO: 5968; WAN024CB3_at; Start 975; Stop 999
cagtgtgctggaagtcattggtcgt

SEQ ID NO: 111305 - DNA, 25 bp, Artificial
  probe
  misc_feature (1)..(25): SEQ ID NO: 5968; WAN024CB3_at; Start 1101; Stop 1125
tgcagagttactaaacaaacaacgt

SEQ ID NO: 111306 - DNA, 25 bp, Artificial
  probe
  misc_feature (1)..(25): SEQ ID NO: 5968; WAN024CB3_at; Start 64; Stop 88
ccctttgataagtgggatatggagg

SEQ ID NO: 111307 - DNA, 25 bp, Artificial
  probe
  misc_feature (1)..(25): SEQ ID NO: 5968; WAN024CB3_at; Start 242; Stop 266
tgctctcaggttatcaggagtttga

SEQ ID NO: 111308 - DNA, 25 bp, Artificial
  probe
  misc_feature (1)..(25): SEQ ID NO: 5968; WAN024CB3_at; Start 289; Stop 313
cttagtgtggtggactatttggtca

SEQ ID NO: 111309 - DNA, 25 bp, Artificial
  probe
  misc_feature (1)..(25): SEQ ID NO: 5968; WAN024CB3_at; Start 396; Stop 420
tcttagtcaagaattagacgaggct

SEQ ID NO: 111310 - DNA, 25 bp, Artificial
  probe
  misc_feature (1)..(25): SEQ ID NO: 5968; WAN024CB3_at; Start 210; Stop 234
gaaagagatcttaccagatgctgcc

SEQ ID NO: 111311 - DNA, 25 bp, Artificial
  probe
  misc_feature (1)..(25): SEQ ID NO: 5968; WAN024CB3_at; Start 1235; Stop 1259
tgtgcggaaaatcgccaaaagccta

SEQ ID NO: 111312 - DNA, 25 bp, Artificial
  probe
  misc_feature (1)..(25): SEQ ID NO: 5968; WAN024CB3_at; Start 25; Stop 49
gatgagtacatggtgacagaaggtc

SEQ ID NO: 111313 - DNA, 25 bp, Artificial
  probe
  misc_feature (1)..(25): SEQ ID NO: 5968; WAN024CB3_at; Start 1073; Stop 1097
tgattaagcgtgaaaccgattcgac

SEQ ID NO: 111314 - DNA, 25 bp, Artificial
  probe
  misc_feature (1)..(25): SEQ ID NO: 5968; WAN024CB3_at; Start 182; Stop 206
aaacagggcttgatatgattcggga

SEQ ID NO: 111315 - DNA, 25 bp, Artificial
  probe
  misc_feature (1)..(25): SEQ ID NO: 5968; WAN024CB3_at; Start 491; Stop 515
tcaccattccctactatgtcttggg

SEQ ID NO: 111316 - DNA, 25 bp, Artificial
  probe
  misc_feature (1)..(25): SEQ ID NO: 3999; WAN024CB4_at; Start 1664; Stop 1688
aagccggtgttcagtatcgtattac

SEQ ID NO: 111317 - DNA, 25 bp, Artificial
  probe
  misc_feature (1)..(25): SEQ ID NO: 3999; WAN024CB4_at; Start 1385; Stop 1409
actatttcgcgcatggtgttgacca

SEQ ID NO: 111318 - DNA, 25 bp, Artificial
  probe
  misc_feature (1)..(25): SEQ ID NO: 3999; WAN024CB4_at; Start 1559; Stop 1583
ccagctacagtgatcaaaggcagtc

SEQ ID NO: 111319 - DNA, 25 bp, Artificial
  probe
  misc_feature (1)..(25): SEQ ID NO: 3999; WAN024CB4_at; Start 331; Stop 355
tactggcaattagagcggaaagctt

SEQ ID NO: 111320 - DNA, 25 bp, Artificial
  probe
  misc_feature (1)..(25): SEQ ID NO: 3999; WAN024CB4_at; Start 1356; Stop 1380
caagtttaccttgcaaccgctggta

SEQ ID NO: 111321 - DNA, 25 bp, Artificial
  probe
  misc_feature (1)..(25): SEQ ID NO: 3999; WAN024CB4_at; Start 1156; Stop 1180
cagagtcaagatgagttggcagata

SEQ ID NO: 111322 - DNA, 25 bp, Artificial
  probe
  misc_feature (1)..(25): SEQ ID NO: 3999; WAN024CB4_at; Start 1231; Stop 1255
gagaccctcctcaaacaggaattag

SEQ ID NO: 111323 - DNA, 25 bp, Artificial
  probe
  misc_feature (1)..(25): SEQ ID NO: 3999; WAN024CB4_at; Start 639; Stop 663
tactccgatggcagtaacagtgacc

SEQ ID NO: 111324 - DNA, 25 bp, Artificial
  probe
  misc_feature (1)..(25): SEQ ID NO: 3999; WAN024CB4_at; Start 1588; Stop 1612
gggattgtcaatgtacacgagcgtt

SEQ ID NO: 111325 - DNA, 25 bp, Artificial
  probe
  misc_feature (1)..(25): SEQ ID NO: 3999; WAN024CB4_at; Start 1573; Stop 1597
caaaggcagtctatcgggattgtca

SEQ ID NO: 111326 - DNA, 25 bp, Artificial
  probe
  misc_feature (1)..(25): SEQ ID NO: 3999; WAN024CB4_at; Start 575; Stop 599
gagtgatttacatctccttggatcc

SEQ ID NO: 111327 - DNA, 25 bp, Artificial
  probe
  misc_feature (1)..(25): SEQ ID NO: 3999; WAN024CB4_at; Start 627; Stop 651
tactagaggtcatactccgatggca

SEQ ID NO: 111328 - DNA, 25 bp, Artificial
  probe
  misc_feature (1)..(25): SEQ ID NO: 3999; WAN024CB4_at; Start 238; Stop 262
gagtcaacccagatagctcaggctt

SEQ ID NO: 111329 - DNA, 25 bp, Artificial
  probe
  misc_feature (1)..(25): SEQ ID NO: 3999; WAN024CB4_at; Start 185; Stop 209
tagcccagcgtgtaactgctagaac

SEQ ID NO: 111330 - DNA, 25 bp, Artificial
  probe
  misc_feature (1)..(25): SEQ ID NO: 3999; WAN024CB4_at; Start 1478; Stop 1502
tcgataatggtagaggaatgtcggc

SEQ ID NO: 111331 - DNA, 25 bp, Artificial
  probe
  misc_feature (1)..(25): SEQ ID NO: 3999; WAN024CB4_at; Start 1493; Stop 1517
gaatgtcggctgaaaagttggcaaa

SEQ ID NO: 111332 - DNA, 25 bp, Artificial
  probe
  misc_feature (1)..(25): SEQ ID NO: 3999; WAN024CB4_at; Start 1189; Stop 1213
gaattcagtagtctcttgcgtaaca

SEQ ID NO: 111333 - DNA, 25 bp, Artificial
  probe
  misc_feature (1)..(25): SEQ ID NO: 3999; WAN024CB4_at; Start 1282; Stop 1306
tgcatggttcgctatcccaagtcca

SEQ ID NO: 111334 - DNA, 25 bp, Artificial
  probe
  misc_feature (1)..(25): SEQ ID NO: 3999; WAN024CB4_at; Start 1543; Stop 1567
tattttgaacaccaagccagctaca

SEQ ID NO: 111335 - DNA, 25 bp, Artificial
  probe
  misc_feature (1)..(25): SEQ ID NO: 3999; WAN024CB4_at; Start 1649; Stop 1673
tagagtctgcagagcaagccggtgt

SEQ ID NO: 111336 - DNA, 25 bp, Artificial
  probe
  misc_feature (1)..(25): SEQ ID NO: 3999; WAN024CB4_at; Start 157; Stop 181
gattcacgtgaaaaggaagcccaga

SEQ ID NO: 111337 - DNA, 25 bp, Artificial
  probe
  misc_feature (1)..(25): SEQ ID NO: 3999; WAN024CB4_at; Start 983; Stop 1007
tcctaatcgcggagacgaccaatga

SEQ ID NO: 111338 - DNA, 25 bp, Artificial
  probe
  misc_feature (1)..(25): SEQ ID NO: 3999; WAN024CB4_at; Start 1399; Stop 1423
ggtgttgaccacaggcggacagata

SEQ ID NO: 111339 - DNA, 25 bp, Artificial
  probe
  misc_feature (1)..(25): SEQ ID NO: 3999; WAN024CB4_at; Start 1215; Stop 1239
tatttccgacgaaagagagaccctc

SEQ ID NO: 111340 - DNA, 25 bp, Artificial
  probe
  misc_feature (1)..(25): SEQ ID NO: 3999; WAN024CB4_at; Start 1369; Stop 1393
caaccgctggtagaaaactatttcg

SEQ ID NO: 111341 - DNA, 25 bp, Artificial
  probe
  misc_feature (1)..(25): SEQ ID NO: 3999; WAN024CB4_at; Start 347; Stop 371
ggaaagcttcgccttatatatcagt

SEQ ID NO: 111342 - DNA, 25 bp, Artificial
  probe
  misc_feature (1)..(25): SEQ ID NO: 3999; WAN024CB4_at; Start 223; Stop 247
gaatattaccatagagagtcaaccc

SEQ ID NO: 111343 - DNA, 25 bp, Artificial
  probe
  misc_feature (1)..(25): SEQ ID NO: 3999; WAN024CB4_at; Start 513; Stop 537
caaaccagcaggaaatagttttgcc

SEQ ID NO: 111344 - DNA, 25 bp, Artificial
  probe
  misc_feature (1)..(25): SEQ ID NO: 3999; WAN024CB4_at; Start 140; Stop 164
tctcttacgctgactgggattcacg

SEQ ID NO: 111345 - DNA, 25 bp, Artificial
  probe
  misc_feature (1)..(25): SEQ ID NO: 3999; WAN024CB4_at; Start 1431; Stop 1455
tagcatcaaggctcttaaacaggat

SEQ ID NO: 111346 - DNA, 25 bp, Artificial
  probe
  misc_feature (1)..(25): SEQ ID NO: 3999; WAN024CB4_at; Start 595; Stop 619
gatcctgctgttttataccatgcca

SEQ ID NO: 111347 - DNA, 25 bp, Artificial
  probe
  misc_feature (1)..(25): SEQ ID NO: 3999; WAN024CB4_at; Start 1617; Stop 1641
gctctattttggagaccgctatgcc

SEQ ID NO: 111348 - DNA, 25 bp, Artificial
  probe
  misc_feature (1)..(25): SEQ ID NO: 3999; WAN024CB4_at; Start 610; Stop 634
taccatgccattgataatactagag

SEQ ID NO: 111349 - DNA, 25 bp, Artificial
  probe
  misc_feature (1)..(25): SEQ ID NO: 3999; WAN024CB4_at; Start 497; Stop 521
tcagggctgaggatttcaaaccagc

SEQ ID NO: 111350 - DNA, 25 bp, Artificial
  probe
  misc_feature (1)..(25): SEQ ID NO: 2602; WAN024CB5_at; Start 279; Stop 303
ggtgcaattgcctcatcagaccatt

SEQ ID NO: 111351 - DNA, 25 bp, Artificial
  probe
  misc_feature (1)..(25): SEQ ID NO: 2602; WAN024CB5_at; Start 159; Stop 183
tcgggaatacagtttgaaggaggct

SEQ ID NO: 111352 - DNA, 25 bp, Artificial
  probe
  misc_feature (1)..(25): SEQ ID NO: 2602; WAN024CB5_at; Start 126; Stop 150
gatgagcttatatgcagaacatggt

SEQ ID NO: 111353 - DNA, 25 bp, Artificial
  probe
  misc_feature (1)..(25): SEQ ID NO: 2602; WAN024CB5_at; Start 437; Stop 461
tctttatgagtctagcagctgtggc

SEQ ID NO: 111354 - DNA, 25 bp, Artificial
  probe
  misc_feature (1)..(25): SEQ ID NO: 2602; WAN024CB5_at; Start 228; Stop 252
ctatagctttttaggtgtgggtcta

SEQ ID NO: 111355 - DNA, 25 bp, Artificial
  probe
  misc_feature (1)..(25): SEQ ID NO: 2602; WAN024CB5_at; Start 312; Stop 336
gattgcgacccttttgaatgtccta

SEQ ID NO: 111356 - DNA, 25 bp, Artificial
  probe
  misc_feature (1)..(25): SEQ ID NO: 2602; WAN024CB5_at; Start 539; Stop 563
ggatgtggcatttctttatcagtga

SEQ ID NO: 111357 - DNA, 25 bp, Artificial
  probe
  misc_feature (1)..(25): SEQ ID NO: 2602; WAN024CB5_at; Start 118; Stop 142
gccaccttgatgagcttatatgcag

SEQ ID NO: 111358 - DNA, 25 bp, Artificial
  probe
  misc_feature (1)..(25): SEQ ID NO: 2602; WAN024CB5_at; Start 384; Stop 408
agtttattttgccttgtcctatcga

SEQ ID NO: 111359 - DNA, 25 bp, Artificial
  probe
  misc_feature (1)..(25): SEQ ID NO: 2602; WAN024CB5_at; Start 166; Stop 190
tacagtttgaaggaggcttggtctc

SEQ ID NO: 111360 - DNA, 25 bp, Artificial
  probe
  misc_feature (1)..(25): SEQ ID NO: 2602; WAN024CB5_at; Start 468; Stop 492
tctccttgggactgtgctacttgta

SEQ ID NO: 111361 - DNA, 25 bp, Artificial
  probe
  misc_feature (1)..(25): SEQ ID NO: 2602; WAN024CB5_at; Start 509; Stop 533
tgcctgccctgctattttttgtagg

SEQ ID NO: 111362 - DNA, 25 bp, Artificial
  probe
  misc_feature (1)..(25): SEQ ID NO: 2602; WAN024CB5_at; Start 243; Stop 267
tgtgggtctagttttgacctatggt

SEQ ID NO: 111363 - DNA, 25 bp, Artificial
  probe
  misc_feature (1)..(25): SEQ ID NO: 2602; WAN024CB5_at; Start 260; Stop 284
cctatggtttgtatctcttggtgca

SEQ ID NO: 111364 - DNA, 25 bp, Artificial
  probe
  misc_feature (1)..(25): SEQ ID NO: 2602; WAN024CB5_at; Start 177; Stop 201
ggaggcttggtctctttacaagcaa

SEQ ID NO: 111365 - DNA, 25 bp, Artificial
  probe
  misc_feature (1)..(25): SEQ ID NO: 2602; WAN024CB5_at; Start 476; Stop 500
ggactgtgctacttgtagcaattgg

SEQ ID NO: 111366 - DNA, 25 bp, Artificial
  probe
  misc_feature (1)..(25): SEQ ID NO: 2602; WAN024CB5_at; Start 269; Stop 293
tgtatctcttggtgcaattgcctca

SEQ ID NO: 111367 - DNA, 25 bp, Artificial
  probe
  misc_feature (1)..(25): SEQ ID NO: 2602; WAN024CB5_at; Start 52; Stop 76
gcgacagccttcttttggctattaa

SEQ ID NO: 111368 - DNA, 25 bp, Artificial
  probe
  misc_feature (1)..(25): SEQ ID NO: 2602; WAN024CB5_at; Start 35; Stop 59
tctttttagggatgattgcgacagc

SEQ ID NO: 111369 - DNA, 25 bp, Artificial
  probe
  misc_feature (1)..(25): SEQ ID NO: 2602; WAN024CB5_at; Start 140; Stop 164
cagaacatggttatagctttcggga

SEQ ID NO: 111370 - DNA, 25 bp, Artificial
  probe
  misc_feature (1)..(25): SEQ ID NO: 2602; WAN024CB5_at; Start 90; Stop 114
gattatccttggtctagcgccggct

SEQ ID NO: 111371 - DNA, 25 bp, Artificial
  probe
  misc_feature (1)..(25): SEQ ID NO: 2602; WAN024CB5_at; Start 424; Stop 448
tccttgattggcatctttatgagtc

SEQ ID NO: 111372 - DNA, 25 bp, Artificial
  probe
  misc_feature (1)..(25): SEQ ID NO: 2602; WAN024CB5_at; Start 74; Stop 98
taactttagcaggagggattatcct

SEQ ID NO: 111373 - DNA, 25 bp, Artificial
  probe
  misc_feature (1)..(25): SEQ ID NO: 2602; WAN024CB5_at; Start 524; Stop 548
tttttgtaggaattgggatgtggca

SEQ ID NO: 111374 - DNA, 25 bp, Artificial
  probe
  misc_feature (1)..(25): SEQ ID NO: 2602; WAN024CB5_at; Start 211; Stop 235
tcaagcaacctgattttctatagct

SEQ ID NO: 111375 - DNA, 25 bp, Artificial
  probe
  misc_feature (1)..(25): SEQ ID NO: 2602; WAN024CB5_at; Start 343; Stop 367
gccctgatctttttggcttatacag

SEQ ID NO: 111376 - DNA, 25 bp, Artificial
  probe
  misc_feature (1)..(25): SEQ ID NO: 2602; WAN024CB5_at; Start 411; Stop 435
tagtctcaaattatccttgattggc

SEQ ID NO: 111377 - DNA, 25 bp, Artificial
  probe
  misc_feature (1)..(25): SEQ ID NO: 2602; WAN024CB5_at; Start 145; Stop 169
catggttatagctttcgggaataca

SEQ ID NO: 111378 - DNA, 25 bp, Artificial
  probe
  misc_feature (1)..(25): SEQ ID NO: 2602; WAN024CB5_at; Start 45; Stop 69
gatgattgcgacagccttcttttgg

SEQ ID NO: 111379 - DNA, 25 bp, Artificial
  probe
  misc_feature (1)..(25): SEQ ID NO: 2602; WAN024CB5_at; Start 297; Stop 321
gaccattgttcatttgattgcgacc

SEQ ID NO: 111380 - DNA, 25 bp, Artificial
  probe
  misc_feature (1)..(25): SEQ ID NO: 2602; WAN024CB5_at; Start 67; Stop 91
tggctattaactttagcaggaggga

SEQ ID NO: 111381 - DNA, 25 bp, Artificial
  probe
  misc_feature (1)..(25): SEQ ID NO: 2602; WAN024CB5_at; Start 106; Stop 130
gcgccggctagtgccaccttgatga

SEQ ID NO: 111382 - DNA, 25 bp, Artificial
  probe
  misc_feature (1)..(25): SEQ ID NO: 2602; WAN024CB5_at; Start 327; Stop 351
gaatgtcctagtagttgccctgatc

SEQ ID NO: 111383 - DNA, 25 bp, Artificial
  probe
  misc_feature (1)..(25): SEQ ID NO: 2602; WAN024CB5_at; Start 394; Stop 418
gccttgtcctatcgaaatagtctca

SEQ ID NO: 111384 - DNA, 25 bp, Artificial
  probe
  misc_feature (1)..(25): SEQ ID NO: 2615; WAN024CB6_at; Start 470; Stop 494
gaaaatcccaagaatatatcgaccg

SEQ ID NO: 111385 - DNA, 25 bp, Artificial
  probe
  misc_feature (1)..(25): SEQ ID NO: 2615; WAN024CB6_at; Start 543; Stop 567
tattgtcatcggagccctagtgggt

SEQ ID NO: 111386 - DNA, 25 bp, Artificial
  probe
  misc_feature (1)..(25): SEQ ID NO: 2615; WAN024CB6_at; Start 478; Stop 502
caagaatatatcgaccgtatcatgg

SEQ ID NO: 111387 - DNA, 25 bp, Artificial
  probe
  misc_feature (1)..(25): SEQ ID NO: 2615; WAN024CB6_at; Start 221; Stop 245
gctttggagccattaccactatcgg

SEQ ID NO: 111388 - DNA, 25 bp, Artificial
  probe
  misc_feature (1)..(25): SEQ ID NO: 2615; WAN024CB6_at; Start 518; Stop 542
gaactgtccttctatttatcgcaag

SEQ ID NO: 111389 - DNA, 25 bp, Artificial
  probe
  misc_feature (1)..(25): SEQ ID NO: 2615; WAN024CB6_at; Start 179; Stop 203
tcggcggtagcgtctatatgatcct

SEQ ID NO: 111390 - DNA, 25 bp, Artificial
  probe
  misc_feature (1)..(25): SEQ ID NO: 2615; WAN024CB6_at; Start 154; Stop 178
tatgcgcctgcctttactgcccttg

SEQ ID NO: 111391 - DNA, 25 bp, Artificial
  probe
  misc_feature (1)..(25): SEQ ID NO: 2615; WAN024CB6_at; Start 195; Stop 219
tatgatcctagtcgcaaaagttccg

SEQ ID NO: 111392 - DNA, 25 bp, Artificial
  probe
  misc_feature (1)..(25): SEQ ID NO: 2615; WAN024CB6_at; Start 337; Stop 361
gctcatttaggaaaatacaaggaca

SEQ ID NO: 111393 - DNA, 25 bp, Artificial
  probe
  misc_feature (1)..(25): SEQ ID NO: 2615; WAN024CB6_at; Start 500; Stop 524
tggtcgctccaaaccctggaactgt

SEQ ID NO: 111394 - DNA, 25 bp, Artificial
  probe
  misc_feature (1)..(25): SEQ ID NO: 2615; WAN024CB6_at; Start 266; Stop 290
tcttgggaactaaacacggtgctgg

SEQ ID NO: 111395 - DNA, 25 bp, Artificial
  probe
  misc_feature (1)..(25): SEQ ID NO: 2615; WAN024CB6_at; Start 210; Stop 234
aaaagttccgcgctttggagccatt

SEQ ID NO: 111396 - DNA, 25 bp, Artificial
  probe
  misc_feature (1)..(25): SEQ ID NO: 2615; WAN024CB6_at; Start 443; Stop 467
cctatatggctactcttctggcaag

SEQ ID NO: 111397 - DNA, 25 bp, Artificial
  probe
  misc_feature (1)..(25): SEQ ID NO: 2615; WAN024CB6_at; Start 231; Stop 255
cattaccactatcggccttgtcatt

SEQ ID NO: 111398 - DNA, 25 bp, Artificial
  probe
  misc_feature (1)..(25): SEQ ID NO: 2615; WAN024CB6_at; Start 387; Stop 411
tattttcgcctttagtacaacagga

SEQ ID NO: 111399 - DNA, 25 bp, Artificial
  probe
  misc_feature (1)..(25): SEQ ID NO: 2615; WAN024CB6_at; Start 416; Stop 440
tcttgcttatgtggattgcgcccaa

SEQ ID NO: 111400 - DNA, 25 bp, Artificial
  probe
  misc_feature (1)..(25): SEQ ID NO: 2615; WAN024CB6_at; Start 80; Stop 104
cagttctttacttcctctgcatggg

SEQ ID NO: 111401 - DNA, 25 bp, Artificial
  probe
  misc_feature (1)..(25): SEQ ID NO: 2615; WAN024CB6_at; Start 166; Stop 190
tttactgcccttgtcggcggtagcg

SEQ ID NO: 111402 - DNA, 25 bp, Artificial
  probe
  misc_feature (1)..(25): SEQ ID NO: 2615; WAN024CB6_at; Start 304; Stop 328
ggaattatctgtggcctcctagcag

SEQ ID NO: 111403 - DNA, 25 bp, Artificial
  probe
  misc_feature (1)..(25): SEQ ID NO: 2615; WAN024CB6_at; Start 494; Stop 518
gtatcatggtcgctccaaaccctgg

SEQ ID NO: 111404 - DNA, 25 bp, Artificial
  probe
  misc_feature (1)..(25): SEQ ID NO: 2615; WAN024CB6_at; Start 428; Stop 452
ggattgcgcccaaagcctatatggc

SEQ ID NO: 111405 - DNA, 25 bp, Artificial
  probe
  misc_feature (1)..(25): SEQ ID NO: 2615; WAN024CB6_at; Start 105; Stop 129
gattggtgtccttttgggcaatctc

SEQ ID NO: 111406 - DNA, 25 bp, Artificial
  probe
  misc_feature (1)..(25): SEQ ID NO: 2615; WAN024CB6_at; Start 558; Stop 582
cctagtgggtgccttgattggacaa

SEQ ID NO: 111407 - DNA, 25 bp, Artificial
  probe
  misc_feature (1)..(25): SEQ ID NO: 2615; WAN024CB6_at; Start 142; Stop 166
ggaaacatgttttatgcgcctgcct

SEQ ID NO: 111408 - DNA, 25 bp, Artificial
  probe
  misc_feature (1)..(25): SEQ ID NO: 2615; WAN024CB6_at; Start 113; Stop 137
tccttttgggcaatctctttgacca

SEQ ID NO: 111409 - DNA, 25 bp, Artificial
  probe
  misc_feature (1)..(25): SEQ ID NO: 2615; WAN024CB6_at; Start 578; Stop 602
gacaagccttgagtaaaaaatttgc

SEQ ID NO: 111410 - DNA, 25 bp, Artificial
  probe
  misc_feature (1)..(25): SEQ ID NO: 2615; WAN024CB6_at; Start 534; Stop 558
tatcgcaagtattgtcatcggagcc

SEQ ID NO: 111411 - DNA, 25 bp, Artificial
  probe
  misc_feature (1)..(25): SEQ ID NO: 2615; WAN024CB6_at; Start 402; Stop 426
tacaacaggaccaatcttgcttatg

SEQ ID NO: 111412 - DNA, 25 bp, Artificial
  probe
  misc_feature (1)..(25): SEQ ID NO: 2615; WAN024CB6_at; Start 297; Stop 321
ccttcctggaattatctgtggcctc

SEQ ID NO: 111413 - DNA, 25 bp, Artificial
  probe
  misc_feature (1)..(25): SEQ ID NO: 2615; WAN024CB6_at; Start 283; Stop 307
ggtgctggttccttccttcctggaa

SEQ ID NO: 111414 - DNA, 25 bp, Artificial
  probe
  misc_feature (1)..(25): SEQ ID NO: 2615; WAN024CB6_at; Start 456; Stop 480
tcttctggcaagaggaaaatcccaa

SEQ ID NO: 111415 - DNA, 25 bp, Artificial
  probe
  misc_feature (1)..(25): SEQ ID NO: 2615; WAN024CB6_at; Start 32; Stop 56
tcaggagacaattcatgaagaaatc

SEQ ID NO: 111416 - DNA, 25 bp, Artificial
  probe
  misc_feature (1)..(25): SEQ ID NO: 2615; WAN024CB6_at; Start 568; Stop 592
gccttgattggacaagccttgagta

SEQ ID NO: 111417 - DNA, 25 bp, Artificial
  probe
  misc_feature (1)..(25): SEQ ID NO: 2615; WAN024CB6_at; Start 51; Stop 75
gaaatctatcttaactacactgctt

SEQ ID NO: 111418 - DNA, 25 bp, Artificial
  probe
  misc_feature (1)..(25): SEQ ID NO: 5517; WAN024CB7_at; Start 188; Stop 212
caggtaaatcatcatggtgctgcat

SEQ ID NO: 111419 - DNA, 25 bp, Artificial
  probe
  misc_feature (1)..(25): SEQ ID NO: 5517; WAN024CB7_at; Start 72; Stop 96
ttgttcccagaccaacaaatccgcc

SEQ ID NO: 111420 - DNA, 25 bp, Artificial
  probe
  misc_feature (1)..(25): SEQ ID NO: 5517; WAN024CB7_at; Start 23; Stop 47
ccttattgccaccagaaatttccag

SEQ ID NO: 111421 - DNA, 25 bp, Artificial
  probe
  misc_feature (1)..(25): SEQ ID NO: 5517; WAN024CB7_at; Start 116; Stop 140
gcttttccaaatacttatctaggtc

SEQ ID NO: 111422 - DNA, 25 bp, Artificial
  probe
  misc_feature (1)..(25): SEQ ID NO: 5517; WAN024CB7_at; Start 9; Stop 33
aaaggtcacaatccccttattgcca

SEQ ID NO: 111423 - DNA, 25 bp, Artificial
  probe
  misc_feature (1)..(25): SEQ ID NO: 5517; WAN024CB7_at; Start 35; Stop 59
cagaaatttccagctgttccaaggc

SEQ ID NO: 111424 - DNA, 25 bp, Artificial
  probe
  misc_feature (1)..(25): SEQ ID NO: 5517; WAN024CB7_at; Start 136; Stop 160
aggtctgttgaagccgattcctccg

SEQ ID NO: 111425 - DNA, 25 bp, Artificial
  probe
  misc_feature (1)..(25): SEQ ID NO: 5517; WAN024CB7_at; Start 48; Stop 72
ctgttccaaggcatttttggtccct

SEQ ID NO: 111426 - DNA, 25 bp, Artificial
  probe
  misc_feature (1)..(25): SEQ ID NO: 5517; WAN024CB7_at; Start 191; Stop 215
gtaaatcatcatggtgctgcatata

SEQ ID NO: 111427 - DNA, 25 bp, Artificial
  probe
  misc_feature (1)..(25): SEQ ID NO: 5517; WAN024CB7_at; Start 45; Stop 69
cagctgttccaaggcatttttggtc

SEQ ID NO: 111428 - DNA, 25 bp, Artificial
  probe
  misc_feature (1)..(25): SEQ ID NO: 5517; WAN024CB7_at; Start 93; Stop 117
cgccccacggagtttgtctgcatgc

SEQ ID NO: 111429 - DNA, 25 bp, Artificial
  probe
  misc_feature (1)..(25): SEQ ID NO: 5517; WAN024CB7_at; Start 142; Stop 166
gttgaagccgattcctccgctccct

SEQ ID NO: 111430 - DNA, 25 bp, Artificial
  probe
  misc_feature (1)..(25): SEQ ID NO: 5517; WAN024CB7_at; Start 1; Stop 25
ttggcatcaaaggtcacaatcccct

SEQ ID NO: 111431 - DNA, 25 bp, Artificial
  probe
  misc_feature (1)..(25): SEQ ID NO: 5517; WAN024CB7_at; Start 65; Stop 89
tggtcccttgttcccagaccaacaa

SEQ ID NO: 111432 - DNA, 25 bp, Artificial
  probe
  misc_feature (1)..(25): SEQ ID NO: 5517; WAN024CB7_at; Start 186; Stop 210
gacaggtaaatcatcatggtgctgc

SEQ ID NO: 111433 - DNA, 25 bp, Artificial
  probe
  misc_feature (1)..(25): SEQ ID NO: 5517; WAN024CB7_at; Start 182; Stop 206
tattgacaggtaaatcatcatggtg

SEQ ID NO: 111434 - DNA, 25 bp, Artificial
  probe
  misc_feature (1)..(25): SEQ ID NO: 5517; WAN024CB7_at; Start 168; Stop 192
catgataaagctgatattgacaggt

SEQ ID NO: 111435 - DNA, 25 bp, Artificial
  probe
  misc_feature (1)..(25): SEQ ID NO: 5517; WAN024CB7_at; Start 102; Stop 126
gagtttgtctgcatgcttttccaaa

SEQ ID NO: 111436 - DNA, 25 bp, Artificial
  probe
  misc_feature (1)..(25): SEQ ID NO: 5517; WAN024CB7_at; Start 160; Stop 184
gctccctccatgataaagctgatat

SEQ ID NO: 111437 - DNA, 25 bp, Artificial
  probe
  misc_feature (1)..(25): SEQ ID NO: 5517; WAN024CB7_at; Start 127; Stop 151
tacttatctaggtctgttgaagccg

SEQ ID NO: 111438 - DNA, 25 bp, Artificial
  probe
  misc_feature (1)..(25): SEQ ID NO: 5517; WAN024CB7_at; Start 131; Stop 155
tatctaggtctgttgaagccgattc

SEQ ID NO: 111439 - DNA, 25 bp, Artificial
  probe
  misc_feature (1)..(25): SEQ ID NO: 5517; WAN024CB7_at; Start 164; Stop 188
cctccatgataaagctgatattgac

SEQ ID NO: 111440 - DNA, 25 bp, Artificial
  probe
  misc_feature (1)..(25): SEQ ID NO: 5517; WAN024CB7_at; Start 37; Stop 61
gaaatttccagctgttccaaggcat

SEQ ID NO: 111441 - DNA, 25 bp, Artificial
  probe
  misc_feature (1)..(25): SEQ ID NO: 5517; WAN024CB7_at; Start 107; Stop 131
tgtctgcatgcttttccaaatactt

SEQ ID NO: 111442 - DNA, 25 bp, Artificial
  probe
  misc_feature (1)..(25): SEQ ID NO: 5517; WAN024CB7_at; Start 157; Stop 181
tccgctccctccatgataaagctga

SEQ ID NO: 111443 - DNA, 25 bp, Artificial
  probe
  misc_feature (1)..(25): SEQ ID NO: 5517; WAN024CB7_at; Start 133; Stop 157
tctaggtctgttgaagccgattcct

SEQ ID NO: 111444 - DNA, 25 bp, Artificial
  probe
  misc_feature (1)..(25): SEQ ID NO: 5517; WAN024CB7_at; Start 29; Stop 53
tgccaccagaaatttccagctgttc

SEQ ID NO: 111445 - DNA, 25 bp, Artificial
  probe
  misc_feature (1)..(25): SEQ ID NO: 5517; WAN024CB7_at; Start 173; Stop 197
taaagctgatattgacaggtaaatc

SEQ ID NO: 111446 - DNA, 25 bp, Artificial
  probe
  misc_feature (1)..(25): SEQ ID NO: 5517; WAN024CB7_at; Start 88; Stop 112
aaatccgccccacggagtttgtctg

SEQ ID NO: 111447 - DNA, 25 bp, Artificial
  probe
  misc_feature (1)..(25): SEQ ID NO: 5517; WAN024CB7_at; Start 42; Stop 66
ttccagctgttccaaggcatttttg

SEQ ID NO: 111448 - DNA, 25 bp, Artificial
  probe
  misc_feature (1)..(25): SEQ ID NO: 5517; WAN024CB7_at; Start 98; Stop 122
cacggagtttgtctgcatgcttttc

SEQ ID NO: 111449 - DNA, 25 bp, Artificial
  probe
  misc_feature (1)..(25): SEQ ID NO: 5517; WAN024CB7_at; Start 95; Stop 119
ccccacggagtttgtctgcatgctt

SEQ ID NO: 111450 - DNA, 25 bp, Artificial
  probe
  misc_feature (1)..(25): SEQ ID NO: 5517; WAN024CB7_at; Start 3; Stop 27
ggcatcaaaggtcacaatcccctta

SEQ ID NO: 111451 - DNA, 25 bp, Artificial
  probe
  misc_feature (1)..(25): SEQ ID NO: 5517; WAN024CB7_at; Start 26; Stop 50
tattgccaccagaaatttccagctg

SEQ ID NO: 111452 - DNA, 25 bp, Artificial
  probe
  misc_feature (1)..(25): SEQ ID NO: 2677; WAN024CB8_at; Start 169; Stop 193
aatcaaggtcttggcatctggacgc

SEQ ID NO: 111453 - DNA, 25 bp, Artificial
  probe
  misc_feature (1)..(25): SEQ ID NO: 2677; WAN024CB8_at; Start 201; Stop 225
tgaaatgtgccatgacaaagggcgc

SEQ ID NO: 111454 - DNA, 25 bp, Artificial
  probe
  misc_feature (1)..(25): SEQ ID NO: 2677; WAN024CB8_at; Start 224; Stop 248
gctgtatagctctcatcaatctcca

SEQ ID NO: 111455 - DNA, 25 bp, Artificial
  probe
  misc_feature (1)..(25): SEQ ID NO: 2677; WAN024CB8_at; Start 296; Stop 320
tccttgagtccaacctgctgggcaa

SEQ ID NO: 111456 - DNA, 25 bp, Artificial
  probe
  misc_feature (1)..(25): SEQ ID NO: 2677; WAN024CB8_at; Start 259; Stop 283
aacacgcttgaaaatctcacccaga

SEQ ID NO: 111457 - DNA, 25 bp, Artificial
  probe
  misc_feature (1)..(25): SEQ ID NO: 2677; WAN024CB8_at; Start 96; Stop 120
ccgaaagcgtaaaaggatcctctgt

SEQ ID NO: 111458 - DNA, 25 bp, Artificial
  probe
  misc_feature (1)..(25): SEQ ID NO: 2677; WAN024CB8_at; Start 105; Stop 129
taaaaggatcctctgtccagacctg

SEQ ID NO: 111459 - DNA, 25 bp, Artificial
  probe
  misc_feature (1)..(25): SEQ ID NO: 2677; WAN024CB8_at; Start 268; Stop 292
gaaaatctcacccagataatttgcg

SEQ ID NO: 111460 - DNA, 25 bp, Artificial
  probe
  misc_feature (1)..(25): SEQ ID NO: 2677; WAN024CB8_at; Start 247; Stop 271
cacttcagctccaacacgcttgaaa

SEQ ID NO: 111461 - DNA, 25 bp, Artificial
  probe
  misc_feature (1)..(25): SEQ ID NO: 2677; WAN024CB8_at; Start 182; Stop 206
gcatctggacgcgaactcttgaaat

SEQ ID NO: 111462 - DNA, 25 bp, Artificial
  probe
  misc_feature (1)..(25): SEQ ID NO: 2677; WAN024CB8_at; Start 303; Stop 327
gtccaacctgctgggcaaagactga

SEQ ID NO: 111463 - DNA, 25 bp, Artificial
  probe
  misc_feature (1)..(25): SEQ ID NO: 2677; WAN024CB8_at; Start 177; Stop 201
tcttggcatctggacgcgaactctt

SEQ ID NO: 111464 - DNA, 25 bp, Artificial
  probe
  misc_feature (1)..(25): SEQ ID NO: 2677; WAN024CB8_at; Start 206; Stop 230
tgtgccatgacaaagggcgctgtat

SEQ ID NO: 111465 - DNA, 25 bp, Artificial
  probe
  misc_feature (1)..(25): SEQ ID NO: 2677; WAN024CB8_at; Start 188; Stop 212
ggacgcgaactcttgaaatgtgcca

SEQ ID NO: 111466 - DNA, 25 bp, Artificial
  probe
  misc_feature (1)..(25): SEQ ID NO: 2677; WAN024CB8_at; Start 108; Stop 132
aaggatcctctgtccagacctgatc

SEQ ID NO: 111467 - DNA, 25 bp, Artificial
  probe
  misc_feature (1)..(25): SEQ ID NO: 2677; WAN024CB8_at; Start 153; Stop 177
catagtggttatagaaaatcaaggt

SEQ ID NO: 111468 - DNA, 25 bp, Artificial
  probe
  misc_feature (1)..(25): SEQ ID NO: 2677; WAN024CB8_at; Start 35; Stop 59
cgagctgtgatatgacccttgtcgt

SEQ ID NO: 111469 - DNA, 25 bp, Artificial
  probe
  misc_feature (1)..(25): SEQ ID NO: 2677; WAN024CB8_at; Start 292; Stop 316
gacttccttgagtccaacctgctgg

SEQ ID NO: 111470 - DNA, 25 bp, Artificial
  probe
  misc_feature (1)..(25): SEQ ID NO: 2677; WAN024CB8_at; Start 218; Stop 242
aagggcgctgtatagctctcatcaa

SEQ ID NO: 111471 - DNA, 25 bp, Artificial
  probe
  misc_feature (1)..(25): SEQ ID NO: 2677; WAN024CB8_at; Start 69; Stop 93
cacgcccatacatgaagccattgcg

SEQ ID NO: 111472 - DNA, 25 bp, Artificial
  probe
  misc_feature (1)..(25): SEQ ID NO: 2677; WAN024CB8_at; Start 172; Stop 196
caaggtcttggcatctggacgcgaa

SEQ ID NO: 111473 - DNA, 25 bp, Artificial
  probe
  misc_feature (1)..(25): SEQ ID NO: 2677; WAN024CB8_at; Start 300; Stop 324
tgagtccaacctgctgggcaaagac

SEQ ID NO: 111474 - DNA, 25 bp, Artificial
  probe
  misc_feature (1)..(25): SEQ ID NO: 2677; WAN024CB8_at; Start 43; Stop 67
gatatgacccttgtcgtcatcaacc

SEQ ID NO: 111475 - DNA, 25 bp, Artificial
  probe
  misc_feature (1)..(25): SEQ ID NO: 2677; WAN024CB8_at; Start 193; Stop 217
cgaactcttgaaatgtgccatgaca

SEQ ID NO: 111476 - DNA, 25 bp, Artificial
  probe
  misc_feature (1)..(25): SEQ ID NO: 2677; WAN024CB8_at; Start 145; Stop 169
cacagtgtcatagtggttatagaaa

SEQ ID NO: 111477 - DNA, 25 bp, Artificial
  probe
  misc_feature (1)..(25): SEQ ID NO: 2677; WAN024CB8_at; Start 230; Stop 254
tagctctcatcaatctccacttcag

SEQ ID NO: 111478 - DNA, 25 bp, Artificial
  probe
  misc_feature (1)..(25): SEQ ID NO: 2677; WAN024CB8_at; Start 133; Stop 157
cccatccgctggcacagtgtcatag

SEQ ID NO: 111479 - DNA, 25 bp, Artificial
  probe
  misc_feature (1)..(25): SEQ ID NO: 2677; WAN024CB8_at; Start 75; Stop 99
catacatgaagccattgcggaccga

SEQ ID NO: 111480 - DNA, 25 bp, Artificial
  probe
  misc_feature (1)..(25): SEQ ID NO: 2677; WAN024CB8_at; Start 90; Stop 114
tgcggaccgaaagcgtaaaaggatc

SEQ ID NO: 111481 - DNA, 25 bp, Artificial
  probe
  misc_feature (1)..(25): SEQ ID NO: 2677; WAN024CB8_at; Start 214; Stop 238
gacaaagggcgctgtatagctctca

SEQ ID NO: 111482 - DNA, 25 bp, Artificial
  probe
  misc_feature (1)..(25): SEQ ID NO: 2677; WAN024CB8_at; Start 278; Stop 302
cccagataatttgcgacttccttga

SEQ ID NO: 111483 - DNA, 25 bp, Artificial
  probe
  misc_feature (1)..(25): SEQ ID NO: 2677; WAN024CB8_at; Start 139; Stop 163
cgctggcacagtgtcatagtggtta

SEQ ID NO: 111484 - DNA, 25 bp, Artificial
  probe
  misc_feature (1)..(25): SEQ ID NO: 2677; WAN024CB8_at; Start 87; Stop 111
cattgcggaccgaaagcgtaaaagg

SEQ ID NO: 111485 - DNA, 25 bp, Artificial
  probe
  misc_feature (1)..(25): SEQ ID NO: 2677; WAN024CB8_at; Start 79; Stop 103
catgaagccattgcggaccgaaagc

SEQ ID NO: 111486 - DNA, 25 bp, Artificial
  probe
  misc_feature (1)..(25): SEQ ID NO: 2737; WAN024CB9_at; Start 324; Stop 348
gctttcggtccgcaatggcttcatg

SEQ ID NO: 111487 - DNA, 25 bp, Artificial
  probe
  misc_feature (1)..(25): SEQ ID NO: 2737; WAN024CB9_at; Start 1268; Stop 1292
taggaaatgccaatagccgagacca

SEQ ID NO: 111488 - DNA, 25 bp, Artificial
  probe
  misc_feature (1)..(25): SEQ ID NO: 2737; WAN024CB9_at; Start 264; Stop 288
taaccactatgacactgtgccagcg

SEQ ID NO: 111489 - DNA, 25 bp, Artificial
  probe
  misc_feature (1)..(25): SEQ ID NO: 2737; WAN024CB9_at; Start 630; Stop 654
aaaaagcgctgatgtggatatccac

SEQ ID NO: 111490 - DNA, 25 bp, Artificial
  probe
  misc_feature (1)..(25): SEQ ID NO: 2737; WAN024CB9_at; Start 441; Stop 465
caatatcagctttatcatggaggga

SEQ ID NO: 111491 - DNA, 25 bp, Artificial
  probe
  misc_feature (1)..(25): SEQ ID NO: 2737; WAN024CB9_at; Start 929; Stop 953
tccagtctggttatcaaggtcaggg

SEQ ID NO: 111492 - DNA, 25 bp, Artificial
  probe
  misc_feature (1)..(25): SEQ ID NO: 2737; WAN024CB9_at; Start 7; Stop 31
tttcctagcgaacaagaacagattg

SEQ ID NO: 111493 - DNA, 25 bp, Artificial
  probe
  misc_feature (1)..(25): SEQ ID NO: 2737; WAN024CB9_at; Start 212; Stop 236
tcatggcacatttcaagagttcgcg

SEQ ID NO: 111494 - DNA, 25 bp, Artificial
  probe
  misc_feature (1)..(25): SEQ ID NO: 2737; WAN024CB9_at; Start 754; Stop 778
tacgaagaagtacaagagcccaatg

SEQ ID NO: 111495 - DNA, 25 bp, Artificial
  probe
  misc_feature (1)..(25): SEQ ID NO: 2737; WAN024CB9_at; Start 1090; Stop 1114
tataccttgggagagatgagctatc

SEQ ID NO: 111496 - DNA, 25 bp, Artificial
  probe
  misc_feature (1)..(25): SEQ ID NO: 2737; WAN024CB9_at; Start 805; Stop 829
tatggtcaacgaaacccagaggaag

SEQ ID NO: 111497 - DNA, 25 bp, Artificial
  probe
  misc_feature (1)..(25): SEQ ID NO: 2737; WAN024CB9_at; Start 561; Stop 585
caaaaatgccttggaacagctggaa

SEQ ID NO: 111498 - DNA, 25 bp, Artificial
  probe
  misc_feature (1)..(25): SEQ ID NO: 2737; WAN024CB9_at; Start 1331; Stop 1355
cccatatcgaattagtagaggagct

SEQ ID NO: 111499 - DNA, 25 bp, Artificial
  probe
  misc_feature (1)..(25): SEQ ID NO: 2737; WAN024CB9_at; Start 384; Stop 408
cacagctcgcttgagtgctttgaga

SEQ ID NO: 111500 - DNA, 25 bp, Artificial
  probe
  misc_feature (1)..(25): SEQ ID NO: 2737; WAN024CB9_at; Start 1111; Stop 1135
tatcgaagcgatatgagcgcaccag

SEQ ID NO: 111501 - DNA, 25 bp, Artificial
  probe
  misc_feature (1)..(25): SEQ ID NO: 2737; WAN024CB9_at; Start 469; Stop 493
gaggaatcggcttcaacagacctag

SEQ ID NO: 111502 - DNA, 25 bp, Artificial
  probe
  misc_feature (1)..(25): SEQ ID NO: 2737; WAN024CB9_at; Start 370; Stop 394
gacaagggtcatatcacagctcgct

SEQ ID NO: 111503 - DNA, 25 bp, Artificial
  probe
  misc_feature (1)..(25): SEQ ID NO: 2737; WAN024CB9_at; Start 39; Stop 63
tgaaaaggatcatgtagcccagcat

SEQ ID NO: 111504 - DNA, 25 bp, Artificial
  probe
  misc_feature (1)..(25): SEQ ID NO: 2737; WAN024CB9_at; Start 788; Stop 812
tggccttgctagaaacttatggtca

SEQ ID NO: 111505 - DNA, 25 bp, Artificial
  probe
  misc_feature (1)..(25): SEQ ID NO: 2737; WAN024CB9_at; Start 1006; Stop 1030
gttccgggcctagaaccgcatgatg

SEQ ID NO: 111506 - DNA, 25 bp, Artificial
  probe
  misc_feature (1)..(25): SEQ ID NO: 2737; WAN024CB9_at; Start 616; Stop 640
tttgatgccaaggtaaaaagcgctg

SEQ ID NO: 111507 - DNA, 25 bp, Artificial
  probe
  misc_feature (1)..(25): SEQ ID NO: 2737; WAN024CB9_at; Start 908; Stop 932
cagcgcttaatatcgaaggaatcca

SEQ ID NO: 111508 - DNA, 25 bp, Artificial
  probe
  misc_feature (1)..(25): SEQ ID NO: 2737; WAN024CB9_at; Start 93; Stop 117
taagaaatcagtctttgcccagcag

SEQ ID NO: 111509 - DNA, 25 bp, Artificial
  probe
  misc_feature (1)..(25): SEQ ID NO: 2737; WAN024CB9_at; Start 1234; Stop 1258
gatgccctagaggtaccaatggttg

SEQ ID NO: 111510 - DNA, 25 bp, Artificial
  probe
  misc_feature (1)..(25): SEQ ID NO: 2737; WAN024CB9_at; Start 1137; Stop 1161
cattctcaatgtgatcgagttggcc

SEQ ID NO: 111511 - DNA, 25 bp, Artificial
  probe
  misc_feature (1)..(25): SEQ ID NO: 2737; WAN024CB9_at; Start 183; Stop 207
gattgatgagagctatacagcgccc

SEQ ID NO: 111512 - DNA, 25 bp, Artificial
  probe
  misc_feature (1)..(25): SEQ ID NO: 2737; WAN024CB9_at; Start 226; Stop 250
aagagttcgcgtccagatgccaaga

SEQ ID NO: 111513 - DNA, 25 bp, Artificial
  probe
  misc_feature (1)..(25): SEQ ID NO: 2737; WAN024CB9_at; Start 507; Stop 531
aaagcatgcagacaaactccgtggg

SEQ ID NO: 111514 - DNA, 25 bp, Artificial
  probe
  misc_feature (1)..(25): SEQ ID NO: 2737; WAN024CB9_at; Start 712; Stop 736
tctcttcgtgctgcggatggccgta

SEQ ID NO: 111515 - DNA, 25 bp, Artificial
  probe
  misc_feature (1)..(25): SEQ ID NO: 2737; WAN024CB9_at; Start 987; Stop 1011
caagctagaggttcgtctggttccg

SEQ ID NO: 111516 - DNA, 25 bp, Artificial
  probe
  misc_feature (1)..(25): SEQ ID NO: 2737; WAN024CB9_at; Start 972; Stop 996
tgcagaagccagtgccaagctagag

SEQ ID NO: 111517 - DNA, 25 bp, Artificial
  probe
  misc_feature (1)..(25): SEQ ID NO: 2737; WAN024CB9_at; Start 771; Stop 795
gcccaatgaacgagaaatggccttg

SEQ ID NO: 111518 - DNA, 25 bp, Artificial
  probe
  misc_feature (1)..(25): SEQ ID NO: 2737; WAN024CB9_at; Start 108; Stop 132
tgcccagcaggttggactcaaggaa

SEQ ID NO: 111519 - DNA, 25 bp, Artificial
  probe
  misc_feature (1)..(25): SEQ ID NO: 2737; WAN024CB9_at; Start 858; Stop 882
tctcttacaggaggagcggatggcc

SEQ ID NO: 111520 - DNA, 25 bp, Artificial
  probe
  misc_feature (1)..(25): SEQ ID NO: 3882; WAN024CBA_at; Start 153; Stop 177
aagagccaaacctgcgactgtagca

SEQ ID NO: 111521 - DNA, 25 bp, Artificial
  probe
  misc_feature (1)..(25): SEQ ID NO: 3882; WAN024CBA_at; Start 6; Stop 30
ctctgtaaattccaaggtaattccg

SEQ ID NO: 111522 - DNA, 25 bp, Artificial
  probe
  misc_feature (1)..(25): SEQ ID NO: 3882; WAN024CBA_at; Start 159; Stop 183
caaacctgcgactgtagcaagggct

SEQ ID NO: 111523 - DNA, 25 bp, Artificial
  probe
  misc_feature (1)..(25): SEQ ID NO: 3882; WAN024CBA_at; Start 115; Stop 139
gcattgtctgctttcttttctgagt

SEQ ID NO: 111524 - DNA, 25 bp, Artificial
  probe
  misc_feature (1)..(25): SEQ ID NO: 3882; WAN024CBA_at; Start 105; Stop 129
gatagttgttgcattgtctgctttc

SEQ ID NO: 111525 - DNA, 25 bp, Artificial
  probe
  misc_feature (1)..(25): SEQ ID NO: 3882; WAN024CBA_at; Start 181; Stop 205
gctgctagaccaagccattttttga

SEQ ID NO: 111526 - DNA, 25 bp, Artificial
  probe
  misc_feature (1)..(25): SEQ ID NO: 3882; WAN024CBA_at; Start 156; Stop 180
agccaaacctgcgactgtagcaagg

SEQ ID NO: 111527 - DNA, 25 bp, Artificial
  probe
  misc_feature (1)..(25): SEQ ID NO: 3882; WAN024CBA_at; Start 140; Stop 164
ttccgcaagctgcaagagccaaacc

SEQ ID NO: 111528 - DNA, 25 bp, Artificial
  probe
  misc_feature (1)..(25): SEQ ID NO: 3882; WAN024CBA_at; Start 184; Stop 208
gctagaccaagccattttttgattt

SEQ ID NO: 111529 - DNA, 25 bp, Artificial
  probe
  misc_feature (1)..(25): SEQ ID NO: 3882; WAN024CBA_at; Start 137; Stop 161
agtttccgcaagctgcaagagccaa

SEQ ID NO: 111530 - DNA, 25 bp, Artificial
  probe
  misc_feature (1)..(25): SEQ ID NO: 3882; WAN024CBA_at; Start 173; Stop 197
tagcaagggctgctagaccaagcca

SEQ ID NO: 111531 - DNA, 25 bp, Artificial
  probe
  misc_feature (1)..(25): SEQ ID NO: 3882; WAN024CBA_at; Start 135; Stop 159
tgagtttccgcaagctgcaagagcc

SEQ ID NO: 111532 - DNA, 25 bp, Artificial
  probe
  misc_feature (1)..(25): SEQ ID NO: 3882; WAN024CBA_at; Start 128; Stop 152
tcttttctgagtttccgcaagctgc

SEQ ID NO: 111533 - DNA, 25 bp, Artificial
  probe
  misc_feature (1)..(25): SEQ ID NO: 3882; WAN024CBA_at; Start 92; Stop 116
cagttgcgattttgatagttgttgc

SEQ ID NO: 111534 - DNA, 25 bp, Artificial
  probe
  misc_feature (1)..(25): SEQ ID NO: 3882; WAN024CBA_at; Start 38; Stop 62
taaccaattcttggattttgtccca

SEQ ID NO: 111535 - DNA, 25 bp, Artificial
  probe
  misc_feature (1)..(25): SEQ ID NO: 3882; WAN024CBA_at; Start 130; Stop 154
ttttctgagtttccgcaagctgcaa

SEQ ID NO: 111536 - DNA, 25 bp, Artificial
  probe
  misc_feature (1)..(25): SEQ ID NO: 3882; WAN024CBA_at; Start 161; Stop 185
aacctgcgactgtagcaagggctgc

SEQ ID NO: 111537 - DNA, 25 bp, Artificial
  probe
  misc_feature (1)..(25): SEQ ID NO: 3882; WAN024CBA_at; Start 85; Stop 109
cggttaacagttgcgattttgatag

SEQ ID NO: 111538 - DNA, 25 bp, Artificial
  probe
  misc_feature (1)..(25): SEQ ID NO: 3882; WAN024CBA_at; Start 190; Stop 214
ccaagccattttttgattttcatga

SEQ ID NO: 111539 - DNA, 25 bp, Artificial
  probe
  misc_feature (1)..(25): SEQ ID NO: 3882; WAN024CBA_at; Start 70; Stop 94
tcttcagaaccgctacggttaacag

SEQ ID NO: 111540 - DNA, 25 bp, Artificial
  probe
  misc_feature (1)..(25): SEQ ID NO: 3882; WAN024CBA_at; Start 133; Stop 157
tctgagtttccgcaagctgcaagag

SEQ ID NO: 111541 - DNA, 25 bp, Artificial
  probe
  misc_feature (1)..(25): SEQ ID NO: 3882; WAN024CBA_at; Start 203; Stop 227
tgattttcatgattctttctcctta

SEQ ID NO: 111542 - DNA, 25 bp, Artificial
  probe
  misc_feature (1)..(25): SEQ ID NO: 3882; WAN024CBA_at; Start 150; Stop 174
tgcaagagccaaacctgcgactgta

SEQ ID NO: 111543 - DNA, 25 bp, Artificial
  probe
  misc_feature (1)..(25): SEQ ID NO: 3882; WAN024CBA_at; Start 176; Stop 200
caagggctgctagaccaagccattt

SEQ ID NO: 111544 - DNA, 25 bp, Artificial
  probe
  misc_feature (1)..(25): SEQ ID NO: 3882; WAN024CBA_at; Start 144; Stop 168
gcaagctgcaagagccaaacctgcg

SEQ ID NO: 111545 - DNA, 25 bp, Artificial
  probe
  misc_feature (1)..(25): SEQ ID NO: 3882; WAN024CBA_at; Start 167; Stop 191
cgactgtagcaagggctgctagacc

SEQ ID NO: 111546 - DNA, 25 bp, Artificial
  probe
  misc_feature (1)..(25): SEQ ID NO: 3882; WAN024CBA_at; Start 124; Stop 148
gctttcttttctgagtttccgcaag

SEQ ID NO: 111547 - DNA, 25 bp, Artificial
  probe
  misc_feature (1)..(25): SEQ ID NO: 3882; WAN024CBA_at; Start 148; Stop 172
gctgcaagagccaaacctgcgactg

SEQ ID NO: 111548 - DNA, 25 bp, Artificial
  probe
  misc_feature (1)..(25): SEQ ID NO: 3882; WAN024CBA_at; Start 1; Stop 25
gtgaactctgtaaattccaaggtaa

SEQ ID NO: 111549 - DNA, 25 bp, Artificial
  probe
  misc_feature (1)..(25): SEQ ID NO: 3882; WAN024CBA_at; Start 42; Stop 66
caattcttggattttgtcccaacgt

SEQ ID NO: 111550 - DNA, 25 bp, Artificial
  probe
  misc_feature (1)..(25): SEQ ID NO: 3882; WAN024CBA_at; Start 163; Stop 187
cctgcgactgtagcaagggctgcta

SEQ ID NO: 111551 - DNA, 25 bp, Artificial
  probe
  misc_feature (1)..(25): SEQ ID NO: 3882; WAN024CBA_at; Start 101; Stop 125
ttttgatagttgttgcattgtctgc

SEQ ID NO: 111552 - DNA, 25 bp, Artificial
  probe
  misc_feature (1)..(25): SEQ ID NO: 3882; WAN024CBA_at; Start 76; Stop 100
gaaccgctacggttaacagttgcga

SEQ ID NO: 111553 - DNA, 25 bp, Artificial
  probe
  misc_feature (1)..(25): SEQ ID NO: 3882; WAN024CBA_at; Start 81; Stop 105
gctacggttaacagttgcgattttg

SEQ ID NO: 111554 - DNA, 25 bp, Artificial
  probe
  misc_feature (1)..(25): SEQ ID NO: 746; WAN024CBB_at; Start 363; Stop 387
ctcaggtttgaatggaagtgccaac

SEQ ID NO: 111555 - DNA, 25 bp, Artificial
  probe
  misc_feature (1)..(25): SEQ ID NO: 746; WAN024CBB_at; Start 33; Stop 57
ccttgctacagtcgcaggtttggct

SEQ ID NO: 111556 - DNA, 25 bp, Artificial
  probe
  misc_feature (1)..(25): SEQ ID NO: 746; WAN024CBB_at; Start 307; Stop 331
aacggaaaagaccttgtagcgattg

SEQ ID NO: 111557 - DNA, 25 bp, Artificial
  probe
  misc_feature (1)..(25): SEQ ID NO: 746; WAN024CBB_at; Start 598; Stop 622
tcattgtcatcagttgacgctgccg

SEQ ID NO: 111558 - DNA, 25 bp, Artificial
  probe
  misc_feature (1)..(25): SEQ ID NO: 746; WAN024CBB_at; Start 502; Stop 526
gatgtttctggaactgctcttgcaa

SEQ ID NO: 111559 - DNA, 25 bp, Artificial
  probe
  misc_feature (1)..(25): SEQ ID NO: 746; WAN024CBB_at; Start 792; Stop 816
cacagatgacgtgaaaaaagttatc

SEQ ID NO: 111560 - DNA, 25 bp, Artificial
  probe
  misc_feature (1)..(25): SEQ ID NO: 746; WAN024CBB_at; Start 637; Stop 661
ttcgttacagaagcaaaattggact

SEQ ID NO: 111561 - DNA, 25 bp, Artificial
  probe
  misc_feature (1)..(25): SEQ ID NO: 746; WAN024CBB_at; Start 391; Stop 415
tacactaaagtagaagacatcccag

SEQ ID NO: 111562 - DNA, 25 bp, Artificial
  probe
  misc_feature (1)..(25): SEQ ID NO: 746; WAN024CBB_at; Start 434; Stop 458
taccgaatgacgctacaaacgaaag

SEQ ID NO: 111563 - DNA, 25 bp, Artificial
  probe
  misc_feature (1)..(25): SEQ ID NO: 746; WAN024CBB_at; Start 763; Stop 787
gctatcaagaaagtaatcgcagctt

SEQ ID NO: 111564 - DNA, 25 bp, Artificial
  probe
  misc_feature (1)..(25): SEQ ID NO: 746; WAN024CBB_at; Start 350; Stop 374
caatccgcctttactcaggtttgaa

SEQ ID NO: 111565 - DNA, 25 bp, Artificial
  probe
  misc_feature (1)..(25): SEQ ID NO: 746; WAN024CBB_at; Start 749; Stop 773
cacctaaggctgatgctatcaagaa

SEQ ID NO: 111566 - DNA, 25 bp, Artificial
  probe
  misc_feature (1)..(25): SEQ ID NO: 746; WAN024CBB_at; Start 836; Stop 860
tggatcaaccagtttggtaactaat

SEQ ID NO: 111567 - DNA, 25 bp, Artificial
  probe
  misc_feature (1)..(25): SEQ ID NO: 746; WAN024CBB_at; Start 779; Stop 803
tcgcagcttaccacacagatgacgt

SEQ ID NO: 111568 - DNA, 25 bp, Artificial
  probe
  misc_feature (1)..(25): SEQ ID NO: 746; WAN024CBB_at; Start 406; Stop 430
gacatcccagcaaacggagaaatcg

SEQ ID NO: 111569 - DNA, 25 bp, Artificial
  probe
  misc_feature (1)..(25): SEQ ID NO: 746; WAN024CBB_at; Start 220; Stop 244
tcacaaccaaacaaagcaactgctg

SEQ ID NO: 111570 - DNA, 25 bp, Artificial
  probe
  misc_feature (1)..(25): SEQ ID NO: 746; WAN024CBB_at; Start 516; Stop 540
tgctcttgcaacagttgccaacatc

SEQ ID NO: 111571 - DNA, 25 bp, Artificial
  probe
  misc_feature (1)..(25): SEQ ID NO: 746; WAN024CBB_at; Start 260; Stop 284
tgaacgctttccaacactataactt

SEQ ID NO: 111572 - DNA, 25 bp, Artificial
  probe
  misc_feature (1)..(25): SEQ ID NO: 746; WAN024CBB_at; Start 148; Stop 172
cgttgggacaaaatccaagaattgg

SEQ ID NO: 111573 - DNA, 25 bp, Artificial
  probe
  misc_feature (1)..(25): SEQ ID NO: 746; WAN024CBB_at; Start 613; Stop 637
gacgctgccgttgtaaacaatacct

SEQ ID NO: 111574 - DNA, 25 bp, Artificial
  probe
  misc_feature (1)..(25): SEQ ID NO: 746; WAN024CBB_at; Start 333; Stop 357
agatacttacatctctccaatccgc

SEQ ID NO: 111575 - DNA, 25 bp, Artificial
  probe
  misc_feature (1)..(25): SEQ ID NO: 746; WAN024CBB_at; Start 91; Stop 115
gacaatgcaacaactatcaaaatcg

SEQ ID NO: 111576 - DNA, 25 bp, Artificial
  probe
  misc_feature (1)..(25): SEQ ID NO: 746; WAN024CBB_at; Start 183; Stop 207
cggaattaccttggaatttacagag

SEQ ID NO: 111577 - DNA, 25 bp, Artificial
  probe
  misc_feature (1)..(25): SEQ ID NO: 746; WAN024CBB_at; Start 553; Stop 577
aagaacttgaaaatcactgaattgg

SEQ ID NO: 111578 - DNA, 25 bp, Artificial
  probe
  misc_feature (1)..(25): SEQ ID NO: 746; WAN024CBB_at; Start 736; Stop 760
gattgggaaacatcacctaaggctg

SEQ ID NO: 111579 - DNA, 25 bp, Artificial
  probe
  misc_feature (1)..(25): SEQ ID NO: 746; WAN024CBB_at; Start 47; Stop 71
caggtttggctcttgcagcttgcgg

SEQ ID NO: 111580 - DNA, 25 bp, Artificial
  probe
  misc_feature (1)..(25): SEQ ID NO: 746; WAN024CBB_at; Start 194; Stop 218
tggaatttacagagttcacagacta

SEQ ID NO: 111581 - DNA, 25 bp, Artificial
  probe
  misc_feature (1)..(25): SEQ ID NO: 746; WAN024CBB_at; Start 421; Stop 445
ggagaaatcgctgtaccgaatgacg

SEQ ID NO: 111582 - DNA, 25 bp, Artificial
  probe
  misc_feature (1)..(25): SEQ ID NO: 746; WAN024CBB_at; Start 74; Stop 98
actcagaaaagaaagcagacaatgc

SEQ ID NO: 111583 - DNA, 25 bp, Artificial
  probe
  misc_feature (1)..(25): SEQ ID NO: 746; WAN024CBB_at; Start 688; Stop 712
gctgatgaaaactcaaaacaatggt

SEQ ID NO: 111584 - DNA, 25 bp, Artificial
  probe
  misc_feature (1)..(25): SEQ ID NO: 746; WAN024CBB_at; Start 444; Stop 468
cgctacaaacgaaagccgtgcgctt

SEQ ID NO: 111585 - DNA, 25 bp, Artificial
  probe
  misc_feature (1)..(25): SEQ ID NO: 746; WAN024CBB_at; Start 110; Stop 134
aaatcgcaactgttaaccgtagcgg

SEQ ID NO: 111586 - DNA, 25 bp, Artificial
  probe
  misc_feature (1)..(25): SEQ ID NO: 746; WAN024CBB_at; Start 60; Stop 84
tgcagcttgcggaaactcagaaaag

SEQ ID NO: 111587 - DNA, 25 bp, Artificial
  probe
  misc_feature (1)..(25): SEQ ID NO: 746; WAN024CBB_at; Start 376; Stop 400
ggaagtgccaacaagtacactaaag

SEQ ID NO: 111588 - DNA, 25 bp, Artificial
  probe
  misc_feature (1)..(25): SEQ ID NO: 5846; WAN024CBC_at; Start 166; Stop 190
gatcactgtttcaacaccgatttta

SEQ ID NO: 111589 - DNA, 25 bp, Artificial
  probe
  misc_feature (1)..(25): SEQ ID NO: 5846; WAN024CBC_at; Start 37; Stop 61
aagttctttgatgcgtttgtctaca

SEQ ID NO: 111590 - DNA, 25 bp, Artificial
  probe
  misc_feature (1)..(25): SEQ ID NO: 5846; WAN024CBC_at; Start 86; Stop 110
tgagcaagaagtgggtaaacgtacg

SEQ ID NO: 111591 - DNA, 25 bp, Artificial
  probe
  misc_feature (1)..(25): SEQ ID NO: 5846; WAN024CBC_at; Start 279; Stop 303
tgtccgtgtgttcagcattgtatgc

SEQ ID NO: 111592 - DNA, 25 bp, Artificial
  probe
  misc_feature (1)..(25): SEQ ID NO: 5846; WAN024CBC_at; Start 212; Stop 236
tgtccatcgctcaaacgtaccatga

SEQ ID NO: 111593 - DNA, 25 bp, Artificial
  probe
  misc_feature (1)..(25): SEQ ID NO: 5846; WAN024CBC_at; Start 119; Stop 143
tcgcttggaagttcgataactttca

SEQ ID NO: 111594 - DNA, 25 bp, Artificial
  probe
  misc_feature (1)..(25): SEQ ID NO: 5846; WAN024CBC_at; Start 55; Stop 79
gtctacaaacgatttcaactcatct

SEQ ID NO: 111595 - DNA, 25 bp, Artificial
  probe
  misc_feature (1)..(25): SEQ ID NO: 5846; WAN024CBC_at; Start 18; Stop 42
caagagttccatctttataaagttc

SEQ ID NO: 111596 - DNA, 25 bp, Artificial
  probe
  misc_feature (1)..(25): SEQ ID NO: 5846; WAN024CBC_at; Start 154; Stop 178
accttggttcttgatcactgtttca

SEQ ID NO: 111597 - DNA, 25 bp, Artificial
  probe
  misc_feature (1)..(25): SEQ ID NO: 5846; WAN024CBC_at; Start 198; Stop 222
tcttatagtcaaattgtccatcgct

SEQ ID NO: 111598 - DNA, 25 bp, Artificial
  probe
  misc_feature (1)..(25): SEQ ID NO: 5846; WAN024CBC_at; Start 33; Stop 57
tataaagttctttgatgcgtttgtc

SEQ ID NO: 111599 - DNA, 25 bp, Artificial
  probe
  misc_feature (1)..(25): SEQ ID NO: 5846; WAN024CBC_at; Start 105; Stop 129
cgtacggttgttggtcgcttggaag

SEQ ID NO: 111600 - DNA, 25 bp, Artificial
  probe
  misc_feature (1)..(25): SEQ ID NO: 5846; WAN024CBC_at; Start 51; Stop 75
gtttgtctacaaacgatttcaactc

SEQ ID NO: 111601 - DNA, 25 bp, Artificial
  probe
  misc_feature (1)..(25): SEQ ID NO: 5846; WAN024CBC_at; Start 113; Stop 137
tgttggtcgcttggaagttcgataa

SEQ ID NO: 111602 - DNA, 25 bp, Artificial
  probe
  misc_feature (1)..(25): SEQ ID NO: 5846; WAN024CBC_at; Start 258; Stop 282
tatagttaaggatagttgggttgtc

SEQ ID NO: 111603 - DNA, 25 bp, Artificial
  probe
  misc_feature (1)..(25): SEQ ID NO: 5846; WAN024CBC_at; Start 41; Stop 65
tctttgatgcgtttgtctacaaacg

SEQ ID NO: 111604 - DNA, 25 bp, Artificial
  probe
  misc_feature (1)..(25): SEQ ID NO: 5846; WAN024CBC_at; Start 285; Stop 309
tgtgttcagcattgtatgcttctaa

SEQ ID NO: 111605 - DNA, 25 bp, Artificial
  probe
  misc_feature (1)..(25): SEQ ID NO: 5846; WAN024CBC_at; Start 192; Stop 216
caaaaatcttatagtcaaattgtcc

SEQ ID NO: 111606 - DNA, 25 bp, Artificial
  probe
  misc_feature (1)..(25): SEQ ID NO: 5846; WAN024CBC_at; Start 272; Stop 296
gttgggttgtccgtgtgttcagcat

SEQ ID NO: 111607 - DNA, 25 bp, Artificial
  probe
  misc_feature (1)..(25): SEQ ID NO: 5846; WAN024CBC_at; Start 142; Stop 166
caagttgtccaaaccttggttcttg

SEQ ID NO: 111608 - DNA, 25 bp, Artificial
  probe
  misc_feature (1)..(25): SEQ ID NO: 5846; WAN024CBC_at; Start 216; Stop 240
catcgctcaaacgtaccatgatttg

SEQ ID NO: 111609 - DNA, 25 bp, Artificial
  probe
  misc_feature (1)..(25): SEQ ID NO: 5846; WAN024CBC_at; Start 245; Stop 269
aagtctgccttagtatagttaagga

SEQ ID NO: 111610 - DNA, 25 bp, Artificial
  probe
  misc_feature (1)..(25): SEQ ID NO: 5846; WAN024CBC_at; Start 160; Stop 184
gttcttgatcactgtttcaacaccg

SEQ ID NO: 111611 - DNA, 25 bp, Artificial
  probe
  misc_feature (1)..(25): SEQ ID NO: 5846; WAN024CBC_at; Start 172; Stop 196
tgtttcaacaccgattttatcaaaa

SEQ ID NO: 111612 - DNA, 25 bp, Artificial
  probe
  misc_feature (1)..(25): SEQ ID NO: 5846; WAN024CBC_at; Start 60; Stop 84
caaacgatttcaactcatcttgacc

SEQ ID NO: 111613 - DNA, 25 bp, Artificial
  probe
  misc_feature (1)..(25): SEQ ID NO: 5846; WAN024CBC_at; Start 219; Stop 243
cgctcaaacgtaccatgatttgttg

SEQ ID NO: 111614 - DNA, 25 bp, Artificial
  probe
  misc_feature (1)..(25): SEQ ID NO: 5846; WAN024CBC_at; Start 276; Stop 300
ggttgtccgtgtgttcagcattgta

SEQ ID NO: 111615 - DNA, 25 bp, Artificial
  probe
  misc_feature (1)..(25): SEQ ID NO: 5846; WAN024CBC_at; Start 204; Stop 228
agtcaaattgtccatcgctcaaacg

SEQ ID NO: 111616 - DNA, 25 bp, Artificial
  probe
  misc_feature (1)..(25): SEQ ID NO: 5846; WAN024CBC_at; Start 268; Stop 292
gatagttgggttgtccgtgtgttca

SEQ ID NO: 111617 - DNA, 25 bp, Artificial
  probe
  misc_feature (1)..(25): SEQ ID NO: 5846; WAN024CBC_at; Start 6; Stop 30
tagacaatttttcaagagttccatc

SEQ ID NO: 111618 - DNA, 25 bp, Artificial
  probe
  misc_feature (1)..(25): SEQ ID NO: 5846; WAN024CBC_at; Start 150; Stop 174
ccaaaccttggttcttgatcactgt

SEQ ID NO: 111619 - DNA, 25 bp, Artificial
  probe
  misc_feature (1)..(25): SEQ ID NO: 5846; WAN024CBC_at; Start 207; Stop 231
caaattgtccatcgctcaaacgtac

SEQ ID NO: 111620 - DNA, 25 bp, Artificial
  probe
  misc_feature (1)..(25): SEQ ID NO: 5846; WAN024CBC_at; Start 282; Stop 306
ccgtgtgttcagcattgtatgcttc

SEQ ID NO: 111621 - DNA, 25 bp, Artificial
  probe
  misc_feature (1)..(25): SEQ ID NO: 5846; WAN024CBC_at; Start 128; Stop 152
agttcgataactttcaagttgtcca

SEQ ID NO: 111622 - DNA, 25 bp, Artificial
  probe
  misc_feature (1)..(25): SEQ ID NO: 620; WAN024CBD_at; Start 397; Stop 421
gatgactctagtatcaagtctctcg

SEQ ID NO: 111623 - DNA, 25 bp, Artificial
  probe
  misc_feature (1)..(25): SEQ ID NO: 620; WAN024CBD_at; Start 8; Stop 32
aaatcgttaaatactcatctcttgc

SEQ ID NO: 111624 - DNA, 25 bp, Artificial
  probe
  misc_feature (1)..(25): SEQ ID NO: 620; WAN024CBD_at; Start 166; Stop 190
aatggcgaattgactggttacgaga

SEQ ID NO: 111625 - DNA, 25 bp, Artificial
  probe
  misc_feature (1)..(25): SEQ ID NO: 620; WAN024CBD_at; Start 186; Stop 210
cgagattgaagtcgttcgcgctatc

SEQ ID NO: 111626 - DNA, 25 bp, Artificial
  probe
  misc_feature (1)..(25): SEQ ID NO: 620; WAN024CBD_at; Start 778; Stop 802
tctaaacaattcttcggagacactt

SEQ ID NO: 111627 - DNA, 25 bp, Artificial
  probe
  misc_feature (1)..(25): SEQ ID NO: 620; WAN024CBD_at; Start 241; Stop 265
tttgaaaagacagaatggtcaggtg

SEQ ID NO: 111628 - DNA, 25 bp, Artificial
  probe
  misc_feature (1)..(25): SEQ ID NO: 620; WAN024CBD_at; Start 84; Stop 108
taagaaagaaggagaagcagctagc

SEQ ID NO: 111629 - DNA, 25 bp, Artificial
  probe
  misc_feature (1)..(25): SEQ ID NO: 620; WAN024CBD_at; Start 454; Stop 478
caagccactacatcagctaagcagt

SEQ ID NO: 111630 - DNA, 25 bp, Artificial
  probe
  misc_feature (1)..(25): SEQ ID NO: 620; WAN024CBD_at; Start 100; Stop 124
gcagctagcaagaaagaaatcatcg

SEQ ID NO: 111631 - DNA, 25 bp, Artificial
  probe
  misc_feature (1)..(25): SEQ ID NO: 620; WAN024CBD_at; Start 441; Stop 465
gacggaagtcgttcaagccactaca

SEQ ID NO: 111632 - DNA, 25 bp, Artificial
  probe
  misc_feature (1)..(25): SEQ ID NO: 620; WAN024CBD_at; Start 153; Stop 177
tatctatgaagaaaatggcgaattg

SEQ ID NO: 111633 - DNA, 25 bp, Artificial
  probe
  misc_feature (1)..(25): SEQ ID NO: 620; WAN024CBD_at; Start 369; Stop 393
aaatcctaatgtccttgtcgtgaag

SEQ ID NO: 111634 - DNA, 25 bp, Artificial
  probe
  misc_feature (1)..(25): SEQ ID NO: 620; WAN024CBD_at; Start 597; Stop 621
taaaatcggtgttgaaacagtgatc

SEQ ID NO: 111635 - DNA, 25 bp, Artificial
  probe
  misc_feature (1)..(25): SEQ ID NO: 620; WAN024CBD_at; Start 544; Stop 568
caacaaatcatggtacgtttgagcg

SEQ ID NO: 111636 - DNA, 25 bp, Artificial
  probe
  misc_feature (1)..(25): SEQ ID NO: 620; WAN024CBD_at; Start 411; Stop 435
caagtctctcgatgatatcggtgga

SEQ ID NO: 111637 - DNA, 25 bp, Artificial
  probe
  misc_feature (1)..(25): SEQ ID NO: 620; WAN024CBD_at; Start 677; Stop 701
cgtacgtttacccacttcttgctca

SEQ ID NO: 111638 - DNA, 25 bp, Artificial
  probe
  misc_feature (1)..(25): SEQ ID NO: 620; WAN024CBD_at; Start 645; Stop 669
gaaagttatcgaacttccaagcgac

SEQ ID NO: 111639 - DNA, 25 bp, Artificial
  probe
  misc_feature (1)..(25): SEQ ID NO: 620; WAN024CBD_at; Start 469; Stop 493
gctaagcagttagaagcatacaatg

SEQ ID NO: 111640 - DNA, 25 bp, Artificial
  probe
  misc_feature (1)..(25): SEQ ID NO: 620; WAN024CBD_at; Start 426; Stop 450
tatcggtggaaaatcgacggaagtc

SEQ ID NO: 111641 - DNA, 25 bp, Artificial
  probe
  misc_feature (1)..(25): SEQ ID NO: 620; WAN024CBD_at; Start 294; Stop 318
caatatggctgtcaacaatcttagc

SEQ ID NO: 111642 - DNA, 25 bp, Artificial
  probe
  misc_feature (1)..(25): SEQ ID NO: 620; WAN024CBD_at; Start 495; Stop 519
tgaacacacggacaacccaactatc

SEQ ID NO: 111643 - DNA, 25 bp, Artificial
  probe
  misc_feature (1)..(25): SEQ ID NO: 620; WAN024CBD_at; Start 328; Stop 352
gaacgtgcggagaaatacctctatg

SEQ ID NO: 111644 - DNA, 25 bp, Artificial
  probe
  misc_feature (1)..(25): SEQ ID NO: 620; WAN024CBD_at; Start 355; Stop 379
gcaccaattgcccaaaatcctaatg

SEQ ID NO: 111645 - DNA, 25 bp, Artificial
  probe
  misc_feature (1)..(25): SEQ ID NO: 620; WAN024CBD_at; Start 312; Stop 336
tcttagctacactaaagaacgtgcg

SEQ ID NO: 111646 - DNA, 25 bp, Artificial
  probe
  misc_feature (1)..(25): SEQ ID NO: 620; WAN024CBD_at; Start 119; Stop 143
tcatcgttgcaaccaatggatcacc

SEQ ID NO: 111647 - DNA, 25 bp, Artificial
  probe
  misc_feature (1)..(25): SEQ ID NO: 620; WAN024CBD_at; Start 613; Stop 637
acagtgatcaagaaccaaggtttgg

SEQ ID NO: 111648 - DNA, 25 bp, Artificial
  probe
  misc_feature (1)..(25): SEQ ID NO: 620; WAN024CBD_at; Start 516; Stop 540
tatccttaactatactaaggcagac

SEQ ID NO: 111649 - DNA, 25 bp, Artificial
  probe
  misc_feature (1)..(25): SEQ ID NO: 620; WAN024CBD_at; Start 202; Stop 226
cgcgctatctttaaagattctgaca

SEQ ID NO: 111650 - DNA, 25 bp, Artificial
  probe
  misc_feature (1)..(25): SEQ ID NO: 620; WAN024CBD_at; Start 805; Stop 829
ctaccggcagaagctgatattaaat

SEQ ID NO: 111651 - DNA, 25 bp, Artificial
  probe
  misc_feature (1)..(25): SEQ ID NO: 620; WAN024CBD_at; Start 484; Stop 508
gcatacaatgctgaacacacggaca

SEQ ID NO: 111652 - DNA, 25 bp, Artificial
  probe
  misc_feature (1)..(25): SEQ ID NO: 620; WAN024CBD_at; Start 260; Stop 284
caggtgtctttgctggtcttgacgc

SEQ ID NO: 111653 - DNA, 25 bp, Artificial
  probe
  misc_feature (1)..(25): SEQ ID NO: 620; WAN024CBD_at; Start 337; Stop 361
gagaaatacctctatgccgcaccaa

SEQ ID NO: 111654 - DNA, 25 bp, Artificial
  probe
  misc_feature (1)..(25): SEQ ID NO: 620; WAN024CBD_at; Start 559; Stop 583
cgtttgagcgatggacaatttgact

SEQ ID NO: 111655 - DNA, 25 bp, Artificial
  probe
  misc_feature (1)..(25): SEQ ID NO: 620; WAN024CBD_at; Start 381; Stop 405
ccttgtcgtgaagaaagatgactct

SEQ ID NO: 111656 - DNA, 25 bp, Artificial
  probe
  misc_feature (1)..(25): SEQ ID NO: 4063; WAN024CBE_at; Start 430; Stop 454
gatgatgtggaatttaatcagacac

SEQ ID NO: 111657 - DNA, 25 bp, Artificial
  probe
  misc_feature (1)..(25): SEQ ID NO: 4063; WAN024CBE_at; Start 300; Stop 324
taagattgtaaatgggctgatacaa

SEQ ID NO: 111658 - DNA, 25 bp, Artificial
  probe
  misc_feature (1)..(25): SEQ ID NO: 4063; WAN024CBE_at; Start 112; Stop 136
cacaaaaagaactgtgagttgaggt

SEQ ID NO: 111659 - DNA, 25 bp, Artificial
  probe
  misc_feature (1)..(25): SEQ ID NO: 4063; WAN024CBE_at; Start 314; Stop 338
ggctgatacaaaatattgaggagaa

SEQ ID NO: 111660 - DNA, 25 bp, Artificial
  probe
  misc_feature (1)..(25): SEQ ID NO: 4063; WAN024CBE_at; Start 34; Stop 58
cctagatatccatataaaatgtctg

SEQ ID NO: 111661 - DNA, 25 bp, Artificial
  probe
  misc_feature (1)..(25): SEQ ID NO: 4063; WAN024CBE_at; Start 15; Stop 39
gcatagttttggcattcatcctaga

SEQ ID NO: 111662 - DNA, 25 bp, Artificial
  probe
  misc_feature (1)..(25): SEQ ID NO: 4063; WAN024CBE_at; Start 43; Stop 67
ccatataaaatgtctgagattgttg

SEQ ID NO: 111663 - DNA, 25 bp, Artificial
  probe
  misc_feature (1)..(25): SEQ ID NO: 4063; WAN024CBE_at; Start 40; Stop 64
tatccatataaaatgtctgagattg

SEQ ID NO: 111664 - DNA, 25 bp, Artificial
  probe
  misc_feature (1)..(25): SEQ ID NO: 4063; WAN024CBE_at; Start 139; Stop 163
caagatagtgttcttgataacataa

SEQ ID NO: 111665 - DNA, 25 bp, Artificial
  probe
  misc_feature (1)..(25): SEQ ID NO: 4063; WAN024CBE_at; Start 345; Stop 369
ggatgatattgaaaggatattgaaa

SEQ ID NO: 111666 - DNA, 25 bp, Artificial
  probe
  misc_feature (1)..(25): SEQ ID NO: 4063; WAN024CBE_at; Start 150; Stop 174
tcttgataacataaatagtgtcccg

SEQ ID NO: 111667 - DNA, 25 bp, Artificial
  probe
  misc_feature (1)..(25): SEQ ID NO: 4063; WAN024CBE_at; Start 230; Stop 254
tatatatttttcgatacaacagttg

SEQ ID NO: 111668 - DNA, 25 bp, Artificial
  probe
  misc_feature (1)..(25): SEQ ID NO: 4063; WAN024CBE_at; Start 263; Stop 287
tatttaattttagagataaagagct

SEQ ID NO: 111669 - DNA, 25 bp, Artificial
  probe
  misc_feature (1)..(25): SEQ ID NO: 4063; WAN024CBE_at; Start 20; Stop 44
gttttggcattcatcctagatatcc

SEQ ID NO: 111670 - DNA, 25 bp, Artificial
  probe
  misc_feature (1)..(25): SEQ ID NO: 4063; WAN024CBE_at; Start 127; Stop 151
gagttgaggtttcaagatagtgttc

SEQ ID NO: 111671 - DNA, 25 bp, Artificial
  probe
  misc_feature (1)..(25): SEQ ID NO: 4063; WAN024CBE_at; Start 336; Stop 360
gaatttagaggatgatattgaaagg

SEQ ID NO: 111672 - DNA, 25 bp, Artificial
  probe
  misc_feature (1)..(25): SEQ ID NO: 4063; WAN024CBE_at; Start 310; Stop 334
aatgggctgatacaaaatattgagg

SEQ ID NO: 111673 - DNA, 25 bp, Artificial
  probe
  misc_feature (1)..(25): SEQ ID NO: 4063; WAN024CBE_at; Start 414; Stop 438
taaggtgaatttttttgatgatgtg

SEQ ID NO: 111674 - DNA, 25 bp, Artificial
  probe
  misc_feature (1)..(25): SEQ ID NO: 4063; WAN024CBE_at; Start 450; Stop 474
gacacttagtgagtttttagataaa

SEQ ID NO: 111675 - DNA, 25 bp, Artificial
  probe
  misc_feature (1)..(25): SEQ ID NO: 4063; WAN024CBE_at; Start 116; Stop 140
aaaagaactgtgagttgaggtttca

SEQ ID NO: 111676 - DNA, 25 bp, Artificial
  probe
  misc_feature (1)..(25): SEQ ID NO: 4063; WAN024CBE_at; Start 398; Stop 422
tattcattattaagaataaggtgaa

SEQ ID NO: 111677 - DNA, 25 bp, Artificial
  probe
  misc_feature (1)..(25): SEQ ID NO: 4063; WAN024CBE_at; Start 8; Stop 32
tcattttgcatagttttggcattca

SEQ ID NO: 111678 - DNA, 25 bp, Artificial
  probe
  misc_feature (1)..(25): SEQ ID NO: 4063; WAN024CBE_at; Start 55; Stop 79
tctgagattgttgaaatgtctaaaa

SEQ ID NO: 111679 - DNA, 25 bp, Artificial
  probe
  misc_feature (1)..(25): SEQ ID NO: 4063; WAN024CBE_at; Start 329; Stop 353
ttgaggagaatttagaggatgatat

SEQ ID NO: 111680 - DNA, 25 bp, Artificial
  probe
  misc_feature (1)..(25): SEQ ID NO: 4063; WAN024CBE_at; Start 295; Stop 319
tttaataagattgtaaatgggctga

SEQ ID NO: 111681 - DNA, 25 bp, Artificial
  probe
  misc_feature (1)..(25): SEQ ID NO: 4063; WAN024CBE_at; Start 25; Stop 49
ggcattcatcctagatatccatata

SEQ ID NO: 111682 - DNA, 25 bp, Artificial
  probe
  misc_feature (1)..(25): SEQ ID NO: 4063; WAN024CBE_at; Start 120; Stop 144
gaactgtgagttgaggtttcaagat

SEQ ID NO: 111683 - DNA, 25 bp, Artificial
  probe
  misc_feature (1)..(25): SEQ ID NO: 4063; WAN024CBE_at; Start 438; Stop 462
ggaatttaatcagacacttagtgag

SEQ ID NO: 111684 - DNA, 25 bp, Artificial
  probe
  misc_feature (1)..(25): SEQ ID NO: 4063; WAN024CBE_at; Start 322; Stop 346
caaaatattgaggagaatttagagg

SEQ ID NO: 111685 - DNA, 25 bp, Artificial
  probe
  misc_feature (1)..(25): SEQ ID NO: 4063; WAN024CBE_at; Start 105; Stop 129
agaatttcacaaaaagaactgtgag

SEQ ID NO: 111686 - DNA, 25 bp, Artificial
  probe
  misc_feature (1)..(25): SEQ ID NO: 4063; WAN024CBE_at; Start 234; Stop 258
tatttttcgatacaacagttgtatg

SEQ ID NO: 111687 - DNA, 25 bp, Artificial
  probe
  misc_feature (1)..(25): SEQ ID NO: 4063; WAN024CBE_at; Start 448; Stop 472
cagacacttagtgagtttttagata

SEQ ID NO: 111688 - DNA, 25 bp, Artificial
  probe
  misc_feature (1)..(25): SEQ ID NO: 4063; WAN024CBE_at; Start 50; Stop 74
aaatgtctgagattgttgaaatgtc

SEQ ID NO: 111689 - DNA, 25 bp, Artificial
  probe
  misc_feature (1)..(25): SEQ ID NO: 4063; WAN024CBE_at; Start 246; Stop 270
caacagttgtatgaaaatatttaat

SEQ ID NO: 111690 - DNA, 25 bp, Artificial
  probe
  misc_feature (1)..(25): SEQ ID NO: 2725; WAN024CBF_at; Start 226; Stop 250
gactctaaaacacacataggtattc

SEQ ID NO: 111691 - DNA, 25 bp, Artificial
  probe
  misc_feature (1)..(25): SEQ ID NO: 2725; WAN024CBF_at; Start 62; Stop 86
cacctatatatttcaaatactcaga

SEQ ID NO: 111692 - DNA, 25 bp, Artificial
  probe
  misc_feature (1)..(25): SEQ ID NO: 2725; WAN024CBF_at; Start 99; Stop 123
aaaattagcacaagcacacactccc

SEQ ID NO: 111693 - DNA, 25 bp, Artificial
  probe
  misc_feature (1)..(25): SEQ ID NO: 2725; WAN024CBF_at; Start 262; Stop 286
gaaggaatatacaataaatccgata

SEQ ID NO: 111694 - DNA, 25 bp, Artificial
  probe
  misc_feature (1)..(25): SEQ ID NO: 2725; WAN024CBF_at; Start 133; Stop 157
tccttctcaaataaaaatccatcaa

SEQ ID NO: 111695 - DNA, 25 bp, Artificial
  probe
  misc_feature (1)..(25): SEQ ID NO: 2725; WAN024CBF_at; Start 269; Stop 293
tatacaataaatccgatatttggta

SEQ ID NO: 111696 - DNA, 25 bp, Artificial
  probe
  misc_feature (1)..(25): SEQ ID NO: 2725; WAN024CBF_at; Start 251; Stop 275
cttctgtatcagaaggaatatacaa

SEQ ID NO: 111697 - DNA, 25 bp, Artificial
  probe
  misc_feature (1)..(25): SEQ ID NO: 2725; WAN024CBF_at; Start 108; Stop 132
acaagcacacactccctcaacatct

SEQ ID NO: 111698 - DNA, 25 bp, Artificial
  probe
  misc_feature (1)..(25): SEQ ID NO: 2725; WAN024CBF_at; Start 180; Stop 204
taacccgccaacattactagctaaa

SEQ ID NO: 111699 - DNA, 25 bp, Artificial
  probe
  misc_feature (1)..(25): SEQ ID NO: 2725; WAN024CBF_at; Start 49; Stop 73
gatttactattctcacctatatatt

SEQ ID NO: 111700 - DNA, 25 bp, Artificial
  probe
  misc_feature (1)..(25): SEQ ID NO: 2725; WAN024CBF_at; Start 232; Stop 256
aaaacacacataggtattccttctg

SEQ ID NO: 111701 - DNA, 25 bp, Artificial
  probe
  misc_feature (1)..(25): SEQ ID NO: 2725; WAN024CBF_at; Start 9; Stop 33
tacaaacattttttgcacagaaaaa

SEQ ID NO: 111702 - DNA, 25 bp, Artificial
  probe
  misc_feature (1)..(25): SEQ ID NO: 2725; WAN024CBF_at; Start 214; Stop 238
ccttgtgacattgactctaaaacac

SEQ ID NO: 111703 - DNA, 25 bp, Artificial
  probe
  misc_feature (1)..(25): SEQ ID NO: 2725; WAN024CBF_at; Start 166; Stop 190
tcaataatttcacttaacccgccaa

SEQ ID NO: 111704 - DNA, 25 bp, Artificial
  probe
  misc_feature (1)..(25): SEQ ID NO: 2725; WAN024CBF_at; Start 178; Stop 202
cttaacccgccaacattactagcta

SEQ ID NO: 111705 - DNA, 25 bp, Artificial
  probe
  misc_feature (1)..(25): SEQ ID NO: 2725; WAN024CBF_at; Start 169; Stop 193
ataatttcacttaacccgccaacat

SEQ ID NO: 111706 - DNA, 25 bp, Artificial
  probe
  misc_feature (1)..(25): SEQ ID NO: 2725; WAN024CBF_at; Start 219; Stop 243
tgacattgactctaaaacacacata

SEQ ID NO: 111707 - DNA, 25 bp, Artificial
  probe
  misc_feature (1)..(25): SEQ ID NO: 2725; WAN024CBF_at; Start 240; Stop 264
cataggtattccttctgtatcagaa

SEQ ID NO: 111708 - DNA, 25 bp, Artificial
  probe
  misc_feature (1)..(25): SEQ ID NO: 2725; WAN024CBF_at; Start 163; Stop 187
tgttcaataatttcacttaacccgc

SEQ ID NO: 111709 - DNA, 25 bp, Artificial
  probe
  misc_feature (1)..(25): SEQ ID NO: 2725; WAN024CBF_at; Start 210; Stop 234
agttccttgtgacattgactctaaa

SEQ ID NO: 111710 - DNA, 25 bp, Artificial
  probe
  misc_feature (1)..(25): SEQ ID NO: 2725; WAN024CBF_at; Start 259; Stop 283
tcagaaggaatatacaataaatccg

SEQ ID NO: 111711 - DNA, 25 bp, Artificial
  probe
  misc_feature (1)..(25): SEQ ID NO: 2725; WAN024CBF_at; Start 3; Stop 27
ggtttctacaaacattttttgcaca

SEQ ID NO: 111712 - DNA, 25 bp, Artificial
  probe
  misc_feature (1)..(25): SEQ ID NO: 2725; WAN024CBF_at; Start 85; Stop 109
gaatcattgagtaaaaaattagcac

SEQ ID NO: 111713 - DNA, 25 bp, Artificial
  probe
  misc_feature (1)..(25): SEQ ID NO: 2725; WAN024CBF_at; Start 93; Stop 117
gagtaaaaaattagcacaagcacac

SEQ ID NO: 111714 - DNA, 25 bp, Artificial
  probe
  misc_feature (1)..(25): SEQ ID NO: 2725; WAN024CBF_at; Start 137; Stop 161
tctcaaataaaaatccatcaaccct

SEQ ID NO: 111715 - DNA, 25 bp, Artificial
  probe
  misc_feature (1)..(25): SEQ ID NO: 2725; WAN024CBF_at; Start 122; Stop 146
cctcaacatcttccttctcaaataa

SEQ ID NO: 111716 - DNA, 25 bp, Artificial
  probe
  misc_feature (1)..(25): SEQ ID NO: 2725; WAN024CBF_at; Start 155; Stop 179
caaccctatgttcaataatttcact

SEQ ID NO: 111717 - DNA, 25 bp, Artificial
  probe
  misc_feature (1)..(25): SEQ ID NO: 2725; WAN024CBF_at; Start 19; Stop 43
ttttgcacagaaaaatgttttctta

SEQ ID NO: 111718 - DNA, 25 bp, Artificial
  probe
  misc_feature (1)..(25): SEQ ID NO: 2725; WAN024CBF_at; Start 184; Stop 208
ccgccaacattactagctaaaaccg

SEQ ID NO: 111719 - DNA, 25 bp, Artificial
  probe
  misc_feature (1)..(25): SEQ ID NO: 2725; WAN024CBF_at; Start 148; Stop 172
aatccatcaaccctatgttcaataa

SEQ ID NO: 111720 - DNA, 25 bp, Artificial
  probe
  misc_feature (1)..(25): SEQ ID NO: 2725; WAN024CBF_at; Start 222; Stop 246
cattgactctaaaacacacataggt

SEQ ID NO: 111721 - DNA, 25 bp, Artificial
  probe
  misc_feature (1)..(25): SEQ ID NO: 2725; WAN024CBF_at; Start 70; Stop 94
tatttcaaatactcagaatcattga

SEQ ID NO: 111722 - DNA, 25 bp, Artificial
  probe
  misc_feature (1)..(25): SEQ ID NO: 2725; WAN024CBF_at; Start 144; Stop 168
taaaaatccatcaaccctatgttca

SEQ ID NO: 111723 - DNA, 25 bp, Artificial
  probe
  misc_feature (1)..(25): SEQ ID NO: 2725; WAN024CBF_at; Start 96; Stop 120
taaaaaattagcacaagcacacact

SEQ ID NO: 111724 - DNA, 25 bp, Artificial
  probe
  misc_feature (1)..(25): SEQ ID NO: 5460; WAN024CBG_at; Start 212; Stop 236
gagaagatgtgatttttattatggc

SEQ ID NO: 111725 - DNA, 25 bp, Artificial
  probe
  misc_feature (1)..(25): SEQ ID NO: 5460; WAN024CBG_at; Start 151; Stop 175
ttggatccagaaaaaaggccggata

SEQ ID NO: 111726 - DNA, 25 bp, Artificial
  probe
  misc_feature (1)..(25): SEQ ID NO: 5460; WAN024CBG_at; Start 302; Stop 326
tcaggttacttggtgaaatctatcc

SEQ ID NO: 111727 - DNA, 25 bp, Artificial
  probe
  misc_feature (1)..(25): SEQ ID NO: 5460; WAN024CBG_at; Start 328; Stop 352
gctactatagtttaccaaatatcgg

SEQ ID NO: 111728 - DNA, 25 bp, Artificial
  probe
  misc_feature (1)..(25): SEQ ID NO: 5460; WAN024CBG_at; Start 562; Stop 586
tatataggtgagaatagtaaatcaa

SEQ ID NO: 111729 - DNA, 25 bp, Artificial
  probe
  misc_feature (1)..(25): SEQ ID NO: 5460; WAN024CBG_at; Start 163; Stop 187
aaaaggccggatagattccttgaat

SEQ ID NO: 111730 - DNA, 25 bp, Artificial
  probe
  misc_feature (1)..(25): SEQ ID NO: 5460; WAN024CBG_at; Start 459; Stop 483
aattattgaacatagggttgatgga

SEQ ID NO: 111731 - DNA, 25 bp, Artificial
  probe
  misc_feature (1)..(25): SEQ ID NO: 5460; WAN024CBG_at; Start 11; Stop 35
taataaaaaataagaagatagttgc

SEQ ID NO: 111732 - DNA, 25 bp, Artificial
  probe
  misc_feature (1)..(25): SEQ ID NO: 5460; WAN024CBG_at; Start 268; Stop 292
gaaaaaatttgccatttgaaatgta

SEQ ID NO: 111733 - DNA, 25 bp, Artificial
  probe
  misc_feature (1)..(25): SEQ ID NO: 5460; WAN024CBG_at; Start 313; Stop 337
ggtgaaatctatccagctactatag

SEQ ID NO: 111734 - DNA, 25 bp, Artificial
  probe
  misc_feature (1)..(25): SEQ ID NO: 5460; WAN024CBG_at; Start 399; Stop 423
tttagagtcaatgtcacaaggaact

SEQ ID NO: 111735 - DNA, 25 bp, Artificial
  probe
  misc_feature (1)..(25): SEQ ID NO: 5460; WAN024CBG_at; Start 369; Stop 393
ttctgatacagaaggaatacctatg

SEQ ID NO: 111736 - DNA, 25 bp, Artificial
  probe
  misc_feature (1)..(25): SEQ ID NO: 5460; WAN024CBG_at; Start 487; Stop 511
ttatttgagaaggaagatgttgagg

SEQ ID NO: 111737 - DNA, 25 bp, Artificial
  probe
  misc_feature (1)..(25): SEQ ID NO: 5460; WAN024CBG_at; Start 228; Stop 252
tattatggctggaaatggtagtatg

SEQ ID NO: 111738 - DNA, 25 bp, Artificial
  probe
  misc_feature (1)..(25): SEQ ID NO: 5460; WAN024CBG_at; Start 42; Stop 66
taacggaattaatgtatcaaatagc

SEQ ID NO: 111739 - DNA, 25 bp, Artificial
  probe
  misc_feature (1)..(25): SEQ ID NO: 5460; WAN024CBG_at; Start 510; Stop 534
gggagtgtgtgcttgtgctaatttt

SEQ ID NO: 111740 - DNA, 25 bp, Artificial
  probe
  misc_feature (1)..(25): SEQ ID NO: 5460; WAN024CBG_at; Start 170; Stop 194
cggatagattccttgaatttgcaga

SEQ ID NO: 111741 - DNA, 25 bp, Artificial
  probe
  misc_feature (1)..(25): SEQ ID NO: 5460; WAN024CBG_at; Start 73; Stop 97
gatgtagtaggtgttcaagacttta

SEQ ID NO: 111742 - DNA, 25 bp, Artificial
  probe
  misc_feature (1)..(25): SEQ ID NO: 5460; WAN024CBG_at; Start 425; Stop 449
cggttttagctagtaatgttggcgg

SEQ ID NO: 111743 - DNA, 25 bp, Artificial
  probe
  misc_feature (1)..(25): SEQ ID NO: 5460; WAN024CBG_at; Start 246; Stop 270
tagtatgtgggctgctttgaaagaa

SEQ ID NO: 111744 - DNA, 25 bp, Artificial
  probe
  misc_feature (1)..(25): SEQ ID NO: 5460; WAN024CBG_at; Start 444; Stop 468
tggcgggttaagtgaaattattgaa

SEQ ID NO: 111745 - DNA, 25 bp, Artificial
  probe
  misc_feature (1)..(25): SEQ ID NO: 5460; WAN024CBG_at; Start 625; Stop 649
gaaaccatgagagtatatgatgaat

SEQ ID NO: 111746 - DNA, 25 bp, Artificial
  probe
  misc_feature (1)..(25): SEQ ID NO: 5460; WAN024CBG_at; Start 384; Stop 408
aatacctatgtgtgttttagagtca

SEQ ID NO: 111747 - DNA, 25 bp, Artificial
  probe
  misc_feature (1)..(25): SEQ ID NO: 5460; WAN024CBG_at; Start 196; Stop 220
aaattatttttagtcagagaagatg

SEQ ID NO: 111748 - DNA, 25 bp, Artificial
  probe
  misc_feature (1)..(25): SEQ ID NO: 5460; WAN024CBG_at; Start 136; Stop 160
tgttatgttggaaggttggatccag

SEQ ID NO: 111749 - DNA, 25 bp, Artificial
  probe
  misc_feature (1)..(25): SEQ ID NO: 5460; WAN024CBG_at; Start 478; Stop 502
gatggatttttatttgagaaggaag

SEQ ID NO: 111750 - DNA, 25 bp, Artificial
  probe
  misc_feature (1)..(25): SEQ ID NO: 5460; WAN024CBG_at; Start 350; Stop 374
cggatttattgtatattccttctga

SEQ ID NO: 111751 - DNA, 25 bp, Artificial
  probe
  misc_feature (1)..(25): SEQ ID NO: 5460; WAN024CBG_at; Start 431; Stop 455
tagctagtaatgttggcgggttaag

SEQ ID NO: 111752 - DNA, 25 bp, Artificial
  probe
  misc_feature (1)..(25): SEQ ID NO: 5460; WAN024CBG_at; Start 59; Stop 83
caaatagcgatttagatgtagtagg

SEQ ID NO: 111753 - DNA, 25 bp, Artificial
  probe
  misc_feature (1)..(25): SEQ ID NO: 5460; WAN024CBG_at; Start 610; Stop 634
caaaaaatgtttgtagaaaccatga

SEQ ID NO: 111754 - DNA, 25 bp, Artificial
  probe
  misc_feature (1)..(25): SEQ ID NO: 5460; WAN024CBG_at; Start 540; Stop 564
caatgattctgagtatttgaaatat

SEQ ID NO: 111755 - DNA, 25 bp, Artificial
  probe
  misc_feature (1)..(25): SEQ ID NO: 5460; WAN024CBG_at; Start 526; Stop 550
gctaattttttactcaatgattctg

SEQ ID NO: 111756 - DNA, 25 bp, Artificial
  probe
  misc_feature (1)..(25): SEQ ID NO: 5460; WAN024CBG_at; Start 24; Stop 48
gaagatagttgcaataaataacgga

SEQ ID NO: 111757 - DNA, 25 bp, Artificial
  probe
  misc_feature (1)..(25): SEQ ID NO: 5460; WAN024CBG_at; Start 647; Stop 671
aattattagagaagagtagtcatgg

SEQ ID NO: 111758 - DNA, 25 bp, Artificial
  probe
  misc_feature (1)..(25): SEQ ID NO: 4202; WAN024CBH_at; Start 29; Stop 53
cacatgttcattctgtgaaaccttg

SEQ ID NO: 111759 - DNA, 25 bp, Artificial
  probe
  misc_feature (1)..(25): SEQ ID NO: 4202; WAN024CBH_at; Start 44; Stop 68
tgaaaccttgcattgtccataatga

SEQ ID NO: 111760 - DNA, 25 bp, Artificial
  probe
  misc_feature (1)..(25): SEQ ID NO: 4202; WAN024CBH_at; Start 43; Stop 67
gtgaaaccttgcattgtccataatg

SEQ ID NO: 111761 - DNA, 25 bp, Artificial
  probe
  misc_feature (1)..(25): SEQ ID NO: 4202; WAN024CBH_at; Start 10; Stop 34
gtctatgccctgctccttacacatg

SEQ ID NO: 111762 - DNA, 25 bp, Artificial
  probe
  misc_feature (1)..(25): SEQ ID NO: 4202; WAN024CBH_at; Start 13; Stop 37
tatgccctgctccttacacatgttc

SEQ ID NO: 111763 - DNA, 25 bp, Artificial
  probe
  misc_feature (1)..(25): SEQ ID NO: 4202; WAN024CBH_at; Start 31; Stop 55
catgttcattctgtgaaaccttgca

SEQ ID NO: 111764 - DNA, 25 bp, Artificial
  probe
  misc_feature (1)..(25): SEQ ID NO: 4202; WAN024CBH_at; Start 42; Stop 66
tgtgaaaccttgcattgtccataat

SEQ ID NO: 111765 - DNA, 25 bp, Artificial
  probe
  misc_feature (1)..(25): SEQ ID NO: 4202; WAN024CBH_at; Start 37; Stop 61
cattctgtgaaaccttgcattgtcc

SEQ ID NO: 111766 - DNA, 25 bp, Artificial
  probe
  misc_feature (1)..(25): SEQ ID NO: 4202; WAN024CBH_at; Start 18; Stop 42
cctgctccttacacatgttcattct

SEQ ID NO: 111767 - DNA, 25 bp, Artificial
  probe
  misc_feature (1)..(25): SEQ ID NO: 4202; WAN024CBH_at; Start 21; Stop 45
gctccttacacatgttcattctgtg

SEQ ID NO: 111768 - DNA, 25 bp, Artificial
  probe
  misc_feature (1)..(25): SEQ ID NO: 4202; WAN024CBH_at; Start 54; Stop 78
cattgtccataatgataagggatgg

SEQ ID NO: 111769 - DNA, 25 bp, Artificial
  probe
  misc_feature (1)..(25): SEQ ID NO: 4202; WAN024CBH_at; Start 52; Stop 76
tgcattgtccataatgataagggat

SEQ ID NO: 111770 - DNA, 25 bp, Artificial
  probe
  misc_feature (1)..(25): SEQ ID NO: 4202; WAN024CBH_at; Start 3; Stop 27
ggtaacagtctatgccctgctcctt

SEQ ID NO: 111771 - DNA, 25 bp, Artificial
  probe
  misc_feature (1)..(25): SEQ ID NO: 4202; WAN024CBH_at; Start 27; Stop 51
tacacatgttcattctgtgaaacct

SEQ ID NO: 111772 - DNA, 25 bp, Artificial
  probe
  misc_feature (1)..(25): SEQ ID NO: 4202; WAN024CBH_at; Start 60; Stop 84
ccataatgataagggatggtgtatc

SEQ ID NO: 111773 - DNA, 25 bp, Artificial
  probe
  misc_feature (1)..(25): SEQ ID NO: 4202; WAN024CBH_at; Start 20; Stop 44
tgctccttacacatgttcattctgt

SEQ ID NO: 111774 - DNA, 25 bp, Artificial
  probe
  misc_feature (1)..(25): SEQ ID NO: 4202; WAN024CBH_at; Start 45; Stop 69
gaaaccttgcattgtccataatgat

SEQ ID NO: 111775 - DNA, 25 bp, Artificial
  probe
  misc_feature (1)..(25): SEQ ID NO: 4202; WAN024CBH_at; Start 38; Stop 62
attctgtgaaaccttgcattgtcca

SEQ ID NO: 111776 - DNA, 25 bp, Artificial
  probe
  misc_feature (1)..(25): SEQ ID NO: 4202; WAN024CBH_at; Start 47; Stop 71
aaccttgcattgtccataatgataa

SEQ ID NO: 111777 - DNA, 25 bp, Artificial
  probe
  misc_feature (1)..(25): SEQ ID NO: 4202; WAN024CBH_at; Start 2; Stop 26
tggtaacagtctatgccctgctcct

SEQ ID NO: 111778 - DNA, 25 bp, Artificial
  probe
  misc_feature (1)..(25): SEQ ID NO: 4202; WAN024CBH_at; Start 16; Stop 40
gccctgctccttacacatgttcatt

SEQ ID NO: 111779 - DNA, 25 bp, Artificial
  probe
  misc_feature (1)..(25): SEQ ID NO: 4202; WAN024CBH_at; Start 34; Stop 58
gttcattctgtgaaaccttgcattg

SEQ ID NO: 111780 - DNA, 25 bp, Artificial
  probe
  misc_feature (1)..(25): SEQ ID NO: 4202; WAN024CBH_at; Start 1; Stop 25
gtggtaacagtctatgccctgctcc

SEQ ID NO: 111781 - DNA, 25 bp, Artificial
  probe
  misc_feature (1)..(25): SEQ ID NO: 4202; WAN024CBH_at; Start 36; Stop 60
tcattctgtgaaaccttgcattgtc

SEQ ID NO: 111782 - DNA, 25 bp, Artificial
  probe
  misc_feature (1)..(25): SEQ ID NO: 4202; WAN024CBH_at; Start 56; Stop 80
ttgtccataatgataagggatggtg

SEQ ID NO: 111783 - DNA, 25 bp, Artificial
  probe
  misc_feature (1)..(25): SEQ ID NO: 4202; WAN024CBH_at; Start 4; Stop 28
gtaacagtctatgccctgctcctta

SEQ ID NO: 111784 - DNA, 25 bp, Artificial
  probe
  misc_feature (1)..(25): SEQ ID NO: 4202; WAN024CBH_at; Start 15; Stop 39
tgccctgctccttacacatgttcat

SEQ ID NO: 111785 - DNA, 25 bp, Artificial
  probe
  misc_feature (1)..(25): SEQ ID NO: 4202; WAN024CBH_at; Start 24; Stop 48
ccttacacatgttcattctgtgaaa

SEQ ID NO: 111786 - DNA, 25 bp, Artificial
  probe
  misc_feature (1)..(25): SEQ ID NO: 4202; WAN024CBH_at; Start 50; Stop 74
cttgcattgtccataatgataaggg

SEQ ID NO: 111787 - DNA, 25 bp, Artificial
  probe
  misc_feature (1)..(25): SEQ ID NO: 4202; WAN024CBH_at; Start 40; Stop 64
tctgtgaaaccttgcattgtccata

SEQ ID NO: 111788 - DNA, 25 bp, Artificial
  probe
  misc_feature (1)..(25): SEQ ID NO: 4202; WAN024CBH_at; Start 41; Stop 65
ctgtgaaaccttgcattgtccataa

SEQ ID NO: 111789 - DNA, 25 bp, Artificial
  probe
  misc_feature (1)..(25): SEQ ID NO: 4202; WAN024CBH_at; Start 39; Stop 63
ttctgtgaaaccttgcattgtccat

SEQ ID NO: 111790 - DNA, 25 bp, Artificial
  probe
  misc_feature (1)..(25): SEQ ID NO: 4202; WAN024CBH_at; Start 57; Stop 81
tgtccataatgataagggatggtgt

SEQ ID NO: 111791 - DNA, 25 bp, Artificial
  probe
  misc_feature (1)..(25): SEQ ID NO: 4202; WAN024CBH_at; Start 11; Stop 35
tctatgccctgctccttacacatgt

SEQ ID NO: 111792 - DNA, 25 bp, Artificial
  probe
  misc_feature (1)..(25): SEQ ID NO: 2502; WAN024CBI_at; Start 142; Stop 166
gagcagggcatagactgttaccact

SEQ ID NO: 111793 - DNA, 25 bp, Artificial
  probe
  misc_feature (1)..(25): SEQ ID NO: 2502; WAN024CBI_at; Start 132; Stop 156
catgtgtaaggagcagggcatagac

SEQ ID NO: 111794 - DNA, 25 bp, Artificial
  probe
  misc_feature (1)..(25): SEQ ID NO: 2502; WAN024CBI_at; Start 2; Stop 26
tggctccgatgacctataaagatac

SEQ ID NO: 111795 - DNA, 25 bp, Artificial
  probe
  misc_feature (1)..(25): SEQ ID NO: 2502; WAN024CBI_at; Start 178; Stop 202
cacccgagtataatcccattgagaa

SEQ ID NO: 111796 - DNA, 25 bp, Artificial
  probe
  misc_feature (1)..(25): SEQ ID NO: 2502; WAN024CBI_at; Start 207; Stop 231
tgggcttacatcaaaaacatctcag

SEQ ID NO: 111797 - DNA, 25 bp, Artificial
  probe
  misc_feature (1)..(25): SEQ ID NO: 2502; WAN024CBI_at; Start 180; Stop 204
cccgagtataatcccattgagaaaa

SEQ ID NO: 111798 - DNA, 25 bp, Artificial
  probe
  misc_feature (1)..(25): SEQ ID NO: 2502; WAN024CBI_at; Start 30; Stop 54
gacgagtgactttttcgaagcttgc

SEQ ID NO: 111799 - DNA, 25 bp, Artificial
  probe
  misc_feature (1)..(25): SEQ ID NO: 2502; WAN024CBI_at; Start 6; Stop 30
tccgatgacctataaagatacgatg

SEQ ID NO: 111800 - DNA, 25 bp, Artificial
  probe
  misc_feature (1)..(25): SEQ ID NO: 2502; WAN024CBI_at; Start 15; Stop 39
ctataaagatacgatgacgagtgac

SEQ ID NO: 111801 - DNA, 25 bp, Artificial
  probe
  misc_feature (1)..(25): SEQ ID NO: 2502; WAN024CBI_at; Start 129; Stop 153
gaacatgtgtaaggagcagggcata

SEQ ID NO: 111802 - DNA, 25 bp, Artificial
  probe
  misc_feature (1)..(25): SEQ ID NO: 2502; WAN024CBI_at; Start 111; Stop 135
tgcaaggtttcacagaatgaacatg

SEQ ID NO: 111803 - DNA, 25 bp, Artificial
  probe
  misc_feature (1)..(25): SEQ ID NO: 2502; WAN024CBI_at; Start 221; Stop 245
aaacatctcagaataatattgtcaa

SEQ ID NO: 111804 - DNA, 25 bp, Artificial
  probe
  misc_feature (1)..(25): SEQ ID NO: 2502; WAN024CBI_at; Start 154; Stop 178
gactgttaccacttcctacctattc

SEQ ID NO: 111805 - DNA, 25 bp, Artificial
  probe
  misc_feature (1)..(25): SEQ ID NO: 2502; WAN024CBI_at; Start 126; Stop 150
aatgaacatgtgtaaggagcagggc

SEQ ID NO: 111806 - DNA, 25 bp, Artificial
  probe
  misc_feature (1)..(25): SEQ ID NO: 2502; WAN024CBI_at; Start 24; Stop 48
tacgatgacgagtgactttttcgaa

SEQ ID NO: 111807 - DNA, 25 bp, Artificial
  probe
  misc_feature (1)..(25): SEQ ID NO: 2502; WAN024CBI_at; Start 139; Stop 163
aaggagcagggcatagactgttacc

SEQ ID NO: 111808 - DNA, 25 bp, Artificial
  probe
  misc_feature (1)..(25): SEQ ID NO: 2502; WAN024CBI_at; Start 82; Stop 106
gatacaccatcccttatcattatgg

SEQ ID NO: 111809 - DNA, 25 bp, Artificial
  probe
  misc_feature (1)..(25): SEQ ID NO: 2502; WAN024CBI_at; Start 45; Stop 69
cgaagcttgcttccaaaaattctta

SEQ ID NO: 111810 - DNA, 25 bp, Artificial
  probe
  misc_feature (1)..(25): SEQ ID NO: 2502; WAN024CBI_at; Start 164; Stop 188
acttcctacctattcacccgagtat

SEQ ID NO: 111811 - DNA, 25 bp, Artificial
  probe
  misc_feature (1)..(25): SEQ ID NO: 2502; WAN024CBI_at; Start 121; Stop 145
cacagaatgaacatgtgtaaggagc

SEQ ID NO: 111812 - DNA, 25 bp, Artificial
  probe
  misc_feature (1)..(25): SEQ ID NO: 2502; WAN024CBI_at; Start 200; Stop 224
gaaaatatgggcttacatcaaaaac

SEQ ID NO: 111813 - DNA, 25 bp, Artificial
  probe
  misc_feature (1)..(25): SEQ ID NO: 2502; WAN024CBI_at; Start 209; Stop 233
ggcttacatcaaaaacatctcagaa

SEQ ID NO: 111814 - DNA, 25 bp, Artificial
  probe
  misc_feature (1)..(25): SEQ ID NO: 2502; WAN024CBI_at; Start 84; Stop 108
tacaccatcccttatcattatggac

SEQ ID NO: 111815 - DNA, 25 bp, Artificial
  probe
  misc_feature (1)..(25): SEQ ID NO: 2502; WAN024CBI_at; Start 21; Stop 45
agatacgatgacgagtgactttttc

SEQ ID NO: 111816 - DNA, 25 bp, Artificial
  probe
  misc_feature (1)..(25): SEQ ID NO: 2502; WAN024CBI_at; Start 147; Stop 171
gggcatagactgttaccacttccta

SEQ ID NO: 111817 - DNA, 25 bp, Artificial
  probe
  misc_feature (1)..(25): SEQ ID NO: 2502; WAN024CBI_at; Start 231; Stop 255
gaataatattgtcaaattacgatgc

SEQ ID NO: 111818 - DNA, 25 bp, Artificial
  probe
  misc_feature (1)..(25): SEQ ID NO: 2502; WAN024CBI_at; Start 194; Stop 218
cattgagaaaatatgggcttacatc

SEQ ID NO: 111819 - DNA, 25 bp, Artificial
  probe
  misc_feature (1)..(25): SEQ ID NO: 2502; WAN024CBI_at; Start 68; Stop 92
tactacctactttagatacaccatc

SEQ ID NO: 111820 - DNA, 25 bp, Artificial
  probe
  misc_feature (1)..(25): SEQ ID NO: 2502; WAN024CBI_at; Start 174; Stop 198
tattcacccgagtataatcccattg

SEQ ID NO: 111821 - DNA, 25 bp, Artificial
  probe
  misc_feature (1)..(25): SEQ ID NO: 2502; WAN024CBI_at; Start 34; Stop 58
agtgactttttcgaagcttgcttcc

SEQ ID NO: 111822 - DNA, 25 bp, Artificial
  probe
  misc_feature (1)..(25): SEQ ID NO: 2502; WAN024CBI_at; Start 240; Stop 264
tgtcaaattacgatgcttttcttga

SEQ ID NO: 111823 - DNA, 25 bp, Artificial
  probe
  misc_feature (1)..(25): SEQ ID NO: 2502; WAN024CBI_at; Start 52; Stop 76
tgcttccaaaaattcttactaccta

SEQ ID NO: 111824 - DNA, 25 bp, Artificial
  probe
  misc_feature (1)..(25): SEQ ID NO: 2502; WAN024CBI_at; Start 188; Stop 212
taatcccattgagaaaatatgggct

SEQ ID NO: 111825 - DNA, 25 bp, Artificial
  probe
  misc_feature (1)..(25): SEQ ID NO: 2502; WAN024CBI_at; Start 11; Stop 35
tgacctataaagatacgatgacgag

SEQ ID NO: 111826 - DNA, 25 bp, Artificial
  probe
  misc_feature (1)..(25): SEQ ID NO: 2596; WAN024CBJ_at; Start 150; Stop 174
gtcacaaaggtcattttccacaaga

SEQ ID NO: 111827 - DNA, 25 bp, Artificial
  probe
  misc_feature (1)..(25): SEQ ID NO: 2596; WAN024CBJ_at; Start 9; Stop 33
gaattttcgtgtcgtaaatctacta

SEQ ID NO: 111828 - DNA, 25 bp, Artificial
  probe
  misc_feature (1)..(25): SEQ ID NO: 2596; WAN024CBJ_at; Start 121; Stop 145
tcacgaggaggagaaaaagcgagta

SEQ ID NO: 111829 - DNA, 25 bp, Artificial
  probe
  misc_feature (1)..(25): SEQ ID NO: 2596; WAN024CBJ_at; Start 17; Stop 41
gtgtcgtaaatctactatctctaca

SEQ ID NO: 111830 - DNA, 25 bp, Artificial
  probe
  misc_feature (1)..(25): SEQ ID NO: 2596; WAN024CBJ_at; Start 137; Stop 161
aagcgagtagagagtcacaaaggtc

SEQ ID NO: 111831 - DNA, 25 bp, Artificial
  probe
  misc_feature (1)..(25): SEQ ID NO: 2596; WAN024CBJ_at; Start 135; Stop 159
aaaagcgagtagagagtcacaaagg

SEQ ID NO: 111832 - DNA, 25 bp, Artificial
  probe
  misc_feature (1)..(25): SEQ ID NO: 2596; WAN024CBJ_at; Start 190; Stop 214
gttccagtttggcaaatagaagatt

SEQ ID NO: 111833 - DNA, 25 bp, Artificial
  probe
  misc_feature (1)..(25): SEQ ID NO: 2596; WAN024CBJ_at; Start 106; Stop 130
accaaacgacataggtcacgaggag

SEQ ID NO: 111834 - DNA, 25 bp, Artificial
  probe
  misc_feature (1)..(25): SEQ ID NO: 2596; WAN024CBJ_at; Start 115; Stop 139
cataggtcacgaggaggagaaaaag

SEQ ID NO: 111835 - DNA, 25 bp, Artificial
  probe
  misc_feature (1)..(25): SEQ ID NO: 2596; WAN024CBJ_at; Start 155; Stop 179
aaaggtcattttccacaagaacttg

SEQ ID NO: 111836 - DNA, 25 bp, Artificial
  probe
  misc_feature (1)..(25): SEQ ID NO: 2596; WAN024CBJ_at; Start 101; Stop 125
tacaaaccaaacgacataggtcacg

SEQ ID NO: 111837 - DNA, 25 bp, Artificial
  probe
  misc_feature (1)..(25): SEQ ID NO: 2596; WAN024CBJ_at; Start 104; Stop 128
aaaccaaacgacataggtcacgagg

SEQ ID NO: 111838 - DNA, 25 bp, Artificial
  probe
  misc_feature (1)..(25): SEQ ID NO: 2596; WAN024CBJ_at; Start 146; Stop 170
gagagtcacaaaggtcattttccac

SEQ ID NO: 111839 - DNA, 25 bp, Artificial
  probe
  misc_feature (1)..(25): SEQ ID NO: 2596; WAN024CBJ_at; Start 116; Stop 140
ataggtcacgaggaggagaaaaagc

SEQ ID NO: 111840 - DNA, 25 bp, Artificial
  probe
  misc_feature (1)..(25): SEQ ID NO: 2596; WAN024CBJ_at; Start 32; Stop 56
tatctctacattcccaaacaaaaaa

SEQ ID NO: 111841 - DNA, 25 bp, Artificial
  probe
  misc_feature (1)..(25): SEQ ID NO: 2596; WAN024CBJ_at; Start 109; Stop 133
aaacgacataggtcacgaggaggag

SEQ ID NO: 111842 - DNA, 25 bp, Artificial
  probe
  misc_feature (1)..(25): SEQ ID NO: 2596; WAN024CBJ_at; Start 144; Stop 168
tagagagtcacaaaggtcattttcc

SEQ ID NO: 111843 - DNA, 25 bp, Artificial
  probe
  misc_feature (1)..(25): SEQ ID NO: 2596; WAN024CBJ_at; Start 133; Stop 157
gaaaaagcgagtagagagtcacaaa

SEQ ID NO: 111844 - DNA, 25 bp, Artificial
  probe
  misc_feature (1)..(25): SEQ ID NO: 2596; WAN024CBJ_at; Start 157; Stop 181
aggtcattttccacaagaacttggt

SEQ ID NO: 111845 - DNA, 25 bp, Artificial
  probe
  misc_feature (1)..(25): SEQ ID NO: 2596; WAN024CBJ_at; Start 29; Stop 53
tactatctctacattcccaaacaaa

SEQ ID NO: 111846 - DNA, 25 bp, Artificial
  probe
  misc_feature (1)..(25): SEQ ID NO: 2596; WAN024CBJ_at; Start 7; Stop 31
tggaattttcgtgtcgtaaatctac

SEQ ID NO: 111847 - DNA, 25 bp, Artificial
  probe
  misc_feature (1)..(25): SEQ ID NO: 2596; WAN024CBJ_at; Start 22; Stop 46
gtaaatctactatctctacattccc

SEQ ID NO: 111848 - DNA, 25 bp, Artificial
  probe
  misc_feature (1)..(25): SEQ ID NO: 2596; WAN024CBJ_at; Start 152; Stop 176
cacaaaggtcattttccacaagaac

SEQ ID NO: 111849 - DNA, 25 bp, Artificial
  probe
  misc_feature (1)..(25): SEQ ID NO: 2596; WAN024CBJ_at; Start 148; Stop 172
gagtcacaaaggtcattttccacaa

SEQ ID NO: 111850 - DNA, 25 bp, Artificial
  probe
  misc_feature (1)..(25): SEQ ID NO: 2596; WAN024CBJ_at; Start 103; Stop 127
caaaccaaacgacataggtcacgag

SEQ ID NO: 111851 - DNA, 25 bp, Artificial
  probe
  misc_feature (1)..(25): SEQ ID NO: 2596; WAN024CBJ_at; Start 13; Stop 37
tttcgtgtcgtaaatctactatctc

SEQ ID NO: 111852 - DNA, 25 bp, Artificial
  probe
  misc_feature (1)..(25): SEQ ID NO: 2596; WAN024CBJ_at; Start 140; Stop 164
cgagtagagagtcacaaaggtcatt

SEQ ID NO: 111853 - DNA, 25 bp, Artificial
  probe
  misc_feature (1)..(25): SEQ ID NO: 2596; WAN024CBJ_at; Start 139; Stop 163
gcgagtagagagtcacaaaggtcat

SEQ ID NO: 111854 - DNA, 25 bp, Artificial
  probe
  misc_feature (1)..(25): SEQ ID NO: 2596; WAN024CBJ_at; Start 188; Stop 212
tcgttccagtttggcaaatagaaga

SEQ ID NO: 111855 - DNA, 25 bp, Artificial
  probe
  misc_feature (1)..(25): SEQ ID NO: 2596; WAN024CBJ_at; Start 113; Stop 137
gacataggtcacgaggaggagaaaa

SEQ ID NO: 111856 - DNA, 25 bp, Artificial
  probe
  misc_feature (1)..(25): SEQ ID NO: 2596; WAN024CBJ_at; Start 130; Stop 154
ggagaaaaagcgagtagagagtcac

SEQ ID NO: 111857 - DNA, 25 bp, Artificial
  probe
  misc_feature (1)..(25): SEQ ID NO: 2596; WAN024CBJ_at; Start 111; Stop 135
acgacataggtcacgaggaggagaa

SEQ ID NO: 111858 - DNA, 25 bp, Artificial
  probe
  misc_feature (1)..(25): SEQ ID NO: 2596; WAN024CBJ_at; Start 161; Stop 185
cattttccacaagaacttggtttgt

SEQ ID NO: 111859 - DNA, 25 bp, Artificial
  probe
  misc_feature (1)..(25): SEQ ID NO: 2596; WAN024CBJ_at; Start 108; Stop 132
caaacgacataggtcacgaggagga

SEQ ID NO: 111860 - DNA, 25 bp, Artificial
  probe
  misc_feature (1)..(25): SEQ ID NO: 2787; WAN024CBK_at; Start 253; Stop 277
gtagagatagtagatttacgacacg

SEQ ID NO: 111861 - DNA, 25 bp, Artificial
  probe
  misc_feature (1)..(25): SEQ ID NO: 2787; WAN024CBK_at; Start 293; Stop 317
ctatcaagatgaggtggtctttgca

SEQ ID NO: 111862 - DNA, 25 bp, Artificial
  probe
  misc_feature (1)..(25): SEQ ID NO: 2787; WAN024CBK_at; Start 279; Stop 303
aaattccaccccatctatcaagatg

SEQ ID NO: 111863 - DNA, 25 bp, Artificial
  probe
  misc_feature (1)..(25): SEQ ID NO: 2787; WAN024CBK_at; Start 283; Stop 307
tccaccccatctatcaagatgaggt

SEQ ID NO: 111864 - DNA, 25 bp, Artificial
  probe
  misc_feature (1)..(25): SEQ ID NO: 2787; WAN024CBK_at; Start 256; Stop 280
gagatagtagatttacgacacgaaa

SEQ ID NO: 111865 - DNA, 25 bp, Artificial
  probe
  misc_feature (1)..(25): SEQ ID NO: 2787; WAN024CBK_at; Start 292; Stop 316
tctatcaagatgaggtggtctttgc

SEQ ID NO: 111866 - DNA, 25 bp, Artificial
  probe
  misc_feature (1)..(25): SEQ ID NO: 2787; WAN024CBK_at; Start 263; Stop 287
tagatttacgacacgaaaattccac

SEQ ID NO: 111867 - DNA, 25 bp, Artificial
  probe
  misc_feature (1)..(25): SEQ ID NO: 2787; WAN024CBK_at; Start 282; Stop 306
ttccaccccatctatcaagatgagg

SEQ ID NO: 111868 - DNA, 25 bp, Artificial
  probe
  misc_feature (1)..(25): SEQ ID NO: 2787; WAN024CBK_at; Start 272; Stop 296
gacacgaaaattccaccccatctat

SEQ ID NO: 111869 - DNA, 25 bp, Artificial
  probe
  misc_feature (1)..(25): SEQ ID NO: 2787; WAN024CBK_at; Start 252; Stop 276
tgtagagatagtagatttacgacac

SEQ ID NO: 111870 - DNA, 25 bp, Artificial
  probe
  misc_feature (1)..(25): SEQ ID NO: 2787; WAN024CBK_at; Start 299; Stop 323
agatgaggtggtctttgcatttttc

SEQ ID NO: 111871 - DNA, 25 bp, Artificial
  probe
  misc_feature (1)..(25): SEQ ID NO: 2787; WAN024CBK_at; Start 257; Stop 281
agatagtagatttacgacacgaaaa

SEQ ID NO: 111872 - DNA, 25 bp, Artificial
  probe
  misc_feature (1)..(25): SEQ ID NO: 2787; WAN024CBK_at; Start 300; Stop 324
gatgaggtggtctttgcatttttct

SEQ ID NO: 111873 - DNA, 25 bp, Artificial
  probe
  misc_feature (1)..(25): SEQ ID NO: 2787; WAN024CBK_at; Start 255; Stop 279
agagatagtagatttacgacacgaa

SEQ ID NO: 111874 - DNA, 25 bp, Artificial
  probe
  misc_feature (1)..(25): SEQ ID NO: 2787; WAN024CBK_at; Start 170; Stop 194
tgacctatgtcgtttggtttgtatt

SEQ ID NO: 111875 - DNA, 25 bp, Artificial
  probe
  misc_feature (1)..(25): SEQ ID NO: 2787; WAN024CBK_at; Start 296; Stop 320
tcaagatgaggtggtctttgcattt

SEQ ID NO: 111876 - DNA, 25 bp, Artificial
  probe
  misc_feature (1)..(25): SEQ ID NO: 2787; WAN024CBK_at; Start 242; Stop 266
tgtttgggaatgtagagatagtaga

SEQ ID NO: 111877 - DNA, 25 bp, Artificial
  probe
  misc_feature (1)..(25): SEQ ID NO: 2787; WAN024CBK_at; Start 281; Stop 305
attccaccccatctatcaagatgag

SEQ ID NO: 111878 - DNA, 25 bp, Artificial
  probe
  misc_feature (1)..(25): SEQ ID NO: 2787; WAN024CBK_at; Start 289; Stop 313
ccatctatcaagatgaggtggtctt

SEQ ID NO: 111879 - DNA, 25 bp, Artificial
  probe
  misc_feature (1)..(25): SEQ ID NO: 2787; WAN024CBK_at; Start 290; Stop 314
catctatcaagatgaggtggtcttt

SEQ ID NO: 111880 - DNA, 25 bp, Artificial
  probe
  misc_feature (1)..(25): SEQ ID NO: 2787; WAN024CBK_at; Start 248; Stop 272
ggaatgtagagatagtagatttacg

SEQ ID NO: 111881 - DNA, 25 bp, Artificial
  probe
  misc_feature (1)..(25): SEQ ID NO: 2787; WAN024CBK_at; Start 278; Stop 302
aaaattccaccccatctatcaagat

SEQ ID NO: 111882 - DNA, 25 bp, Artificial
  probe
  misc_feature (1)..(25): SEQ ID NO: 2787; WAN024CBK_at; Start 297; Stop 321
caagatgaggtggtctttgcatttt

SEQ ID NO: 111883 - DNA, 25 bp, Artificial
  probe
  misc_feature (1)..(25): SEQ ID NO: 2787; WAN024CBK_at; Start 285; Stop 309
caccccatctatcaagatgaggtgg

SEQ ID NO: 111884 - DNA, 25 bp, Artificial
  probe
  misc_feature (1)..(25): SEQ ID NO: 2787; WAN024CBK_at; Start 294; Stop 318
tatcaagatgaggtggtctttgcat

SEQ ID NO: 111885 - DNA, 25 bp, Artificial
  probe
  misc_feature (1)..(25): SEQ ID NO: 2787; WAN024CBK_at; Start 254; Stop 278
tagagatagtagatttacgacacga

SEQ ID NO: 111886 - DNA, 25 bp, Artificial
  probe
  misc_feature (1)..(25): SEQ ID NO: 2787; WAN024CBK_at; Start 288; Stop 312
cccatctatcaagatgaggtggtct

SEQ ID NO: 111887 - DNA, 25 bp, Artificial
  probe
  misc_feature (1)..(25): SEQ ID NO: 2787; WAN024CBK_at; Start 287; Stop 311
ccccatctatcaagatgaggtggtc

SEQ ID NO: 111888 - DNA, 25 bp, Artificial
  probe
  misc_feature (1)..(25): SEQ ID NO: 2787; WAN024CBK_at; Start 302; Stop 326
tgaggtggtctttgcatttttctaa

SEQ ID NO: 111889 - DNA, 25 bp, Artificial
  probe
  misc_feature (1)..(25): SEQ ID NO: 2787; WAN024CBK_at; Start 275; Stop 299
acgaaaattccaccccatctatcaa

SEQ ID NO: 111890 - DNA, 25 bp, Artificial
  probe
  misc_feature (1)..(25): SEQ ID NO: 2787; WAN024CBK_at; Start 260; Stop 284
tagtagatttacgacacgaaaattc

SEQ ID NO: 111891 - DNA, 25 bp, Artificial
  probe
  misc_feature (1)..(25): SEQ ID NO: 2787; WAN024CBK_at; Start 238; Stop 262
tttttgtttgggaatgtagagatag

SEQ ID NO: 111892 - DNA, 25 bp, Artificial
  probe
  misc_feature (1)..(25): SEQ ID NO: 2787; WAN024CBK_at; Start 262; Stop 286
gtagatttacgacacgaaaattcca

SEQ ID NO: 111893 - DNA, 25 bp, Artificial
  probe
  misc_feature (1)..(25): SEQ ID NO: 2787; WAN024CBK_at; Start 258; Stop 282
gatagtagatttacgacacgaaaat

SEQ ID NO: 111894 - DNA, 25 bp, Artificial
  probe
  misc_feature (1)..(25): SEQ ID NO: 7688; WAN024CBL_at; Start 97; Stop 121
acgatgcaacaacttattattttag

SEQ ID NO: 111895 - DNA, 25 bp, Artificial
  probe
  misc_feature (1)..(25): SEQ ID NO: 7688; WAN024CBL_at; Start 85; Stop 109
aaatcgctagctacgatgcaacaac

SEQ ID NO: 111896 - DNA, 25 bp, Artificial
  probe
  misc_feature (1)..(25): SEQ ID NO: 7688; WAN024CBL_at; Start 40; Stop 64
ttatcctcaaaaaatatgacgtcca

SEQ ID NO: 111897 - DNA, 25 bp, Artificial
  probe
  misc_feature (1)..(25): SEQ ID NO: 7688; WAN024CBL_at; Start 92; Stop 116
tagctacgatgcaacaacttattat

SEQ ID NO: 111898 - DNA, 25 bp, Artificial
  probe
  misc_feature (1)..(25): SEQ ID NO: 7688; WAN024CBL_at; Start 86; Stop 110
aatcgctagctacgatgcaacaact

SEQ ID NO: 111899 - DNA, 25 bp, Artificial
  probe
  misc_feature (1)..(25): SEQ ID NO: 7688; WAN024CBL_at; Start 54; Stop 78
tatgacgtccaatttcatagtattt

SEQ ID NO: 111900 - DNA, 25 bp, Artificial
  probe
  misc_feature (1)..(25): SEQ ID NO: 7688; WAN024CBL_at; Start 39; Stop 63
tttatcctcaaaaaatatgacgtcc

SEQ ID NO: 111901 - DNA, 25 bp, Artificial
  probe
  misc_feature (1)..(25): SEQ ID NO: 7688; WAN024CBL_at; Start 87; Stop 111
atcgctagctacgatgcaacaactt

SEQ ID NO: 111902 - DNA, 25 bp, Artificial
  probe
  misc_feature (1)..(25): SEQ ID NO: 7688; WAN024CBL_at; Start 74; Stop 98
tatttttagataaatcgctagctac

SEQ ID NO: 111903 - DNA, 25 bp, Artificial
  probe
  misc_feature (1)..(25): SEQ ID NO: 7688; WAN024CBL_at; Start 57; Stop 81
gacgtccaatttcatagtattttta

SEQ ID NO: 111904 - DNA, 25 bp, Artificial
  probe
  misc_feature (1)..(25): SEQ ID NO: 7688; WAN024CBL_at; Start 89; Stop 113
cgctagctacgatgcaacaacttat

SEQ ID NO: 111905 - DNA, 25 bp, Artificial
  probe
  misc_feature (1)..(25): SEQ ID NO: 7688; WAN024CBL_at; Start 76; Stop 100
tttttagataaatcgctagctacga

SEQ ID NO: 111906 - DNA, 25 bp, Artificial
  probe
  misc_feature (1)..(25): SEQ ID NO: 7688; WAN024CBL_at; Start 41; Stop 65
tatcctcaaaaaatatgacgtccaa

SEQ ID NO: 111907 - DNA, 25 bp, Artificial
  probe
  misc_feature (1)..(25): SEQ ID NO: 7688; WAN024CBL_at; Start 43; Stop 67
tcctcaaaaaatatgacgtccaatt

SEQ ID NO: 111908 - DNA, 25 bp, Artificial
  probe
  misc_feature (1)..(25): SEQ ID NO: 7688; WAN024CBL_at; Start 81; Stop 105
agataaatcgctagctacgatgcaa

SEQ ID NO: 111909 - DNA, 25 bp, Artificial
  probe
  misc_feature (1)..(25): SEQ ID NO: 7688; WAN024CBL_at; Start 90; Stop 114
gctagctacgatgcaacaacttatt

SEQ ID NO: 111910 - DNA, 25 bp, Artificial
  probe
  misc_feature (1)..(25): SEQ ID NO: 7688; WAN024CBL_at; Start 44; Stop 68
cctcaaaaaatatgacgtccaattt

SEQ ID NO: 111911 - DNA, 25 bp, Artificial
  probe
  misc_feature (1)..(25): SEQ ID NO: 7688; WAN024CBL_at; Start 2; Stop 26
tgtctcttcgtaaacctaaaactgc

SEQ ID NO: 111912 - DNA, 25 bp, Artificial
  probe
  misc_feature (1)..(25): SEQ ID NO: 7688; WAN024CBL_at; Start 46; Stop 70
tcaaaaaatatgacgtccaatttca

SEQ ID NO: 111913 - DNA, 25 bp, Artificial
  probe
  misc_feature (1)..(25): SEQ ID NO: 7688; WAN024CBL_at; Start 91; Stop 115
ctagctacgatgcaacaacttatta

SEQ ID NO: 111914 - DNA, 25 bp, Artificial
  probe
  misc_feature (1)..(25): SEQ ID NO: 7688; WAN024CBL_at; Start 49; Stop 73
aaaaatatgacgtccaatttcatag

SEQ ID NO: 111915 - DNA, 25 bp, Artificial
  probe
  misc_feature (1)..(25): SEQ ID NO: 7688; WAN024CBL_at; Start 94; Stop 118
gctacgatgcaacaacttattattt

SEQ ID NO: 111916 - DNA, 25 bp, Artificial
  probe
  misc_feature (1)..(25): SEQ ID NO: 7688; WAN024CBL_at; Start 82; Stop 106
gataaatcgctagctacgatgcaac

SEQ ID NO: 111917 - DNA, 25 bp, Artificial
  probe
  misc_feature (1)..(25): SEQ ID NO: 7688; WAN024CBL_at; Start 25; Stop 49
gcggatcttttatttttatcctcaa

SEQ ID NO: 111918 - DNA, 25 bp, Artificial
  probe
  misc_feature (1)..(25): SEQ ID NO: 7688; WAN024CBL_at; Start 83; Stop 107
ataaatcgctagctacgatgcaaca

SEQ ID NO: 111919 - DNA, 25 bp, Artificial
  probe
  misc_feature (1)..(25): SEQ ID NO: 7688; WAN024CBL_at; Start 80; Stop 104
tagataaatcgctagctacgatgca

SEQ ID NO: 111920 - DNA, 25 bp, Artificial
  probe
  misc_feature (1)..(25): SEQ ID NO: 7688; WAN024CBL_at; Start 79; Stop 103
ttagataaatcgctagctacgatgc

SEQ ID NO: 111921 - DNA, 25 bp, Artificial
  probe
  misc_feature (1)..(25): SEQ ID NO: 7688; WAN024CBL_at; Start 84; Stop 108
taaatcgctagctacgatgcaacaa

SEQ ID NO: 111922 - DNA, 25 bp, Artificial
  probe
  misc_feature (1)..(25): SEQ ID NO: 7688; WAN024CBL_at; Start 99; Stop 123
gatgcaacaacttattattttagaa

SEQ ID NO: 111923 - DNA, 25 bp, Artificial
  probe
  misc_feature (1)..(25): SEQ ID NO: 7688; WAN024CBL_at; Start 75; Stop 99
atttttagataaatcgctagctacg

SEQ ID NO: 111924 - DNA, 25 bp, Artificial
  probe
  misc_feature (1)..(25): SEQ ID NO: 7688; WAN024CBL_at; Start 88; Stop 112
tcgctagctacgatgcaacaactta

SEQ ID NO: 111925 - DNA, 25 bp, Artificial
  probe
  misc_feature (1)..(25): SEQ ID NO: 7688; WAN024CBL_at; Start 59; Stop 83
cgtccaatttcatagtatttttaga

SEQ ID NO: 111926 - DNA, 25 bp, Artificial
  probe
  misc_feature (1)..(25): SEQ ID NO: 7688; WAN024CBL_at; Start 77; Stop 101
ttttagataaatcgctagctacgat

SEQ ID NO: 111927 - DNA, 25 bp, Artificial
  probe
  misc_feature (1)..(25): SEQ ID NO: 7688; WAN024CBL_at; Start 51; Stop 75
aaatatgacgtccaatttcatagta

SEQ ID NO: 111928 - DNA, 25 bp, Artificial
  probe
  misc_feature (1)..(25): SEQ ID NO: 4722; WAN024CBM_at; Start 40; Stop 64
aagttgttgcatcgtagctaaggat

SEQ ID NO: 111929 - DNA, 25 bp, Artificial
  probe
  misc_feature (1)..(25): SEQ ID NO: 4722; WAN024CBM_at; Start 138; Stop 162
tacgaagagacaaaagcggagtatt

SEQ ID NO: 111930 - DNA, 25 bp, Artificial
  probe
  misc_feature (1)..(25): SEQ ID NO: 4722; WAN024CBM_at; Start 200; Stop 224
tatgctaaagttcgtaaaacagatg

SEQ ID NO: 111931 - DNA, 25 bp, Artificial
  probe
  misc_feature (1)..(25): SEQ ID NO: 4722; WAN024CBM_at; Start 184; Stop 208
tacaagcgctaagaaatatgctaaa

SEQ ID NO: 111932 - DNA, 25 bp, Artificial
  probe
  misc_feature (1)..(25): SEQ ID NO: 4722; WAN024CBM_at; Start 181; Stop 205
ttttacaagcgctaagaaatatgct

SEQ ID NO: 111933 - DNA, 25 bp, Artificial
  probe
  misc_feature (1)..(25): SEQ ID NO: 4722; WAN024CBM_at; Start 42; Stop 66
gttgttgcatcgtagctaaggattt

SEQ ID NO: 111934 - DNA, 25 bp, Artificial
  probe
  misc_feature (1)..(25): SEQ ID NO: 4722; WAN024CBM_at; Start 191; Stop 215
gctaagaaatatgctaaagttcgta

SEQ ID NO: 111935 - DNA, 25 bp, Artificial
  probe
  misc_feature (1)..(25): SEQ ID NO: 4722; WAN024CBM_at; Start 68; Stop 92
tctaaaaatactatgaaattggacg

SEQ ID NO: 111936 - DNA, 25 bp, Artificial
  probe
  misc_feature (1)..(25): SEQ ID NO: 4722; WAN024CBM_at; Start 207; Stop 231
aagttcgtaaaacagatgtgaaaga

SEQ ID NO: 111937 - DNA, 25 bp, Artificial
  probe
  misc_feature (1)..(25): SEQ ID NO: 4722; WAN024CBM_at; Start 186; Stop 210
caagcgctaagaaatatgctaaagt

SEQ ID NO: 111938 - DNA, 25 bp, Artificial
  probe
  misc_feature (1)..(25): SEQ ID NO: 4722; WAN024CBM_at; Start 189; Stop 213
gcgctaagaaatatgctaaagttcg

SEQ ID NO: 111939 - DNA, 25 bp, Artificial
  probe
  misc_feature (1)..(25): SEQ ID NO: 4722; WAN024CBM_at; Start 48; Stop 72
gcatcgtagctaaggatttatctaa

SEQ ID NO: 111940 - DNA, 25 bp, Artificial
  probe
  misc_feature (1)..(25): SEQ ID NO: 4722; WAN024CBM_at; Start 86; Stop 110
ttggacgtcatattttttgaggata

SEQ ID NO: 111941 - DNA, 25 bp, Artificial
  probe
  misc_feature (1)..(25): SEQ ID NO: 4722; WAN024CBM_at; Start 51; Stop 75
tcgtagctaaggatttatctaaaaa

SEQ ID NO: 111942 - DNA, 25 bp, Artificial
  probe
  misc_feature (1)..(25): SEQ ID NO: 4722; WAN024CBM_at; Start 218; Stop 242
acagatgtgaaagaaatgaaatggc

SEQ ID NO: 111943 - DNA, 25 bp, Artificial
  probe
  misc_feature (1)..(25): SEQ ID NO: 4722; WAN024CBM_at; Start 202; Stop 226
tgctaaagttcgtaaaacagatgtg

SEQ ID NO: 111944 - DNA, 25 bp, Artificial
  probe
  misc_feature (1)..(25): SEQ ID NO: 4722; WAN024CBM_at; Start 223; Stop 247
tgtgaaagaaatgaaatggctataa

SEQ ID NO: 111945 - DNA, 25 bp, Artificial
  probe
  misc_feature (1)..(25): SEQ ID NO: 4722; WAN024CBM_at; Start 54; Stop 78
tagctaaggatttatctaaaaatac

SEQ ID NO: 111946 - DNA, 25 bp, Artificial
  probe
  misc_feature (1)..(25): SEQ ID NO: 4722; WAN024CBM_at; Start 72; Stop 96
aaaatactatgaaattggacgtcat

SEQ ID NO: 111947 - DNA, 25 bp, Artificial
  probe
  misc_feature (1)..(25): SEQ ID NO: 4722; WAN024CBM_at; Start 76; Stop 100
tactatgaaattggacgtcatattt

SEQ ID NO: 111948 - DNA, 25 bp, Artificial
  probe
  misc_feature (1)..(25): SEQ ID NO: 4722; WAN024CBM_at; Start 45; Stop 69
gttgcatcgtagctaaggatttatc

SEQ ID NO: 111949 - DNA, 25 bp, Artificial
  probe
  misc_feature (1)..(25): SEQ ID NO: 4722; WAN024CBM_at; Start 221; Stop 245
gatgtgaaagaaatgaaatggctat

SEQ ID NO: 111950 - DNA, 25 bp, Artificial
  probe
  misc_feature (1)..(25): SEQ ID NO: 4722; WAN024CBM_at; Start 125; Stop 149
gcagttttaggtttacgaagagaca

SEQ ID NO: 111951 - DNA, 25 bp, Artificial
  probe
  misc_feature (1)..(25): SEQ ID NO: 4722; WAN024CBM_at; Start 219; Stop 243
cagatgtgaaagaaatgaaatggct

SEQ ID NO: 111952 - DNA, 25 bp, Artificial
  probe
  misc_feature (1)..(25): SEQ ID NO: 4722; WAN024CBM_at; Start 212; Stop 236
cgtaaaacagatgtgaaagaaatga

SEQ ID NO: 111953 - DNA, 25 bp, Artificial
  probe
  misc_feature (1)..(25): SEQ ID NO: 4722; WAN024CBM_at; Start 136; Stop 160
tttacgaagagacaaaagcggagta

SEQ ID NO: 111954 - DNA, 25 bp, Artificial
  probe
  misc_feature (1)..(25): SEQ ID NO: 4722; WAN024CBM_at; Start 204; Stop 228
ctaaagttcgtaaaacagatgtgaa

SEQ ID NO: 111955 - DNA, 25 bp, Artificial
  probe
  misc_feature (1)..(25): SEQ ID NO: 4722; WAN024CBM_at; Start 176; Stop 200
ctacattttacaagcgctaagaaat

SEQ ID NO: 111956 - DNA, 25 bp, Artificial
  probe
  misc_feature (1)..(25): SEQ ID NO: 4722; WAN024CBM_at; Start 196; Stop 220
gaaatatgctaaagttcgtaaaaca

SEQ ID NO: 111957 - DNA, 25 bp, Artificial
  probe
  misc_feature (1)..(25): SEQ ID NO: 4722; WAN024CBM_at; Start 84; Stop 108
aattggacgtcatattttttgagga

SEQ ID NO: 111958 - DNA, 25 bp, Artificial
  probe
  misc_feature (1)..(25): SEQ ID NO: 4722; WAN024CBM_at; Start 141; Stop 165
gaagagacaaaagcggagtatttaa

SEQ ID NO: 111959 - DNA, 25 bp, Artificial
  probe
  misc_feature (1)..(25): SEQ ID NO: 4722; WAN024CBM_at; Start 70; Stop 94
taaaaatactatgaaattggacgtc

SEQ ID NO: 111960 - DNA, 25 bp, Artificial
  probe
  misc_feature (1)..(25): SEQ ID NO: 4722; WAN024CBM_at; Start 39; Stop 63
caagttgttgcatcgtagctaagga

SEQ ID NO: 111961 - DNA, 25 bp, Artificial
  probe
  misc_feature (1)..(25): SEQ ID NO: 4722; WAN024CBM_at; Start 140; Stop 164
cgaagagacaaaagcggagtattta

SEQ ID NO: 111962 - DNA, 25 bp, Artificial
  probe
  misc_feature (1)..(25): SEQ ID NO: 7664; WAN024CBN_at; Start 176; Stop 200
aaaaaatgattagtttacgtatcat

SEQ ID NO: 111963 - DNA, 25 bp, Artificial
  probe
  misc_feature (1)..(25): SEQ ID NO: 7664; WAN024CBN_at; Start 132; Stop 156
gacatgcaactctagccacaagaca

SEQ ID NO: 111964 - DNA, 25 bp, Artificial
  probe
  misc_feature (1)..(25): SEQ ID NO: 7664; WAN024CBN_at; Start 62; Stop 86
aaaaagcaagactcatactaatcac

SEQ ID NO: 111965 - DNA, 25 bp, Artificial
  probe
  misc_feature (1)..(25): SEQ ID NO: 7664; WAN024CBN_at; Start 122; Stop 146
tattcactaggacatgcaactctag

SEQ ID NO: 111966 - DNA, 25 bp, Artificial
  probe
  misc_feature (1)..(25): SEQ ID NO: 7664; WAN024CBN_at; Start 129; Stop 153
taggacatgcaactctagccacaag

SEQ ID NO: 111967 - DNA, 25 bp, Artificial
  probe
  misc_feature (1)..(25): SEQ ID NO: 7664; WAN024CBN_at; Start 51; Stop 75
tatcaaaacaaaaaaagcaagactc

SEQ ID NO: 111968 - DNA, 25 bp, Artificial
  probe
  misc_feature (1)..(25): SEQ ID NO: 7664; WAN024CBN_at; Start 134; Stop 158
catgcaactctagccacaagacaaa

SEQ ID NO: 111969 - DNA, 25 bp, Artificial
  probe
  misc_feature (1)..(25): SEQ ID NO: 7664; WAN024CBN_at; Start 126; Stop 150
cactaggacatgcaactctagccac

SEQ ID NO: 111970 - DNA, 25 bp, Artificial
  probe
  misc_feature (1)..(25): SEQ ID NO: 7664; WAN024CBN_at; Start 120; Stop 144
gttattcactaggacatgcaactct

SEQ ID NO: 111971 - DNA, 25 bp, Artificial
  probe
  misc_feature (1)..(25): SEQ ID NO: 7664; WAN024CBN_at; Start 130; Stop 154
aggacatgcaactctagccacaaga

SEQ ID NO: 111972 - DNA, 25 bp, Artificial
  probe
  misc_feature (1)..(25): SEQ ID NO: 7664; WAN024CBN_at; Start 19; Stop 43
gcgtatagtatgtctaaaactattt

SEQ ID NO: 111973 - DNA, 25 bp, Artificial
  probe
  misc_feature (1)..(25): SEQ ID NO: 7664; WAN024CBN_at; Start 117; Stop 141
taagttattcactaggacatgcaac

SEQ ID NO: 111974 - DNA, 25 bp, Artificial
  probe
  misc_feature (1)..(25): SEQ ID NO: 7664; WAN024CBN_at; Start 15; Stop 39
caatgcgtatagtatgtctaaaact

SEQ ID NO: 111975 - DNA, 25 bp, Artificial
  probe
  misc_feature (1)..(25): SEQ ID NO: 7664; WAN024CBN_at; Start 73; Stop 97
ctcatactaatcacaaaatcaaggg

SEQ ID NO: 111976 - DNA, 25 bp, Artificial
  probe
  misc_feature (1)..(25): SEQ ID NO: 7664; WAN024CBN_at; Start 96; Stop 120
gggagattctagattcaatagtaag

SEQ ID NO: 111977 - DNA, 25 bp, Artificial
  probe
  misc_feature (1)..(25): SEQ ID NO: 7664; WAN024CBN_at; Start 150; Stop 174
caagacaaaaagagggagcattaat

SEQ ID NO: 111978 - DNA, 25 bp, Artificial
  probe
  misc_feature (1)..(25): SEQ ID NO: 7664; WAN024CBN_at; Start 194; Stop 218
gtatcataattttacagtgtcctta

SEQ ID NO: 111979 - DNA, 25 bp, Artificial
  probe
  misc_feature (1)..(25): SEQ ID NO: 7664; WAN024CBN_at; Start 142; Stop 166
tctagccacaagacaaaaagaggga

SEQ ID NO: 111980 - DNA, 25 bp, Artificial
  probe
  misc_feature (1)..(25): SEQ ID NO: 7664; WAN024CBN_at; Start 124; Stop 148
ttcactaggacatgcaactctagcc

SEQ ID NO: 111981 - DNA, 25 bp, Artificial
  probe
  misc_feature (1)..(25): SEQ ID NO: 7664; WAN024CBN_at; Start 148; Stop 172
cacaagacaaaaagagggagcatta

SEQ ID NO: 111982 - DNA, 25 bp, Artificial
  probe
  misc_feature (1)..(25): SEQ ID NO: 7664; WAN024CBN_at; Start 147; Stop 171
ccacaagacaaaaagagggagcatt

SEQ ID NO: 111983 - DNA, 25 bp, Artificial
  probe
  misc_feature (1)..(25): SEQ ID NO: 7664; WAN024CBN_at; Start 6; Stop 30
caaatctttcaatgcgtatagtatg

SEQ ID NO: 111984 - DNA, 25 bp, Artificial
  probe
  misc_feature (1)..(25): SEQ ID NO: 7664; WAN024CBN_at; Start 213; Stop 237
tccttatcattttcttaattttgga

SEQ ID NO: 111985 - DNA, 25 bp, Artificial
  probe
  misc_feature (1)..(25): SEQ ID NO: 7664; WAN024CBN_at; Start 10; Stop 34
tctttcaatgcgtatagtatgtcta

SEQ ID NO: 111986 - DNA, 25 bp, Artificial
  probe
  misc_feature (1)..(25): SEQ ID NO: 7664; WAN024CBN_at; Start 2; Stop 26
tgtacaaatctttcaatgcgtatag

SEQ ID NO: 111987 - DNA, 25 bp, Artificial
  probe
  misc_feature (1)..(25): SEQ ID NO: 7664; WAN024CBN_at; Start 67; Stop 91
gcaagactcatactaatcacaaaat

SEQ ID NO: 111988 - DNA, 25 bp, Artificial
  probe
  misc_feature (1)..(25): SEQ ID NO: 7664; WAN024CBN_at; Start 206; Stop 230
tacagtgtccttatcattttcttaa

SEQ ID NO: 111989 - DNA, 25 bp, Artificial
  probe
  misc_feature (1)..(25): SEQ ID NO: 7664; WAN024CBN_at; Start 144; Stop 168
tagccacaagacaaaaagagggagc

SEQ ID NO: 111990 - DNA, 25 bp, Artificial
  probe
  misc_feature (1)..(25): SEQ ID NO: 7664; WAN024CBN_at; Start 191; Stop 215
tacgtatcataattttacagtgtcc

SEQ ID NO: 111991 - DNA, 25 bp, Artificial
  probe
  misc_feature (1)..(25): SEQ ID NO: 7664; WAN024CBN_at; Start 137; Stop 161
gcaactctagccacaagacaaaaag

SEQ ID NO: 111992 - DNA, 25 bp, Artificial
  probe
  misc_feature (1)..(25): SEQ ID NO: 7664; WAN024CBN_at; Start 114; Stop 138
tagtaagttattcactaggacatgc

SEQ ID NO: 111993 - DNA, 25 bp, Artificial
  probe
  misc_feature (1)..(25): SEQ ID NO: 7664; WAN024CBN_at; Start 111; Stop 135
caatagtaagttattcactaggaca

SEQ ID NO: 111994 - DNA, 25 bp, Artificial
  probe
  misc_feature (1)..(25): SEQ ID NO: 7664; WAN024CBN_at; Start 83; Stop 107
tcacaaaatcaaggggagattctag

SEQ ID NO: 111995 - DNA, 25 bp, Artificial
  probe
  misc_feature (1)..(25): SEQ ID NO: 7664; WAN024CBN_at; Start 153; Stop 177
gacaaaaagagggagcattaataaa

SEQ ID NO: 111996 - DNA, 25 bp, Artificial
  probe
  misc_feature (1)..(25): SEQ ID NO: 7522; WAN024CBO_at; Start 4; Stop 28
attgattctgatgaggtgtatccta

SEQ ID NO: 111997 - DNA, 25 bp, Artificial
  probe
  misc_feature (1)..(25): SEQ ID NO: 7522; WAN024CBO_at; Start 34; Stop 58
atcaaccttgttggaccagttgtta

SEQ ID NO: 111998 - DNA, 25 bp, Artificial
  probe
  misc_feature (1)..(25): SEQ ID NO: 7522; WAN024CBO_at; Start 5; Stop 29
ttgattctgatgaggtgtatcctaa

SEQ ID NO: 111999 - DNA, 25 bp, Artificial
  probe
  misc_feature (1)..(25): SEQ ID NO: 7522; WAN024CBO_at; Start 13; Stop 37
gatgaggtgtatcctaattttatca

SEQ ID NO: 112000 - DNA, 25 bp, Artificial
  probe
  misc_feature (1)..(25): SEQ ID NO: 7522; WAN024CBO_at; Start 43; Stop 67
gttggaccagttgttattgttacta

SEQ ID NO: 112001 - DNA, 25 bp, Artificial
  probe
  misc_feature (1)..(25): SEQ ID NO: 7522; WAN024CBO_at; Start 27; Stop 51
taattttatcaaccttgttggacca

SEQ ID NO: 112002 - DNA, 25 bp, Artificial
  probe
  misc_feature (1)..(25): SEQ ID NO: 7522; WAN024CBO_at; Start 50; Stop 74
cagttgttattgttactaatagaca

SEQ ID NO: 112003 - DNA, 25 bp, Artificial
  probe
  misc_feature (1)..(25): SEQ ID NO: 7522; WAN024CBO_at; Start 10; Stop 34
tctgatgaggtgtatcctaatttta

SEQ ID NO: 112004 - DNA, 25 bp, Artificial
  probe
  misc_feature (1)..(25): SEQ ID NO: 7522; WAN024CBO_at; Start 29; Stop 53
attttatcaaccttgttggaccagt

SEQ ID NO: 112005 - DNA, 25 bp, Artificial
  probe
  misc_feature (1)..(25): SEQ ID NO: 7522; WAN024CBO_at; Start 22; Stop 46
tatcctaattttatcaaccttgttg

SEQ ID NO: 112006 - DNA, 25 bp, Artificial
  probe
  misc_feature (1)..(25): SEQ ID NO: 7522; WAN024CBO_at; Start 32; Stop 56
ttatcaaccttgttggaccagttgt

SEQ ID NO: 112007 - DNA, 25 bp, Artificial
  probe
  misc_feature (1)..(25): SEQ ID NO: 7522; WAN024CBO_at; Start 2; Stop 26
tgattgattctgatgaggtgtatcc

SEQ ID NO: 112008 - DNA, 25 bp, Artificial
  probe
  misc_feature (1)..(25): SEQ ID NO: 7522; WAN024CBO_at; Start 19; Stop 43
gtgtatcctaattttatcaaccttg

SEQ ID NO: 112009 - DNA, 25 bp, Artificial
  probe
  misc_feature (1)..(25): SEQ ID NO: 7522; WAN024CBO_at; Start 31; Stop 55
tttatcaaccttgttggaccagttg

SEQ ID NO: 112010 - DNA, 25 bp, Artificial
  probe
  misc_feature (1)..(25): SEQ ID NO: 7522; WAN024CBO_at; Start 24; Stop 48
tcctaattttatcaaccttgttgga

SEQ ID NO: 112011 - DNA, 25 bp, Artificial
  probe
  misc_feature (1)..(25): SEQ ID NO: 7522; WAN024CBO_at; Start 40; Stop 64
cttgttggaccagttgttattgtta

SEQ ID NO: 112012 - DNA, 25 bp, Artificial
  probe
  misc_feature (1)..(25): SEQ ID NO: 7522; WAN024CBO_at; Start 46; Stop 70
ggaccagttgttattgttactaata

SEQ ID NO: 112013 - DNA, 25 bp, Artificial
  probe
  misc_feature (1)..(25): SEQ ID NO: 7522; WAN024CBO_at; Start 38; Stop 62
accttgttggaccagttgttattgt

SEQ ID NO: 112014 - DNA, 25 bp, Artificial
  probe
  misc_feature (1)..(25): SEQ ID NO: 7522; WAN024CBO_at; Start 7; Stop 31
gattctgatgaggtgtatcctaatt

SEQ ID NO: 112015 - DNA, 25 bp, Artificial
  probe
  misc_feature (1)..(25): SEQ ID NO: 7522; WAN024CBO_at; Start 47; Stop 71
gaccagttgttattgttactaatag

SEQ ID NO: 112016 - DNA, 25 bp, Artificial
  probe
  misc_feature (1)..(25): SEQ ID NO: 7522; WAN024CBO_at; Start 37; Stop 61
aaccttgttggaccagttgttattg

SEQ ID NO: 112017 - DNA, 25 bp, Artificial
  probe
  misc_feature (1)..(25): SEQ ID NO: 7522; WAN024CBO_at; Start 35; Stop 59
tcaaccttgttggaccagttgttat

SEQ ID NO: 112018 - DNA, 25 bp, Artificial
  probe
  misc_feature (1)..(25): SEQ ID NO: 7522; WAN024CBO_at; Start 28; Stop 52
aattttatcaaccttgttggaccag

SEQ ID NO: 112019 - DNA, 25 bp, Artificial
  probe
  misc_feature (1)..(25): SEQ ID NO: 7522; WAN024CBO_at; Start 33; Stop 57
tatcaaccttgttggaccagttgtt

SEQ ID NO: 112020 - DNA, 25 bp, Artificial
  probe
  misc_feature (1)..(25): SEQ ID NO: 7522; WAN024CBO_at; Start 45; Stop 69
tggaccagttgttattgttactaat

SEQ ID NO: 112021 - DNA, 25 bp, Artificial
  probe
  misc_feature (1)..(25): SEQ ID NO: 7522; WAN024CBO_at; Start 16; Stop 40
gaggtgtatcctaattttatcaacc

SEQ ID NO: 112022 - DNA, 25 bp, Artificial
  probe
  misc_feature (1)..(25): SEQ ID NO: 7522; WAN024CBO_at; Start 3; Stop 27
gattgattctgatgaggtgtatcct

SEQ ID NO: 112023 - DNA, 25 bp, Artificial
  probe
  misc_feature (1)..(25): SEQ ID NO: 7522; WAN024CBO_at; Start 36; Stop 60
caaccttgttggaccagttgttatt

SEQ ID NO: 112024 - DNA, 25 bp, Artificial
  probe
  misc_feature (1)..(25): SEQ ID NO: 7522; WAN024CBO_at; Start 49; Stop 73
ccagttgttattgttactaatagac

SEQ ID NO: 112025 - DNA, 25 bp, Artificial
  probe
  misc_feature (1)..(25): SEQ ID NO: 7522; WAN024CBO_at; Start 41; Stop 65
ttgttggaccagttgttattgttac

SEQ ID NO: 112026 - DNA, 25 bp, Artificial
  probe
  misc_feature (1)..(25): SEQ ID NO: 7522; WAN024CBO_at; Start 6; Stop 30
tgattctgatgaggtgtatcctaat

SEQ ID NO: 112027 - DNA, 25 bp, Artificial
  probe
  misc_feature (1)..(25): SEQ ID NO: 7522; WAN024CBO_at; Start 15; Stop 39
tgaggtgtatcctaattttatcaac

SEQ ID NO: 112028 - DNA, 25 bp, Artificial
  probe
  misc_feature (1)..(25): SEQ ID NO: 7522; WAN024CBO_at; Start 63; Stop 87
tactaatagacatttcatacatcag

SEQ ID NO: 112029 - DNA, 25 bp, Artificial
  probe
  misc_feature (1)..(25): SEQ ID NO: 7522; WAN024CBO_at; Start 39; Stop 63
ccttgttggaccagttgttattgtt

SEQ ID NO: 112030 - DNA, 25 bp, Artificial
  probe
  misc_feature (1)..(25): SEQ ID NO: 7518; WAN024CBP_at; Start 18; Stop 42
ccgtcttattaaaaacgagatgatt

SEQ ID NO: 112031 - DNA, 25 bp, Artificial
  probe
  misc_feature (1)..(25): SEQ ID NO: 7518; WAN024CBP_at; Start 1; Stop 25
ttgattgaaaagaaattccgtctta

SEQ ID NO: 112032 - DNA, 25 bp, Artificial
  probe
  misc_feature (1)..(25): SEQ ID NO: 7518; WAN024CBP_at; Start 28; Stop 52
aaaaacgagatgattgatatccatt

SEQ ID NO: 112033 - DNA, 25 bp, Artificial
  probe
  misc_feature (1)..(25): SEQ ID NO: 7518; WAN024CBP_at; Start 25; Stop 49
attaaaaacgagatgattgatatcc

SEQ ID NO: 112034 - DNA, 25 bp, Artificial
  probe
  misc_feature (1)..(25): SEQ ID NO: 7518; WAN024CBP_at; Start 56; Stop 80
ttccaaaaaaatattgtagtaagca

SEQ ID NO: 112035 - DNA, 25 bp, Artificial
  probe
  misc_feature (1)..(25): SEQ ID NO: 7518; WAN024CBP_at; Start 39; Stop 63
gattgatatccattatattccaaaa

SEQ ID NO: 112036 - DNA, 25 bp, Artificial
  probe
  misc_feature (1)..(25): SEQ ID NO: 7518; WAN024CBP_at; Start 22; Stop 46
cttattaaaaacgagatgattgata

SEQ ID NO: 112037 - DNA, 25 bp, Artificial
  probe
  misc_feature (1)..(25): SEQ ID NO: 7518; WAN024CBP_at; Start 77; Stop 101
agcataatgatgacaaaaggaattt

SEQ ID NO: 112038 - DNA, 25 bp, Artificial
  probe
  misc_feature (1)..(25): SEQ ID NO: 7518; WAN024CBP_at; Start 15; Stop 39
attccgtcttattaaaaacgagatg

SEQ ID NO: 112039 - DNA, 25 bp, Artificial
  probe
  misc_feature (1)..(25): SEQ ID NO: 7518; WAN024CBP_at; Start 16; Stop 40
ttccgtcttattaaaaacgagatga

SEQ ID NO: 112040 - DNA, 25 bp, Artificial
  probe
  misc_feature (1)..(25): SEQ ID NO: 7518; WAN024CBP_at; Start 70; Stop 94
tgtagtaagcataatgatgacaaaa

SEQ ID NO: 112041 - DNA, 25 bp, Artificial
  probe
  misc_feature (1)..(25): SEQ ID NO: 7518; WAN024CBP_at; Start 20; Stop 44
gtcttattaaaaacgagatgattga

SEQ ID NO: 112042 - DNA, 25 bp, Artificial
  probe
  misc_feature (1)..(25): SEQ ID NO: 7518; WAN024CBP_at; Start 27; Stop 51
taaaaacgagatgattgatatccat

SEQ ID NO: 112043 - DNA, 25 bp, Artificial
  probe
  misc_feature (1)..(25): SEQ ID NO: 7518; WAN024CBP_at; Start 30; Stop 54
aaacgagatgattgatatccattat

SEQ ID NO: 112044 - DNA, 25 bp, Artificial
  probe
  misc_feature (1)..(25): SEQ ID NO: 7518; WAN024CBP_at; Start 36; Stop 60
gatgattgatatccattatattcca

SEQ ID NO: 112045 - DNA, 25 bp, Artificial
  probe
  misc_feature (1)..(25): SEQ ID NO: 7518; WAN024CBP_at; Start 29; Stop 53
aaaacgagatgattgatatccatta

SEQ ID NO: 112046 - DNA, 25 bp, Artificial
  probe
  misc_feature (1)..(25): SEQ ID NO: 7518; WAN024CBP_at; Start 21; Stop 45
tcttattaaaaacgagatgattgat

SEQ ID NO: 112047 - DNA, 25 bp, Artificial
  probe
  misc_feature (1)..(25): SEQ ID NO: 7518; WAN024CBP_at; Start 31; Stop 55
aacgagatgattgatatccattata

SEQ ID NO: 112048 - DNA, 25 bp, Artificial
  probe
  misc_feature (1)..(25): SEQ ID NO: 7518; WAN024CBP_at; Start 41; Stop 65
ttgatatccattatattccaaaaaa

SEQ ID NO: 112049 - DNA, 25 bp, Artificial
  probe
  misc_feature (1)..(25): SEQ ID NO: 7518; WAN024CBP_at; Start 72; Stop 96
tagtaagcataatgatgacaaaagg

SEQ ID NO: 112050 - DNA, 25 bp, Artificial
  probe
  misc_feature (1)..(25): SEQ ID NO: 7518; WAN024CBP_at; Start 33; Stop 57
cgagatgattgatatccattatatt

SEQ ID NO: 112051 - DNA, 25 bp, Artificial
  probe
  misc_feature (1)..(25): SEQ ID NO: 7518; WAN024CBP_at; Start 76; Stop 100
aagcataatgatgacaaaaggaatt

SEQ ID NO: 112052 - DNA, 25 bp, Artificial
  probe
  misc_feature (1)..(25): SEQ ID NO: 7518; WAN024CBP_at; Start 78; Stop 102
gcataatgatgacaaaaggaatttt

SEQ ID NO: 112053 - DNA, 25 bp, Artificial
  probe
  misc_feature (1)..(25): SEQ ID NO: 7518; WAN024CBP_at; Start 74; Stop 98
gtaagcataatgatgacaaaaggaa

SEQ ID NO: 112054 - DNA, 25 bp, Artificial
  probe
  misc_feature (1)..(25): SEQ ID NO: 7518; WAN024CBP_at; Start 19; Stop 43
cgtcttattaaaaacgagatgattg

SEQ ID NO: 112055 - DNA, 25 bp, Artificial
  probe
  misc_feature (1)..(25): SEQ ID NO: 7518; WAN024CBP_at; Start 71; Stop 95
gtagtaagcataatgatgacaaaag

SEQ ID NO: 112056 - DNA, 25 bp, Artificial
  probe
  misc_feature (1)..(25): SEQ ID NO: 7518; WAN024CBP_at; Start 32; Stop 56
acgagatgattgatatccattatat

SEQ ID NO: 112057 - DNA, 25 bp, Artificial
  probe
  misc_feature (1)..(25): SEQ ID NO: 7518; WAN024CBP_at; Start 24; Stop 48
tattaaaaacgagatgattgatatc

SEQ ID NO: 112058 - DNA, 25 bp, Artificial
  probe
  misc_feature (1)..(25): SEQ ID NO: 7518; WAN024CBP_at; Start 67; Stop 91
tattgtagtaagcataatgatgaca

SEQ ID NO: 112059 - DNA, 25 bp, Artificial
  probe
  misc_feature (1)..(25): SEQ ID NO: 7518; WAN024CBP_at; Start 2; Stop 26
tgattgaaaagaaattccgtcttat

SEQ ID NO: 112060 - DNA, 25 bp, Artificial
  probe
  misc_feature (1)..(25): SEQ ID NO: 7518; WAN024CBP_at; Start 17; Stop 41
tccgtcttattaaaaacgagatgat

SEQ ID NO: 112061 - DNA, 25 bp, Artificial
  probe
  misc_feature (1)..(25): SEQ ID NO: 7518; WAN024CBP_at; Start 26; Stop 50
ttaaaaacgagatgattgatatcca

SEQ ID NO: 112062 - DNA, 25 bp, Artificial
  probe
  misc_feature (1)..(25): SEQ ID NO: 7518; WAN024CBP_at; Start 73; Stop 97
agtaagcataatgatgacaaaagga

SEQ ID NO: 112063 - DNA, 25 bp, Artificial
  probe
  misc_feature (1)..(25): SEQ ID NO: 7518; WAN024CBP_at; Start 75; Stop 99
taagcataatgatgacaaaaggaat

SEQ ID NO: 112064 - DNA, 25 bp, Artificial
  probe
  misc_feature (1)..(25): SEQ ID NO: 1693; WAN024CBQ_at; Start 294; Stop 318
aagtttgtcgcctgatgatttaaga

SEQ ID NO: 112065 - DNA, 25 bp, Artificial
  probe
  misc_feature (1)..(25): SEQ ID NO: 1693; WAN024CBQ_at; Start 83; Stop 107
tactattgaatctagaatctcccct

SEQ ID NO: 112066 - DNA, 25 bp, Artificial
  probe
  misc_feature (1)..(25): SEQ ID NO: 1693; WAN024CBQ_at; Start 601; Stop 625
caatccacctttttaacggatagtg

SEQ ID NO: 112067 - DNA, 25 bp, Artificial
  probe
  misc_feature (1)..(25): SEQ ID NO: 1693; WAN024CBQ_at; Start 565; Stop 589
gacttaatgtctcttcagctgtatg

SEQ ID NO: 112068 - DNA, 25 bp, Artificial
  probe
  misc_feature (1)..(25): SEQ ID NO: 1693; WAN024CBQ_at; Start 438; Stop 462
tcatctcgtttttaataagacggaa

SEQ ID NO: 112069 - DNA, 25 bp, Artificial
  probe
  misc_feature (1)..(25): SEQ ID NO: 1693; WAN024CBQ_at; Start 198; Stop 222
caagaaagaagctcttattacgatt

SEQ ID NO: 112070 - DNA, 25 bp, Artificial
  probe
  misc_feature (1)..(25): SEQ ID NO: 1693; WAN024CBQ_at; Start 716; Stop 740
ctattagtaacaataacaactggtc

SEQ ID NO: 112071 - DNA, 25 bp, Artificial
  probe
  misc_feature (1)..(25): SEQ ID NO: 1693; WAN024CBQ_at; Start 539; Stop 563
tacaaaaatcagagctaagttattc

SEQ ID NO: 112072 - DNA, 25 bp, Artificial
  probe
  misc_feature (1)..(25): SEQ ID NO: 1693; WAN024CBQ_at; Start 167; Stop 191
tagacatactatacgcattgaaaga

SEQ ID NO: 112073 - DNA, 25 bp, Artificial
  probe
  misc_feature (1)..(25): SEQ ID NO: 1693; WAN024CBQ_at; Start 548; Stop 572
cagagctaagttattctgacttaat

SEQ ID NO: 112074 - DNA, 25 bp, Artificial
  probe
  misc_feature (1)..(25): SEQ ID NO: 1693; WAN024CBQ_at; Start 769; Stop 793
ctcatcagaatcaatcaattagatt

SEQ ID NO: 112075 - DNA, 25 bp, Artificial
  probe
  misc_feature (1)..(25): SEQ ID NO: 1693; WAN024CBQ_at; Start 798; Stop 822
ctattatacaagttggttaaggcaa

SEQ ID NO: 112076 - DNA, 25 bp, Artificial
  probe
  misc_feature (1)..(25): SEQ ID NO: 1693; WAN024CBQ_at; Start 677; Stop 701
tgtgtacaggtcttgtcgagttact

SEQ ID NO: 112077 - DNA, 25 bp, Artificial
  probe
  misc_feature (1)..(25): SEQ ID NO: 1693; WAN024CBQ_at; Start 589; Stop 613
gatgcgatgaaccaatccacctttt

SEQ ID NO: 112078 - DNA, 25 bp, Artificial
  probe
  misc_feature (1)..(25): SEQ ID NO: 1693; WAN024CBQ_at; Start 178; Stop 202
tacgcattgaaagatttgtacaaga

SEQ ID NO: 112079 - DNA, 25 bp, Artificial
  probe
  misc_feature (1)..(25): SEQ ID NO: 1693; WAN024CBQ_at; Start 47; Stop 71
tcttgtggctagagttgcatgtcct

SEQ ID NO: 112080 - DNA, 25 bp, Artificial
  probe
  misc_feature (1)..(25): SEQ ID NO: 1693; WAN024CBQ_at; Start 649; Stop 673
aaaatcgaagattctcataacaccc

SEQ ID NO: 112081 - DNA, 25 bp, Artificial
  probe
  misc_feature (1)..(25): SEQ ID NO: 1693; WAN024CBQ_at; Start 342; Stop 366
tcttgaaattgctattatcctagta

SEQ ID NO: 112082 - DNA, 25 bp, Artificial
  probe
  misc_feature (1)..(25): SEQ ID NO: 1693; WAN024CBQ_at; Start 428; Stop 452
tggatatcaatcatctcgtttttaa

SEQ ID NO: 112083 - DNA, 25 bp, Artificial
  probe
  misc_feature (1)..(25): SEQ ID NO: 1693; WAN024CBQ_at; Start 818; Stop 842
ggcaaaattttgatttctgtatgaa

SEQ ID NO: 112084 - DNA, 25 bp, Artificial
  probe
  misc_feature (1)..(25): SEQ ID NO: 1693; WAN024CBQ_at; Start 579; Stop 603
tcagctgtatgatgcgatgaaccaa

SEQ ID NO: 112085 - DNA, 25 bp, Artificial
  probe
  misc_feature (1)..(25): SEQ ID NO: 1693; WAN024CBQ_at; Start 30; Stop 54
aatgctccctctttttgtcttgtgg

SEQ ID NO: 112086 - DNA, 25 bp, Artificial
  probe
  misc_feature (1)..(25): SEQ ID NO: 1693; WAN024CBQ_at; Start 861; Stop 885
gaaatctcggaaattattactgagt

SEQ ID NO: 112087 - DNA, 25 bp, Artificial
  probe
  misc_feature (1)..(25): SEQ ID NO: 1693; WAN024CBQ_at; Start 266; Stop 290
tctcgccctatttttcattccatcg

SEQ ID NO: 112088 - DNA, 25 bp, Artificial
  probe
  misc_feature (1)..(25): SEQ ID NO: 1693; WAN024CBQ_at; Start 316; Stop 340
agatctaggattatatggagtttta

SEQ ID NO: 112089 - DNA, 25 bp, Artificial
  probe
  misc_feature (1)..(25): SEQ ID NO: 1693; WAN024CBQ_at; Start 62; Stop 86
tgcatgtcctagtgaataacttact

SEQ ID NO: 112090 - DNA, 25 bp, Artificial
  probe
  misc_feature (1)..(25): SEQ ID NO: 1693; WAN024CBQ_at; Start 829; Stop 853
gatttctgtatgaatagagagtatc

SEQ ID NO: 112091 - DNA, 25 bp, Artificial
  probe
  misc_feature (1)..(25): SEQ ID NO: 1693; WAN024CBQ_at; Start 190; Stop 214
gatttgtacaagaaagaagctctta

SEQ ID NO: 112092 - DNA, 25 bp, Artificial
  probe
  misc_feature (1)..(25): SEQ ID NO: 1693; WAN024CBQ_at; Start 847; Stop 871
gagtatcataaaatgaaatctcgga

SEQ ID NO: 112093 - DNA, 25 bp, Artificial
  probe
  misc_feature (1)..(25): SEQ ID NO: 1693; WAN024CBQ_at; Start 91; Stop 115
aatctagaatctccccttgattttg

SEQ ID NO: 112094 - DNA, 25 bp, Artificial
  probe
  misc_feature (1)..(25): SEQ ID NO: 1693; WAN024CBQ_at; Start 664; Stop 688
cataacacccttctgtgtacaggtc

SEQ ID NO: 112095 - DNA, 25 bp, Artificial
  probe
  misc_feature (1)..(25): SEQ ID NO: 1693; WAN024CBQ_at; Start 302; Stop 326
cgcctgatgatttaagatctaggat

SEQ ID NO: 112096 - DNA, 25 bp, Artificial
  probe
  misc_feature (1)..(25): SEQ ID NO: 1693; WAN024CBQ_at; Start 329; Stop 353
tatggagttttattcttgaaattgc

SEQ ID NO: 112097 - DNA, 25 bp, Artificial
  probe
  misc_feature (1)..(25): SEQ ID NO: 1693; WAN024CBQ_at; Start 614; Stop 638
taacggatagtgaactttttgagga

SEQ ID NO: 112098 - DNA, 25 bp, Artificial
  probe
  misc_feature (1)..(25): SEQ ID NO: 6609; WAN024CBR_at; Start 331; Stop 355
ccctttatcagagaaaaagagtatg

SEQ ID NO: 112099 - DNA, 25 bp, Artificial
  probe
  misc_feature (1)..(25): SEQ ID NO: 6609; WAN024CBR_at; Start 264; Stop 288
tgttttagtgatacaaaaagacgta

SEQ ID NO: 112100 - DNA, 25 bp, Artificial
  probe
  misc_feature (1)..(25): SEQ ID NO: 6609; WAN024CBR_at; Start 285; Stop 309
cgtatatctgttttcaattctgata

SEQ ID NO: 112101 - DNA, 25 bp, Artificial
  probe
  misc_feature (1)..(25): SEQ ID NO: 6609; WAN024CBR_at; Start 222; Stop 246
tctttttgtactagatttgatggtc

SEQ ID NO: 112102 - DNA, 25 bp, Artificial
  probe
  misc_feature (1)..(25): SEQ ID NO: 6609; WAN024CBR_at; Start 325; Stop 349
tcagttccctttatcagagaaaaag

SEQ ID NO: 112103 - DNA, 25 bp, Artificial
  probe
  misc_feature (1)..(25): SEQ ID NO: 6609; WAN024CBR_at; Start 10; Stop 34
ggaacttttatagcattgactggag

SEQ ID NO: 112104 - DNA, 25 bp, Artificial
  probe
  misc_feature (1)..(25): SEQ ID NO: 6609; WAN024CBR_at; Start 3; Stop 27
gagtccaggaacttttatagcattg

SEQ ID NO: 112105 - DNA, 25 bp, Artificial
  probe
  misc_feature (1)..(25): SEQ ID NO: 6609; WAN024CBR_at; Start 277; Stop 301
caaaaagacgtatatctgttttcaa

SEQ ID NO: 112106 - DNA, 25 bp, Artificial
  probe
  misc_feature (1)..(25): SEQ ID NO: 6609; WAN024CBR_at; Start 167; Stop 191
ttctattaaacagaatctttaaggc

SEQ ID NO: 112107 - DNA, 25 bp, Artificial
  probe
  misc_feature (1)..(25): SEQ ID NO: 6609; WAN024CBR_at; Start 268; Stop 292
ttagtgatacaaaaagacgtatatc

SEQ ID NO: 112108 - DNA, 25 bp, Artificial
  probe
  misc_feature (1)..(25): SEQ ID NO: 6609; WAN024CBR_at; Start 333; Stop 357
ctttatcagagaaaaagagtatgaa

SEQ ID NO: 112109 - DNA, 25 bp, Artificial
  probe
  misc_feature (1)..(25): SEQ ID NO: 6609; WAN024CBR_at; Start 271; Stop 295
gtgatacaaaaagacgtatatctgt

SEQ ID NO: 112110 - DNA, 25 bp, Artificial
  probe
  misc_feature (1)..(25): SEQ ID NO: 6609; WAN024CBR_at; Start 151; Stop 175
gatactacgataaaggttctattaa

SEQ ID NO: 112111 - DNA, 25 bp, Artificial
  probe
  misc_feature (1)..(25): SEQ ID NO: 6609; WAN024CBR_at; Start 262; Stop 286
tatgttttagtgatacaaaaagacg

SEQ ID NO: 112112 - DNA, 25 bp, Artificial
  probe
  misc_feature (1)..(25): SEQ ID NO: 6609; WAN024CBR_at; Start 228; Stop 252
tgtactagatttgatggtctatata

SEQ ID NO: 112113 - DNA, 25 bp, Artificial
  probe
  misc_feature (1)..(25): SEQ ID NO: 6609; WAN024CBR_at; Start 212; Stop 236
ggatattttctctttttgtactaga

SEQ ID NO: 112114 - DNA, 25 bp, Artificial
  probe
  misc_feature (1)..(25): SEQ ID NO: 6609; WAN024CBR_at; Start 200; Stop 224
taatgaaaaggaggatattttctct

SEQ ID NO: 112115 - DNA, 25 bp, Artificial
  probe
  misc_feature (1)..(25): SEQ ID NO: 6609; WAN024CBR_at; Start 11; Stop 35
gaacttttatagcattgactggagc

SEQ ID NO: 112116 - DNA, 25 bp, Artificial
  probe
  misc_feature (1)..(25): SEQ ID NO: 6609; WAN024CBR_at; Start 71; Stop 95
aggttggaggccttggaggttggct

SEQ ID NO: 112117 - DNA, 25 bp, Artificial
  probe
  misc_feature (1)..(25): SEQ ID NO: 6609; WAN024CBR_at; Start 112; Stop 136
ggtgtattggctcttatctttttga

SEQ ID NO: 112118 - DNA, 25 bp, Artificial
  probe
  misc_feature (1)..(25): SEQ ID NO: 6609; WAN024CBR_at; Start 8; Stop 32
caggaacttttatagcattgactgg

SEQ ID NO: 112119 - DNA, 25 bp, Artificial
  probe
  misc_feature (1)..(25): SEQ ID NO: 6609; WAN024CBR_at; Start 145; Stop 169
tgtgtagatactacgataaaggttc

SEQ ID NO: 112120 - DNA, 25 bp, Artificial
  probe
  misc_feature (1)..(25): SEQ ID NO: 6609; WAN024CBR_at; Start 275; Stop 299
tacaaaaagacgtatatctgttttc

SEQ ID NO: 112121 - DNA, 25 bp, Artificial
  probe
  misc_feature (1)..(25): SEQ ID NO: 6609; WAN024CBR_at; Start 327; Stop 351
agttccctttatcagagaaaaagag

SEQ ID NO: 112122 - DNA, 25 bp, Artificial
  probe
  misc_feature (1)..(25): SEQ ID NO: 6609; WAN024CBR_at; Start 110; Stop 134
caggtgtattggctcttatcttttt

SEQ ID NO: 112123 - DNA, 25 bp, Artificial
  probe
  misc_feature (1)..(25): SEQ ID NO: 6609; WAN024CBR_at; Start 235; Stop 259
gatttgatggtctatatatttttag

SEQ ID NO: 112124 - DNA, 25 bp, Artificial
  probe
  misc_feature (1)..(25): SEQ ID NO: 6609; WAN024CBR_at; Start 338; Stop 362
tcagagaaaaagagtatgaattatt

SEQ ID NO: 112125 - DNA, 25 bp, Artificial
  probe
  misc_feature (1)..(25): SEQ ID NO: 6609; WAN024CBR_at; Start 283; Stop 307
gacgtatatctgttttcaattctga

SEQ ID NO: 112126 - DNA, 25 bp, Artificial
  probe
  misc_feature (1)..(25): SEQ ID NO: 6609; WAN024CBR_at; Start 147; Stop 171
tgtagatactacgataaaggttcta

SEQ ID NO: 112127 - DNA, 25 bp, Artificial
  probe
  misc_feature (1)..(25): SEQ ID NO: 6609; WAN024CBR_at; Start 182; Stop 206
tctttaaggcaagtaaggtaatgaa

SEQ ID NO: 112128 - DNA, 25 bp, Artificial
  probe
  misc_feature (1)..(25): SEQ ID NO: 6609; WAN024CBR_at; Start 170; Stop 194
tattaaacagaatctttaaggcaag

SEQ ID NO: 112129 - DNA, 25 bp, Artificial
  probe
  misc_feature (1)..(25): SEQ ID NO: 6609; WAN024CBR_at; Start 220; Stop 244
tctctttttgtactagatttgatgg

SEQ ID NO: 112130 - DNA, 25 bp, Artificial
  probe
  misc_feature (1)..(25): SEQ ID NO: 6609; WAN024CBR_at; Start 6; Stop 30
tccaggaacttttatagcattgact

SEQ ID NO: 112131 - DNA, 25 bp, Artificial
  probe
  misc_feature (1)..(25): SEQ ID NO: 6609; WAN024CBR_at; Start 191; Stop 215
caagtaaggtaatgaaaaggaggat

SEQ ID NO: 112132 - DNA, 25 bp, Artificial
  probe
  misc_feature (1)..(25): SEQ ID NO: 6906; WAN024CBS_at; Start 147; Stop 171
catagcaatgataatttatccaaaa

SEQ ID NO: 112133 - DNA, 25 bp, Artificial
  probe
  misc_feature (1)..(25): SEQ ID NO: 6906; WAN024CBS_at; Start 71; Stop 95
ttttagcctatgattttgttagcga

SEQ ID NO: 112134 - DNA, 25 bp, Artificial
  probe
  misc_feature (1)..(25): SEQ ID NO: 6906; WAN024CBS_at; Start 40; Stop 64
tttgtatgtctatttatatcatcca

SEQ ID NO: 112135 - DNA, 25 bp, Artificial
  probe
  misc_feature (1)..(25): SEQ ID NO: 6906; WAN024CBS_at; Start 59; Stop 83
catccataacttttttagcctatga

SEQ ID NO: 112136 - DNA, 25 bp, Artificial
  probe
  misc_feature (1)..(25): SEQ ID NO: 6906; WAN024CBS_at; Start 73; Stop 97
ttagcctatgattttgttagcgaag

SEQ ID NO: 112137 - DNA, 25 bp, Artificial
  probe
  misc_feature (1)..(25): SEQ ID NO: 6906; WAN024CBS_at; Start 46; Stop 70
tgtctatttatatcatccataactt

SEQ ID NO: 112138 - DNA, 25 bp, Artificial
  probe
  misc_feature (1)..(25): SEQ ID NO: 6906; WAN024CBS_at; Start 143; Stop 167
taatcatagcaatgataatttatcc

SEQ ID NO: 112139 - DNA, 25 bp, Artificial
  probe
  misc_feature (1)..(25): SEQ ID NO: 6906; WAN024CBS_at; Start 106; Stop 130
aagttgattatttggatgaatgtcg

SEQ ID NO: 112140 - DNA, 25 bp, Artificial
  probe
  misc_feature (1)..(25): SEQ ID NO: 6906; WAN024CBS_at; Start 135; Stop 159
tttgattttaatcatagcaatgata

SEQ ID NO: 112141 - DNA, 25 bp, Artificial
  probe
  misc_feature (1)..(25): SEQ ID NO: 6906; WAN024CBS_at; Start 62; Stop 86
ccataacttttttagcctatgattt

SEQ ID NO: 112142 - DNA, 25 bp, Artificial
  probe
  misc_feature (1)..(25): SEQ ID NO: 6906; WAN024CBS_at; Start 78; Stop 102
ctatgattttgttagcgaagaaata

SEQ ID NO: 112143 - DNA, 25 bp, Artificial
  probe
  misc_feature (1)..(25): SEQ ID NO: 6906; WAN024CBS_at; Start 79; Stop 103
tatgattttgttagcgaagaaataa

SEQ ID NO: 112144 - DNA, 25 bp, Artificial
  probe
  misc_feature (1)..(25): SEQ ID NO: 6906; WAN024CBS_at; Start 61; Stop 85
tccataacttttttagcctatgatt

SEQ ID NO: 112145 - DNA, 25 bp, Artificial
  probe
  misc_feature (1)..(25): SEQ ID NO: 6906; WAN024CBS_at; Start 111; Stop 135
gattatttggatgaatgtcgttttt

SEQ ID NO: 112146 - DNA, 25 bp, Artificial
  probe
  misc_feature (1)..(25): SEQ ID NO: 6906; WAN024CBS_at; Start 146; Stop 170
tcatagcaatgataatttatccaaa

SEQ ID NO: 112147 - DNA, 25 bp, Artificial
  probe
  misc_feature (1)..(25): SEQ ID NO: 6906; WAN024CBS_at; Start 70; Stop 94
tttttagcctatgattttgttagcg

SEQ ID NO: 112148 - DNA, 25 bp, Artificial
  probe
  misc_feature (1)..(25): SEQ ID NO: 6906; WAN024CBS_at; Start 77; Stop 101
cctatgattttgttagcgaagaaat

SEQ ID NO: 112149 - DNA, 25 bp, Artificial
  probe
  misc_feature (1)..(25): SEQ ID NO: 6906; WAN024CBS_at; Start 110; Stop 134
tgattatttggatgaatgtcgtttt

SEQ ID NO: 112150 - DNA, 25 bp, Artificial
  probe
  misc_feature (1)..(25): SEQ ID NO: 6906; WAN024CBS_at; Start 76; Stop 100
gcctatgattttgttagcgaagaaa

SEQ ID NO: 112151 - DNA, 25 bp, Artificial
  probe
  misc_feature (1)..(25): SEQ ID NO: 6906; WAN024CBS_at; Start 75; Stop 99
agcctatgattttgttagcgaagaa

SEQ ID NO: 112152 - DNA, 25 bp, Artificial
  probe
  misc_feature (1)..(25): SEQ ID NO: 6906; WAN024CBS_at; Start 108; Stop 132
gttgattatttggatgaatgtcgtt

SEQ ID NO: 112153 - DNA, 25 bp, Artificial
  probe
  misc_feature (1)..(25): SEQ ID NO: 6906; WAN024CBS_at; Start 74; Stop 98
tagcctatgattttgttagcgaaga

SEQ ID NO: 112154 - DNA, 25 bp, Artificial
  probe
  misc_feature (1)..(25): SEQ ID NO: 6906; WAN024CBS_at; Start 72; Stop 96
tttagcctatgattttgttagcgaa

SEQ ID NO: 112155 - DNA, 25 bp, Artificial
  probe
  misc_feature (1)..(25): SEQ ID NO: 6906; WAN024CBS_at; Start 54; Stop 78
tatatcatccataacttttttagcc

SEQ ID NO: 112156 - DNA, 25 bp, Artificial
  probe
  misc_feature (1)..(25): SEQ ID NO: 6906; WAN024CBS_at; Start 107; Stop 131
agttgattatttggatgaatgtcgt

SEQ ID NO: 112157 - DNA, 25 bp, Artificial
  probe
  misc_feature (1)..(25): SEQ ID NO: 6906; WAN024CBS_at; Start 42; Stop 66
tgtatgtctatttatatcatccata

SEQ ID NO: 112158 - DNA, 25 bp, Artificial
  probe
  misc_feature (1)..(25): SEQ ID NO: 6906; WAN024CBS_at; Start 152; Stop 176
caatgataatttatccaaaattaag

SEQ ID NO: 112159 - DNA, 25 bp, Artificial
  probe
  misc_feature (1)..(25): SEQ ID NO: 6906; WAN024CBS_at; Start 56; Stop 80
tatcatccataacttttttagccta

SEQ ID NO: 112160 - DNA, 25 bp, Artificial
  probe
  misc_feature (1)..(25): SEQ ID NO: 6906; WAN024CBS_at; Start 120; Stop 144
gatgaatgtcgtttttttgatttta

SEQ ID NO: 112161 - DNA, 25 bp, Artificial
  probe
  misc_feature (1)..(25): SEQ ID NO: 6906; WAN024CBS_at; Start 44; Stop 68
tatgtctatttatatcatccataac

SEQ ID NO: 112162 - DNA, 25 bp, Artificial
  probe
  misc_feature (1)..(25): SEQ ID NO: 6906; WAN024CBS_at; Start 144; Stop 168
aatcatagcaatgataatttatcca

SEQ ID NO: 112163 - DNA, 25 bp, Artificial
  probe
  misc_feature (1)..(25): SEQ ID NO: 6906; WAN024CBS_at; Start 58; Stop 82
tcatccataacttttttagcctatg

SEQ ID NO: 112164 - DNA, 25 bp, Artificial
  probe
  misc_feature (1)..(25): SEQ ID NO: 6906; WAN024CBS_at; Start 105; Stop 129
aaagttgattatttggatgaatgtc

SEQ ID NO: 112165 - DNA, 25 bp, Artificial
  probe
  misc_feature (1)..(25): SEQ ID NO: 6906; WAN024CBS_at; Start 80; Stop 104
atgattttgttagcgaagaaataaa

SEQ ID NO: 112166 - DNA, 25 bp, Artificial
  probe
  misc_feature (1)..(25): SEQ ID NO: 2195; WAN024CBT_at; Start 304; Stop 328
gatgctattacaacaatctgggcca

SEQ ID NO: 112167 - DNA, 25 bp, Artificial
  probe
  misc_feature (1)..(25): SEQ ID NO: 2195; WAN024CBT_at; Start 83; Stop 107
gatggcctgttgcaacagccattaa

SEQ ID NO: 112168 - DNA, 25 bp, Artificial
  probe
  misc_feature (1)..(25): SEQ ID NO: 2195; WAN024CBT_at; Start 195; Stop 219
cgcaattgctggagcagctgcaaga

SEQ ID NO: 112169 - DNA, 25 bp, Artificial
  probe
  misc_feature (1)..(25): SEQ ID NO: 2195; WAN024CBT_at; Start 300; Stop 324
tggcgatgctattacaacaatctgg

SEQ ID NO: 112170 - DNA, 25 bp, Artificial
  probe
  misc_feature (1)..(25): SEQ ID NO: 2195; WAN024CBT_at; Start 66; Stop 90
gggattttctattctgagatggcct

SEQ ID NO: 112171 - DNA, 25 bp, Artificial
  probe
  misc_feature (1)..(25): SEQ ID NO: 2195; WAN024CBT_at; Start 239; Stop 263
caaatagagtggcaggatttgcact

SEQ ID NO: 112172 - DNA, 25 bp, Artificial
  probe
  misc_feature (1)..(25): SEQ ID NO: 2195; WAN024CBT_at; Start 90; Stop 114
tgttgcaacagccattaatatagct

SEQ ID NO: 112173 - DNA, 25 bp, Artificial
  probe
  misc_feature (1)..(25): SEQ ID NO: 2195; WAN024CBT_at; Start 260; Stop 284
cactgtctgctattaatggatttgc

SEQ ID NO: 112174 - DNA, 25 bp, Artificial
  probe
  misc_feature (1)..(25): SEQ ID NO: 2195; WAN024CBT_at; Start 330; Stop 354
caatgatgtaaataggagagaccca

SEQ ID NO: 112175 - DNA, 25 bp, Artificial
  probe
  misc_feature (1)..(25): SEQ ID NO: 2195; WAN024CBT_at; Start 109; Stop 133
atagcttttaatggtgttttaggtg

SEQ ID NO: 112176 - DNA, 25 bp, Artificial
  probe
  misc_feature (1)..(25): SEQ ID NO: 2195; WAN024CBT_at; Start 334; Stop 358
gatgtaaataggagagacccaaatt

SEQ ID NO: 112177 - DNA, 25 bp, Artificial
  probe
  misc_feature (1)..(25): SEQ ID NO: 2195; WAN024CBT_at; Start 273; Stop 297
taatggatttgcagcttggatgtca

SEQ ID NO: 112178 - DNA, 25 bp, Artificial
  probe
  misc_feature (1)..(25): SEQ ID NO: 2195; WAN024CBT_at; Start 185; Stop 209
gagttacaagcgcaattgctggagc

SEQ ID NO: 112179 - DNA, 25 bp, Artificial
  probe
  misc_feature (1)..(25): SEQ ID NO: 2195; WAN024CBT_at; Start 295; Stop 319
tcaattggcgatgctattacaacaa

SEQ ID NO: 112180 - DNA, 25 bp, Artificial
  probe
  misc_feature (1)..(25): SEQ ID NO: 2195; WAN024CBT_at; Start 181; Stop 205
gggcgagttacaagcgcaattgctg

SEQ ID NO: 112181 - DNA, 25 bp, Artificial
  probe
  misc_feature (1)..(25): SEQ ID NO: 2195; WAN024CBT_at; Start 307; Stop 331
gctattacaacaatctgggccaaca

SEQ ID NO: 112182 - DNA, 25 bp, Artificial
  probe
  misc_feature (1)..(25): SEQ ID NO: 2195; WAN024CBT_at; Start 73; Stop 97
tctattctgagatggcctgttgcaa

SEQ ID NO: 112183 - DNA, 25 bp, Artificial
  probe
  misc_feature (1)..(25): SEQ ID NO: 2195; WAN024CBT_at; Start 251; Stop 275
caggatttgcactgtctgctattaa

SEQ ID NO: 112184 - DNA, 25 bp, Artificial
  probe
  misc_feature (1)..(25): SEQ ID NO: 2195; WAN024CBT_at; Start 317; Stop 341
caatctgggccaacaatgatgtaaa

SEQ ID NO: 112185 - DNA, 25 bp, Artificial
  probe
  misc_feature (1)..(25): SEQ ID NO: 2195; WAN024CBT_at; Start 134; Stop 158
gaggagcaatcagtctagttagaaa

SEQ ID NO: 112186 - DNA, 25 bp, Artificial
  probe
  misc_feature (1)..(25): SEQ ID NO: 2195; WAN024CBT_at; Start 130; Stop 154
ggtggaggagcaatcagtctagtta

SEQ ID NO: 112187 - DNA, 25 bp, Artificial
  probe
  misc_feature (1)..(25): SEQ ID NO: 2195; WAN024CBT_at; Start 144; Stop 168
cagtctagttagaaattatattcgt

SEQ ID NO: 112188 - DNA, 25 bp, Artificial
  probe
  misc_feature (1)..(25): SEQ ID NO: 2195; WAN024CBT_at; Start 280; Stop 304
tttgcagcttggatgtcaattggcg

SEQ ID NO: 112189 - DNA, 25 bp, Artificial
  probe
  misc_feature (1)..(25): SEQ ID NO: 2195; WAN024CBT_at; Start 228; Stop 252
ggtacgagttgcaaatagagtggca

SEQ ID NO: 112190 - DNA, 25 bp, Artificial
  probe
  misc_feature (1)..(25): SEQ ID NO: 2195; WAN024CBT_at; Start 230; Stop 254
tacgagttgcaaatagagtggcagg

SEQ ID NO: 112191 - DNA, 25 bp, Artificial
  probe
  misc_feature (1)..(25): SEQ ID NO: 2195; WAN024CBT_at; Start 124; Stop 148
gttttaggtggaggagcaatcagtc

SEQ ID NO: 112192 - DNA, 25 bp, Artificial
  probe
  misc_feature (1)..(25): SEQ ID NO: 2195; WAN024CBT_at; Start 245; Stop 269
gagtggcaggatttgcactgtctgc

SEQ ID NO: 112193 - DNA, 25 bp, Artificial
  probe
  misc_feature (1)..(25): SEQ ID NO: 2195; WAN024CBT_at; Start 189; Stop 213
tacaagcgcaattgctggagcagct

SEQ ID NO: 112194 - DNA, 25 bp, Artificial
  probe
  misc_feature (1)..(25): SEQ ID NO: 2195; WAN024CBT_at; Start 286; Stop 310
gcttggatgtcaattggcgatgcta

SEQ ID NO: 112195 - DNA, 25 bp, Artificial
  probe
  misc_feature (1)..(25): SEQ ID NO: 2195; WAN024CBT_at; Start 158; Stop 182
attatattcgtaattatggtttggg

SEQ ID NO: 112196 - DNA, 25 bp, Artificial
  probe
  misc_feature (1)..(25): SEQ ID NO: 2195; WAN024CBT_at; Start 94; Stop 118
gcaacagccattaatatagctttta

SEQ ID NO: 112197 - DNA, 25 bp, Artificial
  probe
  misc_feature (1)..(25): SEQ ID NO: 2195; WAN024CBT_at; Start 311; Stop 335
ttacaacaatctgggccaacaatga

SEQ ID NO: 112198 - DNA, 25 bp, Artificial
  probe
  misc_feature (1)..(25): SEQ ID NO: 2195; WAN024CBT_at; Start 202; Stop 226
gctggagcagctgcaagatatgttg

SEQ ID NO: 112199 - DNA, 25 bp, Artificial
  probe
  misc_feature (1)..(25): SEQ ID NO: 2195; WAN024CBT_at; Start 78; Stop 102
tctgagatggcctgttgcaacagcc

SEQ ID NO: 112200 - DNA, 25 bp, Artificial
  probe
  misc_feature (1)..(25): SEQ ID NO: 2198; WAN024CBU_at; Start 82; Stop 106
cccaggtgggcaattacaggagcca

SEQ ID NO: 112201 - DNA, 25 bp, Artificial
  probe
  misc_feature (1)..(25): SEQ ID NO: 2198; WAN024CBU_at; Start 179; Stop 203
gattacgctccgcactggtagctgg

SEQ ID NO: 112202 - DNA, 25 bp, Artificial
  probe
  misc_feature (1)..(25): SEQ ID NO: 2198; WAN024CBU_at; Start 278; Stop 302
catctgctggaattggtgctggagc

SEQ ID NO: 112203 - DNA, 25 bp, Artificial
  probe
  misc_feature (1)..(25): SEQ ID NO: 2198; WAN024CBU_at; Start 319; Stop 343
aatattattgatggctgggatgggc

SEQ ID NO: 112204 - DNA, 25 bp, Artificial
  probe
  misc_feature (1)..(25): SEQ ID NO: 2198; WAN024CBU_at; Start 123; Stop 147
tgcagcattagcagcagcaggaggt

SEQ ID NO: 112205 - DNA, 25 bp, Artificial
  probe
  misc_feature (1)..(25): SEQ ID NO: 2198; WAN024CBU_at; Start 96; Stop 120
tacaggagccattactggtgcagca

SEQ ID NO: 112206 - DNA, 25 bp, Artificial
  probe
  misc_feature (1)..(25): SEQ ID NO: 2198; WAN024CBU_at; Start 88; Stop 112
tgggcaattacaggagccattactg

SEQ ID NO: 112207 - DNA, 25 bp, Artificial
  probe
  misc_feature (1)..(25): SEQ ID NO: 2198; WAN024CBU_at; Start 298; Stop 322
ggagctgattggatttttaccaata

SEQ ID NO: 112208 - DNA, 25 bp, Artificial
  probe
  misc_feature (1)..(25): SEQ ID NO: 2198; WAN024CBU_at; Start 239; Stop 263
ttggaaatgcttttgcaaatactgt

SEQ ID NO: 112209 - DNA, 25 bp, Artificial
  probe
  misc_feature (1)..(25): SEQ ID NO: 2198; WAN024CBU_at; Start 193; Stop 217
ctggtagctgggattgttaaaggtt

SEQ ID NO: 112210 - DNA, 25 bp, Artificial
  probe
  misc_feature (1)..(25): SEQ ID NO: 2198; WAN024CBU_at; Start 144; Stop 168
aggtggaggccttcaactagttctt

SEQ ID NO: 112211 - DNA, 25 bp, Artificial
  probe
  misc_feature (1)..(25): SEQ ID NO: 2198; WAN024CBU_at; Start 339; Stop 363
tgggcgacgtgataatcaattgaga

SEQ ID NO: 112212 - DNA, 25 bp, Artificial
  probe
  misc_feature (1)..(25): SEQ ID NO: 2198; WAN024CBU_at; Start 137; Stop 161
cagcaggaggtggaggccttcaact

SEQ ID NO: 112213 - DNA, 25 bp, Artificial
  probe
  misc_feature (1)..(25): SEQ ID NO: 2198; WAN024CBU_at; Start 264; Stop 288
tattagaagtattgcatctgctgga

SEQ ID NO: 112214 - DNA, 25 bp, Artificial
  probe
  misc_feature (1)..(25): SEQ ID NO: 2198; WAN024CBU_at; Start 105; Stop 129
cattactggtgcagcatatgcagca

SEQ ID NO: 112215 - DNA, 25 bp, Artificial
  probe
  misc_feature (1)..(25): SEQ ID NO: 2198; WAN024CBU_at; Start 189; Stop 213
cgcactggtagctgggattgttaaa

SEQ ID NO: 112216 - DNA, 25 bp, Artificial
  probe
  misc_feature (1)..(25): SEQ ID NO: 2198; WAN024CBU_at; Start 165; Stop 189
tcttgcatcttatggattacgctcc

SEQ ID NO: 112217 - DNA, 25 bp, Artificial
  probe
  misc_feature (1)..(25): SEQ ID NO: 2198; WAN024CBU_at; Start 346; Stop 370
cgtgataatcaattgagaataggtt

SEQ ID NO: 112218 - DNA, 25 bp, Artificial
  probe
  misc_feature (1)..(25): SEQ ID NO: 2198; WAN024CBU_at; Start 175; Stop 199
tatggattacgctccgcactggtag

SEQ ID NO: 112219 - DNA, 25 bp, Artificial
  probe
  misc_feature (1)..(25): SEQ ID NO: 2198; WAN024CBU_at; Start 313; Stop 337
tttaccaatattattgatggctggg

SEQ ID NO: 112220 - DNA, 25 bp, Artificial
  probe
  misc_feature (1)..(25): SEQ ID NO: 2198; WAN024CBU_at; Start 76; Stop 100
tatatacccaggtgggcaattacag

SEQ ID NO: 112221 - DNA, 25 bp, Artificial
  probe
  misc_feature (1)..(25): SEQ ID NO: 2198; WAN024CBU_at; Start 214; Stop 238
ggtttaggagtattaggaattcata

SEQ ID NO: 112222 - DNA, 25 bp, Artificial
  probe
  misc_feature (1)..(25): SEQ ID NO: 2198; WAN024CBU_at; Start 224; Stop 248
tattaggaattcatattggaaatgc

SEQ ID NO: 112223 - DNA, 25 bp, Artificial
  probe
  misc_feature (1)..(25): SEQ ID NO: 2198; WAN024CBU_at; Start 169; Stop 193
gcatcttatggattacgctccgcac

SEQ ID NO: 112224 - DNA, 25 bp, Artificial
  probe
  misc_feature (1)..(25): SEQ ID NO: 2198; WAN024CBU_at; Start 333; Stop 357
ctgggatgggcgacgtgataatcaa

SEQ ID NO: 112225 - DNA, 25 bp, Artificial
  probe
  misc_feature (1)..(25): SEQ ID NO: 2198; WAN024CBU_at; Start 247; Stop 271
gcttttgcaaatactgttattagaa

SEQ ID NO: 112226 - DNA, 25 bp, Artificial
  probe
  misc_feature (1)..(25): SEQ ID NO: 2198; WAN024CBU_at; Start 182; Stop 206
tacgctccgcactggtagctgggat

SEQ ID NO: 112227 - DNA, 25 bp, Artificial
  probe
  misc_feature (1)..(25): SEQ ID NO: 2198; WAN024CBU_at; Start 273; Stop 297
tattgcatctgctggaattggtgct

SEQ ID NO: 112228 - DNA, 25 bp, Artificial
  probe
  misc_feature (1)..(25): SEQ ID NO: 2198; WAN024CBU_at; Start 157; Stop 181
caactagttcttgcatcttatggat

SEQ ID NO: 112229 - DNA, 25 bp, Artificial
  probe
  misc_feature (1)..(25): SEQ ID NO: 2198; WAN024CBU_at; Start 111; Stop 135
tggtgcagcatatgcagcattagca

SEQ ID NO: 112230 - DNA, 25 bp, Artificial
  probe
  misc_feature (1)..(25): SEQ ID NO: 2198; WAN024CBU_at; Start 69; Stop 93
ggctatatatatacccaggtgggca

SEQ ID NO: 112231 - DNA, 25 bp, Artificial
  probe
  misc_feature (1)..(25): SEQ ID NO: 2198; WAN024CBU_at; Start 119; Stop 143
catatgcagcattagcagcagcagg

SEQ ID NO: 112232 - DNA, 25 bp, Artificial
  probe
  misc_feature (1)..(25): SEQ ID NO: 2198; WAN024CBU_at; Start 101; Stop 125
gagccattactggtgcagcatatgc

SEQ ID NO: 112233 - DNA, 25 bp, Artificial
  probe
  misc_feature (1)..(25): SEQ ID NO: 2198; WAN024CBU_at; Start 294; Stop 318
tgctggagctgattggatttttacc

SEQ ID NO: 112234 - DNA, 25 bp, Artificial
  probe
  misc_feature (1)..(25): SEQ ID NO: 2355; WAN024CBV_at; Start 181; Stop 205
gacagtgcaaatcctgccactctat

SEQ ID NO: 112235 - DNA, 25 bp, Artificial
  probe
  misc_feature (1)..(25): SEQ ID NO: 2355; WAN024CBV_at; Start 120; Stop 144
ggcccagattgttgtaatagcatcg

SEQ ID NO: 112236 - DNA, 25 bp, Artificial
  probe
  misc_feature (1)..(25): SEQ ID NO: 2355; WAN024CBV_at; Start 106; Stop 130
tttacatcattgttggcccagattg

SEQ ID NO: 112237 - DNA, 25 bp, Artificial
  probe
  misc_feature (1)..(25): SEQ ID NO: 2355; WAN024CBV_at; Start 201; Stop 225
tctatttgcaactcgtaccccaaca

SEQ ID NO: 112238 - DNA, 25 bp, Artificial
  probe
  misc_feature (1)..(25): SEQ ID NO: 2355; WAN024CBV_at; Start 87; Stop 111
taaatttgggtctctcctatttaca

SEQ ID NO: 112239 - DNA, 25 bp, Artificial
  probe
  misc_feature (1)..(25): SEQ ID NO: 2355; WAN024CBV_at; Start 93; Stop 117
tgggtctctcctatttacatcattg

SEQ ID NO: 112240 - DNA, 25 bp, Artificial
  probe
  misc_feature (1)..(25): SEQ ID NO: 2355; WAN024CBV_at; Start 63; Stop 87
catatctagttaccacaaggcgttt

SEQ ID NO: 112241 - DNA, 25 bp, Artificial
  probe
  misc_feature (1)..(25): SEQ ID NO: 2355; WAN024CBV_at; Start 124; Stop 148
cagattgttgtaatagcatcgccaa

SEQ ID NO: 112242 - DNA, 25 bp, Artificial
  probe
  misc_feature (1)..(25): SEQ ID NO: 2355; WAN024CBV_at; Start 173; Stop 197
taatagcagacagtgcaaatcctgc

SEQ ID NO: 112243 - DNA, 25 bp, Artificial
  probe
  misc_feature (1)..(25): SEQ ID NO: 2355; WAN024CBV_at; Start 47; Stop 71
tttccattttaatacccatatctag

SEQ ID NO: 112244 - DNA, 25 bp, Artificial
  probe
  misc_feature (1)..(25): SEQ ID NO: 2355; WAN024CBV_at; Start 129; Stop 153
tgttgtaatagcatcgccaattgac

SEQ ID NO: 112245 - DNA, 25 bp, Artificial
  probe
  misc_feature (1)..(25): SEQ ID NO: 2355; WAN024CBV_at; Start 232; Stop 256
gcagctgctccagcaattgcgcttg

SEQ ID NO: 112246 - DNA, 25 bp, Artificial
  probe
  misc_feature (1)..(25): SEQ ID NO: 2355; WAN024CBV_at; Start 163; Stop 187
gcaaatccattaatagcagacagtg

SEQ ID NO: 112247 - DNA, 25 bp, Artificial
  probe
  misc_feature (1)..(25): SEQ ID NO: 2355; WAN024CBV_at; Start 59; Stop 83
tacccatatctagttaccacaaggc

SEQ ID NO: 112248 - DNA, 25 bp, Artificial
  probe
  misc_feature (1)..(25): SEQ ID NO: 2355; WAN024CBV_at; Start 228; Stop 252
tcttgcagctgctccagcaattgcg

SEQ ID NO: 112249 - DNA, 25 bp, Artificial
  probe
  misc_feature (1)..(25): SEQ ID NO: 2355; WAN024CBV_at; Start 112; Stop 136
tcattgttggcccagattgttgtaa

SEQ ID NO: 112250 - DNA, 25 bp, Artificial
  probe
  misc_feature (1)..(25): SEQ ID NO: 2355; WAN024CBV_at; Start 214; Stop 238
cgtaccccaacatatcttgcagctg

SEQ ID NO: 112251 - DNA, 25 bp, Artificial
  probe
  misc_feature (1)..(25): SEQ ID NO: 2355; WAN024CBV_at; Start 151; Stop 175
gacatccaagctgcaaatccattaa

SEQ ID NO: 112252 - DNA, 25 bp, Artificial
  probe
  misc_feature (1)..(25): SEQ ID NO: 2355; WAN024CBV_at; Start 241; Stop 265
ccagcaattgcgcttgtaactcgcc

SEQ ID NO: 112253 - DNA, 25 bp, Artificial
  probe
  misc_feature (1)..(25): SEQ ID NO: 2355; WAN024CBV_at; Start 210; Stop 234
aactcgtaccccaacatatcttgca

SEQ ID NO: 112254 - DNA, 25 bp, Artificial
  probe
  misc_feature (1)..(25): SEQ ID NO: 2355; WAN024CBV_at; Start 102; Stop 126
cctatttacatcattgttggcccag

SEQ ID NO: 112255 - DNA, 25 bp, Artificial
  probe
  misc_feature (1)..(25): SEQ ID NO: 2355; WAN024CBV_at; Start 137; Stop 161
tagcatcgccaattgacatccaagc

SEQ ID NO: 112256 - DNA, 25 bp, Artificial
  probe
  misc_feature (1)..(25): SEQ ID NO: 2355; WAN024CBV_at; Start 193; Stop 217
cctgccactctatttgcaactcgta

SEQ ID NO: 112257 - DNA, 25 bp, Artificial
  probe
  misc_feature (1)..(25): SEQ ID NO: 2355; WAN024CBV_at; Start 146; Stop 170
caattgacatccaagctgcaaatcc

SEQ ID NO: 112258 - DNA, 25 bp, Artificial
  probe
  misc_feature (1)..(25): SEQ ID NO: 2355; WAN024CBV_at; Start 142; Stop 166
tcgccaattgacatccaagctgcaa

SEQ ID NO: 112259 - DNA, 25 bp, Artificial
  probe
  misc_feature (1)..(25): SEQ ID NO: 2355; WAN024CBV_at; Start 221; Stop 245
caacatatcttgcagctgctccagc

SEQ ID NO: 112260 - DNA, 25 bp, Artificial
  probe
  misc_feature (1)..(25): SEQ ID NO: 2355; WAN024CBV_at; Start 116; Stop 140
tgttggcccagattgttgtaatagc

SEQ ID NO: 112261 - DNA, 25 bp, Artificial
  probe
  misc_feature (1)..(25): SEQ ID NO: 2355; WAN024CBV_at; Start 155; Stop 179
tccaagctgcaaatccattaatagc

SEQ ID NO: 112262 - DNA, 25 bp, Artificial
  probe
  misc_feature (1)..(25): SEQ ID NO: 2355; WAN024CBV_at; Start 65; Stop 89
tatctagttaccacaaggcgtttaa

SEQ ID NO: 112263 - DNA, 25 bp, Artificial
  probe
  misc_feature (1)..(25): SEQ ID NO: 2355; WAN024CBV_at; Start 134; Stop 158
taatagcatcgccaattgacatcca

SEQ ID NO: 112264 - DNA, 25 bp, Artificial
  probe
  misc_feature (1)..(25): SEQ ID NO: 2355; WAN024CBV_at; Start 235; Stop 259
gctgctccagcaattgcgcttgtaa

SEQ ID NO: 112265 - DNA, 25 bp, Artificial
  probe
  misc_feature (1)..(25): SEQ ID NO: 2355; WAN024CBV_at; Start 2; Stop 26
tggatgatataaatagacatacaaa

SEQ ID NO: 112266 - DNA, 25 bp, Artificial
  probe
  misc_feature (1)..(25): SEQ ID NO: 2355; WAN024CBV_at; Start 166; Stop 190
aatccattaatagcagacagtgcaa

SEQ ID NO: 112267 - DNA, 25 bp, Artificial
  probe
  misc_feature (1)..(25): SEQ ID NO: 2355; WAN024CBV_at; Start 176; Stop 200
tagcagacagtgcaaatcctgccac

SEQ ID NO: 112268 - DNA, 25 bp, Artificial
  probe
  misc_feature (1)..(25): SEQ ID NO: 5558; WAN024CBW_at; Start 167; Stop 191
cactacctctatattctgtgaaaaa

SEQ ID NO: 112269 - DNA, 25 bp, Artificial
  probe
  misc_feature (1)..(25): SEQ ID NO: 5558; WAN024CBW_at; Start 366; Stop 390
taacgaatataagaaaattagtcag

SEQ ID NO: 112270 - DNA, 25 bp, Artificial
  probe
  misc_feature (1)..(25): SEQ ID NO: 5558; WAN024CBW_at; Start 37; Stop 61
aatgtagataagattcgaaaaatac

SEQ ID NO: 112271 - DNA, 25 bp, Artificial
  probe
  misc_feature (1)..(25): SEQ ID NO: 5558; WAN024CBW_at; Start 464; Stop 488
catctattctttatggtacagttga

SEQ ID NO: 112272 - DNA, 25 bp, Artificial
  probe
  misc_feature (1)..(25): SEQ ID NO: 5558; WAN024CBW_at; Start 398; Stop 422
gcaaggtgtctcaatctccttggat

SEQ ID NO: 112273 - DNA, 25 bp, Artificial
  probe
  misc_feature (1)..(25): SEQ ID NO: 5558; WAN024CBW_at; Start 472; Stop 496
ctttatggtacagttgataatcatg

SEQ ID NO: 112274 - DNA, 25 bp, Artificial
  probe
  misc_feature (1)..(25): SEQ ID NO: 5558; WAN024CBW_at; Start 416; Stop 440
cttggataaaatatttagagatttc

SEQ ID NO: 112275 - DNA, 25 bp, Artificial
  probe
  misc_feature (1)..(25): SEQ ID NO: 5558; WAN024CBW_at; Start 647; Stop 671
ttttagtgattcaaaaagcaggcta

SEQ ID NO: 112276 - DNA, 25 bp, Artificial
  probe
  misc_feature (1)..(25): SEQ ID NO: 5558; WAN024CBW_at; Start 650; Stop 674
tagtgattcaaaaagcaggctattt

SEQ ID NO: 112277 - DNA, 25 bp, Artificial
  probe
  misc_feature (1)..(25): SEQ ID NO: 5558; WAN024CBW_at; Start 493; Stop 517
catgtactgactcttatctttttga

SEQ ID NO: 112278 - DNA, 25 bp, Artificial
  probe
  misc_feature (1)..(25): SEQ ID NO: 5558; WAN024CBW_at; Start 218; Stop 242
taaattcgattctgttaatgagttt

SEQ ID NO: 112279 - DNA, 25 bp, Artificial
  probe
  misc_feature (1)..(25): SEQ ID NO: 5558; WAN024CBW_at; Start 145; Stop 169
gcttttatctactcaatagtatcac

SEQ ID NO: 112280 - DNA, 25 bp, Artificial
  probe
  misc_feature (1)..(25): SEQ ID NO: 5558; WAN024CBW_at; Start 181; Stop 205
tctgtgaaaaataaaatagtatcta

SEQ ID NO: 112281 - DNA, 25 bp, Artificial
  probe
  misc_feature (1)..(25): SEQ ID NO: 5558; WAN024CBW_at; Start 190; Stop 214
aataaaatagtatctatctgtctag

SEQ ID NO: 112282 - DNA, 25 bp, Artificial
  probe
  misc_feature (1)..(25): SEQ ID NO: 5558; WAN024CBW_at; Start 161; Stop 185
tagtatcactacctctatattctgt

SEQ ID NO: 112283 - DNA, 25 bp, Artificial
  probe
  misc_feature (1)..(25): SEQ ID NO: 5558; WAN024CBW_at; Start 601; Stop 625
tttcttttcgcattggatgttatag

SEQ ID NO: 112284 - DNA, 25 bp, Artificial
  probe
  misc_feature (1)..(25): SEQ ID NO: 5558; WAN024CBW_at; Start 551; Stop 575
tattcatcagattatttgacacaag

SEQ ID NO: 112285 - DNA, 25 bp, Artificial
  probe
  misc_feature (1)..(25): SEQ ID NO: 5558; WAN024CBW_at; Start 577; Stop 601
actttaatgaagaggagaatatttt

SEQ ID NO: 112286 - DNA, 25 bp, Artificial
  probe
  misc_feature (1)..(25): SEQ ID NO: 5558; WAN024CBW_at; Start 24; Stop 48
cagtaagatgagtaatgtagataag

SEQ ID NO: 112287 - DNA, 25 bp, Artificial
  probe
  misc_feature (1)..(25): SEQ ID NO: 5558; WAN024CBW_at; Start 431; Stop 455
tagagatttctagttttatattaac

SEQ ID NO: 112288 - DNA, 25 bp, Artificial
  probe
  misc_feature (1)..(25): SEQ ID NO: 5558; WAN024CBW_at; Start 554; Stop 578
tcatcagattatttgacacaagtac

SEQ ID NO: 112289 - DNA, 25 bp, Artificial
  probe
  misc_feature (1)..(25): SEQ ID NO: 5558; WAN024CBW_at; Start 357; Stop 381
taaattgactaacgaatataagaaa

SEQ ID NO: 112290 - DNA, 25 bp, Artificial
  probe
  misc_feature (1)..(25): SEQ ID NO: 5558; WAN024CBW_at; Start 30; Stop 54
gatgagtaatgtagataagattcga

SEQ ID NO: 112291 - DNA, 25 bp, Artificial
  probe
  misc_feature (1)..(25): SEQ ID NO: 5558; WAN024CBW_at; Start 638; Stop 662
taggatatcttttagtgattcaaaa

SEQ ID NO: 112292 - DNA, 25 bp, Artificial
  probe
  misc_feature (1)..(25): SEQ ID NO: 5558; WAN024CBW_at; Start 394; Stop 418
agaagcaaggtgtctcaatctcctt

SEQ ID NO: 112293 - DNA, 25 bp, Artificial
  probe
  misc_feature (1)..(25): SEQ ID NO: 5558; WAN024CBW_at; Start 482; Stop 506
cagttgataatcatgtactgactct

SEQ ID NO: 112294 - DNA, 25 bp, Artificial
  probe
  misc_feature (1)..(25): SEQ ID NO: 5558; WAN024CBW_at; Start 402; Stop 426
ggtgtctcaatctccttggataaaa

SEQ ID NO: 112295 - DNA, 25 bp, Artificial
  probe
  misc_feature (1)..(25): SEQ ID NO: 5558; WAN024CBW_at; Start 570; Stop 594
cacaagtactttaatgaagaggaga

SEQ ID NO: 112296 - DNA, 25 bp, Artificial
  probe
  misc_feature (1)..(25): SEQ ID NO: 5558; WAN024CBW_at; Start 449; Stop 473
tattaactatatttccatctattct

SEQ ID NO: 112297 - DNA, 25 bp, Artificial
  probe
  misc_feature (1)..(25): SEQ ID NO: 5558; WAN024CBW_at; Start 658; Stop 682
caaaaagcaggctatttgttttcgg

SEQ ID NO: 112298 - DNA, 25 bp, Artificial
  probe
  misc_feature (1)..(25): SEQ ID NO: 5558; WAN024CBW_at; Start 567; Stop 591
tgacacaagtactttaatgaagagg

SEQ ID NO: 112299 - DNA, 25 bp, Artificial
  probe
  misc_feature (1)..(25): SEQ ID NO: 5558; WAN024CBW_at; Start 409; Stop 433
caatctccttggataaaatatttag

SEQ ID NO: 112300 - DNA, 25 bp, Artificial
  probe
  misc_feature (1)..(25): SEQ ID NO: 5558; WAN024CBW_at; Start 593; Stop 617
gaatattttttcttttcgcattgga

SEQ ID NO: 112301 - DNA, 25 bp, Artificial
  probe
  misc_feature (1)..(25): SEQ ID NO: 5558; WAN024CBW_at; Start 152; Stop 176
tctactcaatagtatcactacctct

SEQ ID NO: 112302 - DNA, 25 bp, Artificial
  probe
  misc_feature (1)..(25): SEQ ID NO: 2196; WAN024CBX_at; Start 135; Stop 159
catctatagtggtggtgcaacaatt

SEQ ID NO: 112303 - DNA, 25 bp, Artificial
  probe
  misc_feature (1)..(25): SEQ ID NO: 2196; WAN024CBX_at; Start 90; Stop 114
gaatagtagaggtagttttgcaaca

SEQ ID NO: 112304 - DNA, 25 bp, Artificial
  probe
  misc_feature (1)..(25): SEQ ID NO: 2196; WAN024CBX_at; Start 277; Stop 301
gcactaaacgttgcactaactgtta

SEQ ID NO: 112305 - DNA, 25 bp, Artificial
  probe
  misc_feature (1)..(25): SEQ ID NO: 2196; WAN024CBX_at; Start 312; Stop 336
actaggtggagcaatcgcatatggg

SEQ ID NO: 112306 - DNA, 25 bp, Artificial
  probe
  misc_feature (1)..(25): SEQ ID NO: 2196; WAN024CBX_at; Start 233; Stop 257
taattaaacatgtaggtagtgcagc

SEQ ID NO: 112307 - DNA, 25 bp, Artificial
  probe
  misc_feature (1)..(25): SEQ ID NO: 2196; WAN024CBX_at; Start 141; Stop 165
tagtggtggtgcaacaatttattct

SEQ ID NO: 112308 - DNA, 25 bp, Artificial
  probe
  misc_feature (1)..(25): SEQ ID NO: 2196; WAN024CBX_at; Start 237; Stop 261
taaacatgtaggtagtgcagctggc

SEQ ID NO: 112309 - DNA, 25 bp, Artificial
  probe
  misc_feature (1)..(25): SEQ ID NO: 2196; WAN024CBX_at; Start 103; Stop 127
agttttgcaacagttctggatgtag

SEQ ID NO: 112310 - DNA, 25 bp, Artificial
  probe
  misc_feature (1)..(25): SEQ ID NO: 2196; WAN024CBX_at; Start 98; Stop 122
gaggtagttttgcaacagttctgga

SEQ ID NO: 112311 - DNA, 25 bp, Artificial
  probe
  misc_feature (1)..(25): SEQ ID NO: 2196; WAN024CBX_at; Start 281; Stop 305
taaacgttgcactaactgttactgg

SEQ ID NO: 112312 - DNA, 25 bp, Artificial
  probe
  misc_feature (1)..(25): SEQ ID NO: 2196; WAN024CBX_at; Start 256; Stop 280
gctggccatttagtcaatactgcac

SEQ ID NO: 112313 - DNA, 25 bp, Artificial
  probe
  misc_feature (1)..(25): SEQ ID NO: 2196; WAN024CBX_at; Start 239; Stop 263
aacatgtaggtagtgcagctggcca

SEQ ID NO: 112314 - DNA, 25 bp, Artificial
  probe
  misc_feature (1)..(25): SEQ ID NO: 2196; WAN024CBX_at; Start 79; Stop 103
cgtaactggtggaatagtagaggta

SEQ ID NO: 112315 - DNA, 25 bp, Artificial
  probe
  misc_feature (1)..(25): SEQ ID NO: 2196; WAN024CBX_at; Start 75; Stop 99
tggtcgtaactggtggaatagtaga

SEQ ID NO: 112316 - DNA, 25 bp, Artificial
  probe
  misc_feature (1)..(25): SEQ ID NO: 2196; WAN024CBX_at; Start 198; Stop 222
tagaggggctattacgagaacatta

SEQ ID NO: 112317 - DNA, 25 bp, Artificial
  probe
  misc_feature (1)..(25): SEQ ID NO: 2196; WAN024CBX_at; Start 133; Stop 157
gccatctatagtggtggtgcaacaa

SEQ ID NO: 112318 - DNA, 25 bp, Artificial
  probe
  misc_feature (1)..(25): SEQ ID NO: 2196; WAN024CBX_at; Start 346; Stop 370
gctgacggtagcttagatggttata

SEQ ID NO: 112319 - DNA, 25 bp, Artificial
  probe
  misc_feature (1)..(25): SEQ ID NO: 2196; WAN024CBX_at; Start 247; Stop 271
ggtagtgcagctggccatttagtca

SEQ ID NO: 112320 - DNA, 25 bp, Artificial
  probe
  misc_feature (1)..(25): SEQ ID NO: 2196; WAN024CBX_at; Start 212; Stop 236
cgagaacattacgtagtttaataat

SEQ ID NO: 112321 - DNA, 25 bp, Artificial
  probe
  misc_feature (1)..(25): SEQ ID NO: 2196; WAN024CBX_at; Start 269; Stop 293
tcaatactgcactaaacgttgcact

SEQ ID NO: 112322 - DNA, 25 bp, Artificial
  probe
  misc_feature (1)..(25): SEQ ID NO: 2196; WAN024CBX_at; Start 266; Stop 290
tagtcaatactgcactaaacgttgc

SEQ ID NO: 112323 - DNA, 25 bp, Artificial
  probe
  misc_feature (1)..(25): SEQ ID NO: 2196; WAN024CBX_at; Start 252; Stop 276
tgcagctggccatttagtcaatact

SEQ ID NO: 112324 - DNA, 25 bp, Artificial
  probe
  misc_feature (1)..(25): SEQ ID NO: 2196; WAN024CBX_at; Start 305; Stop 329
gattttcactaggtggagcaatcgc

SEQ ID NO: 112325 - DNA, 25 bp, Artificial
  probe
  misc_feature (1)..(25): SEQ ID NO: 2196; WAN024CBX_at; Start 293; Stop 317
taactgttactggattttcactagg

SEQ ID NO: 112326 - DNA, 25 bp, Artificial
  probe
  misc_feature (1)..(25): SEQ ID NO: 2196; WAN024CBX_at; Start 180; Stop 204
aaaagctatctcagctaatagaggg

SEQ ID NO: 112327 - DNA, 25 bp, Artificial
  probe
  misc_feature (1)..(25): SEQ ID NO: 2196; WAN024CBX_at; Start 144; Stop 168
tggtggtgcaacaatttattctgct

SEQ ID NO: 112328 - DNA, 25 bp, Artificial
  probe
  misc_feature (1)..(25): SEQ ID NO: 2196; WAN024CBX_at; Start 289; Stop 313
gcactaactgttactggattttcac

SEQ ID NO: 112329 - DNA, 25 bp, Artificial
  probe
  misc_feature (1)..(25): SEQ ID NO: 2196; WAN024CBX_at; Start 308; Stop 332
tttcactaggtggagcaatcgcata

SEQ ID NO: 112330 - DNA, 25 bp, Artificial
  probe
  misc_feature (1)..(25): SEQ ID NO: 2196; WAN024CBX_at; Start 243; Stop 267
tgtaggtagtgcagctggccattta

SEQ ID NO: 112331 - DNA, 25 bp, Artificial
  probe
  misc_feature (1)..(25): SEQ ID NO: 2196; WAN024CBX_at; Start 152; Stop 176
caacaatttattctgcttatgcgat

SEQ ID NO: 112332 - DNA, 25 bp, Artificial
  probe
  misc_feature (1)..(25): SEQ ID NO: 2196; WAN024CBX_at; Start 300; Stop 324
tactggattttcactaggtggagca

SEQ ID NO: 112333 - DNA, 25 bp, Artificial
  probe
  misc_feature (1)..(25): SEQ ID NO: 2196; WAN024CBX_at; Start 129; Stop 153
tttggccatctatagtggtggtgca

SEQ ID NO: 112334 - DNA, 25 bp, Artificial
  probe
  misc_feature (1)..(25): SEQ ID NO: 2196; WAN024CBX_at; Start 165; Stop 189
tgcttatgcgataaaaaaagctatc

SEQ ID NO: 112335 - DNA, 25 bp, Artificial
  probe
  misc_feature (1)..(25): SEQ ID NO: 2196; WAN024CBX_at; Start 351; Stop 375
cggtagcttagatggttatattttt

SEQ ID NO: 112336 - DNA, 25 bp, Artificial
  probe
  misc_feature (1)..(25): SEQ ID NO: 815; WAN024CBY_at; Start 104; Stop 128
cttatttaagcaagcgtgcttgtca

SEQ ID NO: 112337 - DNA, 25 bp, Artificial
  probe
  misc_feature (1)..(25): SEQ ID NO: 815; WAN024CBY_at; Start 13; Stop 37
caactaaggaggagaaaacaaatgg

SEQ ID NO: 112338 - DNA, 25 bp, Artificial
  probe
  misc_feature (1)..(25): SEQ ID NO: 815; WAN024CBY_at; Start 343; Stop 367
aacccttatccttgggatggattca

SEQ ID NO: 112339 - DNA, 25 bp, Artificial
  probe
  misc_feature (1)..(25): SEQ ID NO: 815; WAN024CBY_at; Start 2; Stop 26
tgaaacaatttcaactaaggaggag

SEQ ID NO: 112340 - DNA, 25 bp, Artificial
  probe
  misc_feature (1)..(25): SEQ ID NO: 815; WAN024CBY_at; Start 19; Stop 43
aggaggagaaaacaaatggaacttg

SEQ ID NO: 112341 - DNA, 25 bp, Artificial
  probe
  misc_feature (1)..(25): SEQ ID NO: 815; WAN024CBY_at; Start 12; Stop 36
tcaactaaggaggagaaaacaaatg

SEQ ID NO: 112342 - DNA, 25 bp, Artificial
  probe
  misc_feature (1)..(25): SEQ ID NO: 815; WAN024CBY_at; Start 105; Stop 129
ttatttaagcaagcgtgcttgtcaa

SEQ ID NO: 112343 - DNA, 25 bp, Artificial
  probe
  misc_feature (1)..(25): SEQ ID NO: 815; WAN024CBY_at; Start 344; Stop 368
acccttatccttgggatggattcat

SEQ ID NO: 112344 - DNA, 25 bp, Artificial
  probe
  misc_feature (1)..(25): SEQ ID NO: 815; WAN024CBY_at; Start 3; Stop 27
gaaacaatttcaactaaggaggaga

SEQ ID NO: 112345 - DNA, 25 bp, Artificial
  probe
  misc_feature (1)..(25): SEQ ID NO: 815; WAN024CBY_at; Start 21; Stop 45
gaggagaaaacaaatggaacttgta

SEQ ID NO: 112346 - DNA, 25 bp, Artificial
  probe
  misc_feature (1)..(25): SEQ ID NO: 815; WAN024CBY_at; Start 110; Stop 134
taagcaagcgtgcttgtcaaggaat

SEQ ID NO: 112347 - DNA, 25 bp, Artificial
  probe
  misc_feature (1)..(25): SEQ ID NO: 815; WAN024CBY_at; Start 102; Stop 126
agcttatttaagcaagcgtgcttgt

SEQ ID NO: 112348 - DNA, 25 bp, Artificial
  probe
  misc_feature (1)..(25): SEQ ID NO: 815; WAN024CBY_at; Start 108; Stop 132
tttaagcaagcgtgcttgtcaagga

SEQ ID NO: 112349 - DNA, 25 bp, Artificial
  probe
  misc_feature (1)..(25): SEQ ID NO: 815; WAN024CBY_at; Start 342; Stop 366
gaacccttatccttgggatggattc

SEQ ID NO: 112350 - DNA, 25 bp, Artificial
  probe
  misc_feature (1)..(25): SEQ ID NO: 815; WAN024CBY_at; Start 107; Stop 131
atttaagcaagcgtgcttgtcaagg

SEQ ID NO: 112351 - DNA, 25 bp, Artificial
  probe
  misc_feature (1)..(25): SEQ ID NO: 815; WAN024CBY_at; Start 109; Stop 133
ttaagcaagcgtgcttgtcaaggaa

SEQ ID NO: 112352 - DNA, 25 bp, Artificial
  probe
  misc_feature (1)..(25): SEQ ID NO: 815; WAN024CBY_at; Start 103; Stop 127
gcttatttaagcaagcgtgcttgtc

SEQ ID NO: 112353 - DNA, 25 bp, Artificial
  probe
  misc_feature (1)..(25): SEQ ID NO: 815; WAN024CBY_at; Start 1; Stop 25
atgaaacaatttcaactaaggagga

SEQ ID NO: 112354 - DNA, 25 bp, Artificial
  probe
  misc_feature (1)..(25): SEQ ID NO: 815; WAN024CBY_at; Start 22; Stop 46
aggagaaaacaaatggaacttgtat

SEQ ID NO: 112355 - DNA, 25 bp, Artificial
  probe
  misc_feature (1)..(25): SEQ ID NO: 815; WAN024CBY_at; Start 106; Stop 130
tatttaagcaagcgtgcttgtcaag

SEQ ID NO: 112356 - DNA, 25 bp, Artificial
  probe
  misc_feature (1)..(25): SEQ ID NO: 815; WAN024CBY_at; Start 24; Stop 48
gagaaaacaaatggaacttgtatta

SEQ ID NO: 112357 - DNA, 25 bp, Artificial
  probe
  misc_feature (1)..(25): SEQ ID NO: 815; WAN024CBY_at; Start 111; Stop 135
aagcaagcgtgcttgtcaaggaatt

SEQ ID NO: 112358 - DNA, 25 bp, Artificial
  probe
  misc_feature (1)..(25): SEQ ID NO: 7506; WAN024CBZ_s_at; Start 92; Stop 116
gctcttggtatgatattggcattaa

SEQ ID NO: 112359 - DNA, 25 bp, Artificial
  probe
  misc_feature (1)..(25): SEQ ID NO: 7506; WAN024CBZ_s_at; Start 108; Stop 132
tggcattaattttggtattatcaag

SEQ ID NO: 112360 - DNA, 25 bp, Artificial
  probe
  misc_feature (1)..(25): SEQ ID NO: 7506; WAN024CBZ_s_at; Start 95; Stop 119
cttggtatgatattggcattaattt

SEQ ID NO: 112361 - DNA, 25 bp, Artificial
  probe
  misc_feature (1)..(25): SEQ ID NO: 7506; WAN024CBZ_s_at; Start 85; Stop 109
tattatagctcttggtatgatattg

SEQ ID NO: 112362 - DNA, 25 bp, Artificial
  probe
  misc_feature (1)..(25): SEQ ID NO: 7506; WAN024CBZ_s_at; Start 11; Stop 35
tttatgggcgtaaaactatagctat

SEQ ID NO: 112363 - DNA, 25 bp, Artificial
  probe
  misc_feature (1)..(25): SEQ ID NO: 7506; WAN024CBZ_s_at; Start 100; Stop 124
tatgatattggcattaattttggta

SEQ ID NO: 112364 - DNA, 25 bp, Artificial
  probe
  misc_feature (1)..(25): SEQ ID NO: 7506; WAN024CBZ_s_at; Start 88; Stop 112
tatagctcttggtatgatattggca

SEQ ID NO: 112365 - DNA, 25 bp, Artificial
  probe
  misc_feature (1)..(25): SEQ ID NO: 7506; WAN024CBZ_s_at; Start 91; Stop 115
agctcttggtatgatattggcatta

SEQ ID NO: 112366 - DNA, 25 bp, Artificial
  probe
  misc_feature (1)..(25): SEQ ID NO: 7506; WAN024CBZ_s_at; Start 105; Stop 129
tattggcattaattttggtattatc

SEQ ID NO: 112367 - DNA, 25 bp, Artificial
  probe
  misc_feature (1)..(25): SEQ ID NO: 7506; WAN024CBZ_s_at; Start 87; Stop 111
ttatagctcttggtatgatattggc

SEQ ID NO: 112368 - DNA, 25 bp, Artificial
  probe
  misc_feature (1)..(25): SEQ ID NO: 7506; WAN024CBZ_s_at; Start 10; Stop 34
atttatgggcgtaaaactatagcta

SEQ ID NO: 112369 - DNA, 25 bp, Artificial
  probe
  misc_feature (1)..(25): SEQ ID NO: 7506; WAN024CBZ_s_at; Start 17; Stop 41
ggcgtaaaactatagctatgaaaca

SEQ ID NO: 112370 - DNA, 25 bp, Artificial
  probe
  misc_feature (1)..(25): SEQ ID NO: 7506; WAN024CBZ_s_at; Start 110; Stop 134
gcattaattttggtattatcaagag

SEQ ID NO: 112371 - DNA, 25 bp, Artificial
  probe
  misc_feature (1)..(25): SEQ ID NO: 7506; WAN024CBZ_s_at; Start 103; Stop 127
gatattggcattaattttggtatta

SEQ ID NO: 112372 - DNA, 25 bp, Artificial
  probe
  misc_feature (1)..(25): SEQ ID NO: 7506; WAN024CBZ_s_at; Start 9; Stop 33
tatttatgggcgtaaaactatagct

SEQ ID NO: 112373 - DNA, 25 bp, Artificial
  probe
  misc_feature (1)..(25): SEQ ID NO: 7506; WAN024CBZ_s_at; Start 99; Stop 123
gtatgatattggcattaattttggt

SEQ ID NO: 112374 - DNA, 25 bp, Artificial
  probe
  misc_feature (1)..(25): SEQ ID NO: 7506; WAN024CBZ_s_at; Start 93; Stop 117
ctcttggtatgatattggcattaat

SEQ ID NO: 112375 - DNA, 25 bp, Artificial
  probe
  misc_feature (1)..(25): SEQ ID NO: 7506; WAN024CBZ_s_at; Start 16; Stop 40
gggcgtaaaactatagctatgaaac

SEQ ID NO: 112376 - DNA, 25 bp, Artificial
  probe
  misc_feature (1)..(25): SEQ ID NO: 7506; WAN024CBZ_s_at; Start 94; Stop 118
tcttggtatgatattggcattaatt

SEQ ID NO: 112377 - DNA, 25 bp, Artificial
  probe
  misc_feature (1)..(25): SEQ ID NO: 7506; WAN024CBZ_s_at; Start 97; Stop 121
tggtatgatattggcattaattttg

SEQ ID NO: 112378 - DNA, 25 bp, Artificial
  probe
  misc_feature (1)..(25): SEQ ID NO: 7506; WAN024CBZ_s_at; Start 111; Stop 135
cattaattttggtattatcaagagt

SEQ ID NO: 112379 - DNA, 25 bp, Artificial
  probe
  misc_feature (1)..(25): SEQ ID NO: 7506; WAN024CBZ_s_at; Start 13; Stop 37
tatgggcgtaaaactatagctatga

SEQ ID NO: 112380 - DNA, 25 bp, Artificial
  probe
  misc_feature (1)..(25): SEQ ID NO: 7506; WAN024CBZ_s_at; Start 114; Stop 138
taattttggtattatcaagagtgta

SEQ ID NO: 112381 - DNA, 25 bp, Artificial
  probe
  misc_feature (1)..(25): SEQ ID NO: 7506; WAN024CBZ_s_at; Start 109; Stop 133
ggcattaattttggtattatcaaga

SEQ ID NO: 112382 - DNA, 25 bp, Artificial
  probe
  misc_feature (1)..(25): SEQ ID NO: 7506; WAN024CBZ_s_at; Start 82; Stop 106
tattattatagctcttggtatgata

SEQ ID NO: 112383 - DNA, 25 bp, Artificial
  probe
  misc_feature (1)..(25): SEQ ID NO: 7506; WAN024CBZ_s_at; Start 20; Stop 44
gtaaaactatagctatgaaacattt

SEQ ID NO: 112384 - DNA, 25 bp, Artificial
  probe
  misc_feature (1)..(25): SEQ ID NO: 7506; WAN024CBZ_s_at; Start 19; Stop 43
cgtaaaactatagctatgaaacatt

SEQ ID NO: 112385 - DNA, 25 bp, Artificial
  probe
  misc_feature (1)..(25): SEQ ID NO: 7506; WAN024CBZ_s_at; Start 18; Stop 42
gcgtaaaactatagctatgaaacat

SEQ ID NO: 112386 - DNA, 25 bp, Artificial
  probe
  misc_feature (1)..(25): SEQ ID NO: 7506; WAN024CBZ_s_at; Start 90; Stop 114
tagctcttggtatgatattggcatt

SEQ ID NO: 112387 - DNA, 25 bp, Artificial
  probe
  misc_feature (1)..(25): SEQ ID NO: 7506; WAN024CBZ_s_at; Start 89; Stop 113
atagctcttggtatgatattggcat

SEQ ID NO: 112388 - DNA, 25 bp, Artificial
  probe
  misc_feature (1)..(25): SEQ ID NO: 7506; WAN024CBZ_s_at; Start 12; Stop 36
ttatgggcgtaaaactatagctatg

SEQ ID NO: 112389 - DNA, 25 bp, Artificial
  probe
  misc_feature (1)..(25): SEQ ID NO: 7506; WAN024CBZ_s_at; Start 15; Stop 39
tgggcgtaaaactatagctatgaaa

SEQ ID NO: 112390 - DNA, 25 bp, Artificial
  probe
  misc_feature (1)..(25): SEQ ID NO: 7506; WAN024CBZ_s_at; Start 14; Stop 38
atgggcgtaaaactatagctatgaa

SEQ ID NO: 112391 - DNA, 25 bp, Artificial
  probe
  misc_feature (1)..(25): SEQ ID NO: 7506; WAN024CBZ_s_at; Start 51; Stop 75
aggaattggtgaaattcattttttg

SEQ ID NO: 112392 - DNA, 25 bp, Artificial
  probe
  misc_feature (1)..(25): SEQ ID NO: 6929; WAN024CC2_at; Start 116; Stop 140
taataggttctgaaatgaattttgt

SEQ ID NO: 112393 - DNA, 25 bp, Artificial
  probe
  misc_feature (1)..(25): SEQ ID NO: 6929; WAN024CC2_at; Start 110; Stop 134
tatatataataggttctgaaatgaa

SEQ ID NO: 112394 - DNA, 25 bp, Artificial
  probe
  misc_feature (1)..(25): SEQ ID NO: 6929; WAN024CC2_at; Start 173; Stop 197
ttgtttgtattttaactattgctcg

SEQ ID NO: 112395 - DNA, 25 bp, Artificial
  probe
  misc_feature (1)..(25): SEQ ID NO: 6929; WAN024CC2_at; Start 103; Stop 127
tttcacgtatatataataggttctg

SEQ ID NO: 112396 - DNA, 25 bp, Artificial
  probe
  misc_feature (1)..(25): SEQ ID NO: 6929; WAN024CC2_at; Start 120; Stop 144
aggttctgaaatgaattttgtgaaa

SEQ ID NO: 112397 - DNA, 25 bp, Artificial
  probe
  misc_feature (1)..(25): SEQ ID NO: 6929; WAN024CC2_at; Start 106; Stop 130
cacgtatatataataggttctgaaa

SEQ ID NO: 112398 - DNA, 25 bp, Artificial
  probe
  misc_feature (1)..(25): SEQ ID NO: 6929; WAN024CC2_at; Start 102; Stop 126
ttttcacgtatatataataggttct

SEQ ID NO: 112399 - DNA, 25 bp, Artificial
  probe
  misc_feature (1)..(25): SEQ ID NO: 6929; WAN024CC2_at; Start 101; Stop 125
tttttcacgtatatataataggttc

SEQ ID NO: 112400 - DNA, 25 bp, Artificial
  probe
  misc_feature (1)..(25): SEQ ID NO: 6929; WAN024CC2_at; Start 113; Stop 137
atataataggttctgaaatgaattt

SEQ ID NO: 112401 - DNA, 25 bp, Artificial
  probe
  misc_feature (1)..(25): SEQ ID NO: 6929; WAN024CC2_at; Start 174; Stop 198
tgtttgtattttaactattgctcga

SEQ ID NO: 112402 - DNA, 25 bp, Artificial
  probe
  misc_feature (1)..(25): SEQ ID NO: 6929; WAN024CC2_at; Start 155; Stop 179
ctattttgggaattatatttgtttg

SEQ ID NO: 112403 - DNA, 25 bp, Artificial
  probe
  misc_feature (1)..(25): SEQ ID NO: 6929; WAN024CC2_at; Start 6; Stop 30
tatatttttgcttaaaatgaaacat

SEQ ID NO: 112404 - DNA, 25 bp, Artificial
  probe
  misc_feature (1)..(25): SEQ ID NO: 6929; WAN024CC2_at; Start 7; Stop 31
atatttttgcttaaaatgaaacatt

SEQ ID NO: 112405 - DNA, 25 bp, Artificial
  probe
  misc_feature (1)..(25): SEQ ID NO: 6929; WAN024CC2_at; Start 117; Stop 141
aataggttctgaaatgaattttgtg

SEQ ID NO: 112406 - DNA, 25 bp, Artificial
  probe
  misc_feature (1)..(25): SEQ ID NO: 6929; WAN024CC2_at; Start 111; Stop 135
atatataataggttctgaaatgaat

SEQ ID NO: 112407 - DNA, 25 bp, Artificial
  probe
  misc_feature (1)..(25): SEQ ID NO: 6929; WAN024CC2_at; Start 121; Stop 145
ggttctgaaatgaattttgtgaaaa

SEQ ID NO: 112408 - DNA, 25 bp, Artificial
  probe
  misc_feature (1)..(25): SEQ ID NO: 6929; WAN024CC2_at; Start 122; Stop 146
gttctgaaatgaattttgtgaaaat

SEQ ID NO: 112409 - DNA, 25 bp, Artificial
  probe
  misc_feature (1)..(25): SEQ ID NO: 6929; WAN024CC2_at; Start 170; Stop 194
tatttgtttgtattttaactattgc

SEQ ID NO: 112410 - DNA, 25 bp, Artificial
  probe
  misc_feature (1)..(25): SEQ ID NO: 6929; WAN024CC2_at; Start 114; Stop 138
tataataggttctgaaatgaatttt

SEQ ID NO: 112411 - DNA, 25 bp, Artificial
  probe
  misc_feature (1)..(25): SEQ ID NO: 6929; WAN024CC2_at; Start 115; Stop 139
ataataggttctgaaatgaattttg

SEQ ID NO: 112412 - DNA, 25 bp, Artificial
  probe
  misc_feature (1)..(25): SEQ ID NO: 6929; WAN024CC2_at; Start 123; Stop 147
ttctgaaatgaattttgtgaaaata

SEQ ID NO: 112413 - DNA, 25 bp, Artificial
  probe
  misc_feature (1)..(25): SEQ ID NO: 6929; WAN024CC2_at; Start 98; Stop 122
ctttttttcacgtatatataatagg

SEQ ID NO: 112414 - DNA, 25 bp, Artificial
  probe
  misc_feature (1)..(25): SEQ ID NO: 6929; WAN024CC2_at; Start 105; Stop 129
tcacgtatatataataggttctgaa

SEQ ID NO: 112415 - DNA, 25 bp, Artificial
  probe
  misc_feature (1)..(25): SEQ ID NO: 6929; WAN024CC2_at; Start 107; Stop 131
acgtatatataataggttctgaaat

SEQ ID NO: 112416 - DNA, 25 bp, Artificial
  probe
  misc_feature (1)..(25): SEQ ID NO: 6929; WAN024CC2_at; Start 125; Stop 149
ctgaaatgaattttgtgaaaatagt

SEQ ID NO: 112417 - DNA, 25 bp, Artificial
  probe
  misc_feature (1)..(25): SEQ ID NO: 6929; WAN024CC2_at; Start 108; Stop 132
cgtatatataataggttctgaaatg

SEQ ID NO: 112418 - DNA, 25 bp, Artificial
  probe
  misc_feature (1)..(25): SEQ ID NO: 6929; WAN024CC2_at; Start 119; Stop 143
taggttctgaaatgaattttgtgaa

SEQ ID NO: 112419 - DNA, 25 bp, Artificial
  probe
  misc_feature (1)..(25): SEQ ID NO: 6929; WAN024CC2_at; Start 118; Stop 142
ataggttctgaaatgaattttgtga

SEQ ID NO: 112420 - DNA, 25 bp, Artificial
  probe
  misc_feature (1)..(25): SEQ ID NO: 6929; WAN024CC2_at; Start 112; Stop 136
tatataataggttctgaaatgaatt

SEQ ID NO: 112421 - DNA, 25 bp, Artificial
  probe
  misc_feature (1)..(25): SEQ ID NO: 6929; WAN024CC2_at; Start 97; Stop 121
cctttttttcacgtatatataatag

SEQ ID NO: 112422 - DNA, 25 bp, Artificial
  probe
  misc_feature (1)..(25): SEQ ID NO: 6929; WAN024CC2_at; Start 104; Stop 128
ttcacgtatatataataggttctga

SEQ ID NO: 112423 - DNA, 25 bp, Artificial
  probe
  misc_feature (1)..(25): SEQ ID NO: 6929; WAN024CC2_at; Start 172; Stop 196
tttgtttgtattttaactattgctc

SEQ ID NO: 112424 - DNA, 25 bp, Artificial
  probe
  misc_feature (1)..(25): SEQ ID NO: 6929; WAN024CC2_at; Start 109; Stop 133
gtatatataataggttctgaaatga

SEQ ID NO: 112425 - DNA, 25 bp, Artificial
  probe
  misc_feature (1)..(25): SEQ ID NO: 6929; WAN024CC2_at; Start 124; Stop 148
tctgaaatgaattttgtgaaaatag

SEQ ID NO: 112426 - DNA, 25 bp, Artificial
  probe
  misc_feature (1)..(25): SEQ ID NO: 7507; WAN024CC3_at; Start 126; Stop 150
gattggatatactaaaataaatcta

SEQ ID NO: 112427 - DNA, 25 bp, Artificial
  probe
  misc_feature (1)..(25): SEQ ID NO: 7507; WAN024CC3_at; Start 118; Stop 142
ggactagtgattggatatactaaaa

SEQ ID NO: 112428 - DNA, 25 bp, Artificial
  probe
  misc_feature (1)..(25): SEQ ID NO: 7507; WAN024CC3_at; Start 81; Stop 105
tttattatatctaagcatgtctgct

SEQ ID NO: 112429 - DNA, 25 bp, Artificial
  probe
  misc_feature (1)..(25): SEQ ID NO: 7507; WAN024CC3_at; Start 206; Stop 230
caagagtgtatagaaaatattttta

SEQ ID NO: 112430 - DNA, 25 bp, Artificial
  probe
  misc_feature (1)..(25): SEQ ID NO: 7507; WAN024CC3_at; Start 80; Stop 104
ttttattatatctaagcatgtctgc

SEQ ID NO: 112431 - DNA, 25 bp, Artificial
  probe
  misc_feature (1)..(25): SEQ ID NO: 7507; WAN024CC3_at; Start 203; Stop 227
tatcaagagtgtatagaaaatattt

SEQ ID NO: 112432 - DNA, 25 bp, Artificial
  probe
  misc_feature (1)..(25): SEQ ID NO: 7507; WAN024CC3_at; Start 97; Stop 121
atgtctgctagtccaattattggac

SEQ ID NO: 112433 - DNA, 25 bp, Artificial
  probe
  misc_feature (1)..(25): SEQ ID NO: 7507; WAN024CC3_at; Start 109; Stop 133
ccaattattggactagtgattggat

SEQ ID NO: 112434 - DNA, 25 bp, Artificial
  probe
  misc_feature (1)..(25): SEQ ID NO: 7507; WAN024CC3_at; Start 90; Stop 114
tctaagcatgtctgctagtccaatt

SEQ ID NO: 112435 - DNA, 25 bp, Artificial
  probe
  misc_feature (1)..(25): SEQ ID NO: 7507; WAN024CC3_at; Start 95; Stop 119
gcatgtctgctagtccaattattgg

SEQ ID NO: 112436 - DNA, 25 bp, Artificial
  probe
  misc_feature (1)..(25): SEQ ID NO: 7507; WAN024CC3_at; Start 98; Stop 122
tgtctgctagtccaattattggact

SEQ ID NO: 112437 - DNA, 25 bp, Artificial
  probe
  misc_feature (1)..(25): SEQ ID NO: 7507; WAN024CC3_at; Start 85; Stop 109
ttatatctaagcatgtctgctagtc

SEQ ID NO: 112438 - DNA, 25 bp, Artificial
  probe
  misc_feature (1)..(25): SEQ ID NO: 7507; WAN024CC3_at; Start 96; Stop 120
catgtctgctagtccaattattgga

SEQ ID NO: 112439 - DNA, 25 bp, Artificial
  probe
  misc_feature (1)..(25): SEQ ID NO: 7507; WAN024CC3_at; Start 217; Stop 241
agaaaatatttttatagagacgatg

SEQ ID NO: 112440 - DNA, 25 bp, Artificial
  probe
  misc_feature (1)..(25): SEQ ID NO: 7507; WAN024CC3_at; Start 115; Stop 139
attggactagtgattggatatacta

SEQ ID NO: 112441 - DNA, 25 bp, Artificial
  probe
  misc_feature (1)..(25): SEQ ID NO: 7507; WAN024CC3_at; Start 94; Stop 118
agcatgtctgctagtccaattattg

SEQ ID NO: 112442 - DNA, 25 bp, Artificial
  probe
  misc_feature (1)..(25): SEQ ID NO: 7507; WAN024CC3_at; Start 86; Stop 110
tatatctaagcatgtctgctagtcc

SEQ ID NO: 112443 - DNA, 25 bp, Artificial
  probe
  misc_feature (1)..(25): SEQ ID NO: 7507; WAN024CC3_at; Start 113; Stop 137
ttattggactagtgattggatatac

SEQ ID NO: 112444 - DNA, 25 bp, Artificial
  probe
  misc_feature (1)..(25): SEQ ID NO: 7507; WAN024CC3_at; Start 107; Stop 131
gtccaattattggactagtgattgg

SEQ ID NO: 112445 - DNA, 25 bp, Artificial
  probe
  misc_feature (1)..(25): SEQ ID NO: 7507; WAN024CC3_at; Start 89; Stop 113
atctaagcatgtctgctagtccaat

SEQ ID NO: 112446 - DNA, 25 bp, Artificial
  probe
  misc_feature (1)..(25): SEQ ID NO: 7507; WAN024CC3_at; Start 88; Stop 112
tatctaagcatgtctgctagtccaa

SEQ ID NO: 112447 - DNA, 25 bp, Artificial
  probe
  misc_feature (1)..(25): SEQ ID NO: 7507; WAN024CC3_at; Start 121; Stop 145
ctagtgattggatatactaaaataa

SEQ ID NO: 112448 - DNA, 25 bp, Artificial
  probe
  misc_feature (1)..(25): SEQ ID NO: 7507; WAN024CC3_at; Start 92; Stop 116
taagcatgtctgctagtccaattat

SEQ ID NO: 112449 - DNA, 25 bp, Artificial
  probe
  misc_feature (1)..(25): SEQ ID NO: 7507; WAN024CC3_at; Start 117; Stop 141
tggactagtgattggatatactaaa

SEQ ID NO: 112450 - DNA, 25 bp, Artificial
  probe
  misc_feature (1)..(25): SEQ ID NO: 7507; WAN024CC3_at; Start 222; Stop 246
atatttttatagagacgatgatgac

SEQ ID NO: 112451 - DNA, 25 bp, Artificial
  probe
  misc_feature (1)..(25): SEQ ID NO: 7507; WAN024CC3_at; Start 148; Stop 172
ctaataaattctattattatagctc

SEQ ID NO: 112452 - DNA, 25 bp, Artificial
  probe
  misc_feature (1)..(25): SEQ ID NO: 7507; WAN024CC3_at; Start 129; Stop 153
tggatatactaaaataaatctaata

SEQ ID NO: 112453 - DNA, 25 bp, Artificial
  probe
  misc_feature (1)..(25): SEQ ID NO: 7507; WAN024CC3_at; Start 87; Stop 111
atatctaagcatgtctgctagtcca

SEQ ID NO: 112454 - DNA, 25 bp, Artificial
  probe
  misc_feature (1)..(25): SEQ ID NO: 7507; WAN024CC3_at; Start 83; Stop 107
tattatatctaagcatgtctgctag

SEQ ID NO: 112455 - DNA, 25 bp, Artificial
  probe
  misc_feature (1)..(25): SEQ ID NO: 7507; WAN024CC3_at; Start 91; Stop 115
ctaagcatgtctgctagtccaatta

SEQ ID NO: 112456 - DNA, 25 bp, Artificial
  probe
  misc_feature (1)..(25): SEQ ID NO: 7507; WAN024CC3_at; Start 93; Stop 117
aagcatgtctgctagtccaattatt

SEQ ID NO: 112457 - DNA, 25 bp, Artificial
  probe
  misc_feature (1)..(25): SEQ ID NO: 7507; WAN024CC3_at; Start 110; Stop 134
caattattggactagtgattggata

SEQ ID NO: 112458 - DNA, 25 bp, Artificial
  probe
  misc_feature (1)..(25): SEQ ID NO: 7507; WAN024CC3_at; Start 119; Stop 143
gactagtgattggatatactaaaat

SEQ ID NO: 112459 - DNA, 25 bp, Artificial
  probe
  misc_feature (1)..(25): SEQ ID NO: 7507; WAN024CC3_at; Start 114; Stop 138
tattggactagtgattggatatact

SEQ ID NO: 112460 - DNA, 25 bp, Artificial
  probe
  misc_feature (1)..(25): SEQ ID NO: 2807; WAN024CC4_at; Start 237; Stop 261
aaattggtttcagacttggtgtgtc

SEQ ID NO: 112461 - DNA, 25 bp, Artificial
  probe
  misc_feature (1)..(25): SEQ ID NO: 2807; WAN024CC4_at; Start 303; Stop 327
gaagcgtcttgggaaaattatagga

SEQ ID NO: 112462 - DNA, 25 bp, Artificial
  probe
  misc_feature (1)..(25): SEQ ID NO: 2807; WAN024CC4_at; Start 950; Stop 974
taacatcaagcacttttcgtcaaat

SEQ ID NO: 112463 - DNA, 25 bp, Artificial
  probe
  misc_feature (1)..(25): SEQ ID NO: 2807; WAN024CC4_at; Start 1435; Stop 1459
taccacccacagtttgatataaaga

SEQ ID NO: 112464 - DNA, 25 bp, Artificial
  probe
  misc_feature (1)..(25): SEQ ID NO: 2807; WAN024CC4_at; Start 1141; Stop 1165
gctaactttgagacaacaatgggct

SEQ ID NO: 112465 - DNA, 25 bp, Artificial
  probe
  misc_feature (1)..(25): SEQ ID NO: 2807; WAN024CC4_at; Start 797; Stop 821
caattagagaagtagctttgcctga

SEQ ID NO: 112466 - DNA, 25 bp, Artificial
  probe
  misc_feature (1)..(25): SEQ ID NO: 2807; WAN024CC4_at; Start 254; Stop 278
ggtgtgtctctgttaaaccacaaac

SEQ ID NO: 112467 - DNA, 25 bp, Artificial
  probe
  misc_feature (1)..(25): SEQ ID NO: 2807; WAN024CC4_at; Start 274; Stop 298
caaacaattcagagagaactactgg

SEQ ID NO: 112468 - DNA, 25 bp, Artificial
  probe
  misc_feature (1)..(25): SEQ ID NO: 2807; WAN024CC4_at; Start 813; Stop 837
tttgcctgaagctgcaagcgaagct

SEQ ID NO: 112469 - DNA, 25 bp, Artificial
  probe
  misc_feature (1)..(25): SEQ ID NO: 2807; WAN024CC4_at; Start 494; Stop 518
tgactgcggtaaaactagatatttc

SEQ ID NO: 112470 - DNA, 25 bp, Artificial
  probe
  misc_feature (1)..(25): SEQ ID NO: 2807; WAN024CC4_at; Start 826; Stop 850
gcaagcgaagctattaaaaggacaa

SEQ ID NO: 112471 - DNA, 25 bp, Artificial
  probe
  misc_feature (1)..(25): SEQ ID NO: 2807; WAN024CC4_at; Start 343; Stop 367
gacaggattactccacttctgatga

SEQ ID NO: 112472 - DNA, 25 bp, Artificial
  probe
  misc_feature (1)..(25): SEQ ID NO: 2807; WAN024CC4_at; Start 923; Stop 947
tatttagaacagaatacggctctcc

SEQ ID NO: 112473 - DNA, 25 bp, Artificial
  probe
  misc_feature (1)..(25): SEQ ID NO: 2807; WAN024CC4_at; Start 641; Stop 665
tagtattgttgcttacaggtattcg

SEQ ID NO: 112474 - DNA, 25 bp, Artificial
  probe
  misc_feature (1)..(25): SEQ ID NO: 2807; WAN024CC4_at; Start 1064; Stop 1088
ggcatatgcatattagttaccttca

SEQ ID NO: 112475 - DNA, 25 bp, Artificial
  probe
  misc_feature (1)..(25): SEQ ID NO: 2807; WAN024CC4_at; Start 516; Stop 540
ttcactagagaaaaggcgtaaagca

SEQ ID NO: 112476 - DNA, 25 bp, Artificial
  probe
  misc_feature (1)..(25): SEQ ID NO: 2807; WAN024CC4_at; Start 166; Stop 190
gatagactaactacttcatttgaaa

SEQ ID NO: 112477 - DNA, 25 bp, Artificial
  probe
  misc_feature (1)..(25): SEQ ID NO: 2807; WAN024CC4_at; Start 531; Stop 555
gcgtaaagcaaaagaaagacatgat

SEQ ID NO: 112478 - DNA, 25 bp, Artificial
  probe
  misc_feature (1)..(25): SEQ ID NO: 2807; WAN024CC4_at; Start 1423; Stop 1447
gatattgtcaaataccacccacagt

SEQ ID NO: 112479 - DNA, 25 bp, Artificial
  probe
  misc_feature (1)..(25): SEQ ID NO: 2807; WAN024CC4_at; Start 1160; Stop 1184
tgggctatacacataatataaatcg

SEQ ID NO: 112480 - DNA, 25 bp, Artificial
  probe
  misc_feature (1)..(25): SEQ ID NO: 2807; WAN024CC4_at; Start 202; Stop 226
cctgaactgattacaacatttggag

SEQ ID NO: 112481 - DNA, 25 bp, Artificial
  probe
  misc_feature (1)..(25): SEQ ID NO: 2807; WAN024CC4_at; Start 605; Stop 629
gccaatgcagaaatgcaaactatta

SEQ ID NO: 112482 - DNA, 25 bp, Artificial
  probe
  misc_feature (1)..(25): SEQ ID NO: 2807; WAN024CC4_at; Start 132; Stop 156
gaaacaagctgaaagagaggttctt

SEQ ID NO: 112483 - DNA, 25 bp, Artificial
  probe
  misc_feature (1)..(25): SEQ ID NO: 2807; WAN024CC4_at; Start 1042; Stop 1066
catgttactccccattcgtttaggc

SEQ ID NO: 112484 - DNA, 25 bp, Artificial
  probe
  misc_feature (1)..(25): SEQ ID NO: 2807; WAN024CC4_at; Start 1186; Stop 1210
tcacaagaaaatactgtaaaagcct

SEQ ID NO: 112485 - DNA, 25 bp, Artificial
  probe
  misc_feature (1)..(25): SEQ ID NO: 2807; WAN024CC4_at; Start 1002; Stop 1026
gacaaattgtttaagtgactatggt

SEQ ID NO: 112486 - DNA, 25 bp, Artificial
  probe
  misc_feature (1)..(25): SEQ ID NO: 2807; WAN024CC4_at; Start 46; Stop 70
caagtggttgaaaagtacaaagatc

SEQ ID NO: 112487 - DNA, 25 bp, Artificial
  probe
  misc_feature (1)..(25): SEQ ID NO: 2807; WAN024CC4_at; Start 1349; Stop 1373
aagacttgttacatcttagtccacg

SEQ ID NO: 112488 - DNA, 25 bp, Artificial
  probe
  misc_feature (1)..(25): SEQ ID NO: 2807; WAN024CC4_at; Start 935; Stop 959
aatacggctctccaataacatcaag

SEQ ID NO: 112489 - DNA, 25 bp, Artificial
  probe
  misc_feature (1)..(25): SEQ ID NO: 2807; WAN024CC4_at; Start 885; Stop 909
gaaacatccctgtcctgcttttaca

SEQ ID NO: 112490 - DNA, 25 bp, Artificial
  probe
  misc_feature (1)..(25): SEQ ID NO: 2807; WAN024CC4_at; Start 74; Stop 98
taacaggaaagtggaaatcagtaac

SEQ ID NO: 112491 - DNA, 25 bp, Artificial
  probe
  misc_feature (1)..(25): SEQ ID NO: 2807; WAN024CC4_at; Start 1095; Stop 1119
tgagatgcacatagcagtgaaagat

SEQ ID NO: 112492 - DNA, 25 bp, Artificial
  probe
  misc_feature (1)..(25): SEQ ID NO: 2807; WAN024CC4_at; Start 60; Stop 84
gtacaaagatccactaacaggaaag

SEQ ID NO: 112493 - DNA, 25 bp, Artificial
  probe
  misc_feature (1)..(25): SEQ ID NO: 2807; WAN024CC4_at; Start 1482; Stop 1506
aatcagaggtttttccattgcatgg

SEQ ID NO: 112494 - DNA, 25 bp, Artificial
  probe
  misc_feature (1)..(25): SEQ ID NO: 2488; WAN024CC5_at; Start 315; Stop 339
cagtccagagtatctacagtatgcg

SEQ ID NO: 112495 - DNA, 25 bp, Artificial
  probe
  misc_feature (1)..(25): SEQ ID NO: 2488; WAN024CC5_at; Start 439; Stop 463
gatatttttataccaattgtaagcc

SEQ ID NO: 112496 - DNA, 25 bp, Artificial
  probe
  misc_feature (1)..(25): SEQ ID NO: 2488; WAN024CC5_at; Start 34; Stop 58
ctggtactaaagtcagttatctgta

SEQ ID NO: 112497 - DNA, 25 bp, Artificial
  probe
  misc_feature (1)..(25): SEQ ID NO: 2488; WAN024CC5_at; Start 161; Stop 185
taaaaagttgtggtactactattca

SEQ ID NO: 112498 - DNA, 25 bp, Artificial
  probe
  misc_feature (1)..(25): SEQ ID NO: 2488; WAN024CC5_at; Start 183; Stop 207
tcatgatgatggattaataacgact

SEQ ID NO: 112499 - DNA, 25 bp, Artificial
  probe
  misc_feature (1)..(25): SEQ ID NO: 2488; WAN024CC5_at; Start 203; Stop 227
cgactgattttgagttttatattca

SEQ ID NO: 112500 - DNA, 25 bp, Artificial
  probe
  misc_feature (1)..(25): SEQ ID NO: 2488; WAN024CC5_at; Start 238; Stop 262
gctcaacagtacagtaacatttatg

SEQ ID NO: 112501 - DNA, 25 bp, Artificial
  probe
  misc_feature (1)..(25): SEQ ID NO: 2488; WAN024CC5_at; Start 46; Stop 70
tcagttatctgtaaaaagttacatg

SEQ ID NO: 112502 - DNA, 25 bp, Artificial
  probe
  misc_feature (1)..(25): SEQ ID NO: 2488; WAN024CC5_at; Start 252; Stop 276
taacatttatgatgtacaggattcc

SEQ ID NO: 112503 - DNA, 25 bp, Artificial
  probe
  misc_feature (1)..(25): SEQ ID NO: 2488; WAN024CC5_at; Start 61; Stop 85
aagttacatgatacaaaagtagaag

SEQ ID NO: 112504 - DNA, 25 bp, Artificial
  probe
  misc_feature (1)..(25): SEQ ID NO: 2488; WAN024CC5_at; Start 259; Stop 283
tatgatgtacaggattccatctctg

SEQ ID NO: 112505 - DNA, 25 bp, Artificial
  probe
  misc_feature (1)..(25): SEQ ID NO: 2488; WAN024CC5_at; Start 74; Stop 98
caaaagtagaagatgtagatcagga

SEQ ID NO: 112506 - DNA, 25 bp, Artificial
  probe
  misc_feature (1)..(25): SEQ ID NO: 2488; WAN024CC5_at; Start 373; Stop 397
gatattcaaacggatgggattgtct

SEQ ID NO: 112507 - DNA, 25 bp, Artificial
  probe
  misc_feature (1)..(25): SEQ ID NO: 2488; WAN024CC5_at; Start 300; Stop 324
tgttcgttttgaagacagtccagag

SEQ ID NO: 112508 - DNA, 25 bp, Artificial
  probe
  misc_feature (1)..(25): SEQ ID NO: 2488; WAN024CC5_at; Start 2; Stop 26
tggctaagttagaggtaaaagataa

SEQ ID NO: 112509 - DNA, 25 bp, Artificial
  probe
  misc_feature (1)..(25): SEQ ID NO: 2488; WAN024CC5_at; Start 220; Stop 244
tatattcaagctcataatgctcaac

SEQ ID NO: 112510 - DNA, 25 bp, Artificial
  probe
  misc_feature (1)..(25): SEQ ID NO: 2488; WAN024CC5_at; Start 85; Stop 109
gatgtagatcaggaaattaatagat

SEQ ID NO: 112511 - DNA, 25 bp, Artificial
  probe
  misc_feature (1)..(25): SEQ ID NO: 2488; WAN024CC5_at; Start 331; Stop 355
cagtatgcgtattctaaattggatc

SEQ ID NO: 112512 - DNA, 25 bp, Artificial
  probe
  misc_feature (1)..(25): SEQ ID NO: 2488; WAN024CC5_at; Start 229; Stop 253
gctcataatgctcaacagtacagta

SEQ ID NO: 112513 - DNA, 25 bp, Artificial
  probe
  misc_feature (1)..(25): SEQ ID NO: 2488; WAN024CC5_at; Start 345; Stop 369
taaattggatctatatgtctatgaa

SEQ ID NO: 112514 - DNA, 25 bp, Artificial
  probe
  misc_feature (1)..(25): SEQ ID NO: 2488; WAN024CC5_at; Start 310; Stop 334
gaagacagtccagagtatctacagt

SEQ ID NO: 112515 - DNA, 25 bp, Artificial
  probe
  misc_feature (1)..(25): SEQ ID NO: 2488; WAN024CC5_at; Start 415; Stop 439
tcttctcctgaaaaaatggtagtag

SEQ ID NO: 112516 - DNA, 25 bp, Artificial
  probe
  misc_feature (1)..(25): SEQ ID NO: 2488; WAN024CC5_at; Start 192; Stop 216
tggattaataacgactgattttgag

SEQ ID NO: 112517 - DNA, 25 bp, Artificial
  probe
  misc_feature (1)..(25): SEQ ID NO: 2488; WAN024CC5_at; Start 102; Stop 126
taatagatttcatcaacatttgcag

SEQ ID NO: 112518 - DNA, 25 bp, Artificial
  probe
  misc_feature (1)..(25): SEQ ID NO: 2488; WAN024CC5_at; Start 444; Stop 468
ttttataccaattgtaagcctatga

SEQ ID NO: 112519 - DNA, 25 bp, Artificial
  probe
  misc_feature (1)..(25): SEQ ID NO: 2488; WAN024CC5_at; Start 271; Stop 295
gattccatctctgttccatattgtt

SEQ ID NO: 112520 - DNA, 25 bp, Artificial
  probe
  misc_feature (1)..(25): SEQ ID NO: 2488; WAN024CC5_at; Start 401; Stop 425
cagtttatgttaattcttctcctga

SEQ ID NO: 112521 - DNA, 25 bp, Artificial
  probe
  misc_feature (1)..(25): SEQ ID NO: 2488; WAN024CC5_at; Start 118; Stop 142
catttgcagttgttaaaagcacaaa

SEQ ID NO: 112522 - DNA, 25 bp, Artificial
  probe
  misc_feature (1)..(25): SEQ ID NO: 2488; WAN024CC5_at; Start 320; Stop 344
cagagtatctacagtatgcgtattc

SEQ ID NO: 112523 - DNA, 25 bp, Artificial
  probe
  misc_feature (1)..(25): SEQ ID NO: 2488; WAN024CC5_at; Start 385; Stop 409
gatgggattgtctatacagtttatg

SEQ ID NO: 112524 - DNA, 25 bp, Artificial
  probe
  misc_feature (1)..(25): SEQ ID NO: 2488; WAN024CC5_at; Start 296; Stop 320
tatatgttcgttttgaagacagtcc

SEQ ID NO: 112525 - DNA, 25 bp, Artificial
  probe
  misc_feature (1)..(25): SEQ ID NO: 2488; WAN024CC5_at; Start 379; Stop 403
caaacggatgggattgtctatacag

SEQ ID NO: 112526 - DNA, 25 bp, Artificial
  probe
  misc_feature (1)..(25): SEQ ID NO: 2488; WAN024CC5_at; Start 170; Stop 194
gtggtactactattcatgatgatgg

SEQ ID NO: 112527 - DNA, 25 bp, Artificial
  probe
  misc_feature (1)..(25): SEQ ID NO: 2488; WAN024CC5_at; Start 136; Stop 160
gcacaaatttttggtccattaattg

SEQ ID NO: 112528 - DNA, 25 bp, Artificial
  probe
  misc_feature (1)..(25): SEQ ID NO: 2092; WAN024CC6_at; Start 89; Stop 113
ctgaattggtgcgtgatatcttaaa

SEQ ID NO: 112529 - DNA, 25 bp, Artificial
  probe
  misc_feature (1)..(25): SEQ ID NO: 2092; WAN024CC6_at; Start 117; Stop 141
tgtcaatacatcacatcatgaagat

SEQ ID NO: 112530 - DNA, 25 bp, Artificial
  probe
  misc_feature (1)..(25): SEQ ID NO: 2092; WAN024CC6_at; Start 498; Stop 522
taccgacttaaatatcaaagagcag

SEQ ID NO: 112531 - DNA, 25 bp, Artificial
  probe
  misc_feature (1)..(25): SEQ ID NO: 2092; WAN024CC6_at; Start 441; Stop 465
taaagactcctctgctccatttgag

SEQ ID NO: 112532 - DNA, 25 bp, Artificial
  probe
  misc_feature (1)..(25): SEQ ID NO: 2092; WAN024CC6_at; Start 404; Stop 428
gattaatatatgctagaaatggctc

SEQ ID NO: 112533 - DNA, 25 bp, Artificial
  probe
  misc_feature (1)..(25): SEQ ID NO: 2092; WAN024CC6_at; Start 721; Stop 745
caccttacaattatcgactttatgg

SEQ ID NO: 112534 - DNA, 25 bp, Artificial
  probe
  misc_feature (1)..(25): SEQ ID NO: 2092; WAN024CC6_at; Start 995; Stop 1019
caacagaagagataatgaagcaact

SEQ ID NO: 112535 - DNA, 25 bp, Artificial
  probe
  misc_feature (1)..(25): SEQ ID NO: 2092; WAN024CC6_at; Start 667; Stop 691
ttaaatcaataccaaaccaatgttg

SEQ ID NO: 112536 - DNA, 25 bp, Artificial
  probe
  misc_feature (1)..(25): SEQ ID NO: 2092; WAN024CC6_at; Start 385; Stop 409
gatactgcattacaaaaaggattaa

SEQ ID NO: 112537 - DNA, 25 bp, Artificial
  probe
  misc_feature (1)..(25): SEQ ID NO: 2092; WAN024CC6_at; Start 3; Stop 27
gctgagtctagatcaaatacattta

SEQ ID NO: 112538 - DNA, 25 bp, Artificial
  probe
  misc_feature (1)..(25): SEQ ID NO: 2092; WAN024CC6_at; Start 286; Stop 310
caaactgaaactatagacaacaaag

SEQ ID NO: 112539 - DNA, 25 bp, Artificial
  probe
  misc_feature (1)..(25): SEQ ID NO: 2092; WAN024CC6_at; Start 759; Stop 783
tcagggaaattgtctagtgccctcc

SEQ ID NO: 112540 - DNA, 25 bp, Artificial
  probe
  misc_feature (1)..(25): SEQ ID NO: 2092; WAN024CC6_at; Start 370; Stop 394
tataagcctaagaaagatactgcat

SEQ ID NO: 112541 - DNA, 25 bp, Artificial
  probe
  misc_feature (1)..(25): SEQ ID NO: 2092; WAN024CC6_at; Start 26; Stop 50
tactattgaatactcctgaagatga

SEQ ID NO: 112542 - DNA, 25 bp, Artificial
  probe
  misc_feature (1)..(25): SEQ ID NO: 2092; WAN024CC6_at; Start 948; Stop 972
taaaatagaattggaaaagactcac

SEQ ID NO: 112543 - DNA, 25 bp, Artificial
  probe
  misc_feature (1)..(25): SEQ ID NO: 2092; WAN024CC6_at; Start 773; Stop 797
tagtgccctcccctgatttagaaga

SEQ ID NO: 112544 - DNA, 25 bp, Artificial
  probe
  misc_feature (1)..(25): SEQ ID NO: 2092; WAN024CC6_at; Start 479; Stop 503
tgtttcaaaagtttaatcataccga

SEQ ID NO: 112545 - DNA, 25 bp, Artificial
  probe
  misc_feature (1)..(25): SEQ ID NO: 2092; WAN024CC6_at; Start 268; Stop 292
caaattagaattagcatacaaactg

SEQ ID NO: 112546 - DNA, 25 bp, Artificial
  probe
  misc_feature (1)..(25): SEQ ID NO: 2092; WAN024CC6_at; Start 1147; Stop 1171
caaaaaacatatcttgataacccac

SEQ ID NO: 112547 - DNA, 25 bp, Artificial
  probe
  misc_feature (1)..(25): SEQ ID NO: 2092; WAN024CC6_at; Start 419; Stop 443
gaaatggctctataaatactcctaa

SEQ ID NO: 112548 - DNA, 25 bp, Artificial
  probe
  misc_feature (1)..(25): SEQ ID NO: 2092; WAN024CC6_at; Start 327; Stop 351
tattcatgatacagataaagttcct

SEQ ID NO: 112549 - DNA, 25 bp, Artificial
  probe
  misc_feature (1)..(25): SEQ ID NO: 2092; WAN024CC6_at; Start 618; Stop 642
taaacttaccgacgatgatgcaaat

SEQ ID NO: 112550 - DNA, 25 bp, Artificial
  probe
  misc_feature (1)..(25): SEQ ID NO: 2092; WAN024CC6_at; Start 706; Stop 730
caacttcgttatcgacaccttacaa

SEQ ID NO: 112551 - DNA, 25 bp, Artificial
  probe
  misc_feature (1)..(25): SEQ ID NO: 2092; WAN024CC6_at; Start 690; Stop 714
tgattggcaattagtacaacttcgt

SEQ ID NO: 112552 - DNA, 25 bp, Artificial
  probe
  misc_feature (1)..(25): SEQ ID NO: 2092; WAN024CC6_at; Start 1018; Stop 1042
cttgaagttacagaaaaagatttcg

SEQ ID NO: 112553 - DNA, 25 bp, Artificial
  probe
  misc_feature (1)..(25): SEQ ID NO: 2092; WAN024CC6_at; Start 557; Stop 581
tcttcgttgaaaatgaagacggaag

SEQ ID NO: 112554 - DNA, 25 bp, Artificial
  probe
  misc_feature (1)..(25): SEQ ID NO: 2092; WAN024CC6_at; Start 874; Stop 898
gttttctcttcaatatctggtctcg

SEQ ID NO: 112555 - DNA, 25 bp, Artificial
  probe
  misc_feature (1)..(25): SEQ ID NO: 2092; WAN024CC6_at; Start 889; Stop 913
tctggtctcgaaaaatatcctttag

SEQ ID NO: 112556 - DNA, 25 bp, Artificial
  probe
  misc_feature (1)..(25): SEQ ID NO: 2092; WAN024CC6_at; Start 171; Stop 195
cactttagatataatcggtgtaaac

SEQ ID NO: 112557 - DNA, 25 bp, Artificial
  probe
  misc_feature (1)..(25): SEQ ID NO: 2092; WAN024CC6_at; Start 741; Stop 765
tatggctttatatttagatcaggga

SEQ ID NO: 112558 - DNA, 25 bp, Artificial
  probe
  misc_feature (1)..(25): SEQ ID NO: 2092; WAN024CC6_at; Start 1069; Stop 1093
aaaaatcctgattatagtatccaag

SEQ ID NO: 112559 - DNA, 25 bp, Artificial
  probe
  misc_feature (1)..(25): SEQ ID NO: 2092; WAN024CC6_at; Start 634; Stop 658
gatgcaaatcgtttcaaaactatgc

SEQ ID NO: 112560 - DNA, 25 bp, Artificial
  probe
  misc_feature (1)..(25): SEQ ID NO: 2092; WAN024CC6_at; Start 857; Stop 881
aataccaattgctgaaagttttctc

SEQ ID NO: 112561 - DNA, 25 bp, Artificial
  probe
  misc_feature (1)..(25): SEQ ID NO: 2092; WAN024CC6_at; Start 79; Stop 103
cattctaaaactgaattggtgcgtg

SEQ ID NO: 112562 - DNA, 25 bp, Artificial
  probe
  misc_feature (1)..(25): SEQ ID NO: 1144; WAN024CC7_at; Start 270; Stop 294
tccctatagtcaagcaattccatcg

SEQ ID NO: 112563 - DNA, 25 bp, Artificial
  probe
  misc_feature (1)..(25): SEQ ID NO: 1144; WAN024CC7_at; Start 755; Stop 779
tggcggcagcacttagacagattgc

SEQ ID NO: 112564 - DNA, 25 bp, Artificial
  probe
  misc_feature (1)..(25): SEQ ID NO: 1144; WAN024CC7_at; Start 359; Stop 383
cttcttgggaagatgatggaacagt

SEQ ID NO: 112565 - DNA, 25 bp, Artificial
  probe
  misc_feature (1)..(25): SEQ ID NO: 1144; WAN024CC7_at; Start 327; Stop 351
tgccaaaccatttctacgaatcagg

SEQ ID NO: 112566 - DNA, 25 bp, Artificial
  probe
  misc_feature (1)..(25): SEQ ID NO: 1144; WAN024CC7_at; Start 1485; Stop 1509
tcaacatctgtatgagctgaacaca

SEQ ID NO: 112567 - DNA, 25 bp, Artificial
  probe
  misc_feature (1)..(25): SEQ ID NO: 1144; WAN024CC7_at; Start 1341; Stop 1365
tcagatttcaattgtccctttaggg

SEQ ID NO: 112568 - DNA, 25 bp, Artificial
  probe
  misc_feature (1)..(25): SEQ ID NO: 1144; WAN024CC7_at; Start 709; Stop 733
gataaccgtttttctcaagcagagt

SEQ ID NO: 112569 - DNA, 25 bp, Artificial
  probe
  misc_feature (1)..(25): SEQ ID NO: 1144; WAN024CC7_at; Start 1087; Stop 1111
gctattgtaaaaagaattgacccag

SEQ ID NO: 112570 - DNA, 25 bp, Artificial
  probe
  misc_feature (1)..(25): SEQ ID NO: 1144; WAN024CC7_at; Start 124; Stop 148
gcattgagtaagctgttttcggaca

SEQ ID NO: 112571 - DNA, 25 bp, Artificial
  probe
  misc_feature (1)..(25): SEQ ID NO: 1144; WAN024CC7_at; Start 811; Stop 835
gcatttacagtttcagatctaggag

SEQ ID NO: 112572 - DNA, 25 bp, Artificial
  probe
  misc_feature (1)..(25): SEQ ID NO: 1144; WAN024CC7_at; Start 1573; Stop 1597
gaatcgataggagctcaacgtctga

SEQ ID NO: 112573 - DNA, 25 bp, Artificial
  probe
  misc_feature (1)..(25): SEQ ID NO: 1144; WAN024CC7_at; Start 1219; Stop 1243
ggagcaattcaagcttatcctgaac

SEQ ID NO: 112574 - DNA, 25 bp, Artificial
  probe
  misc_feature (1)..(25): SEQ ID NO: 1144; WAN024CC7_at; Start 1703; Stop 1727
tatccccaatagaaggaccagttgt

SEQ ID NO: 112575 - DNA, 25 bp, Artificial
  probe
  misc_feature (1)..(25): SEQ ID NO: 1144; WAN024CC7_at; Start 893; Stop 917
tagaaattaccaaagaccgtgaaga

SEQ ID NO: 112576 - DNA, 25 bp, Artificial
  probe
  misc_feature (1)..(25): SEQ ID NO: 1144; WAN024CC7_at; Start 1506; Stop 1530
cacagagtttcaagaatggttccat

SEQ ID NO: 112577 - DNA, 25 bp, Artificial
  probe
  misc_feature (1)..(25): SEQ ID NO: 1144; WAN024CC7_at; Start 1931; Stop 1955
gaggaaaaccaacaactcatatgca

SEQ ID NO: 112578 - DNA, 25 bp, Artificial
  probe
  misc_feature (1)..(25): SEQ ID NO: 1144; WAN024CC7_at; Start 448; Stop 472
gacaaacatcgtgctcctagaaagg

SEQ ID NO: 112579 - DNA, 25 bp, Artificial
  probe
  misc_feature (1)..(25): SEQ ID NO: 1144; WAN024CC7_at; Start 1854; Stop 1878
taagagtggacatggcgatagtttc

SEQ ID NO: 112580 - DNA, 25 bp, Artificial
  probe
  misc_feature (1)..(25): SEQ ID NO: 1144; WAN024CC7_at; Start 794; Stop 818
caacaaccactgaagaagcatttac

SEQ ID NO: 112581 - DNA, 25 bp, Artificial
  probe
  misc_feature (1)..(25): SEQ ID NO: 1144; WAN024CC7_at; Start 1262; Stop 1286
tagttctaggtgaaggcgacagtga

SEQ ID NO: 112582 - DNA, 25 bp, Artificial
  probe
  misc_feature (1)..(25): SEQ ID NO: 1144; WAN024CC7_at; Start 498; Stop 522
tgtacctgcttcaagaacgcctgag

SEQ ID NO: 112583 - DNA, 25 bp, Artificial
  probe
  misc_feature (1)..(25): SEQ ID NO: 1144; WAN024CC7_at; Start 741; Stop 765
taattcttctgagatggcggcagca

SEQ ID NO: 112584 - DNA, 25 bp, Artificial
  probe
  misc_feature (1)..(25): SEQ ID NO: 1144; WAN024CC7_at; Start 931; Stop 955
ccaagatttaagttgattccaccag

SEQ ID NO: 112585 - DNA, 25 bp, Artificial
  probe
  misc_feature (1)..(25): SEQ ID NO: 1144; WAN024CC7_at; Start 1281; Stop 1305
cagtgaggaactgctattaccaaag

SEQ ID NO: 112586 - DNA, 25 bp, Artificial
  probe
  misc_feature (1)..(25): SEQ ID NO: 1144; WAN024CC7_at; Start 1811; Stop 1835
tcaacaaacgtaaagaggaagcaat

SEQ ID NO: 112587 - DNA, 25 bp, Artificial
  probe
  misc_feature (1)..(25): SEQ ID NO: 1144; WAN024CC7_at; Start 1519; Stop 1543
gaatggttccatactcagagacttg

SEQ ID NO: 112588 - DNA, 25 bp, Artificial
  probe
  misc_feature (1)..(25): SEQ ID NO: 1144; WAN024CC7_at; Start 1179; Stop 1203
gctacctccagctatagatgaatct

SEQ ID NO: 112589 - DNA, 25 bp, Artificial
  probe
  misc_feature (1)..(25): SEQ ID NO: 1144; WAN024CC7_at; Start 1069; Stop 1093
ttaacgtcacattctccagctattg

SEQ ID NO: 112590 - DNA, 25 bp, Artificial
  probe
  misc_feature (1)..(25): SEQ ID NO: 1144; WAN024CC7_at; Start 251; Stop 275
ttgatgaacttgatggaactcccta

SEQ ID NO: 112591 - DNA, 25 bp, Artificial
  probe
  misc_feature (1)..(25): SEQ ID NO: 1144; WAN024CC7_at; Start 1796; Stop 1820
tgcagttagaaggtttcaacaaacg

SEQ ID NO: 112592 - DNA, 25 bp, Artificial
  probe
  misc_feature (1)..(25): SEQ ID NO: 1144; WAN024CC7_at; Start 199; Stop 223
tcaaggcccggagaaaatactagaa

SEQ ID NO: 112593 - DNA, 25 bp, Artificial
  probe
  misc_feature (1)..(25): SEQ ID NO: 1144; WAN024CC7_at; Start 963; Stop 987
tatcctagcaatagaagaaccagaa

SEQ ID NO: 112594 - DNA, 25 bp, Artificial
  probe
  misc_feature (1)..(25): SEQ ID NO: 1144; WAN024CC7_at; Start 1316; Stop 1340
tacttgggaaagaggtagatagctc

SEQ ID NO: 112595 - DNA, 25 bp, Artificial
  probe
  misc_feature (1)..(25): SEQ ID NO: 1144; WAN024CC7_at; Start 309; Stop 333
tacagtttctaaagatggtgccaaa

SEQ ID NO: 112596 - DNA, 25 bp, Artificial
  probe
  misc_feature (1)..(25): SEQ ID NO: 4095; WAN024CC8_at; Start 1552; Stop 1576
gatacagtctctagtttcaagggtg

SEQ ID NO: 112597 - DNA, 25 bp, Artificial
  probe
  misc_feature (1)..(25): SEQ ID NO: 4095; WAN024CC8_at; Start 757; Stop 781
gataagcaagccattatgagatggg

SEQ ID NO: 112598 - DNA, 25 bp, Artificial
  probe
  misc_feature (1)..(25): SEQ ID NO: 4095; WAN024CC8_at; Start 618; Stop 642
cgaatacatccgtaaagcacttcaa

SEQ ID NO: 112599 - DNA, 25 bp, Artificial
  probe
  misc_feature (1)..(25): SEQ ID NO: 4095; WAN024CC8_at; Start 849; Stop 873
gatgaatcaccgctctgtacctaag

SEQ ID NO: 112600 - DNA, 25 bp, Artificial
  probe
  misc_feature (1)..(25): SEQ ID NO: 4095; WAN024CC8_at; Start 1037; Stop 1061
ttcaaggaggtatacgaccatcaga

SEQ ID NO: 112601 - DNA, 25 bp, Artificial
  probe
  misc_feature (1)..(25): SEQ ID NO: 4095; WAN024CC8_at; Start 1753; Stop 1777
tgtaaattgagaaataatagtccgc

SEQ ID NO: 112602 - DNA, 25 bp, Artificial
  probe
  misc_feature (1)..(25): SEQ ID NO: 4095; WAN024CC8_at; Start 1664; Stop 1688
tctggagttttaataatcagccgga

SEQ ID NO: 112603 - DNA, 25 bp, Artificial
  probe
  misc_feature (1)..(25): SEQ ID NO: 4095; WAN024CC8_at; Start 1525; Stop 1549
tattctcaaacacaaggtgaatggc

SEQ ID NO: 112604 - DNA, 25 bp, Artificial
  probe
  misc_feature (1)..(25): SEQ ID NO: 4095; WAN024CC8_at; Start 416; Stop 440
taaaagaactactctctatgaatgg

SEQ ID NO: 112605 - DNA, 25 bp, Artificial
  probe
  misc_feature (1)..(25): SEQ ID NO: 4095; WAN024CC8_at; Start 1066; Stop 1090
tgtatcctagcaaaacaaaaggttg

SEQ ID NO: 112606 - DNA, 25 bp, Artificial
  probe
  misc_feature (1)..(25): SEQ ID NO: 4095; WAN024CC8_at; Start 740; Stop 764
taacagcagttggagatgataagca

SEQ ID NO: 112607 - DNA, 25 bp, Artificial
  probe
  misc_feature (1)..(25): SEQ ID NO: 4095; WAN024CC8_at; Start 1052; Stop 1076
gaccatcagaaatttgtatcctagc

SEQ ID NO: 112608 - DNA, 25 bp, Artificial
  probe
  misc_feature (1)..(25): SEQ ID NO: 4095; WAN024CC8_at; Start 353; Stop 377
gagatgttctacctgaggatatacg

SEQ ID NO: 112609 - DNA, 25 bp, Artificial
  probe
  misc_feature (1)..(25): SEQ ID NO: 4095; WAN024CC8_at; Start 184; Stop 208
tctacaaataaatgcgtttctccga

SEQ ID NO: 112610 - DNA, 25 bp, Artificial
  probe
  misc_feature (1)..(25): SEQ ID NO: 4095; WAN024CC8_at; Start 486; Stop 510
cgaaaacatcatacttaacaatggg

SEQ ID NO: 112611 - DNA, 25 bp, Artificial
  probe
  misc_feature (1)..(25): SEQ ID NO: 4095; WAN024CC8_at; Start 1460; Stop 1484
catacaatggaaaaagtgacctaga

SEQ ID NO: 112612 - DNA, 25 bp, Artificial
  probe
  misc_feature (1)..(25): SEQ ID NO: 4095; WAN024CC8_at; Start 786; Stop 810
tgcaaagcctgatatttttccagac

SEQ ID NO: 112613 - DNA, 25 bp, Artificial
  probe
  misc_feature (1)..(25): SEQ ID NO: 4095; WAN024CC8_at; Start 74; Stop 98
tagaagagactgcattaggagccgt

SEQ ID NO: 112614 - DNA, 25 bp, Artificial
  probe
  misc_feature (1)..(25): SEQ ID NO: 4095; WAN024CC8_at; Start 1706; Stop 1730
tctttgtcgcactttcaagagcaaa

SEQ ID NO: 112615 - DNA, 25 bp, Artificial
  probe
  misc_feature (1)..(25): SEQ ID NO: 4095; WAN024CC8_at; Start 1641; Stop 1665
tctaggcttggaggattctgcattc

SEQ ID NO: 112616 - DNA, 25 bp, Artificial
  probe
  misc_feature (1)..(25): SEQ ID NO: 4095; WAN024CC8_at; Start 771; Stop 795
tatgagatgggcaggtgcaaagcct

SEQ ID NO: 112617 - DNA, 25 bp, Artificial
  probe
  misc_feature (1)..(25): SEQ ID NO: 4095; WAN024CC8_at; Start 1680; Stop 1704
tcagccggaagaagataaaagtgca

SEQ ID NO: 112618 - DNA, 25 bp, Artificial
  probe
  misc_feature (1)..(25): SEQ ID NO: 4095; WAN024CC8_at; Start 545; Stop 569
gaacacaagataataagccggtcct

SEQ ID NO: 112619 - DNA, 25 bp, Artificial
  probe
  misc_feature (1)..(25): SEQ ID NO: 4095; WAN024CC8_at; Start 116; Stop 140
gtttagtcattgctggaccaggtgc

SEQ ID NO: 112620 - DNA, 25 bp, Artificial
  probe
  misc_feature (1)..(25): SEQ ID NO: 4095; WAN024CC8_at; Start 1537; Stop 1561
caaggtgaatggctagatacagtct

SEQ ID NO: 112621 - DNA, 25 bp, Artificial
  probe
  misc_feature (1)..(25): SEQ ID NO: 4095; WAN024CC8_at; Start 1568; Stop 1592
tcaagggtgaaaactcaattccaat

SEQ ID NO: 112622 - DNA, 25 bp, Artificial
  probe
  misc_feature (1)..(25): SEQ ID NO: 4095; WAN024CC8_at; Start 133; Stop 157
ccaggtgctgggaaaactgaattac

SEQ ID NO: 112623 - DNA, 25 bp, Artificial
  probe
  misc_feature (1)..(25): SEQ ID NO: 4095; WAN024CC8_at; Start 224; Stop 248
taagtttcaaaacggatgctgcatc

SEQ ID NO: 112624 - DNA, 25 bp, Artificial
  probe
  misc_feature (1)..(25): SEQ ID NO: 4095; WAN024CC8_at; Start 89; Stop 113
taggagccgtcaaagatgtgactaa

SEQ ID NO: 112625 - DNA, 25 bp, Artificial
  probe
  misc_feature (1)..(25): SEQ ID NO: 4095; WAN024CC8_at; Start 1211; Stop 1235
catgcagtcaaggaaaacgagatcc

SEQ ID NO: 112626 - DNA, 25 bp, Artificial
  probe
  misc_feature (1)..(25): SEQ ID NO: 4095; WAN024CC8_at; Start 561; Stop 585
gccggtcctcttgtataggcaaata

SEQ ID NO: 112627 - DNA, 25 bp, Artificial
  probe
  misc_feature (1)..(25): SEQ ID NO: 4095; WAN024CC8_at; Start 670; Stop 694
gaatttcaggatactacatatgccc

SEQ ID NO: 112628 - DNA, 25 bp, Artificial
  probe
  misc_feature (1)..(25): SEQ ID NO: 4095; WAN024CC8_at; Start 1374; Stop 1398
tattcccaatgaagaaagtatgcta

SEQ ID NO: 112629 - DNA, 25 bp, Artificial
  probe
  misc_feature (1)..(25): SEQ ID NO: 4095; WAN024CC8_at; Start 722; Stop 746
taggttcgtcttgtaaattaacagc

SEQ ID NO: 112630 - DNA, 25 bp, Artificial
  probe
  misc_feature (1)..(25): SEQ ID NO: 7617; WAN024CC9_at; Start 35; Stop 59
atgcggacatagcagatagccagcc

SEQ ID NO: 112631 - DNA, 25 bp, Artificial
  probe
  misc_feature (1)..(25): SEQ ID NO: 7617; WAN024CC9_at; Start 28; Stop 52
aatcccaatgcggacatagcagata

SEQ ID NO: 112632 - DNA, 25 bp, Artificial
  probe
  misc_feature (1)..(25): SEQ ID NO: 7617; WAN024CC9_at; Start 38; Stop 62
cggacatagcagatagccagcctat

SEQ ID NO: 112633 - DNA, 25 bp, Artificial
  probe
  misc_feature (1)..(25): SEQ ID NO: 7617; WAN024CC9_at; Start 4; Stop 28
gataagtttcgcatcatccctacaa

SEQ ID NO: 112634 - DNA, 25 bp, Artificial
  probe
  misc_feature (1)..(25): SEQ ID NO: 7617; WAN024CC9_at; Start 34; Stop 58
aatgcggacatagcagatagccagc

SEQ ID NO: 112635 - DNA, 25 bp, Artificial
  probe
  misc_feature (1)..(25): SEQ ID NO: 7617; WAN024CC9_at; Start 36; Stop 60
tgcggacatagcagatagccagcct

SEQ ID NO: 112636 - DNA, 25 bp, Artificial
  probe
  misc_feature (1)..(25): SEQ ID NO: 7617; WAN024CC9_at; Start 55; Stop 79
cagcctatcgtagcttttcttattc

SEQ ID NO: 112637 - DNA, 25 bp, Artificial
  probe
  misc_feature (1)..(25): SEQ ID NO: 7617; WAN024CC9_at; Start 6; Stop 30
taagtttcgcatcatccctacaaat

SEQ ID NO: 112638 - DNA, 25 bp, Artificial
  probe
  misc_feature (1)..(25): SEQ ID NO: 7617; WAN024CC9_at; Start 17; Stop 41
tcatccctacaaatcccaatgcgga

SEQ ID NO: 112639 - DNA, 25 bp, Artificial
  probe
  misc_feature (1)..(25): SEQ ID NO: 7617; WAN024CC9_at; Start 19; Stop 43
atccctacaaatcccaatgcggaca

SEQ ID NO: 112640 - DNA, 25 bp, Artificial
  probe
  misc_feature (1)..(25): SEQ ID NO: 7617; WAN024CC9_at; Start 44; Stop 68
tagcagatagccagcctatcgtagc

SEQ ID NO: 112641 - DNA, 25 bp, Artificial
  probe
  misc_feature (1)..(25): SEQ ID NO: 7617; WAN024CC9_at; Start 49; Stop 73
gatagccagcctatcgtagcttttc

SEQ ID NO: 112642 - DNA, 25 bp, Artificial
  probe
  misc_feature (1)..(25): SEQ ID NO: 7617; WAN024CC9_at; Start 62; Stop 86
tcgtagcttttcttattcttggcgt

SEQ ID NO: 112643 - DNA, 25 bp, Artificial
  probe
  misc_feature (1)..(25): SEQ ID NO: 7617; WAN024CC9_at; Start 37; Stop 61
gcggacatagcagatagccagccta

SEQ ID NO: 112644 - DNA, 25 bp, Artificial
  probe
  misc_feature (1)..(25): SEQ ID NO: 7617; WAN024CC9_at; Start 8; Stop 32
agtttcgcatcatccctacaaatcc

SEQ ID NO: 112645 - DNA, 25 bp, Artificial
  probe
  misc_feature (1)..(25): SEQ ID NO: 7617; WAN024CC9_at; Start 22; Stop 46
cctacaaatcccaatgcggacatag

SEQ ID NO: 112646 - DNA, 25 bp, Artificial
  probe
  misc_feature (1)..(25): SEQ ID NO: 7617; WAN024CC9_at; Start 64; Stop 88
gtagcttttcttattcttggcgtcc

SEQ ID NO: 112647 - DNA, 25 bp, Artificial
  probe
  misc_feature (1)..(25): SEQ ID NO: 7617; WAN024CC9_at; Start 47; Stop 71
cagatagccagcctatcgtagcttt

SEQ ID NO: 112648 - DNA, 25 bp, Artificial
  probe
  misc_feature (1)..(25): SEQ ID NO: 7617; WAN024CC9_at; Start 60; Stop 84
tatcgtagcttttcttattcttggc

SEQ ID NO: 112649 - DNA, 25 bp, Artificial
  probe
  misc_feature (1)..(25): SEQ ID NO: 7617; WAN024CC9_at; Start 16; Stop 40
atcatccctacaaatcccaatgcgg

SEQ ID NO: 112650 - DNA, 25 bp, Artificial
  probe
  misc_feature (1)..(25): SEQ ID NO: 7617; WAN024CC9_at; Start 66; Stop 90
agcttttcttattcttggcgtcctc

SEQ ID NO: 112651 - DNA, 25 bp, Artificial
  probe
  misc_feature (1)..(25): SEQ ID NO: 7617; WAN024CC9_at; Start 51; Stop 75
tagccagcctatcgtagcttttctt

SEQ ID NO: 112652 - DNA, 25 bp, Artificial
  probe
  misc_feature (1)..(25): SEQ ID NO: 7617; WAN024CC9_at; Start 1; Stop 25
ttggataagtttcgcatcatcccta

SEQ ID NO: 112653 - DNA, 25 bp, Artificial
  probe
  misc_feature (1)..(25): SEQ ID NO: 7617; WAN024CC9_at; Start 33; Stop 57
caatgcggacatagcagatagccag

SEQ ID NO: 112654 - DNA, 25 bp, Artificial
  probe
  misc_feature (1)..(25): SEQ ID NO: 7617; WAN024CC9_at; Start 24; Stop 48
tacaaatcccaatgcggacatagca

SEQ ID NO: 112655 - DNA, 25 bp, Artificial
  probe
  misc_feature (1)..(25): SEQ ID NO: 7617; WAN024CC9_at; Start 41; Stop 65
acatagcagatagccagcctatcgt

SEQ ID NO: 112656 - DNA, 25 bp, Artificial
  probe
  misc_feature (1)..(25): SEQ ID NO: 7617; WAN024CC9_at; Start 3; Stop 27
ggataagtttcgcatcatccctaca

SEQ ID NO: 112657 - DNA, 25 bp, Artificial
  probe
  misc_feature (1)..(25): SEQ ID NO: 7617; WAN024CC9_at; Start 31; Stop 55
cccaatgcggacatagcagatagcc

SEQ ID NO: 112658 - DNA, 25 bp, Artificial
  probe
  misc_feature (1)..(25): SEQ ID NO: 7617; WAN024CC9_at; Start 53; Stop 77
gccagcctatcgtagcttttcttat

SEQ ID NO: 112659 - DNA, 25 bp, Artificial
  probe
  misc_feature (1)..(25): SEQ ID NO: 7617; WAN024CC9_at; Start 32; Stop 56
ccaatgcggacatagcagatagcca

SEQ ID NO: 112660 - DNA, 25 bp, Artificial
  probe
  misc_feature (1)..(25): SEQ ID NO: 7617; WAN024CC9_at; Start 25; Stop 49
acaaatcccaatgcggacatagcag

SEQ ID NO: 112661 - DNA, 25 bp, Artificial
  probe
  misc_feature (1)..(25): SEQ ID NO: 7617; WAN024CC9_at; Start 30; Stop 54
tcccaatgcggacatagcagatagc

SEQ ID NO: 112662 - DNA, 25 bp, Artificial
  probe
  misc_feature (1)..(25): SEQ ID NO: 7617; WAN024CC9_at; Start 45; Stop 69
agcagatagccagcctatcgtagct

SEQ ID NO: 112663 - DNA, 25 bp, Artificial
  probe
  misc_feature (1)..(25): SEQ ID NO: 7617; WAN024CC9_at; Start 40; Stop 64
gacatagcagatagccagcctatcg

SEQ ID NO: 112664 - DNA, 25 bp, Artificial
  probe
  misc_feature (1)..(25): SEQ ID NO: 5868; WAN024CCA_at; Start 376; Stop 400
gaaatcagagatatgcttgaagttg

SEQ ID NO: 112665 - DNA, 25 bp, Artificial
  probe
  misc_feature (1)..(25): SEQ ID NO: 5868; WAN024CCA_at; Start 172; Stop 196
gaaaatatggaatttcttctccgtc

SEQ ID NO: 112666 - DNA, 25 bp, Artificial
  probe
  misc_feature (1)..(25): SEQ ID NO: 5868; WAN024CCA_at; Start 252; Stop 276
tcaacgcacagagattatgcaaacc

SEQ ID NO: 112667 - DNA, 25 bp, Artificial
  probe
  misc_feature (1)..(25): SEQ ID NO: 5868; WAN024CCA_at; Start 214; Stop 238
gaagagtttgaatatatctgtcaac

SEQ ID NO: 112668 - DNA, 25 bp, Artificial
  probe
  misc_feature (1)..(25): SEQ ID NO: 5868; WAN024CCA_at; Start 57; Stop 81
ggtctataaagaaatacgtgagtca

SEQ ID NO: 112669 - DNA, 25 bp, Artificial
  probe
  misc_feature (1)..(25): SEQ ID NO: 5868; WAN024CCA_at; Start 323; Stop 347
tatttcaaaaatgccaagactacct

SEQ ID NO: 112670 - DNA, 25 bp, Artificial
  probe
  misc_feature (1)..(25): SEQ ID NO: 5868; WAN024CCA_at; Start 487; Stop 511
caagatacatggtatgagagtgatc

SEQ ID NO: 112671 - DNA, 25 bp, Artificial
  probe
  misc_feature (1)..(25): SEQ ID NO: 5868; WAN024CCA_at; Start 536; Stop 560
tcagttttcccattgaatacctcca

SEQ ID NO: 112672 - DNA, 25 bp, Artificial
  probe
  misc_feature (1)..(25): SEQ ID NO: 5868; WAN024CCA_at; Start 830; Stop 854
ccgaggaaacttctatgctgtctca

SEQ ID NO: 112673 - DNA, 25 bp, Artificial
  probe
  misc_feature (1)..(25): SEQ ID NO: 5868; WAN024CCA_at; Start 156; Stop 180
gacaaccccaaaatatgaaaatatg

SEQ ID NO: 112674 - DNA, 25 bp, Artificial
  probe
  misc_feature (1)..(25): SEQ ID NO: 5868; WAN024CCA_at; Start 845; Stop 869
tgctgtctcatctcaaaaaagaagt

SEQ ID NO: 112675 - DNA, 25 bp, Artificial
  probe
  misc_feature (1)..(25): SEQ ID NO: 5868; WAN024CCA_at; Start 361; Stop 385
gatctccctatagaagaaatcagag

SEQ ID NO: 112676 - DNA, 25 bp, Artificial
  probe
  misc_feature (1)..(25): SEQ ID NO: 5868; WAN024CCA_at; Start 267; Stop 291
tatgcaaacctatctcaatatgcgt

SEQ ID NO: 112677 - DNA, 25 bp, Artificial
  probe
  misc_feature (1)..(25): SEQ ID NO: 5868; WAN024CCA_at; Start 652; Stop 676
tccacactctatctatacaatcaag

SEQ ID NO: 112678 - DNA, 25 bp, Artificial
  probe
  misc_feature (1)..(25): SEQ ID NO: 5868; WAN024CCA_at; Start 549; Stop 573
tgaatacctccatctcatcactgga

SEQ ID NO: 112679 - DNA, 25 bp, Artificial
  probe
  misc_feature (1)..(25): SEQ ID NO: 5868; WAN024CCA_at; Start 665; Stop 689
tatacaatcaagataaaaacatgtg

SEQ ID NO: 112680 - DNA, 25 bp, Artificial
  probe
  misc_feature (1)..(25): SEQ ID NO: 5868; WAN024CCA_at; Start 143; Stop 167
tcgaaagtggcaagacaaccccaaa

SEQ ID NO: 112681 - DNA, 25 bp, Artificial
  probe
  misc_feature (1)..(25): SEQ ID NO: 5868; WAN024CCA_at; Start 354; Stop 378
ccaccacgatctccctatagaagaa

SEQ ID NO: 112682 - DNA, 25 bp, Artificial
  probe
  misc_feature (1)..(25): SEQ ID NO: 5868; WAN024CCA_at; Start 678; Stop 702
taaaaacatgtgtaagcaaatctgc

SEQ ID NO: 112683 - DNA, 25 bp, Artificial
  probe
  misc_feature (1)..(25): SEQ ID NO: 5868; WAN024CCA_at; Start 499; Stop 523
tatgagagtgatctaaaaatcctca

SEQ ID NO: 112684 - DNA, 25 bp, Artificial
  probe
  misc_feature (1)..(25): SEQ ID NO: 5868; WAN024CCA_at; Start 442; Stop 466
cacgcagaacaggttgtcaaaaaac

SEQ ID NO: 112685 - DNA, 25 bp, Artificial
  probe
  misc_feature (1)..(25): SEQ ID NO: 5868; WAN024CCA_at; Start 134; Stop 158
tatcaaaaatcgaaagtggcaagac

SEQ ID NO: 112686 - DNA, 25 bp, Artificial
  probe
  misc_feature (1)..(25): SEQ ID NO: 5868; WAN024CCA_at; Start 241; Stop 265
tatcaaccaagtcaacgcacagaga

SEQ ID NO: 112687 - DNA, 25 bp, Artificial
  probe
  misc_feature (1)..(25): SEQ ID NO: 5868; WAN024CCA_at; Start 111; Stop 135
gggtgttctctcaagaaccagctta

SEQ ID NO: 112688 - DNA, 25 bp, Artificial
  probe
  misc_feature (1)..(25): SEQ ID NO: 5868; WAN024CCA_at; Start 300; Stop 324
cgggaccagcgatcttgtcaattta

SEQ ID NO: 112689 - DNA, 25 bp, Artificial
  probe
  misc_feature (1)..(25): SEQ ID NO: 5868; WAN024CCA_at; Start 332; Stop 356
aatgccaagactacctcaagaccca

SEQ ID NO: 112690 - DNA, 25 bp, Artificial
  probe
  misc_feature (1)..(25): SEQ ID NO: 5868; WAN024CCA_at; Start 515; Stop 539
aaatcctcaataccattcttttcag

SEQ ID NO: 112691 - DNA, 25 bp, Artificial
  probe
  misc_feature (1)..(25): SEQ ID NO: 5868; WAN024CCA_at; Start 228; Stop 252
tatctgtcaactttatcaaccaagt

SEQ ID NO: 112692 - DNA, 25 bp, Artificial
  probe
  misc_feature (1)..(25): SEQ ID NO: 5868; WAN024CCA_at; Start 201; Stop 225
caatatgagttttgaagagtttgaa

SEQ ID NO: 112693 - DNA, 25 bp, Artificial
  probe
  misc_feature (1)..(25): SEQ ID NO: 5868; WAN024CCA_at; Start 186; Stop 210
tcttctccgtcaaatcaatatgagt

SEQ ID NO: 112694 - DNA, 25 bp, Artificial
  probe
  misc_feature (1)..(25): SEQ ID NO: 5868; WAN024CCA_at; Start 285; Stop 309
tatgcgttccattatcgggaccagc

SEQ ID NO: 112695 - DNA, 25 bp, Artificial
  probe
  misc_feature (1)..(25): SEQ ID NO: 5868; WAN024CCA_at; Start 121; Stop 145
tcaagaaccagcttatcaaaaatcg

SEQ ID NO: 112696 - DNA, 25 bp, Artificial
  probe
  misc_feature (1)..(25): SEQ ID NO: 5868; WAN024CCA_at; Start 36; Stop 60
catgcgttatgatttcggaaaggtc

SEQ ID NO: 112697 - DNA, 25 bp, Artificial
  probe
  misc_feature (1)..(25): SEQ ID NO: 5868; WAN024CCA_at; Start 17; Stop 41
ttcacgaaaaggagaaaatcatgcg

SEQ ID NO: 112698 - DNA, 25 bp, Artificial
  probe
  misc_feature (1)..(25): SEQ ID NO: 6535; WAN024CCB_at; Start 233; Stop 257
agagggcggctcaaggcagatacca

SEQ ID NO: 112699 - DNA, 25 bp, Artificial
  probe
  misc_feature (1)..(25): SEQ ID NO: 6535; WAN024CCB_at; Start 181; Stop 205
aattgtagtcgctcctatctgatgc

SEQ ID NO: 112700 - DNA, 25 bp, Artificial
  probe
  misc_feature (1)..(25): SEQ ID NO: 6535; WAN024CCB_at; Start 176; Stop 200
tgagcaattgtagtcgctcctatct

SEQ ID NO: 112701 - DNA, 25 bp, Artificial
  probe
  misc_feature (1)..(25): SEQ ID NO: 6535; WAN024CCB_at; Start 161; Stop 185
ttaccggtacaaccatgagcaattg

SEQ ID NO: 112702 - DNA, 25 bp, Artificial
  probe
  misc_feature (1)..(25): SEQ ID NO: 6535; WAN024CCB_at; Start 204; Stop 228
gcgctatttcaaccaattttttaga

SEQ ID NO: 112703 - DNA, 25 bp, Artificial
  probe
  misc_feature (1)..(25): SEQ ID NO: 6535; WAN024CCB_at; Start 247; Stop 271
ggcagataccaagagatacttttgt

SEQ ID NO: 112704 - DNA, 25 bp, Artificial
  probe
  misc_feature (1)..(25): SEQ ID NO: 6535; WAN024CCB_at; Start 201; Stop 225
gatgcgctatttcaaccaatttttt

SEQ ID NO: 112705 - DNA, 25 bp, Artificial
  probe
  misc_feature (1)..(25): SEQ ID NO: 6535; WAN024CCB_at; Start 184; Stop 208
tgtagtcgctcctatctgatgcgct

SEQ ID NO: 112706 - DNA, 25 bp, Artificial
  probe
  misc_feature (1)..(25): SEQ ID NO: 6535; WAN024CCB_at; Start 168; Stop 192
tacaaccatgagcaattgtagtcgc

SEQ ID NO: 112707 - DNA, 25 bp, Artificial
  probe
  misc_feature (1)..(25): SEQ ID NO: 6535; WAN024CCB_at; Start 55; Stop 79
gctgataatctaccaacctcttatt

SEQ ID NO: 112708 - DNA, 25 bp, Artificial
  probe
  misc_feature (1)..(25): SEQ ID NO: 6535; WAN024CCB_at; Start 221; Stop 245
tttttagaaatcagagggcggctca

SEQ ID NO: 112709 - DNA, 25 bp, Artificial
  probe
  misc_feature (1)..(25): SEQ ID NO: 6535; WAN024CCB_at; Start 217; Stop 241
caattttttagaaatcagagggcgg

SEQ ID NO: 112710 - DNA, 25 bp, Artificial
  probe
  misc_feature (1)..(25): SEQ ID NO: 6535; WAN024CCB_at; Start 162; Stop 186
taccggtacaaccatgagcaattgt

SEQ ID NO: 112711 - DNA, 25 bp, Artificial
  probe
  misc_feature (1)..(25): SEQ ID NO: 6535; WAN024CCB_at; Start 191; Stop 215
gctcctatctgatgcgctatttcaa

SEQ ID NO: 112712 - DNA, 25 bp, Artificial
  probe
  misc_feature (1)..(25): SEQ ID NO: 6535; WAN024CCB_at; Start 198; Stop 222
tctgatgcgctatttcaaccaattt

SEQ ID NO: 112713 - DNA, 25 bp, Artificial
  probe
  misc_feature (1)..(25): SEQ ID NO: 6535; WAN024CCB_at; Start 253; Stop 277
taccaagagatacttttgttcataa

SEQ ID NO: 112714 - DNA, 25 bp, Artificial
  probe
  misc_feature (1)..(25): SEQ ID NO: 6535; WAN024CCB_at; Start 173; Stop 197
ccatgagcaattgtagtcgctccta

SEQ ID NO: 112715 - DNA, 25 bp, Artificial
  probe
  misc_feature (1)..(25): SEQ ID NO: 6535; WAN024CCB_at; Start 140; Stop 164
tattcgacttggtcattccccttac

SEQ ID NO: 112716 - DNA, 25 bp, Artificial
  probe
  misc_feature (1)..(25): SEQ ID NO: 6535; WAN024CCB_at; Start 170; Stop 194
caaccatgagcaattgtagtcgctc

SEQ ID NO: 112717 - DNA, 25 bp, Artificial
  probe
  misc_feature (1)..(25): SEQ ID NO: 6535; WAN024CCB_at; Start 164; Stop 188
ccggtacaaccatgagcaattgtag

SEQ ID NO: 112718 - DNA, 25 bp, Artificial
  probe
  misc_feature (1)..(25): SEQ ID NO: 6535; WAN024CCB_at; Start 249; Stop 273
cagataccaagagatacttttgttc

SEQ ID NO: 112719 - DNA, 25 bp, Artificial
  probe
  misc_feature (1)..(25): SEQ ID NO: 6535; WAN024CCB_at; Start 264; Stop 288
acttttgttcataataggcatgtga

SEQ ID NO: 112720 - DNA, 25 bp, Artificial
  probe
  misc_feature (1)..(25): SEQ ID NO: 6535; WAN024CCB_at; Start 259; Stop 283
gagatacttttgttcataataggca

SEQ ID NO: 112721 - DNA, 25 bp, Artificial
  probe
  misc_feature (1)..(25): SEQ ID NO: 6535; WAN024CCB_at; Start 223; Stop 247
tttagaaatcagagggcggctcaag

SEQ ID NO: 112722 - DNA, 25 bp, Artificial
  probe
  misc_feature (1)..(25): SEQ ID NO: 6535; WAN024CCB_at; Start 224; Stop 248
ttagaaatcagagggcggctcaagg

SEQ ID NO: 112723 - DNA, 25 bp, Artificial
  probe
  misc_feature (1)..(25): SEQ ID NO: 6535; WAN024CCB_at; Start 186; Stop 210
tagtcgctcctatctgatgcgctat

SEQ ID NO: 112724 - DNA, 25 bp, Artificial
  probe
  misc_feature (1)..(25): SEQ ID NO: 6535; WAN024CCB_at; Start 54; Stop 78
ggctgataatctaccaacctcttat

SEQ ID NO: 112725 - DNA, 25 bp, Artificial
  probe
  misc_feature (1)..(25): SEQ ID NO: 6535; WAN024CCB_at; Start 196; Stop 220
tatctgatgcgctatttcaaccaat

SEQ ID NO: 112726 - DNA, 25 bp, Artificial
  probe
  misc_feature (1)..(25): SEQ ID NO: 6535; WAN024CCB_at; Start 158; Stop 182
cccttaccggtacaaccatgagcaa

SEQ ID NO: 112727 - DNA, 25 bp, Artificial
  probe
  misc_feature (1)..(25): SEQ ID NO: 6535; WAN024CCB_at; Start 231; Stop 255
tcagagggcggctcaaggcagatac

SEQ ID NO: 112728 - DNA, 25 bp, Artificial
  probe
  misc_feature (1)..(25): SEQ ID NO: 6535; WAN024CCB_at; Start 216; Stop 240
ccaattttttagaaatcagagggcg

SEQ ID NO: 112729 - DNA, 25 bp, Artificial
  probe
  misc_feature (1)..(25): SEQ ID NO: 6535; WAN024CCB_at; Start 220; Stop 244
ttttttagaaatcagagggcggctc

SEQ ID NO: 112730 - DNA, 25 bp, Artificial
  probe
  misc_feature (1)..(25): SEQ ID NO: 6535; WAN024CCB_at; Start 234; Stop 258
gagggcggctcaaggcagataccaa

SEQ ID NO: 112731 - DNA, 25 bp, Artificial
  probe
  misc_feature (1)..(25): SEQ ID NO: 6535; WAN024CCB_at; Start 178; Stop 202
agcaattgtagtcgctcctatctga

SEQ ID NO: 112732 - DNA, 25 bp, Artificial
  probe
  misc_feature (1)..(25): SEQ ID NO: 6877; WAN024CCC_at; Start 367; Stop 391
tatctcaaggaacaactaggctatg

SEQ ID NO: 112733 - DNA, 25 bp, Artificial
  probe
  misc_feature (1)..(25): SEQ ID NO: 6877; WAN024CCC_at; Start 881; Stop 905
tgattcgaggaaagactggcagagt

SEQ ID NO: 112734 - DNA, 25 bp, Artificial
  probe
  misc_feature (1)..(25): SEQ ID NO: 6877; WAN024CCC_at; Start 1092; Stop 1116
gaaggacttttcaaatgcaactgag

SEQ ID NO: 112735 - DNA, 25 bp, Artificial
  probe
  misc_feature (1)..(25): SEQ ID NO: 6877; WAN024CCC_at; Start 985; Stop 1009
gaaggaatgtttgatacggtcgaaa

SEQ ID NO: 112736 - DNA, 25 bp, Artificial
  probe
  misc_feature (1)..(25): SEQ ID NO: 6877; WAN024CCC_at; Start 1307; Stop 1331
gacgaaattccttgggaggcacagg

SEQ ID NO: 112737 - DNA, 25 bp, Artificial
  probe
  misc_feature (1)..(25): SEQ ID NO: 6877; WAN024CCC_at; Start 397; Stop 421
gataaactggctcatcttaagggtg

SEQ ID NO: 112738 - DNA, 25 bp, Artificial
  probe
  misc_feature (1)..(25): SEQ ID NO: 6877; WAN024CCC_at; Start 59; Stop 83
tagagcgctttggtgcgagtatatc

SEQ ID NO: 112739 - DNA, 25 bp, Artificial
  probe
  misc_feature (1)..(25): SEQ ID NO: 6877; WAN024CCC_at; Start 1016; Stop 1040
taaattccctcgatgtgttggcagg

SEQ ID NO: 112740 - DNA, 25 bp, Artificial
  probe
  misc_feature (1)..(25): SEQ ID NO: 6877; WAN024CCC_at; Start 1324; Stop 1348
ggcacagggtttgaccaagtcgaat

SEQ ID NO: 112741 - DNA, 25 bp, Artificial
  probe
  misc_feature (1)..(25): SEQ ID NO: 6877; WAN024CCC_at; Start 306; Stop 330
tgcagggaagttacatacggctcgt

SEQ ID NO: 112742 - DNA, 25 bp, Artificial
  probe
  misc_feature (1)..(25): SEQ ID NO: 6877; WAN024CCC_at; Start 1264; Stop 1288
gaggatatctatgtctacttgcaac

SEQ ID NO: 112743 - DNA, 25 bp, Artificial
  probe
  misc_feature (1)..(25): SEQ ID NO: 6877; WAN024CCC_at; Start 428; Stop 452
tagacttggcggaaaatcatgtggc

SEQ ID NO: 112744 - DNA, 25 bp, Artificial
  probe
  misc_feature (1)..(25): SEQ ID NO: 6877; WAN024CCC_at; Start 118; Stop 142
ggttctttagcccacgttcagatgt

SEQ ID NO: 112745 - DNA, 25 bp, Artificial
  probe
  misc_feature (1)..(25): SEQ ID NO: 6877; WAN024CCC_at; Start 559; Stop 583
gaatttaaccagaagcatacagacc

SEQ ID NO: 112746 - DNA, 25 bp, Artificial
  probe
  misc_feature (1)..(25): SEQ ID NO: 6877; WAN024CCC_at; Start 321; Stop 345
tacggctcgttctcgaaatgaccaa

SEQ ID NO: 112747 - DNA, 25 bp, Artificial
  probe
  misc_feature (1)..(25): SEQ ID NO: 6877; WAN024CCC_at; Start 635; Stop 659
gccaattgtctagcgatttgctgga

SEQ ID NO: 112748 - DNA, 25 bp, Artificial
  probe
  misc_feature (1)..(25): SEQ ID NO: 6877; WAN024CCC_at; Start 444; Stop 468
tcatgtggcgacgatcatgccgggc

SEQ ID NO: 112749 - DNA, 25 bp, Artificial
  probe
  misc_feature (1)..(25): SEQ ID NO: 6877; WAN024CCC_at; Start 926; Stop 950
tgttgacagtcatgaagtccttgcc

SEQ ID NO: 112750 - DNA, 25 bp, Artificial
  probe
  misc_feature (1)..(25): SEQ ID NO: 6877; WAN024CCC_at; Start 209; Stop 233
tagaagagctagaggcaggtcaact

SEQ ID NO: 112751 - DNA, 25 bp, Artificial
  probe
  misc_feature (1)..(25): SEQ ID NO: 6877; WAN024CCC_at; Start 134; Stop 158
ttcagatgttgggtcagacgggcat

SEQ ID NO: 112752 - DNA, 25 bp, Artificial
  probe
  misc_feature (1)..(25): SEQ ID NO: 6877; WAN024CCC_at; Start 580; Stop 604
gacctatgccctttaggtgcggcag

SEQ ID NO: 112753 - DNA, 25 bp, Artificial
  probe
  misc_feature (1)..(25): SEQ ID NO: 6877; WAN024CCC_at; Start 683; Stop 707
ctttggatgctgttagtgaccgcga

SEQ ID NO: 112754 - DNA, 25 bp, Artificial
  probe
  misc_feature (1)..(25): SEQ ID NO: 6877; WAN024CCC_at; Start 287; Stop 311
cagaaaaaattggtccccttgcagg

SEQ ID NO: 112755 - DNA, 25 bp, Artificial
  probe
  misc_feature (1)..(25): SEQ ID NO: 6877; WAN024CCC_at; Start 833; Stop 857
taggttcctctattatgccccaaaa

SEQ ID NO: 112756 - DNA, 25 bp, Artificial
  probe
  misc_feature (1)..(25): SEQ ID NO: 6877; WAN024CCC_at; Start 44; Stop 68
ctgtcgaagactgggtagagcgctt

SEQ ID NO: 112757 - DNA, 25 bp, Artificial
  probe
  misc_feature (1)..(25): SEQ ID NO: 6877; WAN024CCC_at; Start 1216; Stop 1240
caagattggactttggaggaattac

SEQ ID NO: 112758 - DNA, 25 bp, Artificial
  probe
  misc_feature (1)..(25): SEQ ID NO: 6877; WAN024CCC_at; Start 28; Stop 52
ggtcgctttgaaggtactgtcgaag

SEQ ID NO: 112759 - DNA, 25 bp, Artificial
  probe
  misc_feature (1)..(25): SEQ ID NO: 6877; WAN024CCC_at; Start 498; Stop 522
tagttttgcctaccacctgatggct

SEQ ID NO: 112760 - DNA, 25 bp, Artificial
  probe
  misc_feature (1)..(25): SEQ ID NO: 6877; WAN024CCC_at; Start 1125; Stop 1149
ttatttggcagggaaaggcttgcca

SEQ ID NO: 112761 - DNA, 25 bp, Artificial
  probe
  misc_feature (1)..(25): SEQ ID NO: 6877; WAN024CCC_at; Start 866; Stop 890
cagatatggctgagttgattcgagg

SEQ ID NO: 112762 - DNA, 25 bp, Artificial
  probe
  misc_feature (1)..(25): SEQ ID NO: 6877; WAN024CCC_at; Start 383; Stop 407
taggctatgtcctagataaactggc

SEQ ID NO: 112763 - DNA, 25 bp, Artificial
  probe
  misc_feature (1)..(25): SEQ ID NO: 6877; WAN024CCC_at; Start 459; Stop 483
catgccgggctatacccatctgcaa

SEQ ID NO: 112764 - DNA, 25 bp, Artificial
  probe
  misc_feature (1)..(25): SEQ ID NO: 6877; WAN024CCC_at; Start 340; Stop 364
gaccaagttgcgacagatatgcact

SEQ ID NO: 112765 - DNA, 25 bp, Artificial
  probe
  misc_feature (1)..(25): SEQ ID NO: 6877; WAN024CCC_at; Start 597; Stop 621
tgcggcagctttggcaggaacgact

SEQ ID NO: 112766 - DNA, 25 bp, Artificial
  probe
  misc_feature (1)..(25): SEQ ID NO: 6999; WAN024CCD_at; Start 288; Stop 312
catagatatcctcggtaatgagaga

SEQ ID NO: 112767 - DNA, 25 bp, Artificial
  probe
  misc_feature (1)..(25): SEQ ID NO: 6999; WAN024CCD_at; Start 264; Stop 288
cagcagttttaggttgcaagtagac

SEQ ID NO: 112768 - DNA, 25 bp, Artificial
  probe
  misc_feature (1)..(25): SEQ ID NO: 6999; WAN024CCD_at; Start 10; Stop 34
tgtcaccatgaatcgccgaacgatt

SEQ ID NO: 112769 - DNA, 25 bp, Artificial
  probe
  misc_feature (1)..(25): SEQ ID NO: 6999; WAN024CCD_at; Start 278; Stop 302
tgcaagtagacatagatatcctcgg

SEQ ID NO: 112770 - DNA, 25 bp, Artificial
  probe
  misc_feature (1)..(25): SEQ ID NO: 6999; WAN024CCD_at; Start 267; Stop 291
cagttttaggttgcaagtagacata

SEQ ID NO: 112771 - DNA, 25 bp, Artificial
  probe
  misc_feature (1)..(25): SEQ ID NO: 6999; WAN024CCD_at; Start 130; Stop 154
gctgccaatcgaccaacctcttatt

SEQ ID NO: 112772 - DNA, 25 bp, Artificial
  probe
  misc_feature (1)..(25): SEQ ID NO: 6999; WAN024CCD_at; Start 303; Stop 327
taatgagagaatgataggtttgtaa

SEQ ID NO: 112773 - DNA, 25 bp, Artificial
  probe
  misc_feature (1)..(25): SEQ ID NO: 6999; WAN024CCD_at; Start 296; Stop 320
tcctcggtaatgagagaatgatagg

SEQ ID NO: 112774 - DNA, 25 bp, Artificial
  probe
  misc_feature (1)..(25): SEQ ID NO: 6999; WAN024CCD_at; Start 256; Stop 280
tctttgaacagcagttttaggttgc

SEQ ID NO: 112775 - DNA, 25 bp, Artificial
  probe
  misc_feature (1)..(25): SEQ ID NO: 6999; WAN024CCD_at; Start 299; Stop 323
tcggtaatgagagaatgataggttt

SEQ ID NO: 112776 - DNA, 25 bp, Artificial
  probe
  misc_feature (1)..(25): SEQ ID NO: 6999; WAN024CCD_at; Start 247; Stop 271
ggaatttcgtctttgaacagcagtt

SEQ ID NO: 112777 - DNA, 25 bp, Artificial
  probe
  misc_feature (1)..(25): SEQ ID NO: 6999; WAN024CCD_at; Start 223; Stop 247
ttggtcaaaccctgtgcctcccaag

SEQ ID NO: 112778 - DNA, 25 bp, Artificial
  probe
  misc_feature (1)..(25): SEQ ID NO: 6999; WAN024CCD_at; Start 8; Stop 32
catgtcaccatgaatcgccgaacga

SEQ ID NO: 112779 - DNA, 25 bp, Artificial
  probe
  misc_feature (1)..(25): SEQ ID NO: 6999; WAN024CCD_at; Start 215; Stop 239
tattcgacttggtcaaaccctgtgc

SEQ ID NO: 112780 - DNA, 25 bp, Artificial
  probe
  misc_feature (1)..(25): SEQ ID NO: 6999; WAN024CCD_at; Start 15; Stop 39
ccatgaatcgccgaacgatttaacg

SEQ ID NO: 112781 - DNA, 25 bp, Artificial
  probe
  misc_feature (1)..(25): SEQ ID NO: 6999; WAN024CCD_at; Start 238; Stop 262
gcctcccaaggaatttcgtctttga

SEQ ID NO: 112782 - DNA, 25 bp, Artificial
  probe
  misc_feature (1)..(25): SEQ ID NO: 6999; WAN024CCD_at; Start 228; Stop 252
caaaccctgtgcctcccaaggaatt

SEQ ID NO: 112783 - DNA, 25 bp, Artificial
  probe
  misc_feature (1)..(25): SEQ ID NO: 6999; WAN024CCD_at; Start 276; Stop 300
gttgcaagtagacatagatatcctc

SEQ ID NO: 112784 - DNA, 25 bp, Artificial
  probe
  misc_feature (1)..(25): SEQ ID NO: 6999; WAN024CCD_at; Start 252; Stop 276
ttcgtctttgaacagcagttttagg

SEQ ID NO: 112785 - DNA, 25 bp, Artificial
  probe
  misc_feature (1)..(25): SEQ ID NO: 6999; WAN024CCD_at; Start 232; Stop 256
ccctgtgcctcccaaggaatttcgt

SEQ ID NO: 112786 - DNA, 25 bp, Artificial
  probe
  misc_feature (1)..(25): SEQ ID NO: 6999; WAN024CCD_at; Start 286; Stop 310
gacatagatatcctcggtaatgaga

SEQ ID NO: 112787 - DNA, 25 bp, Artificial
  probe
  misc_feature (1)..(25): SEQ ID NO: 6999; WAN024CCD_at; Start 21; Stop 45
atcgccgaacgatttaacgagaaag

SEQ ID NO: 112788 - DNA, 25 bp, Artificial
  probe
  misc_feature (1)..(25): SEQ ID NO: 6999; WAN024CCD_at; Start 292; Stop 316
gatatcctcggtaatgagagaatga

SEQ ID NO: 112789 - DNA, 25 bp, Artificial
  probe
  misc_feature (1)..(25): SEQ ID NO: 6999; WAN024CCD_at; Start 19; Stop 43
gaatcgccgaacgatttaacgagaa

SEQ ID NO: 112790 - DNA, 25 bp, Artificial
  probe
  misc_feature (1)..(25): SEQ ID NO: 6999; WAN024CCD_at; Start 127; Stop 151
gaggctgccaatcgaccaacctctt

SEQ ID NO: 112791 - DNA, 25 bp, Artificial
  probe
  misc_feature (1)..(25): SEQ ID NO: 6999; WAN024CCD_at; Start 280; Stop 304
caagtagacatagatatcctcggta

SEQ ID NO: 112792 - DNA, 25 bp, Artificial
  probe
  misc_feature (1)..(25): SEQ ID NO: 6999; WAN024CCD_at; Start 218; Stop 242
tcgacttggtcaaaccctgtgcctc

SEQ ID NO: 112793 - DNA, 25 bp, Artificial
  probe
  misc_feature (1)..(25): SEQ ID NO: 6999; WAN024CCD_at; Start 235; Stop 259
tgtgcctcccaaggaatttcgtctt

SEQ ID NO: 112794 - DNA, 25 bp, Artificial
  probe
  misc_feature (1)..(25): SEQ ID NO: 6999; WAN024CCD_at; Start 283; Stop 307
gtagacatagatatcctcggtaatg

SEQ ID NO: 112795 - DNA, 25 bp, Artificial
  probe
  misc_feature (1)..(25): SEQ ID NO: 6999; WAN024CCD_at; Start 48; Stop 72
tgacttttacgtttatcccaactca

SEQ ID NO: 112796 - DNA, 25 bp, Artificial
  probe
  misc_feature (1)..(25): SEQ ID NO: 6999; WAN024CCD_at; Start 261; Stop 285
gaacagcagttttaggttgcaagta

SEQ ID NO: 112797 - DNA, 25 bp, Artificial
  probe
  misc_feature (1)..(25): SEQ ID NO: 6999; WAN024CCD_at; Start 129; Stop 153
ggctgccaatcgaccaacctcttat

SEQ ID NO: 112798 - DNA, 25 bp, Artificial
  probe
  misc_feature (1)..(25): SEQ ID NO: 6999; WAN024CCD_at; Start 273; Stop 297
taggttgcaagtagacatagatatc

SEQ ID NO: 112799 - DNA, 25 bp, Artificial
  probe
  misc_feature (1)..(25): SEQ ID NO: 6999; WAN024CCD_at; Start 244; Stop 268
caaggaatttcgtctttgaacagca

SEQ ID NO: 112800 - DNA, 25 bp, Artificial
  probe
  misc_feature (1)..(25): SEQ ID NO: 5127; WAN024CCE_at; Start 430; Stop 454
gaagtatcgattgcagccttggatc

SEQ ID NO: 112801 - DNA, 25 bp, Artificial
  probe
  misc_feature (1)..(25): SEQ ID NO: 5127; WAN024CCE_at; Start 3; Stop 27
gaggatgcctttaaagcgtccattg

SEQ ID NO: 112802 - DNA, 25 bp, Artificial
  probe
  misc_feature (1)..(25): SEQ ID NO: 5127; WAN024CCE_at; Start 1086; Stop 1110
cgctcaggtcgtggctcggaaatca

SEQ ID NO: 112803 - DNA, 25 bp, Artificial
  probe
  misc_feature (1)..(25): SEQ ID NO: 5127; WAN024CCE_at; Start 1103; Stop 1127
ggaaatcaccaagttctctttacga

SEQ ID NO: 112804 - DNA, 25 bp, Artificial
  probe
  misc_feature (1)..(25): SEQ ID NO: 5127; WAN024CCE_at; Start 1038; Stop 1062
tcaaaaagttgtcaatgggactgca

SEQ ID NO: 112805 - DNA, 25 bp, Artificial
  probe
  misc_feature (1)..(25): SEQ ID NO: 5127; WAN024CCE_at; Start 777; Stop 801
caatgaaatagctggaaaacatggg

SEQ ID NO: 112806 - DNA, 25 bp, Artificial
  probe
  misc_feature (1)..(25): SEQ ID NO: 5127; WAN024CCE_at; Start 816; Stop 840
ccacgtggaaaatcgcttggttggg

SEQ ID NO: 112807 - DNA, 25 bp, Artificial
  probe
  misc_feature (1)..(25): SEQ ID NO: 5127; WAN024CCE_at; Start 636; Stop 660
tccagaagaagcctttggcatcaca

SEQ ID NO: 112808 - DNA, 25 bp, Artificial
  probe
  misc_feature (1)..(25): SEQ ID NO: 5127; WAN024CCE_at; Start 289; Stop 313
tattatgaacaaaagtatcccttgg

SEQ ID NO: 112809 - DNA, 25 bp, Artificial
  probe
  misc_feature (1)..(25): SEQ ID NO: 5127; WAN024CCE_at; Start 565; Stop 589
tactctgtcgaccaaaatctttggg

SEQ ID NO: 112810 - DNA, 25 bp, Artificial
  probe
  misc_feature (1)..(25): SEQ ID NO: 5127; WAN024CCE_at; Start 802; Stop 826
gttggacggattgaccacgtggaaa

SEQ ID NO: 112811 - DNA, 25 bp, Artificial
  probe
  misc_feature (1)..(25): SEQ ID NO: 5127; WAN024CCE_at; Start 869; Stop 893
caggtgcagtgaccctgctgacagc

SEQ ID NO: 112812 - DNA, 25 bp, Artificial
  probe
  misc_feature (1)..(25): SEQ ID NO: 5127; WAN024CCE_at; Start 461; Stop 485
taaaagtgattgctccagttcgtga

SEQ ID NO: 112813 - DNA, 25 bp, Artificial
  probe
  misc_feature (1)..(25): SEQ ID NO: 5127; WAN024CCE_at; Start 652; Stop 676
ggcatcacaacttctccagagcaag

SEQ ID NO: 112814 - DNA, 25 bp, Artificial
  probe
  misc_feature (1)..(25): SEQ ID NO: 5127; WAN024CCE_at; Start 1156; Stop 1180
gatacctttgaccaagatgcggctg

SEQ ID NO: 112815 - DNA, 25 bp, Artificial
  probe
  misc_feature (1)..(25): SEQ ID NO: 5127; WAN024CCE_at; Start 1053; Stop 1077
tgggactgcaaaagtcaaactgtat

SEQ ID NO: 112816 - DNA, 25 bp, Artificial
  probe
  misc_feature (1)..(25): SEQ ID NO: 5127; WAN024CCE_at; Start 476; Stop 500
cagttcgtgaatggaaatggtctcg

SEQ ID NO: 112817 - DNA, 25 bp, Artificial
  probe
  misc_feature (1)..(25): SEQ ID NO: 5127; WAN024CCE_at; Start 1136; Stop 1160
tggcgacgtatactagtgcagatac

SEQ ID NO: 112818 - DNA, 25 bp, Artificial
  probe
  misc_feature (1)..(25): SEQ ID NO: 5127; WAN024CCE_at; Start 1201; Stop 1225
ggacttccaaccaaggttcattctg

SEQ ID NO: 112819 - DNA, 25 bp, Artificial
  probe
  misc_feature (1)..(25): SEQ ID NO: 5127; WAN024CCE_at; Start 1119; Stop 1143
tctttacgatgaaaatttggcgacg

SEQ ID NO: 112820 - DNA, 25 bp, Artificial
  probe
  misc_feature (1)..(25): SEQ ID NO: 5127; WAN024CCE_at; Start 715; Stop 739
gaaggtgttccagtttccctcaatg

SEQ ID NO: 112821 - DNA, 25 bp, Artificial
  probe
  misc_feature (1)..(25): SEQ ID NO: 5127; WAN024CCE_at; Start 915; Stop 939
gacgcttgtgagagaagtggctcat

SEQ ID NO: 112822 - DNA, 25 bp, Artificial
  probe
  misc_feature (1)..(25): SEQ ID NO: 5127; WAN024CCE_at; Start 263; Stop 287
tgctagtggctcatcagtcacatgc

SEQ ID NO: 112823 - DNA, 25 bp, Artificial
  probe
  misc_feature (1)..(25): SEQ ID NO: 5127; WAN024CCE_at; Start 994; Stop 1018
tttagttcggctacacaagccttga

SEQ ID NO: 112824 - DNA, 25 bp, Artificial
  probe
  misc_feature (1)..(25): SEQ ID NO: 5127; WAN024CCE_at; Start 901; Stop 925
gaaattgaggacttgacgcttgtga

SEQ ID NO: 112825 - DNA, 25 bp, Artificial
  probe
  misc_feature (1)..(25): SEQ ID NO: 5127; WAN024CCE_at; Start 1218; Stop 1242
tcattctgaggttcaaaaaagcgcc

SEQ ID NO: 112826 - DNA, 25 bp, Artificial
  probe
  misc_feature (1)..(25): SEQ ID NO: 5127; WAN024CCE_at; Start 1230; Stop 1254
tcaaaaaagcgccaaataggacgat

SEQ ID NO: 112827 - DNA, 25 bp, Artificial
  probe
  misc_feature (1)..(25): SEQ ID NO: 5127; WAN024CCE_at; Start 547; Stop 571
gctgaccttgacaatccctactctg

SEQ ID NO: 112828 - DNA, 25 bp, Artificial
  probe
  misc_feature (1)..(25): SEQ ID NO: 5127; WAN024CCE_at; Start 616; Stop 640
gaaaatccatggaatcaggctccag

SEQ ID NO: 112829 - DNA, 25 bp, Artificial
  probe
  misc_feature (1)..(25): SEQ ID NO: 5127; WAN024CCE_at; Start 415; Stop 439
gaccaagtacgttttgaagtatcga

SEQ ID NO: 112830 - DNA, 25 bp, Artificial
  probe
  misc_feature (1)..(25): SEQ ID NO: 5127; WAN024CCE_at; Start 533; Stop 557
gggtgcctgttcctgctgaccttga

SEQ ID NO: 112831 - DNA, 25 bp, Artificial
  probe
  misc_feature (1)..(25): SEQ ID NO: 5127; WAN024CCE_at; Start 673; Stop 697
caagctccagatatgccagaataca

SEQ ID NO: 112832 - DNA, 25 bp, Artificial
  probe
  misc_feature (1)..(25): SEQ ID NO: 5127; WAN024CCE_at; Start 884; Stop 908
tgctgacagctcataaggaaattga

SEQ ID NO: 112833 - DNA, 25 bp, Artificial
  probe
  misc_feature (1)..(25): SEQ ID NO: 5127; WAN024CCE_at; Start 853; Stop 877
gaaatctatgagtgtccaggtgcag

SEQ ID NO: 112834 - DNA, 25 bp, Artificial
  probe
  misc_feature (1)..(25): SEQ ID NO: 2025; WAN024CCF_s_at; Start 237; Stop 261
cgaatttgctacagattatgtgcta

SEQ ID NO: 112835 - DNA, 25 bp, Artificial
  probe
  misc_feature (1)..(25): SEQ ID NO: 2025; WAN024CCF_s_at; Start 15; Stop 39
tccattgaaaaatagaaagaaggaa

SEQ ID NO: 112836 - DNA, 25 bp, Artificial
  probe
  misc_feature (1)..(25): SEQ ID NO: 2025; WAN024CCF_s_at; Start 166; Stop 190
gacttagatttcatccatgataagg

SEQ ID NO: 112837 - DNA, 25 bp, Artificial
  probe
  misc_feature (1)..(25): SEQ ID NO: 2025; WAN024CCF_s_at; Start 60; Stop 84
agtaattttggcctattctggcggt

SEQ ID NO: 112838 - DNA, 25 bp, Artificial
  probe
  misc_feature (1)..(25): SEQ ID NO: 2025; WAN024CCF_s_at; Start 366; Stop 390
aggagcgactacaattgctcatggt

SEQ ID NO: 112839 - DNA, 25 bp, Artificial
  probe
  misc_feature (1)..(25): SEQ ID NO: 2025; WAN024CCF_s_at; Start 160; Stop 184
gggaaagacttagatttcatccatg

SEQ ID NO: 112840 - DNA, 25 bp, Artificial
  probe
  misc_feature (1)..(25): SEQ ID NO: 2025; WAN024CCF_s_at; Start 334; Stop 358
tctaaaaaattggttgaaatagcgc

SEQ ID NO: 112841 - DNA, 25 bp, Artificial
  probe
  misc_feature (1)..(25): SEQ ID NO: 2025; WAN024CCF_s_at; Start 211; Stop 235
gaatcttatgtcattgatgttaagg

SEQ ID NO: 112842 - DNA, 25 bp, Artificial
  probe
  misc_feature (1)..(25): SEQ ID NO: 2025; WAN024CCF_s_at; Start 177; Stop 201
catccatgataaggctcttaaggtt

SEQ ID NO: 112843 - DNA, 25 bp, Artificial
  probe
  misc_feature (1)..(25): SEQ ID NO: 2025; WAN024CCF_s_at; Start 221; Stop 245
tcattgatgttaaggacgaatttgc

SEQ ID NO: 112844 - DNA, 25 bp, Artificial
  probe
  misc_feature (1)..(25): SEQ ID NO: 2025; WAN024CCF_s_at; Start 305; Stop 329
tggtatctgccttgagccgccctct

SEQ ID NO: 112845 - DNA, 25 bp, Artificial
  probe
  misc_feature (1)..(25): SEQ ID NO: 2025; WAN024CCF_s_at; Start 368; Stop 392
gagcgactacaattgctcatggttg

SEQ ID NO: 112846 - DNA, 25 bp, Artificial
  probe
  misc_feature (1)..(25): SEQ ID NO: 2025; WAN024CCF_s_at; Start 45; Stop 69
catgagtaaagaaaaagtaattttg

SEQ ID NO: 112847 - DNA, 25 bp, Artificial
  probe
  misc_feature (1)..(25): SEQ ID NO: 2025; WAN024CCF_s_at; Start 29; Stop 53
gaaagaaggaaaagaacatgagtaa

SEQ ID NO: 112848 - DNA, 25 bp, Artificial
  probe
  misc_feature (1)..(25): SEQ ID NO: 2025; WAN024CCF_s_at; Start 229; Stop 253
gttaaggacgaatttgctacagatt

SEQ ID NO: 112849 - DNA, 25 bp, Artificial
  probe
  misc_feature (1)..(25): SEQ ID NO: 2025; WAN024CCF_s_at; Start 371; Stop 395
cgactacaattgctcatggttgtac

SEQ ID NO: 112850 - DNA, 25 bp, Artificial
  probe
  misc_feature (1)..(25): SEQ ID NO: 2025; WAN024CCF_s_at; Start 215; Stop 239
cttatgtcattgatgttaaggacga

SEQ ID NO: 112851 - DNA, 25 bp, Artificial
  probe
  misc_feature (1)..(25): SEQ ID NO: 2025; WAN024CCF_s_at; Start 232; Stop 256
aaggacgaatttgctacagattatg

SEQ ID NO: 112852 - DNA, 25 bp, Artificial
  probe
  misc_feature (1)..(25): SEQ ID NO: 2025; WAN024CCF_s_at; Start 33; Stop 57
gaaggaaaagaacatgagtaaagaa

SEQ ID NO: 112853 - DNA, 25 bp, Artificial
  probe
  misc_feature (1)..(25): SEQ ID NO: 2025; WAN024CCF_s_at; Start 175; Stop 199
ttcatccatgataaggctcttaagg

SEQ ID NO: 112854 - DNA, 25 bp, Artificial
  probe
  misc_feature (1)..(25): SEQ ID NO: 2025; WAN024CCF_s_at; Start 27; Stop 51
tagaaagaaggaaaagaacatgagt

SEQ ID NO: 112855 - DNA, 25 bp, Artificial
  probe
  misc_feature (1)..(25): SEQ ID NO: 2025; WAN024CCF_s_at; Start 303; Stop 327
cttggtatctgccttgagccgccct

SEQ ID NO: 112856 - DNA, 25 bp, Artificial
  probe
  misc_feature (1)..(25): SEQ ID NO: 2025; WAN024CCF_s_at; Start 239; Stop 263
aatttgctacagattatgtgctagt

SEQ ID NO: 112857 - DNA, 25 bp, Artificial
  probe
  misc_feature (1)..(25): SEQ ID NO: 2025; WAN024CCF_s_at; Start 340; Stop 364
aaattggttgaaatagcgcatcaga

SEQ ID NO: 112858 - DNA, 25 bp, Artificial
  probe
  misc_feature (1)..(25): SEQ ID NO: 2025; WAN024CCF_s_at; Start 226; Stop 250
gatgttaaggacgaatttgctacag

SEQ ID NO: 112859 - DNA, 25 bp, Artificial
  probe
  misc_feature (1)..(25): SEQ ID NO: 2025; WAN024CCF_s_at; Start 172; Stop 196
gatttcatccatgataaggctctta

SEQ ID NO: 112860 - DNA, 25 bp, Artificial
  probe
  misc_feature (1)..(25): SEQ ID NO: 2025; WAN024CCF_s_at; Start 235; Stop 259
gacgaatttgctacagattatgtgc

SEQ ID NO: 112861 - DNA, 25 bp, Artificial
  probe
  misc_feature (1)..(25): SEQ ID NO: 2025; WAN024CCF_s_at; Start 337; Stop 361
aaaaaattggttgaaatagcgcatc

SEQ ID NO: 112862 - DNA, 25 bp, Artificial
  probe
  misc_feature (1)..(25): SEQ ID NO: 2025; WAN024CCF_s_at; Start 137; Stop 161
cagtttgtatggatgtgggtgaagg

SEQ ID NO: 112863 - DNA, 25 bp, Artificial
  probe
  misc_feature (1)..(25): SEQ ID NO: 2025; WAN024CCF_s_at; Start 162; Stop 186
gaaagacttagatttcatccatgat

SEQ ID NO: 112864 - DNA, 25 bp, Artificial
  probe
  misc_feature (1)..(25): SEQ ID NO: 2025; WAN024CCF_s_at; Start 157; Stop 181
gaagggaaagacttagatttcatcc

SEQ ID NO: 112865 - DNA, 25 bp, Artificial
  probe
  misc_feature (1)..(25): SEQ ID NO: 2025; WAN024CCF_s_at; Start 144; Stop 168
tatggatgtgggtgaagggaaagac

SEQ ID NO: 112866 - DNA, 25 bp, Artificial
  probe
  misc_feature (1)..(25): SEQ ID NO: 2025; WAN024CCF_s_at; Start 169; Stop 193
ttagatttcatccatgataaggctc

SEQ ID NO: 112867 - DNA, 25 bp, Artificial
  probe
  misc_feature (1)..(25): SEQ ID NO: 2025; WAN024CCF_s_at; Start 224; Stop 248
ttgatgttaaggacgaatttgctac

SEQ ID NO: 112868 - DNA, 25 bp, Artificial
  probe
  misc_feature (1)..(25): SEQ ID NO: 5015; WAN024CCG_at; Start 538; Stop 562
ggttcgattcaagagacgatggcga

SEQ ID NO: 112869 - DNA, 25 bp, Artificial
  probe
  misc_feature (1)..(25): SEQ ID NO: 5015; WAN024CCG_at; Start 99; Stop 123
gatgtttggtttagtgatgctcccc

SEQ ID NO: 112870 - DNA, 25 bp, Artificial
  probe
  misc_feature (1)..(25): SEQ ID NO: 5015; WAN024CCG_at; Start 394; Stop 418
tctaagacagatgaacggagcaagg

SEQ ID NO: 112871 - DNA, 25 bp, Artificial
  probe
  misc_feature (1)..(25): SEQ ID NO: 5015; WAN024CCG_at; Start 182; Stop 206
gaaaattggttgtagccctcaatcc

SEQ ID NO: 112872 - DNA, 25 bp, Artificial
  probe
  misc_feature (1)..(25): SEQ ID NO: 5015; WAN024CCG_at; Start 778; Stop 802
ttgaaagaggcagtcgataaaacca

SEQ ID NO: 112873 - DNA, 25 bp, Artificial
  probe
  misc_feature (1)..(25): SEQ ID NO: 5015; WAN024CCG_at; Start 720; Stop 744
ttttgaaaaagagcaagatgattcc

SEQ ID NO: 112874 - DNA, 25 bp, Artificial
  probe
  misc_feature (1)..(25): SEQ ID NO: 5015; WAN024CCG_at; Start 85; Stop 109
aaggtgttgatgacgatgtttggtt

SEQ ID NO: 112875 - DNA, 25 bp, Artificial
  probe
  misc_feature (1)..(25): SEQ ID NO: 5015; WAN024CCG_at; Start 824; Stop 848
gggaattagacaaactcattgagga

SEQ ID NO: 112876 - DNA, 25 bp, Artificial
  probe
  misc_feature (1)..(25): SEQ ID NO: 5015; WAN024CCG_at; Start 2; Stop 26
tgacaaaggatgcatatagatgtat

SEQ ID NO: 112877 - DNA, 25 bp, Artificial
  probe
  misc_feature (1)..(25): SEQ ID NO: 5015; WAN024CCG_at; Start 786; Stop 810
ggcagtcgataaaaccattcaaaag

SEQ ID NO: 112878 - DNA, 25 bp, Artificial
  probe
  misc_feature (1)..(25): SEQ ID NO: 5015; WAN024CCG_at; Start 550; Stop 574
gagacgatggcgaaagatttgctac

SEQ ID NO: 112879 - DNA, 25 bp, Artificial
  probe
  misc_feature (1)..(25): SEQ ID NO: 5015; WAN024CCG_at; Start 696; Stop 720
tgatttagcaatcgcagacctcaat

SEQ ID NO: 112880 - DNA, 25 bp, Artificial
  probe
  misc_feature (1)..(25): SEQ ID NO: 5015; WAN024CCG_at; Start 167; Stop 191
ccatcaagtccaaaggaaaattggt

SEQ ID NO: 112881 - DNA, 25 bp, Artificial
  probe
  misc_feature (1)..(25): SEQ ID NO: 5015; WAN024CCG_at; Start 265; Stop 289
tcagatatcgaattagccaaggcta

SEQ ID NO: 112882 - DNA, 25 bp, Artificial
  probe
  misc_feature (1)..(25): SEQ ID NO: 5015; WAN024CCG_at; Start 401; Stop 425
cagatgaacggagcaaggtgtttga

SEQ ID NO: 112883 - DNA, 25 bp, Artificial
  probe
  misc_feature (1)..(25): SEQ ID NO: 5015; WAN024CCG_at; Start 273; Stop 297
cgaattagccaaggctatcgcaaca

SEQ ID NO: 112884 - DNA, 25 bp, Artificial
  probe
  misc_feature (1)..(25): SEQ ID NO: 5015; WAN024CCG_at; Start 748; Stop 772
gcggtagccatgaaaaaagatagca

SEQ ID NO: 112885 - DNA, 25 bp, Artificial
  probe
  misc_feature (1)..(25): SEQ ID NO: 5015; WAN024CCG_at; Start 688; Stop 712
aataatcctgatttagcaatcgcag

SEQ ID NO: 112886 - DNA, 25 bp, Artificial
  probe
  misc_feature (1)..(25): SEQ ID NO: 5015; WAN024CCG_at; Start 526; Stop 550
ggagcgcagaaaggttcgattcaag

SEQ ID NO: 112887 - DNA, 25 bp, Artificial
  probe
  misc_feature (1)..(25): SEQ ID NO: 5015; WAN024CCG_at; Start 302; Stop 326
taggtgtcgaattggaactatctcc

SEQ ID NO: 112888 - DNA, 25 bp, Artificial
  probe
  misc_feature (1)..(25): SEQ ID NO: 5015; WAN024CCG_at; Start 232; Stop 256
aaagtggttgatgggaaaaatcaga

SEQ ID NO: 112889 - DNA, 25 bp, Artificial
  probe
  misc_feature (1)..(25): SEQ ID NO: 5015; WAN024CCG_at; Start 575; Stop 599
aaaattcttccctcgtatctctgcc

SEQ ID NO: 112890 - DNA, 25 bp, Artificial
  probe
  misc_feature (1)..(25): SEQ ID NO: 5015; WAN024CCG_at; Start 249; Stop 273
aaatcagattgtgggttcagatatc

SEQ ID NO: 112891 - DNA, 25 bp, Artificial
  probe
  misc_feature (1)..(25): SEQ ID NO: 5015; WAN024CCG_at; Start 437; Stop 461
cctactatactgcaaaaaataaact

SEQ ID NO: 112892 - DNA, 25 bp, Artificial
  probe
  misc_feature (1)..(25): SEQ ID NO: 5015; WAN024CCG_at; Start 598; Stop 622
cctaaaaatgggaatttaatcacag

SEQ ID NO: 112893 - DNA, 25 bp, Artificial
  probe
  misc_feature (1)..(25): SEQ ID NO: 5015; WAN024CCG_at; Start 454; Stop 478
aataaactcattgtcaaaaaatctg

SEQ ID NO: 112894 - DNA, 25 bp, Artificial
  probe
  misc_feature (1)..(25): SEQ ID NO: 5015; WAN024CCG_at; Start 379; Stop 403
gccatatcaggtgtttctaagacag

SEQ ID NO: 112895 - DNA, 25 bp, Artificial
  probe
  misc_feature (1)..(25): SEQ ID NO: 5015; WAN024CCG_at; Start 565; Stop 589
gatttgctacaaaattcttccctcg

SEQ ID NO: 112896 - DNA, 25 bp, Artificial
  probe
  misc_feature (1)..(25): SEQ ID NO: 5015; WAN024CCG_at; Start 158; Stop 182
gaattgaagccatcaagtccaaagg

SEQ ID NO: 112897 - DNA, 25 bp, Artificial
  probe
  misc_feature (1)..(25): SEQ ID NO: 5015; WAN024CCG_at; Start 587; Stop 611
tcgtatctctgcctaaaaatgggaa

SEQ ID NO: 112898 - DNA, 25 bp, Artificial
  probe
  misc_feature (1)..(25): SEQ ID NO: 5015; WAN024CCG_at; Start 144; Stop 168
caatcaatcggctggaattgaagcc

SEQ ID NO: 112899 - DNA, 25 bp, Artificial
  probe
  misc_feature (1)..(25): SEQ ID NO: 5015; WAN024CCG_at; Start 672; Stop 696
caagggatttgtggaaaataatcct

SEQ ID NO: 112900 - DNA, 25 bp, Artificial
  probe
  misc_feature (1)..(25): SEQ ID NO: 5015; WAN024CCG_at; Start 801; Stop 825
cattcaaaagttgaaggagtctggg

SEQ ID NO: 112901 - DNA, 25 bp, Artificial
  probe
  misc_feature (1)..(25): SEQ ID NO: 5015; WAN024CCG_at; Start 69; Stop 93
tatgaataagatgaagaaggtgttg

SEQ ID NO: 112902 - DNA, 25 bp, Artificial
  probe
  misc_feature (1)..(25): SEQ ID NO: 618; WAN024CCH_at; Start 522; Stop 546
gatagaccaggctaccttgctagag

SEQ ID NO: 112903 - DNA, 25 bp, Artificial
  probe
  misc_feature (1)..(25): SEQ ID NO: 618; WAN024CCH_at; Start 459; Stop 483
gataacttctacacaagagatggac

SEQ ID NO: 112904 - DNA, 25 bp, Artificial
  probe
  misc_feature (1)..(25): SEQ ID NO: 618; WAN024CCH_at; Start 902; Stop 926
tgacaatcagctctctgctgaaagg

SEQ ID NO: 112905 - DNA, 25 bp, Artificial
  probe
  misc_feature (1)..(25): SEQ ID NO: 618; WAN024CCH_at; Start 1205; Stop 1229
gctatgtgcagagtagcagtcttcc

SEQ ID NO: 112906 - DNA, 25 bp, Artificial
  probe
  misc_feature (1)..(25): SEQ ID NO: 618; WAN024CCH_at; Start 1601; Stop 1625
agaaagcctccctgtcaacaactgg

SEQ ID NO: 112907 - DNA, 25 bp, Artificial
  probe
  misc_feature (1)..(25): SEQ ID NO: 618; WAN024CCH_at; Start 987; Stop 1011
tttactgacggccttactgattggg

SEQ ID NO: 112908 - DNA, 25 bp, Artificial
  probe
  misc_feature (1)..(25): SEQ ID NO: 618; WAN024CCH_at; Start 1316; Stop 1340
taaagagcaagggattcaagctacc

SEQ ID NO: 112909 - DNA, 25 bp, Artificial
  probe
  misc_feature (1)..(25): SEQ ID NO: 618; WAN024CCH_at; Start 1131; Stop 1155
gctagcagggtcagggaaatctaca

SEQ ID NO: 112910 - DNA, 25 bp, Artificial
  probe
  misc_feature (1)..(25): SEQ ID NO: 618; WAN024CCH_at; Start 1279; Stop 1303
gatacggtggatgtttactatgcca

SEQ ID NO: 112911 - DNA, 25 bp, Artificial
  probe
  misc_feature (1)..(25): SEQ ID NO: 618; WAN024CCH_at; Start 1187; Stop 1211
tagaaaaaacgcaggcgggctatgt

SEQ ID NO: 112912 - DNA, 25 bp, Artificial
  probe
  misc_feature (1)..(25): SEQ ID NO: 618; WAN024CCH_at; Start 507; Stop 531
gagcgattttttcaagatagaccag

SEQ ID NO: 112913 - DNA, 25 bp, Artificial
  probe
  misc_feature (1)..(25): SEQ ID NO: 618; WAN024CCH_at; Start 542; Stop 566
tagagccgacctacaaaagtgcagt

SEQ ID NO: 112914 - DNA, 25 bp, Artificial
  probe
  misc_feature (1)..(25): SEQ ID NO: 618; WAN024CCH_at; Start 1897; Stop 1921
tggaaactggtcgatcgctaccgtc

SEQ ID NO: 112915 - DNA, 25 bp, Artificial
  probe
  misc_feature (1)..(25): SEQ ID NO: 618; WAN024CCH_at; Start 77; Stop 101
cacgagaagtggttcggattcaaga

SEQ ID NO: 112916 - DNA, 25 bp, Artificial
  probe
  misc_feature (1)..(25): SEQ ID NO: 618; WAN024CCH_at; Start 1113; Stop 1137
taatctgtggcaagaagagctagca

SEQ ID NO: 112917 - DNA, 25 bp, Artificial
  probe
  misc_feature (1)..(25): SEQ ID NO: 618; WAN024CCH_at; Start 1432; Stop 1456
cattcgatgaagtatgaagagcagc

SEQ ID NO: 112918 - DNA, 25 bp, Artificial
  probe
  misc_feature (1)..(25): SEQ ID NO: 618; WAN024CCH_at; Start 208; Stop 232
tccatcatcaaaacagacagtggtg

SEQ ID NO: 112919 - DNA, 25 bp, Artificial
  probe
  misc_feature (1)..(25): SEQ ID NO: 618; WAN024CCH_at; Start 1300; Stop 1324
gccaatcgcaattttctaaagagca

SEQ ID NO: 112920 - DNA, 25 bp, Artificial
  probe
  misc_feature (1)..(25): SEQ ID NO: 618; WAN024CCH_at; Start 1847; Stop 1871
caactttcttattgaagcgcaggga

SEQ ID NO: 112921 - DNA, 25 bp, Artificial
  probe
  misc_feature (1)..(25): SEQ ID NO: 618; WAN024CCH_at; Start 142; Stop 166
gatattaacgaacctgcagcgtctg

SEQ ID NO: 112922 - DNA, 25 bp, Artificial
  probe
  misc_feature (1)..(25): SEQ ID NO: 618; WAN024CCH_at; Start 759; Stop 783
ggctcttgtgatcaatctaggcgtg

SEQ ID NO: 112923 - DNA, 25 bp, Artificial
  probe
  misc_feature (1)..(25): SEQ ID NO: 618; WAN024CCH_at; Start 1368; Stop 1392
gatgccagcaagtacgaaaggtgaa

SEQ ID NO: 112924 - DNA, 25 bp, Artificial
  probe
  misc_feature (1)..(25): SEQ ID NO: 618; WAN024CCH_at; Start 559; Stop 583
agtgcagtggaagtcataaatcgag

SEQ ID NO: 112925 - DNA, 25 bp, Artificial
  probe
  misc_feature (1)..(25): SEQ ID NO: 618; WAN024CCH_at; Start 1991; Stop 2015
tcttaccacttctactgtttgcagg

SEQ ID NO: 112926 - DNA, 25 bp, Artificial
  probe
  misc_feature (1)..(25): SEQ ID NO: 618; WAN024CCH_at; Start 1927; Stop 1951
ctcgttctgctcttgctgggctata

SEQ ID NO: 112927 - DNA, 25 bp, Artificial
  probe
  misc_feature (1)..(25): SEQ ID NO: 618; WAN024CCH_at; Start 1587; Stop 1611
tatgatgtgggatgagaaagcctcc

SEQ ID NO: 112928 - DNA, 25 bp, Artificial
  probe
  misc_feature (1)..(25): SEQ ID NO: 618; WAN024CCH_at; Start 2045; Stop 2069
taggcttagcttctaggatggagaa

SEQ ID NO: 112929 - DNA, 25 bp, Artificial
  probe
  misc_feature (1)..(25): SEQ ID NO: 618; WAN024CCH_at; Start 1051; Stop 1075
tatcagcaacagtgggtaagtcaag

SEQ ID NO: 112930 - DNA, 25 bp, Artificial
  probe
  misc_feature (1)..(25): SEQ ID NO: 618; WAN024CCH_at; Start 309; Stop 333
taccacagatggtgaaggagtctat

SEQ ID NO: 112931 - DNA, 25 bp, Artificial
  probe
  misc_feature (1)..(25): SEQ ID NO: 618; WAN024CCH_at; Start 1447; Stop 1471
gaagagcagcaaaaacgaacgatag

SEQ ID NO: 112932 - DNA, 25 bp, Artificial
  probe
  misc_feature (1)..(25): SEQ ID NO: 618; WAN024CCH_at; Start 429; Stop 453
tacatctcgtagtttaaatggtcgc

SEQ ID NO: 112933 - DNA, 25 bp, Artificial
  probe
  misc_feature (1)..(25): SEQ ID NO: 618; WAN024CCH_at; Start 639; Stop 663
gacagtgtatcaaccgatgatggag

SEQ ID NO: 112934 - DNA, 25 bp, Artificial
  probe
  misc_feature (1)..(25): SEQ ID NO: 618; WAN024CCH_at; Start 974; Stop 998
tagggacaactattttactgacggc

SEQ ID NO: 112935 - DNA, 25 bp, Artificial
  probe
  misc_feature (1)..(25): SEQ ID NO: 618; WAN024CCH_at; Start 1860; Stop 1884
gaagcgcagggatatcattaccaag

SEQ ID NO: 112936 - DNA, 25 bp, Artificial
  probe
  misc_feature (1)..(25): SEQ ID NO: 1016; WAN024CCI_at; Start 168; Stop 192
tgatgaacaaactaaaccagcagac

SEQ ID NO: 112937 - DNA, 25 bp, Artificial
  probe
  misc_feature (1)..(25): SEQ ID NO: 1016; WAN024CCI_at; Start 6; Stop 30
cacagaacagcttaaccaagcctta

SEQ ID NO: 112938 - DNA, 25 bp, Artificial
  probe
  misc_feature (1)..(25): SEQ ID NO: 1016; WAN024CCI_at; Start 131; Stop 155
gacttcaagcacgagtggatgagct

SEQ ID NO: 112939 - DNA, 25 bp, Artificial
  probe
  misc_feature (1)..(25): SEQ ID NO: 1016; WAN024CCI_at; Start 38; Stop 62
caattagtgaaatgtcaacaacttc

SEQ ID NO: 112940 - DNA, 25 bp, Artificial
  probe
  misc_feature (1)..(25): SEQ ID NO: 1016; WAN024CCI_at; Start 10; Stop 34
gaacagcttaaccaagccttacaaa

SEQ ID NO: 112941 - DNA, 25 bp, Artificial
  probe
  misc_feature (1)..(25): SEQ ID NO: 1016; WAN024CCI_at; Start 177; Stop 201
aactaaaccagcagacaaaggagaa

SEQ ID NO: 112942 - DNA, 25 bp, Artificial
  probe
  misc_feature (1)..(25): SEQ ID NO: 1016; WAN024CCI_at; Start 22; Stop 46
caagccttacaaatgacaattagtg

SEQ ID NO: 112943 - DNA, 25 bp, Artificial
  probe
  misc_feature (1)..(25): SEQ ID NO: 1016; WAN024CCI_at; Start 151; Stop 175
gagctggaagctctgcttgatgaac

SEQ ID NO: 112944 - DNA, 25 bp, Artificial
  probe
  misc_feature (1)..(25): SEQ ID NO: 1016; WAN024CCI_at; Start 89; Stop 113
tcttgagtattcagttgaatgagca

SEQ ID NO: 112945 - DNA, 25 bp, Artificial
  probe
  misc_feature (1)..(25): SEQ ID NO: 1016; WAN024CCI_at; Start 175; Stop 199
caaactaaaccagcagacaaaggag

SEQ ID NO: 112946 - DNA, 25 bp, Artificial
  probe
  misc_feature (1)..(25): SEQ ID NO: 1016; WAN024CCI_at; Start 71; Stop 95
cgatgattacaagtaatatcttgag

SEQ ID NO: 112947 - DNA, 25 bp, Artificial
  probe
  misc_feature (1)..(25): SEQ ID NO: 1016; WAN024CCI_at; Start 126; Stop 150
tcaaagacttcaagcacgagtggat

SEQ ID NO: 112948 - DNA, 25 bp, Artificial
  probe
  misc_feature (1)..(25): SEQ ID NO: 1016; WAN024CCI_at; Start 96; Stop 120
tattcagttgaatgagcaaagggaa

SEQ ID NO: 112949 - DNA, 25 bp, Artificial
  probe
  misc_feature (1)..(25): SEQ ID NO: 1016; WAN024CCI_at; Start 135; Stop 159
tcaagcacgagtggatgagctggaa

SEQ ID NO: 112950 - DNA, 25 bp, Artificial
  probe
  misc_feature (1)..(25): SEQ ID NO: 1016; WAN024CCI_at; Start 172; Stop 196
gaacaaactaaaccagcagacaaag

SEQ ID NO: 112951 - DNA, 25 bp, Artificial
  probe
  misc_feature (1)..(25): SEQ ID NO: 1016; WAN024CCI_at; Start 18; Stop 42
taaccaagccttacaaatgacaatt

SEQ ID NO: 112952 - DNA, 25 bp, Artificial
  probe
  misc_feature (1)..(25): SEQ ID NO: 1016; WAN024CCI_at; Start 42; Stop 66
tagtgaaatgtcaacaacttcaaca

SEQ ID NO: 112953 - DNA, 25 bp, Artificial
  probe
  misc_feature (1)..(25): SEQ ID NO: 1016; WAN024CCI_at; Start 29; Stop 53
tacaaatgacaattagtgaaatgtc

SEQ ID NO: 112954 - DNA, 25 bp, Artificial
  probe
  misc_feature (1)..(25): SEQ ID NO: 1016; WAN024CCI_at; Start 78; Stop 102
tacaagtaatatcttgagtattcag

SEQ ID NO: 112955 - DNA, 25 bp, Artificial
  probe
  misc_feature (1)..(25): SEQ ID NO: 1016; WAN024CCI_at; Start 98; Stop 122
ttcagttgaatgagcaaagggaaga

SEQ ID NO: 112956 - DNA, 25 bp, Artificial
  probe
  misc_feature (1)..(25): SEQ ID NO: 1016; WAN024CCI_at; Start 166; Stop 190
cttgatgaacaaactaaaccagcag

SEQ ID NO: 112957 - DNA, 25 bp, Artificial
  probe
  misc_feature (1)..(25): SEQ ID NO: 1016; WAN024CCI_at; Start 146; Stop 170
tggatgagctggaagctctgcttga

SEQ ID NO: 112958 - DNA, 25 bp, Artificial
  probe
  misc_feature (1)..(25): SEQ ID NO: 1016; WAN024CCI_at; Start 140; Stop 164
cacgagtggatgagctggaagctct

SEQ ID NO: 112959 - DNA, 25 bp, Artificial
  probe
  misc_feature (1)..(25): SEQ ID NO: 1016; WAN024CCI_at; Start 160; Stop 184
gctctgcttgatgaacaaactaaac

SEQ ID NO: 112960 - DNA, 25 bp, Artificial
  probe
  misc_feature (1)..(25): SEQ ID NO: 1016; WAN024CCI_at; Start 153; Stop 177
gctggaagctctgcttgatgaacaa

SEQ ID NO: 112961 - DNA, 25 bp, Artificial
  probe
  misc_feature (1)..(25): SEQ ID NO: 1016; WAN024CCI_at; Start 155; Stop 179
tggaagctctgcttgatgaacaaac

SEQ ID NO: 112962 - DNA, 25 bp, Artificial
  probe
  misc_feature (1)..(25): SEQ ID NO: 1016; WAN024CCI_at; Start 164; Stop 188
tgcttgatgaacaaactaaaccagc

SEQ ID NO: 112963 - DNA, 25 bp, Artificial
  probe
  misc_feature (1)..(25): SEQ ID NO: 1016; WAN024CCI_at; Start 133; Stop 157
cttcaagcacgagtggatgagctgg

SEQ ID NO: 112964 - DNA, 25 bp, Artificial
  probe
  misc_feature (1)..(25): SEQ ID NO: 1016; WAN024CCI_at; Start 25; Stop 49
gccttacaaatgacaattagtgaaa

SEQ ID NO: 112965 - DNA, 25 bp, Artificial
  probe
  misc_feature (1)..(25): SEQ ID NO: 1016; WAN024CCI_at; Start 15; Stop 39
gcttaaccaagccttacaaatgaca

SEQ ID NO: 112966 - DNA, 25 bp, Artificial
  probe
  misc_feature (1)..(25): SEQ ID NO: 1016; WAN024CCI_at; Start 3; Stop 27
gaacacagaacagcttaaccaagcc

SEQ ID NO: 112967 - DNA, 25 bp, Artificial
  probe
  misc_feature (1)..(25): SEQ ID NO: 1016; WAN024CCI_at; Start 157; Stop 181
gaagctctgcttgatgaacaaacta

SEQ ID NO: 112968 - DNA, 25 bp, Artificial
  probe
  misc_feature (1)..(25): SEQ ID NO: 1016; WAN024CCI_at; Start 124; Stop 148
aatcaaagacttcaagcacgagtgg

SEQ ID NO: 112969 - DNA, 25 bp, Artificial
  probe
  misc_feature (1)..(25): SEQ ID NO: 1016; WAN024CCI_at; Start 128; Stop 152
aaagacttcaagcacgagtggatga

SEQ ID NO: 112970 - DNA, 25 bp, Artificial
  probe
  misc_feature (1)..(25): SEQ ID NO: 2422; WAN024CCJ_at; Start 259; Stop 283
gccgttctgttgaatcatgaattct

SEQ ID NO: 112971 - DNA, 25 bp, Artificial
  probe
  misc_feature (1)..(25): SEQ ID NO: 2422; WAN024CCJ_at; Start 76; Stop 100
gctttgcgctacatgaaagaaaatg

SEQ ID NO: 112972 - DNA, 25 bp, Artificial
  probe
  misc_feature (1)..(25): SEQ ID NO: 2422; WAN024CCJ_at; Start 163; Stop 187
cgtcctgtgatcgtaaatggccgtc

SEQ ID NO: 112973 - DNA, 25 bp, Artificial
  probe
  misc_feature (1)..(25): SEQ ID NO: 2422; WAN024CCJ_at; Start 44; Stop 68
caaaaatcacagaaccatttgatct

SEQ ID NO: 112974 - DNA, 25 bp, Artificial
  probe
  misc_feature (1)..(25): SEQ ID NO: 2422; WAN024CCJ_at; Start 128; Stop 152
gcgatgacttctatatgtatcgtga

SEQ ID NO: 112975 - DNA, 25 bp, Artificial
  probe
  misc_feature (1)..(25): SEQ ID NO: 2422; WAN024CCJ_at; Start 2; Stop 26
tggcagaaacaattcaaaacacaga

SEQ ID NO: 112976 - DNA, 25 bp, Artificial
  probe
  misc_feature (1)..(25): SEQ ID NO: 2422; WAN024CCJ_at; Start 125; Stop 149
taagcgatgacttctatatgtatcg

SEQ ID NO: 112977 - DNA, 25 bp, Artificial
  probe
  misc_feature (1)..(25): SEQ ID NO: 2422; WAN024CCJ_at; Start 97; Stop 121
aatggagagttcattcgttgcaaga

SEQ ID NO: 112978 - DNA, 25 bp, Artificial
  probe
  misc_feature (1)..(25): SEQ ID NO: 2422; WAN024CCJ_at; Start 120; Stop 144
gaatgtaagcgatgacttctatatg

SEQ ID NO: 112979 - DNA, 25 bp, Artificial
  probe
  misc_feature (1)..(25): SEQ ID NO: 2422; WAN024CCJ_at; Start 253; Stop 277
aacgtagccgttctgttgaatcatg

SEQ ID NO: 112980 - DNA, 25 bp, Artificial
  probe
  misc_feature (1)..(25): SEQ ID NO: 2422; WAN024CCJ_at; Start 235; Stop 259
ggtacaatcgcaacaatcaacgtag

SEQ ID NO: 112981 - DNA, 25 bp, Artificial
  probe
  misc_feature (1)..(25): SEQ ID NO: 2422; WAN024CCJ_at; Start 169; Stop 193
gtgatcgtaaatggccgtcgccaat

SEQ ID NO: 112982 - DNA, 25 bp, Artificial
  probe
  misc_feature (1)..(25): SEQ ID NO: 2422; WAN024CCJ_at; Start 280; Stop 304
ttctatatcatgaaatttgatgcag

SEQ ID NO: 112983 - DNA, 25 bp, Artificial
  probe
  misc_feature (1)..(25): SEQ ID NO: 2422; WAN024CCJ_at; Start 7; Stop 31
gaaacaattcaaaacacagataact

SEQ ID NO: 112984 - DNA, 25 bp, Artificial
  probe
  misc_feature (1)..(25): SEQ ID NO: 2422; WAN024CCJ_at; Start 107; Stop 131
tcattcgttgcaagaatgtaagcga

SEQ ID NO: 112985 - DNA, 25 bp, Artificial
  probe
  misc_feature (1)..(25): SEQ ID NO: 2422; WAN024CCJ_at; Start 80; Stop 104
tgcgctacatgaaagaaaatggaga

SEQ ID NO: 112986 - DNA, 25 bp, Artificial
  probe
  misc_feature (1)..(25): SEQ ID NO: 2422; WAN024CCJ_at; Start 84; Stop 108
ctacatgaaagaaaatggagagttc

SEQ ID NO: 112987 - DNA, 25 bp, Artificial
  probe
  misc_feature (1)..(25): SEQ ID NO: 2422; WAN024CCJ_at; Start 154; Stop 178
gttcaaaaacgtcctgtgatcgtaa

SEQ ID NO: 112988 - DNA, 25 bp, Artificial
  probe
  misc_feature (1)..(25): SEQ ID NO: 2422; WAN024CCJ_at; Start 246; Stop 270
aacaatcaacgtagccgttctgttg

SEQ ID NO: 112989 - DNA, 25 bp, Artificial
  probe
  misc_feature (1)..(25): SEQ ID NO: 2422; WAN024CCJ_at; Start 165; Stop 189
tcctgtgatcgtaaatggccgtcgc

SEQ ID NO: 112990 - DNA, 25 bp, Artificial
  probe
  misc_feature (1)..(25): SEQ ID NO: 2422; WAN024CCJ_at; Start 16; Stop 40
caaaacacagataacttactagacc

SEQ ID NO: 112991 - DNA, 25 bp, Artificial
  probe
  misc_feature (1)..(25): SEQ ID NO: 2422; WAN024CCJ_at; Start 264; Stop 288
tctgttgaatcatgaattctatatc

SEQ ID NO: 112992 - DNA, 25 bp, Artificial
  probe
  misc_feature (1)..(25): SEQ ID NO: 2422; WAN024CCJ_at; Start 244; Stop 268
gcaacaatcaacgtagccgttctgt

SEQ ID NO: 112993 - DNA, 25 bp, Artificial
  probe
  misc_feature (1)..(25): SEQ ID NO: 2422; WAN024CCJ_at; Start 167; Stop 191
ctgtgatcgtaaatggccgtcgcca

SEQ ID NO: 112994 - DNA, 25 bp, Artificial
  probe
  misc_feature (1)..(25): SEQ ID NO: 2422; WAN024CCJ_at; Start 199; Stop 223
gatgttgaaaccgtttgggcgttca

SEQ ID NO: 112995 - DNA, 25 bp, Artificial
  probe
  misc_feature (1)..(25): SEQ ID NO: 2422; WAN024CCJ_at; Start 18; Stop 42
aaacacagataacttactagacctt

SEQ ID NO: 112996 - DNA, 25 bp, Artificial
  probe
  misc_feature (1)..(25): SEQ ID NO: 2422; WAN024CCJ_at; Start 116; Stop 140
gcaagaatgtaagcgatgacttcta

SEQ ID NO: 112997 - DNA, 25 bp, Artificial
  probe
  misc_feature (1)..(25): SEQ ID NO: 2422; WAN024CCJ_at; Start 89; Stop 113
tgaaagaaaatggagagttcattcg

SEQ ID NO: 112998 - DNA, 25 bp, Artificial
  probe
  misc_feature (1)..(25): SEQ ID NO: 2422; WAN024CCJ_at; Start 231; Stop 255
gggtggtacaatcgcaacaatcaac

SEQ ID NO: 112999 - DNA, 25 bp, Artificial
  probe
  misc_feature (1)..(25): SEQ ID NO: 2422; WAN024CCJ_at; Start 255; Stop 279
cgtagccgttctgttgaatcatgaa

SEQ ID NO: 113000 - DNA, 25 bp, Artificial
  probe
  misc_feature (1)..(25): SEQ ID NO: 2422; WAN024CCJ_at; Start 50; Stop 74
tcacagaaccatttgatcttgcgag

SEQ ID NO: 113001 - DNA, 25 bp, Artificial
  probe
  misc_feature (1)..(25): SEQ ID NO: 2422; WAN024CCJ_at; Start 112; Stop 136
cgttgcaagaatgtaagcgatgact

SEQ ID NO: 113002 - DNA, 25 bp, Artificial
  probe
  misc_feature (1)..(25): SEQ ID NO: 2422; WAN024CCJ_at; Start 239; Stop 263
caatcgcaacaatcaacgtagccgt

SEQ ID NO: 113003 - DNA, 25 bp, Artificial
  probe
  misc_feature (1)..(25): SEQ ID NO: 2422; WAN024CCJ_at; Start 160; Stop 184
aaacgtcctgtgatcgtaaatggcc

SEQ ID NO: 113004 - DNA, 25 bp, Artificial
  probe
  misc_feature (1)..(25): SEQ ID NO: 1984; WAN024CCK_at; Start 154; Stop 178
gactctaatagacgagaagagcgtt

SEQ ID NO: 113005 - DNA, 25 bp, Artificial
  probe
  misc_feature (1)..(25): SEQ ID NO: 1984; WAN024CCK_at; Start 103; Stop 127
tcggacaagcgagagaagaagatta

SEQ ID NO: 113006 - DNA, 25 bp, Artificial
  probe
  misc_feature (1)..(25): SEQ ID NO: 1984; WAN024CCK_at; Start 186; Stop 210
tcacctagaaaagaccactacagaa

SEQ ID NO: 113007 - DNA, 25 bp, Artificial
  probe
  misc_feature (1)..(25): SEQ ID NO: 1984; WAN024CCK_at; Start 179; Stop 203
tgatgactcacctagaaaagaccac

SEQ ID NO: 113008 - DNA, 25 bp, Artificial
  probe
  misc_feature (1)..(25): SEQ ID NO: 1984; WAN024CCK_at; Start 130; Stop 154
gatttgcacgagcaatcaaaggccg

SEQ ID NO: 113009 - DNA, 25 bp, Artificial
  probe
  misc_feature (1)..(25): SEQ ID NO: 1984; WAN024CCK_at; Start 28; Stop 52
gctcaaagtcaggtagcttgggcga

SEQ ID NO: 113010 - DNA, 25 bp, Artificial
  probe
  misc_feature (1)..(25): SEQ ID NO: 1984; WAN024CCK_at; Start 108; Stop 132
caagcgagagaagaagattatggat

SEQ ID NO: 113011 - DNA, 25 bp, Artificial
  probe
  misc_feature (1)..(25): SEQ ID NO: 1984; WAN024CCK_at; Start 209; Stop 233
aattaaccacaatcactcacacggg

SEQ ID NO: 113012 - DNA, 25 bp, Artificial
  probe
  misc_feature (1)..(25): SEQ ID NO: 1984; WAN024CCK_at; Start 95; Stop 119
tcaagacttcggacaagcgagagaa

SEQ ID NO: 113013 - DNA, 25 bp, Artificial
  probe
  misc_feature (1)..(25): SEQ ID NO: 1984; WAN024CCK_at; Start 19; Stop 43
gaaaaaatcgctcaaagtcaggtag

SEQ ID NO: 113014 - DNA, 25 bp, Artificial
  probe
  misc_feature (1)..(25): SEQ ID NO: 1984; WAN024CCK_at; Start 240; Stop 264
gacattcaaaaagaaatggttcgca

SEQ ID NO: 113015 - DNA, 25 bp, Artificial
  probe
  misc_feature (1)..(25): SEQ ID NO: 1984; WAN024CCK_at; Start 133; Stop 157
ttgcacgagcaatcaaaggccgact

SEQ ID NO: 113016 - DNA, 25 bp, Artificial
  probe
  misc_feature (1)..(25): SEQ ID NO: 1984; WAN024CCK_at; Start 198; Stop 222
gaccactacagaattaaccacaatc

SEQ ID NO: 113017 - DNA, 25 bp, Artificial
  probe
  misc_feature (1)..(25): SEQ ID NO: 1984; WAN024CCK_at; Start 172; Stop 196
gagcgtttgatgactcacctagaaa

SEQ ID NO: 113018 - DNA, 25 bp, Artificial
  probe
  misc_feature (1)..(25): SEQ ID NO: 1984; WAN024CCK_at; Start 193; Stop 217
gaaaagaccactacagaattaacca

SEQ ID NO: 113019 - DNA, 25 bp, Artificial
  probe
  misc_feature (1)..(25): SEQ ID NO: 1984; WAN024CCK_at; Start 218; Stop 242
caatcactcacacggggtcggagac

SEQ ID NO: 113020 - DNA, 25 bp, Artificial
  probe
  misc_feature (1)..(25): SEQ ID NO: 1984; WAN024CCK_at; Start 157; Stop 181
tctaatagacgagaagagcgtttga

SEQ ID NO: 113021 - DNA, 25 bp, Artificial
  probe
  misc_feature (1)..(25): SEQ ID NO: 1984; WAN024CCK_at; Start 43; Stop 67
gcttgggcgattttgtttatcttgc

SEQ ID NO: 113022 - DNA, 25 bp, Artificial
  probe
  misc_feature (1)..(25): SEQ ID NO: 1984; WAN024CCK_at; Start 150; Stop 174
ggccgactctaatagacgagaagag

SEQ ID NO: 113023 - DNA, 25 bp, Artificial
  probe
  misc_feature (1)..(25): SEQ ID NO: 1984; WAN024CCK_at; Start 166; Stop 190
cgagaagagcgtttgatgactcacc

SEQ ID NO: 113024 - DNA, 25 bp, Artificial
  probe
  misc_feature (1)..(25): SEQ ID NO: 1984; WAN024CCK_at; Start 182; Stop 206
tgactcacctagaaaagaccactac

SEQ ID NO: 113025 - DNA, 25 bp, Artificial
  probe
  misc_feature (1)..(25): SEQ ID NO: 1984; WAN024CCK_at; Start 24; Stop 48
aatcgctcaaagtcaggtagcttgg

SEQ ID NO: 113026 - DNA, 25 bp, Artificial
  probe
  misc_feature (1)..(25): SEQ ID NO: 1984; WAN024CCK_at; Start 145; Stop 169
tcaaaggccgactctaatagacgag

SEQ ID NO: 113027 - DNA, 25 bp, Artificial
  probe
  misc_feature (1)..(25): SEQ ID NO: 1984; WAN024CCK_at; Start 92; Stop 116
ttatcaagacttcggacaagcgaga

SEQ ID NO: 113028 - DNA, 25 bp, Artificial
  probe
  misc_feature (1)..(25): SEQ ID NO: 1984; WAN024CCK_at; Start 120; Stop 144
gaagattatggatttgcacgagcaa

SEQ ID NO: 113029 - DNA, 25 bp, Artificial
  probe
  misc_feature (1)..(25): SEQ ID NO: 1984; WAN024CCK_at; Start 35; Stop 59
gtcaggtagcttgggcgattttgtt

SEQ ID NO: 113030 - DNA, 25 bp, Artificial
  probe
  misc_feature (1)..(25): SEQ ID NO: 1984; WAN024CCK_at; Start 88; Stop 112
tatcttatcaagacttcggacaagc

SEQ ID NO: 113031 - DNA, 25 bp, Artificial
  probe
  misc_feature (1)..(25): SEQ ID NO: 1984; WAN024CCK_at; Start 118; Stop 142
aagaagattatggatttgcacgagc

SEQ ID NO: 113032 - DNA, 25 bp, Artificial
  probe
  misc_feature (1)..(25): SEQ ID NO: 1984; WAN024CCK_at; Start 31; Stop 55
caaagtcaggtagcttgggcgattt

SEQ ID NO: 113033 - DNA, 25 bp, Artificial
  probe
  misc_feature (1)..(25): SEQ ID NO: 1984; WAN024CCK_at; Start 138; Stop 162
cgagcaatcaaaggccgactctaat

SEQ ID NO: 113034 - DNA, 25 bp, Artificial
  probe
  misc_feature (1)..(25): SEQ ID NO: 1984; WAN024CCK_at; Start 233; Stop 257
ggtcggagacattcaaaaagaaatg

SEQ ID NO: 113035 - DNA, 25 bp, Artificial
  probe
  misc_feature (1)..(25): SEQ ID NO: 1984; WAN024CCK_at; Start 10; Stop 34
gaagaagctgaaaaaatcgctcaaa

SEQ ID NO: 113036 - DNA, 25 bp, Artificial
  probe
  misc_feature (1)..(25): SEQ ID NO: 1984; WAN024CCK_at; Start 81; Stop 105
cattcgatatcttatcaagacttcg

SEQ ID NO: 113037 - DNA, 25 bp, Artificial
  probe
  misc_feature (1)..(25): SEQ ID NO: 1984; WAN024CCK_at; Start 169; Stop 193
gaagagcgtttgatgactcacctag

SEQ ID NO: 113038 - DNA, 25 bp, Artificial
  probe
  misc_feature (1)..(25): SEQ ID NO: 6697; WAN024CCL_at; Start 180; Stop 204
gactggctataagggcgaagaaaag

SEQ ID NO: 113039 - DNA, 25 bp, Artificial
  probe
  misc_feature (1)..(25): SEQ ID NO: 6697; WAN024CCL_at; Start 91; Stop 115
cttttgcgtaaaggcggagagaaag

SEQ ID NO: 113040 - DNA, 25 bp, Artificial
  probe
  misc_feature (1)..(25): SEQ ID NO: 6697; WAN024CCL_at; Start 162; Stop 186
tgagcaagtagcttcagagactggc

SEQ ID NO: 113041 - DNA, 25 bp, Artificial
  probe
  misc_feature (1)..(25): SEQ ID NO: 6697; WAN024CCL_at; Start 139; Stop 163
gctaaaaatgcagttcatgccgttg

SEQ ID NO: 113042 - DNA, 25 bp, Artificial
  probe
  misc_feature (1)..(25): SEQ ID NO: 6697; WAN024CCL_at; Start 46; Stop 70
ttaacagtagcagtaggcggtattg

SEQ ID NO: 113043 - DNA, 25 bp, Artificial
  probe
  misc_feature (1)..(25): SEQ ID NO: 6697; WAN024CCL_at; Start 88; Stop 112
tatcttttgcgtaaaggcggagaga

SEQ ID NO: 113044 - DNA, 25 bp, Artificial
  probe
  misc_feature (1)..(25): SEQ ID NO: 6697; WAN024CCL_at; Start 21; Stop 45
catcattgcttttgcgacaagcttt

SEQ ID NO: 113045 - DNA, 25 bp, Artificial
  probe
  misc_feature (1)..(25): SEQ ID NO: 6697; WAN024CCL_at; Start 109; Stop 133
gagaaagcggtgatcatcgctgaaa

SEQ ID NO: 113046 - DNA, 25 bp, Artificial
  probe
  misc_feature (1)..(25): SEQ ID NO: 6697; WAN024CCL_at; Start 31; Stop 55
tttgcgacaagctttttaacagtag

SEQ ID NO: 113047 - DNA, 25 bp, Artificial
  probe
  misc_feature (1)..(25): SEQ ID NO: 6697; WAN024CCL_at; Start 176; Stop 200
cagagactggctataagggcgaaga

SEQ ID NO: 113048 - DNA, 25 bp, Artificial
  probe
  misc_feature (1)..(25): SEQ ID NO: 6697; WAN024CCL_at; Start 149; Stop 173
cagttcatgccgttgagcaagtagc

SEQ ID NO: 113049 - DNA, 25 bp, Artificial
  probe
  misc_feature (1)..(25): SEQ ID NO: 6697; WAN024CCL_at; Start 172; Stop 196
gcttcagagactggctataagggcg

SEQ ID NO: 113050 - DNA, 25 bp, Artificial
  probe
  misc_feature (1)..(25): SEQ ID NO: 6697; WAN024CCL_at; Start 83; Stop 107
aagattatcttttgcgtaaaggcgg

SEQ ID NO: 113051 - DNA, 25 bp, Artificial
  probe
  misc_feature (1)..(25): SEQ ID NO: 6697; WAN024CCL_at; Start 187; Stop 211
tataagggcgaagaaaagctggagc

SEQ ID NO: 113052 - DNA, 25 bp, Artificial
  probe
  misc_feature (1)..(25): SEQ ID NO: 6697; WAN024CCL_at; Start 12; Stop 36
tactgaaatcatcattgcttttgcg

SEQ ID NO: 113053 - DNA, 25 bp, Artificial
  probe
  misc_feature (1)..(25): SEQ ID NO: 6697; WAN024CCL_at; Start 68; Stop 92
ttgtaaaagcagtaaaagattatct

SEQ ID NO: 113054 - DNA, 25 bp, Artificial
  probe
  misc_feature (1)..(25): SEQ ID NO: 6697; WAN024CCL_at; Start 34; Stop 58
gcgacaagctttttaacagtagcag

SEQ ID NO: 113055 - DNA, 25 bp, Artificial
  probe
  misc_feature (1)..(25): SEQ ID NO: 6697; WAN024CCL_at; Start 62; Stop 86
gcggtattgtaaaagcagtaaaaga

SEQ ID NO: 113056 - DNA, 25 bp, Artificial
  probe
  misc_feature (1)..(25): SEQ ID NO: 6697; WAN024CCL_at; Start 166; Stop 190
caagtagcttcagagactggctata

SEQ ID NO: 113057 - DNA, 25 bp, Artificial
  probe
  misc_feature (1)..(25): SEQ ID NO: 6697; WAN024CCL_at; Start 42; Stop 66
ctttttaacagtagcagtaggcggt

SEQ ID NO: 113058 - DNA, 25 bp, Artificial
  probe
  misc_feature (1)..(25): SEQ ID NO: 6697; WAN024CCL_at; Start 135; Stop 159
tctagctaaaaatgcagttcatgcc

SEQ ID NO: 113059 - DNA, 25 bp, Artificial
  probe
  misc_feature (1)..(25): SEQ ID NO: 6697; WAN024CCL_at; Start 188; Stop 212
ataagggcgaagaaaagctggagca

SEQ ID NO: 113060 - DNA, 25 bp, Artificial
  probe
  misc_feature (1)..(25): SEQ ID NO: 6697; WAN024CCL_at; Start 59; Stop 83
taggcggtattgtaaaagcagtaaa

SEQ ID NO: 113061 - DNA, 25 bp, Artificial
  probe
  misc_feature (1)..(25): SEQ ID NO: 6697; WAN024CCL_at; Start 56; Stop 80
cagtaggcggtattgtaaaagcagt

SEQ ID NO: 113062 - DNA, 25 bp, Artificial
  probe
  misc_feature (1)..(25): SEQ ID NO: 6697; WAN024CCL_at; Start 145; Stop 169
aatgcagttcatgccgttgagcaag

SEQ ID NO: 113063 - DNA, 25 bp, Artificial
  probe
  misc_feature (1)..(25): SEQ ID NO: 6697; WAN024CCL_at; Start 38; Stop 62
caagctttttaacagtagcagtagg

SEQ ID NO: 113064 - DNA, 25 bp, Artificial
  probe
  misc_feature (1)..(25): SEQ ID NO: 6697; WAN024CCL_at; Start 116; Stop 140
cggtgatcatcgctgaaattctagc

SEQ ID NO: 113065 - DNA, 25 bp, Artificial
  probe
  misc_feature (1)..(25): SEQ ID NO: 6697; WAN024CCL_at; Start 53; Stop 77
tagcagtaggcggtattgtaaaagc

SEQ ID NO: 113066 - DNA, 25 bp, Artificial
  probe
  misc_feature (1)..(25): SEQ ID NO: 6697; WAN024CCL_at; Start 158; Stop 182
ccgttgagcaagtagcttcagagac

SEQ ID NO: 113067 - DNA, 25 bp, Artificial
  probe
  misc_feature (1)..(25): SEQ ID NO: 6697; WAN024CCL_at; Start 154; Stop 178
catgccgttgagcaagtagcttcag

SEQ ID NO: 113068 - DNA, 25 bp, Artificial
  probe
  misc_feature (1)..(25): SEQ ID NO: 6697; WAN024CCL_at; Start 142; Stop 166
aaaaatgcagttcatgccgttgagc

SEQ ID NO: 113069 - DNA, 25 bp, Artificial
  probe
  misc_feature (1)..(25): SEQ ID NO: 6697; WAN024CCL_at; Start 120; Stop 144
gatcatcgctgaaattctagctaaa

SEQ ID NO: 113070 - DNA, 25 bp, Artificial
  probe
  misc_feature (1)..(25): SEQ ID NO: 6697; WAN024CCL_at; Start 107; Stop 131
gagagaaagcggtgatcatcgctga

SEQ ID NO: 113071 - DNA, 25 bp, Artificial
  probe
  misc_feature (1)..(25): SEQ ID NO: 6697; WAN024CCL_at; Start 17; Stop 41
aaatcatcattgcttttgcgacaag

SEQ ID NO: 113072 - DNA, 25 bp, Artificial
  probe
  misc_feature (1)..(25): SEQ ID NO: 6698; WAN024CCM_at; Start 187; Stop 211
tacaagggagatgaaaaactggcac

SEQ ID NO: 113073 - DNA, 25 bp, Artificial
  probe
  misc_feature (1)..(25): SEQ ID NO: 6698; WAN024CCM_at; Start 149; Stop 173
cagttaatgccgtggagcaggtagc

SEQ ID NO: 113074 - DNA, 25 bp, Artificial
  probe
  misc_feature (1)..(25): SEQ ID NO: 6698; WAN024CCM_at; Start 72; Stop 96
caaggcagtcaaggaatacctcgtc

SEQ ID NO: 113075 - DNA, 25 bp, Artificial
  probe
  misc_feature (1)..(25): SEQ ID NO: 6698; WAN024CCM_at; Start 308; Stop 332
tgaacgacgcttggaaaggacaaga

SEQ ID NO: 113076 - DNA, 25 bp, Artificial
  probe
  misc_feature (1)..(25): SEQ ID NO: 6698; WAN024CCM_at; Start 145; Stop 169
aacgcagttaatgccgtggagcagg

SEQ ID NO: 113077 - DNA, 25 bp, Artificial
  probe
  misc_feature (1)..(25): SEQ ID NO: 6698; WAN024CCM_at; Start 279; Stop 303
cacctttgtggagtcagccgtgaag

SEQ ID NO: 113078 - DNA, 25 bp, Artificial
  probe
  misc_feature (1)..(25): SEQ ID NO: 6698; WAN024CCM_at; Start 106; Stop 130
ggagaaaagactatcaagattgttg

SEQ ID NO: 113079 - DNA, 25 bp, Artificial
  probe
  misc_feature (1)..(25): SEQ ID NO: 6698; WAN024CCM_at; Start 170; Stop 194
tagctgctgaaactggctacaaggg

SEQ ID NO: 113080 - DNA, 25 bp, Artificial
  probe
  misc_feature (1)..(25): SEQ ID NO: 6698; WAN024CCM_at; Start 283; Stop 307
tttgtggagtcagccgtgaagcaga

SEQ ID NO: 113081 - DNA, 25 bp, Artificial
  probe
  misc_feature (1)..(25): SEQ ID NO: 6698; WAN024CCM_at; Start 53; Stop 77
ttttggctggtatcgcagtcaaggc

SEQ ID NO: 113082 - DNA, 25 bp, Artificial
  probe
  misc_feature (1)..(25): SEQ ID NO: 6698; WAN024CCM_at; Start 201; Stop 225
aaaactggcacaggctcgtgctaaa

SEQ ID NO: 113083 - DNA, 25 bp, Artificial
  probe
  misc_feature (1)..(25): SEQ ID NO: 6698; WAN024CCM_at; Start 295; Stop 319
gccgtgaagcagatgaacgacgctt

SEQ ID NO: 113084 - DNA, 25 bp, Artificial
  probe
  misc_feature (1)..(25): SEQ ID NO: 6698; WAN024CCM_at; Start 174; Stop 198
tgctgaaactggctacaagggagat

SEQ ID NO: 113085 - DNA, 25 bp, Artificial
  probe
  misc_feature (1)..(25): SEQ ID NO: 6698; WAN024CCM_at; Start 275; Stop 299
tagacacctttgtggagtcagccgt

SEQ ID NO: 113086 - DNA, 25 bp, Artificial
  probe
  misc_feature (1)..(25): SEQ ID NO: 6698; WAN024CCM_at; Start 34; Stop 58
gcaatcagcatccttgttattttgg

SEQ ID NO: 113087 - DNA, 25 bp, Artificial
  probe
  misc_feature (1)..(25): SEQ ID NO: 6698; WAN024CCM_at; Start 138; Stop 162
ggctaagaacgcagttaatgccgtg

SEQ ID NO: 113088 - DNA, 25 bp, Artificial
  probe
  misc_feature (1)..(25): SEQ ID NO: 6698; WAN024CCM_at; Start 77; Stop 101
cagtcaaggaatacctcgtcaaaaa

SEQ ID NO: 113089 - DNA, 25 bp, Artificial
  probe
  misc_feature (1)..(25): SEQ ID NO: 6698; WAN024CCM_at; Start 153; Stop 177
taatgccgtggagcaggtagctgct

SEQ ID NO: 113090 - DNA, 25 bp, Artificial
  probe
  misc_feature (1)..(25): SEQ ID NO: 6698; WAN024CCM_at; Start 60; Stop 84
tggtatcgcagtcaaggcagtcaag

SEQ ID NO: 113091 - DNA, 25 bp, Artificial
  probe
  misc_feature (1)..(25): SEQ ID NO: 6698; WAN024CCM_at; Start 255; Stop 279
cagtatgacggacaaggacttagac

SEQ ID NO: 113092 - DNA, 25 bp, Artificial
  probe
  misc_feature (1)..(25): SEQ ID NO: 6698; WAN024CCM_at; Start 67; Stop 91
gcagtcaaggcagtcaaggaatacc

SEQ ID NO: 113093 - DNA, 25 bp, Artificial
  probe
  misc_feature (1)..(25): SEQ ID NO: 6698; WAN024CCM_at; Start 267; Stop 291
caaggacttagacacctttgtggag

SEQ ID NO: 113094 - DNA, 25 bp, Artificial
  probe
  misc_feature (1)..(25): SEQ ID NO: 6698; WAN024CCM_at; Start 103; Stop 127
ggtggagaaaagactatcaagattg

SEQ ID NO: 113095 - DNA, 25 bp, Artificial
  probe
  misc_feature (1)..(25): SEQ ID NO: 6698; WAN024CCM_at; Start 123; Stop 147
gattgttgaaatcttggctaagaac

SEQ ID NO: 113096 - DNA, 25 bp, Artificial
  probe
  misc_feature (1)..(25): SEQ ID NO: 6698; WAN024CCM_at; Start 166; Stop 190
caggtagctgctgaaactggctaca

SEQ ID NO: 113097 - DNA, 25 bp, Artificial
  probe
  misc_feature (1)..(25): SEQ ID NO: 6698; WAN024CCM_at; Start 247; Stop 271
tacaatatcagtatgacggacaagg

SEQ ID NO: 113098 - DNA, 25 bp, Artificial
  probe
  misc_feature (1)..(25): SEQ ID NO: 6698; WAN024CCM_at; Start 198; Stop 222
tgaaaaactggcacaggctcgtgct

SEQ ID NO: 113099 - DNA, 25 bp, Artificial
  probe
  misc_feature (1)..(25): SEQ ID NO: 6698; WAN024CCM_at; Start 192; Stop 216
gggagatgaaaaactggcacaggct

SEQ ID NO: 113100 - DNA, 25 bp, Artificial
  probe
  misc_feature (1)..(25): SEQ ID NO: 6698; WAN024CCM_at; Start 306; Stop 330
gatgaacgacgcttggaaaggacaa

SEQ ID NO: 113101 - DNA, 25 bp, Artificial
  probe
  misc_feature (1)..(25): SEQ ID NO: 6698; WAN024CCM_at; Start 63; Stop 87
tatcgcagtcaaggcagtcaaggaa

SEQ ID NO: 113102 - DNA, 25 bp, Artificial
  probe
  misc_feature (1)..(25): SEQ ID NO: 6698; WAN024CCM_at; Start 158; Stop 182
ccgtggagcaggtagctgctgaaac

SEQ ID NO: 113103 - DNA, 25 bp, Artificial
  probe
  misc_feature (1)..(25): SEQ ID NO: 6698; WAN024CCM_at; Start 178; Stop 202
gaaactggctacaagggagatgaaa

SEQ ID NO: 113104 - DNA, 25 bp, Artificial
  probe
  misc_feature (1)..(25): SEQ ID NO: 6698; WAN024CCM_at; Start 45; Stop 69
ccttgttattttggctggtatcgca

SEQ ID NO: 113105 - DNA, 25 bp, Artificial
  probe
  misc_feature (1)..(25): SEQ ID NO: 6698; WAN024CCM_at; Start 141; Stop 165
taagaacgcagttaatgccgtggag

SEQ ID NO: 113106 - DNA, 25 bp, Artificial
  probe
  misc_feature (1)..(25): SEQ ID NO: 1915; WAN024CCN_at; Start 121; Stop 145
aaaatcgttgaaatcttggccaaga

SEQ ID NO: 113107 - DNA, 25 bp, Artificial
  probe
  misc_feature (1)..(25): SEQ ID NO: 1915; WAN024CCN_at; Start 117; Stop 141
catcaaaatcgttgaaatcttggcc

SEQ ID NO: 113108 - DNA, 25 bp, Artificial
  probe
  misc_feature (1)..(25): SEQ ID NO: 1915; WAN024CCN_at; Start 138; Stop 162
ggccaagaacgcagtaaatgccgtt

SEQ ID NO: 113109 - DNA, 25 bp, Artificial
  probe
  misc_feature (1)..(25): SEQ ID NO: 1915; WAN024CCN_at; Start 38; Stop 62
tcagcatcctagtcattttagcagg

SEQ ID NO: 113110 - DNA, 25 bp, Artificial
  probe
  misc_feature (1)..(25): SEQ ID NO: 1915; WAN024CCN_at; Start 106; Stop 130
ggagaaaagaccatcaaaatcgttg

SEQ ID NO: 113111 - DNA, 25 bp, Artificial
  probe
  misc_feature (1)..(25): SEQ ID NO: 1915; WAN024CCN_at; Start 39; Stop 63
cagcatcctagtcattttagcaggg

SEQ ID NO: 113112 - DNA, 25 bp, Artificial
  probe
  misc_feature (1)..(25): SEQ ID NO: 1915; WAN024CCN_at; Start 119; Stop 143
tcaaaatcgttgaaatcttggccaa

SEQ ID NO: 113113 - DNA, 25 bp, Artificial
  probe
  misc_feature (1)..(25): SEQ ID NO: 1915; WAN024CCN_at; Start 122; Stop 146
aaatcgttgaaatcttggccaagaa

SEQ ID NO: 113114 - DNA, 25 bp, Artificial
  probe
  misc_feature (1)..(25): SEQ ID NO: 1915; WAN024CCN_at; Start 66; Stop 90
ggtagttagggcagtcaaggactac

SEQ ID NO: 113115 - DNA, 25 bp, Artificial
  probe
  misc_feature (1)..(25): SEQ ID NO: 1915; WAN024CCN_at; Start 105; Stop 129
tggagaaaagaccatcaaaatcgtt

SEQ ID NO: 113116 - DNA, 25 bp, Artificial
  probe
  misc_feature (1)..(25): SEQ ID NO: 1915; WAN024CCN_at; Start 69; Stop 93
agttagggcagtcaaggactacctg

SEQ ID NO: 113117 - DNA, 25 bp, Artificial
  probe
  misc_feature (1)..(25): SEQ ID NO: 1915; WAN024CCN_at; Start 120; Stop 144
caaaatcgttgaaatcttggccaag

SEQ ID NO: 113118 - DNA, 25 bp, Artificial
  probe
  misc_feature (1)..(25): SEQ ID NO: 1915; WAN024CCN_at; Start 45; Stop 69
cctagtcattttagcaggggtggta

SEQ ID NO: 113119 - DNA, 25 bp, Artificial
  probe
  misc_feature (1)..(25): SEQ ID NO: 1915; WAN024CCN_at; Start 34; Stop 58
gcaatcagcatcctagtcattttag

SEQ ID NO: 113120 - DNA, 25 bp, Artificial
  probe
  misc_feature (1)..(25): SEQ ID NO: 1915; WAN024CCN_at; Start 77; Stop 101
cagtcaaggactacctggttcaaaa

SEQ ID NO: 113121 - DNA, 25 bp, Artificial
  probe
  misc_feature (1)..(25): SEQ ID NO: 1915; WAN024CCN_at; Start 109; Stop 133
gaaaagaccatcaaaatcgttgaaa

SEQ ID NO: 113122 - DNA, 25 bp, Artificial
  probe
  misc_feature (1)..(25): SEQ ID NO: 1915; WAN024CCN_at; Start 75; Stop 99
ggcagtcaaggactacctggttcaa

SEQ ID NO: 113123 - DNA, 25 bp, Artificial
  probe
  misc_feature (1)..(25): SEQ ID NO: 1915; WAN024CCN_at; Start 76; Stop 100
gcagtcaaggactacctggttcaaa

SEQ ID NO: 113124 - DNA, 25 bp, Artificial
  probe
  misc_feature (1)..(25): SEQ ID NO: 1915; WAN024CCN_at; Start 74; Stop 98
gggcagtcaaggactacctggttca

SEQ ID NO: 113125 - DNA, 25 bp, Artificial
  probe
  misc_feature (1)..(25): SEQ ID NO: 1915; WAN024CCN_at; Start 107; Stop 131
gagaaaagaccatcaaaatcgttga

SEQ ID NO: 113126 - DNA, 25 bp, Artificial
  probe
  misc_feature (1)..(25): SEQ ID NO: 1915; WAN024CCN_at; Start 71; Stop 95
ttagggcagtcaaggactacctggt

SEQ ID NO: 113127 - DNA, 25 bp, Artificial
  probe
  misc_feature (1)..(25): SEQ ID NO: 1915; WAN024CCN_at; Start 49; Stop 73
gtcattttagcaggggtggtagtta

SEQ ID NO: 113128 - DNA, 25 bp, Artificial
  probe
  misc_feature (1)..(25): SEQ ID NO: 1915; WAN024CCN_at; Start 141; Stop 165
caagaacgcagtaaatgccgttgag

SEQ ID NO: 113129 - DNA, 25 bp, Artificial
  probe
  misc_feature (1)..(25): SEQ ID NO: 1915; WAN024CCN_at; Start 73; Stop 97
agggcagtcaaggactacctggttc

SEQ ID NO: 113130 - DNA, 25 bp, Artificial
  probe
  misc_feature (1)..(25): SEQ ID NO: 1915; WAN024CCN_at; Start 103; Stop 127
ggtggagaaaagaccatcaaaatcg

SEQ ID NO: 113131 - DNA, 25 bp, Artificial
  probe
  misc_feature (1)..(25): SEQ ID NO: 1915; WAN024CCN_at; Start 139; Stop 163
gccaagaacgcagtaaatgccgttg

SEQ ID NO: 113132 - DNA, 25 bp, Artificial
  probe
  misc_feature (1)..(25): SEQ ID NO: 1915; WAN024CCN_at; Start 114; Stop 138
gaccatcaaaatcgttgaaatcttg

SEQ ID NO: 113133 - DNA, 25 bp, Artificial
  probe
  misc_feature (1)..(25): SEQ ID NO: 1915; WAN024CCN_at; Start 123; Stop 147
aatcgttgaaatcttggccaagaac

SEQ ID NO: 113134 - DNA, 25 bp, Artificial
  probe
  misc_feature (1)..(25): SEQ ID NO: 1915; WAN024CCN_at; Start 68; Stop 92
tagttagggcagtcaaggactacct

SEQ ID NO: 113135 - DNA, 25 bp, Artificial
  probe
  misc_feature (1)..(25): SEQ ID NO: 1915; WAN024CCN_at; Start 140; Stop 164
ccaagaacgcagtaaatgccgttga

SEQ ID NO: 113136 - DNA, 25 bp, Artificial
  probe
  misc_feature (1)..(25): SEQ ID NO: 1915; WAN024CCN_at; Start 36; Stop 60
aatcagcatcctagtcattttagca

SEQ ID NO: 113137 - DNA, 25 bp, Artificial
  probe
  misc_feature (1)..(25): SEQ ID NO: 1915; WAN024CCN_at; Start 116; Stop 140
ccatcaaaatcgttgaaatcttggc

SEQ ID NO: 113138 - DNA, 25 bp, Artificial
  probe
  misc_feature (1)..(25): SEQ ID NO: 1915; WAN024CCN_at; Start 72; Stop 96
tagggcagtcaaggactacctggtt

SEQ ID NO: 113139 - DNA, 25 bp, Artificial
  probe
  misc_feature (1)..(25): SEQ ID NO: 1915; WAN024CCN_at; Start 70; Stop 94
gttagggcagtcaaggactacctgg

SEQ ID NO: 113140 - DNA, 25 bp, Artificial
  probe
  misc_feature (1)..(25): SEQ ID NO: 4001; WAN024CCO_at; Start 101; Stop 125
tccatgagaaggaagacttcttcac

SEQ ID NO: 113141 - DNA, 25 bp, Artificial
  probe
  misc_feature (1)..(25): SEQ ID NO: 4001; WAN024CCO_at; Start 70; Stop 94
gacagaggctttcataacttccaga

SEQ ID NO: 113142 - DNA, 25 bp, Artificial
  probe
  misc_feature (1)..(25): SEQ ID NO: 4001; WAN024CCO_at; Start 28; Stop 52
tgtcaggccactacgagatttattt

SEQ ID NO: 113143 - DNA, 25 bp, Artificial
  probe
  misc_feature (1)..(25): SEQ ID NO: 4001; WAN024CCO_at; Start 169; Stop 193
tgcgacatttccttgaaagtccaga

SEQ ID NO: 113144 - DNA, 25 bp, Artificial
  probe
  misc_feature (1)..(25): SEQ ID NO: 4001; WAN024CCO_at; Start 245; Stop 269
taaagaaattgacattgtggagatg

SEQ ID NO: 113145 - DNA, 25 bp, Artificial
  probe
  misc_feature (1)..(25): SEQ ID NO: 4001; WAN024CCO_at; Start 24; Stop 48
cacctgtcaggccactacgagattt

SEQ ID NO: 113146 - DNA, 25 bp, Artificial
  probe
  misc_feature (1)..(25): SEQ ID NO: 4001; WAN024CCO_at; Start 226; Stop 250
aaacatgcttcctcctatttaaaga

SEQ ID NO: 113147 - DNA, 25 bp, Artificial
  probe
  misc_feature (1)..(25): SEQ ID NO: 4001; WAN024CCO_at; Start 39; Stop 63
tacgagatttattttcattgaggcc

SEQ ID NO: 113148 - DNA, 25 bp, Artificial
  probe
  misc_feature (1)..(25): SEQ ID NO: 4001; WAN024CCO_at; Start 54; Stop 78
cattgaggccaagttggacagaggc

SEQ ID NO: 113149 - DNA, 25 bp, Artificial
  probe
  misc_feature (1)..(25): SEQ ID NO: 4001; WAN024CCO_at; Start 112; Stop 136
gaagacttcttcacgttcgcgaccg

SEQ ID NO: 113150 - DNA, 25 bp, Artificial
  probe
  misc_feature (1)..(25): SEQ ID NO: 4001; WAN024CCO_at; Start 96; Stop 120
tgcgttccatgagaaggaagacttc

SEQ ID NO: 113151 - DNA, 25 bp, Artificial
  probe
  misc_feature (1)..(25): SEQ ID NO: 4001; WAN024CCO_at; Start 84; Stop 108
taacttccagattgcgttccatgag

SEQ ID NO: 113152 - DNA, 25 bp, Artificial
  probe
  misc_feature (1)..(25): SEQ ID NO: 4001; WAN024CCO_at; Start 74; Stop 98
gaggctttcataacttccagattgc

SEQ ID NO: 113153 - DNA, 25 bp, Artificial
  probe
  misc_feature (1)..(25): SEQ ID NO: 4001; WAN024CCO_at; Start 10; Stop 34
tttggcagcatctccacctgtcagg

SEQ ID NO: 113154 - DNA, 25 bp, Artificial
  probe
  misc_feature (1)..(25): SEQ ID NO: 4001; WAN024CCO_at; Start 128; Stop 152
tcgcgaccggtcaattcaaactctg

SEQ ID NO: 113155 - DNA, 25 bp, Artificial
  probe
  misc_feature (1)..(25): SEQ ID NO: 4001; WAN024CCO_at; Start 1; Stop 25
gtgatccaatttggcagcatctcca

SEQ ID NO: 113156 - DNA, 25 bp, Artificial
  probe
  misc_feature (1)..(25): SEQ ID NO: 4001; WAN024CCO_at; Start 216; Stop 240
tgatagaataaaacatgcttcctcc

SEQ ID NO: 113157 - DNA, 25 bp, Artificial
  probe
  misc_feature (1)..(25): SEQ ID NO: 4001; WAN024CCO_at; Start 201; Stop 225
gctcgaccaattctttgatagaata

SEQ ID NO: 113158 - DNA, 25 bp, Artificial
  probe
  misc_feature (1)..(25): SEQ ID NO: 4001; WAN024CCO_at; Start 232; Stop 256
gcttcctcctatttaaagaaattga

SEQ ID NO: 113159 - DNA, 25 bp, Artificial
  probe
  misc_feature (1)..(25): SEQ ID NO: 4001; WAN024CCO_at; Start 31; Stop 55
caggccactacgagatttattttca

SEQ ID NO: 113160 - DNA, 25 bp, Artificial
  probe
  misc_feature (1)..(25): SEQ ID NO: 4001; WAN024CCO_at; Start 116; Stop 140
acttcttcacgttcgcgaccggtca

SEQ ID NO: 113161 - DNA, 25 bp, Artificial
  probe
  misc_feature (1)..(25): SEQ ID NO: 4001; WAN024CCO_at; Start 61; Stop 85
gccaagttggacagaggctttcata

SEQ ID NO: 113162 - DNA, 25 bp, Artificial
  probe
  misc_feature (1)..(25): SEQ ID NO: 4001; WAN024CCO_at; Start 183; Stop 207
gaaagtccagatctgcttgctcgac

SEQ ID NO: 113163 - DNA, 25 bp, Artificial
  probe
  misc_feature (1)..(25): SEQ ID NO: 4001; WAN024CCO_at; Start 89; Stop 113
tccagattgcgttccatgagaagga

SEQ ID NO: 113164 - DNA, 25 bp, Artificial
  probe
  misc_feature (1)..(25): SEQ ID NO: 4001; WAN024CCO_at; Start 48; Stop 72
tattttcattgaggccaagttggac

SEQ ID NO: 113165 - DNA, 25 bp, Artificial
  probe
  misc_feature (1)..(25): SEQ ID NO: 4001; WAN024CCO_at; Start 197; Stop 221
gcttgctcgaccaattctttgatag

SEQ ID NO: 113166 - DNA, 25 bp, Artificial
  probe
  misc_feature (1)..(25): SEQ ID NO: 4001; WAN024CCO_at; Start 188; Stop 212
tccagatctgcttgctcgaccaatt

SEQ ID NO: 113167 - DNA, 25 bp, Artificial
  probe
  misc_feature (1)..(25): SEQ ID NO: 4001; WAN024CCO_at; Start 134; Stop 158
ccggtcaattcaaactctgttgtaa

SEQ ID NO: 113168 - DNA, 25 bp, Artificial
  probe
  misc_feature (1)..(25): SEQ ID NO: 4001; WAN024CCO_at; Start 174; Stop 198
catttccttgaaagtccagatctgc

SEQ ID NO: 113169 - DNA, 25 bp, Artificial
  probe
  misc_feature (1)..(25): SEQ ID NO: 4001; WAN024CCO_at; Start 122; Stop 146
tcacgttcgcgaccggtcaattcaa

SEQ ID NO: 113170 - DNA, 25 bp, Artificial
  probe
  misc_feature (1)..(25): SEQ ID NO: 4001; WAN024CCO_at; Start 163; Stop 187
gagttctgcgacatttccttgaaag

SEQ ID NO: 113171 - DNA, 25 bp, Artificial
  probe
  misc_feature (1)..(25): SEQ ID NO: 4001; WAN024CCO_at; Start 178; Stop 202
tccttgaaagtccagatctgcttgc

SEQ ID NO: 113172 - DNA, 25 bp, Artificial
  probe
  misc_feature (1)..(25): SEQ ID NO: 4001; WAN024CCO_at; Start 156; Stop 180
taatcatgagttctgcgacatttcc

SEQ ID NO: 113173 - DNA, 25 bp, Artificial
  probe
  misc_feature (1)..(25): SEQ ID NO: 4001; WAN024CCO_at; Start 150; Stop 174
ctgttgtaatcatgagttctgcgac

SEQ ID NO: 113174 - DNA, 25 bp, Artificial
  probe
  misc_feature (1)..(25): SEQ ID NO: 4128; WAN024CCP_at; Start 111; Stop 135
tctgggcgatattgataccatagcg

SEQ ID NO: 113175 - DNA, 25 bp, Artificial
  probe
  misc_feature (1)..(25): SEQ ID NO: 4128; WAN024CCP_at; Start 384; Stop 408
tgtgggcaatttccagactatttgg

SEQ ID NO: 113176 - DNA, 25 bp, Artificial
  probe
  misc_feature (1)..(25): SEQ ID NO: 4128; WAN024CCP_at; Start 179; Stop 203
tgatgaacgatgatgatagtcggtg

SEQ ID NO: 113177 - DNA, 25 bp, Artificial
  probe
  misc_feature (1)..(25): SEQ ID NO: 4128; WAN024CCP_at; Start 218; Stop 242
gagacggcaaaaccattgagttcgg

SEQ ID NO: 113178 - DNA, 25 bp, Artificial
  probe
  misc_feature (1)..(25): SEQ ID NO: 4128; WAN024CCP_at; Start 411; Stop 435
tttcaggatcatctgtatccattcc

SEQ ID NO: 113179 - DNA, 25 bp, Artificial
  probe
  misc_feature (1)..(25): SEQ ID NO: 4128; WAN024CCP_at; Start 339; Stop 363
cattgctgtctttctgaatggtcca

SEQ ID NO: 113180 - DNA, 25 bp, Artificial
  probe
  misc_feature (1)..(25): SEQ ID NO: 4128; WAN024CCP_at; Start 193; Stop 217
gatagtcggtgtattcatattgaga

SEQ ID NO: 113181 - DNA, 25 bp, Artificial
  probe
  misc_feature (1)..(25): SEQ ID NO: 4128; WAN024CCP_at; Start 375; Stop 399
taccacgcttgtgggcaatttccag

SEQ ID NO: 113182 - DNA, 25 bp, Artificial
  probe
  misc_feature (1)..(25): SEQ ID NO: 4128; WAN024CCP_at; Start 66; Stop 90
taatcataatggctttttcaccagc

SEQ ID NO: 113183 - DNA, 25 bp, Artificial
  probe
  misc_feature (1)..(25): SEQ ID NO: 4128; WAN024CCP_at; Start 76; Stop 100
ggctttttcaccagctttttcacga

SEQ ID NO: 113184 - DNA, 25 bp, Artificial
  probe
  misc_feature (1)..(25): SEQ ID NO: 4128; WAN024CCP_at; Start 309; Stop 333
cagtaattttagtggtgttagggtg

SEQ ID NO: 113185 - DNA, 25 bp, Artificial
  probe
  misc_feature (1)..(25): SEQ ID NO: 4128; WAN024CCP_at; Start 153; Stop 177
caagggcaatcatacctggaatatc

SEQ ID NO: 113186 - DNA, 25 bp, Artificial
  probe
  misc_feature (1)..(25): SEQ ID NO: 4128; WAN024CCP_at; Start 354; Stop 378
gaatggtccagacaatcttgatacc

SEQ ID NO: 113187 - DNA, 25 bp, Artificial
  probe
  misc_feature (1)..(25): SEQ ID NO: 4128; WAN024CCP_at; Start 208; Stop 232
catattgagagagacggcaaaacca

SEQ ID NO: 113188 - DNA, 25 bp, Artificial
  probe
  misc_feature (1)..(25): SEQ ID NO: 4128; WAN024CCP_at; Start 44; Stop 68
cagttgcgactgtcaacttcgataa

SEQ ID NO: 113189 - DNA, 25 bp, Artificial
  probe
  misc_feature (1)..(25): SEQ ID NO: 4128; WAN024CCP_at; Start 54; Stop 78
tgtcaacttcgataatcataatggc

SEQ ID NO: 113190 - DNA, 25 bp, Artificial
  probe
  misc_feature (1)..(25): SEQ ID NO: 4128; WAN024CCP_at; Start 6; Stop 30
gatgagggatttttcgaatttcttc

SEQ ID NO: 113191 - DNA, 25 bp, Artificial
  probe
  misc_feature (1)..(25): SEQ ID NO: 4128; WAN024CCP_at; Start 86; Stop 110
ccagctttttcacgagtgacattca

SEQ ID NO: 113192 - DNA, 25 bp, Artificial
  probe
  misc_feature (1)..(25): SEQ ID NO: 4128; WAN024CCP_at; Start 120; Stop 144
tattgataccatagcgggaaagcgc

SEQ ID NO: 113193 - DNA, 25 bp, Artificial
  probe
  misc_feature (1)..(25): SEQ ID NO: 4128; WAN024CCP_at; Start 96; Stop 120
cacgagtgacattcatctgggcgat

SEQ ID NO: 113194 - DNA, 25 bp, Artificial
  probe
  misc_feature (1)..(25): SEQ ID NO: 4128; WAN024CCP_at; Start 134; Stop 158
cgggaaagcgcctctgtaacaaggg

SEQ ID NO: 113195 - DNA, 25 bp, Artificial
  probe
  misc_feature (1)..(25): SEQ ID NO: 4128; WAN024CCP_at; Start 167; Stop 191
cctggaatatcttgatgaacgatga

SEQ ID NO: 113196 - DNA, 25 bp, Artificial
  probe
  misc_feature (1)..(25): SEQ ID NO: 4128; WAN024CCP_at; Start 366; Stop 390
caatcttgataccacgcttgtgggc

SEQ ID NO: 113197 - DNA, 25 bp, Artificial
  probe
  misc_feature (1)..(25): SEQ ID NO: 4128; WAN024CCP_at; Start 246; Stop 270
cctgaatatttcctccaccgataga

SEQ ID NO: 113198 - DNA, 25 bp, Artificial
  probe
  misc_feature (1)..(25): SEQ ID NO: 4128; WAN024CCP_at; Start 397; Stop 421
cagactatttggaatttcaggatca

SEQ ID NO: 113199 - DNA, 25 bp, Artificial
  probe
  misc_feature (1)..(25): SEQ ID NO: 4128; WAN024CCP_at; Start 31; Stop 55
gatagcctcatcacagttgcgactg

SEQ ID NO: 113200 - DNA, 25 bp, Artificial
  probe
  misc_feature (1)..(25): SEQ ID NO: 4128; WAN024CCP_at; Start 21; Stop 45
gaatttcttcgatagcctcatcaca

SEQ ID NO: 113201 - DNA, 25 bp, Artificial
  probe
  misc_feature (1)..(25): SEQ ID NO: 4128; WAN024CCP_at; Start 280; Stop 304
cacgctgatggtcttgtgggcattt

SEQ ID NO: 113202 - DNA, 25 bp, Artificial
  probe
  misc_feature (1)..(25): SEQ ID NO: 4128; WAN024CCP_at; Start 234; Stop 258
tgagttcggttacctgaatatttcc

SEQ ID NO: 113203 - DNA, 25 bp, Artificial
  probe
  misc_feature (1)..(25): SEQ ID NO: 4128; WAN024CCP_at; Start 269; Stop 293
gaaataccagtcacgctgatggtct

SEQ ID NO: 113204 - DNA, 25 bp, Artificial
  probe
  misc_feature (1)..(25): SEQ ID NO: 4128; WAN024CCP_at; Start 126; Stop 150
taccatagcgggaaagcgcctctgt

SEQ ID NO: 113205 - DNA, 25 bp, Artificial
  probe
  misc_feature (1)..(25): SEQ ID NO: 4128; WAN024CCP_at; Start 143; Stop 167
gcctctgtaacaagggcaatcatac

SEQ ID NO: 113206 - DNA, 25 bp, Artificial
  probe
  misc_feature (1)..(25): SEQ ID NO: 4128; WAN024CCP_at; Start 259; Stop 283
tccaccgatagaaataccagtcacg

SEQ ID NO: 113207 - DNA, 25 bp, Artificial
  probe
  misc_feature (1)..(25): SEQ ID NO: 4128; WAN024CCP_at; Start 290; Stop 314
gtcttgtgggcatttttaacagtaa

SEQ ID NO: 113208 - DNA, 25 bp, Artificial
  probe
  misc_feature (1)..(25): SEQ ID NO: 5120; WAN024CCQ_at; Start 370; Stop 394
tcctacttggtacatggcatcgatc

SEQ ID NO: 113209 - DNA, 25 bp, Artificial
  probe
  misc_feature (1)..(25): SEQ ID NO: 5120; WAN024CCQ_at; Start 100; Stop 124
gagaggtggtcccataaaaccacga

SEQ ID NO: 113210 - DNA, 25 bp, Artificial
  probe
  misc_feature (1)..(25): SEQ ID NO: 5120; WAN024CCQ_at; Start 540; Stop 564
ttttaatgacaaaggcaatagcttg

SEQ ID NO: 113211 - DNA, 25 bp, Artificial
  probe
  misc_feature (1)..(25): SEQ ID NO: 5120; WAN024CCQ_at; Start 477; Stop 501
tacgtttgacacagggaacttcgac

SEQ ID NO: 113212 - DNA, 25 bp, Artificial
  probe
  misc_feature (1)..(25): SEQ ID NO: 5120; WAN024CCQ_at; Start 59; Stop 83
gaaatttggtctttggacaggcagg

SEQ ID NO: 113213 - DNA, 25 bp, Artificial
  probe
  misc_feature (1)..(25): SEQ ID NO: 5120; WAN024CCQ_at; Start 1; Stop 25
ttgagcttcatagatgccttttgcc

SEQ ID NO: 113214 - DNA, 25 bp, Artificial
  probe
  misc_feature (1)..(25): SEQ ID NO: 5120; WAN024CCQ_at; Start 462; Stop 486
tagctcccatggcattacgtttgac

SEQ ID NO: 113215 - DNA, 25 bp, Artificial
  probe
  misc_feature (1)..(25): SEQ ID NO: 5120; WAN024CCQ_at; Start 128; Stop 152
gttttggcatcagggctaggcaccc

SEQ ID NO: 113216 - DNA, 25 bp, Artificial
  probe
  misc_feature (1)..(25): SEQ ID NO: 5120; WAN024CCQ_at; Start 508; Stop 532
tgcaacagggtcacagatgaggcct

SEQ ID NO: 113217 - DNA, 25 bp, Artificial
  probe
  misc_feature (1)..(25): SEQ ID NO: 5120; WAN024CCQ_at; Start 492; Stop 516
gaacttcgaccaaacctgcaacagg

SEQ ID NO: 113218 - DNA, 25 bp, Artificial
  probe
  misc_feature (1)..(25): SEQ ID NO: 5120; WAN024CCQ_at; Start 31; Stop 55
gtaagaacgatatatctgcacggct

SEQ ID NO: 113219 - DNA, 25 bp, Artificial
  probe
  misc_feature (1)..(25): SEQ ID NO: 5120; WAN024CCQ_at; Start 523; Stop 547
gatgaggcctagcatatttttaatg

SEQ ID NO: 113220 - DNA, 25 bp, Artificial
  probe
  misc_feature (1)..(25): SEQ ID NO: 5120; WAN024CCQ_at; Start 260; Stop 284
cctatttgataagcttattctccga

SEQ ID NO: 113221 - DNA, 25 bp, Artificial
  probe
  misc_feature (1)..(25): SEQ ID NO: 5120; WAN024CCQ_at; Start 287; Stop 311
atttctttttggaggcgacgaccag

SEQ ID NO: 113222 - DNA, 25 bp, Artificial
  probe
  misc_feature (1)..(25): SEQ ID NO: 5120; WAN024CCQ_at; Start 204; Stop 228
caacgagggttccatccaaatcgaa

SEQ ID NO: 113223 - DNA, 25 bp, Artificial
  probe
  misc_feature (1)..(25): SEQ ID NO: 5120; WAN024CCQ_at; Start 244; Stop 268
agaggtcatggtttctcctatttga

SEQ ID NO: 113224 - DNA, 25 bp, Artificial
  probe
  misc_feature (1)..(25): SEQ ID NO: 5120; WAN024CCQ_at; Start 318; Stop 342
tggtagcgagtccaccttcagctgt

SEQ ID NO: 113225 - DNA, 25 bp, Artificial
  probe
  misc_feature (1)..(25): SEQ ID NO: 5120; WAN024CCQ_at; Start 229; Stop 253
aaaaatcgctgtgatagaggtcatg

SEQ ID NO: 113226 - DNA, 25 bp, Artificial
  probe
  misc_feature (1)..(25): SEQ ID NO: 5120; WAN024CCQ_at; Start 325; Stop 349
gagtccaccttcagctgtttcacga

SEQ ID NO: 113227 - DNA, 25 bp, Artificial
  probe
  misc_feature (1)..(25): SEQ ID NO: 5120; WAN024CCQ_at; Start 86; Stop 110
gcaaaactactttcgagaggtggtc

SEQ ID NO: 113228 - DNA, 25 bp, Artificial
  probe
  misc_feature (1)..(25): SEQ ID NO: 5120; WAN024CCQ_at; Start 45; Stop 69
tctgcacggcttcagaaatttggtc

SEQ ID NO: 113229 - DNA, 25 bp, Artificial
  probe
  misc_feature (1)..(25): SEQ ID NO: 5120; WAN024CCQ_at; Start 178; Stop 202
ggcattgtgaatcccgatagaacta

SEQ ID NO: 113230 - DNA, 25 bp, Artificial
  probe
  misc_feature (1)..(25): SEQ ID NO: 5120; WAN024CCQ_at; Start 445; Stop 469
tgcgatgaaagcaaagctagctccc

SEQ ID NO: 113231 - DNA, 25 bp, Artificial
  probe
  misc_feature (1)..(25): SEQ ID NO: 5120; WAN024CCQ_at; Start 72; Stop 96
tggacaggcaggtcgcaaaactact

SEQ ID NO: 113232 - DNA, 25 bp, Artificial
  probe
  misc_feature (1)..(25): SEQ ID NO: 5120; WAN024CCQ_at; Start 340; Stop 364
tgtttcacgaaaggcagttggcatg

SEQ ID NO: 113233 - DNA, 25 bp, Artificial
  probe
  misc_feature (1)..(25): SEQ ID NO: 5120; WAN024CCQ_at; Start 414; Stop 438
tagattcgatacctgccaaggccat

SEQ ID NO: 113234 - DNA, 25 bp, Artificial
  probe
  misc_feature (1)..(25): SEQ ID NO: 5120; WAN024CCQ_at; Start 430; Stop 454
caaggccatgtctgctgcgatgaaa

SEQ ID NO: 113235 - DNA, 25 bp, Artificial
  probe
  misc_feature (1)..(25): SEQ ID NO: 5120; WAN024CCQ_at; Start 16; Stop 40
gccttttgccttatagtaagaacga

SEQ ID NO: 113236 - DNA, 25 bp, Artificial
  probe
  misc_feature (1)..(25): SEQ ID NO: 5120; WAN024CCQ_at; Start 120; Stop 144
cacgaatagttttggcatcagggct

SEQ ID NO: 113237 - DNA, 25 bp, Artificial
  probe
  misc_feature (1)..(25): SEQ ID NO: 5120; WAN024CCQ_at; Start 386; Stop 410
gcatcgatcacttcatccacaggga

SEQ ID NO: 113238 - DNA, 25 bp, Artificial
  probe
  misc_feature (1)..(25): SEQ ID NO: 5120; WAN024CCQ_at; Start 355; Stop 379
agttggcatgcttgctcctacttgg

SEQ ID NO: 113239 - DNA, 25 bp, Artificial
  probe
  misc_feature (1)..(25): SEQ ID NO: 5120; WAN024CCQ_at; Start 168; Stop 192
tataggtaaaggcattgtgaatccc

SEQ ID NO: 113240 - DNA, 25 bp, Artificial
  probe
  misc_feature (1)..(25): SEQ ID NO: 5120; WAN024CCQ_at; Start 193; Stop 217
gatagaactatcaacgagggttcca

SEQ ID NO: 113241 - DNA, 25 bp, Artificial
  probe
  misc_feature (1)..(25): SEQ ID NO: 5120; WAN024CCQ_at; Start 402; Stop 426
ccacagggattttagattcgatacc

SEQ ID NO: 113242 - DNA, 25 bp, Artificial
  probe
  misc_feature (1)..(25): SEQ ID NO: 3361; WAN024CCR_at; Start 282; Stop 306
caagattgtctggaccattcagaaa

SEQ ID NO: 113243 - DNA, 25 bp, Artificial
  probe
  misc_feature (1)..(25): SEQ ID NO: 3361; WAN024CCR_at; Start 87; Stop 111
tgttcgtattgggaagattgtctct

SEQ ID NO: 113244 - DNA, 25 bp, Artificial
  probe
  misc_feature (1)..(25): SEQ ID NO: 3361; WAN024CCR_at; Start 385; Stop 409
tctatcggtggaggaaatattcagg

SEQ ID NO: 113245 - DNA, 25 bp, Artificial
  probe
  misc_feature (1)..(25): SEQ ID NO: 3361; WAN024CCR_at; Start 600; Stop 624
cagtcgcaactgtgatgaggctatc

SEQ ID NO: 113246 - DNA, 25 bp, Artificial
  probe
  misc_feature (1)..(25): SEQ ID NO: 3361; WAN024CCR_at; Start 611; Stop 635
gtgatgaggctatcgaagaaattcg

SEQ ID NO: 113247 - DNA, 25 bp, Artificial
  probe
  misc_feature (1)..(25): SEQ ID NO: 3361; WAN024CCR_at; Start 635; Stop 659
gaaaaatccctcatctccacaatgt

SEQ ID NO: 113248 - DNA, 25 bp, Artificial
  probe
  misc_feature (1)..(25): SEQ ID NO: 3361; WAN024CCR_at; Start 173; Stop 197
cctatcgtggtcacggaacagacct

SEQ ID NO: 113249 - DNA, 25 bp, Artificial
  probe
  misc_feature (1)..(25): SEQ ID NO: 3361; WAN024CCR_at; Start 464; Stop 488
tcatcgttcatcaagatattccagg

SEQ ID NO: 113250 - DNA, 25 bp, Artificial
  probe
  misc_feature (1)..(25): SEQ ID NO: 3361; WAN024CCR_at; Start 504; Stop 528
tacagaggcgctttcccgctatggt

SEQ ID NO: 113251 - DNA, 25 bp, Artificial
  probe
  misc_feature (1)..(25): SEQ ID NO: 3361; WAN024CCR_at; Start 187; Stop 211
ggaacagacctagcccttgttgcag

SEQ ID NO: 113252 - DNA, 25 bp, Artificial
  probe
  misc_feature (1)..(25): SEQ ID NO: 3361; WAN024CCR_at; Start 555; Stop 579
tcgtgaaaaagctggtgaaaaagcc

SEQ ID NO: 113253 - DNA, 25 bp, Artificial
  probe
  misc_feature (1)..(25): SEQ ID NO: 3361; WAN024CCR_at; Start 54; Stop 78
gattggcccatctagtagccatacc

SEQ ID NO: 113254 - DNA, 25 bp, Artificial
  probe
  misc_feature (1)..(25): SEQ ID NO: 3361; WAN024CCR_at; Start 298; Stop 322
attcagaaagacagcaatgcccctc

SEQ ID NO: 113255 - DNA, 25 bp, Artificial
  probe
  misc_feature (1)..(25): SEQ ID NO: 3361; WAN024CCR_at; Start 38; Stop 62
tcatcggaccagttatgattggccc

SEQ ID NO: 113256 - DNA, 25 bp, Artificial
  probe
  misc_feature (1)..(25): SEQ ID NO: 3361; WAN024CCR_at; Start 158; Stop 182
actcatttgccaagacctatcgtgg

SEQ ID NO: 113257 - DNA, 25 bp, Artificial
  probe
  misc_feature (1)..(25): SEQ ID NO: 3361; WAN024CCR_at; Start 478; Stop 502
gatattccaggtatgattgcccttg

SEQ ID NO: 113258 - DNA, 25 bp, Artificial
  probe
  misc_feature (1)..(25): SEQ ID NO: 3361; WAN024CCR_at; Start 489; Stop 513
tatgattgcccttgttacagaggcg

SEQ ID NO: 113259 - DNA, 25 bp, Artificial
  probe
  misc_feature (1)..(25): SEQ ID NO: 3361; WAN024CCR_at; Start 372; Stop 396
cgtgactggtatttctatcggtgga

SEQ ID NO: 113260 - DNA, 25 bp, Artificial
  probe
  misc_feature (1)..(25): SEQ ID NO: 3361; WAN024CCR_at; Start 252; Stop 276
tagtctggaaattgcccacaagcgt

SEQ ID NO: 113261 - DNA, 25 bp, Artificial
  probe
  misc_feature (1)..(25): SEQ ID NO: 3361; WAN024CCR_at; Start 446; Stop 470
tgaatacaccgactatcatcatcgt

SEQ ID NO: 113262 - DNA, 25 bp, Artificial
  probe
  misc_feature (1)..(25): SEQ ID NO: 3361; WAN024CCR_at; Start 397; Stop 421
ggaaatattcaggtaaccgaactca

SEQ ID NO: 113263 - DNA, 25 bp, Artificial
  probe
  misc_feature (1)..(25): SEQ ID NO: 3361; WAN024CCR_at; Start 235; Stop 259
gatcctgaaattccaaatagtctgg

SEQ ID NO: 113264 - DNA, 25 bp, Artificial
  probe
  misc_feature (1)..(25): SEQ ID NO: 3361; WAN024CCR_at; Start 433; Stop 457
gtctctctcaatatgaatacaccga

SEQ ID NO: 113265 - DNA, 25 bp, Artificial
  probe
  misc_feature (1)..(25): SEQ ID NO: 3361; WAN024CCR_at; Start 342; Stop 366
tactgttaaaaatgcccacaagacc

SEQ ID NO: 113266 - DNA, 25 bp, Artificial
  probe
  misc_feature (1)..(25): SEQ ID NO: 3361; WAN024CCR_at; Start 22; Stop 46
caatctgtctttgatatcatcggac

SEQ ID NO: 113267 - DNA, 25 bp, Artificial
  probe
  misc_feature (1)..(25): SEQ ID NO: 3361; WAN024CCR_at; Start 520; Stop 544
cgctatggtatcaatatcgcccaga

SEQ ID NO: 113268 - DNA, 25 bp, Artificial
  probe
  misc_feature (1)..(25): SEQ ID NO: 3361; WAN024CCR_at; Start 69; Stop 93
tagccataccgctggtgctgttcgt

SEQ ID NO: 113269 - DNA, 25 bp, Artificial
  probe
  misc_feature (1)..(25): SEQ ID NO: 3361; WAN024CCR_at; Start 267; Stop 291
ccacaagcgtggtatcaagattgtc

SEQ ID NO: 113270 - DNA, 25 bp, Artificial
  probe
  misc_feature (1)..(25): SEQ ID NO: 3361; WAN024CCR_at; Start 358; Stop 382
cacaagaccatcagcgtgactggta

SEQ ID NO: 113271 - DNA, 25 bp, Artificial
  probe
  misc_feature (1)..(25): SEQ ID NO: 3361; WAN024CCR_at; Start 571; Stop 595
gaaaaagccattatgattatcgaag

SEQ ID NO: 113272 - DNA, 25 bp, Artificial
  probe
  misc_feature (1)..(25): SEQ ID NO: 3361; WAN024CCR_at; Start 537; Stop 561
cgcccagatgaatgtcactcgtgaa

SEQ ID NO: 113273 - DNA, 25 bp, Artificial
  probe
  misc_feature (1)..(25): SEQ ID NO: 3361; WAN024CCR_at; Start 415; Stop 439
gaactcaatggttttgccgtctctc

SEQ ID NO: 113274 - DNA, 25 bp, Artificial
  probe
  misc_feature (1)..(25): SEQ ID NO: 3361; WAN024CCR_at; Start 220; Stop 244
ggaatggatacagatgatcctgaaa

SEQ ID NO: 113275 - DNA, 25 bp, Artificial
  probe
  misc_feature (1)..(25): SEQ ID NO: 3361; WAN024CCR_at; Start 585; Stop 609
gattatcgaagttgacagtcgcaac

SEQ ID NO: 113276 - DNA, 25 bp, Artificial
  probe
  misc_feature (1)..(25): SEQ ID NO: 3105; WAN024CCS_at; Start 198; Stop 222
cctgacaggtggagatgctgccaaa

SEQ ID NO: 113277 - DNA, 25 bp, Artificial
  probe
  misc_feature (1)..(25): SEQ ID NO: 3105; WAN024CCS_at; Start 31; Stop 55
caagcagatctggactttcaaggaa

SEQ ID NO: 113278 - DNA, 25 bp, Artificial
  probe
  misc_feature (1)..(25): SEQ ID NO: 3105; WAN024CCS_at; Start 450; Stop 474
tggactagtcatcgcaaacaatgcc

SEQ ID NO: 113279 - DNA, 25 bp, Artificial
  probe
  misc_feature (1)..(25): SEQ ID NO: 3105; WAN024CCS_at; Start 546; Stop 570
gactctggctgcaggtggaacacct

SEQ ID NO: 113280 - DNA, 25 bp, Artificial
  probe
  misc_feature (1)..(25): SEQ ID NO: 3105; WAN024CCS_at; Start 299; Stop 323
tcaatgaacacaatgccaaaatggg

SEQ ID NO: 113281 - DNA, 25 bp, Artificial
  probe
  misc_feature (1)..(25): SEQ ID NO: 3105; WAN024CCS_at; Start 764; Stop 788
tgtaccaagtaggagcaagcatgcc

SEQ ID NO: 113282 - DNA, 25 bp, Artificial
  probe
  misc_feature (1)..(25): SEQ ID NO: 3105; WAN024CCS_at; Start 562; Stop 586
ggaacaccttatcaggccagtcaag

SEQ ID NO: 113283 - DNA, 25 bp, Artificial
  probe
  misc_feature (1)..(25): SEQ ID NO: 3105; WAN024CCS_at; Start 663; Stop 687
caaacgtaatgccatgggagctagc

SEQ ID NO: 113284 - DNA, 25 bp, Artificial
  probe
  misc_feature (1)..(25): SEQ ID NO: 3105; WAN024CCS_at; Start 649; Stop 673
gaagttccctgtgtcaaacgtaatg

SEQ ID NO: 113285 - DNA, 25 bp, Artificial
  probe
  misc_feature (1)..(25): SEQ ID NO: 3105; WAN024CCS_at; Start 523; Stop 547
tctgctatgagtgctgccgccttga

SEQ ID NO: 113286 - DNA, 25 bp, Artificial
  probe
  misc_feature (1)..(25): SEQ ID NO: 3105; WAN024CCS_at; Start 694; Stop 718
ttcatcgcagcagacatggccttgg

SEQ ID NO: 113287 - DNA, 25 bp, Artificial
  probe
  misc_feature (1)..(25): SEQ ID NO: 3105; WAN024CCS_at; Start 405; Stop 429
cagccacgagcaacaattggatttc

SEQ ID NO: 113288 - DNA, 25 bp, Artificial
  probe
  misc_feature (1)..(25): SEQ ID NO: 3105; WAN024CCS_at; Start 48; Stop 72
tcaaggaaatgtcgcagaactcatg

SEQ ID NO: 113289 - DNA, 25 bp, Artificial
  probe
  misc_feature (1)..(25): SEQ ID NO: 3105; WAN024CCS_at; Start 779; Stop 803
caagcatgccaactgcctttcgtga

SEQ ID NO: 113290 - DNA, 25 bp, Artificial
  probe
  misc_feature (1)..(25): SEQ ID NO: 3105; WAN024CCS_at; Start 429; Stop 453
cctctttgctgctggtgcctttgga

SEQ ID NO: 113291 - DNA, 25 bp, Artificial
  probe
  misc_feature (1)..(25): SEQ ID NO: 3105; WAN024CCS_at; Start 798; Stop 822
tcgtgaaacagctgaaggtggactc

SEQ ID NO: 113292 - DNA, 25 bp, Artificial
  probe
  misc_feature (1)..(25): SEQ ID NO: 3105; WAN024CCS_at; Start 753; Stop 777
gatcgatgccatgtaccaagtagga

SEQ ID NO: 113293 - DNA, 25 bp, Artificial
  probe
  misc_feature (1)..(25): SEQ ID NO: 3105; WAN024CCS_at; Start 97; Stop 121
ggtcgcgaacgtgaagaagtcttcc

SEQ ID NO: 113294 - DNA, 25 bp, Artificial
  probe
  misc_feature (1)..(25): SEQ ID NO: 3105; WAN024CCS_at; Start 390; Stop 414
tgaaaaattagacctcagccacgag

SEQ ID NO: 113295 - DNA, 25 bp, Artificial
  probe
  misc_feature (1)..(25): SEQ ID NO: 3105; WAN024CCS_at; Start 138; Stop 162
tctggaagttatgaaagcctctgtc

SEQ ID NO: 113296 - DNA, 25 bp, Artificial
  probe
  misc_feature (1)..(25): SEQ ID NO: 3105; WAN024CCS_at; Start 314; Stop 338
ccaaaatgggcttggtctgtgccac

SEQ ID NO: 113297 - DNA, 25 bp, Artificial
  probe
  misc_feature (1)..(25): SEQ ID NO: 3105; WAN024CCS_at; Start 112; Stop 136
gaagtcttccttctcatggaacgca

SEQ ID NO: 113298 - DNA, 25 bp, Artificial
  probe
  misc_feature (1)..(25): SEQ ID NO: 3105; WAN024CCS_at; Start 341; Stop 365
caaccgctggaagtgctggctgtct

SEQ ID NO: 113299 - DNA, 25 bp, Artificial
  probe
  misc_feature (1)..(25): SEQ ID NO: 3105; WAN024CCS_at; Start 633; Stop 657
tgttgcaggtttggtcgaagttccc

SEQ ID NO: 113300 - DNA, 25 bp, Artificial
  probe
  misc_feature (1)..(25): SEQ ID NO: 3105; WAN024CCS_at; Start 836; Stop 860
ctggtcgtcgcctccaaaaagaaat

SEQ ID NO: 113301 - DNA, 25 bp, Artificial
  probe
  misc_feature (1)..(25): SEQ ID NO: 3105; WAN024CCS_at; Start 180; Stop 204
aaataaatctcgtagtggcctgaca

SEQ ID NO: 113302 - DNA, 25 bp, Artificial
  probe
  misc_feature (1)..(25): SEQ ID NO: 3105; WAN024CCS_at; Start 721; Stop 745
ggtatcgaatctaaaatccctgtgg

SEQ ID NO: 113303 - DNA, 25 bp, Artificial
  probe
  misc_feature (1)..(25): SEQ ID NO: 3105; WAN024CCS_at; Start 508; Stop 532
gaagttggttcagcctctgctatga

SEQ ID NO: 113304 - DNA, 25 bp, Artificial
  probe
  misc_feature (1)..(25): SEQ ID NO: 3105; WAN024CCS_at; Start 12; Stop 36
tatcaaagaattggtcgagcaagca

SEQ ID NO: 113305 - DNA, 25 bp, Artificial
  probe
  misc_feature (1)..(25): SEQ ID NO: 3105; WAN024CCS_at; Start 80; Stop 104
cagagtttgaattgaccggtcgcga

SEQ ID NO: 113306 - DNA, 25 bp, Artificial
  probe
  misc_feature (1)..(25): SEQ ID NO: 3105; WAN024CCS_at; Start 737; Stop 761
tccctgtggatgaagtgatcgatgc

SEQ ID NO: 113307 - DNA, 25 bp, Artificial
  probe
  misc_feature (1)..(25): SEQ ID NO: 3105; WAN024CCS_at; Start 679; Stop 703
ggagctagctttgctttcatcgcag

SEQ ID NO: 113308 - DNA, 25 bp, Artificial
  probe
  misc_feature (1)..(25): SEQ ID NO: 3105; WAN024CCS_at; Start 607; Stop 631
aatatgctaggcctcatctgtgacc

SEQ ID NO: 113309 - DNA, 25 bp, Artificial
  probe
  misc_feature (1)..(25): SEQ ID NO: 3105; WAN024CCS_at; Start 468; Stop 492
caatgcctccatctcaggtgctgag

SEQ ID NO: 113310 - DNA, 25 bp, Artificial
  probe
  misc_feature (1)..(25): SEQ ID NO: 1412; WAN024CCT_at; Start 361; Stop 385
gaaatccatcatttctttgatggca

SEQ ID NO: 113311 - DNA, 25 bp, Artificial
  probe
  misc_feature (1)..(25): SEQ ID NO: 1412; WAN024CCT_at; Start 586; Stop 610
gattatatcgctcacaaacccttag

SEQ ID NO: 113312 - DNA, 25 bp, Artificial
  probe
  misc_feature (1)..(25): SEQ ID NO: 1412; WAN024CCT_at; Start 182; Stop 206
aagaccaaatttctgaagccgtgca

SEQ ID NO: 113313 - DNA, 25 bp, Artificial
  probe
  misc_feature (1)..(25): SEQ ID NO: 1412; WAN024CCT_at; Start 1; Stop 25
atgacctctatcacagcgatttttt

SEQ ID NO: 113314 - DNA, 25 bp, Artificial
  probe
  misc_feature (1)..(25): SEQ ID NO: 1412; WAN024CCT_at; Start 168; Stop 192
gacctgcctgtccaaagaccaaatt

SEQ ID NO: 113315 - DNA, 25 bp, Artificial
  probe
  misc_feature (1)..(25): SEQ ID NO: 1412; WAN024CCT_at; Start 433; Stop 457
caagccttgcagacacatcaactag

SEQ ID NO: 113316 - DNA, 25 bp, Artificial
  probe
  misc_feature (1)..(25): SEQ ID NO: 1412; WAN024CCT_at; Start 51; Stop 75
tagttctatcgggattcacaatgcc

SEQ ID NO: 113317 - DNA, 25 bp, Artificial
  probe
  misc_feature (1)..(25): SEQ ID NO: 1412; WAN024CCT_at; Start 38; Stop 62
gaaccctcgttgatagttctatcgg

SEQ ID NO: 113318 - DNA, 25 bp, Artificial
  probe
  misc_feature (1)..(25): SEQ ID NO: 1412; WAN024CCT_at; Start 196; Stop 220
gaagccgtgcagatatatcgttctt

SEQ ID NO: 113319 - DNA, 25 bp, Artificial
  probe
  misc_feature (1)..(25): SEQ ID NO: 1412; WAN024CCT_at; Start 502; Stop 526
ctgggagctcgagaaacaggtattc

SEQ ID NO: 113320 - DNA, 25 bp, Artificial
  probe
  misc_feature (1)..(25): SEQ ID NO: 1412; WAN024CCT_at; Start 295; Stop 319
agttatccactctacatcaccacga

SEQ ID NO: 113321 - DNA, 25 bp, Artificial
  probe
  misc_feature (1)..(25): SEQ ID NO: 1412; WAN024CCT_at; Start 261; Stop 285
tcagattatagacttgcttgaggag

SEQ ID NO: 113322 - DNA, 25 bp, Artificial
  probe
  misc_feature (1)..(25): SEQ ID NO: 1412; WAN024CCT_at; Start 562; Stop 586
gcagatctactaaactatcaacctg

SEQ ID NO: 113323 - DNA, 25 bp, Artificial
  probe
  misc_feature (1)..(25): SEQ ID NO: 1412; WAN024CCT_at; Start 464; Stop 488
aacaagccatcatcatcggagatac

SEQ ID NO: 113324 - DNA, 25 bp, Artificial
  probe
  misc_feature (1)..(25): SEQ ID NO: 1412; WAN024CCT_at; Start 343; Stop 367
gacatggcaaaaaacttggaaatcc

SEQ ID NO: 113325 - DNA, 25 bp, Artificial
  probe
  misc_feature (1)..(25): SEQ ID NO: 1412; WAN024CCT_at; Start 244; Stop 268
gaagctcaactctttcctcagatta

SEQ ID NO: 113326 - DNA, 25 bp, Artificial
  probe
  misc_feature (1)..(25): SEQ ID NO: 1412; WAN024CCT_at; Start 327; Stop 351
tacatctactgctcaagacatggca

SEQ ID NO: 113327 - DNA, 25 bp, Artificial
  probe
  misc_feature (1)..(25): SEQ ID NO: 1412; WAN024CCT_at; Start 488; Stop 512
ccaagtttgatatgctgggagctcg

SEQ ID NO: 113328 - DNA, 25 bp, Artificial
  probe
  misc_feature (1)..(25): SEQ ID NO: 1412; WAN024CCT_at; Start 112; Stop 136
cctgatgccaaaactattcgtggtt

SEQ ID NO: 113329 - DNA, 25 bp, Artificial
  probe
  misc_feature (1)..(25): SEQ ID NO: 1412; WAN024CCT_at; Start 153; Stop 177
cgaaagtagttttgcgacctgcctg

SEQ ID NO: 113330 - DNA, 25 bp, Artificial
  probe
  misc_feature (1)..(25): SEQ ID NO: 1412; WAN024CCT_at; Start 229; Stop 253
gcaaaaggcatctatgaagctcaac

SEQ ID NO: 113331 - DNA, 25 bp, Artificial
  probe
  misc_feature (1)..(25): SEQ ID NO: 1412; WAN024CCT_at; Start 277; Stop 301
cttgaggagttatcgagcagttatc

SEQ ID NO: 113332 - DNA, 25 bp, Artificial
  probe
  misc_feature (1)..(25): SEQ ID NO: 1412; WAN024CCT_at; Start 420; Stop 444
agatgtcattcaccaagccttgcag

SEQ ID NO: 113333 - DNA, 25 bp, Artificial
  probe
  misc_feature (1)..(25): SEQ ID NO: 1412; WAN024CCT_at; Start 102; Stop 126
ggtgcctagccctgatgccaaaact

SEQ ID NO: 113334 - DNA, 25 bp, Artificial
  probe
  misc_feature (1)..(25): SEQ ID NO: 1412; WAN024CCT_at; Start 75; Stop 99
ctttacctatacctttaaagagctg

SEQ ID NO: 113335 - DNA, 25 bp, Artificial
  probe
  misc_feature (1)..(25): SEQ ID NO: 1412; WAN024CCT_at; Start 547; Stop 571
ggatttggagagcaagcagatctac

SEQ ID NO: 113336 - DNA, 25 bp, Artificial
  probe
  misc_feature (1)..(25): SEQ ID NO: 1412; WAN024CCT_at; Start 473; Stop 497
tcatcatcggagataccaagtttga

SEQ ID NO: 113337 - DNA, 25 bp, Artificial
  probe
  misc_feature (1)..(25): SEQ ID NO: 1412; WAN024CCT_at; Start 402; Stop 426
tgaagcaccccataaggcagatgtc

SEQ ID NO: 113338 - DNA, 25 bp, Artificial
  probe
  misc_feature (1)..(25): SEQ ID NO: 1412; WAN024CCT_at; Start 513; Stop 537
agaaacaggtattcagaaattggcc

SEQ ID NO: 113339 - DNA, 25 bp, Artificial
  probe
  misc_feature (1)..(25): SEQ ID NO: 1412; WAN024CCT_at; Start 25; Stop 49
ttcgatttggatggaaccctcgttg

SEQ ID NO: 113340 - DNA, 25 bp, Artificial
  probe
  misc_feature (1)..(25): SEQ ID NO: 1412; WAN024CCT_at; Start 384; Stop 408
catttatggttctagccctgaagca

SEQ ID NO: 113341 - DNA, 25 bp, Artificial
  probe
  misc_feature (1)..(25): SEQ ID NO: 1412; WAN024CCT_at; Start 61; Stop 85
gggattcacaatgcctttacctata

SEQ ID NO: 113342 - DNA, 25 bp, Artificial
  probe
  misc_feature (1)..(25): SEQ ID NO: 1412; WAN024CCT_at; Start 214; Stop 238
cgttcttactataaggcaaaaggca

SEQ ID NO: 113343 - DNA, 25 bp, Artificial
  probe
  misc_feature (1)..(25): SEQ ID NO: 1412; WAN024CCT_at; Start 138; Stop 162
tatgggaccacctctcgaaagtagt

SEQ ID NO: 113344 - DNA, 25 bp, Artificial
  probe
  misc_feature (1)..(25): SEQ ID NO: 6965; WAN024CCU_at; Start 325; Stop 349
taccagacagagattgatgctagca

SEQ ID NO: 113345 - DNA, 25 bp, Artificial
  probe
  misc_feature (1)..(25): SEQ ID NO: 6965; WAN024CCU_at; Start 367; Stop 391
cgtggcgtagccaacggttttcaag

SEQ ID NO: 113346 - DNA, 25 bp, Artificial
  probe
  misc_feature (1)..(25): SEQ ID NO: 6965; WAN024CCU_at; Start 208; Stop 232
aatgttcttcgaggactccatgctg

SEQ ID NO: 113347 - DNA, 25 bp, Artificial
  probe
  misc_feature (1)..(25): SEQ ID NO: 6965; WAN024CCU_at; Start 132; Stop 156
gatgctaccgcttggttttcctgaa

SEQ ID NO: 113348 - DNA, 25 bp, Artificial
  probe
  misc_feature (1)..(25): SEQ ID NO: 6965; WAN024CCU_at; Start 353; Stop 377
gaatttttgtccctcgtggcgtagc

SEQ ID NO: 113349 - DNA, 25 bp, Artificial
  probe
  misc_feature (1)..(25): SEQ ID NO: 6965; WAN024CCU_at; Start 463; Stop 487
gcctttgttaactatgctgacccag

SEQ ID NO: 113350 - DNA, 25 bp, Artificial
  probe
  misc_feature (1)..(25): SEQ ID NO: 6965; WAN024CCU_at; Start 222; Stop 246
actccatgctgaaccttgggacaag

SEQ ID NO: 113351 - DNA, 25 bp, Artificial
  probe
  misc_feature (1)..(25): SEQ ID NO: 6965; WAN024CCU_at; Start 567; Stop 591
caaaccacttacgaaagacgagttg

SEQ ID NO: 113352 - DNA, 25 bp, Artificial
  probe
  misc_feature (1)..(25): SEQ ID NO: 6965; WAN024CCU_at; Start 30; Stop 54
tgtggtacgcaagattgatgctata

SEQ ID NO: 113353 - DNA, 25 bp, Artificial
  probe
  misc_feature (1)..(25): SEQ ID NO: 6965; WAN024CCU_at; Start 382; Stop 406
ggttttcaagtcctctcagatacag

SEQ ID NO: 113354 - DNA, 25 bp, Artificial
  probe
  misc_feature (1)..(25): SEQ ID NO: 6965; WAN024CCU_at; Start 517; Stop 541
gaagctgaggtttcagaggcagaca

SEQ ID NO: 113355 - DNA, 25 bp, Artificial
  probe
  misc_feature (1)..(25): SEQ ID NO: 6965; WAN024CCU_at; Start 357; Stop 381
ttttgtccctcgtggcgtagccaac

SEQ ID NO: 113356 - DNA, 25 bp, Artificial
  probe
  misc_feature (1)..(25): SEQ ID NO: 6965; WAN024CCU_at; Start 218; Stop 242
gaggactccatgctgaaccttggga

SEQ ID NO: 113357 - DNA, 25 bp, Artificial
  probe
  misc_feature (1)..(25): SEQ ID NO: 6965; WAN024CCU_at; Start 136; Stop 160
ctaccgcttggttttcctgaaagct

SEQ ID NO: 113358 - DNA, 25 bp, Artificial
  probe
  misc_feature (1)..(25): SEQ ID NO: 6965; WAN024CCU_at; Start 471; Stop 495
taactatgctgacccagcattggga

SEQ ID NO: 113359 - DNA, 25 bp, Artificial
  probe
  misc_feature (1)..(25): SEQ ID NO: 6965; WAN024CCU_at; Start 15; Stop 39
ttttggaaagacacttgtggtacgc

SEQ ID NO: 113360 - DNA, 25 bp, Artificial
  probe
  misc_feature (1)..(25): SEQ ID NO: 6965; WAN024CCU_at; Start 339; Stop 363
tgatgctagcaagggaatttttgtc

SEQ ID NO: 113361 - DNA, 25 bp, Artificial
  probe
  misc_feature (1)..(25): SEQ ID NO: 6965; WAN024CCU_at; Start 296; Stop 320
tgcgtgaaggcgagacctttggaaa

SEQ ID NO: 113362 - DNA, 25 bp, Artificial
  probe
  misc_feature (1)..(25): SEQ ID NO: 6965; WAN024CCU_at; Start 538; Stop 562
gacaaacaccatcctctattaaggg

SEQ ID NO: 113363 - DNA, 25 bp, Artificial
  probe
  misc_feature (1)..(25): SEQ ID NO: 6965; WAN024CCU_at; Start 321; Stop 345
tgtttaccagacagagattgatgct

SEQ ID NO: 113364 - DNA, 25 bp, Artificial
  probe
  misc_feature (1)..(25): SEQ ID NO: 6965; WAN024CCU_at; Start 290; Stop 314
tagatttgcgtgaaggcgagacctt

SEQ ID NO: 113365 - DNA, 25 bp, Artificial
  probe
  misc_feature (1)..(25): SEQ ID NO: 6965; WAN024CCU_at; Start 527; Stop 551
tttcagaggcagacaaacaccatcc

SEQ ID NO: 113366 - DNA, 25 bp, Artificial
  probe
  misc_feature (1)..(25): SEQ ID NO: 6965; WAN024CCU_at; Start 121; Stop 145
cagaaggaaaagatgctaccgcttg

SEQ ID NO: 113367 - DNA, 25 bp, Artificial
  probe
  misc_feature (1)..(25): SEQ ID NO: 6965; WAN024CCU_at; Start 20; Stop 44
gaaagacacttgtggtacgcaagat

SEQ ID NO: 113368 - DNA, 25 bp, Artificial
  probe
  misc_feature (1)..(25): SEQ ID NO: 6965; WAN024CCU_at; Start 488; Stop 512
cattgggaattgagtgggaaaacct

SEQ ID NO: 113369 - DNA, 25 bp, Artificial
  probe
  misc_feature (1)..(25): SEQ ID NO: 6965; WAN024CCU_at; Start 455; Stop 479
ccaaatatgcctttgttaactatgc

SEQ ID NO: 113370 - DNA, 25 bp, Artificial
  probe
  misc_feature (1)..(25): SEQ ID NO: 6965; WAN024CCU_at; Start 376; Stop 400
gccaacggttttcaagtcctctcag

SEQ ID NO: 113371 - DNA, 25 bp, Artificial
  probe
  misc_feature (1)..(25): SEQ ID NO: 6965; WAN024CCU_at; Start 395; Stop 419
tctcagatacagtttcctatagcta

SEQ ID NO: 113372 - DNA, 25 bp, Artificial
  probe
  misc_feature (1)..(25): SEQ ID NO: 6965; WAN024CCU_at; Start 560; Stop 584
gggatgtcaaaccacttacgaaaga

SEQ ID NO: 113373 - DNA, 25 bp, Artificial
  probe
  misc_feature (1)..(25): SEQ ID NO: 6965; WAN024CCU_at; Start 307; Stop 331
gagacctttggaaatgtttaccaga

SEQ ID NO: 113374 - DNA, 25 bp, Artificial
  probe
  misc_feature (1)..(25): SEQ ID NO: 6965; WAN024CCU_at; Start 278; Stop 302
taggatcttgggtagatttgcgtga

SEQ ID NO: 113375 - DNA, 25 bp, Artificial
  probe
  misc_feature (1)..(25): SEQ ID NO: 6965; WAN024CCU_at; Start 508; Stop 532
aacctaccggaagctgaggtttcag

SEQ ID NO: 113376 - DNA, 25 bp, Artificial
  probe
  misc_feature (1)..(25): SEQ ID NO: 6965; WAN024CCU_at; Start 550; Stop 574
cctctattaagggatgtcaaaccac

SEQ ID NO: 113377 - DNA, 25 bp, Artificial
  probe
  misc_feature (1)..(25): SEQ ID NO: 6965; WAN024CCU_at; Start 477; Stop 501
tgctgacccagcattgggaattgag

SEQ ID NO: 113378 - DNA, 25 bp, Artificial
  probe
  misc_feature (1)..(25): SEQ ID NO: 2863; WAN024CCV_s_at; Start 79; Stop 103
cccgttcatggagacaatcgtggtt

SEQ ID NO: 113379 - DNA, 25 bp, Artificial
  probe
  misc_feature (1)..(25): SEQ ID NO: 2863; WAN024CCV_s_at; Start 263; Stop 287
acgatgggaaggttttaggatcttg

SEQ ID NO: 113380 - DNA, 25 bp, Artificial
  probe
  misc_feature (1)..(25): SEQ ID NO: 2863; WAN024CCV_s_at; Start 255; Stop 279
tgttgcagacgatgggaaggtttta

SEQ ID NO: 113381 - DNA, 25 bp, Artificial
  probe
  misc_feature (1)..(25): SEQ ID NO: 2863; WAN024CCV_s_at; Start 50; Stop 74
ctataccaggactgctagagtttga

SEQ ID NO: 113382 - DNA, 25 bp, Artificial
  probe
  misc_feature (1)..(25): SEQ ID NO: 2863; WAN024CCV_s_at; Start 48; Stop 72
tgctataccaggactgctagagttt

SEQ ID NO: 113383 - DNA, 25 bp, Artificial
  probe
  misc_feature (1)..(25): SEQ ID NO: 2863; WAN024CCV_s_at; Start 45; Stop 69
tgatgctataccaggactgctagag

SEQ ID NO: 113384 - DNA, 25 bp, Artificial
  probe
  misc_feature (1)..(25): SEQ ID NO: 2863; WAN024CCV_s_at; Start 232; Stop 256
gaaccttgggacaagtatatctctg

SEQ ID NO: 113385 - DNA, 25 bp, Artificial
  probe
  misc_feature (1)..(25): SEQ ID NO: 2863; WAN024CCV_s_at; Start 254; Stop 278
ctgttgcagacgatgggaaggtttt

SEQ ID NO: 113386 - DNA, 25 bp, Artificial
  probe
  misc_feature (1)..(25): SEQ ID NO: 2863; WAN024CCV_s_at; Start 40; Stop 64
aagattgatgctataccaggactgc

SEQ ID NO: 113387 - DNA, 25 bp, Artificial
  probe
  misc_feature (1)..(25): SEQ ID NO: 2863; WAN024CCV_s_at; Start 242; Stop 266
acaagtatatctctgttgcagacga

SEQ ID NO: 113388 - DNA, 25 bp, Artificial
  probe
  misc_feature (1)..(25): SEQ ID NO: 2863; WAN024CCV_s_at; Start 233; Stop 257
aaccttgggacaagtatatctctgt

SEQ ID NO: 113389 - DNA, 25 bp, Artificial
  probe
  misc_feature (1)..(25): SEQ ID NO: 2863; WAN024CCV_s_at; Start 235; Stop 259
ccttgggacaagtatatctctgttg

SEQ ID NO: 113390 - DNA, 25 bp, Artificial
  probe
  misc_feature (1)..(25): SEQ ID NO: 2863; WAN024CCV_s_at; Start 253; Stop 277
tctgttgcagacgatgggaaggttt

SEQ ID NO: 113391 - DNA, 25 bp, Artificial
  probe
  misc_feature (1)..(25): SEQ ID NO: 2863; WAN024CCV_s_at; Start 243; Stop 267
caagtatatctctgttgcagacgat

SEQ ID NO: 113392 - DNA, 25 bp, Artificial
  probe
  misc_feature (1)..(25): SEQ ID NO: 2863; WAN024CCV_s_at; Start 238; Stop 262
tgggacaagtatatctctgttgcag

SEQ ID NO: 113393 - DNA, 25 bp, Artificial
  probe
  misc_feature (1)..(25): SEQ ID NO: 2863; WAN024CCV_s_at; Start 241; Stop 265
gacaagtatatctctgttgcagacg

SEQ ID NO: 113394 - DNA, 25 bp, Artificial
  probe
  misc_feature (1)..(25): SEQ ID NO: 2863; WAN024CCV_s_at; Start 49; Stop 73
gctataccaggactgctagagtttg

SEQ ID NO: 113395 - DNA, 25 bp, Artificial
  probe
  misc_feature (1)..(25): SEQ ID NO: 2863; WAN024CCV_s_at; Start 46; Stop 70
gatgctataccaggactgctagagt

SEQ ID NO: 113396 - DNA, 25 bp, Artificial
  probe
  misc_feature (1)..(25): SEQ ID NO: 2863; WAN024CCV_s_at; Start 43; Stop 67
attgatgctataccaggactgctag

SEQ ID NO: 113397 - DNA, 25 bp, Artificial
  probe
  misc_feature (1)..(25): SEQ ID NO: 2863; WAN024CCV_s_at; Start 251; Stop 275
tctctgttgcagacgatgggaaggt

SEQ ID NO: 113398 - DNA, 25 bp, Artificial
  probe
  misc_feature (1)..(25): SEQ ID NO: 2863; WAN024CCV_s_at; Start 76; Stop 100
attcccgttcatggagacaatcgtg

SEQ ID NO: 113399 - DNA, 25 bp, Artificial
  probe
  misc_feature (1)..(25): SEQ ID NO: 2863; WAN024CCV_s_at; Start 249; Stop 273
tatctctgttgcagacgatgggaag

SEQ ID NO: 113400 - DNA, 25 bp, Artificial
  probe
  misc_feature (1)..(25): SEQ ID NO: 2863; WAN024CCV_s_at; Start 245; Stop 269
agtatatctctgttgcagacgatgg

SEQ ID NO: 113401 - DNA, 25 bp, Artificial
  probe
  misc_feature (1)..(25): SEQ ID NO: 2863; WAN024CCV_s_at; Start 239; Stop 263
gggacaagtatatctctgttgcaga

SEQ ID NO: 113402 - DNA, 25 bp, Artificial
  probe
  misc_feature (1)..(25): SEQ ID NO: 2863; WAN024CCV_s_at; Start 41; Stop 65
agattgatgctataccaggactgct

SEQ ID NO: 113403 - DNA, 25 bp, Artificial
  probe
  misc_feature (1)..(25): SEQ ID NO: 2863; WAN024CCV_s_at; Start 246; Stop 270
gtatatctctgttgcagacgatggg

SEQ ID NO: 113404 - DNA, 25 bp, Artificial
  probe
  misc_feature (1)..(25): SEQ ID NO: 2863; WAN024CCV_s_at; Start 260; Stop 284
cagacgatgggaaggttttaggatc

SEQ ID NO: 113405 - DNA, 25 bp, Artificial
  probe
  misc_feature (1)..(25): SEQ ID NO: 2863; WAN024CCV_s_at; Start 42; Stop 66
gattgatgctataccaggactgcta

SEQ ID NO: 113406 - DNA, 25 bp, Artificial
  probe
  misc_feature (1)..(25): SEQ ID NO: 2863; WAN024CCV_s_at; Start 77; Stop 101
ttcccgttcatggagacaatcgtgg

SEQ ID NO: 113407 - DNA, 25 bp, Artificial
  probe
  misc_feature (1)..(25): SEQ ID NO: 2863; WAN024CCV_s_at; Start 247; Stop 271
tatatctctgttgcagacgatggga

SEQ ID NO: 113408 - DNA, 25 bp, Artificial
  probe
  misc_feature (1)..(25): SEQ ID NO: 2863; WAN024CCV_s_at; Start 80; Stop 104
ccgttcatggagacaatcgtggttg

SEQ ID NO: 113409 - DNA, 25 bp, Artificial
  probe
  misc_feature (1)..(25): SEQ ID NO: 2863; WAN024CCV_s_at; Start 236; Stop 260
cttgggacaagtatatctctgttgc

SEQ ID NO: 113410 - DNA, 25 bp, Artificial
  probe
  misc_feature (1)..(25): SEQ ID NO: 2863; WAN024CCV_s_at; Start 78; Stop 102
tcccgttcatggagacaatcgtggt

SEQ ID NO: 113411 - DNA, 25 bp, Artificial
  probe
  misc_feature (1)..(25): SEQ ID NO: 2863; WAN024CCV_s_at; Start 240; Stop 264
ggacaagtatatctctgttgcagac

SEQ ID NO: 113412 - DNA, 25 bp, Artificial
  probe
  misc_feature (1)..(25): SEQ ID NO: 5212; WAN024CCW_at; Start 942; Stop 966
tgtattagacctctggttgccagcc

SEQ ID NO: 113413 - DNA, 25 bp, Artificial
  probe
  misc_feature (1)..(25): SEQ ID NO: 5212; WAN024CCW_at; Start 801; Stop 825
cattaatgccattggactagtcgtc

SEQ ID NO: 113414 - DNA, 25 bp, Artificial
  probe
  misc_feature (1)..(25): SEQ ID NO: 5212; WAN024CCW_at; Start 815; Stop 839
gactagtcgtctttccgctattaag

SEQ ID NO: 113415 - DNA, 25 bp, Artificial
  probe
  misc_feature (1)..(25): SEQ ID NO: 5212; WAN024CCW_at; Start 1364; Stop 1388
tgaaacacgaagatatcaaaaccta

SEQ ID NO: 113416 - DNA, 25 bp, Artificial
  probe
  misc_feature (1)..(25): SEQ ID NO: 5212; WAN024CCW_at; Start 955; Stop 979
tggttgccagcctatcaagatgcct

SEQ ID NO: 113417 - DNA, 25 bp, Artificial
  probe
  misc_feature (1)..(25): SEQ ID NO: 5212; WAN024CCW_at; Start 1153; Stop 1177
ttggagctgactgttgtatcgatag

SEQ ID NO: 113418 - DNA, 25 bp, Artificial
  probe
  misc_feature (1)..(25): SEQ ID NO: 5212; WAN024CCW_at; Start 714; Stop 738
tcgtctaggaatccaatggaactgg

SEQ ID NO: 113419 - DNA, 25 bp, Artificial
  probe
  misc_feature (1)..(25): SEQ ID NO: 5212; WAN024CCW_at; Start 518; Stop 542
aatacaaggttatgattttggcaga

SEQ ID NO: 113420 - DNA, 25 bp, Artificial
  probe
  misc_feature (1)..(25): SEQ ID NO: 5212; WAN024CCW_at; Start 439; Stop 463
gatagttccatcattctactcagtg

SEQ ID NO: 113421 - DNA, 25 bp, Artificial
  probe
  misc_feature (1)..(25): SEQ ID NO: 5212; WAN024CCW_at; Start 1075; Stop 1099
gatatccttagagtcaatgccttag

SEQ ID NO: 113422 - DNA, 25 bp, Artificial
  probe
  misc_feature (1)..(25): SEQ ID NO: 5212; WAN024CCW_at; Start 970; Stop 994
caagatgccttgattttcatgaccc

SEQ ID NO: 113423 - DNA, 25 bp, Artificial
  probe
  misc_feature (1)..(25): SEQ ID NO: 5212; WAN024CCW_at; Start 699; Stop 723
gattatcggtattgttcgtctagga

SEQ ID NO: 113424 - DNA, 25 bp, Artificial
  probe
  misc_feature (1)..(25): SEQ ID NO: 5212; WAN024CCW_at; Start 752; Stop 776
tcgggaaagtatctctgaccttgag

SEQ ID NO: 113425 - DNA, 25 bp, Artificial
  probe
  misc_feature (1)..(25): SEQ ID NO: 5212; WAN024CCW_at; Start 1103; Stop 1127
tgttgatcagtatgggagtgaccct

SEQ ID NO: 113426 - DNA, 25 bp, Artificial
  probe
  misc_feature (1)..(25): SEQ ID NO: 5212; WAN024CCW_at; Start 323; Stop 347
tagctgtaacagattcgaatgcacg

SEQ ID NO: 113427 - DNA, 25 bp, Artificial
  probe
  misc_feature (1)..(25): SEQ ID NO: 5212; WAN024CCW_at; Start 1029; Stop 1053
ggcattggtcattaatacttactta

SEQ ID NO: 113428 - DNA, 25 bp, Artificial
  probe
  misc_feature (1)..(25): SEQ ID NO: 5212; WAN024CCW_at; Start 1057; Stop 1081
gcattaagaatggaaagagatatcc

SEQ ID NO: 113429 - DNA, 25 bp, Artificial
  probe
  misc_feature (1)..(25): SEQ ID NO: 5212; WAN024CCW_at; Start 675; Stop 699
gttatccaacatcgcaagtagtttg

SEQ ID NO: 113430 - DNA, 25 bp, Artificial
  probe
  misc_feature (1)..(25): SEQ ID NO: 5212; WAN024CCW_at; Start 996; Stop 1020
tattttccctatgtcagtctatgaa

SEQ ID NO: 113431 - DNA, 25 bp, Artificial
  probe
  misc_feature (1)..(25): SEQ ID NO: 5212; WAN024CCW_at; Start 1314; Stop 1338
tgggctggcagtaattgtctacaca

SEQ ID NO: 113432 - DNA, 25 bp, Artificial
  probe
  misc_feature (1)..(25): SEQ ID NO: 5212; WAN024CCW_at; Start 533; Stop 557
ttttggcagatattctaggtcgatc

SEQ ID NO: 113433 - DNA, 25 bp, Artificial
  probe
  misc_feature (1)..(25): SEQ ID NO: 5212; WAN024CCW_at; Start 634; Stop 658
aaagagtcttttgataatatccgag

SEQ ID NO: 113434 - DNA, 25 bp, Artificial
  probe
  misc_feature (1)..(25): SEQ ID NO: 5212; WAN024CCW_at; Start 65; Stop 89
tgacagtcttgacctcttccttggt

SEQ ID NO: 113435 - DNA, 25 bp, Artificial
  probe
  misc_feature (1)..(25): SEQ ID NO: 5212; WAN024CCW_at; Start 1118; Stop 1142
gagtgaccctggttacaacatacct

SEQ ID NO: 113436 - DNA, 25 bp, Artificial
  probe
  misc_feature (1)..(25): SEQ ID NO: 5212; WAN024CCW_at; Start 1329; Stop 1353
tgtctacacaatagcctacggttta

SEQ ID NO: 113437 - DNA, 25 bp, Artificial
  probe
  misc_feature (1)..(25): SEQ ID NO: 5212; WAN024CCW_at; Start 402; Stop 426
ctacgtgtatgttttgcagatgaca

SEQ ID NO: 113438 - DNA, 25 bp, Artificial
  probe
  misc_feature (1)..(25): SEQ ID NO: 5212; WAN024CCW_at; Start 1214; Stop 1238
taattctgtctaaaaaactggatgt

SEQ ID NO: 113439 - DNA, 25 bp, Artificial
  probe
  misc_feature (1)..(25): SEQ ID NO: 5212; WAN024CCW_at; Start 1186; Stop 1210
ctagctttgagaagtatcatagccg

SEQ ID NO: 113440 - DNA, 25 bp, Artificial
  probe
  misc_feature (1)..(25): SEQ ID NO: 5212; WAN024CCW_at; Start 897; Stop 921
gcttatcatgttcgcgattttgctc

SEQ ID NO: 113441 - DNA, 25 bp, Artificial
  probe
  misc_feature (1)..(25): SEQ ID NO: 5212; WAN024CCW_at; Start 829; Stop 853
ccgctattaagacgaacaaaagcag

SEQ ID NO: 113442 - DNA, 25 bp, Artificial
  probe
  misc_feature (1)..(25): SEQ ID NO: 5212; WAN024CCW_at; Start 768; Stop 792
gaccttgagtgtttccaatctattg

SEQ ID NO: 113443 - DNA, 25 bp, Artificial
  probe
  misc_feature (1)..(25): SEQ ID NO: 5212; WAN024CCW_at; Start 1294; Stop 1318
tcaagttggtatttgccgattgggc

SEQ ID NO: 113444 - DNA, 25 bp, Artificial
  probe
  misc_feature (1)..(25): SEQ ID NO: 5212; WAN024CCW_at; Start 1139; Stop 1163
acctgttaaatagtttggagctgac

SEQ ID NO: 113445 - DNA, 25 bp, Artificial
  probe
  misc_feature (1)..(25): SEQ ID NO: 5212; WAN024CCW_at; Start 386; Stop 410
caaatttaagaacgctctacgtgta

SEQ ID NO: 113446 - DNA, 25 bp, Artificial
  probe
  misc_feature (1)..(25): SEQ ID NO: 1201; WAN024CCX_at; Start 986; Stop 1010
tggccctaatttttcctatgtcagt

SEQ ID NO: 113447 - DNA, 25 bp, Artificial
  probe
  misc_feature (1)..(25): SEQ ID NO: 1201; WAN024CCX_at; Start 502; Stop 526
tttggatggcatgagtacaaggtca

SEQ ID NO: 113448 - DNA, 25 bp, Artificial
  probe
  misc_feature (1)..(25): SEQ ID NO: 1201; WAN024CCX_at; Start 668; Stop 692
taatgctatctaacattgcgagtag

SEQ ID NO: 113449 - DNA, 25 bp, Artificial
  probe
  misc_feature (1)..(25): SEQ ID NO: 1201; WAN024CCX_at; Start 970; Stop 994
gatgccttagttttcatggccctaa

SEQ ID NO: 113450 - DNA, 25 bp, Artificial
  probe
  misc_feature (1)..(25): SEQ ID NO: 1201; WAN024CCX_at; Start 803; Stop 827
atgccattggattagttatctttcc

SEQ ID NO: 113451 - DNA, 25 bp, Artificial
  probe
  misc_feature (1)..(25): SEQ ID NO: 1201; WAN024CCX_at; Start 1043; Stop 1067
catatttaaaagcaatgagaatgga

SEQ ID NO: 113452 - DNA, 25 bp, Artificial
  probe
  misc_feature (1)..(25): SEQ ID NO: 1201; WAN024CCX_at; Start 819; Stop 843
tatctttcctttgataaagcgaaca

SEQ ID NO: 113453 - DNA, 25 bp, Artificial
  probe
  misc_feature (1)..(25): SEQ ID NO: 1201; WAN024CCX_at; Start 701; Stop 725
taggcattgttcgtatgggaattca

SEQ ID NO: 113454 - DNA, 25 bp, Artificial
  probe
  misc_feature (1)..(25): SEQ ID NO: 1201; WAN024CCX_at; Start 905; Stop 929
tcgcaatcttgctcttctactatcc

SEQ ID NO: 113455 - DNA, 25 bp, Artificial
  probe
  misc_feature (1)..(25): SEQ ID NO: 1201; WAN024CCX_at; Start 1020; Stop 1044
gaaaatggctttggtgataaataca

SEQ ID NO: 113456 - DNA, 25 bp, Artificial
  probe
  misc_feature (1)..(25): SEQ ID NO: 1201; WAN024CCX_at; Start 398; Stop 422
tctatgtttatatcttgcagatgac

SEQ ID NO: 113457 - DNA, 25 bp, Artificial
  probe
  misc_feature (1)..(25): SEQ ID NO: 1201; WAN024CCX_at; Start 631; Stop 655
aaggagtcccttgataatatccgtg

SEQ ID NO: 113458 - DNA, 25 bp, Artificial
  probe
  misc_feature (1)..(25): SEQ ID NO: 1201; WAN024CCX_at; Start 517; Stop 541
tacaaggtcatgatttgggctgata

SEQ ID NO: 113459 - DNA, 25 bp, Artificial
  probe
  misc_feature (1)..(25): SEQ ID NO: 1201; WAN024CCX_at; Start 274; Stop 298
agtttcttaatgctaatctcgctgg

SEQ ID NO: 113460 - DNA, 25 bp, Artificial
  probe
  misc_feature (1)..(25): SEQ ID NO: 1201; WAN024CCX_at; Start 53; Stop 77
caaatctgctcatagttttaacctc

SEQ ID NO: 113461 - DNA, 25 bp, Artificial
  probe
  misc_feature (1)..(25): SEQ ID NO: 1201; WAN024CCX_at; Start 1359; Stop 1383
tttaaagcacaaagatatcagaatg

SEQ ID NO: 113462 - DNA, 25 bp, Artificial
  probe
  misc_feature (1)..(25): SEQ ID NO: 1201; WAN024CCX_at; Start 532; Stop 556
tgggctgatattctaggtcgaacat

SEQ ID NO: 113463 - DNA, 25 bp, Artificial
  probe
  misc_feature (1)..(25): SEQ ID NO: 1201; WAN024CCX_at; Start 379; Stop 403
gtcacaaacttaagaacactctatg

SEQ ID NO: 113464 - DNA, 25 bp, Artificial
  probe
  misc_feature (1)..(25): SEQ ID NO: 1201; WAN024CCX_at; Start 1183; Stop 1207
cttgctttaagaagtataatagctg

SEQ ID NO: 113465 - DNA, 25 bp, Artificial
  probe
  misc_feature (1)..(25): SEQ ID NO: 1201; WAN024CCX_at; Start 1297; Stop 1321
tggtatctctctatttggattgcag

SEQ ID NO: 113466 - DNA, 25 bp, Artificial
  probe
  misc_feature (1)..(25): SEQ ID NO: 1201; WAN024CCX_at; Start 886; Stop 910
gctttgatgttggttatgttcgcaa

SEQ ID NO: 113467 - DNA, 25 bp, Artificial
  probe
  misc_feature (1)..(25): SEQ ID NO: 1201; WAN024CCX_at; Start 744; Stop 768
aacattcgggaaagtgtcattaact

SEQ ID NO: 113468 - DNA, 25 bp, Artificial
  probe
  misc_feature (1)..(25): SEQ ID NO: 1201; WAN024CCX_at; Start 1072; Stop 1096
gacattctcaaaattaatgctttgg

SEQ ID NO: 113469 - DNA, 25 bp, Artificial
  probe
  misc_feature (1)..(25): SEQ ID NO: 1201; WAN024CCX_at; Start 1251; Stop 1275
cattgctttagagttacttatgacg

SEQ ID NO: 113470 - DNA, 25 bp, Artificial
  probe
  misc_feature (1)..(25): SEQ ID NO: 1201; WAN024CCX_at; Start 954; Stop 978
gcttcctgcttataaggatgcctta

SEQ ID NO: 113471 - DNA, 25 bp, Artificial
  probe
  misc_feature (1)..(25): SEQ ID NO: 1201; WAN024CCX_at; Start 1233; Stop 1257
gatatcagtcaagcaagacattgct

SEQ ID NO: 113472 - DNA, 25 bp, Artificial
  probe
  misc_feature (1)..(25): SEQ ID NO: 1201; WAN024CCX_at; Start 292; Stop 316
tcgctggtattatttactttgaacc

SEQ ID NO: 113473 - DNA, 25 bp, Artificial
  probe
  misc_feature (1)..(25): SEQ ID NO: 1201; WAN024CCX_at; Start 837; Stop 861
gcgaacaaagactgagaatttacct

SEQ ID NO: 113474 - DNA, 25 bp, Artificial
  probe
  misc_feature (1)..(25): SEQ ID NO: 1201; WAN024CCX_at; Start 681; Stop 705
cattgcgagtagcatgattataggc

SEQ ID NO: 113475 - DNA, 25 bp, Artificial
  probe
  misc_feature (1)..(25): SEQ ID NO: 1201; WAN024CCX_at; Start 616; Stop 640
tttatcttagatttcaaggagtccc

SEQ ID NO: 113476 - DNA, 25 bp, Artificial
  probe
  misc_feature (1)..(25): SEQ ID NO: 1201; WAN024CCX_at; Start 946; Stop 970
gatatttggcttcctgcttataagg

SEQ ID NO: 113477 - DNA, 25 bp, Artificial
  probe
  misc_feature (1)..(25): SEQ ID NO: 1201; WAN024CCX_at; Start 317; Stop 341
taataactgtaagggatgaaaacgc

SEQ ID NO: 113478 - DNA, 25 bp, Artificial
  probe
  misc_feature (1)..(25): SEQ ID NO: 1201; WAN024CCX_at; Start 1153; Stop 1177
gggctgacagttgtatctatagtta

SEQ ID NO: 113479 - DNA, 25 bp, Artificial
  probe
  misc_feature (1)..(25): SEQ ID NO: 1201; WAN024CCX_at; Start 442; Stop 466
tcagtcattctaattagtgatcgcg

SEQ ID NO: 113480 - DNA, 25 bp, Artificial
  probe
  misc_feature (1)..(25): SEQ ID NO: 985; WAN024CCY_at; Start 98; Stop 122
aaattatgggagtaactgagtatag

SEQ ID NO: 113481 - DNA, 25 bp, Artificial
  probe
  misc_feature (1)..(25): SEQ ID NO: 985; WAN024CCY_at; Start 152; Stop 176
catatattggtttttttcatctggg

SEQ ID NO: 113482 - DNA, 25 bp, Artificial
  probe
  misc_feature (1)..(25): SEQ ID NO: 985; WAN024CCY_at; Start 129; Stop 153
gcaactatatattttttacctaaca

SEQ ID NO: 113483 - DNA, 25 bp, Artificial
  probe
  misc_feature (1)..(25): SEQ ID NO: 985; WAN024CCY_at; Start 237; Stop 261
acagttttattctcaaatacttcaa

SEQ ID NO: 113484 - DNA, 25 bp, Artificial
  probe
  misc_feature (1)..(25): SEQ ID NO: 985; WAN024CCY_at; Start 107; Stop 131
gagtaactgagtatagttattggca

SEQ ID NO: 113485 - DNA, 25 bp, Artificial
  probe
  misc_feature (1)..(25): SEQ ID NO: 985; WAN024CCY_at; Start 1343; Stop 1367
tatacttgtatctaaagcgtaaaga

SEQ ID NO: 113486 - DNA, 25 bp, Artificial
  probe
  misc_feature (1)..(25): SEQ ID NO: 985; WAN024CCY_at; Start 1316; Stop 1340
taatagtttatttgttagcgtatac

SEQ ID NO: 113487 - DNA, 25 bp, Artificial
  probe
  misc_feature (1)..(25): SEQ ID NO: 985; WAN024CCY_at; Start 577; Stop 601
tgtaaagatattgtttttcaatcct

SEQ ID NO: 113488 - DNA, 25 bp, Artificial
  probe
  misc_feature (1)..(25): SEQ ID NO: 985; WAN024CCY_at; Start 690; Stop 714
gattattggtattgttcgaatggga

SEQ ID NO: 113489 - DNA, 25 bp, Artificial
  probe
  misc_feature (1)..(25): SEQ ID NO: 985; WAN024CCY_at; Start 866; Stop 890
ccaacttaagaaatgttttgatgct

SEQ ID NO: 113490 - DNA, 25 bp, Artificial
  probe
  misc_feature (1)..(25): SEQ ID NO: 985; WAN024CCY_at; Start 862; Stop 886
tattccaacttaagaaatgttttga

SEQ ID NO: 113491 - DNA, 25 bp, Artificial
  probe
  misc_feature (1)..(25): SEQ ID NO: 985; WAN024CCY_at; Start 1345; Stop 1369
tacttgtatctaaagcgtaaagata

SEQ ID NO: 113492 - DNA, 25 bp, Artificial
  probe
  misc_feature (1)..(25): SEQ ID NO: 985; WAN024CCY_at; Start 1198; Stop 1222
gcagaactaattctatctaaaaaac

SEQ ID NO: 113493 - DNA, 25 bp, Artificial
  probe
  misc_feature (1)..(25): SEQ ID NO: 985; WAN024CCY_at; Start 1064; Stop 1088
gagatattctcaaaataaatacttt

SEQ ID NO: 113494 - DNA, 25 bp, Artificial
  probe
  misc_feature (1)..(25): SEQ ID NO: 985; WAN024CCY_at; Start 548; Stop 572
cattttctctcctactttctttttg

SEQ ID NO: 113495 - DNA, 25 bp, Artificial
  probe
  misc_feature (1)..(25): SEQ ID NO: 985; WAN024CCY_at; Start 1311; Stop 1335
cgcagtaatagtttatttgttagcg

SEQ ID NO: 113496 - DNA, 25 bp, Artificial
  probe
  misc_feature (1)..(25): SEQ ID NO: 985; WAN024CCY_at; Start 542; Stop 566
gaaggacattttctctcctactttc

SEQ ID NO: 113497 - DNA, 25 bp, Artificial
  probe
  misc_feature (1)..(25): SEQ ID NO: 985; WAN024CCY_at; Start 2; Stop 26
tgaaattgaagtttcttataacaaa

SEQ ID NO: 113498 - DNA, 25 bp, Artificial
  probe
  misc_feature (1)..(25): SEQ ID NO: 985; WAN024CCY_at; Start 1100; Stop 1124
tcagtatgttagttaccctaataac

SEQ ID NO: 113499 - DNA, 25 bp, Artificial
  probe
  misc_feature (1)..(25): SEQ ID NO: 985; WAN024CCY_at; Start 1092; Stop 1116
tatgttgttcagtatgttagttacc

SEQ ID NO: 113500 - DNA, 25 bp, Artificial
  probe
  misc_feature (1)..(25): SEQ ID NO: 985; WAN024CCY_at; Start 585; Stop 609
tattgtttttcaatccttatccgag

SEQ ID NO: 113501 - DNA, 25 bp, Artificial
  probe
  misc_feature (1)..(25): SEQ ID NO: 985; WAN024CCY_at; Start 665; Stop 689
tgttatccaatattgcaagtagtat

SEQ ID NO: 113502 - DNA, 25 bp, Artificial
  probe
  misc_feature (1)..(25): SEQ ID NO: 985; WAN024CCY_at; Start 668; Stop 692
tatccaatattgcaagtagtatgat

SEQ ID NO: 113503 - DNA, 25 bp, Artificial
  probe
  misc_feature (1)..(25): SEQ ID NO: 985; WAN024CCY_at; Start 684; Stop 708
tagtatgattattggtattgttcga

SEQ ID NO: 113504 - DNA, 25 bp, Artificial
  probe
  misc_feature (1)..(25): SEQ ID NO: 985; WAN024CCY_at; Start 671; Stop 695
ccaatattgcaagtagtatgattat

SEQ ID NO: 113505 - DNA, 25 bp, Artificial
  probe
  misc_feature (1)..(25): SEQ ID NO: 985; WAN024CCY_at; Start 124; Stop 148
tattggcaactatatattttttacc

SEQ ID NO: 113506 - DNA, 25 bp, Artificial
  probe
  misc_feature (1)..(25): SEQ ID NO: 985; WAN024CCY_at; Start 1095; Stop 1119
gttgttcagtatgttagttacccta

SEQ ID NO: 113507 - DNA, 25 bp, Artificial
  probe
  misc_feature (1)..(25): SEQ ID NO: 985; WAN024CCY_at; Start 1285; Stop 1309
tcaagttggtacttaccgatttggc

SEQ ID NO: 113508 - DNA, 25 bp, Artificial
  probe
  misc_feature (1)..(25): SEQ ID NO: 985; WAN024CCY_at; Start 1079; Stop 1103
taaatactttgattatgttgttcag

SEQ ID NO: 113509 - DNA, 25 bp, Artificial
  probe
  misc_feature (1)..(25): SEQ ID NO: 985; WAN024CCY_at; Start 1328; Stop 1352
tgttagcgtatactttatacttgta

SEQ ID NO: 113510 - DNA, 25 bp, Artificial
  probe
  misc_feature (1)..(25): SEQ ID NO: 985; WAN024CCY_at; Start 1193; Stop 1217
taatagcagaactaattctatctaa

SEQ ID NO: 113511 - DNA, 25 bp, Artificial
  probe
  misc_feature (1)..(25): SEQ ID NO: 985; WAN024CCY_at; Start 366; Stop 390
tatgatagttacaaatttaagaatg

SEQ ID NO: 113512 - DNA, 25 bp, Artificial
  probe
  misc_feature (1)..(25): SEQ ID NO: 985; WAN024CCY_at; Start 695; Stop 719
ttggtattgttcgaatgggaattca

SEQ ID NO: 113513 - DNA, 25 bp, Artificial
  probe
  misc_feature (1)..(25): SEQ ID NO: 985; WAN024CCY_at; Start 111; Stop 135
aactgagtatagttattggcaacta

SEQ ID NO: 113514 - DNA, 25 bp, Artificial
  probe
  misc_feature (1)..(25): SEQ ID NO: 2131; WAN024CCZ_at; Start 824; Stop 848
gttacatcactcgttatatgggagg

SEQ ID NO: 113515 - DNA, 25 bp, Artificial
  probe
  misc_feature (1)..(25): SEQ ID NO: 2131; WAN024CCZ_at; Start 875; Stop 899
ttatagatccgatacgacgtaacaa

SEQ ID NO: 113516 - DNA, 25 bp, Artificial
  probe
  misc_feature (1)..(25): SEQ ID NO: 2131; WAN024CCZ_at; Start 1009; Stop 1033
tctttagggaatgtgtatactgcaa

SEQ ID NO: 113517 - DNA, 25 bp, Artificial
  probe
  misc_feature (1)..(25): SEQ ID NO: 2131; WAN024CCZ_at; Start 406; Stop 430
gatttgataagtaactataggtacc

SEQ ID NO: 113518 - DNA, 25 bp, Artificial
  probe
  misc_feature (1)..(25): SEQ ID NO: 2131; WAN024CCZ_at; Start 1219; Stop 1243
gtgttttatatttcaatggttacca

SEQ ID NO: 113519 - DNA, 25 bp, Artificial
  probe
  misc_feature (1)..(25): SEQ ID NO: 2131; WAN024CCZ_at; Start 934; Stop 958
gagatgcttgcaaaattaggatttg

SEQ ID NO: 113520 - DNA, 25 bp, Artificial
  probe
  misc_feature (1)..(25): SEQ ID NO: 2131; WAN024CCZ_at; Start 1045; Stop 1069
tattcagactttggtgtaattggta

SEQ ID NO: 113521 - DNA, 25 bp, Artificial
  probe
  misc_feature (1)..(25): SEQ ID NO: 2131; WAN024CCZ_at; Start 117; Stop 141
gattgcaagtgctctagttaataga

SEQ ID NO: 113522 - DNA, 25 bp, Artificial
  probe
  misc_feature (1)..(25): SEQ ID NO: 2131; WAN024CCZ_at; Start 424; Stop 448
aggtacctatcttattattcaaatg

SEQ ID NO: 113523 - DNA, 25 bp, Artificial
  probe
  misc_feature (1)..(25): SEQ ID NO: 2131; WAN024CCZ_at; Start 460; Stop 484
cgtgtaagtggaatgattaatcaac

SEQ ID NO: 113524 - DNA, 25 bp, Artificial
  probe
  misc_feature (1)..(25): SEQ ID NO: 2131; WAN024CCZ_at; Start 1070; Stop 1094
ttgtaatttgtcagagttttacagc

SEQ ID NO: 113525 - DNA, 25 bp, Artificial
  probe
  misc_feature (1)..(25): SEQ ID NO: 2131; WAN024CCZ_at; Start 1016; Stop 1040
ggaatgtgtatactgcaattagacg

SEQ ID NO: 113526 - DNA, 25 bp, Artificial
  probe
  misc_feature (1)..(25): SEQ ID NO: 2131; WAN024CCZ_at; Start 900; Stop 924
agaactaggtgcagaaactttttcg

SEQ ID NO: 113527 - DNA, 25 bp, Artificial
  probe
  misc_feature (1)..(25): SEQ ID NO: 2131; WAN024CCZ_at; Start 805; Stop 829
tctcaggaagattttatcagttaca

SEQ ID NO: 113528 - DNA, 25 bp, Artificial
  probe
  misc_feature (1)..(25): SEQ ID NO: 2131; WAN024CCZ_at; Start 812; Stop 836
aagattttatcagttacatcactcg

SEQ ID NO: 113529 - DNA, 25 bp, Artificial
  probe
  misc_feature (1)..(25): SEQ ID NO: 2131; WAN024CCZ_at; Start 605; Stop 629
tctatgcaatcattagtggtggtag

SEQ ID NO: 113530 - DNA, 25 bp, Artificial
  probe
  misc_feature (1)..(25): SEQ ID NO: 2131; WAN024CCZ_at; Start 127; Stop 151
gctctagttaatagaaatgtttggg

SEQ ID NO: 113531 - DNA, 25 bp, Artificial
  probe
  misc_feature (1)..(25): SEQ ID NO: 2131; WAN024CCZ_at; Start 887; Stop 911
tacgacgtaacaaagaactaggtgc

SEQ ID NO: 113532 - DNA, 25 bp, Artificial
  probe
  misc_feature (1)..(25): SEQ ID NO: 2131; WAN024CCZ_at; Start 1209; Stop 1233
tatcgaggatgtgttttatatttca

SEQ ID NO: 113533 - DNA, 25 bp, Artificial
  probe
  misc_feature (1)..(25): SEQ ID NO: 2131; WAN024CCZ_at; Start 1285; Stop 1309
tgggttcttctgaaagttcaggttg

SEQ ID NO: 113534 - DNA, 25 bp, Artificial
  probe
  misc_feature (1)..(25): SEQ ID NO: 2131; WAN024CCZ_at; Start 577; Stop 601
tatttgattccaatagctatattct

SEQ ID NO: 113535 - DNA, 25 bp, Artificial
  probe
  misc_feature (1)..(25): SEQ ID NO: 2131; WAN024CCZ_at; Start 1061; Stop 1085
taattggtattgtaatttgtcagag

SEQ ID NO: 113536 - DNA, 25 bp, Artificial
  probe
  misc_feature (1)..(25): SEQ ID NO: 2131; WAN024CCZ_at; Start 894; Stop 918
taacaaagaactaggtgcagaaact

SEQ ID NO: 113537 - DNA, 25 bp, Artificial
  probe
  misc_feature (1)..(25): SEQ ID NO: 2131; WAN024CCZ_at; Start 213; Stop 237
agtttccttgttgacaaaattgtcg

SEQ ID NO: 113538 - DNA, 25 bp, Artificial
  probe
  misc_feature (1)..(25): SEQ ID NO: 2131; WAN024CCZ_at; Start 966; Stop 990
tattataaaaggcttagaatggaga

SEQ ID NO: 113539 - DNA, 25 bp, Artificial
  probe
  misc_feature (1)..(25): SEQ ID NO: 2131; WAN024CCZ_at; Start 592; Stop 616
gctatattctttgtctatgcaatca

SEQ ID NO: 113540 - DNA, 25 bp, Artificial
  probe
  misc_feature (1)..(25): SEQ ID NO: 2131; WAN024CCZ_at; Start 1232; Stop 1256
caatggttaccattggatatggaat

SEQ ID NO: 113541 - DNA, 25 bp, Artificial
  probe
  misc_feature (1)..(25): SEQ ID NO: 2131; WAN024CCZ_at; Start 1295; Stop 1319
tgaaagttcaggttgactttaacaa

SEQ ID NO: 113542 - DNA, 25 bp, Artificial
  probe
  misc_feature (1)..(25): SEQ ID NO: 2131; WAN024CCZ_at; Start 106; Stop 130
tattttatttcgattgcaagtgctc

SEQ ID NO: 113543 - DNA, 25 bp, Artificial
  probe
  misc_feature (1)..(25): SEQ ID NO: 2131; WAN024CCZ_at; Start 869; Stop 893
tatttgttatagatccgatacgacg

SEQ ID NO: 113544 - DNA, 25 bp, Artificial
  probe
  misc_feature (1)..(25): SEQ ID NO: 2131; WAN024CCZ_at; Start 144; Stop 168
tgtttggggaacagaactccatttc

SEQ ID NO: 113545 - DNA, 25 bp, Artificial
  probe
  misc_feature (1)..(25): SEQ ID NO: 2131; WAN024CCZ_at; Start 920; Stop 944
tttcgggaatttatgagatgcttgc

SEQ ID NO: 113546 - DNA, 25 bp, Artificial
  probe
  misc_feature (1)..(25): SEQ ID NO: 2131; WAN024CCZ_at; Start 673; Stop 697
tatatatactctgtgtacgggagtc

SEQ ID NO: 113547 - DNA, 25 bp, Artificial
  probe
  misc_feature (1)..(25): SEQ ID NO: 2131; WAN024CCZ_at; Start 659; Stop 683
ctctgttgatattgtatatatactc

SEQ ID NO: 113548 - DNA, 25 bp, Artificial
  probe
  misc_feature (1)..(25): SEQ ID NO: 6592; WAN024CD2_at; Start 17; Stop 41
cgatgacaacctataatggagcaga

SEQ ID NO: 113549 - DNA, 25 bp, Artificial
  probe
  misc_feature (1)..(25): SEQ ID NO: 6592; WAN024CD2_at; Start 351; Stop 375
ggctagtaactatgagattctcgat

SEQ ID NO: 113550 - DNA, 25 bp, Artificial
  probe
  misc_feature (1)..(25): SEQ ID NO: 6592; WAN024CD2_at; Start 817; Stop 841
tatggtactcttatgcaaatagttc

SEQ ID NO: 113551 - DNA, 25 bp, Artificial
  probe
  misc_feature (1)..(25): SEQ ID NO: 6592; WAN024CD2_at; Start 453; Stop 477
caagagtatttctgttatgagacca

SEQ ID NO: 113552 - DNA, 25 bp, Artificial
  probe
  misc_feature (1)..(25): SEQ ID NO: 6592; WAN024CD2_at; Start 50; Stop 74
tagagcagctagaatcgcttcgcac

SEQ ID NO: 113553 - DNA, 25 bp, Artificial
  probe
  misc_feature (1)..(25): SEQ ID NO: 6592; WAN024CD2_at; Start 710; Stop 734
cagttttcttacttgatgcggctcg

SEQ ID NO: 113554 - DNA, 25 bp, Artificial
  probe
  misc_feature (1)..(25): SEQ ID NO: 6592; WAN024CD2_at; Start 689; Stop 713
tggatacgagtcatcaaattacagt

SEQ ID NO: 113555 - DNA, 25 bp, Artificial
  probe
  misc_feature (1)..(25): SEQ ID NO: 6592; WAN024CD2_at; Start 35; Stop 59
gagcagattatttgctagagcagct

SEQ ID NO: 113556 - DNA, 25 bp, Artificial
  probe
  misc_feature (1)..(25): SEQ ID NO: 6592; WAN024CD2_at; Start 859; Stop 883
catacttattatcctacattccgca

SEQ ID NO: 113557 - DNA, 25 bp, Artificial
  probe
  misc_feature (1)..(25): SEQ ID NO: 6592; WAN024CD2_at; Start 608; Stop 632
gcttaatacattttcgtcgccacga

SEQ ID NO: 113558 - DNA, 25 bp, Artificial
  probe
  misc_feature (1)..(25): SEQ ID NO: 6592; WAN024CD2_at; Start 468; Stop 492
tatgagaccaggatgtacttttgca

SEQ ID NO: 113559 - DNA, 25 bp, Artificial
  probe
  misc_feature (1)..(25): SEQ ID NO: 6592; WAN024CD2_at; Start 420; Stop 444
taatggtgctgtagttccgttttcg

SEQ ID NO: 113560 - DNA, 25 bp, Artificial
  probe
  misc_feature (1)..(25): SEQ ID NO: 6592; WAN024CD2_at; Start 122; Stop 146
cggataatacagttgagctacttga

SEQ ID NO: 113561 - DNA, 25 bp, Artificial
  probe
  misc_feature (1)..(25): SEQ ID NO: 6592; WAN024CD2_at; Start 328; Stop 352
aaatcgccgtcaatagaactattgg

SEQ ID NO: 113562 - DNA, 25 bp, Artificial
  probe
  misc_feature (1)..(25): SEQ ID NO: 6592; WAN024CD2_at; Start 621; Stop 645
tcgtcgccacgagacaagtgcttct

SEQ ID NO: 113563 - DNA, 25 bp, Artificial
  probe
  misc_feature (1)..(25): SEQ ID NO: 6592; WAN024CD2_at; Start 831; Stop 855
gcaaatagttcatttccaactgaag

SEQ ID NO: 113564 - DNA, 25 bp, Artificial
  probe
  misc_feature (1)..(25): SEQ ID NO: 6592; WAN024CD2_at; Start 479; Stop 503
gatgtacttttgcagttaagcgtga

SEQ ID NO: 113565 - DNA, 25 bp, Artificial
  probe
  misc_feature (1)..(25): SEQ ID NO: 6592; WAN024CD2_at; Start 567; Stop 591
tctagctatgataagaggaactcta

SEQ ID NO: 113566 - DNA, 25 bp, Artificial
  probe
  misc_feature (1)..(25): SEQ ID NO: 6592; WAN024CD2_at; Start 671; Stop 695
accggcgagttgttgaagtggatac

SEQ ID NO: 113567 - DNA, 25 bp, Artificial
  probe
  misc_feature (1)..(25): SEQ ID NO: 6592; WAN024CD2_at; Start 157; Stop 181
cagaagtatcatctcgataattggg

SEQ ID NO: 113568 - DNA, 25 bp, Artificial
  probe
  misc_feature (1)..(25): SEQ ID NO: 6592; WAN024CD2_at; Start 633; Stop 657
gacaagtgcttctgctcctaaccaa

SEQ ID NO: 113569 - DNA, 25 bp, Artificial
  probe
  misc_feature (1)..(25): SEQ ID NO: 6592; WAN024CD2_at; Start 726; Stop 750
tgcggctcgtagagaacatttagac

SEQ ID NO: 113570 - DNA, 25 bp, Artificial
  probe
  misc_feature (1)..(25): SEQ ID NO: 6592; WAN024CD2_at; Start 763; Stop 787
tctcagcttgaaaatatggaaatgg

SEQ ID NO: 113571 - DNA, 25 bp, Artificial
  probe
  misc_feature (1)..(25): SEQ ID NO: 6592; WAN024CD2_at; Start 2; Stop 26
tgaggatatctgttgcgatgacaac

SEQ ID NO: 113572 - DNA, 25 bp, Artificial
  probe
  misc_feature (1)..(25): SEQ ID NO: 6592; WAN024CD2_at; Start 655; Stop 679
caatctcttaatcgtgaccggcgag

SEQ ID NO: 113573 - DNA, 25 bp, Artificial
  probe
  misc_feature (1)..(25): SEQ ID NO: 6592; WAN024CD2_at; Start 232; Stop 256
gctcttcaagagacaacaggagata

SEQ ID NO: 113574 - DNA, 25 bp, Artificial
  probe
  misc_feature (1)..(25): SEQ ID NO: 6592; WAN024CD2_at; Start 191; Stop 215
gaaactcatctaatataggttggag

SEQ ID NO: 113575 - DNA, 25 bp, Artificial
  probe
  misc_feature (1)..(25): SEQ ID NO: 6592; WAN024CD2_at; Start 781; Stop 805
gaaatggttcttgagagacgtagag

SEQ ID NO: 113576 - DNA, 25 bp, Artificial
  probe
  misc_feature (1)..(25): SEQ ID NO: 6592; WAN024CD2_at; Start 314; Stop 338
taaaagagtttcataaatcgccgtc

SEQ ID NO: 113577 - DNA, 25 bp, Artificial
  probe
  misc_feature (1)..(25): SEQ ID NO: 6592; WAN024CD2_at; Start 528; Stop 552
tgatatagatagatttggccatgat

SEQ ID NO: 113578 - DNA, 25 bp, Artificial
  probe
  misc_feature (1)..(25): SEQ ID NO: 6592; WAN024CD2_at; Start 302; Stop 326
tttcactgatggtaaaagagtttca

SEQ ID NO: 113579 - DNA, 25 bp, Artificial
  probe
  misc_feature (1)..(25): SEQ ID NO: 6592; WAN024CD2_at; Start 109; Stop 133
gatgattgttcaacggataatacag

SEQ ID NO: 113580 - DNA, 25 bp, Artificial
  probe
  misc_feature (1)..(25): SEQ ID NO: 6592; WAN024CD2_at; Start 364; Stop 388
gagattctcgattttggcagaaatg

SEQ ID NO: 113581 - DNA, 25 bp, Artificial
  probe
  misc_feature (1)..(25): SEQ ID NO: 6592; WAN024CD2_at; Start 61; Stop 85
gaatcgcttcgcactcagagtttaa

SEQ ID NO: 113582 - DNA, 25 bp, Artificial
  probe
  misc_feature (1)..(25): SEQ ID NO: 1212; WAN024CD3_at; Start 112; Stop 136
gatgcatctacagatgatactgttc

SEQ ID NO: 113583 - DNA, 25 bp, Artificial
  probe
  misc_feature (1)..(25): SEQ ID NO: 1212; WAN024CD3_at; Start 45; Stop 69
tattgttgaacagttagatactcta

SEQ ID NO: 113584 - DNA, 25 bp, Artificial
  probe
  misc_feature (1)..(25): SEQ ID NO: 1212; WAN024CD3_at; Start 589; Stop 613
gggttatacatttactcctactcta

SEQ ID NO: 113585 - DNA, 25 bp, Artificial
  probe
  misc_feature (1)..(25): SEQ ID NO: 1212; WAN024CD3_at; Start 95; Stop 119
aagtcttgattagtgatgatgcatc

SEQ ID NO: 113586 - DNA, 25 bp, Artificial
  probe
  misc_feature (1)..(25): SEQ ID NO: 1212; WAN024CD3_at; Start 80; Stop 104
cgcgccttgctgaggaagtcttgat

SEQ ID NO: 113587 - DNA, 25 bp, Artificial
  probe
  misc_feature (1)..(25): SEQ ID NO: 1212; WAN024CD3_at; Start 874; Stop 898
tggtcgttcaggtcatatattactg

SEQ ID NO: 113588 - DNA, 25 bp, Artificial
  probe
  misc_feature (1)..(25): SEQ ID NO: 1212; WAN024CD3_at; Start 567; Stop 591
gaggctagcttcgtttcttaatggg

SEQ ID NO: 113589 - DNA, 25 bp, Artificial
  probe
  misc_feature (1)..(25): SEQ ID NO: 1212; WAN024CD3_at; Start 552; Stop 576
tgatgccttgttatggaggctagct

SEQ ID NO: 113590 - DNA, 25 bp, Artificial
  probe
  misc_feature (1)..(25): SEQ ID NO: 1212; WAN024CD3_at; Start 334; Stop 358
gataaaattttgttgttagcctcta

SEQ ID NO: 113591 - DNA, 25 bp, Artificial
  probe
  misc_feature (1)..(25): SEQ ID NO: 1212; WAN024CD3_at; Start 367; Stop 391
cctttttatgttggtgatggtgtca

SEQ ID NO: 113592 - DNA, 25 bp, Artificial
  probe
  misc_feature (1)..(25): SEQ ID NO: 1212; WAN024CD3_at; Start 772; Stop 796
gttttgaacgactacattctatggg

SEQ ID NO: 113593 - DNA, 25 bp, Artificial
  probe
  misc_feature (1)..(25): SEQ ID NO: 1212; WAN024CD3_at; Start 430; Stop 454
gcagtgtatcaaccaaattttttag

SEQ ID NO: 113594 - DNA, 25 bp, Artificial
  probe
  misc_feature (1)..(25): SEQ ID NO: 1212; WAN024CD3_at; Start 61; Stop 85
gatactctaagaaatcaaacgcgcc

SEQ ID NO: 113595 - DNA, 25 bp, Artificial
  probe
  misc_feature (1)..(25): SEQ ID NO: 1212; WAN024CD3_at; Start 646; Stop 670
actggtagcagagaaagaagtttcc

SEQ ID NO: 113596 - DNA, 25 bp, Artificial
  probe
  misc_feature (1)..(25): SEQ ID NO: 1212; WAN024CD3_at; Start 219; Stop 243
taattttgccatgttattagaggag

SEQ ID NO: 113597 - DNA, 25 bp, Artificial
  probe
  misc_feature (1)..(25): SEQ ID NO: 1212; WAN024CD3_at; Start 524; Stop 548
tagaaatccgaagtaacgaagatgc

SEQ ID NO: 113598 - DNA, 25 bp, Artificial
  probe
  misc_feature (1)..(25): SEQ ID NO: 1212; WAN024CD3_at; Start 634; Stop 658
gatagcaacgcgactggtagcagag

SEQ ID NO: 113599 - DNA, 25 bp, Artificial
  probe
  misc_feature (1)..(25): SEQ ID NO: 1212; WAN024CD3_at; Start 493; Stop 517
gcggtgaacaaaaagattattccat

SEQ ID NO: 113600 - DNA, 25 bp, Artificial
  probe
  misc_feature (1)..(25): SEQ ID NO: 1212; WAN024CD3_at; Start 347; Stop 371
tgttagcctctaattacacaccttt

SEQ ID NO: 113601 - DNA, 25 bp, Artificial
  probe
  misc_feature (1)..(25): SEQ ID NO: 1212; WAN024CD3_at; Start 382; Stop 406
gatggtgtcaagattaaattggata

SEQ ID NO: 113602 - DNA, 25 bp, Artificial
  probe
  misc_feature (1)..(25): SEQ ID NO: 1212; WAN024CD3_at; Start 610; Stop 634
tctactatagattttagaagacacg

SEQ ID NO: 113603 - DNA, 25 bp, Artificial
  probe
  misc_feature (1)..(25): SEQ ID NO: 1212; WAN024CD3_at; Start 804; Stop 828
tcgaagagaattgtttatgaaaagg

SEQ ID NO: 113604 - DNA, 25 bp, Artificial
  probe
  misc_feature (1)..(25): SEQ ID NO: 1212; WAN024CD3_at; Start 420; Stop 444
taatagtgaggcagtgtatcaacca

SEQ ID NO: 113605 - DNA, 25 bp, Artificial
  probe
  misc_feature (1)..(25): SEQ ID NO: 1212; WAN024CD3_at; Start 75; Stop 99
tcaaacgcgccttgctgaggaagtc

SEQ ID NO: 113606 - DNA, 25 bp, Artificial
  probe
  misc_feature (1)..(25): SEQ ID NO: 1212; WAN024CD3_at; Start 234; Stop 258
attagaggaggcgaaaggagatatc

SEQ ID NO: 113607 - DNA, 25 bp, Artificial
  probe
  misc_feature (1)..(25): SEQ ID NO: 1212; WAN024CD3_at; Start 759; Stop 783
tgaacaaattagtgttttgaacgac

SEQ ID NO: 113608 - DNA, 25 bp, Artificial
  probe
  misc_feature (1)..(25): SEQ ID NO: 1212; WAN024CD3_at; Start 697; Stop 721
tatgatgatttgcttcagagattag

SEQ ID NO: 113609 - DNA, 25 bp, Artificial
  probe
  misc_feature (1)..(25): SEQ ID NO: 1212; WAN024CD3_at; Start 623; Stop 647
ttagaagacacgatagcaacgcgac

SEQ ID NO: 113610 - DNA, 25 bp, Artificial
  probe
  misc_feature (1)..(25): SEQ ID NO: 1212; WAN024CD3_at; Start 668; Stop 692
tcctaaggagaaaagagcaagttat

SEQ ID NO: 113611 - DNA, 25 bp, Artificial
  probe
  misc_feature (1)..(25): SEQ ID NO: 1212; WAN024CD3_at; Start 461; Stop 485
tctttcatattagaaggccagggtg

SEQ ID NO: 113612 - DNA, 25 bp, Artificial
  probe
  misc_feature (1)..(25): SEQ ID NO: 1212; WAN024CD3_at; Start 204; Stop 228
tcaaggatggaagaataattttgcc

SEQ ID NO: 113613 - DNA, 25 bp, Artificial
  probe
  misc_feature (1)..(25): SEQ ID NO: 1212; WAN024CD3_at; Start 478; Stop 502
ccagggtgtgtttatgcggtgaaca

SEQ ID NO: 113614 - DNA, 25 bp, Artificial
  probe
  misc_feature (1)..(25): SEQ ID NO: 1212; WAN024CD3_at; Start 537; Stop 561
taacgaagatgcacatgatgccttg

SEQ ID NO: 113615 - DNA, 25 bp, Artificial
  probe
  misc_feature (1)..(25): SEQ ID NO: 1212; WAN024CD3_at; Start 861; Stop 885
tcataagttgtattggtcgttcagg

SEQ ID NO: 113616 - DNA, 25 bp, Artificial
  probe
  misc_feature (1)..(25): SEQ ID NO: 2528; WAN024CD4_at; Start 463; Stop 487
tattttattcatgcctatatctggg

SEQ ID NO: 113617 - DNA, 25 bp, Artificial
  probe
  misc_feature (1)..(25): SEQ ID NO: 2528; WAN024CD4_at; Start 885; Stop 909
tcagaatcgaatttctcgaaagcaa

SEQ ID NO: 113618 - DNA, 25 bp, Artificial
  probe
  misc_feature (1)..(25): SEQ ID NO: 2528; WAN024CD4_at; Start 518; Stop 542
tagagatggttccttcagttgatat

SEQ ID NO: 113619 - DNA, 25 bp, Artificial
  probe
  misc_feature (1)..(25): SEQ ID NO: 2528; WAN024CD4_at; Start 433; Stop 457
gggattgaattaccgaacataaata

SEQ ID NO: 113620 - DNA, 25 bp, Artificial
  probe
  misc_feature (1)..(25): SEQ ID NO: 2528; WAN024CD4_at; Start 190; Stop 214
gaaaatccctcaaagtttcatggag

SEQ ID NO: 113621 - DNA, 25 bp, Artificial
  probe
  misc_feature (1)..(25): SEQ ID NO: 2528; WAN024CD4_at; Start 47; Stop 71
gatatttgtcacaacagattgatag

SEQ ID NO: 113622 - DNA, 25 bp, Artificial
  probe
  misc_feature (1)..(25): SEQ ID NO: 2528; WAN024CD4_at; Start 142; Stop 166
gaagtaatacagaggtattctaaga

SEQ ID NO: 113623 - DNA, 25 bp, Artificial
  probe
  misc_feature (1)..(25): SEQ ID NO: 2528; WAN024CD4_at; Start 319; Stop 343
gaaatacagctgttaagattttcta

SEQ ID NO: 113624 - DNA, 25 bp, Artificial
  probe
  misc_feature (1)..(25): SEQ ID NO: 2528; WAN024CD4_at; Start 598; Stop 622
tttgcactagagtatgggaaggtgt

SEQ ID NO: 113625 - DNA, 25 bp, Artificial
  probe
  misc_feature (1)..(25): SEQ ID NO: 2528; WAN024CD4_at; Start 728; Stop 752
tgggtttcaatgaattggcacttac

SEQ ID NO: 113626 - DNA, 25 bp, Artificial
  probe
  misc_feature (1)..(25): SEQ ID NO: 2528; WAN024CD4_at; Start 662; Stop 686
gacataatgtaacaactagtcatca

SEQ ID NO: 113627 - DNA, 25 bp, Artificial
  probe
  misc_feature (1)..(25): SEQ ID NO: 2528; WAN024CD4_at; Start 63; Stop 87
gattgatagtattaggtctcaaaca

SEQ ID NO: 113628 - DNA, 25 bp, Artificial
  probe
  misc_feature (1)..(25): SEQ ID NO: 2528; WAN024CD4_at; Start 56; Stop 80
cacaacagattgatagtattaggtc

SEQ ID NO: 113629 - DNA, 25 bp, Artificial
  probe
  misc_feature (1)..(25): SEQ ID NO: 2528; WAN024CD4_at; Start 634; Stop 658
gagcaactggtcttgtatcgaagac

SEQ ID NO: 113630 - DNA, 25 bp, Artificial
  probe
  misc_feature (1)..(25): SEQ ID NO: 2528; WAN024CD4_at; Start 893; Stop 917
gaatttctcgaaagcaactcgtaag

SEQ ID NO: 113631 - DNA, 25 bp, Artificial
  probe
  misc_feature (1)..(25): SEQ ID NO: 2528; WAN024CD4_at; Start 196; Stop 220
ccctcaaagtttcatggagcttatt

SEQ ID NO: 113632 - DNA, 25 bp, Artificial
  probe
  misc_feature (1)..(25): SEQ ID NO: 2528; WAN024CD4_at; Start 923; Stop 947
tcggcttatataccatcatgctttt

SEQ ID NO: 113633 - DNA, 25 bp, Artificial
  probe
  misc_feature (1)..(25): SEQ ID NO: 2528; WAN024CD4_at; Start 151; Stop 175
cagaggtattctaagatagatgata

SEQ ID NO: 113634 - DNA, 25 bp, Artificial
  probe
  misc_feature (1)..(25): SEQ ID NO: 2528; WAN024CD4_at; Start 849; Stop 873
caaaattggaggattaaaaggtgtg

SEQ ID NO: 113635 - DNA, 25 bp, Artificial
  probe
  misc_feature (1)..(25): SEQ ID NO: 2528; WAN024CD4_at; Start 529; Stop 553
ccttcagttgatattgataaagatt

SEQ ID NO: 113636 - DNA, 25 bp, Artificial
  probe
  misc_feature (1)..(25): SEQ ID NO: 2528; WAN024CD4_at; Start 629; Stop 653
gccctgagcaactggtcttgtatcg

SEQ ID NO: 113637 - DNA, 25 bp, Artificial
  probe
  misc_feature (1)..(25): SEQ ID NO: 2528; WAN024CD4_at; Start 682; Stop 706
catcattttaaattatctccgctaa

SEQ ID NO: 113638 - DNA, 25 bp, Artificial
  probe
  misc_feature (1)..(25): SEQ ID NO: 2528; WAN024CD4_at; Start 610; Stop 634
tatgggaaggtgttgttctgccctg

SEQ ID NO: 113639 - DNA, 25 bp, Artificial
  probe
  misc_feature (1)..(25): SEQ ID NO: 2528; WAN024CD4_at; Start 591; Stop 615
tgcaaagtttgcactagagtatggg

SEQ ID NO: 113640 - DNA, 25 bp, Artificial
  probe
  misc_feature (1)..(25): SEQ ID NO: 2528; WAN024CD4_at; Start 836; Stop 860
ttcaggaagtaatcaaaattggagg

SEQ ID NO: 113641 - DNA, 25 bp, Artificial
  probe
  misc_feature (1)..(25): SEQ ID NO: 2528; WAN024CD4_at; Start 859; Stop 883
ggattaaaaggtgtgagatatttct

SEQ ID NO: 113642 - DNA, 25 bp, Artificial
  probe
  misc_feature (1)..(25): SEQ ID NO: 2528; WAN024CD4_at; Start 291; Stop 315
agatgatatttggaaagagcacaag

SEQ ID NO: 113643 - DNA, 25 bp, Artificial
  probe
  misc_feature (1)..(25): SEQ ID NO: 2528; WAN024CD4_at; Start 240; Stop 264
tgaatacgttaaaaacaattatcaa

SEQ ID NO: 113644 - DNA, 25 bp, Artificial
  probe
  misc_feature (1)..(25): SEQ ID NO: 2528; WAN024CD4_at; Start 768; Stop 792
taatcaaactctttatatgctaaaa

SEQ ID NO: 113645 - DNA, 25 bp, Artificial
  probe
  misc_feature (1)..(25): SEQ ID NO: 2528; WAN024CD4_at; Start 623; Stop 647
tgttctgccctgagcaactggtctt

SEQ ID NO: 113646 - DNA, 25 bp, Artificial
  probe
  misc_feature (1)..(25): SEQ ID NO: 2528; WAN024CD4_at; Start 735; Stop 759
caatgaattggcacttacacatgct

SEQ ID NO: 113647 - DNA, 25 bp, Artificial
  probe
  misc_feature (1)..(25): SEQ ID NO: 2528; WAN024CD4_at; Start 358; Stop 382
gagatggtttactctgatatgtcaa

SEQ ID NO: 113648 - DNA, 25 bp, Artificial
  probe
  misc_feature (1)..(25): SEQ ID NO: 2528; WAN024CD4_at; Start 615; Stop 639
gaaggtgttgttctgccctgagcaa

SEQ ID NO: 113649 - DNA, 25 bp, Artificial
  probe
  misc_feature (1)..(25): SEQ ID NO: 2528; WAN024CD4_at; Start 896; Stop 920
tttctcgaaagcaactcgtaagaac

SEQ ID NO: 113650 - DNA, 25 bp, Artificial
  probe
  misc_feature (1)..(25): SEQ ID NO: 6435; WAN024CD5_at; Start 530; Stop 554
cattgatgaattgcaaacttaagag

SEQ ID NO: 113651 - DNA, 25 bp, Artificial
  probe
  misc_feature (1)..(25): SEQ ID NO: 6435; WAN024CD5_at; Start 190; Stop 214
gattttgataagtttaccaatggaa

SEQ ID NO: 113652 - DNA, 25 bp, Artificial
  probe
  misc_feature (1)..(25): SEQ ID NO: 6435; WAN024CD5_at; Start 99; Stop 123
ttttgctctgggagggagcctgtta

SEQ ID NO: 113653 - DNA, 25 bp, Artificial
  probe
  misc_feature (1)..(25): SEQ ID NO: 6435; WAN024CD5_at; Start 427; Stop 451
ttttcagttatagatcaagtagttg

SEQ ID NO: 113654 - DNA, 25 bp, Artificial
  probe
  misc_feature (1)..(25): SEQ ID NO: 6435; WAN024CD5_at; Start 442; Stop 466
caagtagttgataaagatagaggaa

SEQ ID NO: 113655 - DNA, 25 bp, Artificial
  probe
  misc_feature (1)..(25): SEQ ID NO: 6435; WAN024CD5_at; Start 59; Stop 83
aagagttcataagaatatgttctca

SEQ ID NO: 113656 - DNA, 25 bp, Artificial
  probe
  misc_feature (1)..(25): SEQ ID NO: 6435; WAN024CD5_at; Start 93; Stop 117
cagatattttgctctgggagggagc

SEQ ID NO: 113657 - DNA, 25 bp, Artificial
  probe
  misc_feature (1)..(25): SEQ ID NO: 6435; WAN024CD5_at; Start 346; Stop 370
ccgttagatggagtaccagtaaata

SEQ ID NO: 113658 - DNA, 25 bp, Artificial
  probe
  misc_feature (1)..(25): SEQ ID NO: 6435; WAN024CD5_at; Start 173; Stop 197
taggaattccaagaaatgattttga

SEQ ID NO: 113659 - DNA, 25 bp, Artificial
  probe
  misc_feature (1)..(25): SEQ ID NO: 6435; WAN024CD5_at; Start 762; Stop 786
tagaattccacattttgaggagctg

SEQ ID NO: 113660 - DNA, 25 bp, Artificial
  probe
  misc_feature (1)..(25): SEQ ID NO: 6435; WAN024CD5_at; Start 519; Stop 543
tatttcaacttcattgatgaattgc

SEQ ID NO: 113661 - DNA, 25 bp, Artificial
  probe
  misc_feature (1)..(25): SEQ ID NO: 6435; WAN024CD5_at; Start 352; Stop 376
gatggagtaccagtaaatagattta

SEQ ID NO: 113662 - DNA, 25 bp, Artificial
  probe
  misc_feature (1)..(25): SEQ ID NO: 6435; WAN024CD5_at; Start 542; Stop 566
gcaaacttaagagattaataaaatc

SEQ ID NO: 113663 - DNA, 25 bp, Artificial
  probe
  misc_feature (1)..(25): SEQ ID NO: 6435; WAN024CD5_at; Start 87; Stop 111
taaaatcagatattttgctctggga

SEQ ID NO: 113664 - DNA, 25 bp, Artificial
  probe
  misc_feature (1)..(25): SEQ ID NO: 6435; WAN024CD5_at; Start 135; Stop 159
gcataaaggtttcattccgtgggat

SEQ ID NO: 113665 - DNA, 25 bp, Artificial
  probe
  misc_feature (1)..(25): SEQ ID NO: 6435; WAN024CD5_at; Start 563; Stop 587
aatcttatgattatagtagttcaag

SEQ ID NO: 113666 - DNA, 25 bp, Artificial
  probe
  misc_feature (1)..(25): SEQ ID NO: 6435; WAN024CD5_at; Start 736; Stop 760
tacatgcagttaccaccggttaaag

SEQ ID NO: 113667 - DNA, 25 bp, Artificial
  probe
  misc_feature (1)..(25): SEQ ID NO: 6435; WAN024CD5_at; Start 71; Stop 95
gaatatgttctcaaaataaaatcag

SEQ ID NO: 113668 - DNA, 25 bp, Artificial
  probe
  misc_feature (1)..(25): SEQ ID NO: 6435; WAN024CD5_at; Start 768; Stop 792
tccacattttgaggagctgaaaaat

SEQ ID NO: 113669 - DNA, 25 bp, Artificial
  probe
  misc_feature (1)..(25): SEQ ID NO: 6435; WAN024CD5_at; Start 749; Stop 773
caccggttaaagatagaattccaca

SEQ ID NO: 113670 - DNA, 25 bp, Artificial
  probe
  misc_feature (1)..(25): SEQ ID NO: 6435; WAN024CD5_at; Start 730; Stop 754
tgtgattacatgcagttaccaccgg

SEQ ID NO: 113671 - DNA, 25 bp, Artificial
  probe
  misc_feature (1)..(25): SEQ ID NO: 6435; WAN024CD5_at; Start 492; Stop 516
tgccaaatttctcaagcttaataaa

SEQ ID NO: 113672 - DNA, 25 bp, Artificial
  probe
  misc_feature (1)..(25): SEQ ID NO: 6435; WAN024CD5_at; Start 117; Stop 141
cctgttaggagcagtaaggcataaa

SEQ ID NO: 113673 - DNA, 25 bp, Artificial
  probe
  misc_feature (1)..(25): SEQ ID NO: 6435; WAN024CD5_at; Start 324; Stop 348
tgaagtatgtttagatatatttccg

SEQ ID NO: 113674 - DNA, 25 bp, Artificial
  probe
  misc_feature (1)..(25): SEQ ID NO: 6435; WAN024CD5_at; Start 576; Stop 600
tagtagttcaagatatgtaggtaac

SEQ ID NO: 113675 - DNA, 25 bp, Artificial
  probe
  misc_feature (1)..(25): SEQ ID NO: 6435; WAN024CD5_at; Start 687; Stop 711
taattgtccagtaaattatgactgt

SEQ ID NO: 113676 - DNA, 25 bp, Artificial
  probe
  misc_feature (1)..(25): SEQ ID NO: 6435; WAN024CD5_at; Start 165; Stop 189
tatggatttaggaattccaagaaat

SEQ ID NO: 113677 - DNA, 25 bp, Artificial
  probe
  misc_feature (1)..(25): SEQ ID NO: 6435; WAN024CD5_at; Start 204; Stop 228
taccaatggaatagattttaacaaa

SEQ ID NO: 113678 - DNA, 25 bp, Artificial
  probe
  misc_feature (1)..(25): SEQ ID NO: 6435; WAN024CD5_at; Start 673; Stop 697
gaagatatatatattaattgtccag

SEQ ID NO: 113679 - DNA, 25 bp, Artificial
  probe
  misc_feature (1)..(25): SEQ ID NO: 6435; WAN024CD5_at; Start 451; Stop 475
gataaagatagaggaacttttgaaa

SEQ ID NO: 113680 - DNA, 25 bp, Artificial
  probe
  misc_feature (1)..(25): SEQ ID NO: 6435; WAN024CD5_at; Start 339; Stop 363
tatatttccgttagatggagtacca

SEQ ID NO: 113681 - DNA, 25 bp, Artificial
  probe
  misc_feature (1)..(25): SEQ ID NO: 6435; WAN024CD5_at; Start 587; Stop 611
gatatgtaggtaacattttaggtcg

SEQ ID NO: 113682 - DNA, 25 bp, Artificial
  probe
  misc_feature (1)..(25): SEQ ID NO: 6435; WAN024CD5_at; Start 124; Stop 148
ggagcagtaaggcataaaggtttca

SEQ ID NO: 113683 - DNA, 25 bp, Artificial
  probe
  misc_feature (1)..(25): SEQ ID NO: 6435; WAN024CD5_at; Start 720; Stop 744
aaatatttattgtgattacatgcag

SEQ ID NO: 113684 - DNA, 25 bp, Artificial
  probe
  misc_feature (1)..(25): SEQ ID NO: 4905; WAN024CD6_at; Start 101; Stop 125
ctgcaagatacaaaggttttattcc

SEQ ID NO: 113685 - DNA, 25 bp, Artificial
  probe
  misc_feature (1)..(25): SEQ ID NO: 4905; WAN024CD6_at; Start 498; Stop 522
agtgtcagagctagagaatatattc

SEQ ID NO: 113686 - DNA, 25 bp, Artificial
  probe
  misc_feature (1)..(25): SEQ ID NO: 4905; WAN024CD6_at; Start 525; Stop 549
gagtttaggagaagatgataatgtc

SEQ ID NO: 113687 - DNA, 25 bp, Artificial
  probe
  misc_feature (1)..(25): SEQ ID NO: 4905; WAN024CD6_at; Start 141; Stop 165
ggctctaggtttaccaagaaagcat

SEQ ID NO: 113688 - DNA, 25 bp, Artificial
  probe
  misc_feature (1)..(25): SEQ ID NO: 4905; WAN024CD6_at; Start 414; Stop 438
tattattgagaatagagaactagcc

SEQ ID NO: 113689 - DNA, 25 bp, Artificial
  probe
  misc_feature (1)..(25): SEQ ID NO: 4905; WAN024CD6_at; Start 354; Stop 378
tgagtcaggttttaaagtcccacta

SEQ ID NO: 113690 - DNA, 25 bp, Artificial
  probe
  misc_feature (1)..(25): SEQ ID NO: 4905; WAN024CD6_at; Start 146; Stop 170
taggtttaccaagaaagcattttga

SEQ ID NO: 113691 - DNA, 25 bp, Artificial
  probe
  misc_feature (1)..(25): SEQ ID NO: 4905; WAN024CD6_at; Start 434; Stop 458
tagccaatgagttaggtagtgttgc

SEQ ID NO: 113692 - DNA, 25 bp, Artificial
  probe
  misc_feature (1)..(25): SEQ ID NO: 4905; WAN024CD6_at; Start 420; Stop 444
tgagaatagagaactagccaatgag

SEQ ID NO: 113693 - DNA, 25 bp, Artificial
  probe
  misc_feature (1)..(25): SEQ ID NO: 4905; WAN024CD6_at; Start 381; Stop 405
taatttagaagtggctgtagataga

SEQ ID NO: 113694 - DNA, 25 bp, Artificial
  probe
  misc_feature (1)..(25): SEQ ID NO: 4905; WAN024CD6_at; Start 426; Stop 450
tagagaactagccaatgagttaggt

SEQ ID NO: 113695 - DNA, 25 bp, Artificial
  probe
  misc_feature (1)..(25): SEQ ID NO: 4905; WAN024CD6_at; Start 518; Stop 542
tattcatgagtttaggagaagatga

SEQ ID NO: 113696 - DNA, 25 bp, Artificial
  probe
  misc_feature (1)..(25): SEQ ID NO: 4905; WAN024CD6_at; Start 297; Stop 321
tgacgtatgtttgaatttatttctg

SEQ ID NO: 113697 - DNA, 25 bp, Artificial
  probe
  misc_feature (1)..(25): SEQ ID NO: 4905; WAN024CD6_at; Start 80; Stop 104
ctggaggtagtctattggaagctgc

SEQ ID NO: 113698 - DNA, 25 bp, Artificial
  probe
  misc_feature (1)..(25): SEQ ID NO: 4905; WAN024CD6_at; Start 349; Stop 373
gatggtgagtcaggttttaaagtcc

SEQ ID NO: 113699 - DNA, 25 bp, Artificial
  probe
  misc_feature (1)..(25): SEQ ID NO: 4905; WAN024CD6_at; Start 484; Stop 508
gaaataaaagaaaaagtgtcagagc

SEQ ID NO: 113700 - DNA, 25 bp, Artificial
  probe
  misc_feature (1)..(25): SEQ ID NO: 4905; WAN024CD6_at; Start 367; Stop 391
aaagtcccactatataatttagaag

SEQ ID NO: 113701 - DNA, 25 bp, Artificial
  probe
  misc_feature (1)..(25): SEQ ID NO: 4905; WAN024CD6_at; Start 87; Stop 111
tagtctattggaagctgcaagatac

SEQ ID NO: 113702 - DNA, 25 bp, Artificial
  probe
  misc_feature (1)..(25): SEQ ID NO: 4905; WAN024CD6_at; Start 490; Stop 514
aaagaaaaagtgtcagagctagaga

SEQ ID NO: 113703 - DNA, 25 bp, Artificial
  probe
  misc_feature (1)..(25): SEQ ID NO: 4905; WAN024CD6_at; Start 214; Stop 238
tatattttagaaagttcggaaatga

SEQ ID NO: 113704 - DNA, 25 bp, Artificial
  probe
  misc_feature (1)..(25): SEQ ID NO: 4905; WAN024CD6_at; Start 388; Stop 412
gaagtggctgtagatagaagtagaa

SEQ ID NO: 113705 - DNA, 25 bp, Artificial
  probe
  misc_feature (1)..(25): SEQ ID NO: 4905; WAN024CD6_at; Start 287; Stop 311
ggaaatcgtatgacgtatgtttgaa

SEQ ID NO: 113706 - DNA, 25 bp, Artificial
  probe
  misc_feature (1)..(25): SEQ ID NO: 4905; WAN024CD6_at; Start 441; Stop 465
tgagttaggtagtgttgctttccaa

SEQ ID NO: 113707 - DNA, 25 bp, Artificial
  probe
  misc_feature (1)..(25): SEQ ID NO: 4905; WAN024CD6_at; Start 133; Stop 157
gatgatatggctctaggtttaccaa

SEQ ID NO: 113708 - DNA, 25 bp, Artificial
  probe
  misc_feature (1)..(25): SEQ ID NO: 4905; WAN024CD6_at; Start 281; Stop 305
ttttagggaaatcgtatgacgtatg

SEQ ID NO: 113709 - DNA, 25 bp, Artificial
  probe
  misc_feature (1)..(25): SEQ ID NO: 4905; WAN024CD6_at; Start 335; Stop 359
cagaattggttattgatggtgagtc

SEQ ID NO: 113710 - DNA, 25 bp, Artificial
  probe
  misc_feature (1)..(25): SEQ ID NO: 4905; WAN024CD6_at; Start 446; Stop 470
taggtagtgttgctttccaaagagt

SEQ ID NO: 113711 - DNA, 25 bp, Artificial
  probe
  misc_feature (1)..(25): SEQ ID NO: 4905; WAN024CD6_at; Start 123; Stop 147
tccttggaatgatgatatggctcta

SEQ ID NO: 113712 - DNA, 25 bp, Artificial
  probe
  misc_feature (1)..(25): SEQ ID NO: 4905; WAN024CD6_at; Start 325; Stop 349
gacaggatgtcagaattggttattg

SEQ ID NO: 113713 - DNA, 25 bp, Artificial
  probe
  misc_feature (1)..(25): SEQ ID NO: 4905; WAN024CD6_at; Start 67; Stop 91
aagtattttgcttctggaggtagtc

SEQ ID NO: 113714 - DNA, 25 bp, Artificial
  probe
  misc_feature (1)..(25): SEQ ID NO: 4905; WAN024CD6_at; Start 503; Stop 527
cagagctagagaatatattcatgag

SEQ ID NO: 113715 - DNA, 25 bp, Artificial
  probe
  misc_feature (1)..(25): SEQ ID NO: 4905; WAN024CD6_at; Start 95; Stop 119
tggaagctgcaagatacaaaggttt

SEQ ID NO: 113716 - DNA, 25 bp, Artificial
  probe
  misc_feature (1)..(25): SEQ ID NO: 4905; WAN024CD6_at; Start 394; Stop 418
gctgtagatagaagtagaagtatta

SEQ ID NO: 113717 - DNA, 25 bp, Artificial
  probe
  misc_feature (1)..(25): SEQ ID NO: 4905; WAN024CD6_at; Start 314; Stop 338
tatttctgttagacaggatgtcaga

SEQ ID NO: 113718 - DNA, 25 bp, Artificial
  probe
  misc_feature (1)..(25): SEQ ID NO: 4142; WAN024CD7_at; Start 130; Stop 154
ttaggagctgtaagacacaaaggtt

SEQ ID NO: 113719 - DNA, 25 bp, Artificial
  probe
  misc_feature (1)..(25): SEQ ID NO: 4142; WAN024CD7_at; Start 163; Stop 187
tgggatgatatggatctaagctttc

SEQ ID NO: 113720 - DNA, 25 bp, Artificial
  probe
  misc_feature (1)..(25): SEQ ID NO: 4142; WAN024CD7_at; Start 137; Stop 161
ctgtaagacacaaaggtttcattcc

SEQ ID NO: 113721 - DNA, 25 bp, Artificial
  probe
  misc_feature (1)..(25): SEQ ID NO: 4142; WAN024CD7_at; Start 95; Stop 119
ataaaattaagtattttgctcttgg

SEQ ID NO: 113722 - DNA, 25 bp, Artificial
  probe
  misc_feature (1)..(25): SEQ ID NO: 4142; WAN024CD7_at; Start 136; Stop 160
gctgtaagacacaaaggtttcattc

SEQ ID NO: 113723 - DNA, 25 bp, Artificial
  probe
  misc_feature (1)..(25): SEQ ID NO: 4142; WAN024CD7_at; Start 170; Stop 194
atatggatctaagctttccaaagag

SEQ ID NO: 113724 - DNA, 25 bp, Artificial
  probe
  misc_feature (1)..(25): SEQ ID NO: 4142; WAN024CD7_at; Start 165; Stop 189
ggatgatatggatctaagctttcca

SEQ ID NO: 113725 - DNA, 25 bp, Artificial
  probe
  misc_feature (1)..(25): SEQ ID NO: 4142; WAN024CD7_at; Start 134; Stop 158
gagctgtaagacacaaaggtttcat

SEQ ID NO: 113726 - DNA, 25 bp, Artificial
  probe
  misc_feature (1)..(25): SEQ ID NO: 4142; WAN024CD7_at; Start 143; Stop 167
gacacaaaggtttcattccttggga

SEQ ID NO: 113727 - DNA, 25 bp, Artificial
  probe
  misc_feature (1)..(25): SEQ ID NO: 4142; WAN024CD7_at; Start 96; Stop 120
taaaattaagtattttgctcttgga

SEQ ID NO: 113728 - DNA, 25 bp, Artificial
  probe
  misc_feature (1)..(25): SEQ ID NO: 4142; WAN024CD7_at; Start 162; Stop 186
ttgggatgatatggatctaagcttt

SEQ ID NO: 113729 - DNA, 25 bp, Artificial
  probe
  misc_feature (1)..(25): SEQ ID NO: 4142; WAN024CD7_at; Start 126; Stop 150
tctattaggagctgtaagacacaaa

SEQ ID NO: 113730 - DNA, 25 bp, Artificial
  probe
  misc_feature (1)..(25): SEQ ID NO: 4142; WAN024CD7_at; Start 135; Stop 159
agctgtaagacacaaaggtttcatt

SEQ ID NO: 113731 - DNA, 25 bp, Artificial
  probe
  misc_feature (1)..(25): SEQ ID NO: 4142; WAN024CD7_at; Start 142; Stop 166
agacacaaaggtttcattccttggg

SEQ ID NO: 113732 - DNA, 25 bp, Artificial
  probe
  misc_feature (1)..(25): SEQ ID NO: 4142; WAN024CD7_at; Start 167; Stop 191
atgatatggatctaagctttccaaa

SEQ ID NO: 113733 - DNA, 25 bp, Artificial
  probe
  misc_feature (1)..(25): SEQ ID NO: 4142; WAN024CD7_at; Start 128; Stop 152
tattaggagctgtaagacacaaagg

SEQ ID NO: 113734 - DNA, 25 bp, Artificial
  probe
  misc_feature (1)..(25): SEQ ID NO: 4142; WAN024CD7_at; Start 125; Stop 149
gtctattaggagctgtaagacacaa

SEQ ID NO: 113735 - DNA, 25 bp, Artificial
  probe
  misc_feature (1)..(25): SEQ ID NO: 4142; WAN024CD7_at; Start 140; Stop 164
taagacacaaaggtttcattccttg

SEQ ID NO: 113736 - DNA, 25 bp, Artificial
  probe
  misc_feature (1)..(25): SEQ ID NO: 4142; WAN024CD7_at; Start 164; Stop 188
gggatgatatggatctaagctttcc

SEQ ID NO: 113737 - DNA, 25 bp, Artificial
  probe
  misc_feature (1)..(25): SEQ ID NO: 4142; WAN024CD7_at; Start 124; Stop 148
agtctattaggagctgtaagacaca

SEQ ID NO: 113738 - DNA, 25 bp, Artificial
  probe
  misc_feature (1)..(25): SEQ ID NO: 4142; WAN024CD7_at; Start 132; Stop 156
aggagctgtaagacacaaaggtttc

SEQ ID NO: 113739 - DNA, 25 bp, Artificial
  probe
  misc_feature (1)..(25): SEQ ID NO: 4142; WAN024CD7_at; Start 138; Stop 162
tgtaagacacaaaggtttcattcct

SEQ ID NO: 113740 - DNA, 25 bp, Artificial
  probe
  misc_feature (1)..(25): SEQ ID NO: 4142; WAN024CD7_at; Start 172; Stop 196
atggatctaagctttccaaagagtt

SEQ ID NO: 113741 - DNA, 25 bp, Artificial
  probe
  misc_feature (1)..(25): SEQ ID NO: 4142; WAN024CD7_at; Start 168; Stop 192
tgatatggatctaagctttccaaag

SEQ ID NO: 113742 - DNA, 25 bp, Artificial
  probe
  misc_feature (1)..(25): SEQ ID NO: 4142; WAN024CD7_at; Start 171; Stop 195
tatggatctaagctttccaaagagt

SEQ ID NO: 113743 - DNA, 25 bp, Artificial
  probe
  misc_feature (1)..(25): SEQ ID NO: 4142; WAN024CD7_at; Start 166; Stop 190
gatgatatggatctaagctttccaa

SEQ ID NO: 113744 - DNA, 25 bp, Artificial
  probe
  misc_feature (1)..(25): SEQ ID NO: 4142; WAN024CD7_at; Start 129; Stop 153
attaggagctgtaagacacaaaggt

SEQ ID NO: 113745 - DNA, 25 bp, Artificial
  probe
  misc_feature (1)..(25): SEQ ID NO: 4142; WAN024CD7_at; Start 161; Stop 185
cttgggatgatatggatctaagctt

SEQ ID NO: 113746 - DNA, 25 bp, Artificial
  probe
  misc_feature (1)..(25): SEQ ID NO: 4142; WAN024CD7_at; Start 131; Stop 155
taggagctgtaagacacaaaggttt

SEQ ID NO: 113747 - DNA, 25 bp, Artificial
  probe
  misc_feature (1)..(25): SEQ ID NO: 4142; WAN024CD7_at; Start 133; Stop 157
ggagctgtaagacacaaaggtttca

SEQ ID NO: 113748 - DNA, 25 bp, Artificial
  probe
  misc_feature (1)..(25): SEQ ID NO: 4142; WAN024CD7_at; Start 127; Stop 151
ctattaggagctgtaagacacaaag

SEQ ID NO: 113749 - DNA, 25 bp, Artificial
  probe
  misc_feature (1)..(25): SEQ ID NO: 4142; WAN024CD7_at; Start 169; Stop 193
gatatggatctaagctttccaaaga

SEQ ID NO: 113750 - DNA, 25 bp, Artificial
  probe
  misc_feature (1)..(25): SEQ ID NO: 6745; WAN024CD8_at; Start 73; Stop 97
tccactgagagtgcggaactctcca

SEQ ID NO: 113751 - DNA, 25 bp, Artificial
  probe
  misc_feature (1)..(25): SEQ ID NO: 6745; WAN024CD8_at; Start 88; Stop 112
gaactctccaatcttttgattgatg

SEQ ID NO: 113752 - DNA, 25 bp, Artificial
  probe
  misc_feature (1)..(25): SEQ ID NO: 6745; WAN024CD8_at; Start 24; Stop 48
tgtgggttgtttgattagcaaaggc

SEQ ID NO: 113753 - DNA, 25 bp, Artificial
  probe
  misc_feature (1)..(25): SEQ ID NO: 6745; WAN024CD8_at; Start 65; Stop 89
aactcatctccactgagagtgcgga

SEQ ID NO: 113754 - DNA, 25 bp, Artificial
  probe
  misc_feature (1)..(25): SEQ ID NO: 6745; WAN024CD8_at; Start 43; Stop 67
aaaggcgataatagcttgcttcaac

SEQ ID NO: 113755 - DNA, 25 bp, Artificial
  probe
  misc_feature (1)..(25): SEQ ID NO: 6745; WAN024CD8_at; Start 85; Stop 109
gcggaactctccaatcttttgattg

SEQ ID NO: 113756 - DNA, 25 bp, Artificial
  probe
  misc_feature (1)..(25): SEQ ID NO: 6745; WAN024CD8_at; Start 83; Stop 107
gtgcggaactctccaatcttttgat

SEQ ID NO: 113757 - DNA, 25 bp, Artificial
  probe
  misc_feature (1)..(25): SEQ ID NO: 6745; WAN024CD8_at; Start 59; Stop 83
tgcttcaactcatctccactgagag

SEQ ID NO: 113758 - DNA, 25 bp, Artificial
  probe
  misc_feature (1)..(25): SEQ ID NO: 6745; WAN024CD8_at; Start 64; Stop 88
caactcatctccactgagagtgcgg

SEQ ID NO: 113759 - DNA, 25 bp, Artificial
  probe
  misc_feature (1)..(25): SEQ ID NO: 6745; WAN024CD8_at; Start 47; Stop 71
gcgataatagcttgcttcaactcat

SEQ ID NO: 113760 - DNA, 25 bp, Artificial
  probe
  misc_feature (1)..(25): SEQ ID NO: 6745; WAN024CD8_at; Start 41; Stop 65
gcaaaggcgataatagcttgcttca

SEQ ID NO: 113761 - DNA, 25 bp, Artificial
  probe
  misc_feature (1)..(25): SEQ ID NO: 6745; WAN024CD8_at; Start 68; Stop 92
tcatctccactgagagtgcggaact

SEQ ID NO: 113762 - DNA, 25 bp, Artificial
  probe
  misc_feature (1)..(25): SEQ ID NO: 6745; WAN024CD8_at; Start 63; Stop 87
tcaactcatctccactgagagtgcg

SEQ ID NO: 113763 - DNA, 25 bp, Artificial
  probe
  misc_feature (1)..(25): SEQ ID NO: 6745; WAN024CD8_at; Start 67; Stop 91
ctcatctccactgagagtgcggaac

SEQ ID NO: 113764 - DNA, 25 bp, Artificial
  probe
  misc_feature (1)..(25): SEQ ID NO: 6745; WAN024CD8_at; Start 71; Stop 95
tctccactgagagtgcggaactctc

SEQ ID NO: 113765 - DNA, 25 bp, Artificial
  probe
  misc_feature (1)..(25): SEQ ID NO: 6745; WAN024CD8_at; Start 78; Stop 102
tgagagtgcggaactctccaatctt

SEQ ID NO: 113766 - DNA, 25 bp, Artificial
  probe
  misc_feature (1)..(25): SEQ ID NO: 6745; WAN024CD8_at; Start 82; Stop 106
agtgcggaactctccaatcttttga

SEQ ID NO: 113767 - DNA, 25 bp, Artificial
  probe
  misc_feature (1)..(25): SEQ ID NO: 6745; WAN024CD8_at; Start 76; Stop 100
actgagagtgcggaactctccaatc

SEQ ID NO: 113768 - DNA, 25 bp, Artificial
  probe
  misc_feature (1)..(25): SEQ ID NO: 6745; WAN024CD8_at; Start 46; Stop 70
ggcgataatagcttgcttcaactca

SEQ ID NO: 113769 - DNA, 25 bp, Artificial
  probe
  misc_feature (1)..(25): SEQ ID NO: 6745; WAN024CD8_at; Start 20; Stop 44
tcaatgtgggttgtttgattagcaa

SEQ ID NO: 113770 - DNA, 25 bp, Artificial
  probe
  misc_feature (1)..(25): SEQ ID NO: 6745; WAN024CD8_at; Start 56; Stop 80
gcttgcttcaactcatctccactga

SEQ ID NO: 113771 - DNA, 25 bp, Artificial
  probe
  misc_feature (1)..(25): SEQ ID NO: 6745; WAN024CD8_at; Start 81; Stop 105
gagtgcggaactctccaatcttttg

SEQ ID NO: 113772 - DNA, 25 bp, Artificial
  probe
  misc_feature (1)..(25): SEQ ID NO: 6745; WAN024CD8_at; Start 49; Stop 73
gataatagcttgcttcaactcatct

SEQ ID NO: 113773 - DNA, 25 bp, Artificial
  probe
  misc_feature (1)..(25): SEQ ID NO: 6745; WAN024CD8_at; Start 55; Stop 79
agcttgcttcaactcatctccactg

SEQ ID NO: 113774 - DNA, 25 bp, Artificial
  probe
  misc_feature (1)..(25): SEQ ID NO: 6745; WAN024CD8_at; Start 51; Stop 75
taatagcttgcttcaactcatctcc

SEQ ID NO: 113775 - DNA, 25 bp, Artificial
  probe
  misc_feature (1)..(25): SEQ ID NO: 6745; WAN024CD8_at; Start 60; Stop 84
gcttcaactcatctccactgagagt

SEQ ID NO: 113776 - DNA, 25 bp, Artificial
  probe
  misc_feature (1)..(25): SEQ ID NO: 6745; WAN024CD8_at; Start 69; Stop 93
catctccactgagagtgcggaactc

SEQ ID NO: 113777 - DNA, 25 bp, Artificial
  probe
  misc_feature (1)..(25): SEQ ID NO: 6745; WAN024CD8_at; Start 21; Stop 45
caatgtgggttgtttgattagcaaa

SEQ ID NO: 113778 - DNA, 25 bp, Artificial
  probe
  misc_feature (1)..(25): SEQ ID NO: 6745; WAN024CD8_at; Start 38; Stop 62
ttagcaaaggcgataatagcttgct

SEQ ID NO: 113779 - DNA, 25 bp, Artificial
  probe
  misc_feature (1)..(25): SEQ ID NO: 6745; WAN024CD8_at; Start 66; Stop 90
actcatctccactgagagtgcggaa

SEQ ID NO: 113780 - DNA, 25 bp, Artificial
  probe
  misc_feature (1)..(25): SEQ ID NO: 6745; WAN024CD8_at; Start 44; Stop 68
aaggcgataatagcttgcttcaact

SEQ ID NO: 113781 - DNA, 25 bp, Artificial
  probe
  misc_feature (1)..(25): SEQ ID NO: 6745; WAN024CD8_at; Start 52; Stop 76
aatagcttgcttcaactcatctcca

SEQ ID NO: 113782 - DNA, 25 bp, Artificial
  probe
  misc_feature (1)..(25): SEQ ID NO: 6745; WAN024CD8_at; Start 42; Stop 66
caaaggcgataatagcttgcttcaa

SEQ ID NO: 113783 - DNA, 25 bp, Artificial
  probe
  misc_feature (1)..(25): SEQ ID NO: 6745; WAN024CD8_at; Start 93; Stop 117
ctccaatcttttgattgatggattc

SEQ ID NO: 113784 - DNA, 25 bp, Artificial
  probe
  misc_feature (1)..(25): SEQ ID NO: 5536; WAN024CD9_at; Start 318; Stop 342
ggaacttacgaatcaattcatgata

SEQ ID NO: 113785 - DNA, 25 bp, Artificial
  probe
  misc_feature (1)..(25): SEQ ID NO: 5536; WAN024CD9_at; Start 169; Stop 193
gaaggcttcttttggattgcgctcc

SEQ ID NO: 113786 - DNA, 25 bp, Artificial
  probe
  misc_feature (1)..(25): SEQ ID NO: 5536; WAN024CD9_at; Start 115; Stop 139
tttagcttcatcaacagccttagca

SEQ ID NO: 113787 - DNA, 25 bp, Artificial
  probe
  misc_feature (1)..(25): SEQ ID NO: 5536; WAN024CD9_at; Start 99; Stop 123
taaccatcttagacactttagcttc

SEQ ID NO: 113788 - DNA, 25 bp, Artificial
  probe
  misc_feature (1)..(25): SEQ ID NO: 5536; WAN024CD9_at; Start 269; Stop 293
cgatcatagtcttgaatgtccgcaa

SEQ ID NO: 113789 - DNA, 25 bp, Artificial
  probe
  misc_feature (1)..(25): SEQ ID NO: 5536; WAN024CD9_at; Start 231; Stop 255
caatagcaggtttgtactgctcaaa

SEQ ID NO: 113790 - DNA, 25 bp, Artificial
  probe
  misc_feature (1)..(25): SEQ ID NO: 5536; WAN024CD9_at; Start 291; Stop 315
caatcacaggtacataatcaatccc

SEQ ID NO: 113791 - DNA, 25 bp, Artificial
  probe
  misc_feature (1)..(25): SEQ ID NO: 5536; WAN024CD9_at; Start 199; Stop 223
aggaacatgcttgtgggctgccgca

SEQ ID NO: 113792 - DNA, 25 bp, Artificial
  probe
  misc_feature (1)..(25): SEQ ID NO: 5536; WAN024CD9_at; Start 141; Stop 165
cattgtaagttccacggatattgtt

SEQ ID NO: 113793 - DNA, 25 bp, Artificial
  probe
  misc_feature (1)..(25): SEQ ID NO: 5536; WAN024CD9_at; Start 285; Stop 309
tgtccgcaatcacaggtacataatc

SEQ ID NO: 113794 - DNA, 25 bp, Artificial
  probe
  misc_feature (1)..(25): SEQ ID NO: 5536; WAN024CD9_at; Start 28; Stop 52
aatcaactccgccacgcgcttggtt

SEQ ID NO: 113795 - DNA, 25 bp, Artificial
  probe
  misc_feature (1)..(25): SEQ ID NO: 5536; WAN024CD9_at; Start 4; Stop 28
gctacgttggttaaagccagtgaca

SEQ ID NO: 113796 - DNA, 25 bp, Artificial
  probe
  misc_feature (1)..(25): SEQ ID NO: 5536; WAN024CD9_at; Start 299; Stop 323
ggtacataatcaatcccttggaact

SEQ ID NO: 113797 - DNA, 25 bp, Artificial
  probe
  misc_feature (1)..(25): SEQ ID NO: 5536; WAN024CD9_at; Start 153; Stop 177
cacggatattgtttttgaaggcttc

SEQ ID NO: 113798 - DNA, 25 bp, Artificial
  probe
  misc_feature (1)..(25): SEQ ID NO: 5536; WAN024CD9_at; Start 275; Stop 299
tagtcttgaatgtccgcaatcacag

SEQ ID NO: 113799 - DNA, 25 bp, Artificial
  probe
  misc_feature (1)..(25): SEQ ID NO: 5536; WAN024CD9_at; Start 49; Stop 73
ggttgctcccataacatttggtgga

SEQ ID NO: 113800 - DNA, 25 bp, Artificial
  probe
  misc_feature (1)..(25): SEQ ID NO: 5536; WAN024CD9_at; Start 258; Stop 282
cttgcaacaaacgatcatagtcttg

SEQ ID NO: 113801 - DNA, 25 bp, Artificial
  probe
  misc_feature (1)..(25): SEQ ID NO: 5536; WAN024CD9_at; Start 196; Stop 220
cataggaacatgcttgtgggctgcc

SEQ ID NO: 113802 - DNA, 25 bp, Artificial
  probe
  misc_feature (1)..(25): SEQ ID NO: 5536; WAN024CD9_at; Start 14; Stop 38
ttaaagccagtgacaatcaactccg

SEQ ID NO: 113803 - DNA, 25 bp, Artificial
  probe
  misc_feature (1)..(25): SEQ ID NO: 5536; WAN024CD9_at; Start 135; Stop 159
tagcaacattgtaagttccacggat

SEQ ID NO: 113804 - DNA, 25 bp, Artificial
  probe
  misc_feature (1)..(25): SEQ ID NO: 5536; WAN024CD9_at; Start 189; Stop 213
gctccatcataggaacatgcttgtg

SEQ ID NO: 113805 - DNA, 25 bp, Artificial
  probe
  misc_feature (1)..(25): SEQ ID NO: 5536; WAN024CD9_at; Start 239; Stop 263
ggtttgtactgctcaaagacttgca

SEQ ID NO: 113806 - DNA, 25 bp, Artificial
  probe
  misc_feature (1)..(25): SEQ ID NO: 5536; WAN024CD9_at; Start 218; Stop 242
gccgcatgataaacaatagcaggtt

SEQ ID NO: 113807 - DNA, 25 bp, Artificial
  probe
  misc_feature (1)..(25): SEQ ID NO: 5536; WAN024CD9_at; Start 309; Stop 333
caatcccttggaacttacgaatcaa

SEQ ID NO: 113808 - DNA, 25 bp, Artificial
  probe
  misc_feature (1)..(25): SEQ ID NO: 5536; WAN024CD9_at; Start 86; Stop 110
tctgtcgaaatcataaccatcttag

SEQ ID NO: 113809 - DNA, 25 bp, Artificial
  probe
  misc_feature (1)..(25): SEQ ID NO: 5536; WAN024CD9_at; Start 79; Stop 103
tgccttatctgtcgaaatcataacc

SEQ ID NO: 113810 - DNA, 25 bp, Artificial
  probe
  misc_feature (1)..(25): SEQ ID NO: 5536; WAN024CD9_at; Start 108; Stop 132
tagacactttagcttcatcaacagc

SEQ ID NO: 113811 - DNA, 25 bp, Artificial
  probe
  misc_feature (1)..(25): SEQ ID NO: 5536; WAN024CD9_at; Start 40; Stop 64
cacgcgcttggttgctcccataaca

SEQ ID NO: 113812 - DNA, 25 bp, Artificial
  probe
  misc_feature (1)..(25): SEQ ID NO: 5536; WAN024CD9_at; Start 249; Stop 273
gctcaaagacttgcaacaaacgatc

SEQ ID NO: 113813 - DNA, 25 bp, Artificial
  probe
  misc_feature (1)..(25): SEQ ID NO: 5536; WAN024CD9_at; Start 183; Stop 207
gattgcgctccatcataggaacatg

SEQ ID NO: 113814 - DNA, 25 bp, Artificial
  probe
  misc_feature (1)..(25): SEQ ID NO: 5536; WAN024CD9_at; Start 212; Stop 236
tgggctgccgcatgataaacaatag

SEQ ID NO: 113815 - DNA, 25 bp, Artificial
  probe
  misc_feature (1)..(25): SEQ ID NO: 5536; WAN024CD9_at; Start 280; Stop 304
ttgaatgtccgcaatcacaggtaca

SEQ ID NO: 113816 - DNA, 25 bp, Artificial
  probe
  misc_feature (1)..(25): SEQ ID NO: 5536; WAN024CD9_at; Start 330; Stop 354
tcaattcatgataaacaaggtagat

SEQ ID NO: 113817 - DNA, 25 bp, Artificial
  probe
  misc_feature (1)..(25): SEQ ID NO: 5536; WAN024CD9_at; Start 125; Stop 149
tcaacagccttagcaacattgtaag

SEQ ID NO: 113818 - DNA, 25 bp, Artificial
  probe
  misc_feature (1)..(25): SEQ ID NO: 1157; WAN024CDA_at; Start 728; Stop 752
tcaaatgttacaagatgcctaaggt

SEQ ID NO: 113819 - DNA, 25 bp, Artificial
  probe
  misc_feature (1)..(25): SEQ ID NO: 1157; WAN024CDA_at; Start 1797; Stop 1821
tgagttgaagcaagctattatcgcc

SEQ ID NO: 113820 - DNA, 25 bp, Artificial
  probe
  misc_feature (1)..(25): SEQ ID NO: 1157; WAN024CDA_at; Start 444; Stop 468
tgatggagaacaccgtcggaccttc

SEQ ID NO: 113821 - DNA, 25 bp, Artificial
  probe
  misc_feature (1)..(25): SEQ ID NO: 1157; WAN024CDA_at; Start 666; Stop 690
gattccgtcgctggatccgtcagaa

SEQ ID NO: 113822 - DNA, 25 bp, Artificial
  probe
  misc_feature (1)..(25): SEQ ID NO: 1157; WAN024CDA_at; Start 462; Stop 486
gaccttcttgattggtgccggtgat

SEQ ID NO: 113823 - DNA, 25 bp, Artificial
  probe
  misc_feature (1)..(25): SEQ ID NO: 1157; WAN024CDA_at; Start 1131; Stop 1155
caagcatgttcctatgatggagcgc

SEQ ID NO: 113824 - DNA, 25 bp, Artificial
  probe
  misc_feature (1)..(25): SEQ ID NO: 1157; WAN024CDA_at; Start 1380; Stop 1404
tagccgtggtagtgtcattccagtc

SEQ ID NO: 113825 - DNA, 25 bp, Artificial
  probe
  misc_feature (1)..(25): SEQ ID NO: 1157; WAN024CDA_at; Start 1414; Stop 1438
cagattgctgaaggtgggcctgtaa

SEQ ID NO: 113826 - DNA, 25 bp, Artificial
  probe
  misc_feature (1)..(25): SEQ ID NO: 1157; WAN024CDA_at; Start 1774; Stop 1798
gagttccgcactctcagtggagatg

SEQ ID NO: 113827 - DNA, 25 bp, Artificial
  probe
  misc_feature (1)..(25): SEQ ID NO: 1157; WAN024CDA_at; Start 418; Stop 442
tactccagacgcaaaaaaggtagtg

SEQ ID NO: 113828 - DNA, 25 bp, Artificial
  probe
  misc_feature (1)..(25): SEQ ID NO: 1157; WAN024CDA_at; Start 643; Stop 667
caaatcgagcgtgtcatcgttgcga

SEQ ID NO: 113829 - DNA, 25 bp, Artificial
  probe
  misc_feature (1)..(25): SEQ ID NO: 1157; WAN024CDA_at; Start 1570; Stop 1594
tatgacttggccaagaagatggtgc

SEQ ID NO: 113830 - DNA, 25 bp, Artificial
  probe
  misc_feature (1)..(25): SEQ ID NO: 1157; WAN024CDA_at; Start 1165; Stop 1189
gaagccttcaaaaacaatatccgtg

SEQ ID NO: 113831 - DNA, 25 bp, Artificial
  probe
  misc_feature (1)..(25): SEQ ID NO: 1157; WAN024CDA_at; Start 1006; Stop 1030
gaattgattcgtaagttccaaggga

SEQ ID NO: 113832 - DNA, 25 bp, Artificial
  probe
  misc_feature (1)..(25): SEQ ID NO: 1157; WAN024CDA_at; Start 876; Stop 900
taagaccatcttagtcacaggagct

SEQ ID NO: 113833 - DNA, 25 bp, Artificial
  probe
  misc_feature (1)..(25): SEQ ID NO: 1157; WAN024CDA_at; Start 603; Stop 627
gggctcttatgacaatctgcctgaa

SEQ ID NO: 113834 - DNA, 25 bp, Artificial
  probe
  misc_feature (1)..(25): SEQ ID NO: 1157; WAN024CDA_at; Start 1539; Stop 1563
tatccttgatatgggcaaaccagtc

SEQ ID NO: 113835 - DNA, 25 bp, Artificial
  probe
  misc_feature (1)..(25): SEQ ID NO: 1157; WAN024CDA_at; Start 1640; Stop 1664
gaatccgcccaggtgaaaaactcta

SEQ ID NO: 113836 - DNA, 25 bp, Artificial
  probe
  misc_feature (1)..(25): SEQ ID NO: 1157; WAN024CDA_at; Start 891; Stop 915
cacaggagctggaggttcaatcggt

SEQ ID NO: 113837 - DNA, 25 bp, Artificial
  probe
  misc_feature (1)..(25): SEQ ID NO: 1157; WAN024CDA_at; Start 1146; Stop 1170
gatggagcgcaatccaaaagaagcc

SEQ ID NO: 113838 - DNA, 25 bp, Artificial
  probe
  misc_feature (1)..(25): SEQ ID NO: 1157; WAN024CDA_at; Start 1033; Stop 1057
gattatgtacctgtgattgcggaca

SEQ ID NO: 113839 - DNA, 25 bp, Artificial
  probe
  misc_feature (1)..(25): SEQ ID NO: 1157; WAN024CDA_at; Start 769; Stop 793
ggccttcaccaagcaggtactggct

SEQ ID NO: 113840 - DNA, 25 bp, Artificial
  probe
  misc_feature (1)..(25): SEQ ID NO: 1157; WAN024CDA_at; Start 618; Stop 642
tctgcctgaattagccaaacgccat

SEQ ID NO: 113841 - DNA, 25 bp, Artificial
  probe
  misc_feature (1)..(25): SEQ ID NO: 1157; WAN024CDA_at; Start 754; Stop 778
gaaactgttgttcagggccttcacc

SEQ ID NO: 113842 - DNA, 25 bp, Artificial
  probe
  misc_feature (1)..(25): SEQ ID NO: 1157; WAN024CDA_at; Start 1585; Stop 1609
aagatggtgcttctaagtggccaca

SEQ ID NO: 113843 - DNA, 25 bp, Artificial
  probe
  misc_feature (1)..(25): SEQ ID NO: 1157; WAN024CDA_at; Start 1666; Stop 1690
gaagaactcttggtatcaaccgaac

SEQ ID NO: 113844 - DNA, 25 bp, Artificial
  probe
  misc_feature (1)..(25): SEQ ID NO: 1157; WAN024CDA_at; Start 908; Stop 932
caatcggttctgaaatctgtcgtca

SEQ ID NO: 113845 - DNA, 25 bp, Artificial
  probe
  misc_feature (1)..(25): SEQ ID NO: 1157; WAN024CDA_at; Start 1346; Stop 1370
cctactgtgcagttcgttttgggaa

SEQ ID NO: 113846 - DNA, 25 bp, Artificial
  probe
  misc_feature (1)..(25): SEQ ID NO: 1157; WAN024CDA_at; Start 1721; Stop 1745
tcgttggtaaggttaatgtcatgcc

SEQ ID NO: 113847 - DNA, 25 bp, Artificial
  probe
  misc_feature (1)..(25): SEQ ID NO: 1157; WAN024CDA_at; Start 1625; Stop 1649
caatcgttgaagttggaatccgccc

SEQ ID NO: 113848 - DNA, 25 bp, Artificial
  probe
  misc_feature (1)..(25): SEQ ID NO: 1157; WAN024CDA_at; Start 1278; Stop 1302
tgttatgggagcaaccaagcgcgtg

SEQ ID NO: 113849 - DNA, 25 bp, Artificial
  probe
  misc_feature (1)..(25): SEQ ID NO: 1157; WAN024CDA_at; Start 505; Stop 529
gatagttaccaacatccaaccagtg

SEQ ID NO: 113850 - DNA, 25 bp, Artificial
  probe
  misc_feature (1)..(25): SEQ ID NO: 1157; WAN024CDA_at; Start 1500; Stop 1524
tatccatgctggtgcttatgccaaa

SEQ ID NO: 113851 - DNA, 25 bp, Artificial
  probe
  misc_feature (1)..(25): SEQ ID NO: 1157; WAN024CDA_at; Start 821; Stop 845
tgggtcgtcaggaaatccgtcttga

SEQ ID NO: 113852 - DNA, 25 bp, Artificial
  probe
  misc_feature (1)..(25): SEQ ID NO: 2336; WAN024CDB_at; Start 628; Stop 652
gaggatatgtcttatgaggatatga

SEQ ID NO: 113853 - DNA, 25 bp, Artificial
  probe
  misc_feature (1)..(25): SEQ ID NO: 2336; WAN024CDB_at; Start 600; Stop 624
tccaagatacaattatatgaccatt

SEQ ID NO: 113854 - DNA, 25 bp, Artificial
  probe
  misc_feature (1)..(25): SEQ ID NO: 2336; WAN024CDB_at; Start 366; Stop 390
aataatccaaggtgtgtccgatgtt

SEQ ID NO: 113855 - DNA, 25 bp, Artificial
  probe
  misc_feature (1)..(25): SEQ ID NO: 2336; WAN024CDB_at; Start 663; Stop 687
gcaacctgtaaactattatagtaag

SEQ ID NO: 113856 - DNA, 25 bp, Artificial
  probe
  misc_feature (1)..(25): SEQ ID NO: 2336; WAN024CDB_at; Start 360; Stop 384
tggaaaaataatccaaggtgtgtcc

SEQ ID NO: 113857 - DNA, 25 bp, Artificial
  probe
  misc_feature (1)..(25): SEQ ID NO: 2336; WAN024CDB_at; Start 176; Stop 200
cgataaactggatagaaaatataga

SEQ ID NO: 113858 - DNA, 25 bp, Artificial
  probe
  misc_feature (1)..(25): SEQ ID NO: 2336; WAN024CDB_at; Start 667; Stop 691
cctgtaaactattatagtaaggaag

SEQ ID NO: 113859 - DNA, 25 bp, Artificial
  probe
  misc_feature (1)..(25): SEQ ID NO: 2336; WAN024CDB_at; Start 148; Stop 172
gagttagctagtaaaaataatcaaa

SEQ ID NO: 113860 - DNA, 25 bp, Artificial
  probe
  misc_feature (1)..(25): SEQ ID NO: 2336; WAN024CDB_at; Start 596; Stop 620
tatctccaagatacaattatatgac

SEQ ID NO: 113861 - DNA, 25 bp, Artificial
  probe
  misc_feature (1)..(25): SEQ ID NO: 2336; WAN024CDB_at; Start 659; Stop 683
ttaagcaacctgtaaactattatag

SEQ ID NO: 113862 - DNA, 25 bp, Artificial
  probe
  misc_feature (1)..(25): SEQ ID NO: 2336; WAN024CDB_at; Start 244; Stop 268
tatagtagattatttttaggagaag

SEQ ID NO: 113863 - DNA, 25 bp, Artificial
  probe
  misc_feature (1)..(25): SEQ ID NO: 2336; WAN024CDB_at; Start 355; Stop 379
tttgatggaaaaataatccaaggtg

SEQ ID NO: 113864 - DNA, 25 bp, Artificial
  probe
  misc_feature (1)..(25): SEQ ID NO: 2336; WAN024CDB_at; Start 371; Stop 395
tccaaggtgtgtccgatgttttaaa

SEQ ID NO: 113865 - DNA, 25 bp, Artificial
  probe
  misc_feature (1)..(25): SEQ ID NO: 2336; WAN024CDB_at; Start 373; Stop 397
caaggtgtgtccgatgttttaaata

SEQ ID NO: 113866 - DNA, 25 bp, Artificial
  probe
  misc_feature (1)..(25): SEQ ID NO: 2336; WAN024CDB_at; Start 375; Stop 399
aggtgtgtccgatgttttaaataag

SEQ ID NO: 113867 - DNA, 25 bp, Artificial
  probe
  misc_feature (1)..(25): SEQ ID NO: 2336; WAN024CDB_at; Start 364; Stop 388
aaaataatccaaggtgtgtccgatg

SEQ ID NO: 113868 - DNA, 25 bp, Artificial
  probe
  misc_feature (1)..(25): SEQ ID NO: 2336; WAN024CDB_at; Start 58; Stop 82
tcatctttatatgaaacgaatgcat

SEQ ID NO: 113869 - DNA, 25 bp, Artificial
  probe
  misc_feature (1)..(25): SEQ ID NO: 2336; WAN024CDB_at; Start 362; Stop 386
gaaaaataatccaaggtgtgtccga

SEQ ID NO: 113870 - DNA, 25 bp, Artificial
  probe
  misc_feature (1)..(25): SEQ ID NO: 2336; WAN024CDB_at; Start 341; Stop 365
tatttgatgaagaatttgatggaaa

SEQ ID NO: 113871 - DNA, 25 bp, Artificial
  probe
  misc_feature (1)..(25): SEQ ID NO: 2336; WAN024CDB_at; Start 609; Stop 633
caattatatgaccatttttgaggat

SEQ ID NO: 113872 - DNA, 25 bp, Artificial
  probe
  misc_feature (1)..(25): SEQ ID NO: 2336; WAN024CDB_at; Start 141; Stop 165
aatcaatgagttagctagtaaaaat

SEQ ID NO: 113873 - DNA, 25 bp, Artificial
  probe
  misc_feature (1)..(25): SEQ ID NO: 2336; WAN024CDB_at; Start 598; Stop 622
tctccaagatacaattatatgacca

SEQ ID NO: 113874 - DNA, 25 bp, Artificial
  probe
  misc_feature (1)..(25): SEQ ID NO: 2336; WAN024CDB_at; Start 582; Stop 606
ttcttataaagaattatctccaaga

SEQ ID NO: 113875 - DNA, 25 bp, Artificial
  probe
  misc_feature (1)..(25): SEQ ID NO: 2336; WAN024CDB_at; Start 368; Stop 392
taatccaaggtgtgtccgatgtttt

SEQ ID NO: 113876 - DNA, 25 bp, Artificial
  probe
  misc_feature (1)..(25): SEQ ID NO: 2336; WAN024CDB_at; Start 449; Stop 473
caggtgtattatatattgatttaga

SEQ ID NO: 113877 - DNA, 25 bp, Artificial
  probe
  misc_feature (1)..(25): SEQ ID NO: 2336; WAN024CDB_at; Start 615; Stop 639
tatgaccatttttgaggatatgtct

SEQ ID NO: 113878 - DNA, 25 bp, Artificial
  probe
  misc_feature (1)..(25): SEQ ID NO: 2336; WAN024CDB_at; Start 313; Stop 337
attattatcatggatagtttatcag

SEQ ID NO: 113879 - DNA, 25 bp, Artificial
  probe
  misc_feature (1)..(25): SEQ ID NO: 2336; WAN024CDB_at; Start 620; Stop 644
ccatttttgaggatatgtcttatga

SEQ ID NO: 113880 - DNA, 25 bp, Artificial
  probe
  misc_feature (1)..(25): SEQ ID NO: 2336; WAN024CDB_at; Start 623; Stop 647
tttttgaggatatgtcttatgagga

SEQ ID NO: 113881 - DNA, 25 bp, Artificial
  probe
  misc_feature (1)..(25): SEQ ID NO: 2336; WAN024CDB_at; Start 223; Stop 247
gatagaggttctataagttcttata

SEQ ID NO: 113882 - DNA, 25 bp, Artificial
  probe
  misc_feature (1)..(25): SEQ ID NO: 2336; WAN024CDB_at; Start 586; Stop 610
tataaagaattatctccaagataca

SEQ ID NO: 113883 - DNA, 25 bp, Artificial
  probe
  misc_feature (1)..(25): SEQ ID NO: 2336; WAN024CDB_at; Start 227; Stop 251
gaggttctataagttcttatagtag

SEQ ID NO: 113884 - DNA, 25 bp, Artificial
  probe
  misc_feature (1)..(25): SEQ ID NO: 2336; WAN024CDB_at; Start 607; Stop 631
tacaattatatgaccatttttgagg

SEQ ID NO: 113885 - DNA, 25 bp, Artificial
  probe
  misc_feature (1)..(25): SEQ ID NO: 2336; WAN024CDB_at; Start 377; Stop 401
gtgtgtccgatgttttaaataagga

SEQ ID NO: 113886 - DNA, 25 bp, Artificial
  probe
  misc_feature (1)..(25): SEQ ID NO: 2748; WAN024CDC_at; Start 910; Stop 934
aaagtgcgtccaaaactgtatagaa

SEQ ID NO: 113887 - DNA, 25 bp, Artificial
  probe
  misc_feature (1)..(25): SEQ ID NO: 2748; WAN024CDC_at; Start 899; Stop 923
ttattcaatcaaaagtgcgtccaaa

SEQ ID NO: 113888 - DNA, 25 bp, Artificial
  probe
  misc_feature (1)..(25): SEQ ID NO: 2748; WAN024CDC_at; Start 900; Stop 924
tattcaatcaaaagtgcgtccaaaa

SEQ ID NO: 113889 - DNA, 25 bp, Artificial
  probe
  misc_feature (1)..(25): SEQ ID NO: 2748; WAN024CDC_at; Start 907; Stop 931
tcaaaagtgcgtccaaaactgtata

SEQ ID NO: 113890 - DNA, 25 bp, Artificial
  probe
  misc_feature (1)..(25): SEQ ID NO: 2748; WAN024CDC_at; Start 902; Stop 926
ttcaatcaaaagtgcgtccaaaact

SEQ ID NO: 113891 - DNA, 25 bp, Artificial
  probe
  misc_feature (1)..(25): SEQ ID NO: 2748; WAN024CDC_at; Start 908; Stop 932
caaaagtgcgtccaaaactgtatag

SEQ ID NO: 113892 - DNA, 25 bp, Artificial
  probe
  misc_feature (1)..(25): SEQ ID NO: 2748; WAN024CDC_at; Start 906; Stop 930
atcaaaagtgcgtccaaaactgtat

SEQ ID NO: 113893 - DNA, 25 bp, Artificial
  probe
  misc_feature (1)..(25): SEQ ID NO: 2748; WAN024CDC_at; Start 893; Stop 917
taggttttattcaatcaaaagtgcg

SEQ ID NO: 113894 - DNA, 25 bp, Artificial
  probe
  misc_feature (1)..(25): SEQ ID NO: 2748; WAN024CDC_at; Start 896; Stop 920
gttttattcaatcaaaagtgcgtcc

SEQ ID NO: 113895 - DNA, 25 bp, Artificial
  probe
  misc_feature (1)..(25): SEQ ID NO: 2748; WAN024CDC_at; Start 894; Stop 918
aggttttattcaatcaaaagtgcgt

SEQ ID NO: 113896 - DNA, 25 bp, Artificial
  probe
  misc_feature (1)..(25): SEQ ID NO: 2748; WAN024CDC_at; Start 905; Stop 929
aatcaaaagtgcgtccaaaactgta

SEQ ID NO: 113897 - DNA, 25 bp, Artificial
  probe
  misc_feature (1)..(25): SEQ ID NO: 2748; WAN024CDC_at; Start 911; Stop 935
aagtgcgtccaaaactgtatagaat

SEQ ID NO: 113898 - DNA, 25 bp, Artificial
  probe
  misc_feature (1)..(25): SEQ ID NO: 2748; WAN024CDC_at; Start 903; Stop 927
tcaatcaaaagtgcgtccaaaactg

SEQ ID NO: 113899 - DNA, 25 bp, Artificial
  probe
  misc_feature (1)..(25): SEQ ID NO: 2748; WAN024CDC_at; Start 901; Stop 925
attcaatcaaaagtgcgtccaaaac

SEQ ID NO: 113900 - DNA, 25 bp, Artificial
  probe
  misc_feature (1)..(25): SEQ ID NO: 2748; WAN024CDC_at; Start 897; Stop 921
ttttattcaatcaaaagtgcgtcca

SEQ ID NO: 113901 - DNA, 25 bp, Artificial
  probe
  misc_feature (1)..(25): SEQ ID NO: 2748; WAN024CDC_at; Start 891; Stop 915
actaggttttattcaatcaaaagtg

SEQ ID NO: 113902 - DNA, 25 bp, Artificial
  probe
  misc_feature (1)..(25): SEQ ID NO: 2748; WAN024CDC_at; Start 895; Stop 919
ggttttattcaatcaaaagtgcgtc

SEQ ID NO: 113903 - DNA, 25 bp, Artificial
  probe
  misc_feature (1)..(25): SEQ ID NO: 2748; WAN024CDC_at; Start 909; Stop 933
aaaagtgcgtccaaaactgtataga

SEQ ID NO: 113904 - DNA, 25 bp, Artificial
  probe
  misc_feature (1)..(25): SEQ ID NO: 2748; WAN024CDC_at; Start 912; Stop 936
agtgcgtccaaaactgtatagaatt

SEQ ID NO: 113905 - DNA, 25 bp, Artificial
  probe
  misc_feature (1)..(25): SEQ ID NO: 2748; WAN024CDC_at; Start 892; Stop 916
ctaggttttattcaatcaaaagtgc

SEQ ID NO: 113906 - DNA, 25 bp, Artificial
  probe
  misc_feature (1)..(25): SEQ ID NO: 2748; WAN024CDC_at; Start 904; Stop 928
caatcaaaagtgcgtccaaaactgt

SEQ ID NO: 113907 - DNA, 25 bp, Artificial
  probe
  misc_feature (1)..(25): SEQ ID NO: 2748; WAN024CDC_at; Start 898; Stop 922
tttattcaatcaaaagtgcgtccaa

SEQ ID NO: 113908 - DNA, 25 bp, Artificial
  probe
  misc_feature (1)..(25): SEQ ID NO: 1211; WAN024CDD_at; Start 411; Stop 435
ggtgttgggtataccaattgacaag

SEQ ID NO: 113909 - DNA, 25 bp, Artificial
  probe
  misc_feature (1)..(25): SEQ ID NO: 1211; WAN024CDD_at; Start 749; Stop 773
caaaaagaccttggcaagaaggcag

SEQ ID NO: 113910 - DNA, 25 bp, Artificial
  probe
  misc_feature (1)..(25): SEQ ID NO: 1211; WAN024CDD_at; Start 418; Stop 442
ggtataccaattgacaagccaatgt

SEQ ID NO: 113911 - DNA, 25 bp, Artificial
  probe
  misc_feature (1)..(25): SEQ ID NO: 1211; WAN024CDD_at; Start 420; Stop 444
tataccaattgacaagccaatgttt

SEQ ID NO: 113912 - DNA, 25 bp, Artificial
  probe
  misc_feature (1)..(25): SEQ ID NO: 1211; WAN024CDD_at; Start 714; Stop 738
tatagtcttacgacatttcacaact

SEQ ID NO: 113913 - DNA, 25 bp, Artificial
  probe
  misc_feature (1)..(25): SEQ ID NO: 1211; WAN024CDD_at; Start 763; Stop 787
caagaaggcagtaatgttgcacata

SEQ ID NO: 113914 - DNA, 25 bp, Artificial
  probe
  misc_feature (1)..(25): SEQ ID NO: 1211; WAN024CDD_at; Start 896; Stop 920
gaattattcaatcaaaatttagacc

SEQ ID NO: 113915 - DNA, 25 bp, Artificial
  probe
  misc_feature (1)..(25): SEQ ID NO: 1211; WAN024CDD_at; Start 807; Stop 831
ctatgaaggtagttataaaaatgtt

SEQ ID NO: 113916 - DNA, 25 bp, Artificial
  probe
  misc_feature (1)..(25): SEQ ID NO: 1211; WAN024CDD_at; Start 720; Stop 744
cttacgacatttcacaactagtttt

SEQ ID NO: 113917 - DNA, 25 bp, Artificial
  probe
  misc_feature (1)..(25): SEQ ID NO: 1211; WAN024CDD_at; Start 413; Stop 437
tgttgggtataccaattgacaagcc

SEQ ID NO: 113918 - DNA, 25 bp, Artificial
  probe
  misc_feature (1)..(25): SEQ ID NO: 1211; WAN024CDD_at; Start 748; Stop 772
tcaaaaagaccttggcaagaaggca

SEQ ID NO: 113919 - DNA, 25 bp, Artificial
  probe
  misc_feature (1)..(25): SEQ ID NO: 1211; WAN024CDD_at; Start 718; Stop 742
gtcttacgacatttcacaactagtt

SEQ ID NO: 113920 - DNA, 25 bp, Artificial
  probe
  misc_feature (1)..(25): SEQ ID NO: 1211; WAN024CDD_at; Start 760; Stop 784
tggcaagaaggcagtaatgttgcac

SEQ ID NO: 113921 - DNA, 25 bp, Artificial
  probe
  misc_feature (1)..(25): SEQ ID NO: 1211; WAN024CDD_at; Start 771; Stop 795
cagtaatgttgcacatatagaccaa

SEQ ID NO: 113922 - DNA, 25 bp, Artificial
  probe
  misc_feature (1)..(25): SEQ ID NO: 1211; WAN024CDD_at; Start 2; Stop 26
tgaatatagtttatgccacagataa

SEQ ID NO: 113923 - DNA, 25 bp, Artificial
  probe
  misc_feature (1)..(25): SEQ ID NO: 1211; WAN024CDD_at; Start 780; Stop 804
tgcacatatagaccaatttaaaaaa

SEQ ID NO: 113924 - DNA, 25 bp, Artificial
  probe
  misc_feature (1)..(25): SEQ ID NO: 1211; WAN024CDD_at; Start 757; Stop 781
ccttggcaagaaggcagtaatgttg

SEQ ID NO: 113925 - DNA, 25 bp, Artificial
  probe
  misc_feature (1)..(25): SEQ ID NO: 1211; WAN024CDD_at; Start 751; Stop 775
aaaagaccttggcaagaaggcagta

SEQ ID NO: 113926 - DNA, 25 bp, Artificial
  probe
  misc_feature (1)..(25): SEQ ID NO: 1211; WAN024CDD_at; Start 805; Stop 829
tactatgaaggtagttataaaaatg

SEQ ID NO: 113927 - DNA, 25 bp, Artificial
  probe
  misc_feature (1)..(25): SEQ ID NO: 1211; WAN024CDD_at; Start 746; Stop 770
tatcaaaaagaccttggcaagaagg

SEQ ID NO: 113928 - DNA, 25 bp, Artificial
  probe
  misc_feature (1)..(25): SEQ ID NO: 1211; WAN024CDD_at; Start 774; Stop 798
taatgttgcacatatagaccaattt

SEQ ID NO: 113929 - DNA, 25 bp, Artificial
  probe
  misc_feature (1)..(25): SEQ ID NO: 1211; WAN024CDD_at; Start 417; Stop 441
gggtataccaattgacaagccaatg

SEQ ID NO: 113930 - DNA, 25 bp, Artificial
  probe
  misc_feature (1)..(25): SEQ ID NO: 1211; WAN024CDD_at; Start 777; Stop 801
tgttgcacatatagaccaatttaaa

SEQ ID NO: 113931 - DNA, 25 bp, Artificial
  probe
  misc_feature (1)..(25): SEQ ID NO: 1211; WAN024CDD_at; Start 769; Stop 793
ggcagtaatgttgcacatatagacc

SEQ ID NO: 113932 - DNA, 25 bp, Artificial
  probe
  misc_feature (1)..(25): SEQ ID NO: 1211; WAN024CDD_at; Start 414; Stop 438
gttgggtataccaattgacaagcca

SEQ ID NO: 113933 - DNA, 25 bp, Artificial
  probe
  misc_feature (1)..(25): SEQ ID NO: 1211; WAN024CDD_at; Start 725; Stop 749
gacatttcacaactagttttttatc

SEQ ID NO: 113934 - DNA, 25 bp, Artificial
  probe
  misc_feature (1)..(25): SEQ ID NO: 1211; WAN024CDD_at; Start 752; Stop 776
aaagaccttggcaagaaggcagtaa

SEQ ID NO: 113935 - DNA, 25 bp, Artificial
  probe
  misc_feature (1)..(25): SEQ ID NO: 1211; WAN024CDD_at; Start 784; Stop 808
catatagaccaatttaaaaaatact

SEQ ID NO: 113936 - DNA, 25 bp, Artificial
  probe
  misc_feature (1)..(25): SEQ ID NO: 1211; WAN024CDD_at; Start 755; Stop 779
gaccttggcaagaaggcagtaatgt

SEQ ID NO: 113937 - DNA, 25 bp, Artificial
  probe
  misc_feature (1)..(25): SEQ ID NO: 1211; WAN024CDD_at; Start 743; Stop 767
ttttatcaaaaagaccttggcaaga

SEQ ID NO: 113938 - DNA, 25 bp, Artificial
  probe
  misc_feature (1)..(25): SEQ ID NO: 1211; WAN024CDD_at; Start 900; Stop 924
tattcaatcaaaatttagacctaaa

SEQ ID NO: 113939 - DNA, 25 bp, Artificial
  probe
  misc_feature (1)..(25): SEQ ID NO: 1211; WAN024CDD_at; Start 766; Stop 790
gaaggcagtaatgttgcacatatag

SEQ ID NO: 113940 - DNA, 25 bp, Artificial
  probe
  misc_feature (1)..(25): SEQ ID NO: 1211; WAN024CDD_at; Start 917; Stop 941
gacctaaattgtatagaattttgaa

SEQ ID NO: 113941 - DNA, 25 bp, Artificial
  probe
  misc_feature (1)..(25): SEQ ID NO: 1211; WAN024CDD_at; Start 4; Stop 28
aatatagtttatgccacagataata

SEQ ID NO: 113942 - DNA, 25 bp, Artificial
  probe
  misc_feature (1)..(25): SEQ ID NO: 51; WAN024CDE_at; Start 244; Stop 268
gctgtcgcaagtagttcaatatcgc

SEQ ID NO: 113943 - DNA, 25 bp, Artificial
  probe
  misc_feature (1)..(25): SEQ ID NO: 51; WAN024CDE_at; Start 375; Stop 399
tgaactagaacaagtatcacatgtg

SEQ ID NO: 113944 - DNA, 25 bp, Artificial
  probe
  misc_feature (1)..(25): SEQ ID NO: 51; WAN024CDE_at; Start 749; Stop 773
tgatgacagtcaatagcgagaccaa

SEQ ID NO: 113945 - DNA, 25 bp, Artificial
  probe
  misc_feature (1)..(25): SEQ ID NO: 51; WAN024CDE_at; Start 1373; Stop 1397
tggaaattgatgagaatagcctctc

SEQ ID NO: 113946 - DNA, 25 bp, Artificial
  probe
  misc_feature (1)..(25): SEQ ID NO: 51; WAN024CDE_at; Start 211; Stop 235
gctgaaaagttgacaatgcttctcc

SEQ ID NO: 113947 - DNA, 25 bp, Artificial
  probe
  misc_feature (1)..(25): SEQ ID NO: 51; WAN024CDE_at; Start 689; Stop 713
tcagtgggattgatacttatggacc

SEQ ID NO: 113948 - DNA, 25 bp, Artificial
  probe
  misc_feature (1)..(25): SEQ ID NO: 51; WAN024CDE_at; Start 402; Stop 426
ggcgcctaccgatacagattatgaa

SEQ ID NO: 113949 - DNA, 25 bp, Artificial
  probe
  misc_feature (1)..(25): SEQ ID NO: 51; WAN024CDE_at; Start 283; Stop 307
caatttatcggttttacaagtcgct

SEQ ID NO: 113950 - DNA, 25 bp, Artificial
  probe
  misc_feature (1)..(25): SEQ ID NO: 51; WAN024CDE_at; Start 69; Stop 93
cctgtacacaggaatagcgagccta

SEQ ID NO: 113951 - DNA, 25 bp, Artificial
  probe
  misc_feature (1)..(25): SEQ ID NO: 51; WAN024CDE_at; Start 799; Stop 823
cgtgactcctatgtcgcaattgcag

SEQ ID NO: 113952 - DNA, 25 bp, Artificial
  probe
  misc_feature (1)..(25): SEQ ID NO: 51; WAN024CDE_at; Start 228; Stop 252
gcttctcctaatcttagctgtcgca

SEQ ID NO: 113953 - DNA, 25 bp, Artificial
  probe
  misc_feature (1)..(25): SEQ ID NO: 51; WAN024CDE_at; Start 1238; Stop 1262
caacaactatcatggacttagccaa

SEQ ID NO: 113954 - DNA, 25 bp, Artificial
  probe
  misc_feature (1)..(25): SEQ ID NO: 51; WAN024CDE_at; Start 260; Stop 284
caatatcgcttttggctgttcaaca

SEQ ID NO: 113955 - DNA, 25 bp, Artificial
  probe
  misc_feature (1)..(25): SEQ ID NO: 51; WAN024CDE_at; Start 389; Stop 413
tatcacatgtgatggcgcctaccga

SEQ ID NO: 113956 - DNA, 25 bp, Artificial
  probe
  misc_feature (1)..(25): SEQ ID NO: 51; WAN024CDE_at; Start 1391; Stop 1415
gcctctcagctatcaaagaaaatat

SEQ ID NO: 113957 - DNA, 25 bp, Artificial
  probe
  misc_feature (1)..(25): SEQ ID NO: 51; WAN024CDE_at; Start 1057; Stop 1081
aagtcagcacttggtttcgttcgag

SEQ ID NO: 113958 - DNA, 25 bp, Artificial
  probe
  misc_feature (1)..(25): SEQ ID NO: 51; WAN024CDE_at; Start 1008; Stop 1032
tacaattgacgggaacgactatcct

SEQ ID NO: 113959 - DNA, 25 bp, Artificial
  probe
  misc_feature (1)..(25): SEQ ID NO: 51; WAN024CDE_at; Start 581; Stop 605
cggattttcctgactttagagacaa

SEQ ID NO: 113960 - DNA, 25 bp, Artificial
  probe
  misc_feature (1)..(25): SEQ ID NO: 51; WAN024CDE_at; Start 51; Stop 75
caatagtgtgctgctaatcctgtac

SEQ ID NO: 113961 - DNA, 25 bp, Artificial
  probe
  misc_feature (1)..(25): SEQ ID NO: 51; WAN024CDE_at; Start 815; Stop 839
caattgcagatggaggaaagaatca

SEQ ID NO: 113962 - DNA, 25 bp, Artificial
  probe
  misc_feature (1)..(25): SEQ ID NO: 51; WAN024CDE_at; Start 1181; Stop 1205
aaaattatcgtcaaatcatgcaagg

SEQ ID NO: 113963 - DNA, 25 bp, Artificial
  probe
  misc_feature (1)..(25): SEQ ID NO: 51; WAN024CDE_at; Start 1103; Stop 1127
gagatcgtgatcgaggacggaatca

SEQ ID NO: 113964 - DNA, 25 bp, Artificial
  probe
  misc_feature (1)..(25): SEQ ID NO: 51; WAN024CDE_at; Start 635; Stop 659
caaagaaagtagaagctccaaaggt

SEQ ID NO: 113965 - DNA, 25 bp, Artificial
  probe
  misc_feature (1)..(25): SEQ ID NO: 51; WAN024CDE_at; Start 1260; Stop 1284
caatactcaattggaaagtggaggg

SEQ ID NO: 113966 - DNA, 25 bp, Artificial
  probe
  misc_feature (1)..(25): SEQ ID NO: 51; WAN024CDE_at; Start 717; Stop 741
taactctgtatcacgttcggatgtc

SEQ ID NO: 113967 - DNA, 25 bp, Artificial
  probe
  misc_feature (1)..(25): SEQ ID NO: 51; WAN024CDE_at; Start 780; Stop 804
tcttttgacaactacacctcgtgac

SEQ ID NO: 113968 - DNA, 25 bp, Artificial
  probe
  misc_feature (1)..(25): SEQ ID NO: 51; WAN024CDE_at; Start 20; Stop 44
gaggaacagcagtccacttgaaatc

SEQ ID NO: 113969 - DNA, 25 bp, Artificial
  probe
  misc_feature (1)..(25): SEQ ID NO: 51; WAN024CDE_at; Start 301; Stop 325
agtcgcttaaatgcaacttcaaacg

SEQ ID NO: 113970 - DNA, 25 bp, Artificial
  probe
  misc_feature (1)..(25): SEQ ID NO: 51; WAN024CDE_at; Start 1081; Stop 1105
gaacgtcattctctagcagatggag

SEQ ID NO: 113971 - DNA, 25 bp, Artificial
  probe
  misc_feature (1)..(25): SEQ ID NO: 51; WAN024CDE_at; Start 1131; Stop 1155
gaaggtgctcgctgcaattattcaa

SEQ ID NO: 113972 - DNA, 25 bp, Artificial
  probe
  misc_feature (1)..(25): SEQ ID NO: 51; WAN024CDE_at; Start 1409; Stop 1433
aaaatattcaggctgttctggaggg

SEQ ID NO: 113973 - DNA, 25 bp, Artificial
  probe
  misc_feature (1)..(25): SEQ ID NO: 51; WAN024CDE_at; Start 1023; Stop 1047
cgactatcctgttggaaatctccat

SEQ ID NO: 113974 - DNA, 25 bp, Artificial
  probe
  misc_feature (1)..(25): SEQ ID NO: 51; WAN024CDE_at; Start 1118; Stop 1142
gacggaatcaacagaaggtgctcgc

SEQ ID NO: 113975 - DNA, 25 bp, Artificial
  probe
  misc_feature (1)..(25): SEQ ID NO: 51; WAN024CDE_at; Start 516; Stop 540
gagtttgatttcaggtgacaccaag

SEQ ID NO: 113976 - DNA, 25 bp, Artificial
  probe
  misc_feature (1)..(25): SEQ ID NO: 4289; WAN024CDF_at; Start 1273; Stop 1297
gtcaatgctcagttagaaagtggtg

SEQ ID NO: 113977 - DNA, 25 bp, Artificial
  probe
  misc_feature (1)..(25): SEQ ID NO: 4289; WAN024CDF_at; Start 1276; Stop 1300
aatgctcagttagaaagtggtggaa

SEQ ID NO: 113978 - DNA, 25 bp, Artificial
  probe
  misc_feature (1)..(25): SEQ ID NO: 4289; WAN024CDF_at; Start 1268; Stop 1292
acttggtcaatgctcagttagaaag

SEQ ID NO: 113979 - DNA, 25 bp, Artificial
  probe
  misc_feature (1)..(25): SEQ ID NO: 4289; WAN024CDF_at; Start 1271; Stop 1295
tggtcaatgctcagttagaaagtgg

SEQ ID NO: 113980 - DNA, 25 bp, Artificial
  probe
  misc_feature (1)..(25): SEQ ID NO: 4289; WAN024CDF_at; Start 1392; Stop 1416
aattaacgacagtagccttgcatct

SEQ ID NO: 113981 - DNA, 25 bp, Artificial
  probe
  misc_feature (1)..(25): SEQ ID NO: 4289; WAN024CDF_at; Start 1282; Stop 1306
cagttagaaagtggtggaacgtaca

SEQ ID NO: 113982 - DNA, 25 bp, Artificial
  probe
  misc_feature (1)..(25): SEQ ID NO: 4289; WAN024CDF_at; Start 1279; Stop 1303
gctcagttagaaagtggtggaacgt

SEQ ID NO: 113983 - DNA, 25 bp, Artificial
  probe
  misc_feature (1)..(25): SEQ ID NO: 4289; WAN024CDF_at; Start 1398; Stop 1422
cgacagtagccttgcatctgtcaaa

SEQ ID NO: 113984 - DNA, 25 bp, Artificial
  probe
  misc_feature (1)..(25): SEQ ID NO: 4289; WAN024CDF_at; Start 1400; Stop 1424
acagtagccttgcatctgtcaaaac

SEQ ID NO: 113985 - DNA, 25 bp, Artificial
  probe
  misc_feature (1)..(25): SEQ ID NO: 4289; WAN024CDF_at; Start 1391; Stop 1415
aaattaacgacagtagccttgcatc

SEQ ID NO: 113986 - DNA, 25 bp, Artificial
  probe
  misc_feature (1)..(25): SEQ ID NO: 4289; WAN024CDF_at; Start 1269; Stop 1293
cttggtcaatgctcagttagaaagt

SEQ ID NO: 113987 - DNA, 25 bp, Artificial
  probe
  misc_feature (1)..(25): SEQ ID NO: 4289; WAN024CDF_at; Start 1394; Stop 1418
ttaacgacagtagccttgcatctgt

SEQ ID NO: 113988 - DNA, 25 bp, Artificial
  probe
  misc_feature (1)..(25): SEQ ID NO: 4289; WAN024CDF_at; Start 1274; Stop 1298
tcaatgctcagttagaaagtggtgg

SEQ ID NO: 113989 - DNA, 25 bp, Artificial
  probe
  misc_feature (1)..(25): SEQ ID NO: 4289; WAN024CDF_at; Start 1262; Stop 1286
tgataaacttggtcaatgctcagtt

SEQ ID NO: 113990 - DNA, 25 bp, Artificial
  probe
  misc_feature (1)..(25): SEQ ID NO: 4289; WAN024CDF_at; Start 1393; Stop 1417
attaacgacagtagccttgcatctg

SEQ ID NO: 113991 - DNA, 25 bp, Artificial
  probe
  misc_feature (1)..(25): SEQ ID NO: 4289; WAN024CDF_at; Start 1280; Stop 1304
ctcagttagaaagtggtggaacgta

SEQ ID NO: 113992 - DNA, 25 bp, Artificial
  probe
  misc_feature (1)..(25): SEQ ID NO: 4289; WAN024CDF_at; Start 1389; Stop 1413
ggaaattaacgacagtagccttgca

SEQ ID NO: 113993 - DNA, 25 bp, Artificial
  probe
  misc_feature (1)..(25): SEQ ID NO: 4289; WAN024CDF_at; Start 1275; Stop 1299
caatgctcagttagaaagtggtgga

SEQ ID NO: 113994 - DNA, 25 bp, Artificial
  probe
  misc_feature (1)..(25): SEQ ID NO: 4289; WAN024CDF_at; Start 1386; Stop 1410
gatggaaattaacgacagtagcctt

SEQ ID NO: 113995 - DNA, 25 bp, Artificial
  probe
  misc_feature (1)..(25): SEQ ID NO: 4289; WAN024CDF_at; Start 1281; Stop 1305
tcagttagaaagtggtggaacgtac

SEQ ID NO: 113996 - DNA, 25 bp, Artificial
  probe
  misc_feature (1)..(25): SEQ ID NO: 4289; WAN024CDF_at; Start 1388; Stop 1412
tggaaattaacgacagtagccttgc

SEQ ID NO: 113997 - DNA, 25 bp, Artificial
  probe
  misc_feature (1)..(25): SEQ ID NO: 4289; WAN024CDF_at; Start 1267; Stop 1291
aacttggtcaatgctcagttagaaa

SEQ ID NO: 113998 - DNA, 25 bp, Artificial
  probe
  misc_feature (1)..(25): SEQ ID NO: 4289; WAN024CDF_at; Start 1385; Stop 1409
tgatggaaattaacgacagtagcct

SEQ ID NO: 113999 - DNA, 25 bp, Artificial
  probe
  misc_feature (1)..(25): SEQ ID NO: 4289; WAN024CDF_at; Start 1261; Stop 1285
atgataaacttggtcaatgctcagt

SEQ ID NO: 114000 - DNA, 25 bp, Artificial
  probe
  misc_feature (1)..(25): SEQ ID NO: 4289; WAN024CDF_at; Start 1278; Stop 1302
tgctcagttagaaagtggtggaacg

SEQ ID NO: 114001 - DNA, 25 bp, Artificial
  probe
  misc_feature (1)..(25): SEQ ID NO: 4289; WAN024CDF_at; Start 1399; Stop 1423
gacagtagccttgcatctgtcaaaa

SEQ ID NO: 114002 - DNA, 25 bp, Artificial
  probe
  misc_feature (1)..(25): SEQ ID NO: 4289; WAN024CDF_at; Start 1266; Stop 1290
aaacttggtcaatgctcagttagaa

SEQ ID NO: 114003 - DNA, 25 bp, Artificial
  probe
  misc_feature (1)..(25): SEQ ID NO: 4289; WAN024CDF_at; Start 1390; Stop 1414
gaaattaacgacagtagccttgcat

SEQ ID NO: 114004 - DNA, 25 bp, Artificial
  probe
  misc_feature (1)..(25): SEQ ID NO: 4289; WAN024CDF_at; Start 1263; Stop 1287
gataaacttggtcaatgctcagtta

SEQ ID NO: 114005 - DNA, 25 bp, Artificial
  probe
  misc_feature (1)..(25): SEQ ID NO: 4289; WAN024CDF_at; Start 1387; Stop 1411
atggaaattaacgacagtagccttg

SEQ ID NO: 114006 - DNA, 25 bp, Artificial
  probe
  misc_feature (1)..(25): SEQ ID NO: 4289; WAN024CDF_at; Start 1272; Stop 1296
ggtcaatgctcagttagaaagtggt

SEQ ID NO: 114007 - DNA, 25 bp, Artificial
  probe
  misc_feature (1)..(25): SEQ ID NO: 4289; WAN024CDF_at; Start 1265; Stop 1289
taaacttggtcaatgctcagttaga

SEQ ID NO: 114008 - DNA, 25 bp, Artificial
  probe
  misc_feature (1)..(25): SEQ ID NO: 4289; WAN024CDF_at; Start 1277; Stop 1301
atgctcagttagaaagtggtggaac

SEQ ID NO: 114009 - DNA, 25 bp, Artificial
  probe
  misc_feature (1)..(25): SEQ ID NO: 4289; WAN024CDF_at; Start 1396; Stop 1420
aacgacagtagccttgcatctgtca

SEQ ID NO: 114010 - DNA, 25 bp, Artificial
  probe
  misc_feature (1)..(25): SEQ ID NO: 679; WAN024CDG_at; Start 455; Stop 479
cacaagccagttcttggaaaggact

SEQ ID NO: 114011 - DNA, 25 bp, Artificial
  probe
  misc_feature (1)..(25): SEQ ID NO: 679; WAN024CDG_at; Start 279; Stop 303
gcccctgctctatctaggaaccttg

SEQ ID NO: 114012 - DNA, 25 bp, Artificial
  probe
  misc_feature (1)..(25): SEQ ID NO: 679; WAN024CDG_at; Start 945; Stop 969
ggtcaacttttcactcaagacaagc

SEQ ID NO: 114013 - DNA, 25 bp, Artificial
  probe
  misc_feature (1)..(25): SEQ ID NO: 679; WAN024CDG_at; Start 521; Stop 545
tctggctcccaaatcaccgctataa

SEQ ID NO: 114014 - DNA, 25 bp, Artificial
  probe
  misc_feature (1)..(25): SEQ ID NO: 679; WAN024CDG_at; Start 799; Stop 823
aaccgtcagctcatgctcactctgg

SEQ ID NO: 114015 - DNA, 25 bp, Artificial
  probe
  misc_feature (1)..(25): SEQ ID NO: 679; WAN024CDG_at; Start 590; Stop 614
tcatgcgtaataaacaggtttgggc

SEQ ID NO: 114016 - DNA, 25 bp, Artificial
  probe
  misc_feature (1)..(25): SEQ ID NO: 679; WAN024CDG_at; Start 99; Stop 123
ttcgcaaggtctggaggtagaagtt

SEQ ID NO: 114017 - DNA, 25 bp, Artificial
  probe
  misc_feature (1)..(25): SEQ ID NO: 679; WAN024CDG_at; Start 1062; Stop 1086
tgacctgttccactcttgggtacca

SEQ ID NO: 114018 - DNA, 25 bp, Artificial
  probe
  misc_feature (1)..(25): SEQ ID NO: 679; WAN024CDG_at; Start 506; Stop 530
tagcaacttttttggtctggctccc

SEQ ID NO: 114019 - DNA, 25 bp, Artificial
  probe
  misc_feature (1)..(25): SEQ ID NO: 679; WAN024CDG_at; Start 314; Stop 338
caagtgtcgcagtcatcaatgtcct

SEQ ID NO: 114020 - DNA, 25 bp, Artificial
  probe
  misc_feature (1)..(25): SEQ ID NO: 679; WAN024CDG_at; Start 549; Stop 573
tagactagctccacaaaccaaacaa

SEQ ID NO: 114021 - DNA, 25 bp, Artificial
  probe
  misc_feature (1)..(25): SEQ ID NO: 679; WAN024CDG_at; Start 976; Stop 1000
gaaaagacagcccaattgtccggcc

SEQ ID NO: 114022 - DNA, 25 bp, Artificial
  probe
  misc_feature (1)..(25): SEQ ID NO: 679; WAN024CDG_at; Start 414; Stop 438
gattgcaacggctctggcttcctat

SEQ ID NO: 114023 - DNA, 25 bp, Artificial
  probe
  misc_feature (1)..(25): SEQ ID NO: 679; WAN024CDG_at; Start 754; Stop 778
ttttcaatgaccatcccaagcctga

SEQ ID NO: 114024 - DNA, 25 bp, Artificial
  probe
  misc_feature (1)..(25): SEQ ID NO: 679; WAN024CDG_at; Start 123; Stop 147
tagttcgcttggtgtcttgaccagc

SEQ ID NO: 114025 - DNA, 25 bp, Artificial
  probe
  misc_feature (1)..(25): SEQ ID NO: 679; WAN024CDG_at; Start 389; Stop 413
ccaccttatatgtaacgtctatggg

SEQ ID NO: 114026 - DNA, 25 bp, Artificial
  probe
  misc_feature (1)..(25): SEQ ID NO: 679; WAN024CDG_at; Start 440; Stop 464
tagctgtgcccattacacaagccag

SEQ ID NO: 114027 - DNA, 25 bp, Artificial
  probe
  misc_feature (1)..(25): SEQ ID NO: 679; WAN024CDG_at; Start 1018; Stop 1042
tatatcctagcagcctttgggccaa

SEQ ID NO: 114028 - DNA, 25 bp, Artificial
  probe
  misc_feature (1)..(25): SEQ ID NO: 679; WAN024CDG_at; Start 1137; Stop 1161
tacagtggacagagcggataagatc

SEQ ID NO: 114029 - DNA, 25 bp, Artificial
  probe
  misc_feature (1)..(25): SEQ ID NO: 679; WAN024CDG_at; Start 261; Stop 285
tattcgactaatcaatctgcccctg

SEQ ID NO: 114030 - DNA, 25 bp, Artificial
  probe
  misc_feature (1)..(25): SEQ ID NO: 679; WAN024CDG_at; Start 644; Stop 668
tgatcttttacaccgtcatgacctg

SEQ ID NO: 114031 - DNA, 25 bp, Artificial
  probe
  misc_feature (1)..(25): SEQ ID NO: 679; WAN024CDG_at; Start 212; Stop 236
tggagcatctcttcacctacagcct

SEQ ID NO: 114032 - DNA, 25 bp, Artificial
  probe
  misc_feature (1)..(25): SEQ ID NO: 679; WAN024CDG_at; Start 784; Stop 808
agtttatctactcgcaaccgtcagc

SEQ ID NO: 114033 - DNA, 25 bp, Artificial
  probe
  misc_feature (1)..(25): SEQ ID NO: 679; WAN024CDG_at; Start 186; Stop 210
tacccaactggctcagaaaatcggc

SEQ ID NO: 114034 - DNA, 25 bp, Artificial
  probe
  misc_feature (1)..(25): SEQ ID NO: 679; WAN024CDG_at; Start 992; Stop 1016
tgtccggcctatctcaaacaggagg

SEQ ID NO: 114035 - DNA, 25 bp, Artificial
  probe
  misc_feature (1)..(25): SEQ ID NO: 679; WAN024CDG_at; Start 816; Stop 840
cactctggtttcactagctggtgtg

SEQ ID NO: 114036 - DNA, 25 bp, Artificial
  probe
  misc_feature (1)..(25): SEQ ID NO: 679; WAN024CDG_at; Start 230; Stop 254
acagcctcttcttcttgaccatcgg

SEQ ID NO: 114037 - DNA, 25 bp, Artificial
  probe
  misc_feature (1)..(25): SEQ ID NO: 679; WAN024CDG_at; Start 38; Stop 62
tcctgattggtgtttccttgcgaac

SEQ ID NO: 114038 - DNA, 25 bp, Artificial
  probe
  misc_feature (1)..(25): SEQ ID NO: 679; WAN024CDG_at; Start 198; Stop 222
tcagaaaatcggcttggagcatctc

SEQ ID NO: 114039 - DNA, 25 bp, Artificial
  probe
  misc_feature (1)..(25): SEQ ID NO: 679; WAN024CDG_at; Start 141; Stop 165
gaccagcctgcctctccttatgttt

SEQ ID NO: 114040 - DNA, 25 bp, Artificial
  probe
  misc_feature (1)..(25): SEQ ID NO: 679; WAN024CDG_at; Start 688; Stop 712
catgcaggtctatccagtcacgaag

SEQ ID NO: 114041 - DNA, 25 bp, Artificial
  probe
  misc_feature (1)..(25): SEQ ID NO: 679; WAN024CDG_at; Start 1113; Stop 1137
tatcctgatgactgtggccctcttt

SEQ ID NO: 114042 - DNA, 25 bp, Artificial
  probe
  misc_feature (1)..(25): SEQ ID NO: 679; WAN024CDG_at; Start 962; Stop 986
agacaagcgcccctgaaaagacagc

SEQ ID NO: 114043 - DNA, 25 bp, Artificial
  probe
  misc_feature (1)..(25): SEQ ID NO: 679; WAN024CDG_at; Start 246; Stop 270
gaccatcggctcacttattcgacta

SEQ ID NO: 114044 - DNA, 25 bp, Artificial
  probe
  misc_feature (1)..(25): SEQ ID NO: 3399; WAN024CDH_at; Start 280; Stop 304
aatttttctacacatacattgtaca

SEQ ID NO: 114045 - DNA, 25 bp, Artificial
  probe
  misc_feature (1)..(25): SEQ ID NO: 3399; WAN024CDH_at; Start 52; Stop 76
gaactctctagaataggttgtcaga

SEQ ID NO: 114046 - DNA, 25 bp, Artificial
  probe
  misc_feature (1)..(25): SEQ ID NO: 3399; WAN024CDH_at; Start 149; Stop 173
gtttggctaatctcataaccataag

SEQ ID NO: 114047 - DNA, 25 bp, Artificial
  probe
  misc_feature (1)..(25): SEQ ID NO: 3399; WAN024CDH_at; Start 245; Stop 269
aacctccttttctaatgtgtaagat

SEQ ID NO: 114048 - DNA, 25 bp, Artificial
  probe
  misc_feature (1)..(25): SEQ ID NO: 3399; WAN024CDH_at; Start 112; Stop 136
gagtgtggattctttgatattagcg

SEQ ID NO: 114049 - DNA, 25 bp, Artificial
  probe
  misc_feature (1)..(25): SEQ ID NO: 3399; WAN024CDH_at; Start 47; Stop 71
ccttggaactctctagaataggttg

SEQ ID NO: 114050 - DNA, 25 bp, Artificial
  probe
  misc_feature (1)..(25): SEQ ID NO: 3399; WAN024CDH_at; Start 21; Stop 45
tcaaggagtagtatttgcgcatgcg

SEQ ID NO: 114051 - DNA, 25 bp, Artificial
  probe
  misc_feature (1)..(25): SEQ ID NO: 3399; WAN024CDH_at; Start 161; Stop 185
tcataaccataagaatcaccctgct

SEQ ID NO: 114052 - DNA, 25 bp, Artificial
  probe
  misc_feature (1)..(25): SEQ ID NO: 3399; WAN024CDH_at; Start 214; Stop 238
caaggcagaggatgttggaaagtac

SEQ ID NO: 114053 - DNA, 25 bp, Artificial
  probe
  misc_feature (1)..(25): SEQ ID NO: 3399; WAN024CDH_at; Start 14; Stop 38
ccgtttgtcaaggagtagtatttgc

SEQ ID NO: 114054 - DNA, 25 bp, Artificial
  probe
  misc_feature (1)..(25): SEQ ID NO: 3399; WAN024CDH_at; Start 9; Stop 33
taccaccgtttgtcaaggagtagta

SEQ ID NO: 114055 - DNA, 25 bp, Artificial
  probe
  misc_feature (1)..(25): SEQ ID NO: 3399; WAN024CDH_at; Start 199; Stop 223
gatgagaaattcaatcaaggcagag

SEQ ID NO: 114056 - DNA, 25 bp, Artificial
  probe
  misc_feature (1)..(25): SEQ ID NO: 3399; WAN024CDH_at; Start 29; Stop 53
tagtatttgcgcatgcgaccttgga

SEQ ID NO: 114057 - DNA, 25 bp, Artificial
  probe
  misc_feature (1)..(25): SEQ ID NO: 3399; WAN024CDH_at; Start 204; Stop 228
gaaattcaatcaaggcagaggatgt

SEQ ID NO: 114058 - DNA, 25 bp, Artificial
  probe
  misc_feature (1)..(25): SEQ ID NO: 3399; WAN024CDH_at; Start 194; Stop 218
gccaagatgagaaattcaatcaagg

SEQ ID NO: 114059 - DNA, 25 bp, Artificial
  probe
  misc_feature (1)..(25): SEQ ID NO: 3399; WAN024CDH_at; Start 140; Stop 164
agcttaatggtttggctaatctcat

SEQ ID NO: 114060 - DNA, 25 bp, Artificial
  probe
  misc_feature (1)..(25): SEQ ID NO: 3399; WAN024CDH_at; Start 94; Stop 118
ttttttgagaatgggatagagtgtg

SEQ ID NO: 114061 - DNA, 25 bp, Artificial
  probe
  misc_feature (1)..(25): SEQ ID NO: 3399; WAN024CDH_at; Start 2; Stop 26
tgctctataccaccgtttgtcaagg

SEQ ID NO: 114062 - DNA, 25 bp, Artificial
  probe
  misc_feature (1)..(25): SEQ ID NO: 3399; WAN024CDH_at; Start 238; Stop 262
catgggaaacctccttttctaatgt

SEQ ID NO: 114063 - DNA, 25 bp, Artificial
  probe
  misc_feature (1)..(25): SEQ ID NO: 3399; WAN024CDH_at; Start 79; Stop 103
gctattgccttccaattttttgaga

SEQ ID NO: 114064 - DNA, 25 bp, Artificial
  probe
  misc_feature (1)..(25): SEQ ID NO: 3399; WAN024CDH_at; Start 144; Stop 168
taatggtttggctaatctcataacc

SEQ ID NO: 114065 - DNA, 25 bp, Artificial
  probe
  misc_feature (1)..(25): SEQ ID NO: 3399; WAN024CDH_at; Start 40; Stop 64
catgcgaccttggaactctctagaa

SEQ ID NO: 114066 - DNA, 25 bp, Artificial
  probe
  misc_feature (1)..(25): SEQ ID NO: 3399; WAN024CDH_at; Start 167; Stop 191
ccataagaatcaccctgctccagta

SEQ ID NO: 114067 - DNA, 25 bp, Artificial
  probe
  misc_feature (1)..(25): SEQ ID NO: 3399; WAN024CDH_at; Start 226; Stop 250
tgttggaaagtacatgggaaacctc

SEQ ID NO: 114068 - DNA, 25 bp, Artificial
  probe
  misc_feature (1)..(25): SEQ ID NO: 3399; WAN024CDH_at; Start 25; Stop 49
ggagtagtatttgcgcatgcgacct

SEQ ID NO: 114069 - DNA, 25 bp, Artificial
  probe
  misc_feature (1)..(25): SEQ ID NO: 3399; WAN024CDH_at; Start 67; Stop 91
ggttgtcagaaagctattgccttcc

SEQ ID NO: 114070 - DNA, 25 bp, Artificial
  probe
  misc_feature (1)..(25): SEQ ID NO: 3399; WAN024CDH_at; Start 70; Stop 94
tgtcagaaagctattgccttccaat

SEQ ID NO: 114071 - DNA, 25 bp, Artificial
  probe
  misc_feature (1)..(25): SEQ ID NO: 3399; WAN024CDH_at; Start 43; Stop 67
gcgaccttggaactctctagaatag

SEQ ID NO: 114072 - DNA, 25 bp, Artificial
  probe
  misc_feature (1)..(25): SEQ ID NO: 3399; WAN024CDH_at; Start 209; Stop 233
tcaatcaaggcagaggatgttggaa

SEQ ID NO: 114073 - DNA, 25 bp, Artificial
  probe
  misc_feature (1)..(25): SEQ ID NO: 3399; WAN024CDH_at; Start 58; Stop 82
tctagaataggttgtcagaaagcta

SEQ ID NO: 114074 - DNA, 25 bp, Artificial
  probe
  misc_feature (1)..(25): SEQ ID NO: 3399; WAN024CDH_at; Start 34; Stop 58
tttgcgcatgcgaccttggaactct

SEQ ID NO: 114075 - DNA, 25 bp, Artificial
  probe
  misc_feature (1)..(25): SEQ ID NO: 3399; WAN024CDH_at; Start 85; Stop 109
gccttccaattttttgagaatggga

SEQ ID NO: 114076 - DNA, 25 bp, Artificial
  probe
  misc_feature (1)..(25): SEQ ID NO: 3399; WAN024CDH_at; Start 37; Stop 61
gcgcatgcgaccttggaactctcta

SEQ ID NO: 114077 - DNA, 25 bp, Artificial
  probe
  misc_feature (1)..(25): SEQ ID NO: 3399; WAN024CDH_at; Start 7; Stop 31
tataccaccgtttgtcaaggagtag

SEQ ID NO: 114078 - DNA, 25 bp, Artificial
  probe
  misc_feature (1)..(25): SEQ ID NO: 2781; WAN024CDI_at; Start 123; Stop 147
cacactctatcccattctcaaaaaa

SEQ ID NO: 114079 - DNA, 25 bp, Artificial
  probe
  misc_feature (1)..(25): SEQ ID NO: 2781; WAN024CDI_at; Start 215; Stop 239
ccttgacaaacggtggtatagagca

SEQ ID NO: 114080 - DNA, 25 bp, Artificial
  probe
  misc_feature (1)..(25): SEQ ID NO: 2781; WAN024CDI_at; Start 132; Stop 156
tcccattctcaaaaaattggaaggc

SEQ ID NO: 114081 - DNA, 25 bp, Artificial
  probe
  misc_feature (1)..(25): SEQ ID NO: 2781; WAN024CDI_at; Start 68; Stop 92
cttatggttatgagattagccaaac

SEQ ID NO: 114082 - DNA, 25 bp, Artificial
  probe
  misc_feature (1)..(25): SEQ ID NO: 2781; WAN024CDI_at; Start 266; Stop 290
cactctatacagacaccatcaatgg

SEQ ID NO: 114083 - DNA, 25 bp, Artificial
  probe
  misc_feature (1)..(25): SEQ ID NO: 2781; WAN024CDI_at; Start 203; Stop 227
gcaaatactactccttgacaaacgg

SEQ ID NO: 114084 - DNA, 25 bp, Artificial
  probe
  misc_feature (1)..(25): SEQ ID NO: 2781; WAN024CDI_at; Start 159; Stop 183
tagctttctgacaacctattctaga

SEQ ID NO: 114085 - DNA, 25 bp, Artificial
  probe
  misc_feature (1)..(25): SEQ ID NO: 2781; WAN024CDI_at; Start 281; Stop 305
ccatcaatggcatcatagaagggag

SEQ ID NO: 114086 - DNA, 25 bp, Artificial
  probe
  misc_feature (1)..(25): SEQ ID NO: 2781; WAN024CDI_at; Start 294; Stop 318
catagaagggagtatccgccatgac

SEQ ID NO: 114087 - DNA, 25 bp, Artificial
  probe
  misc_feature (1)..(25): SEQ ID NO: 2781; WAN024CDI_at; Start 187; Stop 211
ttccaaggtcgcatgcgcaaatact

SEQ ID NO: 114088 - DNA, 25 bp, Artificial
  probe
  misc_feature (1)..(25): SEQ ID NO: 2781; WAN024CDI_at; Start 165; Stop 189
tctgacaacctattctagagagttc

SEQ ID NO: 114089 - DNA, 25 bp, Artificial
  probe
  misc_feature (1)..(25): SEQ ID NO: 2781; WAN024CDI_at; Start 193; Stop 217
ggtcgcatgcgcaaatactactcct

SEQ ID NO: 114090 - DNA, 25 bp, Artificial
  probe
  misc_feature (1)..(25): SEQ ID NO: 2781; WAN024CDI_at; Start 76; Stop 100
tatgagattagccaaaccattaagc

SEQ ID NO: 114091 - DNA, 25 bp, Artificial
  probe
  misc_feature (1)..(25): SEQ ID NO: 2781; WAN024CDI_at; Start 23; Stop 47
ccttgattgaatttctcatcttggc

SEQ ID NO: 114092 - DNA, 25 bp, Artificial
  probe
  misc_feature (1)..(25): SEQ ID NO: 2781; WAN024CDI_at; Start 111; Stop 135
tatcaaagaatccacactctatccc

SEQ ID NO: 114093 - DNA, 25 bp, Artificial
  probe
  misc_feature (1)..(25): SEQ ID NO: 2781; WAN024CDI_at; Start 180; Stop 204
tagagagttccaaggtcgcatgcgc

SEQ ID NO: 114094 - DNA, 25 bp, Artificial
  probe
  misc_feature (1)..(25): SEQ ID NO: 2781; WAN024CDI_at; Start 297; Stop 321
agaagggagtatccgccatgacaag

SEQ ID NO: 114095 - DNA, 25 bp, Artificial
  probe
  misc_feature (1)..(25): SEQ ID NO: 2781; WAN024CDI_at; Start 233; Stop 257
tagagcagctcttgaccctaaaaga

SEQ ID NO: 114096 - DNA, 25 bp, Artificial
  probe
  misc_feature (1)..(25): SEQ ID NO: 2781; WAN024CDI_at; Start 269; Stop 293
tctatacagacaccatcaatggcat

SEQ ID NO: 114097 - DNA, 25 bp, Artificial
  probe
  misc_feature (1)..(25): SEQ ID NO: 2781; WAN024CDI_at; Start 211; Stop 235
tactccttgacaaacggtggtatag

SEQ ID NO: 114098 - DNA, 25 bp, Artificial
  probe
  misc_feature (1)..(25): SEQ ID NO: 2781; WAN024CDI_at; Start 104; Stop 128
tcgctaatatcaaagaatccacact

SEQ ID NO: 114099 - DNA, 25 bp, Artificial
  probe
  misc_feature (1)..(25): SEQ ID NO: 2781; WAN024CDI_at; Start 219; Stop 243
gacaaacggtggtatagagcagctc

SEQ ID NO: 114100 - DNA, 25 bp, Artificial
  probe
  misc_feature (1)..(25): SEQ ID NO: 2781; WAN024CDI_at; Start 170; Stop 194
caacctattctagagagttccaagg

SEQ ID NO: 114101 - DNA, 25 bp, Artificial
  probe
  misc_feature (1)..(25): SEQ ID NO: 2781; WAN024CDI_at; Start 138; Stop 162
tctcaaaaaattggaaggcaatagc

SEQ ID NO: 114102 - DNA, 25 bp, Artificial
  probe
  misc_feature (1)..(25): SEQ ID NO: 2781; WAN024CDI_at; Start 206; Stop 230
aatactactccttgacaaacggtgg

SEQ ID NO: 114103 - DNA, 25 bp, Artificial
  probe
  misc_feature (1)..(25): SEQ ID NO: 2781; WAN024CDI_at; Start 240; Stop 264
gctcttgaccctaaaagatgaatgg

SEQ ID NO: 114104 - DNA, 25 bp, Artificial
  probe
  misc_feature (1)..(25): SEQ ID NO: 2781; WAN024CDI_at; Start 285; Stop 309
caatggcatcatagaagggagtatc

SEQ ID NO: 114105 - DNA, 25 bp, Artificial
  probe
  misc_feature (1)..(25): SEQ ID NO: 2781; WAN024CDI_at; Start 175; Stop 199
tattctagagagttccaaggtcgca

SEQ ID NO: 114106 - DNA, 25 bp, Artificial
  probe
  misc_feature (1)..(25): SEQ ID NO: 2781; WAN024CDI_at; Start 150; Stop 174
ggaaggcaatagctttctgacaacc

SEQ ID NO: 114107 - DNA, 25 bp, Artificial
  probe
  misc_feature (1)..(25): SEQ ID NO: 2781; WAN024CDI_at; Start 57; Stop 81
gcagggtgattcttatggttatgag

SEQ ID NO: 114108 - DNA, 25 bp, Artificial
  probe
  misc_feature (1)..(25): SEQ ID NO: 2781; WAN024CDI_at; Start 183; Stop 207
agagttccaaggtcgcatgcgcaaa

SEQ ID NO: 114109 - DNA, 25 bp, Artificial
  probe
  misc_feature (1)..(25): SEQ ID NO: 2781; WAN024CDI_at; Start 289; Stop 313
ggcatcatagaagggagtatccgcc

SEQ ID NO: 114110 - DNA, 25 bp, Artificial
  probe
  misc_feature (1)..(25): SEQ ID NO: 2781; WAN024CDI_at; Start 221; Stop 245
caaacggtggtatagagcagctctt

SEQ ID NO: 114111 - DNA, 25 bp, Artificial
  probe
  misc_feature (1)..(25): SEQ ID NO: 2781; WAN024CDI_at; Start 50; Stop 74
tactggagcagggtgattcttatgg

SEQ ID NO: 114112 - DNA, 25 bp, Artificial
  probe
  misc_feature (1)..(25): SEQ ID NO: 1980; WAN024CDJ_at; Start 252; Stop 276
caaggcgatatgtaaaatttgtcgg

SEQ ID NO: 114113 - DNA, 25 bp, Artificial
  probe
  misc_feature (1)..(25): SEQ ID NO: 1980; WAN024CDJ_at; Start 123; Stop 147
gatgatacccagtatggaaactgca

SEQ ID NO: 114114 - DNA, 25 bp, Artificial
  probe
  misc_feature (1)..(25): SEQ ID NO: 1980; WAN024CDJ_at; Start 100; Stop 124
tcaactaaaaataggaatccgccga

SEQ ID NO: 114115 - DNA, 25 bp, Artificial
  probe
  misc_feature (1)..(25): SEQ ID NO: 1980; WAN024CDJ_at; Start 104; Stop 128
ctaaaaataggaatccgccgatgat

SEQ ID NO: 114116 - DNA, 25 bp, Artificial
  probe
  misc_feature (1)..(25): SEQ ID NO: 1980; WAN024CDJ_at; Start 132; Stop 156
cagtatggaaactgcaaagaaagcc

SEQ ID NO: 114117 - DNA, 25 bp, Artificial
  probe
  misc_feature (1)..(25): SEQ ID NO: 1980; WAN024CDJ_at; Start 190; Stop 214
aacagggtcacgaggatggcgattc

SEQ ID NO: 114118 - DNA, 25 bp, Artificial
  probe
  misc_feature (1)..(25): SEQ ID NO: 1980; WAN024CDJ_at; Start 8; Stop 32
gtaaaactagcgaagaagcaccgat

SEQ ID NO: 114119 - DNA, 25 bp, Artificial
  probe
  misc_feature (1)..(25): SEQ ID NO: 1980; WAN024CDJ_at; Start 80; Stop 104
gggcgaggacagtgaaactttcaac

SEQ ID NO: 114120 - DNA, 25 bp, Artificial
  probe
  misc_feature (1)..(25): SEQ ID NO: 1980; WAN024CDJ_at; Start 111; Stop 135
taggaatccgccgatgatacccagt

SEQ ID NO: 114121 - DNA, 25 bp, Artificial
  probe
  misc_feature (1)..(25): SEQ ID NO: 1980; WAN024CDJ_at; Start 34; Stop 58
gccagtaaaccagaaccaaaaatca

SEQ ID NO: 114122 - DNA, 25 bp, Artificial
  probe
  misc_feature (1)..(25): SEQ ID NO: 1980; WAN024CDJ_at; Start 77; Stop 101
cttgggcgaggacagtgaaactttc

SEQ ID NO: 114123 - DNA, 25 bp, Artificial
  probe
  misc_feature (1)..(25): SEQ ID NO: 1980; WAN024CDJ_at; Start 195; Stop 219
ggtcacgaggatggcgattcccaga

SEQ ID NO: 114124 - DNA, 25 bp, Artificial
  probe
  misc_feature (1)..(25): SEQ ID NO: 1980; WAN024CDJ_at; Start 126; Stop 150
gatacccagtatggaaactgcaaag

SEQ ID NO: 114125 - DNA, 25 bp, Artificial
  probe
  misc_feature (1)..(25): SEQ ID NO: 1980; WAN024CDJ_at; Start 237; Stop 261
tgcaaggagggctaacaaggcgata

SEQ ID NO: 114126 - DNA, 25 bp, Artificial
  probe
  misc_feature (1)..(25): SEQ ID NO: 1980; WAN024CDJ_at; Start 46; Stop 70
gaaccaaaaatcaagataaaggctg

SEQ ID NO: 114127 - DNA, 25 bp, Artificial
  probe
  misc_feature (1)..(25): SEQ ID NO: 1980; WAN024CDJ_at; Start 216; Stop 240
cagaggaatgccgataggtgctgca

SEQ ID NO: 114128 - DNA, 25 bp, Artificial
  probe
  misc_feature (1)..(25): SEQ ID NO: 1980; WAN024CDJ_at; Start 118; Stop 142
ccgccgatgatacccagtatggaaa

SEQ ID NO: 114129 - DNA, 25 bp, Artificial
  probe
  misc_feature (1)..(25): SEQ ID NO: 1980; WAN024CDJ_at; Start 84; Stop 108
gaggacagtgaaactttcaactaaa

SEQ ID NO: 114130 - DNA, 25 bp, Artificial
  probe
  misc_feature (1)..(25): SEQ ID NO: 1980; WAN024CDJ_at; Start 22; Stop 46
gaagcaccgatagccagtaaaccag

SEQ ID NO: 114131 - DNA, 25 bp, Artificial
  probe
  misc_feature (1)..(25): SEQ ID NO: 1980; WAN024CDJ_at; Start 144; Stop 168
tgcaaagaaagccagaatgacagtc

SEQ ID NO: 114132 - DNA, 25 bp, Artificial
  probe
  misc_feature (1)..(25): SEQ ID NO: 1980; WAN024CDJ_at; Start 61; Stop 85
ataaaggctgatttggcttgggcga

SEQ ID NO: 114133 - DNA, 25 bp, Artificial
  probe
  misc_feature (1)..(25): SEQ ID NO: 1980; WAN024CDJ_at; Start 15; Stop 39
tagcgaagaagcaccgatagccagt

SEQ ID NO: 114134 - DNA, 25 bp, Artificial
  probe
  misc_feature (1)..(25): SEQ ID NO: 1980; WAN024CDJ_at; Start 230; Stop 254
taggtgctgcaaggagggctaacaa

SEQ ID NO: 114135 - DNA, 25 bp, Artificial
  probe
  misc_feature (1)..(25): SEQ ID NO: 1980; WAN024CDJ_at; Start 212; Stop 236
ttcccagaggaatgccgataggtgc

SEQ ID NO: 114136 - DNA, 25 bp, Artificial
  probe
  misc_feature (1)..(25): SEQ ID NO: 1980; WAN024CDJ_at; Start 158; Stop 182
gaatgacagtcaaagcggctacaag

SEQ ID NO: 114137 - DNA, 25 bp, Artificial
  probe
  misc_feature (1)..(25): SEQ ID NO: 1980; WAN024CDJ_at; Start 200; Stop 224
cgaggatggcgattcccagaggaat

SEQ ID NO: 114138 - DNA, 25 bp, Artificial
  probe
  misc_feature (1)..(25): SEQ ID NO: 1980; WAN024CDJ_at; Start 135; Stop 159
tatggaaactgcaaagaaagccaga

SEQ ID NO: 114139 - DNA, 25 bp, Artificial
  probe
  misc_feature (1)..(25): SEQ ID NO: 1980; WAN024CDJ_at; Start 2; Stop 26
tgccaagtaaaactagcgaagaagc

SEQ ID NO: 114140 - DNA, 25 bp, Artificial
  probe
  misc_feature (1)..(25): SEQ ID NO: 1980; WAN024CDJ_at; Start 256; Stop 280
gcgatatgtaaaatttgtcggttat

SEQ ID NO: 114141 - DNA, 25 bp, Artificial
  probe
  misc_feature (1)..(25): SEQ ID NO: 1980; WAN024CDJ_at; Start 150; Stop 174
gaaagccagaatgacagtcaaagcg

SEQ ID NO: 114142 - DNA, 25 bp, Artificial
  probe
  misc_feature (1)..(25): SEQ ID NO: 1980; WAN024CDJ_at; Start 25; Stop 49
gcaccgatagccagtaaaccagaac

SEQ ID NO: 114143 - DNA, 25 bp, Artificial
  probe
  misc_feature (1)..(25): SEQ ID NO: 1980; WAN024CDJ_at; Start 29; Stop 53
cgatagccagtaaaccagaaccaaa

SEQ ID NO: 114144 - DNA, 25 bp, Artificial
  probe
  misc_feature (1)..(25): SEQ ID NO: 1980; WAN024CDJ_at; Start 243; Stop 267
gagggctaacaaggcgatatgtaaa

SEQ ID NO: 114145 - DNA, 25 bp, Artificial
  probe
  misc_feature (1)..(25): SEQ ID NO: 1980; WAN024CDJ_at; Start 114; Stop 138
gaatccgccgatgatacccagtatg

SEQ ID NO: 114146 - DNA, 25 bp, Artificial
  probe
  misc_feature (1)..(25): SEQ ID NO: 1326; WAN024CDK_at; Start 87; Stop 111
cagagagctctttgacgatgctgga

SEQ ID NO: 114147 - DNA, 25 bp, Artificial
  probe
  misc_feature (1)..(25): SEQ ID NO: 1326; WAN024CDK_at; Start 159; Stop 183
agcggcccacgaagttctatccaat

SEQ ID NO: 114148 - DNA, 25 bp, Artificial
  probe
  misc_feature (1)..(25): SEQ ID NO: 1326; WAN024CDK_at; Start 478; Stop 502
gcttcttcgctagttttacttggca

SEQ ID NO: 114149 - DNA, 25 bp, Artificial
  probe
  misc_feature (1)..(25): SEQ ID NO: 1326; WAN024CDK_at; Start 60; Stop 84
tgaccgtatcgaagccatggactat

SEQ ID NO: 114150 - DNA, 25 bp, Artificial
  probe
  misc_feature (1)..(25): SEQ ID NO: 1326; WAN024CDK_at; Start 290; Stop 314
gaatcgccatcctcgtgaccctgtt

SEQ ID NO: 114151 - DNA, 25 bp, Artificial
  probe
  misc_feature (1)..(25): SEQ ID NO: 1326; WAN024CDK_at; Start 287; Stop 311
tgggaatcgccatcctcgtgaccct

SEQ ID NO: 114152 - DNA, 25 bp, Artificial
  probe
  misc_feature (1)..(25): SEQ ID NO: 1326; WAN024CDK_at; Start 419; Stop 443
tcgcccaagccaaatcagcctttat

SEQ ID NO: 114153 - DNA, 25 bp, Artificial
  probe
  misc_feature (1)..(25): SEQ ID NO: 1326; WAN024CDK_at; Start 12; Stop 36
tgaatacctgactcagctagaactc

SEQ ID NO: 114154 - DNA, 25 bp, Artificial
  probe
  misc_feature (1)..(25): SEQ ID NO: 1326; WAN024CDK_at; Start 368; Stop 392
tactgggtatcatcggcggattcct

SEQ ID NO: 114155 - DNA, 25 bp, Artificial
  probe
  misc_feature (1)..(25): SEQ ID NO: 1326; WAN024CDK_at; Start 452; Stop 476
ttggttctggtttactggctatcgg

SEQ ID NO: 114156 - DNA, 25 bp, Artificial
  probe
  misc_feature (1)..(25): SEQ ID NO: 1326; WAN024CDK_at; Start 21; Stop 45
gactcagctagaactctatctcaag

SEQ ID NO: 114157 - DNA, 25 bp, Artificial
  probe
  misc_feature (1)..(25): SEQ ID NO: 1326; WAN024CDK_at; Start 575; Stop 599
gaggtaatcagcatgcgtaactaat

SEQ ID NO: 114158 - DNA, 25 bp, Artificial
  probe
  misc_feature (1)..(25): SEQ ID NO: 1326; WAN024CDK_at; Start 122; Stop 146
aagaagaactcatcgctagtttggg

SEQ ID NO: 114159 - DNA, 25 bp, Artificial
  probe
  misc_feature (1)..(25): SEQ ID NO: 1326; WAN024CDK_at; Start 113; Stop 137
tcgaaggagaagaagaactcatcgc

SEQ ID NO: 114160 - DNA, 25 bp, Artificial
  probe
  misc_feature (1)..(25): SEQ ID NO: 1326; WAN024CDK_at; Start 280; Stop 304
attcctctgggaatcgccatcctcg

SEQ ID NO: 114161 - DNA, 25 bp, Artificial
  probe
  misc_feature (1)..(25): SEQ ID NO: 1326; WAN024CDK_at; Start 336; Stop 360
gactgtcattctggctttctttgca

SEQ ID NO: 114162 - DNA, 25 bp, Artificial
  probe
  misc_feature (1)..(25): SEQ ID NO: 1326; WAN024CDK_at; Start 525; Stop 549
cggtctactcattgttcgtctggta

SEQ ID NO: 114163 - DNA, 25 bp, Artificial
  probe
  misc_feature (1)..(25): SEQ ID NO: 1326; WAN024CDK_at; Start 54; Stop 78
tgaagctgaccgtatcgaagccatg

SEQ ID NO: 114164 - DNA, 25 bp, Artificial
  probe
  misc_feature (1)..(25): SEQ ID NO: 1326; WAN024CDK_at; Start 380; Stop 404
tcggcggattcctatttttagttga

SEQ ID NO: 114165 - DNA, 25 bp, Artificial
  probe
  misc_feature (1)..(25): SEQ ID NO: 1326; WAN024CDK_at; Start 515; Stop 539
ctcgcttcttcggtctactcattgt

SEQ ID NO: 114166 - DNA, 25 bp, Artificial
  probe
  misc_feature (1)..(25): SEQ ID NO: 1326; WAN024CDK_at; Start 434; Stop 458
cagcctttatcttgatttttggttc

SEQ ID NO: 114167 - DNA, 25 bp, Artificial
  probe
  misc_feature (1)..(25): SEQ ID NO: 1326; WAN024CDK_at; Start 251; Stop 275
tgttagccctccttgcagcacctat

SEQ ID NO: 114168 - DNA, 25 bp, Artificial
  probe
  misc_feature (1)..(25): SEQ ID NO: 1326; WAN024CDK_at; Start 362; Stop 386
tttccatactgggtatcatcggcgg

SEQ ID NO: 114169 - DNA, 25 bp, Artificial
  probe
  misc_feature (1)..(25): SEQ ID NO: 1326; WAN024CDK_at; Start 569; Stop 593
gaaagagaggtaatcagcatgcgta

SEQ ID NO: 114170 - DNA, 25 bp, Artificial
  probe
  misc_feature (1)..(25): SEQ ID NO: 1326; WAN024CDK_at; Start 243; Stop 267
tatcgccttgttagccctccttgca

SEQ ID NO: 114171 - DNA, 25 bp, Artificial
  probe
  misc_feature (1)..(25): SEQ ID NO: 1326; WAN024CDK_at; Start 234; Stop 258
aattttacatatcgccttgttagcc

SEQ ID NO: 114172 - DNA, 25 bp, Artificial
  probe
  misc_feature (1)..(25): SEQ ID NO: 1326; WAN024CDK_at; Start 348; Stop 372
ggctttctttgcagtttccatactg

SEQ ID NO: 114173 - DNA, 25 bp, Artificial
  probe
  misc_feature (1)..(25): SEQ ID NO: 1326; WAN024CDK_at; Start 166; Stop 190
cacgaagttctatccaatcttctcg

SEQ ID NO: 114174 - DNA, 25 bp, Artificial
  probe
  misc_feature (1)..(25): SEQ ID NO: 1326; WAN024CDK_at; Start 322; Stop 346
cttgtagccgctttgactgtcattc

SEQ ID NO: 114175 - DNA, 25 bp, Artificial
  probe
  misc_feature (1)..(25): SEQ ID NO: 1326; WAN024CDK_at; Start 538; Stop 562
gttcgtctggtacaatttgttctta

SEQ ID NO: 114176 - DNA, 25 bp, Artificial
  probe
  misc_feature (1)..(25): SEQ ID NO: 1326; WAN024CDK_at; Start 268; Stop 292
gcacctatcggcattcctctgggaa

SEQ ID NO: 114177 - DNA, 25 bp, Artificial
  probe
  misc_feature (1)..(25): SEQ ID NO: 1326; WAN024CDK_at; Start 485; Stop 509
cgctagttttacttggcatttccta

SEQ ID NO: 114178 - DNA, 25 bp, Artificial
  probe
  misc_feature (1)..(25): SEQ ID NO: 1326; WAN024CDK_at; Start 464; Stop 488
tactggctatcggtgcttcttcgct

SEQ ID NO: 114179 - DNA, 25 bp, Artificial
  probe
  misc_feature (1)..(25): SEQ ID NO: 1326; WAN024CDK_at; Start 73; Stop 97
gccatggactatttcagagagctct

SEQ ID NO: 114180 - DNA, 25 bp, Artificial
  probe
  misc_feature (1)..(25): SEQ ID NO: 5672; WAN024CDL_at; Start 95; Stop 119
caaaccaggttgaggagggatactc

SEQ ID NO: 114181 - DNA, 25 bp, Artificial
  probe
  misc_feature (1)..(25): SEQ ID NO: 5672; WAN024CDL_at; Start 1317; Stop 1341
tgaactagaaaacgatccagcactc

SEQ ID NO: 114182 - DNA, 25 bp, Artificial
  probe
  misc_feature (1)..(25): SEQ ID NO: 5672; WAN024CDL_at; Start 300; Stop 324
tcttagccgtagtcaaaaagacacg

SEQ ID NO: 114183 - DNA, 25 bp, Artificial
  probe
  misc_feature (1)..(25): SEQ ID NO: 5672; WAN024CDL_at; Start 284; Stop 308
tctataagctggaccgtcttagccg

SEQ ID NO: 114184 - DNA, 25 bp, Artificial
  probe
  misc_feature (1)..(25): SEQ ID NO: 5672; WAN024CDL_at; Start 1010; Stop 1034
cgctgagaggcgttactacctacaa

SEQ ID NO: 114185 - DNA, 25 bp, Artificial
  probe
  misc_feature (1)..(25): SEQ ID NO: 5672; WAN024CDL_at; Start 1261; Stop 1285
gaggaattacagagcaagtcagccg

SEQ ID NO: 114186 - DNA, 25 bp, Artificial
  probe
  misc_feature (1)..(25): SEQ ID NO: 5672; WAN024CDL_at; Start 510; Stop 534
taaatccatgatgtgggctaagaca

SEQ ID NO: 114187 - DNA, 25 bp, Artificial
  probe
  misc_feature (1)..(25): SEQ ID NO: 5672; WAN024CDL_at; Start 1212; Stop 1236
gaaactgagcagacttaacgacctc

SEQ ID NO: 114188 - DNA, 25 bp, Artificial
  probe
  misc_feature (1)..(25): SEQ ID NO: 5672; WAN024CDL_at; Start 209; Stop 233
gatccaatactgacagaccagcgct

SEQ ID NO: 114189 - DNA, 25 bp, Artificial
  probe
  misc_feature (1)..(25): SEQ ID NO: 5672; WAN024CDL_at; Start 1446; Stop 1470
caaggttaaggtgacagctgaggac

SEQ ID NO: 114190 - DNA, 25 bp, Artificial
  probe
  misc_feature (1)..(25): SEQ ID NO: 5672; WAN024CDL_at; Start 224; Stop 248
gaccagcgctagaaagtcttatcaa

SEQ ID NO: 114191 - DNA, 25 bp, Artificial
  probe
  misc_feature (1)..(25): SEQ ID NO: 5672; WAN024CDL_at; Start 666; Stop 690
tgagaaatacccaaagcatgtgcct

SEQ ID NO: 114192 - DNA, 25 bp, Artificial
  probe
  misc_feature (1)..(25): SEQ ID NO: 5672; WAN024CDL_at; Start 697; Stop 721
tatcgggcggtcagaaccatactcg

SEQ ID NO: 114193 - DNA, 25 bp, Artificial
  probe
  misc_feature (1)..(25): SEQ ID NO: 5672; WAN024CDL_at; Start 371; Stop 395
tgagcttgcaggagaactttgacac

SEQ ID NO: 114194 - DNA, 25 bp, Artificial
  probe
  misc_feature (1)..(25): SEQ ID NO: 5672; WAN024CDL_at; Start 1365; Stop 1389
tatgaggaaactgctaaacgctgag

SEQ ID NO: 114195 - DNA, 25 bp, Artificial
  probe
  misc_feature (1)..(25): SEQ ID NO: 5672; WAN024CDL_at; Start 762; Stop 786
aatttatccaggtaatcatgagccg

SEQ ID NO: 114196 - DNA, 25 bp, Artificial
  probe
  misc_feature (1)..(25): SEQ ID NO: 5672; WAN024CDL_at; Start 1279; Stop 1303
tcagccgaatttataagcatgaggg

SEQ ID NO: 114197 - DNA, 25 bp, Artificial
  probe
  misc_feature (1)..(25): SEQ ID NO: 5672; WAN024CDL_at; Start 569; Stop 593
cagtgaccatcaatccagctcaggc

SEQ ID NO: 114198 - DNA, 25 bp, Artificial
  probe
  misc_feature (1)..(25): SEQ ID NO: 5672; WAN024CDL_at; Start 1066; Stop 1090
tacaaagacaagctagaggcctatg

SEQ ID NO: 114199 - DNA, 25 bp, Artificial
  probe
  misc_feature (1)..(25): SEQ ID NO: 5672; WAN024CDL_at; Start 1405; Stop 1429
gactacgaaagtcaaaaggtgcttg

SEQ ID NO: 114200 - DNA, 25 bp, Artificial
  probe
  misc_feature (1)..(25): SEQ ID NO: 5672; WAN024CDL_at; Start 317; Stop 341
aagacacgcttcacttgattgagga

SEQ ID NO: 114201 - DNA, 25 bp, Artificial
  probe
  misc_feature (1)..(25): SEQ ID NO: 5672; WAN024CDL_at; Start 147; Stop 171
tagctactgcgacattaaagactgg

SEQ ID NO: 114202 - DNA, 25 bp, Artificial
  probe
  misc_feature (1)..(25): SEQ ID NO: 5672; WAN024CDL_at; Start 1241; Stop 1265
tagacgaccgtatcacgctggagga

SEQ ID NO: 114203 - DNA, 25 bp, Artificial
  probe
  misc_feature (1)..(25): SEQ ID NO: 5672; WAN024CDL_at; Start 465; Stop 489
caaggaacgcatgcaacttggcaag

SEQ ID NO: 114204 - DNA, 25 bp, Artificial
  probe
  misc_feature (1)..(25): SEQ ID NO: 5672; WAN024CDL_at; Start 547; Stop 571
gattaccacaaagagacaggcacag

SEQ ID NO: 114205 - DNA, 25 bp, Artificial
  probe
  misc_feature (1)..(25): SEQ ID NO: 5672; WAN024CDL_at; Start 80; Stop 104
tcagggtatcgacgacaaaccaggt

SEQ ID NO: 114206 - DNA, 25 bp, Artificial
  probe
  misc_feature (1)..(25): SEQ ID NO: 5672; WAN024CDL_at; Start 486; Stop 510
caagctaggacgtgccaaatctggt

SEQ ID NO: 114207 - DNA, 25 bp, Artificial
  probe
  misc_feature (1)..(25): SEQ ID NO: 5672; WAN024CDL_at; Start 890; Stop 914
ttttatccggtatcgcccaatgtgg

SEQ ID NO: 114208 - DNA, 25 bp, Artificial
  probe
  misc_feature (1)..(25): SEQ ID NO: 5672; WAN024CDL_at; Start 451; Stop 475
gaaagggagcaaatcaaggaacgca

SEQ ID NO: 114209 - DNA, 25 bp, Artificial
  probe
  misc_feature (1)..(25): SEQ ID NO: 5672; WAN024CDL_at; Start 1155; Stop 1179
caatgctgagaccatagaccgtgag

SEQ ID NO: 114210 - DNA, 25 bp, Artificial
  probe
  misc_feature (1)..(25): SEQ ID NO: 5672; WAN024CDL_at; Start 842; Stop 866
gaacagcagcagagaatgtcaatcc

SEQ ID NO: 114211 - DNA, 25 bp, Artificial
  probe
  misc_feature (1)..(25): SEQ ID NO: 5672; WAN024CDL_at; Start 906; Stop 930
ccaatgtggatattgtggcgctcct

SEQ ID NO: 114212 - DNA, 25 bp, Artificial
  probe
  misc_feature (1)..(25): SEQ ID NO: 5672; WAN024CDL_at; Start 189; Stop 213
tactgatggaggtttctcaggatcc

SEQ ID NO: 114213 - DNA, 25 bp, Artificial
  probe
  misc_feature (1)..(25): SEQ ID NO: 5672; WAN024CDL_at; Start 1114; Stop 1138
caagatgacgctgattacctggaca

SEQ ID NO: 114214 - DNA, 25 bp, Artificial
  probe
  misc_feature (1)..(25): SEQ ID NO: 446; WAN024CDM_at; Start 363; Stop 387
tgggattcttcatatcgcaagtagc

SEQ ID NO: 114215 - DNA, 25 bp, Artificial
  probe
  misc_feature (1)..(25): SEQ ID NO: 446; WAN024CDM_at; Start 678; Stop 702
tgaactgactgccaaagattatctc

SEQ ID NO: 114216 - DNA, 25 bp, Artificial
  probe
  misc_feature (1)..(25): SEQ ID NO: 446; WAN024CDM_at; Start 153; Stop 177
gctaacctttggcaaggaagtcgaa

SEQ ID NO: 114217 - DNA, 25 bp, Artificial
  probe
  misc_feature (1)..(25): SEQ ID NO: 446; WAN024CDM_at; Start 520; Stop 544
aacagctatatcctccgaattgaag

SEQ ID NO: 114218 - DNA, 25 bp, Artificial
  probe
  misc_feature (1)..(25): SEQ ID NO: 446; WAN024CDM_at; Start 379; Stop 403
gcaagtagctactctagtcgttttg

SEQ ID NO: 114219 - DNA, 25 bp, Artificial
  probe
  misc_feature (1)..(25): SEQ ID NO: 446; WAN024CDM_at; Start 799; Stop 823
tcaagaggtacggaattaagcaacc

SEQ ID NO: 114220 - DNA, 25 bp, Artificial
  probe
  misc_feature (1)..(25): SEQ ID NO: 446; WAN024CDM_at; Start 220; Stop 244
gactctttcgatgatcaaatccaca

SEQ ID NO: 114221 - DNA, 25 bp, Artificial
  probe
  misc_feature (1)..(25): SEQ ID NO: 446; WAN024CDM_at; Start 27; Stop 51
tctcatctttggtgtggtgactacc

SEQ ID NO: 114222 - DNA, 25 bp, Artificial
  probe
  misc_feature (1)..(25): SEQ ID NO: 446; WAN024CDM_at; Start 334; Stop 358
gaaactccgtttctctcttctggaa

SEQ ID NO: 114223 - DNA, 25 bp, Artificial
  probe
  misc_feature (1)..(25): SEQ ID NO: 446; WAN024CDM_at; Start 787; Stop 811
gaaaagcctgaatcaagaggtacgg

SEQ ID NO: 114224 - DNA, 25 bp, Artificial
  probe
  misc_feature (1)..(25): SEQ ID NO: 446; WAN024CDM_at; Start 888; Stop 912
tctaatatccacaccaagcagacgt

SEQ ID NO: 114225 - DNA, 25 bp, Artificial
  probe
  misc_feature (1)..(25): SEQ ID NO: 446; WAN024CDM_at; Start 844; Stop 868
gatgtcaaggatcaactcattgcga

SEQ ID NO: 114226 - DNA, 25 bp, Artificial
  probe
  misc_feature (1)..(25): SEQ ID NO: 446; WAN024CDM_at; Start 598; Stop 622
gatacagttcttacagatagtcagc

SEQ ID NO: 114227 - DNA, 25 bp, Artificial
  probe
  misc_feature (1)..(25): SEQ ID NO: 446; WAN024CDM_at; Start 302; Stop 326
gaactctgagtctcactgataagaa

SEQ ID NO: 114228 - DNA, 25 bp, Artificial
  probe
  misc_feature (1)..(25): SEQ ID NO: 446; WAN024CDM_at; Start 772; Stop 796
ttccaattcacaagagaaaagcctg

SEQ ID NO: 114229 - DNA, 25 bp, Artificial
  probe
  misc_feature (1)..(25): SEQ ID NO: 446; WAN024CDM_at; Start 562; Stop 586
agtaaactcacaacgcccaatatcg

SEQ ID NO: 114230 - DNA, 25 bp, Artificial
  probe
  misc_feature (1)..(25): SEQ ID NO: 446; WAN024CDM_at; Start 482; Stop 506
tcataaatgctagccttgaaaatgc

SEQ ID NO: 114231 - DNA, 25 bp, Artificial
  probe
  misc_feature (1)..(25): SEQ ID NO: 446; WAN024CDM_at; Start 710; Stop 734
tcctagaccagaaagaaagccaacg

SEQ ID NO: 114232 - DNA, 25 bp, Artificial
  probe
  misc_feature (1)..(25): SEQ ID NO: 446; WAN024CDM_at; Start 541; Stop 565
gaaggaagtcgtatcaaaaacagta

SEQ ID NO: 114233 - DNA, 25 bp, Artificial
  probe
  misc_feature (1)..(25): SEQ ID NO: 446; WAN024CDM_at; Start 85; Stop 109
caatctgacgggattaagagcctac

SEQ ID NO: 114234 - DNA, 25 bp, Artificial
  probe
  misc_feature (1)..(25): SEQ ID NO: 446; WAN024CDM_at; Start 284; Stop 308
tcaccaatcagaacgatagaactct

SEQ ID NO: 114235 - DNA, 25 bp, Artificial
  probe
  misc_feature (1)..(25): SEQ ID NO: 446; WAN024CDM_at; Start 120; Stop 144
caaagaacctgtctatgatagccgt

SEQ ID NO: 114236 - DNA, 25 bp, Artificial
  probe
  misc_feature (1)..(25): SEQ ID NO: 446; WAN024CDM_at; Start 438; Stop 462
tctaaaagggatcaacatctcagcc

SEQ ID NO: 114237 - DNA, 25 bp, Artificial
  probe
  misc_feature (1)..(25): SEQ ID NO: 446; WAN024CDM_at; Start 467; Stop 491
gcggacaaaccaccatcataaatgc

SEQ ID NO: 114238 - DNA, 25 bp, Artificial
  probe
  misc_feature (1)..(25): SEQ ID NO: 446; WAN024CDM_at; Start 72; Stop 96
ttttgtaggtatccaatctgacggg

SEQ ID NO: 114239 - DNA, 25 bp, Artificial
  probe
  misc_feature (1)..(25): SEQ ID NO: 446; WAN024CDM_at; Start 613; Stop 637
gatagtcagctagagtcaacagaga

SEQ ID NO: 114240 - DNA, 25 bp, Artificial
  probe
  misc_feature (1)..(25): SEQ ID NO: 446; WAN024CDM_at; Start 133; Stop 157
tatgatagccgtacggaaaagctaa

SEQ ID NO: 114241 - DNA, 25 bp, Artificial
  probe
  misc_feature (1)..(25): SEQ ID NO: 446; WAN024CDM_at; Start 319; Stop 343
gataagaaactgtctgaaactccgt

SEQ ID NO: 114242 - DNA, 25 bp, Artificial
  probe
  misc_feature (1)..(25): SEQ ID NO: 446; WAN024CDM_at; Start 7; Stop 31
cgtaaatggacaaaaggatttctca

SEQ ID NO: 114243 - DNA, 25 bp, Artificial
  probe
  misc_feature (1)..(25): SEQ ID NO: 446; WAN024CDM_at; Start 632; Stop 656
cagagaatcacttccacgctgaaaa

SEQ ID NO: 114244 - DNA, 25 bp, Artificial
  probe
  misc_feature (1)..(25): SEQ ID NO: 446; WAN024CDM_at; Start 740; Stop 764
actgggacatctcaagcaactatgg

SEQ ID NO: 114245 - DNA, 25 bp, Artificial
  probe
  misc_feature (1)..(25): SEQ ID NO: 446; WAN024CDM_at; Start 724; Stop 748
gaaagccaacgaattaactgggaca

SEQ ID NO: 114246 - DNA, 25 bp, Artificial
  probe
  misc_feature (1)..(25): SEQ ID NO: 446; WAN024CDM_at; Start 647; Stop 671
acgctgaaaatatccaagtccatgg

SEQ ID NO: 114247 - DNA, 25 bp, Artificial
  probe
  misc_feature (1)..(25): SEQ ID NO: 446; WAN024CDM_at; Start 100; Stop 124
aagagcctactttccatgtccaaag

SEQ ID NO: 114248 - DNA, 25 bp, Artificial
  probe
  misc_feature (1)..(25): SEQ ID NO: 2023; WAN024CDN_at; Start 159; Stop 183
tcagccttgtctgcaacctcttgag

SEQ ID NO: 114249 - DNA, 25 bp, Artificial
  probe
  misc_feature (1)..(25): SEQ ID NO: 2023; WAN024CDN_at; Start 234; Stop 258
tcaaaccattcttgtttcatggtag

SEQ ID NO: 114250 - DNA, 25 bp, Artificial
  probe
  misc_feature (1)..(25): SEQ ID NO: 2023; WAN024CDN_at; Start 66; Stop 90
tgctggctttccaattcgacttcag

SEQ ID NO: 114251 - DNA, 25 bp, Artificial
  probe
  misc_feature (1)..(25): SEQ ID NO: 2023; WAN024CDN_at; Start 60; Stop 84
tcttcttgctggctttccaattcga

SEQ ID NO: 114252 - DNA, 25 bp, Artificial
  probe
  misc_feature (1)..(25): SEQ ID NO: 2023; WAN024CDN_at; Start 153; Stop 177
gtttcttcagccttgtctgcaacct

SEQ ID NO: 114253 - DNA, 25 bp, Artificial
  probe
  misc_feature (1)..(25): SEQ ID NO: 2023; WAN024CDN_at; Start 133; Stop 157
gtgtatcgagatcggctatcgtttc

SEQ ID NO: 114254 - DNA, 25 bp, Artificial
  probe
  misc_feature (1)..(25): SEQ ID NO: 2023; WAN024CDN_at; Start 162; Stop 186
gccttgtctgcaacctcttgagctt

SEQ ID NO: 114255 - DNA, 25 bp, Artificial
  probe
  misc_feature (1)..(25): SEQ ID NO: 2023; WAN024CDN_at; Start 218; Stop 242
tacaaaatcattactttcaaaccat

SEQ ID NO: 114256 - DNA, 25 bp, Artificial
  probe
  misc_feature (1)..(25): SEQ ID NO: 2023; WAN024CDN_at; Start 53; Stop 77
aattttctcttcttgctggctttcc

SEQ ID NO: 114257 - DNA, 25 bp, Artificial
  probe
  misc_feature (1)..(25): SEQ ID NO: 2023; WAN024CDN_at; Start 177; Stop 201
tcttgagcttgctcttcaggcttgt

SEQ ID NO: 114258 - DNA, 25 bp, Artificial
  probe
  misc_feature (1)..(25): SEQ ID NO: 2023; WAN024CDN_at; Start 138; Stop 162
tcgagatcggctatcgtttcttcag

SEQ ID NO: 114259 - DNA, 25 bp, Artificial
  probe
  misc_feature (1)..(25): SEQ ID NO: 2023; WAN024CDN_at; Start 126; Stop 150
tcaattggtgtatcgagatcggcta

SEQ ID NO: 114260 - DNA, 25 bp, Artificial
  probe
  misc_feature (1)..(25): SEQ ID NO: 2023; WAN024CDN_at; Start 192; Stop 216
tcaggcttgttcttgcttgttgttt

SEQ ID NO: 114261 - DNA, 25 bp, Artificial
  probe
  misc_feature (1)..(25): SEQ ID NO: 2023; WAN024CDN_at; Start 140; Stop 164
gagatcggctatcgtttcttcagcc

SEQ ID NO: 114262 - DNA, 25 bp, Artificial
  probe
  misc_feature (1)..(25): SEQ ID NO: 2023; WAN024CDN_at; Start 131; Stop 155
tggtgtatcgagatcggctatcgtt

SEQ ID NO: 114263 - DNA, 25 bp, Artificial
  probe
  misc_feature (1)..(25): SEQ ID NO: 2023; WAN024CDN_at; Start 124; Stop 148
tttcaattggtgtatcgagatcggc

SEQ ID NO: 114264 - DNA, 25 bp, Artificial
  probe
  misc_feature (1)..(25): SEQ ID NO: 2023; WAN024CDN_at; Start 172; Stop 196
caacctcttgagcttgctcttcagg

SEQ ID NO: 114265 - DNA, 25 bp, Artificial
  probe
  misc_feature (1)..(25): SEQ ID NO: 2023; WAN024CDN_at; Start 189; Stop 213
tcttcaggcttgttcttgcttgttg

SEQ ID NO: 114266 - DNA, 25 bp, Artificial
  probe
  misc_feature (1)..(25): SEQ ID NO: 2023; WAN024CDN_at; Start 203; Stop 227
cttgcttgttgtttttacaaaatca

SEQ ID NO: 114267 - DNA, 25 bp, Artificial
  probe
  misc_feature (1)..(25): SEQ ID NO: 2023; WAN024CDN_at; Start 23; Stop 47
tgttctcgcttcactgtcttcagga

SEQ ID NO: 114268 - DNA, 25 bp, Artificial
  probe
  misc_feature (1)..(25): SEQ ID NO: 2023; WAN024CDN_at; Start 186; Stop 210
tgctcttcaggcttgttcttgcttg

SEQ ID NO: 114269 - DNA, 25 bp, Artificial
  probe
  misc_feature (1)..(25): SEQ ID NO: 2023; WAN024CDN_at; Start 128; Stop 152
aattggtgtatcgagatcggctatc

SEQ ID NO: 114270 - DNA, 25 bp, Artificial
  probe
  misc_feature (1)..(25): SEQ ID NO: 2023; WAN024CDN_at; Start 70; Stop 94
ggctttccaattcgacttcagcttg

SEQ ID NO: 114271 - DNA, 25 bp, Artificial
  probe
  misc_feature (1)..(25): SEQ ID NO: 2023; WAN024CDN_at; Start 149; Stop 173
tatcgtttcttcagccttgtctgca

SEQ ID NO: 114272 - DNA, 25 bp, Artificial
  probe
  misc_feature (1)..(25): SEQ ID NO: 2023; WAN024CDN_at; Start 223; Stop 247
aatcattactttcaaaccattcttg

SEQ ID NO: 114273 - DNA, 25 bp, Artificial
  probe
  misc_feature (1)..(25): SEQ ID NO: 2023; WAN024CDN_at; Start 98; Stop 122
gacttcctcctctaactgagtattt

SEQ ID NO: 114274 - DNA, 25 bp, Artificial
  probe
  misc_feature (1)..(25): SEQ ID NO: 2023; WAN024CDN_at; Start 24; Stop 48
gttctcgcttcactgtcttcaggag

SEQ ID NO: 114275 - DNA, 25 bp, Artificial
  probe
  misc_feature (1)..(25): SEQ ID NO: 2023; WAN024CDN_at; Start 142; Stop 166
gatcggctatcgtttcttcagcctt

SEQ ID NO: 114276 - DNA, 25 bp, Artificial
  probe
  misc_feature (1)..(25): SEQ ID NO: 2023; WAN024CDN_at; Start 180; Stop 204
tgagcttgctcttcaggcttgttct

SEQ ID NO: 114277 - DNA, 25 bp, Artificial
  probe
  misc_feature (1)..(25): SEQ ID NO: 2023; WAN024CDN_at; Start 183; Stop 207
gcttgctcttcaggcttgttcttgc

SEQ ID NO: 114278 - DNA, 25 bp, Artificial
  probe
  misc_feature (1)..(25): SEQ ID NO: 2023; WAN024CDN_at; Start 63; Stop 87
tcttgctggctttccaattcgactt

SEQ ID NO: 114279 - DNA, 25 bp, Artificial
  probe
  misc_feature (1)..(25): SEQ ID NO: 2023; WAN024CDN_at; Start 72; Stop 96
ctttccaattcgacttcagcttgag

SEQ ID NO: 114280 - DNA, 25 bp, Artificial
  probe
  misc_feature (1)..(25): SEQ ID NO: 2023; WAN024CDN_at; Start 136; Stop 160
tatcgagatcggctatcgtttcttc

SEQ ID NO: 114281 - DNA, 25 bp, Artificial
  probe
  misc_feature (1)..(25): SEQ ID NO: 2023; WAN024CDN_at; Start 166; Stop 190
tgtctgcaacctcttgagcttgctc

SEQ ID NO: 114282 - DNA, 25 bp, Artificial
  probe
  misc_feature (1)..(25): SEQ ID NO: 811; WAN024CDO_at; Start 302; Stop 326
tcactatagctgaagagagccaaga

SEQ ID NO: 114283 - DNA, 25 bp, Artificial
  probe
  misc_feature (1)..(25): SEQ ID NO: 811; WAN024CDO_at; Start 708; Stop 732
cctcttgggtagtttcgttgtgaga

SEQ ID NO: 114284 - DNA, 25 bp, Artificial
  probe
  misc_feature (1)..(25): SEQ ID NO: 811; WAN024CDO_at; Start 570; Stop 594
tagtatctatcacatcaaacatgct

SEQ ID NO: 114285 - DNA, 25 bp, Artificial
  probe
  misc_feature (1)..(25): SEQ ID NO: 811; WAN024CDO_at; Start 604; Stop 628
catatagcaagcattaacagtcgct

SEQ ID NO: 114286 - DNA, 25 bp, Artificial
  probe
  misc_feature (1)..(25): SEQ ID NO: 811; WAN024CDO_at; Start 900; Stop 924
gcttgccagtctccatatcattaca

SEQ ID NO: 114287 - DNA, 25 bp, Artificial
  probe
  misc_feature (1)..(25): SEQ ID NO: 811; WAN024CDO_at; Start 354; Stop 378
gaaagagccacttcttatcagtaaa

SEQ ID NO: 114288 - DNA, 25 bp, Artificial
  probe
  misc_feature (1)..(25): SEQ ID NO: 811; WAN024CDO_at; Start 70; Stop 94
gctcaagaggttgcagacaaggctg

SEQ ID NO: 114289 - DNA, 25 bp, Artificial
  probe
  misc_feature (1)..(25): SEQ ID NO: 811; WAN024CDO_at; Start 1022; Stop 1046
tggcactgattggagattatcttcg

SEQ ID NO: 114290 - DNA, 25 bp, Artificial
  probe
  misc_feature (1)..(25): SEQ ID NO: 811; WAN024CDO_at; Start 1007; Stop 1031
tctttgtagctgaagtggcactgat

SEQ ID NO: 114291 - DNA, 25 bp, Artificial
  probe
  misc_feature (1)..(25): SEQ ID NO: 811; WAN024CDO_at; Start 383; Stop 407
tagaaagtccttatatccccgacca

SEQ ID NO: 114292 - DNA, 25 bp, Artificial
  probe
  misc_feature (1)..(25): SEQ ID NO: 811; WAN024CDO_at; Start 424; Stop 448
gataaatggaaagagcaagtgcttg

SEQ ID NO: 114293 - DNA, 25 bp, Artificial
  probe
  misc_feature (1)..(25): SEQ ID NO: 811; WAN024CDO_at; Start 439; Stop 463
caagtgcttgatttttggtcttggc

SEQ ID NO: 114294 - DNA, 25 bp, Artificial
  probe
  misc_feature (1)..(25): SEQ ID NO: 811; WAN024CDO_at; Start 472; Stop 496
gcgatcaaatctcctacaagtaagt

SEQ ID NO: 114295 - DNA, 25 bp, Artificial
  probe
  misc_feature (1)..(25): SEQ ID NO: 811; WAN024CDO_at; Start 1097; Stop 1121
ttctatgtcaaaaaagcaagtcgat

SEQ ID NO: 114296 - DNA, 25 bp, Artificial
  probe
  misc_feature (1)..(25): SEQ ID NO: 811; WAN024CDO_at; Start 784; Stop 808
tatagtcaactcttggcaattccaa

SEQ ID NO: 114297 - DNA, 25 bp, Artificial
  probe
  misc_feature (1)..(25): SEQ ID NO: 811; WAN024CDO_at; Start 726; Stop 750
tgtgagacgatttatccaccaggaa

SEQ ID NO: 114298 - DNA, 25 bp, Artificial
  probe
  misc_feature (1)..(25): SEQ ID NO: 811; WAN024CDO_at; Start 759; Stop 783
gacgctagacaaggttctccaacaa

SEQ ID NO: 114299 - DNA, 25 bp, Artificial
  probe
  misc_feature (1)..(25): SEQ ID NO: 811; WAN024CDO_at; Start 51; Stop 75
gaacaagcctgaagagcaagctcaa

SEQ ID NO: 114300 - DNA, 25 bp, Artificial
  probe
  misc_feature (1)..(25): SEQ ID NO: 811; WAN024CDO_at; Start 884; Stop 908
gcattggaatcattctgcttgccag

SEQ ID NO: 114301 - DNA, 25 bp, Artificial
  probe
  misc_feature (1)..(25): SEQ ID NO: 811; WAN024CDO_at; Start 507; Stop 531
tatcacacacagttacacagccttt

SEQ ID NO: 114302 - DNA, 25 bp, Artificial
  probe
  misc_feature (1)..(25): SEQ ID NO: 811; WAN024CDO_at; Start 965; Stop 989
tattcttgtctgtccttgtgaacgg

SEQ ID NO: 114303 - DNA, 25 bp, Artificial
  probe
  misc_feature (1)..(25): SEQ ID NO: 811; WAN024CDO_at; Start 672; Stop 696
tatcctagtagcgacaacactcttc

SEQ ID NO: 114304 - DNA, 25 bp, Artificial
  probe
  misc_feature (1)..(25): SEQ ID NO: 811; WAN024CDO_at; Start 35; Stop 59
taaaaacaacaagcaagaacaagcc

SEQ ID NO: 114305 - DNA, 25 bp, Artificial
  probe
  misc_feature (1)..(25): SEQ ID NO: 811; WAN024CDO_at; Start 847; Stop 871
gatagcctacgatttacagccctct

SEQ ID NO: 114306 - DNA, 25 bp, Artificial
  probe
  misc_feature (1)..(25): SEQ ID NO: 811; WAN024CDO_at; Start 455; Stop 479
ggtcttggctagtggaagcgatcaa

SEQ ID NO: 114307 - DNA, 25 bp, Artificial
  probe
  misc_feature (1)..(25): SEQ ID NO: 811; WAN024CDO_at; Start 978; Stop 1002
ccttgtgaacggagttattatcctc

SEQ ID NO: 114308 - DNA, 25 bp, Artificial
  probe
  misc_feature (1)..(25): SEQ ID NO: 811; WAN024CDO_at; Start 325; Stop 349
gaagctcttcctcagcaaaaagcaa

SEQ ID NO: 114309 - DNA, 25 bp, Artificial
  probe
  misc_feature (1)..(25): SEQ ID NO: 811; WAN024CDO_at; Start 1066; Stop 1090
aattcaatcctgtcatccttggcag

SEQ ID NO: 114310 - DNA, 25 bp, Artificial
  probe
  misc_feature (1)..(25): SEQ ID NO: 811; WAN024CDO_at; Start 340; Stop 364
caaaaagcaaccacgaaagagccac

SEQ ID NO: 114311 - DNA, 25 bp, Artificial
  probe
  misc_feature (1)..(25): SEQ ID NO: 811; WAN024CDO_at; Start 932; Stop 956
gtcaagcaagtgaaaccgactcctt

SEQ ID NO: 114312 - DNA, 25 bp, Artificial
  probe
  misc_feature (1)..(25): SEQ ID NO: 811; WAN024CDO_at; Start 585; Stop 609
caaacatgcttactatggacatata

SEQ ID NO: 114313 - DNA, 25 bp, Artificial
  probe
  misc_feature (1)..(25): SEQ ID NO: 811; WAN024CDO_at; Start 917; Stop 941
tcattacaagaccaagtcaagcaag

SEQ ID NO: 114314 - DNA, 25 bp, Artificial
  probe
  misc_feature (1)..(25): SEQ ID NO: 811; WAN024CDO_at; Start 634; Stop 658
gagcagctagctcctttaactcttt

SEQ ID NO: 114315 - DNA, 25 bp, Artificial
  probe
  misc_feature (1)..(25): SEQ ID NO: 811; WAN024CDO_at; Start 246; Stop 270
gaaggcatctaattctactgaagaa

SEQ ID NO: 114316 - DNA, 25 bp, Artificial
  probe
  misc_feature (1)..(25): SEQ ID NO: 5969; WAN024CDP_at; Start 87; Stop 111
ctgtaaatcaatcggccttaaaggc

SEQ ID NO: 114317 - DNA, 25 bp, Artificial
  probe
  misc_feature (1)..(25): SEQ ID NO: 5969; WAN024CDP_at; Start 187; Stop 211
tacgttcacagccttccaggaatgg

SEQ ID NO: 114318 - DNA, 25 bp, Artificial
  probe
  misc_feature (1)..(25): SEQ ID NO: 5969; WAN024CDP_at; Start 457; Stop 481
gctattcgcccagatattcgcaact

SEQ ID NO: 114319 - DNA, 25 bp, Artificial
  probe
  misc_feature (1)..(25): SEQ ID NO: 5969; WAN024CDP_at; Start 393; Stop 417
taaagataccgttgtccttgacaca

SEQ ID NO: 114320 - DNA, 25 bp, Artificial
  probe
  misc_feature (1)..(25): SEQ ID NO: 5969; WAN024CDP_at; Start 531; Stop 555
caagcgtgtcgtggtttactgtaca

SEQ ID NO: 114321 - DNA, 25 bp, Artificial
  probe
  misc_feature (1)..(25): SEQ ID NO: 5969; WAN024CDP_at; Start 878; Stop 902
gtgttcacccacgtaaccgctatgt

SEQ ID NO: 114322 - DNA, 25 bp, Artificial
  probe
  misc_feature (1)..(25): SEQ ID NO: 5969; WAN024CDP_at; Start 58; Stop 82
gagcaatttgctgcagaccacttgg

SEQ ID NO: 114323 - DNA, 25 bp, Artificial
  probe
  misc_feature (1)..(25): SEQ ID NO: 5969; WAN024CDP_at; Start 844; Stop 868
gacaagtaccttcgtggatgctcac

SEQ ID NO: 114324 - DNA, 25 bp, Artificial
  probe
  misc_feature (1)..(25): SEQ ID NO: 5969; WAN024CDP_at; Start 172; Stop 196
caaaaatacatggactacgttcaca

SEQ ID NO: 114325 - DNA, 25 bp, Artificial
  probe
  misc_feature (1)..(25): SEQ ID NO: 5969; WAN024CDP_at; Start 779; Stop 803
aacgttatgtcaactgtggaaatcc

SEQ ID NO: 114326 - DNA, 25 bp, Artificial
  probe
  misc_feature (1)..(25): SEQ ID NO: 5969; WAN024CDP_at; Start 617; Stop 641
gccaattgcacggaggaatcgcaac

SEQ ID NO: 114327 - DNA, 25 bp, Artificial
  probe
  misc_feature (1)..(25): SEQ ID NO: 5969; WAN024CDP_at; Start 517; Stop 541
gaaaaattcatggacaagcgtgtcg

SEQ ID NO: 114328 - DNA, 25 bp, Artificial
  probe
  misc_feature (1)..(25): SEQ ID NO: 5969; WAN024CDP_at; Start 105; Stop 129
taaaggccgtatcctagtcgctgac

SEQ ID NO: 114329 - DNA, 25 bp, Artificial
  probe
  misc_feature (1)..(25): SEQ ID NO: 5969; WAN024CDP_at; Start 750; Stop 774
gaaagactggtttgatggaacacca

SEQ ID NO: 114330 - DNA, 25 bp, Artificial
  probe
  misc_feature (1)..(25): SEQ ID NO: 5969; WAN024CDP_at; Start 765; Stop 789
tggaacaccatgtgaacgttatgtc

SEQ ID NO: 114331 - DNA, 25 bp, Artificial
  probe
  misc_feature (1)..(25): SEQ ID NO: 5969; WAN024CDP_at; Start 430; Stop 454
gagtacgacctaggacatttccgtg

SEQ ID NO: 114332 - DNA, 25 bp, Artificial
  probe
  misc_feature (1)..(25): SEQ ID NO: 5969; WAN024CDP_at; Start 808; Stop 832
tgtaaccgtcgtatcttgacatcag

SEQ ID NO: 114333 - DNA, 25 bp, Artificial
  probe
  misc_feature (1)..(25): SEQ ID NO: 5969; WAN024CDP_at; Start 860; Stop 884
gatgctcacacgagtgccgtgttca

SEQ ID NO: 114334 - DNA, 25 bp, Artificial
  probe
  misc_feature (1)..(25): SEQ ID NO: 5969; WAN024CDP_at; Start 329; Stop 353
tcaacccacttgaaacaacaggtgc

SEQ ID NO: 114335 - DNA, 25 bp, Artificial
  probe
  misc_feature (1)..(25): SEQ ID NO: 5969; WAN024CDP_at; Start 37; Stop 61
tatactccaattgaaaatgcagagc

SEQ ID NO: 114336 - DNA, 25 bp, Artificial
  probe
  misc_feature (1)..(25): SEQ ID NO: 5969; WAN024CDP_at; Start 307; Stop 331
gacaacgactttgacaatgacatca

SEQ ID NO: 114337 - DNA, 25 bp, Artificial
  probe
  misc_feature (1)..(25): SEQ ID NO: 5969; WAN024CDP_at; Start 139; Stop 163
aacggaacagtttcaggtgactatg

SEQ ID NO: 114338 - DNA, 25 bp, Artificial
  probe
  misc_feature (1)..(25): SEQ ID NO: 5969; WAN024CDP_at; Start 292; Stop 316
caccttggtttggaagacaacgact

SEQ ID NO: 114339 - DNA, 25 bp, Artificial
  probe
  misc_feature (1)..(25): SEQ ID NO: 5969; WAN024CDP_at; Start 414; Stop 438
cacacgtaacgattatgagtacgac

SEQ ID NO: 114340 - DNA, 25 bp, Artificial
  probe
  misc_feature (1)..(25): SEQ ID NO: 5969; WAN024CDP_at; Start 947; Stop 971
ccgctatcggtgaaagcttggatca

SEQ ID NO: 114341 - DNA, 25 bp, Artificial
  probe
  misc_feature (1)..(25): SEQ ID NO: 5969; WAN024CDP_at; Start 652; Stop 676
gacccagaagttcaaggtgagcttt

SEQ ID NO: 114342 - DNA, 25 bp, Artificial
  probe
  misc_feature (1)..(25): SEQ ID NO: 5969; WAN024CDP_at; Start 379; Stop 403
gaagcgcttcttgataaagataccg

SEQ ID NO: 114343 - DNA, 25 bp, Artificial
  probe
  misc_feature (1)..(25): SEQ ID NO: 5969; WAN024CDP_at; Start 122; Stop 146
tcgctgacgagggaattaacggaac

SEQ ID NO: 114344 - DNA, 25 bp, Artificial
  probe
  misc_feature (1)..(25): SEQ ID NO: 5969; WAN024CDP_at; Start 72; Stop 96
agaccacttggctttctgtaaatca

SEQ ID NO: 114345 - DNA, 25 bp, Artificial
  probe
  misc_feature (1)..(25): SEQ ID NO: 5969; WAN024CDP_at; Start 255; Stop 279
caagaagatgtttgttcgctacaag

SEQ ID NO: 114346 - DNA, 25 bp, Artificial
  probe
  misc_feature (1)..(25): SEQ ID NO: 5969; WAN024CDP_at; Start 272; Stop 296
gctacaagaaagaaattgtccacct

SEQ ID NO: 114347 - DNA, 25 bp, Artificial
  probe
  misc_feature (1)..(25): SEQ ID NO: 5969; WAN024CDP_at; Start 361; Stop 385
tctccaaaagagttcaaagaagcgc

SEQ ID NO: 114348 - DNA, 25 bp, Artificial
  probe
  misc_feature (1)..(25): SEQ ID NO: 5969; WAN024CDP_at; Start 635; Stop 659
tcgcaacttacggtaaagacccaga

SEQ ID NO: 114349 - DNA, 25 bp, Artificial
  probe
  misc_feature (1)..(25): SEQ ID NO: 5969; WAN024CDP_at; Start 344; Stop 368
caacaggtgcttacttgtctccaaa

SEQ ID NO: 114350 - DNA, 25 bp, Artificial
  probe
  misc_feature (1)..(25): SEQ ID NO: 4278; WAN024CDQ_at; Start 122; Stop 146
ttgctagctccgtccactgtcgctg

SEQ ID NO: 114351 - DNA, 25 bp, Artificial
  probe
  misc_feature (1)..(25): SEQ ID NO: 4278; WAN024CDQ_at; Start 37; Stop 61
gaagatatttccgactgcaaggatg

SEQ ID NO: 114352 - DNA, 25 bp, Artificial
  probe
  misc_feature (1)..(25): SEQ ID NO: 4278; WAN024CDQ_at; Start 149; Stop 173
tcgtagtaggttggatcaattccca

SEQ ID NO: 114353 - DNA, 25 bp, Artificial
  probe
  misc_feature (1)..(25): SEQ ID NO: 4278; WAN024CDQ_at; Start 97; Stop 121
ggttacgttgcgaatacgttgccac

SEQ ID NO: 114354 - DNA, 25 bp, Artificial
  probe
  misc_feature (1)..(25): SEQ ID NO: 4278; WAN024CDQ_at; Start 105; Stop 129
tgcgaatacgttgccacttgctagc

SEQ ID NO: 114355 - DNA, 25 bp, Artificial
  probe
  misc_feature (1)..(25): SEQ ID NO: 4278; WAN024CDQ_at; Start 52; Stop 76
tgcaaggatggtcaatacagttaca

SEQ ID NO: 114356 - DNA, 25 bp, Artificial
  probe
  misc_feature (1)..(25): SEQ ID NO: 4278; WAN024CDQ_at; Start 89; Stop 113
tgaggaatggttacgttgcgaatac

SEQ ID NO: 114357 - DNA, 25 bp, Artificial
  probe
  misc_feature (1)..(25): SEQ ID NO: 4278; WAN024CDQ_at; Start 46; Stop 70
tccgactgcaaggatggtcaataca

SEQ ID NO: 114358 - DNA, 25 bp, Artificial
  probe
  misc_feature (1)..(25): SEQ ID NO: 4278; WAN024CDQ_at; Start 79; Stop 103
cggagtcaactgaggaatggttacg

SEQ ID NO: 114359 - DNA, 25 bp, Artificial
  probe
  misc_feature (1)..(25): SEQ ID NO: 4278; WAN024CDQ_at; Start 73; Stop 97
tacaagcggagtcaactgaggaatg

SEQ ID NO: 114360 - DNA, 25 bp, Artificial
  probe
  misc_feature (1)..(25): SEQ ID NO: 4278; WAN024CDQ_at; Start 100; Stop 124
tacgttgcgaatacgttgccacttg

SEQ ID NO: 114361 - DNA, 25 bp, Artificial
  probe
  misc_feature (1)..(25): SEQ ID NO: 4278; WAN024CDQ_at; Start 165; Stop 189
caattcccatgatcgtcgcatagta

SEQ ID NO: 114362 - DNA, 25 bp, Artificial
  probe
  misc_feature (1)..(25): SEQ ID NO: 4278; WAN024CDQ_at; Start 175; Stop 199
gatcgtcgcatagtacatgacactg

SEQ ID NO: 114363 - DNA, 25 bp, Artificial
  probe
  misc_feature (1)..(25): SEQ ID NO: 4278; WAN024CDQ_at; Start 19; Stop 43
gagaccgaagtctgcgcggaagata

SEQ ID NO: 114364 - DNA, 25 bp, Artificial
  probe
  misc_feature (1)..(25): SEQ ID NO: 4278; WAN024CDQ_at; Start 142; Stop 166
cgctgcttcgtagtaggttggatca

SEQ ID NO: 114365 - DNA, 25 bp, Artificial
  probe
  misc_feature (1)..(25): SEQ ID NO: 4278; WAN024CDQ_at; Start 64; Stop 88
caatacagttacaagcggagtcaac

SEQ ID NO: 114366 - DNA, 25 bp, Artificial
  probe
  misc_feature (1)..(25): SEQ ID NO: 4278; WAN024CDQ_at; Start 26; Stop 50
aagtctgcgcggaagatatttccga

SEQ ID NO: 114367 - DNA, 25 bp, Artificial
  probe
  misc_feature (1)..(25): SEQ ID NO: 4278; WAN024CDQ_at; Start 11; Stop 35
tgatagaagagaccgaagtctgcgc

SEQ ID NO: 114368 - DNA, 25 bp, Artificial
  probe
  misc_feature (1)..(25): SEQ ID NO: 4278; WAN024CDQ_at; Start 6; Stop 30
ggatttgatagaagagaccgaagtc

SEQ ID NO: 114369 - DNA, 25 bp, Artificial
  probe
  misc_feature (1)..(25): SEQ ID NO: 4278; WAN024CDQ_at; Start 85; Stop 109
caactgaggaatggttacgttgcga

SEQ ID NO: 114370 - DNA, 25 bp, Artificial
  probe
  misc_feature (1)..(25): SEQ ID NO: 4278; WAN024CDQ_at; Start 155; Stop 179
taggttggatcaattcccatgatcg

SEQ ID NO: 114371 - DNA, 25 bp, Artificial
  probe
  misc_feature (1)..(25): SEQ ID NO: 4278; WAN024CDQ_at; Start 187; Stop 211
gtacatgacactgctatatccaaag

SEQ ID NO: 114372 - DNA, 25 bp, Artificial
  probe
  misc_feature (1)..(25): SEQ ID NO: 4278; WAN024CDQ_at; Start 178; Stop 202
cgtcgcatagtacatgacactgcta

SEQ ID NO: 114373 - DNA, 25 bp, Artificial
  probe
  misc_feature (1)..(25): SEQ ID NO: 4278; WAN024CDQ_at; Start 192; Stop 216
tgacactgctatatccaaagccttt

SEQ ID NO: 114374 - DNA, 25 bp, Artificial
  probe
  misc_feature (1)..(25): SEQ ID NO: 4278; WAN024CDQ_at; Start 136; Stop 160
cactgtcgctgcttcgtagtaggtt

SEQ ID NO: 114375 - DNA, 25 bp, Artificial
  probe
  misc_feature (1)..(25): SEQ ID NO: 4278; WAN024CDQ_at; Start 204; Stop 228
atccaaagcctttccaaatacctag

SEQ ID NO: 114376 - DNA, 25 bp, Artificial
  probe
  misc_feature (1)..(25): SEQ ID NO: 4278; WAN024CDQ_at; Start 109; Stop 133
aatacgttgccacttgctagctccg

SEQ ID NO: 114377 - DNA, 25 bp, Artificial
  probe
  misc_feature (1)..(25): SEQ ID NO: 4278; WAN024CDQ_at; Start 42; Stop 66
tatttccgactgcaaggatggtcaa

SEQ ID NO: 114378 - DNA, 25 bp, Artificial
  probe
  misc_feature (1)..(25): SEQ ID NO: 4278; WAN024CDQ_at; Start 2; Stop 26
tgtgggatttgatagaagagaccga

SEQ ID NO: 114379 - DNA, 25 bp, Artificial
  probe
  misc_feature (1)..(25): SEQ ID NO: 4278; WAN024CDQ_at; Start 58; Stop 82
gatggtcaatacagttacaagcgga

SEQ ID NO: 114380 - DNA, 25 bp, Artificial
  probe
  misc_feature (1)..(25): SEQ ID NO: 4278; WAN024CDQ_at; Start 130; Stop 154
tccgtccactgtcgctgcttcgtag

SEQ ID NO: 114381 - DNA, 25 bp, Artificial
  probe
  misc_feature (1)..(25): SEQ ID NO: 4278; WAN024CDQ_at; Start 61; Stop 85
ggtcaatacagttacaagcggagtc

SEQ ID NO: 114382 - DNA, 25 bp, Artificial
  probe
  misc_feature (1)..(25): SEQ ID NO: 4278; WAN024CDQ_at; Start 161; Stop 185
ggatcaattcccatgatcgtcgcat

SEQ ID NO: 114383 - DNA, 25 bp, Artificial
  probe
  misc_feature (1)..(25): SEQ ID NO: 4278; WAN024CDQ_at; Start 14; Stop 38
tagaagagaccgaagtctgcgcgga

SEQ ID NO: 114384 - DNA, 25 bp, Artificial
  probe
  misc_feature (1)..(25): SEQ ID NO: 2337; WAN024CDR_at; Start 468; Stop 492
tcatctattggaaagtcttggtctc

SEQ ID NO: 114385 - DNA, 25 bp, Artificial
  probe
  misc_feature (1)..(25): SEQ ID NO: 2337; WAN024CDR_at; Start 619; Stop 643
tactacgaagcagcgacagtggacg

SEQ ID NO: 114386 - DNA, 25 bp, Artificial
  probe
  misc_feature (1)..(25): SEQ ID NO: 2337; WAN024CDR_at; Start 58; Stop 82
gacaactggatctttctcttgatgg

SEQ ID NO: 114387 - DNA, 25 bp, Artificial
  probe
  misc_feature (1)..(25): SEQ ID NO: 2337; WAN024CDR_at; Start 558; Stop 582
gaaaggctttggatatagcagtgtc

SEQ ID NO: 114388 - DNA, 25 bp, Artificial
  probe
  misc_feature (1)..(25): SEQ ID NO: 2337; WAN024CDR_at; Start 705; Stop 729
tgtattgaccatccttgcagtcgga

SEQ ID NO: 114389 - DNA, 25 bp, Artificial
  probe
  misc_feature (1)..(25): SEQ ID NO: 2337; WAN024CDR_at; Start 663; Stop 687
tattcgcaacgtaaccattcctcag

SEQ ID NO: 114390 - DNA, 25 bp, Artificial
  probe
  misc_feature (1)..(25): SEQ ID NO: 2337; WAN024CDR_at; Start 323; Stop 347
ggattgccattatcctcagcgagct

SEQ ID NO: 114391 - DNA, 25 bp, Artificial
  probe
  misc_feature (1)..(25): SEQ ID NO: 2337; WAN024CDR_at; Start 123; Stop 147
tccagtatttgggaacgtggttgcc

SEQ ID NO: 114392 - DNA, 25 bp, Artificial
  probe
  misc_feature (1)..(25): SEQ ID NO: 2337; WAN024CDR_at; Start 520; Stop 544
ggcatctggccctatctcctacttt

SEQ ID NO: 114393 - DNA, 25 bp, Artificial
  probe
  misc_feature (1)..(25): SEQ ID NO: 2337; WAN024CDR_at; Start 918; Stop 942
cttgcttgcaagacgagtcgatcca

SEQ ID NO: 114394 - DNA, 25 bp, Artificial
  probe
  misc_feature (1)..(25): SEQ ID NO: 2337; WAN024CDR_at; Start 586; Stop 610
tactatgcgacgatcatgggaattg

SEQ ID NO: 114395 - DNA, 25 bp, Artificial
  probe
  misc_feature (1)..(25): SEQ ID NO: 2337; WAN024CDR_at; Start 245; Stop 269
gagacgcctttattatcacacgaaa

SEQ ID NO: 114396 - DNA, 25 bp, Artificial
  probe
  misc_feature (1)..(25): SEQ ID NO: 2337; WAN024CDR_at; Start 431; Stop 455
cagatgccttcctaaatattgataa

SEQ ID NO: 114397 - DNA, 25 bp, Artificial
  probe
  misc_feature (1)..(25): SEQ ID NO: 2337; WAN024CDR_at; Start 732; Stop 756
tatcttccgcgcagacttcggtctc

SEQ ID NO: 114398 - DNA, 25 bp, Artificial
  probe
  misc_feature (1)..(25): SEQ ID NO: 2337; WAN024CDR_at; Start 690; Stop 714
gactccgcttgtaactgtattgacc

SEQ ID NO: 114399 - DNA, 25 bp, Artificial
  probe
  misc_feature (1)..(25): SEQ ID NO: 2337; WAN024CDR_at; Start 266; Stop 290
gaaatactgtcctctacaatcttgg

SEQ ID NO: 114400 - DNA, 25 bp, Artificial
  probe
  misc_feature (1)..(25): SEQ ID NO: 2337; WAN024CDR_at; Start 92; Stop 116
gggcactctggttgattctattctt

SEQ ID NO: 114401 - DNA, 25 bp, Artificial
  probe
  misc_feature (1)..(25): SEQ ID NO: 2337; WAN024CDR_at; Start 604; Stop 628
ggaattgatccaacctactacgaag

SEQ ID NO: 114402 - DNA, 25 bp, Artificial
  probe
  misc_feature (1)..(25): SEQ ID NO: 2337; WAN024CDR_at; Start 43; Stop 67
tcaaaaacattgagagacaactgga

SEQ ID NO: 114403 - DNA, 25 bp, Artificial
  probe
  misc_feature (1)..(25): SEQ ID NO: 2337; WAN024CDR_at; Start 573; Stop 597
tagcagtgtcatgtactatgcgacg

SEQ ID NO: 114404 - DNA, 25 bp, Artificial
  probe
  misc_feature (1)..(25): SEQ ID NO: 2337; WAN024CDR_at; Start 308; Stop 332
tagttgtatctgtagggattgccat

SEQ ID NO: 114405 - DNA, 25 bp, Artificial
  probe
  misc_feature (1)..(25): SEQ ID NO: 2337; WAN024CDR_at; Start 825; Stop 849
taatggtttgactcagacagcagat

SEQ ID NO: 114406 - DNA, 25 bp, Artificial
  probe
  misc_feature (1)..(25): SEQ ID NO: 2337; WAN024CDR_at; Start 141; Stop 165
ggttgccttcaaagactaccacatg

SEQ ID NO: 114407 - DNA, 25 bp, Artificial
  probe
  misc_feature (1)..(25): SEQ ID NO: 2337; WAN024CDR_at; Start 483; Stop 507
tcttggtctcaaagaagtcaatttc

SEQ ID NO: 114408 - DNA, 25 bp, Artificial
  probe
  misc_feature (1)..(25): SEQ ID NO: 2337; WAN024CDR_at; Start 777; Stop 801
tgctggtcagctttacaatgtaacc

SEQ ID NO: 114409 - DNA, 25 bp, Artificial
  probe
  misc_feature (1)..(25): SEQ ID NO: 2337; WAN024CDR_at; Start 862; Stop 886
gcagcagccggtctttaccaatccg

SEQ ID NO: 114410 - DNA, 25 bp, Artificial
  probe
  misc_feature (1)..(25): SEQ ID NO: 2337; WAN024CDR_at; Start 931; Stop 955
cgagtcgatccaaactcagctttgt

SEQ ID NO: 114411 - DNA, 25 bp, Artificial
  probe
  misc_feature (1)..(25): SEQ ID NO: 2337; WAN024CDR_at; Start 678; Stop 702
cattcctcagttgactccgcttgta

SEQ ID NO: 114412 - DNA, 25 bp, Artificial
  probe
  misc_feature (1)..(25): SEQ ID NO: 2337; WAN024CDR_at; Start 646; Stop 670
gctagcaagtggcaacgtattcgca

SEQ ID NO: 114413 - DNA, 25 bp, Artificial
  probe
  misc_feature (1)..(25): SEQ ID NO: 2337; WAN024CDR_at; Start 194; Stop 218
taaatagtaaatgggtcggactcga

SEQ ID NO: 114414 - DNA, 25 bp, Artificial
  probe
  misc_feature (1)..(25): SEQ ID NO: 2337; WAN024CDR_at; Start 501; Stop 525
caatttctacgctgacctgggcatc

SEQ ID NO: 114415 - DNA, 25 bp, Artificial
  probe
  misc_feature (1)..(25): SEQ ID NO: 2337; WAN024CDR_at; Start 762; Stop 786
tcaaatcccacacaatgctggtcag

SEQ ID NO: 114416 - DNA, 25 bp, Artificial
  probe
  misc_feature (1)..(25): SEQ ID NO: 2337; WAN024CDR_at; Start 903; Stop 927
ggttatcctatcaaacttgcttgca

SEQ ID NO: 114417 - DNA, 25 bp, Artificial
  probe
  misc_feature (1)..(25): SEQ ID NO: 2337; WAN024CDR_at; Start 338; Stop 362
tcagcgagctccgttctaagagaat

SEQ ID NO: 114418 - DNA, 25 bp, Artificial
  probe
  misc_feature (1)..(25): SEQ ID NO: 5346; WAN024CDS_at; Start 196; Stop 220
aatgatctcaaaagattttctaagg

SEQ ID NO: 114419 - DNA, 25 bp, Artificial
  probe
  misc_feature (1)..(25): SEQ ID NO: 5346; WAN024CDS_at; Start 24; Stop 48
cttagttgctgactggctttcctta

SEQ ID NO: 114420 - DNA, 25 bp, Artificial
  probe
  misc_feature (1)..(25): SEQ ID NO: 5346; WAN024CDS_at; Start 90; Stop 114
gatatcacgtaaaccttgctctgtc

SEQ ID NO: 114421 - DNA, 25 bp, Artificial
  probe
  misc_feature (1)..(25): SEQ ID NO: 5346; WAN024CDS_at; Start 5; Stop 29
ccgctgtttgtcctccatccttagt

SEQ ID NO: 114422 - DNA, 25 bp, Artificial
  probe
  misc_feature (1)..(25): SEQ ID NO: 5346; WAN024CDS_at; Start 15; Stop 39
tcctccatccttagttgctgactgg

SEQ ID NO: 114423 - DNA, 25 bp, Artificial
  probe
  misc_feature (1)..(25): SEQ ID NO: 5346; WAN024CDS_at; Start 34; Stop 58
gactggctttccttaatggactcta

SEQ ID NO: 114424 - DNA, 25 bp, Artificial
  probe
  misc_feature (1)..(25): SEQ ID NO: 5346; WAN024CDS_at; Start 99; Stop 123
taaaccttgctctgtcaaactatca

SEQ ID NO: 114425 - DNA, 25 bp, Artificial
  probe
  misc_feature (1)..(25): SEQ ID NO: 5346; WAN024CDS_at; Start 188; Stop 212
cacctgtcaatgatctcaaaagatt

SEQ ID NO: 114426 - DNA, 25 bp, Artificial
  probe
  misc_feature (1)..(25): SEQ ID NO: 5346; WAN024CDS_at; Start 78; Stop 102
gactgtttgcaagatatcacgtaaa

SEQ ID NO: 114427 - DNA, 25 bp, Artificial
  probe
  misc_feature (1)..(25): SEQ ID NO: 5346; WAN024CDS_at; Start 57; Stop 81
tagggaagcaatggcatctttgact

SEQ ID NO: 114428 - DNA, 25 bp, Artificial
  probe
  misc_feature (1)..(25): SEQ ID NO: 5346; WAN024CDS_at; Start 176; Stop 200
taggattcgatacacctgtcaatga

SEQ ID NO: 114429 - DNA, 25 bp, Artificial
  probe
  misc_feature (1)..(25): SEQ ID NO: 5346; WAN024CDS_at; Start 167; Stop 191
aatctgtggtaggattcgatacacc

SEQ ID NO: 114430 - DNA, 25 bp, Artificial
  probe
  misc_feature (1)..(25): SEQ ID NO: 5346; WAN024CDS_at; Start 81; Stop 105
tgtttgcaagatatcacgtaaacct

SEQ ID NO: 114431 - DNA, 25 bp, Artificial
  probe
  misc_feature (1)..(25): SEQ ID NO: 5346; WAN024CDS_at; Start 61; Stop 85
gaagcaatggcatctttgactgttt

SEQ ID NO: 114432 - DNA, 25 bp, Artificial
  probe
  misc_feature (1)..(25): SEQ ID NO: 5346; WAN024CDS_at; Start 30; Stop 54
tgctgactggctttccttaatggac

SEQ ID NO: 114433 - DNA, 25 bp, Artificial
  probe
  misc_feature (1)..(25): SEQ ID NO: 5346; WAN024CDS_at; Start 179; Stop 203
gattcgatacacctgtcaatgatct

SEQ ID NO: 114434 - DNA, 25 bp, Artificial
  probe
  misc_feature (1)..(25): SEQ ID NO: 5346; WAN024CDS_at; Start 20; Stop 44
catccttagttgctgactggctttc

SEQ ID NO: 114435 - DNA, 25 bp, Artificial
  probe
  misc_feature (1)..(25): SEQ ID NO: 5346; WAN024CDS_at; Start 174; Stop 198
ggtaggattcgatacacctgtcaat

SEQ ID NO: 114436 - DNA, 25 bp, Artificial
  probe
  misc_feature (1)..(25): SEQ ID NO: 5346; WAN024CDS_at; Start 66; Stop 90
aatggcatctttgactgtttgcaag

SEQ ID NO: 114437 - DNA, 25 bp, Artificial
  probe
  misc_feature (1)..(25): SEQ ID NO: 5346; WAN024CDS_at; Start 88; Stop 112
aagatatcacgtaaaccttgctctg

SEQ ID NO: 114438 - DNA, 25 bp, Artificial
  probe
  misc_feature (1)..(25): SEQ ID NO: 5346; WAN024CDS_at; Start 107; Stop 131
gctctgtcaaactatcatctgcaaa

SEQ ID NO: 114439 - DNA, 25 bp, Artificial
  probe
  misc_feature (1)..(25): SEQ ID NO: 5346; WAN024CDS_at; Start 50; Stop 74
tggactctagggaagcaatggcatc

SEQ ID NO: 114440 - DNA, 25 bp, Artificial
  probe
  misc_feature (1)..(25): SEQ ID NO: 5346; WAN024CDS_at; Start 47; Stop 71
taatggactctagggaagcaatggc

SEQ ID NO: 114441 - DNA, 25 bp, Artificial
  probe
  misc_feature (1)..(25): SEQ ID NO: 5346; WAN024CDS_at; Start 52; Stop 76
gactctagggaagcaatggcatctt

SEQ ID NO: 114442 - DNA, 25 bp, Artificial
  probe
  misc_feature (1)..(25): SEQ ID NO: 5346; WAN024CDS_at; Start 74; Stop 98
ctttgactgtttgcaagatatcacg

SEQ ID NO: 114443 - DNA, 25 bp, Artificial
  probe
  misc_feature (1)..(25): SEQ ID NO: 5346; WAN024CDS_at; Start 184; Stop 208
gatacacctgtcaatgatctcaaaa

SEQ ID NO: 114444 - DNA, 25 bp, Artificial
  probe
  misc_feature (1)..(25): SEQ ID NO: 5346; WAN024CDS_at; Start 43; Stop 67
tccttaatggactctagggaagcaa

SEQ ID NO: 114445 - DNA, 25 bp, Artificial
  probe
  misc_feature (1)..(25): SEQ ID NO: 5346; WAN024CDS_at; Start 38; Stop 62
ggctttccttaatggactctaggga

SEQ ID NO: 114446 - DNA, 25 bp, Artificial
  probe
  misc_feature (1)..(25): SEQ ID NO: 5346; WAN024CDS_at; Start 171; Stop 195
tgtggtaggattcgatacacctgtc

SEQ ID NO: 114447 - DNA, 25 bp, Artificial
  probe
  misc_feature (1)..(25): SEQ ID NO: 5346; WAN024CDS_at; Start 94; Stop 118
tcacgtaaaccttgctctgtcaaac

SEQ ID NO: 114448 - DNA, 25 bp, Artificial
  probe
  misc_feature (1)..(25): SEQ ID NO: 5346; WAN024CDS_at; Start 113; Stop 137
tcaaactatcatctgcaaaagcttt

SEQ ID NO: 114449 - DNA, 25 bp, Artificial
  probe
  misc_feature (1)..(25): SEQ ID NO: 5346; WAN024CDS_at; Start 161; Stop 185
gtgctgaatctgtggtaggattcga

SEQ ID NO: 114450 - DNA, 25 bp, Artificial
  probe
  misc_feature (1)..(25): SEQ ID NO: 5346; WAN024CDS_at; Start 111; Stop 135
tgtcaaactatcatctgcaaaagct

SEQ ID NO: 114451 - DNA, 25 bp, Artificial
  probe
  misc_feature (1)..(25): SEQ ID NO: 5346; WAN024CDS_at; Start 10; Stop 34
gtttgtcctccatccttagttgctg

SEQ ID NO: 114452 - DNA, 25 bp, Artificial
  probe
  misc_feature (1)..(25): SEQ ID NO: 5286; WAN024CDT_at; Start 204; Stop 228
tcttaaagaggttattgctaagttg

SEQ ID NO: 114453 - DNA, 25 bp, Artificial
  probe
  misc_feature (1)..(25): SEQ ID NO: 5286; WAN024CDT_at; Start 194; Stop 218
tgattgataatcttaaagaggttat

SEQ ID NO: 114454 - DNA, 25 bp, Artificial
  probe
  misc_feature (1)..(25): SEQ ID NO: 5286; WAN024CDT_at; Start 209; Stop 233
aagaggttattgctaagttgaaagc

SEQ ID NO: 114455 - DNA, 25 bp, Artificial
  probe
  misc_feature (1)..(25): SEQ ID NO: 5286; WAN024CDT_at; Start 111; Stop 135
ccttgaaaactctcaagaagaactt

SEQ ID NO: 114456 - DNA, 25 bp, Artificial
  probe
  misc_feature (1)..(25): SEQ ID NO: 5286; WAN024CDT_at; Start 106; Stop 130
gatgtccttgaaaactctcaagaag

SEQ ID NO: 114457 - DNA, 25 bp, Artificial
  probe
  misc_feature (1)..(25): SEQ ID NO: 5286; WAN024CDT_at; Start 137; Stop 161
aaaaagcagttttgttcttggcaga

SEQ ID NO: 114458 - DNA, 25 bp, Artificial
  probe
  misc_feature (1)..(25): SEQ ID NO: 5286; WAN024CDT_at; Start 156; Stop 180
ggcagatgaaaaaggctctgagcat

SEQ ID NO: 114459 - DNA, 25 bp, Artificial
  probe
  misc_feature (1)..(25): SEQ ID NO: 5286; WAN024CDT_at; Start 95; Stop 119
cagcagataaggatgtccttgaaaa

SEQ ID NO: 114460 - DNA, 25 bp, Artificial
  probe
  misc_feature (1)..(25): SEQ ID NO: 5286; WAN024CDT_at; Start 143; Stop 167
cagttttgttcttggcagatgaaaa

SEQ ID NO: 114461 - DNA, 25 bp, Artificial
  probe
  misc_feature (1)..(25): SEQ ID NO: 5286; WAN024CDT_at; Start 201; Stop 225
taatcttaaagaggttattgctaag

SEQ ID NO: 114462 - DNA, 25 bp, Artificial
  probe
  misc_feature (1)..(25): SEQ ID NO: 5286; WAN024CDT_at; Start 100; Stop 124
gataaggatgtccttgaaaactctc

SEQ ID NO: 114463 - DNA, 25 bp, Artificial
  probe
  misc_feature (1)..(25): SEQ ID NO: 5286; WAN024CDT_at; Start 219; Stop 243
tgctaagttgaaagcaaacgcccta

SEQ ID NO: 114464 - DNA, 25 bp, Artificial
  probe
  misc_feature (1)..(25): SEQ ID NO: 5286; WAN024CDT_at; Start 86; Stop 110
gcaaagaaacagcagataaggatgt

SEQ ID NO: 114465 - DNA, 25 bp, Artificial
  probe
  misc_feature (1)..(25): SEQ ID NO: 5286; WAN024CDT_at; Start 160; Stop 184
gatgaaaaaggctctgagcatactg

SEQ ID NO: 114466 - DNA, 25 bp, Artificial
  probe
  misc_feature (1)..(25): SEQ ID NO: 5286; WAN024CDT_at; Start 104; Stop 128
aggatgtccttgaaaactctcaaga

SEQ ID NO: 114467 - DNA, 25 bp, Artificial
  probe
  misc_feature (1)..(25): SEQ ID NO: 5286; WAN024CDT_at; Start 216; Stop 240
tattgctaagttgaaagcaaacgcc

SEQ ID NO: 114468 - DNA, 25 bp, Artificial
  probe
  misc_feature (1)..(25): SEQ ID NO: 5286; WAN024CDT_at; Start 108; Stop 132
tgtccttgaaaactctcaagaagaa

SEQ ID NO: 114469 - DNA, 25 bp, Artificial
  probe
  misc_feature (1)..(25): SEQ ID NO: 5286; WAN024CDT_at; Start 141; Stop 165
agcagttttgttcttggcagatgaa

SEQ ID NO: 114470 - DNA, 25 bp, Artificial
  probe
  misc_feature (1)..(25): SEQ ID NO: 5286; WAN024CDT_at; Start 89; Stop 113
aagaaacagcagataaggatgtcct

SEQ ID NO: 114471 - DNA, 25 bp, Artificial
  probe
  misc_feature (1)..(25): SEQ ID NO: 5286; WAN024CDT_at; Start 150; Stop 174
gttcttggcagatgaaaaaggctct

SEQ ID NO: 114472 - DNA, 25 bp, Artificial
  probe
  misc_feature (1)..(25): SEQ ID NO: 5286; WAN024CDT_at; Start 115; Stop 139
gaaaactctcaagaagaacttcaaa

SEQ ID NO: 114473 - DNA, 25 bp, Artificial
  probe
  misc_feature (1)..(25): SEQ ID NO: 5286; WAN024CDT_at; Start 93; Stop 117
aacagcagataaggatgtccttgaa

SEQ ID NO: 114474 - DNA, 25 bp, Artificial
  probe
  misc_feature (1)..(25): SEQ ID NO: 5286; WAN024CDT_at; Start 218; Stop 242
ttgctaagttgaaagcaaacgccct

SEQ ID NO: 114475 - DNA, 25 bp, Artificial
  probe
  misc_feature (1)..(25): SEQ ID NO: 5286; WAN024CDT_at; Start 139; Stop 163
aaagcagttttgttcttggcagatg

SEQ ID NO: 114476 - DNA, 25 bp, Artificial
  probe
  misc_feature (1)..(25): SEQ ID NO: 5286; WAN024CDT_at; Start 154; Stop 178
ttggcagatgaaaaaggctctgagc

SEQ ID NO: 114477 - DNA, 25 bp, Artificial
  probe
  misc_feature (1)..(25): SEQ ID NO: 5286; WAN024CDT_at; Start 136; Stop 160
caaaaagcagttttgttcttggcag

SEQ ID NO: 114478 - DNA, 25 bp, Artificial
  probe
  misc_feature (1)..(25): SEQ ID NO: 5286; WAN024CDT_at; Start 87; Stop 111
caaagaaacagcagataaggatgtc

SEQ ID NO: 114479 - DNA, 25 bp, Artificial
  probe
  misc_feature (1)..(25): SEQ ID NO: 5286; WAN024CDT_at; Start 98; Stop 122
cagataaggatgtccttgaaaactc

SEQ ID NO: 114480 - DNA, 25 bp, Artificial
  probe
  misc_feature (1)..(25): SEQ ID NO: 5286; WAN024CDT_at; Start 91; Stop 115
gaaacagcagataaggatgtccttg

SEQ ID NO: 114481 - DNA, 25 bp, Artificial
  probe
  misc_feature (1)..(25): SEQ ID NO: 5286; WAN024CDT_at; Start 149; Stop 173
tgttcttggcagatgaaaaaggctc

SEQ ID NO: 114482 - DNA, 25 bp, Artificial
  probe
  misc_feature (1)..(25): SEQ ID NO: 5286; WAN024CDT_at; Start 102; Stop 126
taaggatgtccttgaaaactctcaa

SEQ ID NO: 114483 - DNA, 25 bp, Artificial
  probe
  misc_feature (1)..(25): SEQ ID NO: 5286; WAN024CDT_at; Start 157; Stop 181
gcagatgaaaaaggctctgagcata

SEQ ID NO: 114484 - DNA, 25 bp, Artificial
  probe
  misc_feature (1)..(25): SEQ ID NO: 5286; WAN024CDT_at; Start 152; Stop 176
tcttggcagatgaaaaaggctctga

SEQ ID NO: 114485 - DNA, 25 bp, Artificial
  probe
  misc_feature (1)..(25): SEQ ID NO: 5286; WAN024CDT_at; Start 220; Stop 244
gctaagttgaaagcaaacgccctaa

SEQ ID NO: 114486 - DNA, 25 bp, Artificial
  probe
  misc_feature (1)..(25): SEQ ID NO: 5099; WAN024CDU_at; Start 70; Stop 94
aaagcttttgcagatgatagtttga

SEQ ID NO: 114487 - DNA, 25 bp, Artificial
  probe
  misc_feature (1)..(25): SEQ ID NO: 5099; WAN024CDU_at; Start 5; Stop 29
gatcattgacaggtgtatcgaatcc

SEQ ID NO: 114488 - DNA, 25 bp, Artificial
  probe
  misc_feature (1)..(25): SEQ ID NO: 5099; WAN024CDU_at; Start 244; Stop 268
caagaaattagccaaggaattaagt

SEQ ID NO: 114489 - DNA, 25 bp, Artificial
  probe
  misc_feature (1)..(25): SEQ ID NO: 5099; WAN024CDU_at; Start 108; Stop 132
acgtgatatcttgcaaacagtcaaa

SEQ ID NO: 114490 - DNA, 25 bp, Artificial
  probe
  misc_feature (1)..(25): SEQ ID NO: 5099; WAN024CDU_at; Start 1; Stop 25
ttgagatcattgacaggtgtatcga

SEQ ID NO: 114491 - DNA, 25 bp, Artificial
  probe
  misc_feature (1)..(25): SEQ ID NO: 5099; WAN024CDU_at; Start 238; Stop 262
caaactcaagaaattagccaaggaa

SEQ ID NO: 114492 - DNA, 25 bp, Artificial
  probe
  misc_feature (1)..(25): SEQ ID NO: 5099; WAN024CDU_at; Start 210; Stop 234
aacagcaggagaagatgagtctgca

SEQ ID NO: 114493 - DNA, 25 bp, Artificial
  probe
  misc_feature (1)..(25): SEQ ID NO: 5099; WAN024CDU_at; Start 232; Stop 256
gcaaatcaaactcaagaaattagcc

SEQ ID NO: 114494 - DNA, 25 bp, Artificial
  probe
  misc_feature (1)..(25): SEQ ID NO: 5099; WAN024CDU_at; Start 223; Stop 247
gatgagtctgcaaatcaaactcaag

SEQ ID NO: 114495 - DNA, 25 bp, Artificial
  probe
  misc_feature (1)..(25): SEQ ID NO: 5099; WAN024CDU_at; Start 16; Stop 40
ggtgtatcgaatcctaccacagatt

SEQ ID NO: 114496 - DNA, 25 bp, Artificial
  probe
  misc_feature (1)..(25): SEQ ID NO: 5099; WAN024CDU_at; Start 20; Stop 44
tatcgaatcctaccacagattcagc

SEQ ID NO: 114497 - DNA, 25 bp, Artificial
  probe
  misc_feature (1)..(25): SEQ ID NO: 5099; WAN024CDU_at; Start 85; Stop 109
gatagtttgacagagcaaggtttac

SEQ ID NO: 114498 - DNA, 25 bp, Artificial
  probe
  misc_feature (1)..(25): SEQ ID NO: 5099; WAN024CDU_at; Start 236; Stop 260
atcaaactcaagaaattagccaagg

SEQ ID NO: 114499 - DNA, 25 bp, Artificial
  probe
  misc_feature (1)..(25): SEQ ID NO: 5099; WAN024CDU_at; Start 215; Stop 239
caggagaagatgagtctgcaaatca

SEQ ID NO: 114500 - DNA, 25 bp, Artificial
  probe
  misc_feature (1)..(25): SEQ ID NO: 5099; WAN024CDU_at; Start 87; Stop 111
tagtttgacagagcaaggtttacgt

SEQ ID NO: 114501 - DNA, 25 bp, Artificial
  probe
  misc_feature (1)..(25): SEQ ID NO: 5099; WAN024CDU_at; Start 203; Stop 227
gcaaagaaacagcaggagaagatga

SEQ ID NO: 114502 - DNA, 25 bp, Artificial
  probe
  misc_feature (1)..(25): SEQ ID NO: 5099; WAN024CDU_at; Start 82; Stop 106
gatgatagtttgacagagcaaggtt

SEQ ID NO: 114503 - DNA, 25 bp, Artificial
  probe
  misc_feature (1)..(25): SEQ ID NO: 5099; WAN024CDU_at; Start 100; Stop 124
caaggtttacgtgatatcttgcaaa

SEQ ID NO: 114504 - DNA, 25 bp, Artificial
  probe
  misc_feature (1)..(25): SEQ ID NO: 5099; WAN024CDU_at; Start 12; Stop 36
gacaggtgtatcgaatcctaccaca

SEQ ID NO: 114505 - DNA, 25 bp, Artificial
  probe
  misc_feature (1)..(25): SEQ ID NO: 5099; WAN024CDU_at; Start 89; Stop 113
gtttgacagagcaaggtttacgtga

SEQ ID NO: 114506 - DNA, 25 bp, Artificial
  probe
  misc_feature (1)..(25): SEQ ID NO: 5099; WAN024CDU_at; Start 103; Stop 127
ggtttacgtgatatcttgcaaacag

SEQ ID NO: 114507 - DNA, 25 bp, Artificial
  probe
  misc_feature (1)..(25): SEQ ID NO: 5099; WAN024CDU_at; Start 8; Stop 32
cattgacaggtgtatcgaatcctac

SEQ ID NO: 114508 - DNA, 25 bp, Artificial
  probe
  misc_feature (1)..(25): SEQ ID NO: 5099; WAN024CDU_at; Start 93; Stop 117
gacagagcaaggtttacgtgatatc

SEQ ID NO: 114509 - DNA, 25 bp, Artificial
  probe
  misc_feature (1)..(25): SEQ ID NO: 5099; WAN024CDU_at; Start 206; Stop 230
aagaaacagcaggagaagatgagtc

SEQ ID NO: 114510 - DNA, 25 bp, Artificial
  probe
  misc_feature (1)..(25): SEQ ID NO: 5099; WAN024CDU_at; Start 14; Stop 38
caggtgtatcgaatcctaccacaga

SEQ ID NO: 114511 - DNA, 25 bp, Artificial
  probe
  misc_feature (1)..(25): SEQ ID NO: 5099; WAN024CDU_at; Start 95; Stop 119
cagagcaaggtttacgtgatatctt

SEQ ID NO: 114512 - DNA, 25 bp, Artificial
  probe
  misc_feature (1)..(25): SEQ ID NO: 5099; WAN024CDU_at; Start 218; Stop 242
gagaagatgagtctgcaaatcaaac

SEQ ID NO: 114513 - DNA, 25 bp, Artificial
  probe
  misc_feature (1)..(25): SEQ ID NO: 5099; WAN024CDU_at; Start 208; Stop 232
gaaacagcaggagaagatgagtctg

SEQ ID NO: 114514 - DNA, 25 bp, Artificial
  probe
  misc_feature (1)..(25): SEQ ID NO: 5099; WAN024CDU_at; Start 22; Stop 46
tcgaatcctaccacagattcagcac

SEQ ID NO: 114515 - DNA, 25 bp, Artificial
  probe
  misc_feature (1)..(25): SEQ ID NO: 5099; WAN024CDU_at; Start 10; Stop 34
ttgacaggtgtatcgaatcctacca

SEQ ID NO: 114516 - DNA, 25 bp, Artificial
  probe
  misc_feature (1)..(25): SEQ ID NO: 5099; WAN024CDU_at; Start 212; Stop 236
cagcaggagaagatgagtctgcaaa

SEQ ID NO: 114517 - DNA, 25 bp, Artificial
  probe
  misc_feature (1)..(25): SEQ ID NO: 5099; WAN024CDU_at; Start 220; Stop 244
gaagatgagtctgcaaatcaaactc

SEQ ID NO: 114518 - DNA, 25 bp, Artificial
  probe
  misc_feature (1)..(25): SEQ ID NO: 5099; WAN024CDU_at; Start 105; Stop 129
tttacgtgatatcttgcaaacagtc

SEQ ID NO: 114519 - DNA, 25 bp, Artificial
  probe
  misc_feature (1)..(25): SEQ ID NO: 5099; WAN024CDU_at; Start 226; Stop 250
gagtctgcaaatcaaactcaagaaa

SEQ ID NO: 114520 - DNA, 25 bp, Artificial
  probe
  misc_feature (1)..(25): SEQ ID NO: 6495; WAN024CDV_at; Start 238; Stop 262
caaatctgtcaggtgtttcaagaca

SEQ ID NO: 114521 - DNA, 25 bp, Artificial
  probe
  misc_feature (1)..(25): SEQ ID NO: 6495; WAN024CDV_at; Start 187; Stop 211
gtaaatagcttcactgtaaccatgg

SEQ ID NO: 114522 - DNA, 25 bp, Artificial
  probe
  misc_feature (1)..(25): SEQ ID NO: 6495; WAN024CDV_at; Start 268; Stop 292
caaagccttgcgtgtgggcaagaga

SEQ ID NO: 114523 - DNA, 25 bp, Artificial
  probe
  misc_feature (1)..(25): SEQ ID NO: 6495; WAN024CDV_at; Start 148; Stop 172
tcgatagagttcaatgccatttccc

SEQ ID NO: 114524 - DNA, 25 bp, Artificial
  probe
  misc_feature (1)..(25): SEQ ID NO: 6495; WAN024CDV_at; Start 212; Stop 236
tctgcaccgccgacaagaggaattt

SEQ ID NO: 114525 - DNA, 25 bp, Artificial
  probe
  misc_feature (1)..(25): SEQ ID NO: 6495; WAN024CDV_at; Start 278; Stop 302
cgtgtgggcaagagaatggccaaat

SEQ ID NO: 114526 - DNA, 25 bp, Artificial
  probe
  misc_feature (1)..(25): SEQ ID NO: 6495; WAN024CDV_at; Start 263; Stop 287
tcagccaaagccttgcgtgtgggca

SEQ ID NO: 114527 - DNA, 25 bp, Artificial
  probe
  misc_feature (1)..(25): SEQ ID NO: 6495; WAN024CDV_at; Start 28; Stop 52
tgccaggataaagggctctactctt

SEQ ID NO: 114528 - DNA, 25 bp, Artificial
  probe
  misc_feature (1)..(25): SEQ ID NO: 6495; WAN024CDV_at; Start 63; Stop 87
cataaatgtcctgcgccgcaagagc

SEQ ID NO: 114529 - DNA, 25 bp, Artificial
  probe
  misc_feature (1)..(25): SEQ ID NO: 6495; WAN024CDV_at; Start 153; Stop 177
agagttcaatgccatttccctccaa

SEQ ID NO: 114530 - DNA, 25 bp, Artificial
  probe
  misc_feature (1)..(25): SEQ ID NO: 6495; WAN024CDV_at; Start 132; Stop 156
tggaaactggcttatctcgatagag

SEQ ID NO: 114531 - DNA, 25 bp, Artificial
  probe
  misc_feature (1)..(25): SEQ ID NO: 6495; WAN024CDV_at; Start 173; Stop 197
tccaaatcttccaagtaaatagctt

SEQ ID NO: 114532 - DNA, 25 bp, Artificial
  probe
  misc_feature (1)..(25): SEQ ID NO: 6495; WAN024CDV_at; Start 197; Stop 221
tcactgtaaccatggtctgcaccgc

SEQ ID NO: 114533 - DNA, 25 bp, Artificial
  probe
  misc_feature (1)..(25): SEQ ID NO: 6495; WAN024CDV_at; Start 338; Stop 362
tcttgtgcttgaatcagctgtacca

SEQ ID NO: 114534 - DNA, 25 bp, Artificial
  probe
  misc_feature (1)..(25): SEQ ID NO: 6495; WAN024CDV_at; Start 141; Stop 165
gcttatctcgatagagttcaatgcc

SEQ ID NO: 114535 - DNA, 25 bp, Artificial
  probe
  misc_feature (1)..(25): SEQ ID NO: 6495; WAN024CDV_at; Start 118; Stop 142
tcgaatatcccatgtggaaactggc

SEQ ID NO: 114536 - DNA, 25 bp, Artificial
  probe
  misc_feature (1)..(25): SEQ ID NO: 6495; WAN024CDV_at; Start 100; Stop 124
gataatgcgtccatcttctcgaata

SEQ ID NO: 114537 - DNA, 25 bp, Artificial
  probe
  misc_feature (1)..(25): SEQ ID NO: 6495; WAN024CDV_at; Start 2; Stop 26
tgaatatgccccattcttgtacctt

SEQ ID NO: 114538 - DNA, 25 bp, Artificial
  probe
  misc_feature (1)..(25): SEQ ID NO: 6495; WAN024CDV_at; Start 257; Stop 281
aagacatcagccaaagccttgcgtg

SEQ ID NO: 114539 - DNA, 25 bp, Artificial
  probe
  misc_feature (1)..(25): SEQ ID NO: 6495; WAN024CDV_at; Start 24; Stop 48
cttctgccaggataaagggctctac

SEQ ID NO: 114540 - DNA, 25 bp, Artificial
  probe
  misc_feature (1)..(25): SEQ ID NO: 6495; WAN024CDV_at; Start 123; Stop 147
tatcccatgtggaaactggcttatc

SEQ ID NO: 114541 - DNA, 25 bp, Artificial
  probe
  misc_feature (1)..(25): SEQ ID NO: 6495; WAN024CDV_at; Start 111; Stop 135
catcttctcgaatatcccatgtgga

SEQ ID NO: 114542 - DNA, 25 bp, Artificial
  probe
  misc_feature (1)..(25): SEQ ID NO: 6495; WAN024CDV_at; Start 216; Stop 240
caccgccgacaagaggaatttgcaa

SEQ ID NO: 114543 - DNA, 25 bp, Artificial
  probe
  misc_feature (1)..(25): SEQ ID NO: 6495; WAN024CDV_at; Start 289; Stop 313
gagaatggccaaatggtaaagacca

SEQ ID NO: 114544 - DNA, 25 bp, Artificial
  probe
  misc_feature (1)..(25): SEQ ID NO: 6495; WAN024CDV_at; Start 348; Stop 372
gaatcagctgtaccaagacttttcc

SEQ ID NO: 114545 - DNA, 25 bp, Artificial
  probe
  misc_feature (1)..(25): SEQ ID NO: 6495; WAN024CDV_at; Start 59; Stop 83
aactcataaatgtcctgcgccgcaa

SEQ ID NO: 114546 - DNA, 25 bp, Artificial
  probe
  misc_feature (1)..(25): SEQ ID NO: 6495; WAN024CDV_at; Start 249; Stop 273
ggtgtttcaagacatcagccaaagc

SEQ ID NO: 114547 - DNA, 25 bp, Artificial
  probe
  misc_feature (1)..(25): SEQ ID NO: 6495; WAN024CDV_at; Start 89; Stop 113
tccgtcactccgataatgcgtccat

SEQ ID NO: 114548 - DNA, 25 bp, Artificial
  probe
  misc_feature (1)..(25): SEQ ID NO: 6495; WAN024CDV_at; Start 303; Stop 327
ggtaaagaccataatgttccctcac

SEQ ID NO: 114549 - DNA, 25 bp, Artificial
  probe
  misc_feature (1)..(25): SEQ ID NO: 6495; WAN024CDV_at; Start 225; Stop 249
caagaggaatttgcaaatctgtcag

SEQ ID NO: 114550 - DNA, 25 bp, Artificial
  probe
  misc_feature (1)..(25): SEQ ID NO: 6495; WAN024CDV_at; Start 360; Stop 384
ccaagacttttccaccaaggcctag

SEQ ID NO: 114551 - DNA, 25 bp, Artificial
  probe
  misc_feature (1)..(25): SEQ ID NO: 6495; WAN024CDV_at; Start 81; Stop 105
caagagcctccgtcactccgataat

SEQ ID NO: 114552 - DNA, 25 bp, Artificial
  probe
  misc_feature (1)..(25): SEQ ID NO: 6495; WAN024CDV_at; Start 325; Stop 349
cacttctccgctctcttgtgcttga

SEQ ID NO: 114553 - DNA, 25 bp, Artificial
  probe
  misc_feature (1)..(25): SEQ ID NO: 6495; WAN024CDV_at; Start 13; Stop 37
cattcttgtaccttctgccaggata

SEQ ID NO: 114554 - DNA, 25 bp, Artificial
  probe
  misc_feature (1)..(25): SEQ ID NO: 1431; WAN024CDW_at; Start 380; Stop 404
cagtttccacatgggatattcgaga

SEQ ID NO: 114555 - DNA, 25 bp, Artificial
  probe
  misc_feature (1)..(25): SEQ ID NO: 1431; WAN024CDW_at; Start 744; Stop 768
gattgcccaacgagcacaagaagtt

SEQ ID NO: 114556 - DNA, 25 bp, Artificial
  probe
  misc_feature (1)..(25): SEQ ID NO: 1431; WAN024CDW_at; Start 355; Stop 379
ggcattgaactctatcgagataagc

SEQ ID NO: 114557 - DNA, 25 bp, Artificial
  probe
  misc_feature (1)..(25): SEQ ID NO: 1431; WAN024CDW_at; Start 359; Stop 383
ttgaactctatcgagataagccagt

SEQ ID NO: 114558 - DNA, 25 bp, Artificial
  probe
  misc_feature (1)..(25): SEQ ID NO: 1431; WAN024CDW_at; Start 757; Stop 781
gcacaagaagttgacgcaccaatca

SEQ ID NO: 114559 - DNA, 25 bp, Artificial
  probe
  misc_feature (1)..(25): SEQ ID NO: 1431; WAN024CDW_at; Start 814; Stop 838
gactcagatggcatcgtgacccgta

SEQ ID NO: 114560 - DNA, 25 bp, Artificial
  probe
  misc_feature (1)..(25): SEQ ID NO: 1431; WAN024CDW_at; Start 820; Stop 844
gatggcatcgtgacccgtattcgtt

SEQ ID NO: 114561 - DNA, 25 bp, Artificial
  probe
  misc_feature (1)..(25): SEQ ID NO: 1431; WAN024CDW_at; Start 701; Stop 725
cctactatgtcatcgaagtcgcaca

SEQ ID NO: 114562 - DNA, 25 bp, Artificial
  probe
  misc_feature (1)..(25): SEQ ID NO: 1431; WAN024CDW_at; Start 378; Stop 402
gccagtttccacatgggatattcga

SEQ ID NO: 114563 - DNA, 25 bp, Artificial
  probe
  misc_feature (1)..(25): SEQ ID NO: 1431; WAN024CDW_at; Start 389; Stop 413
catgggatattcgagaagatggacg

SEQ ID NO: 114564 - DNA, 25 bp, Artificial
  probe
  misc_feature (1)..(25): SEQ ID NO: 1431; WAN024CDW_at; Start 373; Stop 397
gataagccagtttccacatgggata

SEQ ID NO: 114565 - DNA, 25 bp, Artificial
  probe
  misc_feature (1)..(25): SEQ ID NO: 1431; WAN024CDW_at; Start 767; Stop 791
ttgacgcaccaatcaaatggatgac

SEQ ID NO: 114566 - DNA, 25 bp, Artificial
  probe
  misc_feature (1)..(25): SEQ ID NO: 1431; WAN024CDW_at; Start 810; Stop 834
cacagactcagatggcatcgtgacc

SEQ ID NO: 114567 - DNA, 25 bp, Artificial
  probe
  misc_feature (1)..(25): SEQ ID NO: 1431; WAN024CDW_at; Start 800; Stop 824
aattggaaatcacagactcagatgg

SEQ ID NO: 114568 - DNA, 25 bp, Artificial
  probe
  misc_feature (1)..(25): SEQ ID NO: 1431; WAN024CDW_at; Start 805; Stop 829
gaaatcacagactcagatggcatcg

SEQ ID NO: 114569 - DNA, 25 bp, Artificial
  probe
  misc_feature (1)..(25): SEQ ID NO: 1431; WAN024CDW_at; Start 747; Stop 771
tgcccaacgagcacaagaagttgac

SEQ ID NO: 114570 - DNA, 25 bp, Artificial
  probe
  misc_feature (1)..(25): SEQ ID NO: 1431; WAN024CDW_at; Start 698; Stop 722
tagcctactatgtcatcgaagtcgc

SEQ ID NO: 114571 - DNA, 25 bp, Artificial
  probe
  misc_feature (1)..(25): SEQ ID NO: 1431; WAN024CDW_at; Start 371; Stop 395
gagataagccagtttccacatggga

SEQ ID NO: 114572 - DNA, 25 bp, Artificial
  probe
  misc_feature (1)..(25): SEQ ID NO: 1431; WAN024CDW_at; Start 731; Stop 755
aagaactgttaacgattgcccaacg

SEQ ID NO: 114573 - DNA, 25 bp, Artificial
  probe
  misc_feature (1)..(25): SEQ ID NO: 1431; WAN024CDW_at; Start 739; Stop 763
ttaacgattgcccaacgagcacaag

SEQ ID NO: 114574 - DNA, 25 bp, Artificial
  probe
  misc_feature (1)..(25): SEQ ID NO: 1431; WAN024CDW_at; Start 824; Stop 848
gcatcgtgacccgtattcgtttagc

SEQ ID NO: 114575 - DNA, 25 bp, Artificial
  probe
  misc_feature (1)..(25): SEQ ID NO: 1431; WAN024CDW_at; Start 763; Stop 787
gaagttgacgcaccaatcaaatgga

SEQ ID NO: 114576 - DNA, 25 bp, Artificial
  probe
  misc_feature (1)..(25): SEQ ID NO: 1431; WAN024CDW_at; Start 705; Stop 729
ctatgtcatcgaagtcgcacataaa

SEQ ID NO: 114577 - DNA, 25 bp, Artificial
  probe
  misc_feature (1)..(25): SEQ ID NO: 1431; WAN024CDW_at; Start 365; Stop 389
tctatcgagataagccagtttccac

SEQ ID NO: 114578 - DNA, 25 bp, Artificial
  probe
  misc_feature (1)..(25): SEQ ID NO: 1431; WAN024CDW_at; Start 691; Stop 715
ccaggtttagcctactatgtcatcg

SEQ ID NO: 114579 - DNA, 25 bp, Artificial
  probe
  misc_feature (1)..(25): SEQ ID NO: 1431; WAN024CDW_at; Start 694; Stop 718
ggtttagcctactatgtcatcgaag

SEQ ID NO: 114580 - DNA, 25 bp, Artificial
  probe
  misc_feature (1)..(25): SEQ ID NO: 1431; WAN024CDW_at; Start 817; Stop 841
tcagatggcatcgtgacccgtattc

SEQ ID NO: 114581 - DNA, 25 bp, Artificial
  probe
  misc_feature (1)..(25): SEQ ID NO: 1431; WAN024CDW_at; Start 734; Stop 758
aactgttaacgattgcccaacgagc

SEQ ID NO: 114582 - DNA, 25 bp, Artificial
  probe
  misc_feature (1)..(25): SEQ ID NO: 1431; WAN024CDW_at; Start 385; Stop 409
tccacatgggatattcgagaagatg

SEQ ID NO: 114583 - DNA, 25 bp, Artificial
  probe
  misc_feature (1)..(25): SEQ ID NO: 1431; WAN024CDW_at; Start 755; Stop 779
gagcacaagaagttgacgcaccaat

SEQ ID NO: 114584 - DNA, 25 bp, Artificial
  probe
  misc_feature (1)..(25): SEQ ID NO: 1431; WAN024CDW_at; Start 772; Stop 796
gcaccaatcaaatggatgacatcga

SEQ ID NO: 114585 - DNA, 25 bp, Artificial
  probe
  misc_feature (1)..(25): SEQ ID NO: 1431; WAN024CDW_at; Start 350; Stop 374
gaaatggcattgaactctatcgaga

SEQ ID NO: 114586 - DNA, 25 bp, Artificial
  probe
  misc_feature (1)..(25): SEQ ID NO: 1431; WAN024CDW_at; Start 343; Stop 367
ttggagggaaatggcattgaactct

SEQ ID NO: 114587 - DNA, 25 bp, Artificial
  probe
  misc_feature (1)..(25): SEQ ID NO: 1431; WAN024CDW_at; Start 752; Stop 776
aacgagcacaagaagttgacgcacc

SEQ ID NO: 114588 - DNA, 25 bp, Artificial
  probe
  misc_feature (1)..(25): SEQ ID NO: 5479; WAN024CDX_at; Start 235; Stop 259
gactcagaagaagaagtaggaatta

SEQ ID NO: 114589 - DNA, 25 bp, Artificial
  probe
  misc_feature (1)..(25): SEQ ID NO: 5479; WAN024CDX_at; Start 590; Stop 614
tttatcaatcaaaaacaggagagga

SEQ ID NO: 114590 - DNA, 25 bp, Artificial
  probe
  misc_feature (1)..(25): SEQ ID NO: 5479; WAN024CDX_at; Start 133; Stop 157
ggtcctggtttctatatcacgcctg

SEQ ID NO: 114591 - DNA, 25 bp, Artificial
  probe
  misc_feature (1)..(25): SEQ ID NO: 5479; WAN024CDX_at; Start 442; Stop 466
gatgacaatccaacccaagctttag

SEQ ID NO: 114592 - DNA, 25 bp, Artificial
  probe
  misc_feature (1)..(25): SEQ ID NO: 5479; WAN024CDX_at; Start 207; Stop 231
tcgaagcagctctaataataatatt

SEQ ID NO: 114593 - DNA, 25 bp, Artificial
  probe
  misc_feature (1)..(25): SEQ ID NO: 5479; WAN024CDX_at; Start 388; Stop 412
gaaaatccagatgaattacaacacc

SEQ ID NO: 114594 - DNA, 25 bp, Artificial
  probe
  misc_feature (1)..(25): SEQ ID NO: 5479; WAN024CDX_at; Start 503; Stop 527
tgcttgctgagtttagaaaaccata

SEQ ID NO: 114595 - DNA, 25 bp, Artificial
  probe
  misc_feature (1)..(25): SEQ ID NO: 5479; WAN024CDX_at; Start 364; Stop 388
gctgaatttgtcgttcaaaatcggg

SEQ ID NO: 114596 - DNA, 25 bp, Artificial
  probe
  misc_feature (1)..(25): SEQ ID NO: 5479; WAN024CDX_at; Start 57; Stop 81
tacattattgagacatttagaatcc

SEQ ID NO: 114597 - DNA, 25 bp, Artificial
  probe
  misc_feature (1)..(25): SEQ ID NO: 5479; WAN024CDX_at; Start 552; Stop 576
caaccaatctttttgtgatataatg

SEQ ID NO: 114598 - DNA, 25 bp, Artificial
  probe
  misc_feature (1)..(25): SEQ ID NO: 5479; WAN024CDX_at; Start 372; Stop 396
tgtcgttcaaaatcgggaaaatcca

SEQ ID NO: 114599 - DNA, 25 bp, Artificial
  probe
  misc_feature (1)..(25): SEQ ID NO: 5479; WAN024CDX_at; Start 186; Stop 210
caagcaagttgaagtattaaatcga

SEQ ID NO: 114600 - DNA, 25 bp, Artificial
  probe
  misc_feature (1)..(25): SEQ ID NO: 5479; WAN024CDX_at; Start 116; Stop 140
gaagtgagctagattttggtcctgg

SEQ ID NO: 114601 - DNA, 25 bp, Artificial
  probe
  misc_feature (1)..(25): SEQ ID NO: 5479; WAN024CDX_at; Start 36; Stop 60
tcagacgcagtggtttcatgctaca

SEQ ID NO: 114602 - DNA, 25 bp, Artificial
  probe
  misc_feature (1)..(25): SEQ ID NO: 5479; WAN024CDX_at; Start 196; Stop 220
gaagtattaaatcgaagcagctcta

SEQ ID NO: 114603 - DNA, 25 bp, Artificial
  probe
  misc_feature (1)..(25): SEQ ID NO: 5479; WAN024CDX_at; Start 489; Stop 513
tacaaaagaagaaatgcttgctgag

SEQ ID NO: 114604 - DNA, 25 bp, Artificial
  probe
  misc_feature (1)..(25): SEQ ID NO: 5479; WAN024CDX_at; Start 8; Stop 32
tgactaccaagcaggaaaagcaact

SEQ ID NO: 114605 - DNA, 25 bp, Artificial
  probe
  misc_feature (1)..(25): SEQ ID NO: 5479; WAN024CDX_at; Start 145; Stop 169
tatatcacgcctgactttgaacaag

SEQ ID NO: 114606 - DNA, 25 bp, Artificial
  probe
  misc_feature (1)..(25): SEQ ID NO: 5479; WAN024CDX_at; Start 605; Stop 629
caggagaggagttacaaaaatggca

SEQ ID NO: 114607 - DNA, 25 bp, Artificial
  probe
  misc_feature (1)..(25): SEQ ID NO: 5479; WAN024CDX_at; Start 457; Stop 481
caagctttagctcgttttcgtcaga

SEQ ID NO: 114608 - DNA, 25 bp, Artificial
  probe
  misc_feature (1)..(25): SEQ ID NO: 5479; WAN024CDX_at; Start 76; Stop 100
gaatccttaaaaagtggtatagatg

SEQ ID NO: 114609 - DNA, 25 bp, Artificial
  probe
  misc_feature (1)..(25): SEQ ID NO: 5479; WAN024CDX_at; Start 22; Stop 46
gaaaagcaactaggtcagacgcagt

SEQ ID NO: 114610 - DNA, 25 bp, Artificial
  probe
  misc_feature (1)..(25): SEQ ID NO: 5479; WAN024CDX_at; Start 293; Stop 317
tttttaagaaccctgactatcattg

SEQ ID NO: 114611 - DNA, 25 bp, Artificial
  probe
  misc_feature (1)..(25): SEQ ID NO: 5479; WAN024CDX_at; Start 418; Stop 442
gattttatctatggtgttcagactg

SEQ ID NO: 114612 - DNA, 25 bp, Artificial
  probe
  misc_feature (1)..(25): SEQ ID NO: 5479; WAN024CDX_at; Start 534; Stop 558
taaacaattatccatccacaaccaa

SEQ ID NO: 114613 - DNA, 25 bp, Artificial
  probe
  misc_feature (1)..(25): SEQ ID NO: 5479; WAN024CDX_at; Start 328; Stop 352
gcaaaacataaaaagtcagagtcag

SEQ ID NO: 114614 - DNA, 25 bp, Artificial
  probe
  misc_feature (1)..(25): SEQ ID NO: 5479; WAN024CDX_at; Start 575; Stop 599
tgaaaatagagaaggtttatcaatc

SEQ ID NO: 114615 - DNA, 25 bp, Artificial
  probe
  misc_feature (1)..(25): SEQ ID NO: 5479; WAN024CDX_at; Start 153; Stop 177
gcctgactttgaacaagctagaaaa

SEQ ID NO: 114616 - DNA, 25 bp, Artificial
  probe
  misc_feature (1)..(25): SEQ ID NO: 5479; WAN024CDX_at; Start 474; Stop 498
tcgtcagaatgaaattacaaaagaa

SEQ ID NO: 114617 - DNA, 25 bp, Artificial
  probe
  misc_feature (1)..(25): SEQ ID NO: 5479; WAN024CDX_at; Start 169; Stop 193
gctagaaaatttattaacaagcaag

SEQ ID NO: 114618 - DNA, 25 bp, Artificial
  probe
  misc_feature (1)..(25): SEQ ID NO: 5479; WAN024CDX_at; Start 307; Stop 331
gactatcattgtcactattttgcaa

SEQ ID NO: 114619 - DNA, 25 bp, Artificial
  probe
  misc_feature (1)..(25): SEQ ID NO: 5479; WAN024CDX_at; Start 343; Stop 367
tcagagtcagatttagattttgctg

SEQ ID NO: 114620 - DNA, 25 bp, Artificial
  probe
  misc_feature (1)..(25): SEQ ID NO: 5479; WAN024CDX_at; Start 103; Stop 127
aaatttaatttaggaagtgagctag

SEQ ID NO: 114621 - DNA, 25 bp, Artificial
  probe
  misc_feature (1)..(25): SEQ ID NO: 5479; WAN024CDX_at; Start 432; Stop 456
tgttcagactgatgacaatccaacc

SEQ ID NO: 114622 - DNA, 25 bp, Artificial
  probe
  misc_feature (1)..(25): SEQ ID NO: 2434; WAN024CDY_at; Start 155; Stop 179
tgatgcatgttggtgtaacttcggt

SEQ ID NO: 114623 - DNA, 25 bp, Artificial
  probe
  misc_feature (1)..(25): SEQ ID NO: 2434; WAN024CDY_at; Start 102; Stop 126
tcagactgttgcagaaggctatgct

SEQ ID NO: 114624 - DNA, 25 bp, Artificial
  probe
  misc_feature (1)..(25): SEQ ID NO: 2434; WAN024CDY_at; Start 83; Stop 107
aattggataagcgtattgctcagac

SEQ ID NO: 114625 - DNA, 25 bp, Artificial
  probe
  misc_feature (1)..(25): SEQ ID NO: 2434; WAN024CDY_at; Start 136; Stop 160
gattattctgatcctgaactgatgc

SEQ ID NO: 114626 - DNA, 25 bp, Artificial
  probe
  misc_feature (1)..(25): SEQ ID NO: 2434; WAN024CDY_at; Start 142; Stop 166
tctgatcctgaactgatgcatgttg

SEQ ID NO: 114627 - DNA, 25 bp, Artificial
  probe
  misc_feature (1)..(25): SEQ ID NO: 2434; WAN024CDY_at; Start 170; Stop 194
taacttcggttgctaacaatctgct

SEQ ID NO: 114628 - DNA, 25 bp, Artificial
  probe
  misc_feature (1)..(25): SEQ ID NO: 2434; WAN024CDY_at; Start 79; Stop 103
tataaattggataagcgtattgctc

SEQ ID NO: 114629 - DNA, 25 bp, Artificial
  probe
  misc_feature (1)..(25): SEQ ID NO: 2434; WAN024CDY_at; Start 118; Stop 142
ggctatgctcgtaatctagattatt

SEQ ID NO: 114630 - DNA, 25 bp, Artificial
  probe
  misc_feature (1)..(25): SEQ ID NO: 2434; WAN024CDY_at; Start 96; Stop 120
tattgctcagactgttgcagaaggc

SEQ ID NO: 114631 - DNA, 25 bp, Artificial
  probe
  misc_feature (1)..(25): SEQ ID NO: 2434; WAN024CDY_at; Start 160; Stop 184
catgttggtgtaacttcggttgcta

SEQ ID NO: 114632 - DNA, 25 bp, Artificial
  probe
  misc_feature (1)..(25): SEQ ID NO: 2434; WAN024CDY_at; Start 139; Stop 163
tattctgatcctgaactgatgcatg

SEQ ID NO: 114633 - DNA, 25 bp, Artificial
  probe
  misc_feature (1)..(25): SEQ ID NO: 2434; WAN024CDY_at; Start 54; Stop 78
tcaagcactattaaaagcctctaat

SEQ ID NO: 114634 - DNA, 25 bp, Artificial
  probe
  misc_feature (1)..(25): SEQ ID NO: 2434; WAN024CDY_at; Start 2; Stop 26
tggcagtagtatcattggaaaataa

SEQ ID NO: 114635 - DNA, 25 bp, Artificial
  probe
  misc_feature (1)..(25): SEQ ID NO: 2434; WAN024CDY_at; Start 50; Stop 74
tatttcaagcactattaaaagcctc

SEQ ID NO: 114636 - DNA, 25 bp, Artificial
  probe
  misc_feature (1)..(25): SEQ ID NO: 2434; WAN024CDY_at; Start 145; Stop 169
gatcctgaactgatgcatgttggtg

SEQ ID NO: 114637 - DNA, 25 bp, Artificial
  probe
  misc_feature (1)..(25): SEQ ID NO: 2434; WAN024CDY_at; Start 115; Stop 139
gaaggctatgctcgtaatctagatt

SEQ ID NO: 114638 - DNA, 25 bp, Artificial
  probe
  misc_feature (1)..(25): SEQ ID NO: 2434; WAN024CDY_at; Start 10; Stop 34
gtatcattggaaaataatattaaac

SEQ ID NO: 114639 - DNA, 25 bp, Artificial
  probe
  misc_feature (1)..(25): SEQ ID NO: 2434; WAN024CDY_at; Start 86; Stop 110
tggataagcgtattgctcagactgt

SEQ ID NO: 114640 - DNA, 25 bp, Artificial
  probe
  misc_feature (1)..(25): SEQ ID NO: 2434; WAN024CDY_at; Start 37; Stop 61
tatagttcagaattatttcaagcac

SEQ ID NO: 114641 - DNA, 25 bp, Artificial
  probe
  misc_feature (1)..(25): SEQ ID NO: 2434; WAN024CDY_at; Start 99; Stop 123
tgctcagactgttgcagaaggctat

SEQ ID NO: 114642 - DNA, 25 bp, Artificial
  probe
  misc_feature (1)..(25): SEQ ID NO: 2434; WAN024CDY_at; Start 132; Stop 156
tctagattattctgatcctgaactg

SEQ ID NO: 114643 - DNA, 25 bp, Artificial
  probe
  misc_feature (1)..(25): SEQ ID NO: 2434; WAN024CDY_at; Start 191; Stop 215
tgcttacaaaaattaaacaagagta

SEQ ID NO: 114644 - DNA, 25 bp, Artificial
  probe
  misc_feature (1)..(25): SEQ ID NO: 2434; WAN024CDY_at; Start 92; Stop 116
agcgtattgctcagactgttgcaga

SEQ ID NO: 114645 - DNA, 25 bp, Artificial
  probe
  misc_feature (1)..(25): SEQ ID NO: 2434; WAN024CDY_at; Start 152; Stop 176
aactgatgcatgttggtgtaacttc

SEQ ID NO: 114646 - DNA, 25 bp, Artificial
  probe
  misc_feature (1)..(25): SEQ ID NO: 2434; WAN024CDY_at; Start 173; Stop 197
cttcggttgctaacaatctgcttac

SEQ ID NO: 114647 - DNA, 25 bp, Artificial
  probe
  misc_feature (1)..(25): SEQ ID NO: 2434; WAN024CDY_at; Start 177; Stop 201
ggttgctaacaatctgcttacaaaa

SEQ ID NO: 114648 - DNA, 25 bp, Artificial
  probe
  misc_feature (1)..(25): SEQ ID NO: 2434; WAN024CDY_at; Start 112; Stop 136
gcagaaggctatgctcgtaatctag

SEQ ID NO: 114649 - DNA, 25 bp, Artificial
  probe
  misc_feature (1)..(25): SEQ ID NO: 2434; WAN024CDY_at; Start 181; Stop 205
gctaacaatctgcttacaaaaatta

SEQ ID NO: 114650 - DNA, 25 bp, Artificial
  probe
  misc_feature (1)..(25): SEQ ID NO: 2434; WAN024CDY_at; Start 148; Stop 172
cctgaactgatgcatgttggtgtaa

SEQ ID NO: 114651 - DNA, 25 bp, Artificial
  probe
  misc_feature (1)..(25): SEQ ID NO: 2434; WAN024CDY_at; Start 105; Stop 129
gactgttgcagaaggctatgctcgt

SEQ ID NO: 114652 - DNA, 25 bp, Artificial
  probe
  misc_feature (1)..(25): SEQ ID NO: 2434; WAN024CDY_at; Start 166; Stop 190
ggtgtaacttcggttgctaacaatc

SEQ ID NO: 114653 - DNA, 25 bp, Artificial
  probe
  misc_feature (1)..(25): SEQ ID NO: 2434; WAN024CDY_at; Start 108; Stop 132
tgttgcagaaggctatgctcgtaat

SEQ ID NO: 114654 - DNA, 25 bp, Artificial
  probe
  misc_feature (1)..(25): SEQ ID NO: 2434; WAN024CDY_at; Start 65; Stop 89
taaaagcctctaattataaattgga

SEQ ID NO: 114655 - DNA, 25 bp, Artificial
  probe
  misc_feature (1)..(25): SEQ ID NO: 2434; WAN024CDY_at; Start 90; Stop 114
taagcgtattgctcagactgttgca

SEQ ID NO: 114656 - DNA, 25 bp, Artificial
  probe
  misc_feature (1)..(25): SEQ ID NO: 1426; WAN024CDZ_at; Start 189; Stop 213
tgtagagagtcaagccatgatcgct

SEQ ID NO: 114657 - DNA, 25 bp, Artificial
  probe
  misc_feature (1)..(25): SEQ ID NO: 1426; WAN024CDZ_at; Start 122; Stop 146
tccaagtgataactgatccaaatct

SEQ ID NO: 114658 - DNA, 25 bp, Artificial
  probe
  misc_feature (1)..(25): SEQ ID NO: 1426; WAN024CDZ_at; Start 22; Stop 46
gaaatcaccagacaagttgaaatag

SEQ ID NO: 114659 - DNA, 25 bp, Artificial
  probe
  misc_feature (1)..(25): SEQ ID NO: 1426; WAN024CDZ_at; Start 201; Stop 225
agccatgatcgcttacttcttcaac

SEQ ID NO: 114660 - DNA, 25 bp, Artificial
  probe
  misc_feature (1)..(25): SEQ ID NO: 1426; WAN024CDZ_at; Start 116; Stop 140
gtttcttccaagtgataactgatcc

SEQ ID NO: 114661 - DNA, 25 bp, Artificial
  probe
  misc_feature (1)..(25): SEQ ID NO: 1426; WAN024CDZ_at; Start 216; Stop 240
cttcttcaacttcaaacaagctgga

SEQ ID NO: 114662 - DNA, 25 bp, Artificial
  probe
  misc_feature (1)..(25): SEQ ID NO: 1426; WAN024CDZ_at; Start 207; Stop 231
gatcgcttacttcttcaacttcaaa

SEQ ID NO: 114663 - DNA, 25 bp, Artificial
  probe
  misc_feature (1)..(25): SEQ ID NO: 1426; WAN024CDZ_at; Start 166; Stop 190
tcctgtcccatctgtacgctctgtg

SEQ ID NO: 114664 - DNA, 25 bp, Artificial
  probe
  misc_feature (1)..(25): SEQ ID NO: 1426; WAN024CDZ_at; Start 127; Stop 151
gtgataactgatccaaatcttgaga

SEQ ID NO: 114665 - DNA, 25 bp, Artificial
  probe
  misc_feature (1)..(25): SEQ ID NO: 1426; WAN024CDZ_at; Start 52; Stop 76
gttggttggattgaccagcgtatcc

SEQ ID NO: 114666 - DNA, 25 bp, Artificial
  probe
  misc_feature (1)..(25): SEQ ID NO: 1426; WAN024CDZ_at; Start 157; Stop 181
agggaaccctcctgtcccatctgta

SEQ ID NO: 114667 - DNA, 25 bp, Artificial
  probe
  misc_feature (1)..(25): SEQ ID NO: 1426; WAN024CDZ_at; Start 8; Stop 32
tcaatcgtctgcgtgaaatcaccag

SEQ ID NO: 114668 - DNA, 25 bp, Artificial
  probe
  misc_feature (1)..(25): SEQ ID NO: 1426; WAN024CDZ_at; Start 90; Stop 114
ccttgtagctgatttcataggcacc

SEQ ID NO: 114669 - DNA, 25 bp, Artificial
  probe
  misc_feature (1)..(25): SEQ ID NO: 1426; WAN024CDZ_at; Start 226; Stop 250
ttcaaacaagctggaatcccaacca

SEQ ID NO: 114670 - DNA, 25 bp, Artificial
  probe
  misc_feature (1)..(25): SEQ ID NO: 1426; WAN024CDZ_at; Start 104; Stop 128
tcataggcaccagtttcttccaagt

SEQ ID NO: 114671 - DNA, 25 bp, Artificial
  probe
  misc_feature (1)..(25): SEQ ID NO: 1426; WAN024CDZ_at; Start 221; Stop 245
tcaacttcaaacaagctggaatccc

SEQ ID NO: 114672 - DNA, 25 bp, Artificial
  probe
  misc_feature (1)..(25): SEQ ID NO: 1426; WAN024CDZ_at; Start 60; Stop 84
gattgaccagcgtatcctgatcggt

SEQ ID NO: 114673 - DNA, 25 bp, Artificial
  probe
  misc_feature (1)..(25): SEQ ID NO: 1426; WAN024CDZ_at; Start 63; Stop 87
tgaccagcgtatcctgatcggtcgt

SEQ ID NO: 114674 - DNA, 25 bp, Artificial
  probe
  misc_feature (1)..(25): SEQ ID NO: 1426; WAN024CDZ_at; Start 44; Stop 68
tagctgtggttggttggattgacca

SEQ ID NO: 114675 - DNA, 25 bp, Artificial
  probe
  misc_feature (1)..(25): SEQ ID NO: 1426; WAN024CDZ_at; Start 29; Stop 53
ccagacaagttgaaatagctgtggt

SEQ ID NO: 114676 - DNA, 25 bp, Artificial
  probe
  misc_feature (1)..(25): SEQ ID NO: 1426; WAN024CDZ_at; Start 34; Stop 58
caagttgaaatagctgtggttggtt

SEQ ID NO: 114677 - DNA, 25 bp, Artificial
  probe
  misc_feature (1)..(25): SEQ ID NO: 1426; WAN024CDZ_at; Start 1; Stop 25
atgacggtcaatcgtctgcgtgaaa

SEQ ID NO: 114678 - DNA, 25 bp, Artificial
  probe
  misc_feature (1)..(25): SEQ ID NO: 1426; WAN024CDZ_at; Start 180; Stop 204
tacgctctgtgtagagagtcaagcc

SEQ ID NO: 114679 - DNA, 25 bp, Artificial
  probe
  misc_feature (1)..(25): SEQ ID NO: 1426; WAN024CDZ_at; Start 94; Stop 118
gtagctgatttcataggcaccagtt

SEQ ID NO: 114680 - DNA, 25 bp, Artificial
  probe
  misc_feature (1)..(25): SEQ ID NO: 1426; WAN024CDZ_at; Start 193; Stop 217
gagagtcaagccatgatcgcttact

SEQ ID NO: 114681 - DNA, 25 bp, Artificial
  probe
  misc_feature (1)..(25): SEQ ID NO: 1426; WAN024CDZ_at; Start 144; Stop 168
tcttgagatttccagggaaccctcc

SEQ ID NO: 114682 - DNA, 25 bp, Artificial
  probe
  misc_feature (1)..(25): SEQ ID NO: 1426; WAN024CDZ_at; Start 231; Stop 255
acaagctggaatcccaaccagttga

SEQ ID NO: 114683 - DNA, 25 bp, Artificial
  probe
  misc_feature (1)..(25): SEQ ID NO: 1426; WAN024CDZ_at; Start 17; Stop 41
tgcgtgaaatcaccagacaagttga

SEQ ID NO: 114684 - DNA, 25 bp, Artificial
  probe
  misc_feature (1)..(25): SEQ ID NO: 1426; WAN024CDZ_at; Start 100; Stop 124
gatttcataggcaccagtttcttcc

SEQ ID NO: 114685 - DNA, 25 bp, Artificial
  probe
  misc_feature (1)..(25): SEQ ID NO: 1426; WAN024CDZ_at; Start 109; Stop 133
ggcaccagtttcttccaagtgataa

SEQ ID NO: 114686 - DNA, 25 bp, Artificial
  probe
  misc_feature (1)..(25): SEQ ID NO: 1426; WAN024CDZ_at; Start 185; Stop 209
tctgtgtagagagtcaagccatgat

SEQ ID NO: 114687 - DNA, 25 bp, Artificial
  probe
  misc_feature (1)..(25): SEQ ID NO: 1426; WAN024CDZ_at; Start 172; Stop 196
cccatctgtacgctctgtgtagaga

SEQ ID NO: 114688 - DNA, 25 bp, Artificial
  probe
  misc_feature (1)..(25): SEQ ID NO: 1426; WAN024CDZ_at; Start 140; Stop 164
caaatcttgagatttccagggaacc

SEQ ID NO: 114689 - DNA, 25 bp, Artificial
  probe
  misc_feature (1)..(25): SEQ ID NO: 1426; WAN024CDZ_at; Start 148; Stop 172
gagatttccagggaaccctcctgtc

SEQ ID NO: 114690 - DNA, 25 bp, Artificial
  probe
  misc_feature (1)..(25): SEQ ID NO: 2122; WAN024CE2_at; Start 117; Stop 141
taacctcaagttggtagccaccgtc

SEQ ID NO: 114691 - DNA, 25 bp, Artificial
  probe
  misc_feature (1)..(25): SEQ ID NO: 2122; WAN024CE2_at; Start 256; Stop 280
gaaagcgtactgacaatctatggtt

SEQ ID NO: 114692 - DNA, 25 bp, Artificial
  probe
  misc_feature (1)..(25): SEQ ID NO: 2122; WAN024CE2_at; Start 232; Stop 256
tttctctcaagcaaacaaaccatag

SEQ ID NO: 114693 - DNA, 25 bp, Artificial
  probe
  misc_feature (1)..(25): SEQ ID NO: 2122; WAN024CE2_at; Start 57; Stop 81
tggcaaaatttccagccttgtcagg

SEQ ID NO: 114694 - DNA, 25 bp, Artificial
  probe
  misc_feature (1)..(25): SEQ ID NO: 2122; WAN024CE2_at; Start 12; Stop 36
tattgcctacataactatcaaagtc

SEQ ID NO: 114695 - DNA, 25 bp, Artificial
  probe
  misc_feature (1)..(25): SEQ ID NO: 2122; WAN024CE2_at; Start 320; Stop 344
aacactgtcttacttttgatattcg

SEQ ID NO: 114696 - DNA, 25 bp, Artificial
  probe
  misc_feature (1)..(25): SEQ ID NO: 2122; WAN024CE2_at; Start 75; Stop 99
tgtcaggtgcgacatagcgcaagat

SEQ ID NO: 114697 - DNA, 25 bp, Artificial
  probe
  misc_feature (1)..(25): SEQ ID NO: 2122; WAN024CE2_at; Start 101; Stop 125
gtcgcaccataagtcataacctcaa

SEQ ID NO: 114698 - DNA, 25 bp, Artificial
  probe
  misc_feature (1)..(25): SEQ ID NO: 2122; WAN024CE2_at; Start 206; Stop 230
gctttcattctgttctccttttact

SEQ ID NO: 114699 - DNA, 25 bp, Artificial
  probe
  misc_feature (1)..(25): SEQ ID NO: 2122; WAN024CE2_at; Start 67; Stop 91
tccagccttgtcaggtgcgacatag

SEQ ID NO: 114700 - DNA, 25 bp, Artificial
  probe
  misc_feature (1)..(25): SEQ ID NO: 2122; WAN024CE2_at; Start 2; Stop 26
tgcttgggactattgcctacataac

SEQ ID NO: 114701 - DNA, 25 bp, Artificial
  probe
  misc_feature (1)..(25): SEQ ID NO: 2122; WAN024CE2_at; Start 110; Stop 134
taagtcataacctcaagttggtagc

SEQ ID NO: 114702 - DNA, 25 bp, Artificial
  probe
  misc_feature (1)..(25): SEQ ID NO: 2122; WAN024CE2_at; Start 305; Stop 329
tgtcaagaattcataaacactgtct

SEQ ID NO: 114703 - DNA, 25 bp, Artificial
  probe
  misc_feature (1)..(25): SEQ ID NO: 2122; WAN024CE2_at; Start 124; Stop 148
aagttggtagccaccgtctgtctca

SEQ ID NO: 114704 - DNA, 25 bp, Artificial
  probe
  misc_feature (1)..(25): SEQ ID NO: 2122; WAN024CE2_at; Start 129; Stop 153
ggtagccaccgtctgtctcaaatcg

SEQ ID NO: 114705 - DNA, 25 bp, Artificial
  probe
  misc_feature (1)..(25): SEQ ID NO: 2122; WAN024CE2_at; Start 135; Stop 159
caccgtctgtctcaaatcgataggc

SEQ ID NO: 114706 - DNA, 25 bp, Artificial
  probe
  misc_feature (1)..(25): SEQ ID NO: 2122; WAN024CE2_at; Start 25; Stop 49
actatcaaagtcatcaaatcccaag

SEQ ID NO: 114707 - DNA, 25 bp, Artificial
  probe
  misc_feature (1)..(25): SEQ ID NO: 2122; WAN024CE2_at; Start 49; Stop 73
gataacattggcaaaatttccagcc

SEQ ID NO: 114708 - DNA, 25 bp, Artificial
  probe
  misc_feature (1)..(25): SEQ ID NO: 2122; WAN024CE2_at; Start 263; Stop 287
tactgacaatctatggtttatctga

SEQ ID NO: 114709 - DNA, 25 bp, Artificial
  probe
  misc_feature (1)..(25): SEQ ID NO: 2122; WAN024CE2_at; Start 302; Stop 326
tcttgtcaagaattcataaacactg

SEQ ID NO: 114710 - DNA, 25 bp, Artificial
  probe
  misc_feature (1)..(25): SEQ ID NO: 2122; WAN024CE2_at; Start 247; Stop 271
caaaccatagaaagcgtactgacaa

SEQ ID NO: 114711 - DNA, 25 bp, Artificial
  probe
  misc_feature (1)..(25): SEQ ID NO: 2122; WAN024CE2_at; Start 277; Stop 301
ggtttatctgataatttacaaatcc

SEQ ID NO: 114712 - DNA, 25 bp, Artificial
  probe
  misc_feature (1)..(25): SEQ ID NO: 2122; WAN024CE2_at; Start 324; Stop 348
ctgtcttacttttgatattcgtgaa

SEQ ID NO: 114713 - DNA, 25 bp, Artificial
  probe
  misc_feature (1)..(25): SEQ ID NO: 2122; WAN024CE2_at; Start 7; Stop 31
gggactattgcctacataactatca

SEQ ID NO: 114714 - DNA, 25 bp, Artificial
  probe
  misc_feature (1)..(25): SEQ ID NO: 2122; WAN024CE2_at; Start 139; Stop 163
gtctgtctcaaatcgataggccaag

SEQ ID NO: 114715 - DNA, 25 bp, Artificial
  probe
  misc_feature (1)..(25): SEQ ID NO: 2122; WAN024CE2_at; Start 288; Stop 312
taatttacaaatcctcttgtcaaga

SEQ ID NO: 114716 - DNA, 25 bp, Artificial
  probe
  misc_feature (1)..(25): SEQ ID NO: 2122; WAN024CE2_at; Start 178; Stop 202
aacatttccaaatacacgctctgtg

SEQ ID NO: 114717 - DNA, 25 bp, Artificial
  probe
  misc_feature (1)..(25): SEQ ID NO: 2122; WAN024CE2_at; Start 192; Stop 216
cacgctctgtgtatgctttcattct

SEQ ID NO: 114718 - DNA, 25 bp, Artificial
  probe
  misc_feature (1)..(25): SEQ ID NO: 2122; WAN024CE2_at; Start 222; Stop 246
ccttttactatttctctcaagcaaa

SEQ ID NO: 114719 - DNA, 25 bp, Artificial
  probe
  misc_feature (1)..(25): SEQ ID NO: 2122; WAN024CE2_at; Start 145; Stop 169
ctcaaatcgataggccaagacatcc

SEQ ID NO: 114720 - DNA, 25 bp, Artificial
  probe
  misc_feature (1)..(25): SEQ ID NO: 2122; WAN024CE2_at; Start 199; Stop 223
tgtgtatgctttcattctgttctcc

SEQ ID NO: 114721 - DNA, 25 bp, Artificial
  probe
  misc_feature (1)..(25): SEQ ID NO: 2122; WAN024CE2_at; Start 61; Stop 85
aaaatttccagccttgtcaggtgcg

SEQ ID NO: 114722 - DNA, 25 bp, Artificial
  probe
  misc_feature (1)..(25): SEQ ID NO: 2122; WAN024CE2_at; Start 36; Stop 60
catcaaatcccaagataacattggc

SEQ ID NO: 114723 - DNA, 25 bp, Artificial
  probe
  misc_feature (1)..(25): SEQ ID NO: 2122; WAN024CE2_at; Start 242; Stop 266
gcaaacaaaccatagaaagcgtact

SEQ ID NO: 114724 - DNA, 25 bp, Artificial
  probe
  misc_feature (1)..(25): SEQ ID NO: 3966; WAN024CE3_at; Start 57; Stop 81
gctcatccaccaaggatttggccaa

SEQ ID NO: 114725 - DNA, 25 bp, Artificial
  probe
  misc_feature (1)..(25): SEQ ID NO: 3966; WAN024CE3_at; Start 49; Stop 73
ttgataaagctcatccaccaaggat

SEQ ID NO: 114726 - DNA, 25 bp, Artificial
  probe
  misc_feature (1)..(25): SEQ ID NO: 3966; WAN024CE3_at; Start 71; Stop 95
gatttggccaaatcaacagtcgcca

SEQ ID NO: 114727 - DNA, 25 bp, Artificial
  probe
  misc_feature (1)..(25): SEQ ID NO: 3966; WAN024CE3_at; Start 153; Stop 177
ttttcaaataggttgctggattggc

SEQ ID NO: 114728 - DNA, 25 bp, Artificial
  probe
  misc_feature (1)..(25): SEQ ID NO: 3966; WAN024CE3_at; Start 157; Stop 181
caaataggttgctggattggcaacg

SEQ ID NO: 114729 - DNA, 25 bp, Artificial
  probe
  misc_feature (1)..(25): SEQ ID NO: 3966; WAN024CE3_at; Start 117; Stop 141
tacgagcaaaagacacaaggacagt

SEQ ID NO: 114730 - DNA, 25 bp, Artificial
  probe
  misc_feature (1)..(25): SEQ ID NO: 3966; WAN024CE3_at; Start 147; Stop 171
catcttttttcaaataggttgctgg

SEQ ID NO: 114731 - DNA, 25 bp, Artificial
  probe
  misc_feature (1)..(25): SEQ ID NO: 3966; WAN024CE3_at; Start 123; Stop 147
caaaagacacaaggacagttgccac

SEQ ID NO: 114732 - DNA, 25 bp, Artificial
  probe
  misc_feature (1)..(25): SEQ ID NO: 3966; WAN024CE3_at; Start 53; Stop 77
taaagctcatccaccaaggatttgg

SEQ ID NO: 114733 - DNA, 25 bp, Artificial
  probe
  misc_feature (1)..(25): SEQ ID NO: 3966; WAN024CE3_at; Start 119; Stop 143
cgagcaaaagacacaaggacagttg

SEQ ID NO: 114734 - DNA, 25 bp, Artificial
  probe
  misc_feature (1)..(25): SEQ ID NO: 3966; WAN024CE3_at; Start 31; Stop 55
tgcacaagtaatcgtcacttgataa

SEQ ID NO: 114735 - DNA, 25 bp, Artificial
  probe
  misc_feature (1)..(25): SEQ ID NO: 3966; WAN024CE3_at; Start 140; Stop 164
gttgccacatcttttttcaaatagg

SEQ ID NO: 114736 - DNA, 25 bp, Artificial
  probe
  misc_feature (1)..(25): SEQ ID NO: 3966; WAN024CE3_at; Start 178; Stop 202
aacgatatctgttgtcgcaatagca

SEQ ID NO: 114737 - DNA, 25 bp, Artificial
  probe
  misc_feature (1)..(25): SEQ ID NO: 3966; WAN024CE3_at; Start 130; Stop 154
cacaaggacagttgccacatctttt

SEQ ID NO: 114738 - DNA, 25 bp, Artificial
  probe
  misc_feature (1)..(25): SEQ ID NO: 3966; WAN024CE3_at; Start 39; Stop 63
taatcgtcacttgataaagctcatc

SEQ ID NO: 114739 - DNA, 25 bp, Artificial
  probe
  misc_feature (1)..(25): SEQ ID NO: 3966; WAN024CE3_at; Start 216; Stop 240
tgcgttcgtcatagacttccttaaa

SEQ ID NO: 114740 - DNA, 25 bp, Artificial
  probe
  misc_feature (1)..(25): SEQ ID NO: 3966; WAN024CE3_at; Start 62; Stop 86
tccaccaaggatttggccaaatcaa

SEQ ID NO: 114741 - DNA, 25 bp, Artificial
  probe
  misc_feature (1)..(25): SEQ ID NO: 3966; WAN024CE3_at; Start 166; Stop 190
tgctggattggcaacgatatctgtt

SEQ ID NO: 114742 - DNA, 25 bp, Artificial
  probe
  misc_feature (1)..(25): SEQ ID NO: 3966; WAN024CE3_at; Start 183; Stop 207
tatctgttgtcgcaatagcattgaa

SEQ ID NO: 114743 - DNA, 25 bp, Artificial
  probe
  misc_feature (1)..(25): SEQ ID NO: 3966; WAN024CE3_at; Start 128; Stop 152
gacacaaggacagttgccacatctt

SEQ ID NO: 114744 - DNA, 25 bp, Artificial
  probe
  misc_feature (1)..(25): SEQ ID NO: 3966; WAN024CE3_at; Start 126; Stop 150
aagacacaaggacagttgccacatc

SEQ ID NO: 114745 - DNA, 25 bp, Artificial
  probe
  misc_feature (1)..(25): SEQ ID NO: 3966; WAN024CE3_at; Start 207; Stop 231
aattccatttgcgttcgtcatagac

SEQ ID NO: 114746 - DNA, 25 bp, Artificial
  probe
  misc_feature (1)..(25): SEQ ID NO: 3966; WAN024CE3_at; Start 188; Stop 212
gttgtcgcaatagcattgaaattcc

SEQ ID NO: 114747 - DNA, 25 bp, Artificial
  probe
  misc_feature (1)..(25): SEQ ID NO: 3966; WAN024CE3_at; Start 42; Stop 66
tcgtcacttgataaagctcatccac

SEQ ID NO: 114748 - DNA, 25 bp, Artificial
  probe
  misc_feature (1)..(25): SEQ ID NO: 3966; WAN024CE3_at; Start 113; Stop 137
ccactacgagcaaaagacacaagga

SEQ ID NO: 114749 - DNA, 25 bp, Artificial
  probe
  misc_feature (1)..(25): SEQ ID NO: 3966; WAN024CE3_at; Start 171; Stop 195
gattggcaacgatatctgttgtcgc

SEQ ID NO: 114750 - DNA, 25 bp, Artificial
  probe
  misc_feature (1)..(25): SEQ ID NO: 3966; WAN024CE3_at; Start 5; Stop 29
gcttgaagagccaatttaccatctg

SEQ ID NO: 114751 - DNA, 25 bp, Artificial
  probe
  misc_feature (1)..(25): SEQ ID NO: 3966; WAN024CE3_at; Start 205; Stop 229
gaaattccatttgcgttcgtcatag

SEQ ID NO: 114752 - DNA, 25 bp, Artificial
  probe
  misc_feature (1)..(25): SEQ ID NO: 3966; WAN024CE3_at; Start 110; Stop 134
ttcccactacgagcaaaagacacaa

SEQ ID NO: 114753 - DNA, 25 bp, Artificial
  probe
  misc_feature (1)..(25): SEQ ID NO: 3966; WAN024CE3_at; Start 1; Stop 25
gtgagcttgaagagccaatttacca

SEQ ID NO: 114754 - DNA, 25 bp, Artificial
  probe
  misc_feature (1)..(25): SEQ ID NO: 3966; WAN024CE3_at; Start 136; Stop 160
gacagttgccacatcttttttcaaa

SEQ ID NO: 114755 - DNA, 25 bp, Artificial
  probe
  misc_feature (1)..(25): SEQ ID NO: 3966; WAN024CE3_at; Start 195; Stop 219
caatagcattgaaattccatttgcg

SEQ ID NO: 114756 - DNA, 25 bp, Artificial
  probe
  misc_feature (1)..(25): SEQ ID NO: 3966; WAN024CE3_at; Start 201; Stop 225
cattgaaattccatttgcgttcgtc

SEQ ID NO: 114757 - DNA, 25 bp, Artificial
  probe
  misc_feature (1)..(25): SEQ ID NO: 3966; WAN024CE3_at; Start 212; Stop 236
catttgcgttcgtcatagacttcct

SEQ ID NO: 114758 - DNA, 25 bp, Artificial
  probe
  misc_feature (1)..(25): SEQ ID NO: 5565; WAN024CE4_at; Start 199; Stop 223
gaccaaaacaactgtattgtcgttg

SEQ ID NO: 114759 - DNA, 25 bp, Artificial
  probe
  misc_feature (1)..(25): SEQ ID NO: 5565; WAN024CE4_at; Start 184; Stop 208
tgtcgttgtaccaaagaccaaaaca

SEQ ID NO: 114760 - DNA, 25 bp, Artificial
  probe
  misc_feature (1)..(25): SEQ ID NO: 5565; WAN024CE4_at; Start 190; Stop 214
tgtaccaaagaccaaaacaactgta

SEQ ID NO: 114761 - DNA, 25 bp, Artificial
  probe
  misc_feature (1)..(25): SEQ ID NO: 5565; WAN024CE4_at; Start 87; Stop 111
gaccaaaagcttgatcactcaaaag

SEQ ID NO: 114762 - DNA, 25 bp, Artificial
  probe
  misc_feature (1)..(25): SEQ ID NO: 5565; WAN024CE4_at; Start 179; Stop 203
tagtctgtcgttgtaccaaagacca

SEQ ID NO: 114763 - DNA, 25 bp, Artificial
  probe
  misc_feature (1)..(25): SEQ ID NO: 5565; WAN024CE4_at; Start 230; Stop 254
gattttggaccgtgacggaagccaa

SEQ ID NO: 114764 - DNA, 25 bp, Artificial
  probe
  misc_feature (1)..(25): SEQ ID NO: 5565; WAN024CE4_at; Start 164; Stop 188
tcgtacttacgagtgtagtctgtcg

SEQ ID NO: 114765 - DNA, 25 bp, Artificial
  probe
  misc_feature (1)..(25): SEQ ID NO: 5565; WAN024CE4_at; Start 35; Stop 59
atatcattcaagacaccgccacaac

SEQ ID NO: 114766 - DNA, 25 bp, Artificial
  probe
  misc_feature (1)..(25): SEQ ID NO: 5565; WAN024CE4_at; Start 6; Stop 30
cataaacgatgtaagggaagacacg

SEQ ID NO: 114767 - DNA, 25 bp, Artificial
  probe
  misc_feature (1)..(25): SEQ ID NO: 5565; WAN024CE4_at; Start 99; Stop 123
gatcactcaaaagcacaacacgacg

SEQ ID NO: 114768 - DNA, 25 bp, Artificial
  probe
  misc_feature (1)..(25): SEQ ID NO: 5565; WAN024CE4_at; Start 118; Stop 142
acgacgagcaatctggtcaccagca

SEQ ID NO: 114769 - DNA, 25 bp, Artificial
  probe
  misc_feature (1)..(25): SEQ ID NO: 5565; WAN024CE4_at; Start 207; Stop 231
caactgtattgtcgttgataagaga

SEQ ID NO: 114770 - DNA, 25 bp, Artificial
  probe
  misc_feature (1)..(25): SEQ ID NO: 5565; WAN024CE4_at; Start 140; Stop 164
gcaacttcacgaaccaagtccaagt

SEQ ID NO: 114771 - DNA, 25 bp, Artificial
  probe
  misc_feature (1)..(25): SEQ ID NO: 5565; WAN024CE4_at; Start 258; Stop 282
ggctttcatacatggtcgcaacttg

SEQ ID NO: 114772 - DNA, 25 bp, Artificial
  probe
  misc_feature (1)..(25): SEQ ID NO: 5565; WAN024CE4_at; Start 222; Stop 246
tgataagagattttggaccgtgacg

SEQ ID NO: 114773 - DNA, 25 bp, Artificial
  probe
  misc_feature (1)..(25): SEQ ID NO: 5565; WAN024CE4_at; Start 31; Stop 55
gtaaatatcattcaagacaccgcca

SEQ ID NO: 114774 - DNA, 25 bp, Artificial
  probe
  misc_feature (1)..(25): SEQ ID NO: 5565; WAN024CE4_at; Start 55; Stop 79
acaaccaagggccacttctttgaca

SEQ ID NO: 114775 - DNA, 25 bp, Artificial
  probe
  misc_feature (1)..(25): SEQ ID NO: 5565; WAN024CE4_at; Start 147; Stop 171
cacgaaccaagtccaagtcgtactt

SEQ ID NO: 114776 - DNA, 25 bp, Artificial
  probe
  misc_feature (1)..(25): SEQ ID NO: 5565; WAN024CE4_at; Start 75; Stop 99
tgacattttcaagaccaaaagcttg

SEQ ID NO: 114777 - DNA, 25 bp, Artificial
  probe
  misc_feature (1)..(25): SEQ ID NO: 5565; WAN024CE4_at; Start 173; Stop 197
cgagtgtagtctgtcgttgtaccaa

SEQ ID NO: 114778 - DNA, 25 bp, Artificial
  probe
  misc_feature (1)..(25): SEQ ID NO: 5565; WAN024CE4_at; Start 112; Stop 136
cacaacacgacgagcaatctggtca

SEQ ID NO: 114779 - DNA, 25 bp, Artificial
  probe
  misc_feature (1)..(25): SEQ ID NO: 5565; WAN024CE4_at; Start 270; Stop 294
tggtcgcaacttgaccagcagttaa

SEQ ID NO: 114780 - DNA, 25 bp, Artificial
  probe
  misc_feature (1)..(25): SEQ ID NO: 5565; WAN024CE4_at; Start 225; Stop 249
taagagattttggaccgtgacggaa

SEQ ID NO: 114781 - DNA, 25 bp, Artificial
  probe
  misc_feature (1)..(25): SEQ ID NO: 5565; WAN024CE4_at; Start 237; Stop 261
gaccgtgacggaagccaactgggct

SEQ ID NO: 114782 - DNA, 25 bp, Artificial
  probe
  misc_feature (1)..(25): SEQ ID NO: 5565; WAN024CE4_at; Start 1; Stop 25
ttgggcataaacgatgtaagggaag

SEQ ID NO: 114783 - DNA, 25 bp, Artificial
  probe
  misc_feature (1)..(25): SEQ ID NO: 5565; WAN024CE4_at; Start 63; Stop 87
gggccacttctttgacattttcaag

SEQ ID NO: 114784 - DNA, 25 bp, Artificial
  probe
  misc_feature (1)..(25): SEQ ID NO: 5565; WAN024CE4_at; Start 252; Stop 276
caactgggctttcatacatggtcgc

SEQ ID NO: 114785 - DNA, 25 bp, Artificial
  probe
  misc_feature (1)..(25): SEQ ID NO: 5565; WAN024CE4_at; Start 17; Stop 41
taagggaagacacggtaaatatcat

SEQ ID NO: 114786 - DNA, 25 bp, Artificial
  probe
  misc_feature (1)..(25): SEQ ID NO: 5565; WAN024CE4_at; Start 25; Stop 49
gacacggtaaatatcattcaagaca

SEQ ID NO: 114787 - DNA, 25 bp, Artificial
  probe
  misc_feature (1)..(25): SEQ ID NO: 5565; WAN024CE4_at; Start 105; Stop 129
tcaaaagcacaacacgacgagcaat

SEQ ID NO: 114788 - DNA, 25 bp, Artificial
  probe
  misc_feature (1)..(25): SEQ ID NO: 5565; WAN024CE4_at; Start 243; Stop 267
gacggaagccaactgggctttcata

SEQ ID NO: 114789 - DNA, 25 bp, Artificial
  probe
  misc_feature (1)..(25): SEQ ID NO: 5565; WAN024CE4_at; Start 129; Stop 153
tctggtcaccagcaacttcacgaac

SEQ ID NO: 114790 - DNA, 25 bp, Artificial
  probe
  misc_feature (1)..(25): SEQ ID NO: 5565; WAN024CE4_at; Start 154; Stop 178
caagtccaagtcgtacttacgagtg

SEQ ID NO: 114791 - DNA, 25 bp, Artificial
  probe
  misc_feature (1)..(25): SEQ ID NO: 5565; WAN024CE4_at; Start 266; Stop 290
tacatggtcgcaacttgaccagcag

SEQ ID NO: 114792 - DNA, 25 bp, Artificial
  probe
  misc_feature (1)..(25): SEQ ID NO: 1346; WAN024CE5_at; Start 71; Stop 95
gactagatacaacttcaaaacgttc

SEQ ID NO: 114793 - DNA, 25 bp, Artificial
  probe
  misc_feature (1)..(25): SEQ ID NO: 1346; WAN024CE5_at; Start 2; Stop 26
tgacacggttaaagtctaaatcaac

SEQ ID NO: 114794 - DNA, 25 bp, Artificial
  probe
  misc_feature (1)..(25): SEQ ID NO: 1346; WAN024CE5_at; Start 36; Stop 60
gacatcttctgccttgtctaaaact

SEQ ID NO: 114795 - DNA, 25 bp, Artificial
  probe
  misc_feature (1)..(25): SEQ ID NO: 1346; WAN024CE5_at; Start 188; Stop 212
tagagacagctggttgcaagagcaa

SEQ ID NO: 114796 - DNA, 25 bp, Artificial
  probe
  misc_feature (1)..(25): SEQ ID NO: 1346; WAN024CE5_at; Start 138; Stop 162
tgtcaacatcatagacgtaaagcta

SEQ ID NO: 114797 - DNA, 25 bp, Artificial
  probe
  misc_feature (1)..(25): SEQ ID NO: 1346; WAN024CE5_at; Start 159; Stop 183
gctagaagtcatggcaaatccagca

SEQ ID NO: 114798 - DNA, 25 bp, Artificial
  probe
  misc_feature (1)..(25): SEQ ID NO: 1346; WAN024CE5_at; Start 190; Stop 214
gagacagctggttgcaagagcaaga

SEQ ID NO: 114799 - DNA, 25 bp, Artificial
  probe
  misc_feature (1)..(25): SEQ ID NO: 1346; WAN024CE5_at; Start 104; Stop 128
cagcaaattctgtaggatcaaagac

SEQ ID NO: 114800 - DNA, 25 bp, Artificial
  probe
  misc_feature (1)..(25): SEQ ID NO: 1346; WAN024CE5_at; Start 27; Stop 51
gagctctttgacatcttctgccttg

SEQ ID NO: 114801 - DNA, 25 bp, Artificial
  probe
  misc_feature (1)..(25): SEQ ID NO: 1346; WAN024CE5_at; Start 185; Stop 209
cattagagacagctggttgcaagag

SEQ ID NO: 114802 - DNA, 25 bp, Artificial
  probe
  misc_feature (1)..(25): SEQ ID NO: 1346; WAN024CE5_at; Start 85; Stop 109
tcaaaacgttcagacttaacagcaa

SEQ ID NO: 114803 - DNA, 25 bp, Artificial
  probe
  misc_feature (1)..(25): SEQ ID NO: 1346; WAN024CE5_at; Start 95; Stop 119
cagacttaacagcaaattctgtagg

SEQ ID NO: 114804 - DNA, 25 bp, Artificial
  probe
  misc_feature (1)..(25): SEQ ID NO: 1346; WAN024CE5_at; Start 65; Stop 89
gggcaagactagatacaacttcaaa

SEQ ID NO: 114805 - DNA, 25 bp, Artificial
  probe
  misc_feature (1)..(25): SEQ ID NO: 1346; WAN024CE5_at; Start 57; Stop 81
aactttacgggcaagactagataca

SEQ ID NO: 114806 - DNA, 25 bp, Artificial
  probe
  misc_feature (1)..(25): SEQ ID NO: 1346; WAN024CE5_at; Start 112; Stop 136
tctgtaggatcaaagaccaagagag

SEQ ID NO: 114807 - DNA, 25 bp, Artificial
  probe
  misc_feature (1)..(25): SEQ ID NO: 1346; WAN024CE5_at; Start 149; Stop 173
tagacgtaaagctagaagtcatggc

SEQ ID NO: 114808 - DNA, 25 bp, Artificial
  probe
  misc_feature (1)..(25): SEQ ID NO: 1346; WAN024CE5_at; Start 8; Stop 32
ggttaaagtctaaatcaacgagctc

SEQ ID NO: 114809 - DNA, 25 bp, Artificial
  probe
  misc_feature (1)..(25): SEQ ID NO: 1346; WAN024CE5_at; Start 91; Stop 115
cgttcagacttaacagcaaattctg

SEQ ID NO: 114810 - DNA, 25 bp, Artificial
  probe
  misc_feature (1)..(25): SEQ ID NO: 1346; WAN024CE5_at; Start 76; Stop 100
gatacaacttcaaaacgttcagact

SEQ ID NO: 114811 - DNA, 25 bp, Artificial
  probe
  misc_feature (1)..(25): SEQ ID NO: 1346; WAN024CE5_at; Start 170; Stop 194
tggcaaatccagcatcattagagac

SEQ ID NO: 114812 - DNA, 25 bp, Artificial
  probe
  misc_feature (1)..(25): SEQ ID NO: 1346; WAN024CE5_at; Start 107; Stop 131
caaattctgtaggatcaaagaccaa

SEQ ID NO: 114813 - DNA, 25 bp, Artificial
  probe
  misc_feature (1)..(25): SEQ ID NO: 1346; WAN024CE5_at; Start 18; Stop 42
taaatcaacgagctctttgacatct

SEQ ID NO: 114814 - DNA, 25 bp, Artificial
  probe
  misc_feature (1)..(25): SEQ ID NO: 1346; WAN024CE5_at; Start 182; Stop 206
catcattagagacagctggttgcaa

SEQ ID NO: 114815 - DNA, 25 bp, Artificial
  probe
  misc_feature (1)..(25): SEQ ID NO: 1346; WAN024CE5_at; Start 155; Stop 179
taaagctagaagtcatggcaaatcc

SEQ ID NO: 114816 - DNA, 25 bp, Artificial
  probe
  misc_feature (1)..(25): SEQ ID NO: 1346; WAN024CE5_at; Start 62; Stop 86
tacgggcaagactagatacaacttc

SEQ ID NO: 114817 - DNA, 25 bp, Artificial
  probe
  misc_feature (1)..(25): SEQ ID NO: 1346; WAN024CE5_at; Start 144; Stop 168
catcatagacgtaaagctagaagtc

SEQ ID NO: 114818 - DNA, 25 bp, Artificial
  probe
  misc_feature (1)..(25): SEQ ID NO: 1346; WAN024CE5_at; Start 197; Stop 221
ctggttgcaagagcaagagattacg

SEQ ID NO: 114819 - DNA, 25 bp, Artificial
  probe
  misc_feature (1)..(25): SEQ ID NO: 1346; WAN024CE5_at; Start 24; Stop 48
aacgagctctttgacatcttctgcc

SEQ ID NO: 114820 - DNA, 25 bp, Artificial
  probe
  misc_feature (1)..(25): SEQ ID NO: 1346; WAN024CE5_at; Start 173; Stop 197
caaatccagcatcattagagacagc

SEQ ID NO: 114821 - DNA, 25 bp, Artificial
  probe
  misc_feature (1)..(25): SEQ ID NO: 1346; WAN024CE5_at; Start 194; Stop 218
cagctggttgcaagagcaagagatt

SEQ ID NO: 114822 - DNA, 25 bp, Artificial
  probe
  misc_feature (1)..(25): SEQ ID NO: 1346; WAN024CE5_at; Start 13; Stop 37
aagtctaaatcaacgagctctttga

SEQ ID NO: 114823 - DNA, 25 bp, Artificial
  probe
  misc_feature (1)..(25): SEQ ID NO: 1346; WAN024CE5_at; Start 45; Stop 69
tgccttgtctaaaactttacgggca

SEQ ID NO: 114824 - DNA, 25 bp, Artificial
  probe
  misc_feature (1)..(25): SEQ ID NO: 1346; WAN024CE5_at; Start 166; Stop 190
gtcatggcaaatccagcatcattag

SEQ ID NO: 114825 - DNA, 25 bp, Artificial
  probe
  misc_feature (1)..(25): SEQ ID NO: 1346; WAN024CE5_at; Start 163; Stop 187
gaagtcatggcaaatccagcatcat

SEQ ID NO: 114826 - DNA, 25 bp, Artificial
  probe
  misc_feature (1)..(25): SEQ ID NO: 894; WAN024CE6_at; Start 267; Stop 291
caatggtaagacctatgaccttgag

SEQ ID NO: 114827 - DNA, 25 bp, Artificial
  probe
  misc_feature (1)..(25): SEQ ID NO: 894; WAN024CE6_at; Start 466; Stop 490
ggtgcctatgaaatcagctacaagg

SEQ ID NO: 114828 - DNA, 25 bp, Artificial
  probe
  misc_feature (1)..(25): SEQ ID NO: 894; WAN024CE6_at; Start 717; Stop 741
tgagcaaatccagctggcatcaggt

SEQ ID NO: 114829 - DNA, 25 bp, Artificial
  probe
  misc_feature (1)..(25): SEQ ID NO: 894; WAN024CE6_at; Start 847; Stop 871
gtggtctacacagcaaactttgtgg

SEQ ID NO: 114830 - DNA, 25 bp, Artificial
  probe
  misc_feature (1)..(25): SEQ ID NO: 894; WAN024CE6_at; Start 448; Stop 472
tatcacttggaagaaactggtgcct

SEQ ID NO: 114831 - DNA, 25 bp, Artificial
  probe
  misc_feature (1)..(25): SEQ ID NO: 894; WAN024CE6_at; Start 248; Stop 272
caggtgcgacctttgagctcaatgg

SEQ ID NO: 114832 - DNA, 25 bp, Artificial
  probe
  misc_feature (1)..(25): SEQ ID NO: 894; WAN024CE6_at; Start 951; Stop 975
cattcacagtgaccttaaaggccaa

SEQ ID NO: 114833 - DNA, 25 bp, Artificial
  probe
  misc_feature (1)..(25): SEQ ID NO: 894; WAN024CE6_at; Start 762; Stop 786
tcctgcaggccatgacaatgctgga

SEQ ID NO: 114834 - DNA, 25 bp, Artificial
  probe
  misc_feature (1)..(25): SEQ ID NO: 894; WAN024CE6_at; Start 192; Stop 216
tgtaggcaatagtcccaagcatgga

SEQ ID NO: 114835 - DNA, 25 bp, Artificial
  probe
  misc_feature (1)..(25): SEQ ID NO: 894; WAN024CE6_at; Start 283; Stop 307
gaccttgaggttaataatgctagca

SEQ ID NO: 114836 - DNA, 25 bp, Artificial
  probe
  misc_feature (1)..(25): SEQ ID NO: 894; WAN024CE6_at; Start 73; Stop 97
gacggtggctaccaacttgaggtta

SEQ ID NO: 114837 - DNA, 25 bp, Artificial
  probe
  misc_feature (1)..(25): SEQ ID NO: 894; WAN024CE6_at; Start 370; Stop 394
gatcatggcttgactctctacacag

SEQ ID NO: 114838 - DNA, 25 bp, Artificial
  probe
  misc_feature (1)..(25): SEQ ID NO: 894; WAN024CE6_at; Start 832; Stop 856
gaagctccttgctttgtggtctaca

SEQ ID NO: 114839 - DNA, 25 bp, Artificial
  probe
  misc_feature (1)..(25): SEQ ID NO: 894; WAN024CE6_at; Start 207; Stop 231
caagcatggagcaagtgtaggtcct

SEQ ID NO: 114840 - DNA, 25 bp, Artificial
  probe
  misc_feature (1)..(25): SEQ ID NO: 894; WAN024CE6_at; Start 513; Stop 537
ggtcaatccaaccaaccacagctat

SEQ ID NO: 114841 - DNA, 25 bp, Artificial
  probe
  misc_feature (1)..(25): SEQ ID NO: 894; WAN024CE6_at; Start 89; Stop 113
ttgaggttatgacttatggtgcgac

SEQ ID NO: 114842 - DNA, 25 bp, Artificial
  probe
  misc_feature (1)..(25): SEQ ID NO: 894; WAN024CE6_at; Start 579; Stop 603
tgtcttccaactaaacacagagggc

SEQ ID NO: 114843 - DNA, 25 bp, Artificial
  probe
  misc_feature (1)..(25): SEQ ID NO: 894; WAN024CE6_at; Start 637; Stop 661
aaaactccagaagccaaccgtgatg

SEQ ID NO: 114844 - DNA, 25 bp, Artificial
  probe
  misc_feature (1)..(25): SEQ ID NO: 894; WAN024CE6_at; Start 116; Stop 140
tcttgcgctatgtcgcacctgacaa

SEQ ID NO: 114845 - DNA, 25 bp, Artificial
  probe
  misc_feature (1)..(25): SEQ ID NO: 894; WAN024CE6_at; Start 662; Stop 686
tggtcaaacacgtctacaatggtac

SEQ ID NO: 114846 - DNA, 25 bp, Artificial
  probe
  misc_feature (1)..(25): SEQ ID NO: 894; WAN024CE6_at; Start 388; Stop 412
tacacagagcgtacagatgggacag

SEQ ID NO: 114847 - DNA, 25 bp, Artificial
  probe
  misc_feature (1)..(25): SEQ ID NO: 894; WAN024CE6_at; Start 874; Stop 898
gaaagtgtcatcataggaggtcagc

SEQ ID NO: 114848 - DNA, 25 bp, Artificial
  probe
  misc_feature (1)..(25): SEQ ID NO: 894; WAN024CE6_at; Start 889; Stop 913
ggaggtcagccaatgctacagcaca

SEQ ID NO: 114849 - DNA, 25 bp, Artificial
  probe
  misc_feature (1)..(25): SEQ ID NO: 894; WAN024CE6_at; Start 928; Stop 952
gaagcgcaagctttaccagatgcca

SEQ ID NO: 114850 - DNA, 25 bp, Artificial
  probe
  misc_feature (1)..(25): SEQ ID NO: 894; WAN024CE6_at; Start 494; Stop 518
cgaccgatcaggatacgctggtcaa

SEQ ID NO: 114851 - DNA, 25 bp, Artificial
  probe
  misc_feature (1)..(25): SEQ ID NO: 894; WAN024CE6_at; Start 222; Stop 246
tgtaggtcctgtagcgggtcgtatt

SEQ ID NO: 114852 - DNA, 25 bp, Artificial
  probe
  misc_feature (1)..(25): SEQ ID NO: 894; WAN024CE6_at; Start 912; Stop 936
caatgggattgctcttgaagcgcaa

SEQ ID NO: 114853 - DNA, 25 bp, Artificial
  probe
  misc_feature (1)..(25): SEQ ID NO: 894; WAN024CE6_at; Start 998; Stop 1022
ccttcaccagtaagacacgttatga

SEQ ID NO: 114854 - DNA, 25 bp, Artificial
  probe
  misc_feature (1)..(25): SEQ ID NO: 894; WAN024CE6_at; Start 968; Stop 992
aaggccaagtcattcttaaagctgg

SEQ ID NO: 114855 - DNA, 25 bp, Artificial
  probe
  misc_feature (1)..(25): SEQ ID NO: 894; WAN024CE6_at; Start 131; Stop 155
cacctgacaaggctggaaattttgc

SEQ ID NO: 114856 - DNA, 25 bp, Artificial
  probe
  misc_feature (1)..(25): SEQ ID NO: 894; WAN024CE6_at; Start 594; Stop 618
cacagagggcatttactcaatcgct

SEQ ID NO: 114857 - DNA, 25 bp, Artificial
  probe
  misc_feature (1)..(25): SEQ ID NO: 894; WAN024CE6_at; Start 552; Stop 576
tgatttcacgcagacgattgaccgt

SEQ ID NO: 114858 - DNA, 25 bp, Artificial
  probe
  misc_feature (1)..(25): SEQ ID NO: 894; WAN024CE6_at; Start 58; Stop 82
tatcgatttgagacagacggtggct

SEQ ID NO: 114859 - DNA, 25 bp, Artificial
  probe
  misc_feature (1)..(25): SEQ ID NO: 894; WAN024CE6_at; Start 808; Stop 832
ggtcgcttcctgcttttcaagacag

SEQ ID NO: 114860 - DNA, 25 bp, Artificial
  probe
  misc_feature (1)..(25): SEQ ID NO: 2535; WAN024CE7_at; Start 70; Stop 94
aagaagacttgctcgaattgggtgc

SEQ ID NO: 114861 - DNA, 25 bp, Artificial
  probe
  misc_feature (1)..(25): SEQ ID NO: 2535; WAN024CE7_at; Start 284; Stop 308
taaggaagtctatgacgaacgcaaa

SEQ ID NO: 114862 - DNA, 25 bp, Artificial
  probe
  misc_feature (1)..(25): SEQ ID NO: 2535; WAN024CE7_at; Start 924; Stop 948
gactacactcgtaagtacgacttgg

SEQ ID NO: 114863 - DNA, 25 bp, Artificial
  probe
  misc_feature (1)..(25): SEQ ID NO: 2535; WAN024CE7_at; Start 317; Stop 341
caatgctattgcgacaacagatatc

SEQ ID NO: 114864 - DNA, 25 bp, Artificial
  probe
  misc_feature (1)..(25): SEQ ID NO: 2535; WAN024CE7_at; Start 687; Stop 711
cgtaaagttttagacaaggcagaag

SEQ ID NO: 114865 - DNA, 25 bp, Artificial
  probe
  misc_feature (1)..(25): SEQ ID NO: 2535; WAN024CE7_at; Start 1023; Stop 1047
gaaaatgtcaaagaagtggcccttg

SEQ ID NO: 114866 - DNA, 25 bp, Artificial
  probe
  misc_feature (1)..(25): SEQ ID NO: 2535; WAN024CE7_at; Start 969; Stop 993
ggtgaccagattgctcgtcgtgttg

SEQ ID NO: 114867 - DNA, 25 bp, Artificial
  probe
  misc_feature (1)..(25): SEQ ID NO: 2535; WAN024CE7_at; Start 162; Stop 186
gcaaaacgtgaagaaattgcagcct

SEQ ID NO: 114868 - DNA, 25 bp, Artificial
  probe
  misc_feature (1)..(25): SEQ ID NO: 2535; WAN024CE7_at; Start 811; Stop 835
aattaactgctggtcaagttgcgac

SEQ ID NO: 114869 - DNA, 25 bp, Artificial
  probe
  misc_feature (1)..(25): SEQ ID NO: 2535; WAN024CE7_at; Start 332; Stop 356
aacagatatcgttgccaatccagca

SEQ ID NO: 114870 - DNA, 25 bp, Artificial
  probe
  misc_feature (1)..(25): SEQ ID NO: 2535; WAN024CE7_at; Start 755; Stop 779
tctaggcgctggtcctttctttgga

SEQ ID NO: 114871 - DNA, 25 bp, Artificial
  probe
  misc_feature (1)..(25): SEQ ID NO: 2535; WAN024CE7_at; Start 666; Stop 690
gaagttgtatctagtcttgcccgta

SEQ ID NO: 114872 - DNA, 25 bp, Artificial
  probe
  misc_feature (1)..(25): SEQ ID NO: 2535; WAN024CE7_at; Start 372; Stop 396
gatgtggcaactgtccttgtgtctt

SEQ ID NO: 114873 - DNA, 25 bp, Artificial
  probe
  misc_feature (1)..(25): SEQ ID NO: 2535; WAN024CE7_at; Start 774; Stop 798
tttggacttgctcatgaagctcagc

SEQ ID NO: 114874 - DNA, 25 bp, Artificial
  probe
  misc_feature (1)..(25): SEQ ID NO: 2535; WAN024CE7_at; Start 442; Stop 466
tggccaaatccttggtggatgagct

SEQ ID NO: 114875 - DNA, 25 bp, Artificial
  probe
  misc_feature (1)..(25): SEQ ID NO: 2535; WAN024CE7_at; Start 239; Stop 263
tgctgggacttctgcttatgtggga

SEQ ID NO: 114876 - DNA, 25 bp, Artificial
  probe
  misc_feature (1)..(25): SEQ ID NO: 2535; WAN024CE7_at; Start 457; Stop 481
tggatgagctttatcaagtgacgat

SEQ ID NO: 114877 - DNA, 25 bp, Artificial
  probe
  misc_feature (1)..(25): SEQ ID NO: 2535; WAN024CE7_at; Start 221; Stop 245
taaggttatcttgacaggtgctggg

SEQ ID NO: 114878 - DNA, 25 bp, Artificial
  probe
  misc_feature (1)..(25): SEQ ID NO: 2535; WAN024CE7_at; Start 789; Stop 813
gaagctcagctcaagattttggaat

SEQ ID NO: 114879 - DNA, 25 bp, Artificial
  probe
  misc_feature (1)..(25): SEQ ID NO: 2535; WAN024CE7_at; Start 85; Stop 109
aattgggtgcagaaatcactacgcg

SEQ ID NO: 114880 - DNA, 25 bp, Artificial
  probe
  misc_feature (1)..(25): SEQ ID NO: 2535; WAN024CE7_at; Start 858; Stop 882
ttccgtcacggtccaaaatctctta

SEQ ID NO: 114881 - DNA, 25 bp, Artificial
  probe
  misc_feature (1)..(25): SEQ ID NO: 2535; WAN024CE7_at; Start 828; Stop 852
gttgcgaccatgtatgaaagcccag

SEQ ID NO: 114882 - DNA, 25 bp, Artificial
  probe
  misc_feature (1)..(25): SEQ ID NO: 2535; WAN024CE7_at; Start 1149; Stop 1173
gatacaccgtctcctacaggtacag

SEQ ID NO: 114883 - DNA, 25 bp, Artificial
  probe
  misc_feature (1)..(25): SEQ ID NO: 2535; WAN024CE7_at; Start 502; Stop 526
aattggctcttcaagctcacggtga

SEQ ID NO: 114884 - DNA, 25 bp, Artificial
  probe
  misc_feature (1)..(25): SEQ ID NO: 2535; WAN024CE7_at; Start 387; Stop 411
cttgtgtcttttgctcgtagtggga

SEQ ID NO: 114885 - DNA, 25 bp, Artificial
  probe
  misc_feature (1)..(25): SEQ ID NO: 2535; WAN024CE7_at; Start 100; Stop 124
tcactacgcgtgaaatctaccaaca

SEQ ID NO: 114886 - DNA, 25 bp, Artificial
  probe
  misc_feature (1)..(25): SEQ ID NO: 2535; WAN024CE7_at; Start 547; Stop 571
tgcaaccagctgtctctaatgatgc

SEQ ID NO: 114887 - DNA, 25 bp, Artificial
  probe
  misc_feature (1)..(25): SEQ ID NO: 2535; WAN024CE7_at; Start 179; Stop 203
tgcagccttcctacaagaaatcgct

SEQ ID NO: 114888 - DNA, 25 bp, Artificial
  probe
  misc_feature (1)..(25): SEQ ID NO: 2535; WAN024CE7_at; Start 531; Stop 555
cgtaatctcttgctcttgcaaccag

SEQ ID NO: 114889 - DNA, 25 bp, Artificial
  probe
  misc_feature (1)..(25): SEQ ID NO: 2535; WAN024CE7_at; Start 939; Stop 963
tacgacttggacttggttcgtgaag

SEQ ID NO: 114890 - DNA, 25 bp, Artificial
  probe
  misc_feature (1)..(25): SEQ ID NO: 2535; WAN024CE7_at; Start 126; Stop 150
cctgatgtatggagagaagcttttg

SEQ ID NO: 114891 - DNA, 25 bp, Artificial
  probe
  misc_feature (1)..(25): SEQ ID NO: 2535; WAN024CE7_at; Start 1165; Stop 1189
caggtacagtaaaccgtgtagtaca

SEQ ID NO: 114892 - DNA, 25 bp, Artificial
  probe
  misc_feature (1)..(25): SEQ ID NO: 2535; WAN024CE7_at; Start 562; Stop 586
ctaatgatgctggatttgccatgac

SEQ ID NO: 114893 - DNA, 25 bp, Artificial
  probe
  misc_feature (1)..(25): SEQ ID NO: 2535; WAN024CE7_at; Start 954; Stop 978
gttcgtgaagttgctggtgaccaga

SEQ ID NO: 114894 - DNA, 25 bp, Artificial
  probe
  misc_feature (1)..(25): SEQ ID NO: 840; WAN024CE8_at; Start 439; Stop 463
gcccctagtgagactgaagttagtg

SEQ ID NO: 114895 - DNA, 25 bp, Artificial
  probe
  misc_feature (1)..(25): SEQ ID NO: 840; WAN024CE8_at; Start 444; Stop 468
tagtgagactgaagttagtgagact

SEQ ID NO: 114896 - DNA, 25 bp, Artificial
  probe
  misc_feature (1)..(25): SEQ ID NO: 840; WAN024CE8_at; Start 667; Stop 691
cagtatgctcttgacaatgttcgct

SEQ ID NO: 114897 - DNA, 25 bp, Artificial
  probe
  misc_feature (1)..(25): SEQ ID NO: 840; WAN024CE8_at; Start 673; Stop 697
gctcttgacaatgttcgctttgtta

SEQ ID NO: 114898 - DNA, 25 bp, Artificial
  probe
  misc_feature (1)..(25): SEQ ID NO: 840; WAN024CE8_at; Start 2; Stop 26
tgaaacgaattaccgcaaatcaata

SEQ ID NO: 114899 - DNA, 25 bp, Artificial
  probe
  misc_feature (1)..(25): SEQ ID NO: 840; WAN024CE8_at; Start 82; Stop 106
tatatggatatgaaactagaagtaa

SEQ ID NO: 114900 - DNA, 25 bp, Artificial
  probe
  misc_feature (1)..(25): SEQ ID NO: 840; WAN024CE8_at; Start 437; Stop 461
cagcccctagtgagactgaagttag

SEQ ID NO: 114901 - DNA, 25 bp, Artificial
  probe
  misc_feature (1)..(25): SEQ ID NO: 840; WAN024CE8_at; Start 675; Stop 699
tcttgacaatgttcgctttgttaga

SEQ ID NO: 114902 - DNA, 25 bp, Artificial
  probe
  misc_feature (1)..(25): SEQ ID NO: 840; WAN024CE8_at; Start 265; Stop 289
aaagaatatgacttaattgatgaag

SEQ ID NO: 114903 - DNA, 25 bp, Artificial
  probe
  misc_feature (1)..(25): SEQ ID NO: 840; WAN024CE8_at; Start 623; Stop 647
aaacagccagtgaaattgctatgac

SEQ ID NO: 114904 - DNA, 25 bp, Artificial
  probe
  misc_feature (1)..(25): SEQ ID NO: 840; WAN024CE8_at; Start 151; Stop 175
agtcgtggttggatagatgaagaag

SEQ ID NO: 114905 - DNA, 25 bp, Artificial
  probe
  misc_feature (1)..(25): SEQ ID NO: 840; WAN024CE8_at; Start 657; Stop 681
gagaatctatcagtatgctcttgac

SEQ ID NO: 114906 - DNA, 25 bp, Artificial
  probe
  misc_feature (1)..(25): SEQ ID NO: 840; WAN024CE8_at; Start 96; Stop 120
actagaagtaaaggtggcttattct

SEQ ID NO: 114907 - DNA, 25 bp, Artificial
  probe
  misc_feature (1)..(25): SEQ ID NO: 840; WAN024CE8_at; Start 458; Stop 482
ttagtgagactaaatatagtgagac

SEQ ID NO: 114908 - DNA, 25 bp, Artificial
  probe
  misc_feature (1)..(25): SEQ ID NO: 840; WAN024CE8_at; Start 110; Stop 134
tggcttattctattttaaaagatcg

SEQ ID NO: 114909 - DNA, 25 bp, Artificial
  probe
  misc_feature (1)..(25): SEQ ID NO: 840; WAN024CE8_at; Start 652; Stop 676
tttgagagaatctatcagtatgctc

SEQ ID NO: 114910 - DNA, 25 bp, Artificial
  probe
  misc_feature (1)..(25): SEQ ID NO: 840; WAN024CE8_at; Start 670; Stop 694
tatgctcttgacaatgttcgctttg

SEQ ID NO: 114911 - DNA, 25 bp, Artificial
  probe
  misc_feature (1)..(25): SEQ ID NO: 840; WAN024CE8_at; Start 662; Stop 686
tctatcagtatgctcttgacaatgt

SEQ ID NO: 114912 - DNA, 25 bp, Artificial
  probe
  misc_feature (1)..(25): SEQ ID NO: 840; WAN024CE8_at; Start 701; Stop 725
gagcggaagtacttgctgaatttgt

SEQ ID NO: 114913 - DNA, 25 bp, Artificial
  probe
  misc_feature (1)..(25): SEQ ID NO: 840; WAN024CE8_at; Start 659; Stop 683
gaatctatcagtatgctcttgacaa

SEQ ID NO: 114914 - DNA, 25 bp, Artificial
  probe
  misc_feature (1)..(25): SEQ ID NO: 840; WAN024CE8_at; Start 90; Stop 114
tatgaaactagaagtaaaggtggct

SEQ ID NO: 114915 - DNA, 25 bp, Artificial
  probe
  misc_feature (1)..(25): SEQ ID NO: 840; WAN024CE8_at; Start 666; Stop 690
tcagtatgctcttgacaatgttcgc

SEQ ID NO: 114916 - DNA, 25 bp, Artificial
  probe
  misc_feature (1)..(25): SEQ ID NO: 840; WAN024CE8_at; Start 92; Stop 116
tgaaactagaagtaaaggtggctta

SEQ ID NO: 114917 - DNA, 25 bp, Artificial
  probe
  misc_feature (1)..(25): SEQ ID NO: 840; WAN024CE8_at; Start 431; Stop 455
cacattcagcccctagtgagactga

SEQ ID NO: 114918 - DNA, 25 bp, Artificial
  probe
  misc_feature (1)..(25): SEQ ID NO: 840; WAN024CE8_at; Start 622; Stop 646
gaaacagccagtgaaattgctatga

SEQ ID NO: 114919 - DNA, 25 bp, Artificial
  probe
  misc_feature (1)..(25): SEQ ID NO: 840; WAN024CE8_at; Start 53; Stop 77
tacctaaaattctttttgaggatga

SEQ ID NO: 114920 - DNA, 25 bp, Artificial
  probe
  misc_feature (1)..(25): SEQ ID NO: 840; WAN024CE8_at; Start 125; Stop 149
taaaagatcgtttagaattatctct

SEQ ID NO: 114921 - DNA, 25 bp, Artificial
  probe
  misc_feature (1)..(25): SEQ ID NO: 840; WAN024CE8_at; Start 448; Stop 472
gagactgaagttagtgagactaaat

SEQ ID NO: 114922 - DNA, 25 bp, Artificial
  probe
  misc_feature (1)..(25): SEQ ID NO: 840; WAN024CE8_at; Start 472; Stop 496
tatagtgagactgattctttattta

SEQ ID NO: 114923 - DNA, 25 bp, Artificial
  probe
  misc_feature (1)..(25): SEQ ID NO: 840; WAN024CE8_at; Start 426; Stop 450
cgtctcacattcagcccctagtgag

SEQ ID NO: 114924 - DNA, 25 bp, Artificial
  probe
  misc_feature (1)..(25): SEQ ID NO: 840; WAN024CE8_at; Start 441; Stop 465
ccctagtgagactgaagttagtgag

SEQ ID NO: 114925 - DNA, 25 bp, Artificial
  probe
  misc_feature (1)..(25): SEQ ID NO: 840; WAN024CE8_at; Start 544; Stop 568
gtagaaaaggtcacaaaatatgatc

SEQ ID NO: 114926 - DNA, 25 bp, Artificial
  probe
  misc_feature (1)..(25): SEQ ID NO: 840; WAN024CE8_at; Start 433; Stop 457
cattcagcccctagtgagactgaag

SEQ ID NO: 114927 - DNA, 25 bp, Artificial
  probe
  misc_feature (1)..(25): SEQ ID NO: 840; WAN024CE8_at; Start 465; Stop 489
gactaaatatagtgagactgattct

SEQ ID NO: 114928 - DNA, 25 bp, Artificial
  probe
  misc_feature (1)..(25): SEQ ID NO: 6975; WAN024CE9_s_at; Start 1; Stop 25
atgtcgccaatcgagtggatattag

SEQ ID NO: 114929 - DNA, 25 bp, Artificial
  probe
  misc_feature (1)..(25): SEQ ID NO: 6975; WAN024CE9_s_at; Start 8; Stop 32
caatcgagtggatattagttatgct

SEQ ID NO: 114930 - DNA, 25 bp, Artificial
  probe
  misc_feature (1)..(25): SEQ ID NO: 6975; WAN024CE9_s_at; Start 3; Stop 27
gtcgccaatcgagtggatattagtt

SEQ ID NO: 114931 - DNA, 25 bp, Artificial
  probe
  misc_feature (1)..(25): SEQ ID NO: 6975; WAN024CE9_s_at; Start 5; Stop 29
cgccaatcgagtggatattagttat

SEQ ID NO: 114932 - DNA, 25 bp, Artificial
  probe
  misc_feature (1)..(25): SEQ ID NO: 6975; WAN024CE9_s_at; Start 6; Stop 30
gccaatcgagtggatattagttatg

SEQ ID NO: 114933 - DNA, 25 bp, Artificial
  probe
  misc_feature (1)..(25): SEQ ID NO: 6975; WAN024CE9_s_at; Start 7; Stop 31
ccaatcgagtggatattagttatgc

SEQ ID NO: 114934 - DNA, 25 bp, Artificial
  probe
  misc_feature (1)..(25): SEQ ID NO: 6975; WAN024CE9_s_at; Start 4; Stop 28
tcgccaatcgagtggatattagtta

SEQ ID NO: 114935 - DNA, 25 bp, Artificial
  probe
  misc_feature (1)..(25): SEQ ID NO: 6975; WAN024CE9_s_at; Start 2; Stop 26
tgtcgccaatcgagtggatattagt

SEQ ID NO: 114936 - DNA, 25 bp, Artificial
  probe
  misc_feature (1)..(25): SEQ ID NO: 6976; WAN024CEA_at; Start 45; Stop 69
aagtggagtgacagttttgacaatg

SEQ ID NO: 114937 - DNA, 25 bp, Artificial
  probe
  misc_feature (1)..(25): SEQ ID NO: 6976; WAN024CEA_at; Start 38; Stop 62
tcatttcaagtggagtgacagtttt

SEQ ID NO: 114938 - DNA, 25 bp, Artificial
  probe
  misc_feature (1)..(25): SEQ ID NO: 6976; WAN024CEA_at; Start 61; Stop 85
ttgacaatggtagtcgataagaaag

SEQ ID NO: 114939 - DNA, 25 bp, Artificial
  probe
  misc_feature (1)..(25): SEQ ID NO: 6976; WAN024CEA_at; Start 59; Stop 83
ttttgacaatggtagtcgataagaa

SEQ ID NO: 114940 - DNA, 25 bp, Artificial
  probe
  misc_feature (1)..(25): SEQ ID NO: 6976; WAN024CEA_at; Start 40; Stop 64
atttcaagtggagtgacagttttga

SEQ ID NO: 114941 - DNA, 25 bp, Artificial
  probe
  misc_feature (1)..(25): SEQ ID NO: 6976; WAN024CEA_at; Start 72; Stop 96
agtcgataagaaaggggtgataaag

SEQ ID NO: 114942 - DNA, 25 bp, Artificial
  probe
  misc_feature (1)..(25): SEQ ID NO: 6976; WAN024CEA_at; Start 58; Stop 82
gttttgacaatggtagtcgataaga

SEQ ID NO: 114943 - DNA, 25 bp, Artificial
  probe
  misc_feature (1)..(25): SEQ ID NO: 6976; WAN024CEA_at; Start 70; Stop 94
gtagtcgataagaaaggggtgataa

SEQ ID NO: 114944 - DNA, 25 bp, Artificial
  probe
  misc_feature (1)..(25): SEQ ID NO: 6976; WAN024CEA_at; Start 44; Stop 68
caagtggagtgacagttttgacaat

SEQ ID NO: 114945 - DNA, 25 bp, Artificial
  probe
  misc_feature (1)..(25): SEQ ID NO: 6976; WAN024CEA_at; Start 48; Stop 72
tggagtgacagttttgacaatggta

SEQ ID NO: 114946 - DNA, 25 bp, Artificial
  probe
  misc_feature (1)..(25): SEQ ID NO: 6976; WAN024CEA_at; Start 74; Stop 98
tcgataagaaaggggtgataaagaa

SEQ ID NO: 114947 - DNA, 25 bp, Artificial
  probe
  misc_feature (1)..(25): SEQ ID NO: 6976; WAN024CEA_at; Start 57; Stop 81
agttttgacaatggtagtcgataag

SEQ ID NO: 114948 - DNA, 25 bp, Artificial
  probe
  misc_feature (1)..(25): SEQ ID NO: 6976; WAN024CEA_at; Start 47; Stop 71
gtggagtgacagttttgacaatggt

SEQ ID NO: 114949 - DNA, 25 bp, Artificial
  probe
  misc_feature (1)..(25): SEQ ID NO: 6976; WAN024CEA_at; Start 46; Stop 70
agtggagtgacagttttgacaatgg

SEQ ID NO: 114950 - DNA, 25 bp, Artificial
  probe
  misc_feature (1)..(25): SEQ ID NO: 6976; WAN024CEA_at; Start 62; Stop 86
tgacaatggtagtcgataagaaagg

SEQ ID NO: 114951 - DNA, 25 bp, Artificial
  probe
  misc_feature (1)..(25): SEQ ID NO: 6976; WAN024CEA_at; Start 56; Stop 80
cagttttgacaatggtagtcgataa

SEQ ID NO: 114952 - DNA, 25 bp, Artificial
  probe
  misc_feature (1)..(25): SEQ ID NO: 6976; WAN024CEA_at; Start 66; Stop 90
aatggtagtcgataagaaaggggtg

SEQ ID NO: 114953 - DNA, 25 bp, Artificial
  probe
  misc_feature (1)..(25): SEQ ID NO: 6976; WAN024CEA_at; Start 50; Stop 74
gagtgacagttttgacaatggtagt

SEQ ID NO: 114954 - DNA, 25 bp, Artificial
  probe
  misc_feature (1)..(25): SEQ ID NO: 6976; WAN024CEA_at; Start 53; Stop 77
tgacagttttgacaatggtagtcga

SEQ ID NO: 114955 - DNA, 25 bp, Artificial
  probe
  misc_feature (1)..(25): SEQ ID NO: 6976; WAN024CEA_at; Start 54; Stop 78
gacagttttgacaatggtagtcgat

SEQ ID NO: 114956 - DNA, 25 bp, Artificial
  probe
  misc_feature (1)..(25): SEQ ID NO: 6976; WAN024CEA_at; Start 65; Stop 89
caatggtagtcgataagaaaggggt

SEQ ID NO: 114957 - DNA, 25 bp, Artificial
  probe
  misc_feature (1)..(25): SEQ ID NO: 6976; WAN024CEA_at; Start 41; Stop 65
tttcaagtggagtgacagttttgac

SEQ ID NO: 114958 - DNA, 25 bp, Artificial
  probe
  misc_feature (1)..(25): SEQ ID NO: 6976; WAN024CEA_at; Start 49; Stop 73
ggagtgacagttttgacaatggtag

SEQ ID NO: 114959 - DNA, 25 bp, Artificial
  probe
  misc_feature (1)..(25): SEQ ID NO: 6976; WAN024CEA_at; Start 64; Stop 88
acaatggtagtcgataagaaagggg

SEQ ID NO: 114960 - DNA, 25 bp, Artificial
  probe
  misc_feature (1)..(25): SEQ ID NO: 6976; WAN024CEA_at; Start 63; Stop 87
gacaatggtagtcgataagaaaggg

SEQ ID NO: 114961 - DNA, 25 bp, Artificial
  probe
  misc_feature (1)..(25): SEQ ID NO: 6976; WAN024CEA_at; Start 60; Stop 84
tttgacaatggtagtcgataagaaa

SEQ ID NO: 114962 - DNA, 25 bp, Artificial
  probe
  misc_feature (1)..(25): SEQ ID NO: 6976; WAN024CEA_at; Start 43; Stop 67
tcaagtggagtgacagttttgacaa

SEQ ID NO: 114963 - DNA, 25 bp, Artificial
  probe
  misc_feature (1)..(25): SEQ ID NO: 6976; WAN024CEA_at; Start 42; Stop 66
ttcaagtggagtgacagttttgaca

SEQ ID NO: 114964 - DNA, 25 bp, Artificial
  probe
  misc_feature (1)..(25): SEQ ID NO: 6976; WAN024CEA_at; Start 39; Stop 63
catttcaagtggagtgacagttttg

SEQ ID NO: 114965 - DNA, 25 bp, Artificial
  probe
  misc_feature (1)..(25): SEQ ID NO: 6976; WAN024CEA_at; Start 51; Stop 75
agtgacagttttgacaatggtagtc

SEQ ID NO: 114966 - DNA, 25 bp, Artificial
  probe
  misc_feature (1)..(25): SEQ ID NO: 6976; WAN024CEA_at; Start 55; Stop 79
acagttttgacaatggtagtcgata

SEQ ID NO: 114967 - DNA, 25 bp, Artificial
  probe
  misc_feature (1)..(25): SEQ ID NO: 6976; WAN024CEA_at; Start 71; Stop 95
tagtcgataagaaaggggtgataaa

SEQ ID NO: 114968 - DNA, 25 bp, Artificial
  probe
  misc_feature (1)..(25): SEQ ID NO: 6976; WAN024CEA_at; Start 52; Stop 76
gtgacagttttgacaatggtagtcg

SEQ ID NO: 114969 - DNA, 25 bp, Artificial
  probe
  misc_feature (1)..(25): SEQ ID NO: 6976; WAN024CEA_at; Start 73; Stop 97
gtcgataagaaaggggtgataaaga

SEQ ID NO: 114970 - DNA, 25 bp, Artificial
  probe
  misc_feature (1)..(25): SEQ ID NO: 1475; WAN024CEB_at; Start 200; Stop 224
gagaacatcatgttaatttaccaac

SEQ ID NO: 114971 - DNA, 25 bp, Artificial
  probe
  misc_feature (1)..(25): SEQ ID NO: 1475; WAN024CEB_at; Start 358; Stop 382
catgtaatggagtgtaaattctata

SEQ ID NO: 114972 - DNA, 25 bp, Artificial
  probe
  misc_feature (1)..(25): SEQ ID NO: 1475; WAN024CEB_at; Start 251; Stop 275
gattaaaagatgattggacattgga

SEQ ID NO: 114973 - DNA, 25 bp, Artificial
  probe
  misc_feature (1)..(25): SEQ ID NO: 1475; WAN024CEB_at; Start 529; Stop 553
aaaatcaatgatacctccgttacag

SEQ ID NO: 114974 - DNA, 25 bp, Artificial
  probe
  misc_feature (1)..(25): SEQ ID NO: 1475; WAN024CEB_at; Start 320; Stop 344
tcaaaatagttggaaccttgttgct

SEQ ID NO: 114975 - DNA, 25 bp, Artificial
  probe
  misc_feature (1)..(25): SEQ ID NO: 1475; WAN024CEB_at; Start 285; Stop 309
taaagctgataatggttggttcaac

SEQ ID NO: 114976 - DNA, 25 bp, Artificial
  probe
  misc_feature (1)..(25): SEQ ID NO: 1475; WAN024CEB_at; Start 502; Stop 526
ggtaatcaatactttccaagaagcc

SEQ ID NO: 114977 - DNA, 25 bp, Artificial
  probe
  misc_feature (1)..(25): SEQ ID NO: 1475; WAN024CEB_at; Start 213; Stop 237
taatttaccaactaataatgcaggg

SEQ ID NO: 114978 - DNA, 25 bp, Artificial
  probe
  misc_feature (1)..(25): SEQ ID NO: 1475; WAN024CEB_at; Start 99; Stop 123
ttctcagtacaaatatatttatcag

SEQ ID NO: 114979 - DNA, 25 bp, Artificial
  probe
  misc_feature (1)..(25): SEQ ID NO: 1475; WAN024CEB_at; Start 228; Stop 252
taatgcagggagtatttttgaagga

SEQ ID NO: 114980 - DNA, 25 bp, Artificial
  probe
  misc_feature (1)..(25): SEQ ID NO: 1475; WAN024CEB_at; Start 245; Stop 269
ttgaaggattaaaagatgattggac

SEQ ID NO: 114981 - DNA, 25 bp, Artificial
  probe
  misc_feature (1)..(25): SEQ ID NO: 1475; WAN024CEB_at; Start 377; Stop 401
tctatacaactgatggcattttgaa

SEQ ID NO: 114982 - DNA, 25 bp, Artificial
  probe
  misc_feature (1)..(25): SEQ ID NO: 1475; WAN024CEB_at; Start 382; Stop 406
acaactgatggcattttgaatagaa

SEQ ID NO: 114983 - DNA, 25 bp, Artificial
  probe
  misc_feature (1)..(25): SEQ ID NO: 1475; WAN024CEB_at; Start 218; Stop 242
taccaactaataatgcagggagtat

SEQ ID NO: 114984 - DNA, 25 bp, Artificial
  probe
  misc_feature (1)..(25): SEQ ID NO: 1475; WAN024CEB_at; Start 123; Stop 147
gacaaatatggagaactgtcctgaa

SEQ ID NO: 114985 - DNA, 25 bp, Artificial
  probe
  misc_feature (1)..(25): SEQ ID NO: 1475; WAN024CEB_at; Start 524; Stop 548
gccttaaaatcaatgatacctccgt

SEQ ID NO: 114986 - DNA, 25 bp, Artificial
  probe
  misc_feature (1)..(25): SEQ ID NO: 1475; WAN024CEB_at; Start 538; Stop 562
gatacctccgttacagattgtagag

SEQ ID NO: 114987 - DNA, 25 bp, Artificial
  probe
  misc_feature (1)..(25): SEQ ID NO: 1475; WAN024CEB_at; Start 369; Stop 393
gtgtaaattctatacaactgatggc

SEQ ID NO: 114988 - DNA, 25 bp, Artificial
  probe
  misc_feature (1)..(25): SEQ ID NO: 1475; WAN024CEB_at; Start 335; Stop 359
ccttgttgctttatcaaatgttaca

SEQ ID NO: 114989 - DNA, 25 bp, Artificial
  probe
  misc_feature (1)..(25): SEQ ID NO: 1475; WAN024CEB_at; Start 114; Stop 138
tatttatcagacaaatatggagaac

SEQ ID NO: 114990 - DNA, 25 bp, Artificial
  probe
  misc_feature (1)..(25): SEQ ID NO: 1475; WAN024CEB_at; Start 514; Stop 538
tttccaagaagccttaaaatcaatg

SEQ ID NO: 114991 - DNA, 25 bp, Artificial
  probe
  misc_feature (1)..(25): SEQ ID NO: 1475; WAN024CEB_at; Start 90; Stop 114
gaaaaatgtttctcagtacaaatat

SEQ ID NO: 114992 - DNA, 25 bp, Artificial
  probe
  misc_feature (1)..(25): SEQ ID NO: 1475; WAN024CEB_at; Start 330; Stop 354
tggaaccttgttgctttatcaaatg

SEQ ID NO: 114993 - DNA, 25 bp, Artificial
  probe
  misc_feature (1)..(25): SEQ ID NO: 1475; WAN024CEB_at; Start 349; Stop 373
caaatgttacatgtaatggagtgta

SEQ ID NO: 114994 - DNA, 25 bp, Artificial
  probe
  misc_feature (1)..(25): SEQ ID NO: 1475; WAN024CEB_at; Start 29; Stop 53
cttttgatggagagattgatattct

SEQ ID NO: 114995 - DNA, 25 bp, Artificial
  probe
  misc_feature (1)..(25): SEQ ID NO: 1475; WAN024CEB_at; Start 142; Stop 166
cctgaaattattctatcagtcccaa

SEQ ID NO: 114996 - DNA, 25 bp, Artificial
  probe
  misc_feature (1)..(25): SEQ ID NO: 1475; WAN024CEB_at; Start 545; Stop 569
ccgttacagattgtagagaaataga

SEQ ID NO: 114997 - DNA, 25 bp, Artificial
  probe
  misc_feature (1)..(25): SEQ ID NO: 1475; WAN024CEB_at; Start 68; Stop 92
attgcttggccaatactattgagaa

SEQ ID NO: 114998 - DNA, 25 bp, Artificial
  probe
  misc_feature (1)..(25): SEQ ID NO: 1475; WAN024CEB_at; Start 20; Stop 44
ggctaaagacttttgatggagagat

SEQ ID NO: 114999 - DNA, 25 bp, Artificial
  probe
  misc_feature (1)..(25): SEQ ID NO: 1475; WAN024CEB_at; Start 77; Stop 101
ccaatactattgagaaaaatgtttc

SEQ ID NO: 115000 - DNA, 25 bp, Artificial
  probe
  misc_feature (1)..(25): SEQ ID NO: 1475; WAN024CEB_at; Start 132; Stop 156
ggagaactgtcctgaaattattcta

SEQ ID NO: 115001 - DNA, 25 bp, Artificial
  probe
  misc_feature (1)..(25): SEQ ID NO: 1475; WAN024CEB_at; Start 188; Stop 212
taggattatctagagaacatcatgt

SEQ ID NO: 115002 - DNA, 25 bp, Artificial
  probe
  misc_feature (1)..(25): SEQ ID NO: 1475; WAN024CEB_at; Start 232; Stop 256
gcagggagtatttttgaaggattaa

SEQ ID NO: 115003 - DNA, 25 bp, Artificial
  probe
  misc_feature (1)..(25): SEQ ID NO: 1475; WAN024CEB_at; Start 290; Stop 314
ctgataatggttggttcaacgaaaa

SEQ ID NO: 115004 - DNA, 25 bp, Artificial
  probe
  misc_feature (1)..(25): SEQ ID NO: 2060; WAN024CEC_at; Start 328; Stop 352
gacgatgagttttccttatggtacg

SEQ ID NO: 115005 - DNA, 25 bp, Artificial
  probe
  misc_feature (1)..(25): SEQ ID NO: 2060; WAN024CEC_at; Start 272; Stop 296
tctttggagacagcactttggttac

SEQ ID NO: 115006 - DNA, 25 bp, Artificial
  probe
  misc_feature (1)..(25): SEQ ID NO: 2060; WAN024CEC_at; Start 206; Stop 230
cgcttacctgatatttatttagatg

SEQ ID NO: 115007 - DNA, 25 bp, Artificial
  probe
  misc_feature (1)..(25): SEQ ID NO: 2060; WAN024CEC_at; Start 333; Stop 357
tgagttttccttatggtacgaatac

SEQ ID NO: 115008 - DNA, 25 bp, Artificial
  probe
  misc_feature (1)..(25): SEQ ID NO: 2060; WAN024CEC_at; Start 238; Stop 262
tgtccttcagtatcgatttccaaag

SEQ ID NO: 115009 - DNA, 25 bp, Artificial
  probe
  misc_feature (1)..(25): SEQ ID NO: 2060; WAN024CEC_at; Start 611; Stop 635
gataagttacaatcttatacggagg

SEQ ID NO: 115010 - DNA, 25 bp, Artificial
  probe
  misc_feature (1)..(25): SEQ ID NO: 2060; WAN024CEC_at; Start 457; Stop 481
agtttatgaagttgaacgagttttg

SEQ ID NO: 115011 - DNA, 25 bp, Artificial
  probe
  misc_feature (1)..(25): SEQ ID NO: 2060; WAN024CEC_at; Start 260; Stop 284
aagggaatcttttctttggagacag

SEQ ID NO: 115012 - DNA, 25 bp, Artificial
  probe
  misc_feature (1)..(25): SEQ ID NO: 2060; WAN024CEC_at; Start 355; Stop 379
taccaaaaacattaaggaagcagat

SEQ ID NO: 115013 - DNA, 25 bp, Artificial
  probe
  misc_feature (1)..(25): SEQ ID NO: 2060; WAN024CEC_at; Start 364; Stop 388
cattaaggaagcagatatatgtcct

SEQ ID NO: 115014 - DNA, 25 bp, Artificial
  probe
  misc_feature (1)..(25): SEQ ID NO: 2060; WAN024CEC_at; Start 78; Stop 102
tgatgaactctttcaatcagtatgg

SEQ ID NO: 115015 - DNA, 25 bp, Artificial
  probe
  misc_feature (1)..(25): SEQ ID NO: 2060; WAN024CEC_at; Start 451; Stop 475
tattaaagtttatgaagttgaacga

SEQ ID NO: 115016 - DNA, 25 bp, Artificial
  probe
  misc_feature (1)..(25): SEQ ID NO: 2060; WAN024CEC_at; Start 245; Stop 269
cagtatcgatttccaaagggaatct

SEQ ID NO: 115017 - DNA, 25 bp, Artificial
  probe
  misc_feature (1)..(25): SEQ ID NO: 2060; WAN024CEC_at; Start 108; Stop 132
taacttttaaacaagtaatagatga

SEQ ID NO: 115018 - DNA, 25 bp, Artificial
  probe
  misc_feature (1)..(25): SEQ ID NO: 2060; WAN024CEC_at; Start 277; Stop 301
ggagacagcactttggttacatggt

SEQ ID NO: 115019 - DNA, 25 bp, Artificial
  probe
  misc_feature (1)..(25): SEQ ID NO: 2060; WAN024CEC_at; Start 505; Stop 529
tcaggtggatcttcaaattattgca

SEQ ID NO: 115020 - DNA, 25 bp, Artificial
  probe
  misc_feature (1)..(25): SEQ ID NO: 2060; WAN024CEC_at; Start 174; Stop 198
gaaaaatcgatgctgaagaaaaagg

SEQ ID NO: 115021 - DNA, 25 bp, Artificial
  probe
  misc_feature (1)..(25): SEQ ID NO: 2060; WAN024CEC_at; Start 571; Stop 595
acacaaattattttattatgcccag

SEQ ID NO: 115022 - DNA, 25 bp, Artificial
  probe
  misc_feature (1)..(25): SEQ ID NO: 2060; WAN024CEC_at; Start 510; Stop 534
tggatcttcaaattattgcaccagc

SEQ ID NO: 115023 - DNA, 25 bp, Artificial
  probe
  misc_feature (1)..(25): SEQ ID NO: 2060; WAN024CEC_at; Start 221; Stop 245
tatttagatgagtggtttgtccttc

SEQ ID NO: 115024 - DNA, 25 bp, Artificial
  probe
  misc_feature (1)..(25): SEQ ID NO: 2060; WAN024CEC_at; Start 230; Stop 254
gagtggtttgtccttcagtatcgat

SEQ ID NO: 115025 - DNA, 25 bp, Artificial
  probe
  misc_feature (1)..(25): SEQ ID NO: 2060; WAN024CEC_at; Start 294; Stop 318
tacatggtttatctttgactatccc

SEQ ID NO: 115026 - DNA, 25 bp, Artificial
  probe
  misc_feature (1)..(25): SEQ ID NO: 2060; WAN024CEC_at; Start 242; Stop 266
cttcagtatcgatttccaaagggaa

SEQ ID NO: 115027 - DNA, 25 bp, Artificial
  probe
  misc_feature (1)..(25): SEQ ID NO: 2060; WAN024CEC_at; Start 86; Stop 110
tctttcaatcagtatggttttttaa

SEQ ID NO: 115028 - DNA, 25 bp, Artificial
  probe
  misc_feature (1)..(25): SEQ ID NO: 2060; WAN024CEC_at; Start 282; Stop 306
cagcactttggttacatggtttatc

SEQ ID NO: 115029 - DNA, 25 bp, Artificial
  probe
  misc_feature (1)..(25): SEQ ID NO: 2060; WAN024CEC_at; Start 440; Stop 464
cctggtcaatttattaaagtttatg

SEQ ID NO: 115030 - DNA, 25 bp, Artificial
  probe
  misc_feature (1)..(25): SEQ ID NO: 2060; WAN024CEC_at; Start 40; Stop 64
aagaaaggagaatgatatggttgat

SEQ ID NO: 115031 - DNA, 25 bp, Artificial
  probe
  misc_feature (1)..(25): SEQ ID NO: 2060; WAN024CEC_at; Start 168; Stop 192
cagaaggaaaaatcgatgctgaaga

SEQ ID NO: 115032 - DNA, 25 bp, Artificial
  probe
  misc_feature (1)..(25): SEQ ID NO: 2060; WAN024CEC_at; Start 47; Stop 71
gagaatgatatggttgataaaagag

SEQ ID NO: 115033 - DNA, 25 bp, Artificial
  probe
  misc_feature (1)..(25): SEQ ID NO: 2060; WAN024CEC_at; Start 264; Stop 288
gaatcttttctttggagacagcact

SEQ ID NO: 115034 - DNA, 25 bp, Artificial
  probe
  misc_feature (1)..(25): SEQ ID NO: 2060; WAN024CEC_at; Start 375; Stop 399
cagatatatgtcctattattttacg

SEQ ID NO: 115035 - DNA, 25 bp, Artificial
  probe
  misc_feature (1)..(25): SEQ ID NO: 2060; WAN024CEC_at; Start 126; Stop 150
tagatgaaaatttacactacaaaac

SEQ ID NO: 115036 - DNA, 25 bp, Artificial
  probe
  misc_feature (1)..(25): SEQ ID NO: 2060; WAN024CEC_at; Start 342; Stop 366
cttatggtacgaataccaaaaacat

SEQ ID NO: 115037 - DNA, 25 bp, Artificial
  probe
  misc_feature (1)..(25): SEQ ID NO: 2060; WAN024CEC_at; Start 119; Stop 143
caagtaatagatgaaaatttacact

SEQ ID NO: 115038 - DNA, 25 bp, Artificial
  probe
  misc_feature (1)..(25): SEQ ID NO: 3106; WAN024CED_at; Start 402; Stop 426
tattgatattactactggtgataag

SEQ ID NO: 115039 - DNA, 25 bp, Artificial
  probe
  misc_feature (1)..(25): SEQ ID NO: 3106; WAN024CED_at; Start 782; Stop 806
tctcatttgataactctgttcaggt

SEQ ID NO: 115040 - DNA, 25 bp, Artificial
  probe
  misc_feature (1)..(25): SEQ ID NO: 3106; WAN024CED_at; Start 370; Stop 394
gcaacttttgatacattaaaggagg

SEQ ID NO: 115041 - DNA, 25 bp, Artificial
  probe
  misc_feature (1)..(25): SEQ ID NO: 3106; WAN024CED_at; Start 310; Stop 334
gataagctagaacctattcgccaag

SEQ ID NO: 115042 - DNA, 25 bp, Artificial
  probe
  misc_feature (1)..(25): SEQ ID NO: 3106; WAN024CED_at; Start 558; Stop 582
gacacgcccacgtgatcgatatgat

SEQ ID NO: 115043 - DNA, 25 bp, Artificial
  probe
  misc_feature (1)..(25): SEQ ID NO: 3106; WAN024CED_at; Start 211; Stop 235
gatgtcactctgaagggaaccgaaa

SEQ ID NO: 115044 - DNA, 25 bp, Artificial
  probe
  misc_feature (1)..(25): SEQ ID NO: 3106; WAN024CED_at; Start 736; Stop 760
gagctatggattcgttatcaacgcc

SEQ ID NO: 115045 - DNA, 25 bp, Artificial
  probe
  misc_feature (1)..(25): SEQ ID NO: 3106; WAN024CED_at; Start 222; Stop 246
gaagggaaccgaaatgagcagagaa

SEQ ID NO: 115046 - DNA, 25 bp, Artificial
  probe
  misc_feature (1)..(25): SEQ ID NO: 3106; WAN024CED_at; Start 632; Stop 656
taaaaaatgcacttgagaatacggc

SEQ ID NO: 115047 - DNA, 25 bp, Artificial
  probe
  misc_feature (1)..(25): SEQ ID NO: 3106; WAN024CED_at; Start 685; Stop 709
tataattgggaagaacaagtgagag

SEQ ID NO: 115048 - DNA, 25 bp, Artificial
  probe
  misc_feature (1)..(25): SEQ ID NO: 3106; WAN024CED_at; Start 587; Stop 611
tcaccttgtataaacttagaaaaga

SEQ ID NO: 115049 - DNA, 25 bp, Artificial
  probe
  misc_feature (1)..(25): SEQ ID NO: 3106; WAN024CED_at; Start 437; Stop 461
gagaaattacttattcaatgacttc

SEQ ID NO: 115050 - DNA, 25 bp, Artificial
  probe
  misc_feature (1)..(25): SEQ ID NO: 3106; WAN024CED_at; Start 641; Stop 665
cacttgagaatacggcagaaaaacg

SEQ ID NO: 115051 - DNA, 25 bp, Artificial
  probe
  misc_feature (1)..(25): SEQ ID NO: 3106; WAN024CED_at; Start 571; Stop 595
gatcgatatgatcttttcaccttgt

SEQ ID NO: 115052 - DNA, 25 bp, Artificial
  probe
  misc_feature (1)..(25): SEQ ID NO: 3106; WAN024CED_at; Start 172; Stop 196
caaatgattggactagataagcgaa

SEQ ID NO: 115053 - DNA, 25 bp, Artificial
  probe
  misc_feature (1)..(25): SEQ ID NO: 3106; WAN024CED_at; Start 452; Stop 476
caatgacttctatctttactaatga

SEQ ID NO: 115054 - DNA, 25 bp, Artificial
  probe
  misc_feature (1)..(25): SEQ ID NO: 3106; WAN024CED_at; Start 79; Stop 103
caacaacattatttaattgagcaag

SEQ ID NO: 115055 - DNA, 25 bp, Artificial
  probe
  misc_feature (1)..(25): SEQ ID NO: 3106; WAN024CED_at; Start 8; Stop 32
caaatgcgaatagctttaaagcaaa

SEQ ID NO: 115056 - DNA, 25 bp, Artificial
  probe
  misc_feature (1)..(25): SEQ ID NO: 3106; WAN024CED_at; Start 299; Stop 323
cattttcagtagataagctagaacc

SEQ ID NO: 115057 - DNA, 25 bp, Artificial
  probe
  misc_feature (1)..(25): SEQ ID NO: 3106; WAN024CED_at; Start 57; Stop 81
gggaattccagctcaacaagtacaa

SEQ ID NO: 115058 - DNA, 25 bp, Artificial
  probe
  misc_feature (1)..(25): SEQ ID NO: 3106; WAN024CED_at; Start 134; Stop 158
gagattccttcattgtaaaaggagg

SEQ ID NO: 115059 - DNA, 25 bp, Artificial
  probe
  misc_feature (1)..(25): SEQ ID NO: 3106; WAN024CED_at; Start 721; Stop 745
tctgattatcagaaagagctatgga

SEQ ID NO: 115060 - DNA, 25 bp, Artificial
  probe
  misc_feature (1)..(25): SEQ ID NO: 3106; WAN024CED_at; Start 120; Stop 144
tactagttcttatagagattccttc

SEQ ID NO: 115061 - DNA, 25 bp, Artificial
  probe
  misc_feature (1)..(25): SEQ ID NO: 3106; WAN024CED_at; Start 546; Stop 570
gggattagcttcgacacgcccacgt

SEQ ID NO: 115062 - DNA, 25 bp, Artificial
  probe
  misc_feature (1)..(25): SEQ ID NO: 3106; WAN024CED_at; Start 200; Stop 224
caatggatttagatgtcactctgaa

SEQ ID NO: 115063 - DNA, 25 bp, Artificial
  probe
  misc_feature (1)..(25): SEQ ID NO: 3106; WAN024CED_at; Start 149; Stop 173
taaaaggagggtatctaataggtca

SEQ ID NO: 115064 - DNA, 25 bp, Artificial
  probe
  misc_feature (1)..(25): SEQ ID NO: 3106; WAN024CED_at; Start 265; Stop 289
gaagagattctttgttctaaaactg

SEQ ID NO: 115065 - DNA, 25 bp, Artificial
  probe
  misc_feature (1)..(25): SEQ ID NO: 3106; WAN024CED_at; Start 488; Stop 512
tatggacatataatctagagactgt

SEQ ID NO: 115066 - DNA, 25 bp, Artificial
  probe
  misc_feature (1)..(25): SEQ ID NO: 3106; WAN024CED_at; Start 44; Stop 68
tttcaaaagataagggaattccagc

SEQ ID NO: 115067 - DNA, 25 bp, Artificial
  probe
  misc_feature (1)..(25): SEQ ID NO: 3106; WAN024CED_at; Start 700; Stop 724
caagtgagaggaattgaaatttctg

SEQ ID NO: 115068 - DNA, 25 bp, Artificial
  probe
  misc_feature (1)..(25): SEQ ID NO: 3106; WAN024CED_at; Start 326; Stop 350
ttcgccaagatgatgaatatggagg

SEQ ID NO: 115069 - DNA, 25 bp, Artificial
  probe
  misc_feature (1)..(25): SEQ ID NO: 3106; WAN024CED_at; Start 160; Stop 184
tatctaataggtcaaatgattggac

SEQ ID NO: 115070 - DNA, 25 bp, Artificial
  probe
  misc_feature (1)..(25): SEQ ID NO: 3106; WAN024CED_at; Start 751; Stop 775
tatcaacgccaatttaagtatgcta

SEQ ID NO: 115071 - DNA, 25 bp, Artificial
  probe
  misc_feature (1)..(25): SEQ ID NO: 3106; WAN024CED_at; Start 501; Stop 525
tctagagactgtacttgctgaaaag

SEQ ID NO: 115072 - DNA, 25 bp, Artificial
  probe
  misc_feature (1)..(25): SEQ ID NO: 1761; WAN024CEE_at; Start 58; Stop 82
tatctttttcatcgtttgacgcttt

SEQ ID NO: 115073 - DNA, 25 bp, Artificial
  probe
  misc_feature (1)..(25): SEQ ID NO: 1761; WAN024CEE_at; Start 1354; Stop 1378
gattttgctgaacaaacctcaacag

SEQ ID NO: 115074 - DNA, 25 bp, Artificial
  probe
  misc_feature (1)..(25): SEQ ID NO: 1761; WAN024CEE_at; Start 1822; Stop 1846
gaaaatcatcttgaaggccttagaa

SEQ ID NO: 115075 - DNA, 25 bp, Artificial
  probe
  misc_feature (1)..(25): SEQ ID NO: 1761; WAN024CEE_at; Start 386; Stop 410
tagataaaaaaccaccccaatatga

SEQ ID NO: 115076 - DNA, 25 bp, Artificial
  probe
  misc_feature (1)..(25): SEQ ID NO: 1761; WAN024CEE_at; Start 1201; Stop 1225
gataacgatagtacctttcgctttc

SEQ ID NO: 115077 - DNA, 25 bp, Artificial
  probe
  misc_feature (1)..(25): SEQ ID NO: 1761; WAN024CEE_at; Start 1078; Stop 1102
gctgtaaccactgctaaatttgccc

SEQ ID NO: 115078 - DNA, 25 bp, Artificial
  probe
  misc_feature (1)..(25): SEQ ID NO: 1761; WAN024CEE_at; Start 1048; Stop 1072
tataaggataagactctggattctg

SEQ ID NO: 115079 - DNA, 25 bp, Artificial
  probe
  misc_feature (1)..(25): SEQ ID NO: 1761; WAN024CEE_at; Start 445; Stop 469
ggaagtgggaagacatttcgctttg

SEQ ID NO: 115080 - DNA, 25 bp, Artificial
  probe
  misc_feature (1)..(25): SEQ ID NO: 1761; WAN024CEE_at; Start 205; Stop 229
ctactaggctttgtgatgatgttgc

SEQ ID NO: 115081 - DNA, 25 bp, Artificial
  probe
  misc_feature (1)..(25): SEQ ID NO: 1761; WAN024CEE_at; Start 564; Stop 588
tggctaccaagtaaaggtgttagat

SEQ ID NO: 115082 - DNA, 25 bp, Artificial
  probe
  misc_feature (1)..(25): SEQ ID NO: 1761; WAN024CEE_at; Start 1550; Stop 1574
aacaaaccattgatgttcgaaatac

SEQ ID NO: 115083 - DNA, 25 bp, Artificial
  probe
  misc_feature (1)..(25): SEQ ID NO: 1761; WAN024CEE_at; Start 1693; Stop 1717
gccaatatgcctgtctttaaaagca

SEQ ID NO: 115084 - DNA, 25 bp, Artificial
  probe
  misc_feature (1)..(25): SEQ ID NO: 1761; WAN024CEE_at; Start 621; Stop 645
tccttttcgctatatagagacagaa

SEQ ID NO: 115085 - DNA, 25 bp, Artificial
  probe
  misc_feature (1)..(25): SEQ ID NO: 1761; WAN024CEE_at; Start 910; Stop 934
gaaatctcaaaactcattaaacact

SEQ ID NO: 115086 - DNA, 25 bp, Artificial
  probe
  misc_feature (1)..(25): SEQ ID NO: 1761; WAN024CEE_at; Start 1610; Stop 1634
tttctcatcaaaagattgctcgtga

SEQ ID NO: 115087 - DNA, 25 bp, Artificial
  probe
  misc_feature (1)..(25): SEQ ID NO: 1761; WAN024CEE_at; Start 70; Stop 94
cgtttgacgcttttgtatgattcct

SEQ ID NO: 115088 - DNA, 25 bp, Artificial
  probe
  misc_feature (1)..(25): SEQ ID NO: 1761; WAN024CEE_at; Start 1686; Stop 1710
tcgaattgccaatatgcctgtcttt

SEQ ID NO: 115089 - DNA, 25 bp, Artificial
  probe
  misc_feature (1)..(25): SEQ ID NO: 1761; WAN024CEE_at; Start 1178; Stop 1202
caatggtttacttagttatcccaga

SEQ ID NO: 115090 - DNA, 25 bp, Artificial
  probe
  misc_feature (1)..(25): SEQ ID NO: 1761; WAN024CEE_at; Start 1831; Stop 1855
cttgaaggccttagaattcgtgatt

SEQ ID NO: 115091 - DNA, 25 bp, Artificial
  probe
  misc_feature (1)..(25): SEQ ID NO: 1761; WAN024CEE_at; Start 1358; Stop 1382
ttgctgaacaaacctcaacagtccg

SEQ ID NO: 115092 - DNA, 25 bp, Artificial
  probe
  misc_feature (1)..(25): SEQ ID NO: 1761; WAN024CEE_at; Start 924; Stop 948
cattaaacacttatccaagggtgaa

SEQ ID NO: 115093 - DNA, 25 bp, Artificial
  probe
  misc_feature (1)..(25): SEQ ID NO: 1761; WAN024CEE_at; Start 709; Stop 733
gatccattttgggatgaagcttcta

SEQ ID NO: 115094 - DNA, 25 bp, Artificial
  probe
  misc_feature (1)..(25): SEQ ID NO: 1761; WAN024CEE_at; Start 212; Stop 236
gctttgtgatgatgttgctggttta

SEQ ID NO: 115095 - DNA, 25 bp, Artificial
  probe
  misc_feature (1)..(25): SEQ ID NO: 1761; WAN024CEE_at; Start 456; Stop 480
gacatttcgctttgtgaaacccaat

SEQ ID NO: 115096 - DNA, 25 bp, Artificial
  probe
  misc_feature (1)..(25): SEQ ID NO: 1761; WAN024CEE_at; Start 78; Stop 102
gcttttgtatgattcctatactgga

SEQ ID NO: 115097 - DNA, 25 bp, Artificial
  probe
  misc_feature (1)..(25): SEQ ID NO: 1761; WAN024CEE_at; Start 1194; Stop 1218
tatcccagataacgatagtaccttt

SEQ ID NO: 115098 - DNA, 25 bp, Artificial
  probe
  misc_feature (1)..(25): SEQ ID NO: 1761; WAN024CEE_at; Start 980; Stop 1004
ttgaaaattatgctaaaaagtatgg

SEQ ID NO: 115099 - DNA, 25 bp, Artificial
  probe
  misc_feature (1)..(25): SEQ ID NO: 1761; WAN024CEE_at; Start 1595; Stop 1619
caggttcaggatccctttctcatca

SEQ ID NO: 115100 - DNA, 25 bp, Artificial
  probe
  misc_feature (1)..(25): SEQ ID NO: 1761; WAN024CEE_at; Start 1042; Stop 1066
caaaattataaggataagactctgg

SEQ ID NO: 115101 - DNA, 25 bp, Artificial
  probe
  misc_feature (1)..(25): SEQ ID NO: 1761; WAN024CEE_at; Start 1090; Stop 1114
gctaaatttgccctcttcaatattc

SEQ ID NO: 115102 - DNA, 25 bp, Artificial
  probe
  misc_feature (1)..(25): SEQ ID NO: 1761; WAN024CEE_at; Start 1540; Stop 1564
ttactcggtaaacaaaccattgatg

SEQ ID NO: 115103 - DNA, 25 bp, Artificial
  probe
  misc_feature (1)..(25): SEQ ID NO: 1761; WAN024CEE_at; Start 719; Stop 743
gggatgaagcttctatgactttggt

SEQ ID NO: 115104 - DNA, 25 bp, Artificial
  probe
  misc_feature (1)..(25): SEQ ID NO: 1761; WAN024CEE_at; Start 1121; Stop 1145
tcatggatttgaccaaaagagatac

SEQ ID NO: 115105 - DNA, 25 bp, Artificial
  probe
  misc_feature (1)..(25): SEQ ID NO: 1761; WAN024CEE_at; Start 1656; Stop 1680
cggaaatatgaaacggcatgaatgc

SEQ ID NO: 115106 - DNA, 25 bp, Artificial
  probe
  misc_feature (1)..(25): SEQ ID NO: 1241; WAN024CEF_at; Start 534; Stop 558
ggtatctattcgatttattcaactc

SEQ ID NO: 115107 - DNA, 25 bp, Artificial
  probe
  misc_feature (1)..(25): SEQ ID NO: 1241; WAN024CEF_at; Start 486; Stop 510
cctcatttggcttgttcggatagta

SEQ ID NO: 115108 - DNA, 25 bp, Artificial
  probe
  misc_feature (1)..(25): SEQ ID NO: 1241; WAN024CEF_at; Start 779; Stop 803
gtttggtacaagctatcttactgat

SEQ ID NO: 115109 - DNA, 25 bp, Artificial
  probe
  misc_feature (1)..(25): SEQ ID NO: 1241; WAN024CEF_at; Start 459; Stop 483
ccggatgattgtgggctttttcgcc

SEQ ID NO: 115110 - DNA, 25 bp, Artificial
  probe
  misc_feature (1)..(25): SEQ ID NO: 1241; WAN024CEF_at; Start 20; Stop 44
caccctttgtttaccttgcatctga

SEQ ID NO: 115111 - DNA, 25 bp, Artificial
  probe
  misc_feature (1)..(25): SEQ ID NO: 1241; WAN024CEF_at; Start 33; Stop 57
ccttgcatctgaaaaaatatcagct

SEQ ID NO: 115112 - DNA, 25 bp, Artificial
  probe
  misc_feature (1)..(25): SEQ ID NO: 1241; WAN024CEF_at; Start 602; Stop 626
taagtgatgaatggaagtctattgg

SEQ ID NO: 115113 - DNA, 25 bp, Artificial
  probe
  misc_feature (1)..(25): SEQ ID NO: 1241; WAN024CEF_at; Start 37; Stop 61
gcatctgaaaaaatatcagctgaaa

SEQ ID NO: 115114 - DNA, 25 bp, Artificial
  probe
  misc_feature (1)..(25): SEQ ID NO: 1241; WAN024CEF_at; Start 794; Stop 818
tcttactgattattgccctcgttgg

SEQ ID NO: 115115 - DNA, 25 bp, Artificial
  probe
  misc_feature (1)..(25): SEQ ID NO: 1241; WAN024CEF_at; Start 49; Stop 73
atatcagctgaaaatttatttgaag

SEQ ID NO: 115116 - DNA, 25 bp, Artificial
  probe
  misc_feature (1)..(25): SEQ ID NO: 1241; WAN024CEF_at; Start 481; Stop 505
gccctcctcatttggcttgttcgga

SEQ ID NO: 115117 - DNA, 25 bp, Artificial
  probe
  misc_feature (1)..(25): SEQ ID NO: 1241; WAN024CEF_at; Start 85; Stop 109
gatttacaatctacggtagatctga

SEQ ID NO: 115118 - DNA, 25 bp, Artificial
  probe
  misc_feature (1)..(25): SEQ ID NO: 1241; WAN024CEF_at; Start 790; Stop 814
gctatcttactgattattgccctcg

SEQ ID NO: 115119 - DNA, 25 bp, Artificial
  probe
  misc_feature (1)..(25): SEQ ID NO: 1241; WAN024CEF_at; Start 753; Stop 777
gcaatcacttgcgattatgtttggt

SEQ ID NO: 115120 - DNA, 25 bp, Artificial
  probe
  misc_feature (1)..(25): SEQ ID NO: 1241; WAN024CEF_at; Start 489; Stop 513
catttggcttgttcggatagtaagt

SEQ ID NO: 115121 - DNA, 25 bp, Artificial
  probe
  misc_feature (1)..(25): SEQ ID NO: 1241; WAN024CEF_at; Start 818; Stop 842
gttctcaacgtacggctcgctcaat

SEQ ID NO: 115122 - DNA, 25 bp, Artificial
  probe
  misc_feature (1)..(25): SEQ ID NO: 1241; WAN024CEF_at; Start 445; Stop 469
tcaggatttattggccggatgattg

SEQ ID NO: 115123 - DNA, 25 bp, Artificial
  probe
  misc_feature (1)..(25): SEQ ID NO: 1241; WAN024CEF_at; Start 14; Stop 38
tagtctcaccctttgtttaccttgc

SEQ ID NO: 115124 - DNA, 25 bp, Artificial
  probe
  misc_feature (1)..(25): SEQ ID NO: 1241; WAN024CEF_at; Start 472; Stop 496
ggctttttcgccctcctcatttggc

SEQ ID NO: 115125 - DNA, 25 bp, Artificial
  probe
  misc_feature (1)..(25): SEQ ID NO: 1241; WAN024CEF_at; Start 801; Stop 825
gattattgccctcgttggttctcaa

SEQ ID NO: 115126 - DNA, 25 bp, Artificial
  probe
  misc_feature (1)..(25): SEQ ID NO: 1241; WAN024CEF_at; Start 587; Stop 611
cgattccaacatttttaagtgatga

SEQ ID NO: 115127 - DNA, 25 bp, Artificial
  probe
  misc_feature (1)..(25): SEQ ID NO: 1241; WAN024CEF_at; Start 23; Stop 47
cctttgtttaccttgcatctgaaaa

SEQ ID NO: 115128 - DNA, 25 bp, Artificial
  probe
  misc_feature (1)..(25): SEQ ID NO: 1241; WAN024CEF_at; Start 544; Stop 568
cgatttattcaactctaccttatga

SEQ ID NO: 115129 - DNA, 25 bp, Artificial
  probe
  misc_feature (1)..(25): SEQ ID NO: 1241; WAN024CEF_at; Start 450; Stop 474
atttattggccggatgattgtgggc

SEQ ID NO: 115130 - DNA, 25 bp, Artificial
  probe
  misc_feature (1)..(25): SEQ ID NO: 1241; WAN024CEF_at; Start 465; Stop 489
gattgtgggctttttcgccctcctc

SEQ ID NO: 115131 - DNA, 25 bp, Artificial
  probe
  misc_feature (1)..(25): SEQ ID NO: 1241; WAN024CEF_at; Start 2; Stop 26
tgaatcttagtttagtctcaccctt

SEQ ID NO: 115132 - DNA, 25 bp, Artificial
  probe
  misc_feature (1)..(25): SEQ ID NO: 1241; WAN024CEF_at; Start 814; Stop 838
gttggttctcaacgtacggctcgct

SEQ ID NO: 115133 - DNA, 25 bp, Artificial
  probe
  misc_feature (1)..(25): SEQ ID NO: 1241; WAN024CEF_at; Start 681; Stop 705
tctgattgtttctcttgttcctttg

SEQ ID NO: 115134 - DNA, 25 bp, Artificial
  probe
  misc_feature (1)..(25): SEQ ID NO: 1241; WAN024CEF_at; Start 775; Stop 799
ggtagtttggtacaagctatcttac

SEQ ID NO: 115135 - DNA, 25 bp, Artificial
  probe
  misc_feature (1)..(25): SEQ ID NO: 1241; WAN024CEF_at; Start 695; Stop 719
ttgttcctttgtttgaatctgctgg

SEQ ID NO: 115136 - DNA, 25 bp, Artificial
  probe
  misc_feature (1)..(25): SEQ ID NO: 1241; WAN024CEF_at; Start 573; Stop 597
atttgcccctcttacgattccaaca

SEQ ID NO: 115137 - DNA, 25 bp, Artificial
  probe
  misc_feature (1)..(25): SEQ ID NO: 1241; WAN024CEF_at; Start 91; Stop 115
caatctacggtagatctgattaaat

SEQ ID NO: 115138 - DNA, 25 bp, Artificial
  probe
  misc_feature (1)..(25): SEQ ID NO: 1241; WAN024CEF_at; Start 143; Stop 167
ggacttatatgtctagtattactaa

SEQ ID NO: 115139 - DNA, 25 bp, Artificial
  probe
  misc_feature (1)..(25): SEQ ID NO: 1241; WAN024CEF_at; Start 764; Stop 788
cgattatgtttggtagtttggtaca

SEQ ID NO: 115140 - DNA, 25 bp, Artificial
  probe
  misc_feature (1)..(25): SEQ ID NO: 4922; WAN024CEG_at; Start 1775; Stop 1799
tggcacttgatatggaactgtatgt

SEQ ID NO: 115141 - DNA, 25 bp, Artificial
  probe
  misc_feature (1)..(25): SEQ ID NO: 4922; WAN024CEG_at; Start 2039; Stop 2063
tgtggagtcgtgtcagaaaatatgg

SEQ ID NO: 115142 - DNA, 25 bp, Artificial
  probe
  misc_feature (1)..(25): SEQ ID NO: 4922; WAN024CEG_at; Start 1810; Stop 1834
cttgatattttttctcataagacca

SEQ ID NO: 115143 - DNA, 25 bp, Artificial
  probe
  misc_feature (1)..(25): SEQ ID NO: 4922; WAN024CEG_at; Start 1315; Stop 1339
aatattattaccattgatcgcagcc

SEQ ID NO: 115144 - DNA, 25 bp, Artificial
  probe
  misc_feature (1)..(25): SEQ ID NO: 4922; WAN024CEG_at; Start 932; Stop 956
caggtatctatttggaaaaagtagg

SEQ ID NO: 115145 - DNA, 25 bp, Artificial
  probe
  misc_feature (1)..(25): SEQ ID NO: 4922; WAN024CEG_at; Start 1172; Stop 1196
gtttgctgccatttggttgtgattt

SEQ ID NO: 115146 - DNA, 25 bp, Artificial
  probe
  misc_feature (1)..(25): SEQ ID NO: 4922; WAN024CEG_at; Start 1329; Stop 1353
tgatcgcagcctattaaatacaccg

SEQ ID NO: 115147 - DNA, 25 bp, Artificial
  probe
  misc_feature (1)..(25): SEQ ID NO: 4922; WAN024CEG_at; Start 1235; Stop 1259
tagcagtgaactcaccttggacttc

SEQ ID NO: 115148 - DNA, 25 bp, Artificial
  probe
  misc_feature (1)..(25): SEQ ID NO: 4922; WAN024CEG_at; Start 1756; Stop 1780
gaagaagaagcgcagaatttggcac

SEQ ID NO: 115149 - DNA, 25 bp, Artificial
  probe
  misc_feature (1)..(25): SEQ ID NO: 4922; WAN024CEG_at; Start 1199; Stop 1223
tagagggagtatcacggagtttatt

SEQ ID NO: 115150 - DNA, 25 bp, Artificial
  probe
  misc_feature (1)..(25): SEQ ID NO: 4922; WAN024CEG_at; Start 1824; Stop 1848
tcataagaccaatattcagacagga

SEQ ID NO: 115151 - DNA, 25 bp, Artificial
  probe
  misc_feature (1)..(25): SEQ ID NO: 4922; WAN024CEG_at; Start 341; Stop 365
ttttgtatgaggaaaaagaagatgg

SEQ ID NO: 115152 - DNA, 25 bp, Artificial
  probe
  misc_feature (1)..(25): SEQ ID NO: 4922; WAN024CEG_at; Start 1801; Stop 1825
gaaggttctcttgatattttttctc

SEQ ID NO: 115153 - DNA, 25 bp, Artificial
  probe
  misc_feature (1)..(25): SEQ ID NO: 4922; WAN024CEG_at; Start 1118; Stop 1142
caaatgacctaatgattgataaact

SEQ ID NO: 115154 - DNA, 25 bp, Artificial
  probe
  misc_feature (1)..(25): SEQ ID NO: 4922; WAN024CEG_at; Start 1241; Stop 1265
tgaactcaccttggacttcagtaga

SEQ ID NO: 115155 - DNA, 25 bp, Artificial
  probe
  misc_feature (1)..(25): SEQ ID NO: 4922; WAN024CEG_at; Start 1829; Stop 1853
agaccaatattcagacaggatctaa

SEQ ID NO: 115156 - DNA, 25 bp, Artificial
  probe
  misc_feature (1)..(25): SEQ ID NO: 4922; WAN024CEG_at; Start 1585; Stop 1609
gatcctgtaaaggtaaaatcagaat

SEQ ID NO: 115157 - DNA, 25 bp, Artificial
  probe
  misc_feature (1)..(25): SEQ ID NO: 4922; WAN024CEG_at; Start 925; Stop 949
gctcgtacaggtatctatttggaaa

SEQ ID NO: 115158 - DNA, 25 bp, Artificial
  probe
  misc_feature (1)..(25): SEQ ID NO: 4922; WAN024CEG_at; Start 1547; Stop 1571
tcaatgtccttgacttgtctgagga

SEQ ID NO: 115159 - DNA, 25 bp, Artificial
  probe
  misc_feature (1)..(25): SEQ ID NO: 4922; WAN024CEG_at; Start 1768; Stop 1792
cagaatttggcacttgatatggaac

SEQ ID NO: 115160 - DNA, 25 bp, Artificial
  probe
  misc_feature (1)..(25): SEQ ID NO: 4922; WAN024CEG_at; Start 2092; Stop 2116
gtcgaaaccttattgttagatccaa

SEQ ID NO: 115161 - DNA, 25 bp, Artificial
  probe
  misc_feature (1)..(25): SEQ ID NO: 4922; WAN024CEG_at; Start 1268; Stop 1292
tacaagaccgtagtgggaaatatta

SEQ ID NO: 115162 - DNA, 25 bp, Artificial
  probe
  misc_feature (1)..(25): SEQ ID NO: 4922; WAN024CEG_at; Start 1454; Stop 1478
ttatcatcgtggatccagaagcaga

SEQ ID NO: 115163 - DNA, 25 bp, Artificial
  probe
  misc_feature (1)..(25): SEQ ID NO: 4922; WAN024CEG_at; Start 2052; Stop 2076
cagaaaatatggagccagtccgact

SEQ ID NO: 115164 - DNA, 25 bp, Artificial
  probe
  misc_feature (1)..(25): SEQ ID NO: 4922; WAN024CEG_at; Start 1441; Stop 1465
gaaaatactgaaattatcatcgtgg

SEQ ID NO: 115165 - DNA, 25 bp, Artificial
  probe
  misc_feature (1)..(25): SEQ ID NO: 4922; WAN024CEG_at; Start 736; Stop 760
cagattgtctatgtgagagactacg

SEQ ID NO: 115166 - DNA, 25 bp, Artificial
  probe
  misc_feature (1)..(25): SEQ ID NO: 4922; WAN024CEG_at; Start 1747; Stop 1771
caacaaccagaagaagaagcgcaga

SEQ ID NO: 115167 - DNA, 25 bp, Artificial
  probe
  misc_feature (1)..(25): SEQ ID NO: 4922; WAN024CEG_at; Start 232; Stop 256
gcaatcattgagaagtattctgatt

SEQ ID NO: 115168 - DNA, 25 bp, Artificial
  probe
  misc_feature (1)..(25): SEQ ID NO: 4922; WAN024CEG_at; Start 1450; Stop 1474
gaaattatcatcgtggatccagaag

SEQ ID NO: 115169 - DNA, 25 bp, Artificial
  probe
  misc_feature (1)..(25): SEQ ID NO: 4922; WAN024CEG_at; Start 1559; Stop 1583
acttgtctgaggaaaatatggatga

SEQ ID NO: 115170 - DNA, 25 bp, Artificial
  probe
  misc_feature (1)..(25): SEQ ID NO: 4922; WAN024CEG_at; Start 1714; Stop 1738
ccttctttggaagaatgggtctttg

SEQ ID NO: 115171 - DNA, 25 bp, Artificial
  probe
  misc_feature (1)..(25): SEQ ID NO: 4922; WAN024CEG_at; Start 2028; Stop 2052
cttctttaaattgtggagtcgtgtc

SEQ ID NO: 115172 - DNA, 25 bp, Artificial
  probe
  misc_feature (1)..(25): SEQ ID NO: 4922; WAN024CEG_at; Start 1339; Stop 1363
ctattaaatacaccgtctggtctga

SEQ ID NO: 115173 - DNA, 25 bp, Artificial
  probe
  misc_feature (1)..(25): SEQ ID NO: 4922; WAN024CEG_at; Start 1428; Stop 1452
caaggaatctggtgaaaatactgaa

SEQ ID NO: 115174 - DNA, 25 bp, Artificial
  probe
  misc_feature (1)..(25): SEQ ID NO: 1197; WAN024CEH_at; Start 134; Stop 158
tctggcaatttggagattggtttgt

SEQ ID NO: 115175 - DNA, 25 bp, Artificial
  probe
  misc_feature (1)..(25): SEQ ID NO: 1197; WAN024CEH_at; Start 27; Stop 51
ctcaaaataccaacacagggcttgg

SEQ ID NO: 115176 - DNA, 25 bp, Artificial
  probe
  misc_feature (1)..(25): SEQ ID NO: 1197; WAN024CEH_at; Start 32; Stop 56
aataccaacacagggcttggttagg

SEQ ID NO: 115177 - DNA, 25 bp, Artificial
  probe
  misc_feature (1)..(25): SEQ ID NO: 1197; WAN024CEH_at; Start 202; Stop 226
ggagtctataaacccaatgatttat

SEQ ID NO: 115178 - DNA, 25 bp, Artificial
  probe
  misc_feature (1)..(25): SEQ ID NO: 1197; WAN024CEH_at; Start 88; Stop 112
ccagcctttattgtcacaattattg

SEQ ID NO: 115179 - DNA, 25 bp, Artificial
  probe
  misc_feature (1)..(25): SEQ ID NO: 1197; WAN024CEH_at; Start 24; Stop 48
catctcaaaataccaacacagggct

SEQ ID NO: 115180 - DNA, 25 bp, Artificial
  probe
  misc_feature (1)..(25): SEQ ID NO: 1197; WAN024CEH_at; Start 101; Stop 125
tcacaattattgttttgggcttgaa

SEQ ID NO: 115181 - DNA, 25 bp, Artificial
  probe
  misc_feature (1)..(25): SEQ ID NO: 1197; WAN024CEH_at; Start 124; Stop 148
aatctctttttctggcaatttggag

SEQ ID NO: 115182 - DNA, 25 bp, Artificial
  probe
  misc_feature (1)..(25): SEQ ID NO: 1197; WAN024CEH_at; Start 201; Stop 225
tggagtctataaacccaatgattta

SEQ ID NO: 115183 - DNA, 25 bp, Artificial
  probe
  misc_feature (1)..(25): SEQ ID NO: 1197; WAN024CEH_at; Start 26; Stop 50
tctcaaaataccaacacagggcttg

SEQ ID NO: 115184 - DNA, 25 bp, Artificial
  probe
  misc_feature (1)..(25): SEQ ID NO: 1197; WAN024CEH_at; Start 86; Stop 110
taccagcctttattgtcacaattat

SEQ ID NO: 115185 - DNA, 25 bp, Artificial
  probe
  misc_feature (1)..(25): SEQ ID NO: 1197; WAN024CEH_at; Start 194; Stop 218
tgctttttggagtctataaacccaa

SEQ ID NO: 115186 - DNA, 25 bp, Artificial
  probe
  misc_feature (1)..(25): SEQ ID NO: 1197; WAN024CEH_at; Start 1; Stop 25
atgaatacacgtgtctttaaagaca

SEQ ID NO: 115187 - DNA, 25 bp, Artificial
  probe
  misc_feature (1)..(25): SEQ ID NO: 1197; WAN024CEH_at; Start 229; Stop 253
tttgaacattatttgaaataccgtc

SEQ ID NO: 115188 - DNA, 25 bp, Artificial
  probe
  misc_feature (1)..(25): SEQ ID NO: 1197; WAN024CEH_at; Start 103; Stop 127
acaattattgttttgggcttgaatc

SEQ ID NO: 115189 - DNA, 25 bp, Artificial
  probe
  misc_feature (1)..(25): SEQ ID NO: 1197; WAN024CEH_at; Start 28; Stop 52
tcaaaataccaacacagggcttggt

SEQ ID NO: 115190 - DNA, 25 bp, Artificial
  probe
  misc_feature (1)..(25): SEQ ID NO: 1197; WAN024CEH_at; Start 3; Stop 27
gaatacacgtgtctttaaagacatc

SEQ ID NO: 115191 - DNA, 25 bp, Artificial
  probe
  misc_feature (1)..(25): SEQ ID NO: 1197; WAN024CEH_at; Start 232; Stop 256
gaacattatttgaaataccgtcttc

SEQ ID NO: 115192 - DNA, 25 bp, Artificial
  probe
  misc_feature (1)..(25): SEQ ID NO: 1197; WAN024CEH_at; Start 6; Stop 30
tacacgtgtctttaaagacatctca

SEQ ID NO: 115193 - DNA, 25 bp, Artificial
  probe
  misc_feature (1)..(25): SEQ ID NO: 1197; WAN024CEH_at; Start 197; Stop 221
tttttggagtctataaacccaatga

SEQ ID NO: 115194 - DNA, 25 bp, Artificial
  probe
  misc_feature (1)..(25): SEQ ID NO: 1197; WAN024CEH_at; Start 139; Stop 163
caatttggagattggtttgtttacg

SEQ ID NO: 115195 - DNA, 25 bp, Artificial
  probe
  misc_feature (1)..(25): SEQ ID NO: 1197; WAN024CEH_at; Start 116; Stop 140
tgggcttgaatctctttttctggca

SEQ ID NO: 115196 - DNA, 25 bp, Artificial
  probe
  misc_feature (1)..(25): SEQ ID NO: 1197; WAN024CEH_at; Start 123; Stop 147
gaatctctttttctggcaatttgga

SEQ ID NO: 115197 - DNA, 25 bp, Artificial
  probe
  misc_feature (1)..(25): SEQ ID NO: 1197; WAN024CEH_at; Start 29; Stop 53
caaaataccaacacagggcttggtt

SEQ ID NO: 115198 - DNA, 25 bp, Artificial
  probe
  misc_feature (1)..(25): SEQ ID NO: 1197; WAN024CEH_at; Start 129; Stop 153
ctttttctggcaatttggagattgg

SEQ ID NO: 115199 - DNA, 25 bp, Artificial
  probe
  misc_feature (1)..(25): SEQ ID NO: 1197; WAN024CEH_at; Start 22; Stop 46
gacatctcaaaataccaacacaggg

SEQ ID NO: 115200 - DNA, 25 bp, Artificial
  probe
  misc_feature (1)..(25): SEQ ID NO: 1197; WAN024CEH_at; Start 105; Stop 129
aattattgttttgggcttgaatctc

SEQ ID NO: 115201 - DNA, 25 bp, Artificial
  probe
  misc_feature (1)..(25): SEQ ID NO: 1197; WAN024CEH_at; Start 119; Stop 143
gcttgaatctctttttctggcaatt

SEQ ID NO: 115202 - DNA, 25 bp, Artificial
  probe
  misc_feature (1)..(25): SEQ ID NO: 1197; WAN024CEH_at; Start 117; Stop 141
gggcttgaatctctttttctggcaa

SEQ ID NO: 115203 - DNA, 25 bp, Artificial
  probe
  misc_feature (1)..(25): SEQ ID NO: 1197; WAN024CEH_at; Start 240; Stop 264
tttgaaataccgtcttcattttgaa

SEQ ID NO: 115204 - DNA, 25 bp, Artificial
  probe
  misc_feature (1)..(25): SEQ ID NO: 1197; WAN024CEH_at; Start 31; Stop 55
aaataccaacacagggcttggttag

SEQ ID NO: 115205 - DNA, 25 bp, Artificial
  probe
  misc_feature (1)..(25): SEQ ID NO: 1197; WAN024CEH_at; Start 96; Stop 120
tattgtcacaattattgttttgggc

SEQ ID NO: 115206 - DNA, 25 bp, Artificial
  probe
  misc_feature (1)..(25): SEQ ID NO: 1197; WAN024CEH_at; Start 212; Stop 236
aacccaatgatttatattttgaaca

SEQ ID NO: 115207 - DNA, 25 bp, Artificial
  probe
  misc_feature (1)..(25): SEQ ID NO: 1197; WAN024CEH_at; Start 8; Stop 32
cacgtgtctttaaagacatctcaaa

SEQ ID NO: 115208 - DNA, 25 bp, Artificial
  probe
  misc_feature (1)..(25): SEQ ID NO: 1125; WAN024CEI_at; Start 286; Stop 310
cctcatgctaggaaacgattgaaaa

SEQ ID NO: 115209 - DNA, 25 bp, Artificial
  probe
  misc_feature (1)..(25): SEQ ID NO: 1125; WAN024CEI_at; Start 1026; Stop 1050
tgaattaacaaaagcttatacccac

SEQ ID NO: 115210 - DNA, 25 bp, Artificial
  probe
  misc_feature (1)..(25): SEQ ID NO: 1125; WAN024CEI_at; Start 2285; Stop 2309
tactggaaagacaaaccagagcaac

SEQ ID NO: 115211 - DNA, 25 bp, Artificial
  probe
  misc_feature (1)..(25): SEQ ID NO: 1125; WAN024CEI_at; Start 752; Stop 776
aagagcgataccatcattttaagga

SEQ ID NO: 115212 - DNA, 25 bp, Artificial
  probe
  misc_feature (1)..(25): SEQ ID NO: 1125; WAN024CEI_at; Start 2566; Stop 2590
tgggttgcgacagcttcaagtcttg

SEQ ID NO: 115213 - DNA, 25 bp, Artificial
  probe
  misc_feature (1)..(25): SEQ ID NO: 1125; WAN024CEI_at; Start 2701; Stop 2725
gatgatggttctttccttgtgtctg

SEQ ID NO: 115214 - DNA, 25 bp, Artificial
  probe
  misc_feature (1)..(25): SEQ ID NO: 1125; WAN024CEI_at; Start 2413; Stop 2437
cattctgttcctggtggtggagatg

SEQ ID NO: 115215 - DNA, 25 bp, Artificial
  probe
  misc_feature (1)..(25): SEQ ID NO: 1125; WAN024CEI_at; Start 2172; Stop 2196
ggatagtccttactatcaaagttgg

SEQ ID NO: 115216 - DNA, 25 bp, Artificial
  probe
  misc_feature (1)..(25): SEQ ID NO: 1125; WAN024CEI_at; Start 994; Stop 1018
tcatctgctagtttgattcaacaag

SEQ ID NO: 115217 - DNA, 25 bp, Artificial
  probe
  misc_feature (1)..(25): SEQ ID NO: 1125; WAN024CEI_at; Start 2529; Stop 2553
gatttcaatcattaataccatggga

SEQ ID NO: 115218 - DNA, 25 bp, Artificial
  probe
  misc_feature (1)..(25): SEQ ID NO: 1125; WAN024CEI_at; Start 1946; Stop 1970
ttggcgctaccgattcctcatggga

SEQ ID NO: 115219 - DNA, 25 bp, Artificial
  probe
  misc_feature (1)..(25): SEQ ID NO: 1125; WAN024CEI_at; Start 1847; Stop 1871
gggcaagtccccaagccattgcggc

SEQ ID NO: 115220 - DNA, 25 bp, Artificial
  probe
  misc_feature (1)..(25): SEQ ID NO: 1125; WAN024CEI_at; Start 20; Stop 44
tcatacgtgcccgaaaggcatttag

SEQ ID NO: 115221 - DNA, 25 bp, Artificial
  probe
  misc_feature (1)..(25): SEQ ID NO: 1125; WAN024CEI_at; Start 1137; Stop 1161
gaactttaaattccatgactatgag

SEQ ID NO: 115222 - DNA, 25 bp, Artificial
  probe
  misc_feature (1)..(25): SEQ ID NO: 1125; WAN024CEI_at; Start 564; Stop 588
ttatgtccttggacgtgaaggtgga

SEQ ID NO: 115223 - DNA, 25 bp, Artificial
  probe
  misc_feature (1)..(25): SEQ ID NO: 1125; WAN024CEI_at; Start 1105; Stop 1129
tacacaaaagttgatgatgtgatgg

SEQ ID NO: 115224 - DNA, 25 bp, Artificial
  probe
  misc_feature (1)..(25): SEQ ID NO: 1125; WAN024CEI_at; Start 1737; Stop 1761
ttttccaaaagtcattcaacttcag

SEQ ID NO: 115225 - DNA, 25 bp, Artificial
  probe
  misc_feature (1)..(25): SEQ ID NO: 1125; WAN024CEI_at; Start 1535; Stop 1559
atgttattctcactaacggaaaagg

SEQ ID NO: 115226 - DNA, 25 bp, Artificial
  probe
  misc_feature (1)..(25): SEQ ID NO: 1125; WAN024CEI_at; Start 2000; Stop 2024
cagccatttatagtggtgcttatcc

SEQ ID NO: 115227 - DNA, 25 bp, Artificial
  probe
  misc_feature (1)..(25): SEQ ID NO: 1125; WAN024CEI_at; Start 1798; Stop 1822
gatgagtttgaacgagcaaaacata

SEQ ID NO: 115228 - DNA, 25 bp, Artificial
  probe
  misc_feature (1)..(25): SEQ ID NO: 1125; WAN024CEI_at; Start 693; Stop 717
tagtgtcaaaacaggacaagcaaca

SEQ ID NO: 115229 - DNA, 25 bp, Artificial
  probe
  misc_feature (1)..(25): SEQ ID NO: 1125; WAN024CEI_at; Start 683; Stop 707
ttggaaaagctagtgtcaaaacagg

SEQ ID NO: 115230 - DNA, 25 bp, Artificial
  probe
  misc_feature (1)..(25): SEQ ID NO: 1125; WAN024CEI_at; Start 1678; Stop 1702
tcctatcaaaagtataagaacaaga

SEQ ID NO: 115231 - DNA, 25 bp, Artificial
  probe
  misc_feature (1)..(25): SEQ ID NO: 1125; WAN024CEI_at; Start 2296; Stop 2320
caaaccagagcaacggaatggtatt

SEQ ID NO: 115232 - DNA, 25 bp, Artificial
  probe
  misc_feature (1)..(25): SEQ ID NO: 1125; WAN024CEI_at; Start 1877; Stop 1901
taggaaattggtcggtagagtcttc

SEQ ID NO: 115233 - DNA, 25 bp, Artificial
  probe
  misc_feature (1)..(25): SEQ ID NO: 1125; WAN024CEI_at; Start 771; Stop 795
taaggatggaaaaggatggaaacta

SEQ ID NO: 115234 - DNA, 25 bp, Artificial
  probe
  misc_feature (1)..(25): SEQ ID NO: 1125; WAN024CEI_at; Start 737; Stop 761
gactgaccaacacaaaagagcgata

SEQ ID NO: 115235 - DNA, 25 bp, Artificial
  probe
  misc_feature (1)..(25): SEQ ID NO: 1125; WAN024CEI_at; Start 1662; Stop 1686
tacaggtttgaaagtttcctatcaa

SEQ ID NO: 115236 - DNA, 25 bp, Artificial
  probe
  misc_feature (1)..(25): SEQ ID NO: 1125; WAN024CEI_at; Start 934; Stop 958
tggatagttggaggaatagtctttc

SEQ ID NO: 115237 - DNA, 25 bp, Artificial
  probe
  misc_feature (1)..(25): SEQ ID NO: 1125; WAN024CEI_at; Start 858; Stop 882
aagtgtccgaaatatctatcaaaaa

SEQ ID NO: 115238 - DNA, 25 bp, Artificial
  probe
  misc_feature (1)..(25): SEQ ID NO: 1125; WAN024CEI_at; Start 1720; Stop 1744
gtcaatccgcaattttattttccaa

SEQ ID NO: 115239 - DNA, 25 bp, Artificial
  probe
  misc_feature (1)..(25): SEQ ID NO: 1125; WAN024CEI_at; Start 1217; Stop 1241
ctttgtggcatgatttaaacgatgg

SEQ ID NO: 115240 - DNA, 25 bp, Artificial
  probe
  misc_feature (1)..(25): SEQ ID NO: 1125; WAN024CEI_at; Start 583; Stop 607
ggtggagagttagcttcagaaaatg

SEQ ID NO: 115241 - DNA, 25 bp, Artificial
  probe
  misc_feature (1)..(25): SEQ ID NO: 1125; WAN024CEI_at; Start 197; Stop 221
taaaacaagcaaatgaagactacaa

SEQ ID NO: 115242 - DNA, 25 bp, Artificial
  probe
  misc_feature (1)..(25): SEQ ID NO: 2219; WAN024CEJ_at; Start 304; Stop 328
gacctagaagacttatatacttact

SEQ ID NO: 115243 - DNA, 25 bp, Artificial
  probe
  misc_feature (1)..(25): SEQ ID NO: 2219; WAN024CEJ_at; Start 232; Stop 256
atgatggagagtcactacaaggaat

SEQ ID NO: 115244 - DNA, 25 bp, Artificial
  probe
  misc_feature (1)..(25): SEQ ID NO: 2219; WAN024CEJ_at; Start 310; Stop 334
gaagacttatatacttactacatga

SEQ ID NO: 115245 - DNA, 25 bp, Artificial
  probe
  misc_feature (1)..(25): SEQ ID NO: 2219; WAN024CEJ_at; Start 158; Stop 182
tacaagacatagaccaaacaagtat

SEQ ID NO: 115246 - DNA, 25 bp, Artificial
  probe
  misc_feature (1)..(25): SEQ ID NO: 2219; WAN024CEJ_at; Start 11; Stop 35
tttatcaacgtgattcggatcaaga

SEQ ID NO: 115247 - DNA, 25 bp, Artificial
  probe
  misc_feature (1)..(25): SEQ ID NO: 2219; WAN024CEJ_at; Start 150; Stop 174
aaaggatttacaagacatagaccaa

SEQ ID NO: 115248 - DNA, 25 bp, Artificial
  probe
  misc_feature (1)..(25): SEQ ID NO: 2219; WAN024CEJ_at; Start 229; Stop 253
gatatgatggagagtcactacaagg

SEQ ID NO: 115249 - DNA, 25 bp, Artificial
  probe
  misc_feature (1)..(25): SEQ ID NO: 2219; WAN024CEJ_at; Start 301; Stop 325
caagacctagaagacttatatactt

SEQ ID NO: 115250 - DNA, 25 bp, Artificial
  probe
  misc_feature (1)..(25): SEQ ID NO: 2219; WAN024CEJ_at; Start 313; Stop 337
gacttatatacttactacatgagaa

SEQ ID NO: 115251 - DNA, 25 bp, Artificial
  probe
  misc_feature (1)..(25): SEQ ID NO: 2219; WAN024CEJ_at; Start 273; Stop 297
tagtattgaaacagggattgaaaac

SEQ ID NO: 115252 - DNA, 25 bp, Artificial
  probe
  misc_feature (1)..(25): SEQ ID NO: 2219; WAN024CEJ_at; Start 217; Stop 241
caaaagatttcagatatgatggaga

SEQ ID NO: 115253 - DNA, 25 bp, Artificial
  probe
  misc_feature (1)..(25): SEQ ID NO: 2219; WAN024CEJ_at; Start 200; Stop 224
tatttatggaaatgaaacaaaagat

SEQ ID NO: 115254 - DNA, 25 bp, Artificial
  probe
  misc_feature (1)..(25): SEQ ID NO: 2219; WAN024CEJ_at; Start 204; Stop 228
tatggaaatgaaacaaaagatttca

SEQ ID NO: 115255 - DNA, 25 bp, Artificial
  probe
  misc_feature (1)..(25): SEQ ID NO: 2219; WAN024CEJ_at; Start 231; Stop 255
tatgatggagagtcactacaaggaa

SEQ ID NO: 115256 - DNA, 25 bp, Artificial
  probe
  misc_feature (1)..(25): SEQ ID NO: 2219; WAN024CEJ_at; Start 359; Stop 383
ctagtgatttagaaaccagtcctca

SEQ ID NO: 115257 - DNA, 25 bp, Artificial
  probe
  misc_feature (1)..(25): SEQ ID NO: 2219; WAN024CEJ_at; Start 222; Stop 246
gatttcagatatgatggagagtcac

SEQ ID NO: 115258 - DNA, 25 bp, Artificial
  probe
  misc_feature (1)..(25): SEQ ID NO: 2219; WAN024CEJ_at; Start 224; Stop 248
tttcagatatgatggagagtcacta

SEQ ID NO: 115259 - DNA, 25 bp, Artificial
  probe
  misc_feature (1)..(25): SEQ ID NO: 2219; WAN024CEJ_at; Start 143; Stop 167
ccttagaaaaggatttacaagacat

SEQ ID NO: 115260 - DNA, 25 bp, Artificial
  probe
  misc_feature (1)..(25): SEQ ID NO: 2219; WAN024CEJ_at; Start 358; Stop 382
tctagtgatttagaaaccagtcctc

SEQ ID NO: 115261 - DNA, 25 bp, Artificial
  probe
  misc_feature (1)..(25): SEQ ID NO: 2219; WAN024CEJ_at; Start 148; Stop 172
gaaaaggatttacaagacatagacc

SEQ ID NO: 115262 - DNA, 25 bp, Artificial
  probe
  misc_feature (1)..(25): SEQ ID NO: 2219; WAN024CEJ_at; Start 153; Stop 177
ggatttacaagacatagaccaaaca

SEQ ID NO: 115263 - DNA, 25 bp, Artificial
  probe
  misc_feature (1)..(25): SEQ ID NO: 2219; WAN024CEJ_at; Start 238; Stop 262
gagagtcactacaaggaatttatac

SEQ ID NO: 115264 - DNA, 25 bp, Artificial
  probe
  misc_feature (1)..(25): SEQ ID NO: 2219; WAN024CEJ_at; Start 13; Stop 37
tatcaacgtgattcggatcaagatg

SEQ ID NO: 115265 - DNA, 25 bp, Artificial
  probe
  misc_feature (1)..(25): SEQ ID NO: 2219; WAN024CEJ_at; Start 227; Stop 251
cagatatgatggagagtcactacaa

SEQ ID NO: 115266 - DNA, 25 bp, Artificial
  probe
  misc_feature (1)..(25): SEQ ID NO: 2219; WAN024CEJ_at; Start 226; Stop 250
tcagatatgatggagagtcactaca

SEQ ID NO: 115267 - DNA, 25 bp, Artificial
  probe
  misc_feature (1)..(25): SEQ ID NO: 2219; WAN024CEJ_at; Start 156; Stop 180
tttacaagacatagaccaaacaagt

SEQ ID NO: 115268 - DNA, 25 bp, Artificial
  probe
  misc_feature (1)..(25): SEQ ID NO: 2219; WAN024CEJ_at; Start 225; Stop 249
ttcagatatgatggagagtcactac

SEQ ID NO: 115269 - DNA, 25 bp, Artificial
  probe
  misc_feature (1)..(25): SEQ ID NO: 2219; WAN024CEJ_at; Start 14; Stop 38
atcaacgtgattcggatcaagatgg

SEQ ID NO: 115270 - DNA, 25 bp, Artificial
  probe
  misc_feature (1)..(25): SEQ ID NO: 2219; WAN024CEJ_at; Start 306; Stop 330
cctagaagacttatatacttactac

SEQ ID NO: 115271 - DNA, 25 bp, Artificial
  probe
  misc_feature (1)..(25): SEQ ID NO: 2219; WAN024CEJ_at; Start 151; Stop 175
aaggatttacaagacatagaccaaa

SEQ ID NO: 115272 - DNA, 25 bp, Artificial
  probe
  misc_feature (1)..(25): SEQ ID NO: 2219; WAN024CEJ_at; Start 196; Stop 220
tcagtatttatggaaatgaaacaaa

SEQ ID NO: 115273 - DNA, 25 bp, Artificial
  probe
  misc_feature (1)..(25): SEQ ID NO: 2219; WAN024CEJ_at; Start 237; Stop 261
ggagagtcactacaaggaatttata

SEQ ID NO: 115274 - DNA, 25 bp, Artificial
  probe
  misc_feature (1)..(25): SEQ ID NO: 2219; WAN024CEJ_at; Start 299; Stop 323
aacaagacctagaagacttatatac

SEQ ID NO: 115275 - DNA, 25 bp, Artificial
  probe
  misc_feature (1)..(25): SEQ ID NO: 2219; WAN024CEJ_at; Start 9; Stop 33
catttatcaacgtgattcggatcaa

SEQ ID NO: 115276 - DNA, 25 bp, Artificial
  probe
  misc_feature (1)..(25): SEQ ID NO: 7136; WAN024CEK_at; Start 24; Stop 48
tgaaagagttcttgtaaatgctgct

SEQ ID NO: 115277 - DNA, 25 bp, Artificial
  probe
  misc_feature (1)..(25): SEQ ID NO: 7136; WAN024CEK_at; Start 60; Stop 84
agaacagaggttttttccaaatctg

SEQ ID NO: 115278 - DNA, 25 bp, Artificial
  probe
  misc_feature (1)..(25): SEQ ID NO: 7136; WAN024CEK_at; Start 43; Stop 67
gctgctcttttgctcttagaacaga

SEQ ID NO: 115279 - DNA, 25 bp, Artificial
  probe
  misc_feature (1)..(25): SEQ ID NO: 7136; WAN024CEK_at; Start 34; Stop 58
cttgtaaatgctgctcttttgctct

SEQ ID NO: 115280 - DNA, 25 bp, Artificial
  probe
  misc_feature (1)..(25): SEQ ID NO: 7136; WAN024CEK_at; Start 33; Stop 57
tcttgtaaatgctgctcttttgctc

SEQ ID NO: 115281 - DNA, 25 bp, Artificial
  probe
  misc_feature (1)..(25): SEQ ID NO: 7136; WAN024CEK_at; Start 3; Stop 27
ggataccgtgagacaaagtcttgaa

SEQ ID NO: 115282 - DNA, 25 bp, Artificial
  probe
  misc_feature (1)..(25): SEQ ID NO: 7136; WAN024CEK_at; Start 38; Stop 62
taaatgctgctcttttgctcttaga

SEQ ID NO: 115283 - DNA, 25 bp, Artificial
  probe
  misc_feature (1)..(25): SEQ ID NO: 7136; WAN024CEK_at; Start 6; Stop 30
taccgtgagacaaagtcttgaaaga

SEQ ID NO: 115284 - DNA, 25 bp, Artificial
  probe
  misc_feature (1)..(25): SEQ ID NO: 7136; WAN024CEK_at; Start 9; Stop 33
cgtgagacaaagtcttgaaagagtt

SEQ ID NO: 115285 - DNA, 25 bp, Artificial
  probe
  misc_feature (1)..(25): SEQ ID NO: 7136; WAN024CEK_at; Start 25; Stop 49
gaaagagttcttgtaaatgctgctc

SEQ ID NO: 115286 - DNA, 25 bp, Artificial
  probe
  misc_feature (1)..(25): SEQ ID NO: 7136; WAN024CEK_at; Start 5; Stop 29
ataccgtgagacaaagtcttgaaag

SEQ ID NO: 115287 - DNA, 25 bp, Artificial
  probe
  misc_feature (1)..(25): SEQ ID NO: 7136; WAN024CEK_at; Start 29; Stop 53
gagttcttgtaaatgctgctctttt

SEQ ID NO: 115288 - DNA, 25 bp, Artificial
  probe
  misc_feature (1)..(25): SEQ ID NO: 7136; WAN024CEK_at; Start 10; Stop 34
gtgagacaaagtcttgaaagagttc

SEQ ID NO: 115289 - DNA, 25 bp, Artificial
  probe
  misc_feature (1)..(25): SEQ ID NO: 7136; WAN024CEK_at; Start 44; Stop 68
ctgctcttttgctcttagaacagag

SEQ ID NO: 115290 - DNA, 25 bp, Artificial
  probe
  misc_feature (1)..(25): SEQ ID NO: 7136; WAN024CEK_at; Start 42; Stop 66
tgctgctcttttgctcttagaacag

SEQ ID NO: 115291 - DNA, 25 bp, Artificial
  probe
  misc_feature (1)..(25): SEQ ID NO: 7136; WAN024CEK_at; Start 37; Stop 61
gtaaatgctgctcttttgctcttag

SEQ ID NO: 115292 - DNA, 25 bp, Artificial
  probe
  misc_feature (1)..(25): SEQ ID NO: 7136; WAN024CEK_at; Start 53; Stop 77
tgctcttagaacagaggttttttcc

SEQ ID NO: 115293 - DNA, 25 bp, Artificial
  probe
  misc_feature (1)..(25): SEQ ID NO: 7136; WAN024CEK_at; Start 7; Stop 31
accgtgagacaaagtcttgaaagag

SEQ ID NO: 115294 - DNA, 25 bp, Artificial
  probe
  misc_feature (1)..(25): SEQ ID NO: 7136; WAN024CEK_at; Start 4; Stop 28
gataccgtgagacaaagtcttgaaa

SEQ ID NO: 115295 - DNA, 25 bp, Artificial
  probe
  misc_feature (1)..(25): SEQ ID NO: 7136; WAN024CEK_at; Start 46; Stop 70
gctcttttgctcttagaacagaggt

SEQ ID NO: 115296 - DNA, 25 bp, Artificial
  probe
  misc_feature (1)..(25): SEQ ID NO: 7136; WAN024CEK_at; Start 31; Stop 55
gttcttgtaaatgctgctcttttgc

SEQ ID NO: 115297 - DNA, 25 bp, Artificial
  probe
  misc_feature (1)..(25): SEQ ID NO: 7136; WAN024CEK_at; Start 39; Stop 63
aaatgctgctcttttgctcttagaa

SEQ ID NO: 115298 - DNA, 25 bp, Artificial
  probe
  misc_feature (1)..(25): SEQ ID NO: 7136; WAN024CEK_at; Start 48; Stop 72
tcttttgctcttagaacagaggttt

SEQ ID NO: 115299 - DNA, 25 bp, Artificial
  probe
  misc_feature (1)..(25): SEQ ID NO: 7136; WAN024CEK_at; Start 1; Stop 25
ctggataccgtgagacaaagtcttg

SEQ ID NO: 115300 - DNA, 25 bp, Artificial
  probe
  misc_feature (1)..(25): SEQ ID NO: 7136; WAN024CEK_at; Start 47; Stop 71
ctcttttgctcttagaacagaggtt

SEQ ID NO: 115301 - DNA, 25 bp, Artificial
  probe
  misc_feature (1)..(25): SEQ ID NO: 7136; WAN024CEK_at; Start 45; Stop 69
tgctcttttgctcttagaacagagg

SEQ ID NO: 115302 - DNA, 25 bp, Artificial
  probe
  misc_feature (1)..(25): SEQ ID NO: 7136; WAN024CEK_at; Start 54; Stop 78
gctcttagaacagaggttttttcca

SEQ ID NO: 115303 - DNA, 25 bp, Artificial
  probe
  misc_feature (1)..(25): SEQ ID NO: 7136; WAN024CEK_at; Start 40; Stop 64
aatgctgctcttttgctcttagaac

SEQ ID NO: 115304 - DNA, 25 bp, Artificial
  probe
  misc_feature (1)..(25): SEQ ID NO: 7136; WAN024CEK_at; Start 2; Stop 26
tggataccgtgagacaaagtcttga

SEQ ID NO: 115305 - DNA, 25 bp, Artificial
  probe
  misc_feature (1)..(25): SEQ ID NO: 7136; WAN024CEK_at; Start 36; Stop 60
tgtaaatgctgctcttttgctctta

SEQ ID NO: 115306 - DNA, 25 bp, Artificial
  probe
  misc_feature (1)..(25): SEQ ID NO: 7136; WAN024CEK_at; Start 8; Stop 32
ccgtgagacaaagtcttgaaagagt

SEQ ID NO: 115307 - DNA, 25 bp, Artificial
  probe
  misc_feature (1)..(25): SEQ ID NO: 7136; WAN024CEK_at; Start 49; Stop 73
cttttgctcttagaacagaggtttt

SEQ ID NO: 115308 - DNA, 25 bp, Artificial
  probe
  misc_feature (1)..(25): SEQ ID NO: 7136; WAN024CEK_at; Start 26; Stop 50
aaagagttcttgtaaatgctgctct

SEQ ID NO: 115309 - DNA, 25 bp, Artificial
  probe
  misc_feature (1)..(25): SEQ ID NO: 7136; WAN024CEK_at; Start 30; Stop 54
agttcttgtaaatgctgctcttttg

SEQ ID NO: 115310 - DNA, 25 bp, Artificial
  probe
  misc_feature (1)..(25): SEQ ID NO: 3597; WAN024CEL-3_at; Start 1468; Stop 1492
tactgtgaagaaaatatgcccattc

SEQ ID NO: 115311 - DNA, 25 bp, Artificial
  probe
  misc_feature (1)..(25): SEQ ID NO: 3597; WAN024CEL-3_at; Start 1436; Stop 1460
gcagcaaggatcactatcgtcatac

SEQ ID NO: 115312 - DNA, 25 bp, Artificial
  probe
  misc_feature (1)..(25): SEQ ID NO: 3597; WAN024CEL-3_at; Start 1275; Stop 1299
gacttctaaggagccgattcgtgct

SEQ ID NO: 115313 - DNA, 25 bp, Artificial
  probe
  misc_feature (1)..(25): SEQ ID NO: 3597; WAN024CEL-3_at; Start 598; Stop 622
gagagtgagttaactgaaaaccaga

SEQ ID NO: 115314 - DNA, 25 bp, Artificial
  probe
  misc_feature (1)..(25): SEQ ID NO: 3597; WAN024CEL-3_at; Start 1266; Stop 1290
gcagattatgacttctaaggagccg

SEQ ID NO: 115315 - DNA, 25 bp, Artificial
  probe
  misc_feature (1)..(25): SEQ ID NO: 3597; WAN024CEL-3_at; Start 1950; Stop 1974
aaaggccgaatacgatgtactcgcg

SEQ ID NO: 115316 - DNA, 25 bp, Artificial
  probe
  misc_feature (1)..(25): SEQ ID NO: 3597; WAN024CEL-3_at; Start 731; Stop 755
ctattgatatgcgtttattggactc

SEQ ID NO: 115317 - DNA, 25 bp, Artificial
  probe
  misc_feature (1)..(25): SEQ ID NO: 3597; WAN024CEL-3_at; Start 1219; Stop 1243
gataattatctatgggcaactcagg

SEQ ID NO: 115318 - DNA, 25 bp, Artificial
  probe
  misc_feature (1)..(25): SEQ ID NO: 3597; WAN024CEL-3_at; Start 1675; Stop 1699
tatcgaggatttgacattaaaatgc

SEQ ID NO: 115319 - DNA, 25 bp, Artificial
  probe
  misc_feature (1)..(25): SEQ ID NO: 3597; WAN024CEL-3_at; Start 967; Stop 991
catgatgccaatagtgatgaaaaga

SEQ ID NO: 115320 - DNA, 25 bp, Artificial
  probe
  misc_feature (1)..(25): SEQ ID NO: 3597; WAN024CEL-3_at; Start 399; Stop 423
tgactcttgggtaggtgcttttgga

SEQ ID NO: 115321 - DNA, 25 bp, Artificial
  probe
  misc_feature (1)..(25): SEQ ID NO: 3597; WAN024CEL-3_at; Start 778; Stop 802
cataaactgcttcaggtagtggata

SEQ ID NO: 115322 - DNA, 25 bp, Artificial
  probe
  misc_feature (1)..(25): SEQ ID NO: 3597; WAN024CEL-3_at; Start 1375; Stop 1399
tataagatggaactagagaatgatc

SEQ ID NO: 115323 - DNA, 25 bp, Artificial
  probe
  misc_feature (1)..(25): SEQ ID NO: 3597; WAN024CEL-3_at; Start 1340; Stop 1364
ttaaggcactagcaacaggtaatcc

SEQ ID NO: 115324 - DNA, 25 bp, Artificial
  probe
  misc_feature (1)..(25): SEQ ID NO: 3597; WAN024CEL-3_at; Start 1076; Stop 1100
ttcagagcaagatgaaagcagttca

SEQ ID NO: 115325 - DNA, 25 bp, Artificial
  probe
  misc_feature (1)..(25): SEQ ID NO: 3597; WAN024CEL-3_at; Start 1044; Stop 1068
ctcaactgaaaaaggaggaacaggt

SEQ ID NO: 115326 - DNA, 25 bp, Artificial
  probe
  misc_feature (1)..(25): SEQ ID NO: 3597; WAN024CEL-3_at; Start 1967; Stop 1991
tactcgcgccattgattgaaacaga

SEQ ID NO: 115327 - DNA, 25 bp, Artificial
  probe
  misc_feature (1)..(25): SEQ ID NO: 3597; WAN024CEL-3_at; Start 952; Stop 976
gaaattgcctttgtacatgatgcca

SEQ ID NO: 115328 - DNA, 25 bp, Artificial
  probe
  misc_feature (1)..(25): SEQ ID NO: 3597; WAN024CEL-3_at; Start 1233; Stop 1257
ggcaactcaggagaacaaactccgt

SEQ ID NO: 115329 - DNA, 25 bp, Artificial
  probe
  misc_feature (1)..(25): SEQ ID NO: 3597; WAN024CEL-3_at; Start 1499; Stop 1523
aacgattaagcaagtatgaaggcga

SEQ ID NO: 115330 - DNA, 25 bp, Artificial
  probe
  misc_feature (1)..(25): SEQ ID NO: 3597; WAN024CEL-3_at; Start 1406; Stop 1430
tattagaaaatcaaagacgcgcctt

SEQ ID NO: 115331 - DNA, 25 bp, Artificial
  probe
  misc_feature (1)..(25): SEQ ID NO: 3597; WAN024CEL-3_at; Start 141; Stop 165
tctctttgtggatgaagcacatcac

SEQ ID NO: 115332 - DNA, 25 bp, Artificial
  probe
  misc_feature (1)..(25): SEQ ID NO: 3597; WAN024CEL-3_at; Start 1484; Stop 1508
tgcccattcttgagaaacgattaag

SEQ ID NO: 115333 - DNA, 25 bp, Artificial
  probe
  misc_feature (1)..(25): SEQ ID NO: 3597; WAN024CEL-3_at; Start 1326; Stop 1350
gacagcttctgattttaaggcacta

SEQ ID NO: 115334 - DNA, 25 bp, Artificial
  probe
  misc_feature (1)..(25): SEQ ID NO: 3597; WAN024CEL-3_at; Start 420; Stop 444
tggagaaattcaaaactctatggaa

SEQ ID NO: 115335 - DNA, 25 bp, Artificial
  probe
  misc_feature (1)..(25): SEQ ID NO: 3597; WAN024CEL-3_at; Start 1421; Stop 1445
gacgcgcctttcaacgcagcaagga

SEQ ID NO: 115336 - DNA, 25 bp, Artificial
  probe
  misc_feature (1)..(25): SEQ ID NO: 3597; WAN024CEL-3_at; Start 486; Stop 510
taaaaagtttgtcaatctacctgag

SEQ ID NO: 115337 - DNA, 25 bp, Artificial
  probe
  misc_feature (1)..(25): SEQ ID NO: 3597; WAN024CEL-3_at; Start 252; Stop 276
gaaggttcgacagattcaggaagaa

SEQ ID NO: 115338 - DNA, 25 bp, Artificial
  probe
  misc_feature (1)..(25): SEQ ID NO: 3597; WAN024CEL-3_at; Start 859; Stop 883
tcagatattggcacacctaagaaaa

SEQ ID NO: 115339 - DNA, 25 bp, Artificial
  probe
  misc_feature (1)..(25): SEQ ID NO: 3597; WAN024CEL-3_at; Start 435; Stop 459
ctctatggaattagctcctacaggg

SEQ ID NO: 115340 - DNA, 25 bp, Artificial
  probe
  misc_feature (1)..(25): SEQ ID NO: 3597; WAN024CEL-3_at; Start 548; Stop 572
cacaagatatgttggatttacctgt

SEQ ID NO: 115341 - DNA, 25 bp, Artificial
  probe
  misc_feature (1)..(25): SEQ ID NO: 3597; WAN024CEL-3_at; Start 1923; Stop 1947
tccaaaggaagaggattatcaaact

SEQ ID NO: 115342 - DNA, 25 bp, Artificial
  probe
  misc_feature (1)..(25): SEQ ID NO: 3597; WAN024CEL-3_at; Start 1851; Stop 1875
gaaaactcagaacttattggatgaa

SEQ ID NO: 115343 - DNA, 25 bp, Artificial
  probe
  misc_feature (1)..(25): SEQ ID NO: 3597; WAN024CEL-3_at; Start 583; Stop 607
catattatccctattgagagtgagt

SEQ ID NO: 115344 - DNA, 25 bp, Artificial
  probe
  misc_feature (1)..(25): SEQ ID NO: 903; WAN024CEL-5_at; Start 1394; Stop 1418
cagaacgtttaactcttaagagctt

SEQ ID NO: 115345 - DNA, 25 bp, Artificial
  probe
  misc_feature (1)..(25): SEQ ID NO: 903; WAN024CEL-5_at; Start 668; Stop 692
cacaaaagctgaagattattactca

SEQ ID NO: 115346 - DNA, 25 bp, Artificial
  probe
  misc_feature (1)..(25): SEQ ID NO: 903; WAN024CEL-5_at; Start 875; Stop 899
ttcagttggtttcgattgaaaatgc

SEQ ID NO: 115347 - DNA, 25 bp, Artificial
  probe
  misc_feature (1)..(25): SEQ ID NO: 903; WAN024CEL-5_at; Start 1196; Stop 1220
cagatgatttagaggacttttatcc

SEQ ID NO: 115348 - DNA, 25 bp, Artificial
  probe
  misc_feature (1)..(25): SEQ ID NO: 903; WAN024CEL-5_at; Start 1413; Stop 1437
gagcttagtaagtaaatcagaatac

SEQ ID NO: 115349 - DNA, 25 bp, Artificial
  probe
  misc_feature (1)..(25): SEQ ID NO: 903; WAN024CEL-5_at; Start 1819; Stop 1843
cactcacttgatttagtaagagacg

SEQ ID NO: 115350 - DNA, 25 bp, Artificial
  probe
  misc_feature (1)..(25): SEQ ID NO: 903; WAN024CEL-5_at; Start 1037; Stop 1061
cagagattgagattgattcatcaag

SEQ ID NO: 115351 - DNA, 25 bp, Artificial
  probe
  misc_feature (1)..(25): SEQ ID NO: 903; WAN024CEL-5_at; Start 1453; Stop 1477
agttctctcacagcctattatacag

SEQ ID NO: 115352 - DNA, 25 bp, Artificial
  probe
  misc_feature (1)..(25): SEQ ID NO: 903; WAN024CEL-5_at; Start 1576; Stop 1600
gcggcgatgcctagaagtatacgag

SEQ ID NO: 115353 - DNA, 25 bp, Artificial
  probe
  misc_feature (1)..(25): SEQ ID NO: 903; WAN024CEL-5_at; Start 988; Stop 1012
gaagagattgaacaagtattgtctc

SEQ ID NO: 115354 - DNA, 25 bp, Artificial
  probe
  misc_feature (1)..(25): SEQ ID NO: 903; WAN024CEL-5_at; Start 46; Stop 70
cgtggaacaattccaaaagataggg

SEQ ID NO: 115355 - DNA, 25 bp, Artificial
  probe
  misc_feature (1)..(25): SEQ ID NO: 903; WAN024CEL-5_at; Start 714; Stop 738
aagcgaaaagtctaatcaagtagag

SEQ ID NO: 115356 - DNA, 25 bp, Artificial
  probe
  misc_feature (1)..(25): SEQ ID NO: 903; WAN024CEL-5_at; Start 354; Stop 378
cactcgattttacatccaatctgaa

SEQ ID NO: 115357 - DNA, 25 bp, Artificial
  probe
  misc_feature (1)..(25): SEQ ID NO: 903; WAN024CEL-5_at; Start 1018; Stop 1042
gaacttgaaaaagaagattcagaga

SEQ ID NO: 115358 - DNA, 25 bp, Artificial
  probe
  misc_feature (1)..(25): SEQ ID NO: 903; WAN024CEL-5_at; Start 1210; Stop 1234
gacttttatcctaagacaaatcgag

SEQ ID NO: 115359 - DNA, 25 bp, Artificial
  probe
  misc_feature (1)..(25): SEQ ID NO: 903; WAN024CEL-5_at; Start 1484; Stop 1508
tgattattcgccagatttggcaaaa

SEQ ID NO: 115360 - DNA, 25 bp, Artificial
  probe
  misc_feature (1)..(25): SEQ ID NO: 903; WAN024CEL-5_at; Start 437; Stop 461
tagtcaatgtctatcgggttgcgaa

SEQ ID NO: 115361 - DNA, 25 bp, Artificial
  probe
  misc_feature (1)..(25): SEQ ID NO: 903; WAN024CEL-5_at; Start 801; Stop 825
tgtcgataaaattgtagaagaagct

SEQ ID NO: 115362 - DNA, 25 bp, Artificial
  probe
  misc_feature (1)..(25): SEQ ID NO: 903; WAN024CEL-5_at; Start 29; Stop 53
aattattggctatgtttcgtggaac

SEQ ID NO: 115363 - DNA, 25 bp, Artificial
  probe
  misc_feature (1)..(25): SEQ ID NO: 903; WAN024CEL-5_at; Start 934; Stop 958
aatgattccaaccagttatttgaag

SEQ ID NO: 115364 - DNA, 25 bp, Artificial
  probe
  misc_feature (1)..(25): SEQ ID NO: 903; WAN024CEL-5_at; Start 2009; Stop 2033
ttcaaaaggatcaagcaaagaatct

SEQ ID NO: 115365 - DNA, 25 bp, Artificial
  probe
  misc_feature (1)..(25): SEQ ID NO: 903; WAN024CEL-5_at; Start 1828; Stop 1852
gatttagtaagagacggaggacaag

SEQ ID NO: 115366 - DNA, 25 bp, Artificial
  probe
  misc_feature (1)..(25): SEQ ID NO: 903; WAN024CEL-5_at; Start 1696; Stop 1720
gaagaagttccctatcaaaataata

SEQ ID NO: 115367 - DNA, 25 bp, Artificial
  probe
  misc_feature (1)..(25): SEQ ID NO: 903; WAN024CEL-5_at; Start 2; Stop 26
tgaaaggagcgagtatggaagtaat

SEQ ID NO: 115368 - DNA, 25 bp, Artificial
  probe
  misc_feature (1)..(25): SEQ ID NO: 903; WAN024CEL-5_at; Start 1253; Stop 1277
tcgccgcaattgaacttgttaaaag

SEQ ID NO: 115369 - DNA, 25 bp, Artificial
  probe
  misc_feature (1)..(25): SEQ ID NO: 903; WAN024CEL-5_at; Start 1683; Stop 1707
agtgcgaggatttgaagaagttccc

SEQ ID NO: 115370 - DNA, 25 bp, Artificial
  probe
  misc_feature (1)..(25): SEQ ID NO: 903; WAN024CEL-5_at; Start 450; Stop 474
tcgggttgcgaataatctatctgac

SEQ ID NO: 115371 - DNA, 25 bp, Artificial
  probe
  misc_feature (1)..(25): SEQ ID NO: 903; WAN024CEL-5_at; Start 1561; Stop 1585
actgggaacttctttgcggcgatgc

SEQ ID NO: 115372 - DNA, 25 bp, Artificial
  probe
  misc_feature (1)..(25): SEQ ID NO: 903; WAN024CEL-5_at; Start 622; Stop 646
acggatcttgtccatcatgaagaaa

SEQ ID NO: 115373 - DNA, 25 bp, Artificial
  probe
  misc_feature (1)..(25): SEQ ID NO: 903; WAN024CEL-5_at; Start 1236; Stop 1260
aaagattgaaacgaatatcgccgca

SEQ ID NO: 115374 - DNA, 25 bp, Artificial
  probe
  misc_feature (1)..(25): SEQ ID NO: 903; WAN024CEL-5_at; Start 103; Stop 127
caacattttgatgagaaatggcagg

SEQ ID NO: 115375 - DNA, 25 bp, Artificial
  probe
  misc_feature (1)..(25): SEQ ID NO: 903; WAN024CEL-5_at; Start 835; Stop 859
tatccaatcggttcacaagtaagtt

SEQ ID NO: 115376 - DNA, 25 bp, Artificial
  probe
  misc_feature (1)..(25): SEQ ID NO: 903; WAN024CEL-5_at; Start 655; Stop 679
caactcccactgacacaaaagctga

SEQ ID NO: 115377 - DNA, 25 bp, Artificial
  probe
  misc_feature (1)..(25): SEQ ID NO: 903; WAN024CEL-5_at; Start 848; Stop 872
cacaagtaagttataaaggacaagt

SEQ ID NO: 115378 - DNA, 25 bp, Artificial
  probe
  misc_feature (1)..(25): SEQ ID NO: 3736; WAN024CEL-M_at; Start 1773; Stop 1797
agaccttgaccatgcttggtgctgg

SEQ ID NO: 115379 - DNA, 25 bp, Artificial
  probe
  misc_feature (1)..(25): SEQ ID NO: 3736; WAN024CEL-M_at; Start 1492; Stop 1516
catcacagatttggaaaaaacctct

SEQ ID NO: 115380 - DNA, 25 bp, Artificial
  probe
  misc_feature (1)..(25): SEQ ID NO: 3736; WAN024CEL-M_at; Start 1483; Stop 1507
gaaaaagaccatcacagatttggaa

SEQ ID NO: 115381 - DNA, 25 bp, Artificial
  probe
  misc_feature (1)..(25): SEQ ID NO: 3736; WAN024CEL-M_at; Start 2003; Stop 2027
gattctcaatttgaaaaaatccctg

SEQ ID NO: 115382 - DNA, 25 bp, Artificial
  probe
  misc_feature (1)..(25): SEQ ID NO: 3736; WAN024CEL-M_at; Start 529; Stop 553
cttatcggataaggatattagtcgc

SEQ ID NO: 115383 - DNA, 25 bp, Artificial
  probe
  misc_feature (1)..(25): SEQ ID NO: 3736; WAN024CEL-M_at; Start 1217; Stop 1241
caatccgtttatggtaaatttgcct

SEQ ID NO: 115384 - DNA, 25 bp, Artificial
  probe
  misc_feature (1)..(25): SEQ ID NO: 3736; WAN024CEL-M_at; Start 1194; Stop 1218
aaatagggtcacgttggattcctca

SEQ ID NO: 115385 - DNA, 25 bp, Artificial
  probe
  misc_feature (1)..(25): SEQ ID NO: 3736; WAN024CEL-M_at; Start 1872; Stop 1896
gccaagaaatcatgaaatttttccc

SEQ ID NO: 115386 - DNA, 25 bp, Artificial
  probe
  misc_feature (1)..(25): SEQ ID NO: 3736; WAN024CEL-M_at; Start 2023; Stop 2047
ccctgtcagtaaggaaagacagatg

SEQ ID NO: 115387 - DNA, 25 bp, Artificial
  probe
  misc_feature (1)..(25): SEQ ID NO: 3736; WAN024CEL-M_at; Start 770; Stop 794
gaatacattgattctaaagatcaga

SEQ ID NO: 115388 - DNA, 25 bp, Artificial
  probe
  misc_feature (1)..(25): SEQ ID NO: 3736; WAN024CEL-M_at; Start 1633; Stop 1657
tagtcgagagtatgacggtagccat

SEQ ID NO: 115389 - DNA, 25 bp, Artificial
  probe
  misc_feature (1)..(25): SEQ ID NO: 3736; WAN024CEL-M_at; Start 617; Stop 641
gattatagtcggacagattttcagg

SEQ ID NO: 115390 - DNA, 25 bp, Artificial
  probe
  misc_feature (1)..(25): SEQ ID NO: 3736; WAN024CEL-M_at; Start 2; Stop 26
gataagcgtgtctggatcaatcctt

SEQ ID NO: 115391 - DNA, 25 bp, Artificial
  probe
  misc_feature (1)..(25): SEQ ID NO: 3736; WAN024CEL-M_at; Start 1206; Stop 1230
gttggattcctcaatccgtttatgg

SEQ ID NO: 115392 - DNA, 25 bp, Artificial
  probe
  misc_feature (1)..(25): SEQ ID NO: 3736; WAN024CEL-M_at; Start 808; Stop 832
aaaatctttagcctttgagaaagca

SEQ ID NO: 115393 - DNA, 25 bp, Artificial
  probe
  misc_feature (1)..(25): SEQ ID NO: 3736; WAN024CEL-M_at; Start 1068; Stop 1092
tcaacaagatagaagtagttcaact

SEQ ID NO: 115394 - DNA, 25 bp, Artificial
  probe
  misc_feature (1)..(25): SEQ ID NO: 3736; WAN024CEL-M_at; Start 755; Stop 779
gcaagtttagaagatgaatacattg

SEQ ID NO: 115395 - DNA, 25 bp, Artificial
  probe
  misc_feature (1)..(25): SEQ ID NO: 3736; WAN024CEL-M_at; Start 1910; Stop 1934
tttgtgaccactaagaaagattttg

SEQ ID NO: 115396 - DNA, 25 bp, Artificial
  probe
  misc_feature (1)..(25): SEQ ID NO: 3736; WAN024CEL-M_at; Start 1345; Stop 1369
tgcttatcgctatccaagtgccaaa

SEQ ID NO: 115397 - DNA, 25 bp, Artificial
  probe
  misc_feature (1)..(25): SEQ ID NO: 3736; WAN024CEL-M_at; Start 252; Stop 276
tagcgctctattcttttggatatga

SEQ ID NO: 115398 - DNA, 25 bp, Artificial
  probe
  misc_feature (1)..(25): SEQ ID NO: 3736; WAN024CEL-M_at; Start 723; Stop 747
tatttgatagtgacgataagtattc

SEQ ID NO: 115399 - DNA, 25 bp, Artificial
  probe
  misc_feature (1)..(25): SEQ ID NO: 3736; WAN024CEL-M_at; Start 1753; Stop 1777
tcatgaggtaggttcaggaaagacc

SEQ ID NO: 115400 - DNA, 25 bp, Artificial
  probe
  misc_feature (1)..(25): SEQ ID NO: 3736; WAN024CEL-M_at; Start 564; Stop 588
tggttgatttgagagagacctatca

SEQ ID NO: 115401 - DNA, 25 bp, Artificial
  probe
  misc_feature (1)..(25): SEQ ID NO: 3736; WAN024CEL-M_at; Start 1840; Stop 1864
tgtggtgccctctagtttgtctgct

SEQ ID NO: 115402 - DNA, 25 bp, Artificial
  probe
  misc_feature (1)..(25): SEQ ID NO: 3736; WAN024CEL-M_at; Start 19; Stop 43
caatccttattttgatgggaaatac

SEQ ID NO: 115403 - DNA, 25 bp, Artificial
  probe
  misc_feature (1)..(25): SEQ ID NO: 3736; WAN024CEL-M_at; Start 1504; Stop 1528
ggaaaaaacctctgttctaagagca

SEQ ID NO: 115404 - DNA, 25 bp, Artificial
  probe
  misc_feature (1)..(25): SEQ ID NO: 3736; WAN024CEL-M_at; Start 1767; Stop 1791
caggaaagaccttgaccatgcttgg

SEQ ID NO: 115405 - DNA, 25 bp, Artificial
  probe
  misc_feature (1)..(25): SEQ ID NO: 3736; WAN024CEL-M_at; Start 1394; Stop 1418
tcacgttatgatacaggaagaaaga

SEQ ID NO: 115406 - DNA, 25 bp, Artificial
  probe
  misc_feature (1)..(25): SEQ ID NO: 3736; WAN024CEL-M_at; Start 1965; Stop 1989
gtattattacaggagattacgatgc

SEQ ID NO: 115407 - DNA, 25 bp, Artificial
  probe
  misc_feature (1)..(25): SEQ ID NO: 3736; WAN024CEL-M_at; Start 2014; Stop 2038
tgaaaaaatccctgtcagtaaggaa

SEQ ID NO: 115408 - DNA, 25 bp, Artificial
  probe
  misc_feature (1)..(25): SEQ ID NO: 3736; WAN024CEL-M_at; Start 455; Stop 479
tacaagtcagaagaagcgagtaaaa

SEQ ID NO: 115409 - DNA, 25 bp, Artificial
  probe
  misc_feature (1)..(25): SEQ ID NO: 3736; WAN024CEL-M_at; Start 819; Stop 843
cctttgagaaagcattggttaggcc

SEQ ID NO: 115410 - DNA, 25 bp, Artificial
  probe
  misc_feature (1)..(25): SEQ ID NO: 3736; WAN024CEL-M_at; Start 1172; Stop 1196
catctggcagatattgagtttaaaa

SEQ ID NO: 115411 - DNA, 25 bp, Artificial
  probe
  misc_feature (1)..(25): SEQ ID NO: 3736; WAN024CEL-M_at; Start 1676; Stop 1700
gcacaaaacatcagtcttcgtcctc

SEQ ID NO: 115412 - DNA, 25 bp, Artificial
  probe
  misc_feature (1)..(25): SEQ ID NO: 1752; WAN024CEM_at; Start 64; Stop 88
gaataccaagcctacaaggagttaa

SEQ ID NO: 115413 - DNA, 25 bp, Artificial
  probe
  misc_feature (1)..(25): SEQ ID NO: 1752; WAN024CEM_at; Start 29; Stop 53
aagaggctttggtacagggatttca

SEQ ID NO: 115414 - DNA, 25 bp, Artificial
  probe
  misc_feature (1)..(25): SEQ ID NO: 1752; WAN024CEM_at; Start 37; Stop 61
ttggtacagggatttcaaacacctg

SEQ ID NO: 115415 - DNA, 25 bp, Artificial
  probe
  misc_feature (1)..(25): SEQ ID NO: 1752; WAN024CEM_at; Start 39; Stop 63
ggtacagggatttcaaacacctgaa

SEQ ID NO: 115416 - DNA, 25 bp, Artificial
  probe
  misc_feature (1)..(25): SEQ ID NO: 1752; WAN024CEM_at; Start 31; Stop 55
gaggctttggtacagggatttcaaa

SEQ ID NO: 115417 - DNA, 25 bp, Artificial
  probe
  misc_feature (1)..(25): SEQ ID NO: 1752; WAN024CEM_at; Start 248; Stop 272
cctctcttgccacccattatcgtca

SEQ ID NO: 115418 - DNA, 25 bp, Artificial
  probe
  misc_feature (1)..(25): SEQ ID NO: 1752; WAN024CEM_at; Start 97; Stop 121
tatgaggaagtgacaggggattaca

SEQ ID NO: 115419 - DNA, 25 bp, Artificial
  probe
  misc_feature (1)..(25): SEQ ID NO: 1752; WAN024CEM_at; Start 72; Stop 96
agcctacaaggagttaaaggaacat

SEQ ID NO: 115420 - DNA, 25 bp, Artificial
  probe
  misc_feature (1)..(25): SEQ ID NO: 1752; WAN024CEM_at; Start 89; Stop 113
aggaacattatgaggaagtgacagg

SEQ ID NO: 115421 - DNA, 25 bp, Artificial
  probe
  misc_feature (1)..(25): SEQ ID NO: 1752; WAN024CEM_at; Start 233; Stop 257
tagaagagtttgattcctctcttgc

SEQ ID NO: 115422 - DNA, 25 bp, Artificial
  probe
  misc_feature (1)..(25): SEQ ID NO: 1752; WAN024CEM_at; Start 238; Stop 262
gagtttgattcctctcttgccaccc

SEQ ID NO: 115423 - DNA, 25 bp, Artificial
  probe
  misc_feature (1)..(25): SEQ ID NO: 1752; WAN024CEM_at; Start 60; Stop 84
tgaagaataccaagcctacaaggag

SEQ ID NO: 115424 - DNA, 25 bp, Artificial
  probe
  misc_feature (1)..(25): SEQ ID NO: 1752; WAN024CEM_at; Start 52; Stop 76
caaacacctgaagaataccaagcct

SEQ ID NO: 115425 - DNA, 25 bp, Artificial
  probe
  misc_feature (1)..(25): SEQ ID NO: 1752; WAN024CEM_at; Start 235; Stop 259
gaagagtttgattcctctcttgcca

SEQ ID NO: 115426 - DNA, 25 bp, Artificial
  probe
  misc_feature (1)..(25): SEQ ID NO: 1752; WAN024CEM_at; Start 40; Stop 64
gtacagggatttcaaacacctgaag

SEQ ID NO: 115427 - DNA, 25 bp, Artificial
  probe
  misc_feature (1)..(25): SEQ ID NO: 1752; WAN024CEM_at; Start 21; Stop 45
tcaattagaagaggctttggtacag

SEQ ID NO: 115428 - DNA, 25 bp, Artificial
  probe
  misc_feature (1)..(25): SEQ ID NO: 1752; WAN024CEM_at; Start 149; Stop 173
aattggaaatcgctcttcagaatca

SEQ ID NO: 115429 - DNA, 25 bp, Artificial
  probe
  misc_feature (1)..(25): SEQ ID NO: 1752; WAN024CEM_at; Start 16; Stop 40
tattatcaattagaagaggctttgg

SEQ ID NO: 115430 - DNA, 25 bp, Artificial
  probe
  misc_feature (1)..(25): SEQ ID NO: 1752; WAN024CEM_at; Start 19; Stop 43
tatcaattagaagaggctttggtac

SEQ ID NO: 115431 - DNA, 25 bp, Artificial
  probe
  misc_feature (1)..(25): SEQ ID NO: 1752; WAN024CEM_at; Start 75; Stop 99
ctacaaggagttaaaggaacattat

SEQ ID NO: 115432 - DNA, 25 bp, Artificial
  probe
  misc_feature (1)..(25): SEQ ID NO: 1752; WAN024CEM_at; Start 26; Stop 50
tagaagaggctttggtacagggatt

SEQ ID NO: 115433 - DNA, 25 bp, Artificial
  probe
  misc_feature (1)..(25): SEQ ID NO: 1752; WAN024CEM_at; Start 86; Stop 110
taaaggaacattatgaggaagtgac

SEQ ID NO: 115434 - DNA, 25 bp, Artificial
  probe
  misc_feature (1)..(25): SEQ ID NO: 1752; WAN024CEM_at; Start 10; Stop 34
gatacctattatcaattagaagagg

SEQ ID NO: 115435 - DNA, 25 bp, Artificial
  probe
  misc_feature (1)..(25): SEQ ID NO: 1752; WAN024CEM_at; Start 151; Stop 175
ttggaaatcgctcttcagaatcatc

SEQ ID NO: 115436 - DNA, 25 bp, Artificial
  probe
  misc_feature (1)..(25): SEQ ID NO: 1752; WAN024CEM_at; Start 57; Stop 81
acctgaagaataccaagcctacaag

SEQ ID NO: 115437 - DNA, 25 bp, Artificial
  probe
  misc_feature (1)..(25): SEQ ID NO: 1752; WAN024CEM_at; Start 54; Stop 78
aacacctgaagaataccaagcctac

SEQ ID NO: 115438 - DNA, 25 bp, Artificial
  probe
  misc_feature (1)..(25): SEQ ID NO: 1752; WAN024CEM_at; Start 51; Stop 75
tcaaacacctgaagaataccaagcc

SEQ ID NO: 115439 - DNA, 25 bp, Artificial
  probe
  misc_feature (1)..(25): SEQ ID NO: 1752; WAN024CEM_at; Start 78; Stop 102
caaggagttaaaggaacattatgag

SEQ ID NO: 115440 - DNA, 25 bp, Artificial
  probe
  misc_feature (1)..(25): SEQ ID NO: 1752; WAN024CEM_at; Start 12; Stop 36
tacctattatcaattagaagaggct

SEQ ID NO: 115441 - DNA, 25 bp, Artificial
  probe
  misc_feature (1)..(25): SEQ ID NO: 1752; WAN024CEM_at; Start 240; Stop 264
gtttgattcctctcttgccacccat

SEQ ID NO: 115442 - DNA, 25 bp, Artificial
  probe
  misc_feature (1)..(25): SEQ ID NO: 1752; WAN024CEM_at; Start 33; Stop 57
ggctttggtacagggatttcaaaca

SEQ ID NO: 115443 - DNA, 25 bp, Artificial
  probe
  misc_feature (1)..(25): SEQ ID NO: 1752; WAN024CEM_at; Start 66; Stop 90
ataccaagcctacaaggagttaaag

SEQ ID NO: 115444 - DNA, 25 bp, Artificial
  probe
  misc_feature (1)..(25): SEQ ID NO: 1752; WAN024CEM_at; Start 243; Stop 267
tgattcctctcttgccacccattat

SEQ ID NO: 115445 - DNA, 25 bp, Artificial
  probe
  misc_feature (1)..(25): SEQ ID NO: 1752; WAN024CEM_at; Start 61; Stop 85
gaagaataccaagcctacaaggagt

SEQ ID NO: 115446 - DNA, 25 bp, Artificial
  probe
  misc_feature (1)..(25): SEQ ID NO: 6503; WAN024CEN_at; Start 255; Stop 279
tagttggcgcttcattaactccata

SEQ ID NO: 115447 - DNA, 25 bp, Artificial
  probe
  misc_feature (1)..(25): SEQ ID NO: 6503; WAN024CEN_at; Start 253; Stop 277
tttagttggcgcttcattaactcca

SEQ ID NO: 115448 - DNA, 25 bp, Artificial
  probe
  misc_feature (1)..(25): SEQ ID NO: 6503; WAN024CEN_at; Start 180; Stop 204
tgatatcagacaacatggtttaact

SEQ ID NO: 115449 - DNA, 25 bp, Artificial
  probe
  misc_feature (1)..(25): SEQ ID NO: 6503; WAN024CEN_at; Start 266; Stop 290
tcattaactccataaataagcataa

SEQ ID NO: 115450 - DNA, 25 bp, Artificial
  probe
  misc_feature (1)..(25): SEQ ID NO: 6503; WAN024CEN_at; Start 220; Stop 244
tactttttcatcaatctgatgttgg

SEQ ID NO: 115451 - DNA, 25 bp, Artificial
  probe
  misc_feature (1)..(25): SEQ ID NO: 6503; WAN024CEN_at; Start 244; Stop 268
gttctaggatttagttggcgcttca

SEQ ID NO: 115452 - DNA, 25 bp, Artificial
  probe
  misc_feature (1)..(25): SEQ ID NO: 6503; WAN024CEN_at; Start 257; Stop 281
gttggcgcttcattaactccataaa

SEQ ID NO: 115453 - DNA, 25 bp, Artificial
  probe
  misc_feature (1)..(25): SEQ ID NO: 6503; WAN024CEN_at; Start 208; Stop 232
tttacggctgtgtactttttcatca

SEQ ID NO: 115454 - DNA, 25 bp, Artificial
  probe
  misc_feature (1)..(25): SEQ ID NO: 6503; WAN024CEN_at; Start 140; Stop 164
gaatttatctgttctttactgaacc

SEQ ID NO: 115455 - DNA, 25 bp, Artificial
  probe
  misc_feature (1)..(25): SEQ ID NO: 6503; WAN024CEN_at; Start 170; Stop 194
tatattttgatgatatcagacaaca

SEQ ID NO: 115456 - DNA, 25 bp, Artificial
  probe
  misc_feature (1)..(25): SEQ ID NO: 6503; WAN024CEN_at; Start 176; Stop 200
ttgatgatatcagacaacatggttt

SEQ ID NO: 115457 - DNA, 25 bp, Artificial
  probe
  misc_feature (1)..(25): SEQ ID NO: 6503; WAN024CEN_at; Start 210; Stop 234
tacggctgtgtactttttcatcaat

SEQ ID NO: 115458 - DNA, 25 bp, Artificial
  probe
  misc_feature (1)..(25): SEQ ID NO: 6503; WAN024CEN_at; Start 260; Stop 284
ggcgcttcattaactccataaataa

SEQ ID NO: 115459 - DNA, 25 bp, Artificial
  probe
  misc_feature (1)..(25): SEQ ID NO: 6503; WAN024CEN_at; Start 136; Stop 160
tatggaatttatctgttctttactg

SEQ ID NO: 115460 - DNA, 25 bp, Artificial
  probe
  misc_feature (1)..(25): SEQ ID NO: 6503; WAN024CEN_at; Start 240; Stop 264
gttggttctaggatttagttggcgc

SEQ ID NO: 115461 - DNA, 25 bp, Artificial
  probe
  misc_feature (1)..(25): SEQ ID NO: 6503; WAN024CEN_at; Start 270; Stop 294
taactccataaataagcataaaatg

SEQ ID NO: 115462 - DNA, 25 bp, Artificial
  probe
  misc_feature (1)..(25): SEQ ID NO: 6503; WAN024CEN_at; Start 216; Stop 240
tgtgtactttttcatcaatctgatg

SEQ ID NO: 115463 - DNA, 25 bp, Artificial
  probe
  misc_feature (1)..(25): SEQ ID NO: 6503; WAN024CEN_at; Start 193; Stop 217
catggtttaactagttttacggctg

SEQ ID NO: 115464 - DNA, 25 bp, Artificial
  probe
  misc_feature (1)..(25): SEQ ID NO: 6503; WAN024CEN_at; Start 158; Stop 182
ctgaacctagtttatattttgatga

SEQ ID NO: 115465 - DNA, 25 bp, Artificial
  probe
  misc_feature (1)..(25): SEQ ID NO: 6503; WAN024CEN_at; Start 248; Stop 272
taggatttagttggcgcttcattaa

SEQ ID NO: 115466 - DNA, 25 bp, Artificial
  probe
  misc_feature (1)..(25): SEQ ID NO: 6503; WAN024CEN_at; Start 261; Stop 285
gcgcttcattaactccataaataag

SEQ ID NO: 115467 - DNA, 25 bp, Artificial
  probe
  misc_feature (1)..(25): SEQ ID NO: 6503; WAN024CEN_at; Start 185; Stop 209
tcagacaacatggtttaactagttt

SEQ ID NO: 115468 - DNA, 25 bp, Artificial
  probe
  misc_feature (1)..(25): SEQ ID NO: 6503; WAN024CEN_at; Start 145; Stop 169
tatctgttctttactgaacctagtt

SEQ ID NO: 115469 - DNA, 25 bp, Artificial
  probe
  misc_feature (1)..(25): SEQ ID NO: 6503; WAN024CEN_at; Start 231; Stop 255
caatctgatgttggttctaggattt

SEQ ID NO: 115470 - DNA, 25 bp, Artificial
  probe
  misc_feature (1)..(25): SEQ ID NO: 6503; WAN024CEN_at; Start 183; Stop 207
tatcagacaacatggtttaactagt

SEQ ID NO: 115471 - DNA, 25 bp, Artificial
  probe
  misc_feature (1)..(25): SEQ ID NO: 6503; WAN024CEN_at; Start 243; Stop 267
ggttctaggatttagttggcgcttc

SEQ ID NO: 115472 - DNA, 25 bp, Artificial
  probe
  misc_feature (1)..(25): SEQ ID NO: 6503; WAN024CEN_at; Start 214; Stop 238
gctgtgtactttttcatcaatctga

SEQ ID NO: 115473 - DNA, 25 bp, Artificial
  probe
  misc_feature (1)..(25): SEQ ID NO: 6503; WAN024CEN_at; Start 246; Stop 270
tctaggatttagttggcgcttcatt

SEQ ID NO: 115474 - DNA, 25 bp, Artificial
  probe
  misc_feature (1)..(25): SEQ ID NO: 6503; WAN024CEN_at; Start 234; Stop 258
tctgatgttggttctaggatttagt

SEQ ID NO: 115475 - DNA, 25 bp, Artificial
  probe
  misc_feature (1)..(25): SEQ ID NO: 6503; WAN024CEN_at; Start 228; Stop 252
catcaatctgatgttggttctagga

SEQ ID NO: 115476 - DNA, 25 bp, Artificial
  probe
  misc_feature (1)..(25): SEQ ID NO: 6503; WAN024CEN_at; Start 178; Stop 202
gatgatatcagacaacatggtttaa

SEQ ID NO: 115477 - DNA, 25 bp, Artificial
  probe
  misc_feature (1)..(25): SEQ ID NO: 6503; WAN024CEN_at; Start 149; Stop 173
tgttctttactgaacctagtttata

SEQ ID NO: 115478 - DNA, 25 bp, Artificial
  probe
  misc_feature (1)..(25): SEQ ID NO: 6503; WAN024CEN_at; Start 213; Stop 237
ggctgtgtactttttcatcaatctg

SEQ ID NO: 115479 - DNA, 25 bp, Artificial
  probe
  misc_feature (1)..(25): SEQ ID NO: 6503; WAN024CEN_at; Start 174; Stop 198
ttttgatgatatcagacaacatggt

SEQ ID NO: 115480 - DNA, 25 bp, Artificial
  probe
  misc_feature (1)..(25): SEQ ID NO: 6504; WAN024CEO_at; Start 88; Stop 112
ggacttttcttgattggttttgtca

SEQ ID NO: 115481 - DNA, 25 bp, Artificial
  probe
  misc_feature (1)..(25): SEQ ID NO: 6504; WAN024CEO_at; Start 170; Stop 194
tttacacggcagatttagctcaaaa

SEQ ID NO: 115482 - DNA, 25 bp, Artificial
  probe
  misc_feature (1)..(25): SEQ ID NO: 6504; WAN024CEO_at; Start 240; Stop 264
tttacttgctttagcatgctgggca

SEQ ID NO: 115483 - DNA, 25 bp, Artificial
  probe
  misc_feature (1)..(25): SEQ ID NO: 6504; WAN024CEO_at; Start 239; Stop 263
ttttacttgctttagcatgctgggc

SEQ ID NO: 115484 - DNA, 25 bp, Artificial
  probe
  misc_feature (1)..(25): SEQ ID NO: 6504; WAN024CEO_at; Start 210; Stop 234
tacgactttctttatcatctttaat

SEQ ID NO: 115485 - DNA, 25 bp, Artificial
  probe
  misc_feature (1)..(25): SEQ ID NO: 6504; WAN024CEO_at; Start 139; Stop 163
ggaatttatcttctctttacagaaa

SEQ ID NO: 115486 - DNA, 25 bp, Artificial
  probe
  misc_feature (1)..(25): SEQ ID NO: 6504; WAN024CEO_at; Start 231; Stop 255
taatttagttttacttgctttagca

SEQ ID NO: 115487 - DNA, 25 bp, Artificial
  probe
  misc_feature (1)..(25): SEQ ID NO: 6504; WAN024CEO_at; Start 254; Stop 278
catgctgggcaggatacaagtggaa

SEQ ID NO: 115488 - DNA, 25 bp, Artificial
  probe
  misc_feature (1)..(25): SEQ ID NO: 6504; WAN024CEO_at; Start 176; Stop 200
cggcagatttagctcaaaatggatt

SEQ ID NO: 115489 - DNA, 25 bp, Artificial
  probe
  misc_feature (1)..(25): SEQ ID NO: 6504; WAN024CEO_at; Start 156; Stop 180
tacagaaactgaactttacacggca

SEQ ID NO: 115490 - DNA, 25 bp, Artificial
  probe
  misc_feature (1)..(25): SEQ ID NO: 6504; WAN024CEO_at; Start 242; Stop 266
tacttgctttagcatgctgggcagg

SEQ ID NO: 115491 - DNA, 25 bp, Artificial
  probe
  misc_feature (1)..(25): SEQ ID NO: 6504; WAN024CEO_at; Start 243; Stop 267
acttgctttagcatgctgggcagga

SEQ ID NO: 115492 - DNA, 25 bp, Artificial
  probe
  misc_feature (1)..(25): SEQ ID NO: 6504; WAN024CEO_at; Start 158; Stop 182
cagaaactgaactttacacggcaga

SEQ ID NO: 115493 - DNA, 25 bp, Artificial
  probe
  misc_feature (1)..(25): SEQ ID NO: 6504; WAN024CEO_at; Start 187; Stop 211
gctcaaaatggattatttggtttta

SEQ ID NO: 115494 - DNA, 25 bp, Artificial
  probe
  misc_feature (1)..(25): SEQ ID NO: 6504; WAN024CEO_at; Start 136; Stop 160
tatggaatttatcttctctttacag

SEQ ID NO: 115495 - DNA, 25 bp, Artificial
  probe
  misc_feature (1)..(25): SEQ ID NO: 6504; WAN024CEO_at; Start 168; Stop 192
actttacacggcagatttagctcaa

SEQ ID NO: 115496 - DNA, 25 bp, Artificial
  probe
  misc_feature (1)..(25): SEQ ID NO: 6504; WAN024CEO_at; Start 174; Stop 198
cacggcagatttagctcaaaatgga

SEQ ID NO: 115497 - DNA, 25 bp, Artificial
  probe
  misc_feature (1)..(25): SEQ ID NO: 6504; WAN024CEO_at; Start 204; Stop 228
tggttttacgactttctttatcatc

SEQ ID NO: 115498 - DNA, 25 bp, Artificial
  probe
  misc_feature (1)..(25): SEQ ID NO: 6504; WAN024CEO_at; Start 160; Stop 184
gaaactgaactttacacggcagatt

SEQ ID NO: 115499 - DNA, 25 bp, Artificial
  probe
  misc_feature (1)..(25): SEQ ID NO: 6504; WAN024CEO_at; Start 247; Stop 271
gctttagcatgctgggcaggataca

SEQ ID NO: 115500 - DNA, 25 bp, Artificial
  probe
  misc_feature (1)..(25): SEQ ID NO: 6504; WAN024CEO_at; Start 167; Stop 191
aactttacacggcagatttagctca

SEQ ID NO: 115501 - DNA, 25 bp, Artificial
  probe
  misc_feature (1)..(25): SEQ ID NO: 6504; WAN024CEO_at; Start 178; Stop 202
gcagatttagctcaaaatggattat

SEQ ID NO: 115502 - DNA, 25 bp, Artificial
  probe
  misc_feature (1)..(25): SEQ ID NO: 6504; WAN024CEO_at; Start 155; Stop 179
ttacagaaactgaactttacacggc

SEQ ID NO: 115503 - DNA, 25 bp, Artificial
  probe
  misc_feature (1)..(25): SEQ ID NO: 6504; WAN024CEO_at; Start 145; Stop 169
tatcttctctttacagaaactgaac

SEQ ID NO: 115504 - DNA, 25 bp, Artificial
  probe
  misc_feature (1)..(25): SEQ ID NO: 6504; WAN024CEO_at; Start 95; Stop 119
tcttgattggttttgtcagtttcct

SEQ ID NO: 115505 - DNA, 25 bp, Artificial
  probe
  misc_feature (1)..(25): SEQ ID NO: 6504; WAN024CEO_at; Start 259; Stop 283
tgggcaggatacaagtggaagaggg

SEQ ID NO: 115506 - DNA, 25 bp, Artificial
  probe
  misc_feature (1)..(25): SEQ ID NO: 6504; WAN024CEO_at; Start 244; Stop 268
cttgctttagcatgctgggcaggat

SEQ ID NO: 115507 - DNA, 25 bp, Artificial
  probe
  misc_feature (1)..(25): SEQ ID NO: 6504; WAN024CEO_at; Start 181; Stop 205
gatttagctcaaaatggattatttg

SEQ ID NO: 115508 - DNA, 25 bp, Artificial
  probe
  misc_feature (1)..(25): SEQ ID NO: 6504; WAN024CEO_at; Start 98; Stop 122
tgattggttttgtcagtttccttat

SEQ ID NO: 115509 - DNA, 25 bp, Artificial
  probe
  misc_feature (1)..(25): SEQ ID NO: 6504; WAN024CEO_at; Start 164; Stop 188
ctgaactttacacggcagatttagc

SEQ ID NO: 115510 - DNA, 25 bp, Artificial
  probe
  misc_feature (1)..(25): SEQ ID NO: 6504; WAN024CEO_at; Start 172; Stop 196
tacacggcagatttagctcaaaatg

SEQ ID NO: 115511 - DNA, 25 bp, Artificial
  probe
  misc_feature (1)..(25): SEQ ID NO: 6504; WAN024CEO_at; Start 163; Stop 187
actgaactttacacggcagatttag

SEQ ID NO: 115512 - DNA, 25 bp, Artificial
  probe
  misc_feature (1)..(25): SEQ ID NO: 6504; WAN024CEO_at; Start 246; Stop 270
tgctttagcatgctgggcaggatac

SEQ ID NO: 115513 - DNA, 25 bp, Artificial
  probe
  misc_feature (1)..(25): SEQ ID NO: 6504; WAN024CEO_at; Start 248; Stop 272
ctttagcatgctgggcaggatacaa

SEQ ID NO: 115514 - DNA, 25 bp, Artificial
  probe
  misc_feature (1)..(25): SEQ ID NO: 1027; WAN024CEP_at; Start 770; Stop 794
taagaaataacttactgactattgg

SEQ ID NO: 115515 - DNA, 25 bp, Artificial
  probe
  misc_feature (1)..(25): SEQ ID NO: 1027; WAN024CEP_at; Start 1424; Stop 1448
cagtttatatatttgacgaacctac

SEQ ID NO: 115516 - DNA, 25 bp, Artificial
  probe
  misc_feature (1)..(25): SEQ ID NO: 1027; WAN024CEP_at; Start 1522; Stop 1546
gtcattactcatgatcaaaatccag

SEQ ID NO: 115517 - DNA, 25 bp, Artificial
  probe
  misc_feature (1)..(25): SEQ ID NO: 1027; WAN024CEP_at; Start 1380; Stop 1404
aaagcaacgaattgatttagctagg

SEQ ID NO: 115518 - DNA, 25 bp, Artificial
  probe
  misc_feature (1)..(25): SEQ ID NO: 1027; WAN024CEP_at; Start 1348; Stop 1372
gctcaatcaaaccaaatcatttcag

SEQ ID NO: 115519 - DNA, 25 bp, Artificial
  probe
  misc_feature (1)..(25): SEQ ID NO: 1027; WAN024CEP_at; Start 1364; Stop 1388
tcatttcagaaggagaaaagcaacg

SEQ ID NO: 115520 - DNA, 25 bp, Artificial
  probe
  misc_feature (1)..(25): SEQ ID NO: 1027; WAN024CEP_at; Start 1203; Stop 1227
taaagatattgcgtttgtgcaaaaa

SEQ ID NO: 115521 - DNA, 25 bp, Artificial
  probe
  misc_feature (1)..(25): SEQ ID NO: 1027; WAN024CEP_at; Start 805; Stop 829
gcaagtattcaattattaaacggtg

SEQ ID NO: 115522 - DNA, 25 bp, Artificial
  probe
  misc_feature (1)..(25): SEQ ID NO: 1027; WAN024CEP_at; Start 1331; Stop 1355
tccttcgtaaaaacctagctcaatc

SEQ ID NO: 115523 - DNA, 25 bp, Artificial
  probe
  misc_feature (1)..(25): SEQ ID NO: 1027; WAN024CEP_at; Start 689; Stop 713
taaaagacttagcttcaactactgg

SEQ ID NO: 115524 - DNA, 25 bp, Artificial
  probe
  misc_feature (1)..(25): SEQ ID NO: 1027; WAN024CEP_at; Start 953; Stop 977
caattgattgtgataacatttcgac

SEQ ID NO: 115525 - DNA, 25 bp, Artificial
  probe
  misc_feature (1)..(25): SEQ ID NO: 1027; WAN024CEP_at; Start 873; Stop 897
cagcagtagcaagtccattattgat

SEQ ID NO: 115526 - DNA, 25 bp, Artificial
  probe
  misc_feature (1)..(25): SEQ ID NO: 1027; WAN024CEP_at; Start 1489; Stop 1513
tacattctatccattaaagatgcaa

SEQ ID NO: 115527 - DNA, 25 bp, Artificial
  probe
  misc_feature (1)..(25): SEQ ID NO: 1027; WAN024CEP_at; Start 435; Stop 459
tatagaatggcgattagcattagtc

SEQ ID NO: 115528 - DNA, 25 bp, Artificial
  probe
  misc_feature (1)..(25): SEQ ID NO: 1027; WAN024CEP_at; Start 271; Stop 295
tatttatcgcgtgaatttaaccaaa

SEQ ID NO: 115529 - DNA, 25 bp, Artificial
  probe
  misc_feature (1)..(25): SEQ ID NO: 1027; WAN024CEP_at; Start 722; Stop 746
taagttttggctctcaactatcctg

SEQ ID NO: 115530 - DNA, 25 bp, Artificial
  probe
  misc_feature (1)..(25): SEQ ID NO: 1027; WAN024CEP_at; Start 648; Stop 672
cagtttagaatttgaagagtccaga

SEQ ID NO: 115531 - DNA, 25 bp, Artificial
  probe
  misc_feature (1)..(25): SEQ ID NO: 1027; WAN024CEP_at; Start 298; Stop 322
gacaaccgtaaccattcagatttct

SEQ ID NO: 115532 - DNA, 25 bp, Artificial
  probe
  misc_feature (1)..(25): SEQ ID NO: 1027; WAN024CEP_at; Start 1039; Stop 1063
tatgaatttaaaaaaggcaagcgct

SEQ ID NO: 115533 - DNA, 25 bp, Artificial
  probe
  misc_feature (1)..(25): SEQ ID NO: 1027; WAN024CEP_at; Start 736; Stop 760
caactatcctgtatggtcgctggta

SEQ ID NO: 115534 - DNA, 25 bp, Artificial
  probe
  misc_feature (1)..(25): SEQ ID NO: 1027; WAN024CEP_at; Start 861; Stop 885
taaaaatttaatcagcagtagcaag

SEQ ID NO: 115535 - DNA, 25 bp, Artificial
  probe
  misc_feature (1)..(25): SEQ ID NO: 1027; WAN024CEP_at; Start 1187; Stop 1211
cctcagaggagttatataaagatat

SEQ ID NO: 115536 - DNA, 25 bp, Artificial
  probe
  misc_feature (1)..(25): SEQ ID NO: 1027; WAN024CEP_at; Start 60; Stop 84
gacaagtgctcttttaatgacattc

SEQ ID NO: 115537 - DNA, 25 bp, Artificial
  probe
  misc_feature (1)..(25): SEQ ID NO: 1027; WAN024CEP_at; Start 496; Stop 520
caaattcctggaaagttaatgacta

SEQ ID NO: 115538 - DNA, 25 bp, Artificial
  probe
  misc_feature (1)..(25): SEQ ID NO: 1027; WAN024CEP_at; Start 1144; Stop 1168
gatggagaaataaaaatcaacggaa

SEQ ID NO: 115539 - DNA, 25 bp, Artificial
  probe
  misc_feature (1)..(25): SEQ ID NO: 1027; WAN024CEP_at; Start 378; Stop 402
aatctctctaattgcaaatttaggg

SEQ ID NO: 115540 - DNA, 25 bp, Artificial
  probe
  misc_feature (1)..(25): SEQ ID NO: 1027; WAN024CEP_at; Start 1451; Stop 1475
gtaaccttgatccaataaaagcaaa

SEQ ID NO: 115541 - DNA, 25 bp, Artificial
  probe
  misc_feature (1)..(25): SEQ ID NO: 1027; WAN024CEP_at; Start 1543; Stop 1567
ccagaaatattggaagagtttgatc

SEQ ID NO: 115542 - DNA, 25 bp, Artificial
  probe
  misc_feature (1)..(25): SEQ ID NO: 1027; WAN024CEP_at; Start 1258; Stop 1282
gagaatatcaaattggctagaaacc

SEQ ID NO: 115543 - DNA, 25 bp, Artificial
  probe
  misc_feature (1)..(25): SEQ ID NO: 1027; WAN024CEP_at; Start 1272; Stop 1296
ggctagaaaccttcatttaactgaa

SEQ ID NO: 115544 - DNA, 25 bp, Artificial
  probe
  misc_feature (1)..(25): SEQ ID NO: 1027; WAN024CEP_at; Start 605; Stop 629
tattaaatattcaaagctggaccca

SEQ ID NO: 115545 - DNA, 25 bp, Artificial
  probe
  misc_feature (1)..(25): SEQ ID NO: 1027; WAN024CEP_at; Start 749; Stop 773
tggtcgctggtatcttttttgtaag

SEQ ID NO: 115546 - DNA, 25 bp, Artificial
  probe
  misc_feature (1)..(25): SEQ ID NO: 1027; WAN024CEP_at; Start 1436; Stop 1460
ttgacgaacctacaagtaaccttga

SEQ ID NO: 115547 - DNA, 25 bp, Artificial
  probe
  misc_feature (1)..(25): SEQ ID NO: 1027; WAN024CEP_at; Start 619; Stop 643
agctggacccaagaaaaaattcagg

SEQ ID NO: 115548 - DNA, 25 bp, Artificial
  probe
  misc_feature (1)..(25): SEQ ID NO: 5290; WAN024CEQ_at; Start 175; Stop 199
tgcgttcaatacctttatagtcaaa

SEQ ID NO: 115549 - DNA, 25 bp, Artificial
  probe
  misc_feature (1)..(25): SEQ ID NO: 5290; WAN024CEQ_at; Start 46; Stop 70
catctgcaacccatttgtaggcttc

SEQ ID NO: 115550 - DNA, 25 bp, Artificial
  probe
  misc_feature (1)..(25): SEQ ID NO: 5290; WAN024CEQ_at; Start 210; Stop 234
gcagcatccacacggtgagcgaaga

SEQ ID NO: 115551 - DNA, 25 bp, Artificial
  probe
  misc_feature (1)..(25): SEQ ID NO: 5290; WAN024CEQ_at; Start 196; Stop 220
caaagcgttcgattgcagcatccac

SEQ ID NO: 115552 - DNA, 25 bp, Artificial
  probe
  misc_feature (1)..(25): SEQ ID NO: 5290; WAN024CEQ_at; Start 190; Stop 214
tatagtcaaagcgttcgattgcagc

SEQ ID NO: 115553 - DNA, 25 bp, Artificial
  probe
  misc_feature (1)..(25): SEQ ID NO: 5290; WAN024CEQ_at; Start 128; Stop 152
tggaagggcacgagatagagcccac

SEQ ID NO: 115554 - DNA, 25 bp, Artificial
  probe
  misc_feature (1)..(25): SEQ ID NO: 5290; WAN024CEQ_at; Start 95; Stop 119
aaaggcaccaccaaaagcaagggca

SEQ ID NO: 115555 - DNA, 25 bp, Artificial
  probe
  misc_feature (1)..(25): SEQ ID NO: 5290; WAN024CEQ_at; Start 8; Stop 32
tccaagacctggaagcatacgtcct

SEQ ID NO: 115556 - DNA, 25 bp, Artificial
  probe
  misc_feature (1)..(25): SEQ ID NO: 5290; WAN024CEQ_at; Start 92; Stop 116
tacaaaggcaccaccaaaagcaagg

SEQ ID NO: 115557 - DNA, 25 bp, Artificial
  probe
  misc_feature (1)..(25): SEQ ID NO: 5290; WAN024CEQ_at; Start 108; Stop 132
aaagcaagggcaaagaagactggaa

SEQ ID NO: 115558 - DNA, 25 bp, Artificial
  probe
  misc_feature (1)..(25): SEQ ID NO: 5290; WAN024CEQ_at; Start 214; Stop 238
catccacacggtgagcgaagaaggt

SEQ ID NO: 115559 - DNA, 25 bp, Artificial
  probe
  misc_feature (1)..(25): SEQ ID NO: 5290; WAN024CEQ_at; Start 159; Stop 183
gcaccaagcaagtagttgcgttcaa

SEQ ID NO: 115560 - DNA, 25 bp, Artificial
  probe
  misc_feature (1)..(25): SEQ ID NO: 5290; WAN024CEQ_at; Start 206; Stop 230
gattgcagcatccacacggtgagcg

SEQ ID NO: 115561 - DNA, 25 bp, Artificial
  probe
  misc_feature (1)..(25): SEQ ID NO: 5290; WAN024CEQ_at; Start 216; Stop 240
tccacacggtgagcgaagaaggtag

SEQ ID NO: 115562 - DNA, 25 bp, Artificial
  probe
  misc_feature (1)..(25): SEQ ID NO: 5290; WAN024CEQ_at; Start 163; Stop 187
caagcaagtagttgcgttcaatacc

SEQ ID NO: 115563 - DNA, 25 bp, Artificial
  probe
  misc_feature (1)..(25): SEQ ID NO: 5290; WAN024CEQ_at; Start 118; Stop 142
caaagaagactggaagggcacgaga

SEQ ID NO: 115564 - DNA, 25 bp, Artificial
  probe
  misc_feature (1)..(25): SEQ ID NO: 5290; WAN024CEQ_at; Start 74; Stop 98
gaagtctactactgattgtacaaag

SEQ ID NO: 115565 - DNA, 25 bp, Artificial
  probe
  misc_feature (1)..(25): SEQ ID NO: 5290; WAN024CEQ_at; Start 83; Stop 107
tactgattgtacaaaggcaccacca

SEQ ID NO: 115566 - DNA, 25 bp, Artificial
  probe
  misc_feature (1)..(25): SEQ ID NO: 5290; WAN024CEQ_at; Start 150; Stop 174
cacggaatcgcaccaagcaagtagt

SEQ ID NO: 115567 - DNA, 25 bp, Artificial
  probe
  misc_feature (1)..(25): SEQ ID NO: 5290; WAN024CEQ_at; Start 204; Stop 228
tcgattgcagcatccacacggtgag

SEQ ID NO: 115568 - DNA, 25 bp, Artificial
  probe
  misc_feature (1)..(25): SEQ ID NO: 5290; WAN024CEQ_at; Start 140; Stop 164
agatagagcccacggaatcgcacca

SEQ ID NO: 115569 - DNA, 25 bp, Artificial
  probe
  misc_feature (1)..(25): SEQ ID NO: 5290; WAN024CEQ_at; Start 154; Stop 178
gaatcgcaccaagcaagtagttgcg

SEQ ID NO: 115570 - DNA, 25 bp, Artificial
  probe
  misc_feature (1)..(25): SEQ ID NO: 5290; WAN024CEQ_at; Start 134; Stop 158
ggcacgagatagagcccacggaatc

SEQ ID NO: 115571 - DNA, 25 bp, Artificial
  probe
  misc_feature (1)..(25): SEQ ID NO: 5290; WAN024CEQ_at; Start 98; Stop 122
ggcaccaccaaaagcaagggcaaag

SEQ ID NO: 115572 - DNA, 25 bp, Artificial
  probe
  misc_feature (1)..(25): SEQ ID NO: 5290; WAN024CEQ_at; Start 57; Stop 81
catttgtaggcttcaacgaagtcta

SEQ ID NO: 115573 - DNA, 25 bp, Artificial
  probe
  misc_feature (1)..(25): SEQ ID NO: 5290; WAN024CEQ_at; Start 167; Stop 191
caagtagttgcgttcaataccttta

SEQ ID NO: 115574 - DNA, 25 bp, Artificial
  probe
  misc_feature (1)..(25): SEQ ID NO: 5290; WAN024CEQ_at; Start 65; Stop 89
ggcttcaacgaagtctactactgat

SEQ ID NO: 115575 - DNA, 25 bp, Artificial
  probe
  misc_feature (1)..(25): SEQ ID NO: 5290; WAN024CEQ_at; Start 10; Stop 34
caagacctggaagcatacgtcctgc

SEQ ID NO: 115576 - DNA, 25 bp, Artificial
  probe
  misc_feature (1)..(25): SEQ ID NO: 5290; WAN024CEQ_at; Start 1; Stop 25
ttgcaaatccaagacctggaagcat

SEQ ID NO: 115577 - DNA, 25 bp, Artificial
  probe
  misc_feature (1)..(25): SEQ ID NO: 5290; WAN024CEQ_at; Start 103; Stop 127
caccaaaagcaagggcaaagaagac

SEQ ID NO: 115578 - DNA, 25 bp, Artificial
  probe
  misc_feature (1)..(25): SEQ ID NO: 5290; WAN024CEQ_at; Start 52; Stop 76
caacccatttgtaggcttcaacgaa

SEQ ID NO: 115579 - DNA, 25 bp, Artificial
  probe
  misc_feature (1)..(25): SEQ ID NO: 5290; WAN024CEQ_at; Start 80; Stop 104
tactactgattgtacaaaggcacca

SEQ ID NO: 115580 - DNA, 25 bp, Artificial
  probe
  misc_feature (1)..(25): SEQ ID NO: 5290; WAN024CEQ_at; Start 37; Stop 61
gtgtcaagccatctgcaacccattt

SEQ ID NO: 115581 - DNA, 25 bp, Artificial
  probe
  misc_feature (1)..(25): SEQ ID NO: 5290; WAN024CEQ_at; Start 42; Stop 66
aagccatctgcaacccatttgtagg

SEQ ID NO: 115582 - DNA, 25 bp, Artificial
  probe
  misc_feature (1)..(25): SEQ ID NO: 2403; WAN024CER_at; Start 134; Stop 158
taagtaaaccagtagtcacatctcc

SEQ ID NO: 115583 - DNA, 25 bp, Artificial
  probe
  misc_feature (1)..(25): SEQ ID NO: 2403; WAN024CER_at; Start 69; Stop 93
gtcgatacgagaagcaccaccgaag

SEQ ID NO: 115584 - DNA, 25 bp, Artificial
  probe
  misc_feature (1)..(25): SEQ ID NO: 2403; WAN024CER_at; Start 118; Stop 142
tgcaagttaccaccgataagtaaac

SEQ ID NO: 115585 - DNA, 25 bp, Artificial
  probe
  misc_feature (1)..(25): SEQ ID NO: 2403; WAN024CER_at; Start 62; Stop 86
aagttgcgtcgatacgagaagcacc

SEQ ID NO: 115586 - DNA, 25 bp, Artificial
  probe
  misc_feature (1)..(25): SEQ ID NO: 2403; WAN024CER_at; Start 59; Stop 83
cagaagttgcgtcgatacgagaagc

SEQ ID NO: 115587 - DNA, 25 bp, Artificial
  probe
  misc_feature (1)..(25): SEQ ID NO: 2403; WAN024CER_at; Start 41; Stop 65
ctgtcgcaagaaccgcaccagaagt

SEQ ID NO: 115588 - DNA, 25 bp, Artificial
  probe
  misc_feature (1)..(25): SEQ ID NO: 2403; WAN024CER_at; Start 149; Stop 173
tcacatctcccatgattaaaccagt

SEQ ID NO: 115589 - DNA, 25 bp, Artificial
  probe
  misc_feature (1)..(25): SEQ ID NO: 2403; WAN024CER_at; Start 13; Stop 37
gcatcaattccttgtgaaacagaga

SEQ ID NO: 115590 - DNA, 25 bp, Artificial
  probe
  misc_feature (1)..(25): SEQ ID NO: 2403; WAN024CER_at; Start 138; Stop 162
taaaccagtagtcacatctcccatg

SEQ ID NO: 115591 - DNA, 25 bp, Artificial
  probe
  misc_feature (1)..(25): SEQ ID NO: 2403; WAN024CER_at; Start 114; Stop 138
cagttgcaagttaccaccgataagt

SEQ ID NO: 115592 - DNA, 25 bp, Artificial
  probe
  misc_feature (1)..(25): SEQ ID NO: 2403; WAN024CER_at; Start 99; Stop 123
aaccccaagaacgaacagttgcaag

SEQ ID NO: 115593 - DNA, 25 bp, Artificial
  probe
  misc_feature (1)..(25): SEQ ID NO: 2403; WAN024CER_at; Start 142; Stop 166
ccagtagtcacatctcccatgatta

SEQ ID NO: 115594 - DNA, 25 bp, Artificial
  probe
  misc_feature (1)..(25): SEQ ID NO: 2403; WAN024CER_at; Start 127; Stop 151
ccaccgataagtaaaccagtagtca

SEQ ID NO: 115595 - DNA, 25 bp, Artificial
  probe
  misc_feature (1)..(25): SEQ ID NO: 2403; WAN024CER_at; Start 30; Stop 54
aacagagaaggctgtcgcaagaacc

SEQ ID NO: 115596 - DNA, 25 bp, Artificial
  probe
  misc_feature (1)..(25): SEQ ID NO: 2403; WAN024CER_at; Start 65; Stop 89
ttgcgtcgatacgagaagcaccacc

SEQ ID NO: 115597 - DNA, 25 bp, Artificial
  probe
  misc_feature (1)..(25): SEQ ID NO: 2403; WAN024CER_at; Start 55; Stop 79
gcaccagaagttgcgtcgatacgag

SEQ ID NO: 115598 - DNA, 25 bp, Artificial
  probe
  misc_feature (1)..(25): SEQ ID NO: 2403; WAN024CER_at; Start 46; Stop 70
gcaagaaccgcaccagaagttgcgt

SEQ ID NO: 115599 - DNA, 25 bp, Artificial
  probe
  misc_feature (1)..(25): SEQ ID NO: 2403; WAN024CER_at; Start 76; Stop 100
cgagaagcaccaccgaaggtaccaa

SEQ ID NO: 115600 - DNA, 25 bp, Artificial
  probe
  misc_feature (1)..(25): SEQ ID NO: 2403; WAN024CER_at; Start 50; Stop 74
gaaccgcaccagaagttgcgtcgat

SEQ ID NO: 115601 - DNA, 25 bp, Artificial
  probe
  misc_feature (1)..(25): SEQ ID NO: 2403; WAN024CER_at; Start 33; Stop 57
agagaaggctgtcgcaagaaccgca

SEQ ID NO: 115602 - DNA, 25 bp, Artificial
  probe
  misc_feature (1)..(25): SEQ ID NO: 2403; WAN024CER_at; Start 199; Stop 223
cctgcagatgaaacgatcgtcaact

SEQ ID NO: 115603 - DNA, 25 bp, Artificial
  probe
  misc_feature (1)..(25): SEQ ID NO: 2403; WAN024CER_at; Start 213; Stop 237
gatcgtcaactcatcacagatttga

SEQ ID NO: 115604 - DNA, 25 bp, Artificial
  probe
  misc_feature (1)..(25): SEQ ID NO: 2403; WAN024CER_at; Start 162; Stop 186
gattaaaccagtaatgaaaccagca

SEQ ID NO: 115605 - DNA, 25 bp, Artificial
  probe
  misc_feature (1)..(25): SEQ ID NO: 2403; WAN024CER_at; Start 194; Stop 218
gggaacctgcagatgaaacgatcgt

SEQ ID NO: 115606 - DNA, 25 bp, Artificial
  probe
  misc_feature (1)..(25): SEQ ID NO: 2403; WAN024CER_at; Start 21; Stop 45
tccttgtgaaacagagaaggctgtc

SEQ ID NO: 115607 - DNA, 25 bp, Artificial
  probe
  misc_feature (1)..(25): SEQ ID NO: 2403; WAN024CER_at; Start 107; Stop 131
gaacgaacagttgcaagttaccacc

SEQ ID NO: 115608 - DNA, 25 bp, Artificial
  probe
  misc_feature (1)..(25): SEQ ID NO: 2403; WAN024CER_at; Start 24; Stop 48
ttgtgaaacagagaaggctgtcgca

SEQ ID NO: 115609 - DNA, 25 bp, Artificial
  probe
  misc_feature (1)..(25): SEQ ID NO: 2403; WAN024CER_at; Start 208; Stop 232
gaaacgatcgtcaactcatcacaga

SEQ ID NO: 115610 - DNA, 25 bp, Artificial
  probe
  misc_feature (1)..(25): SEQ ID NO: 2403; WAN024CER_at; Start 1; Stop 25
atggcaagcggtgcatcaattcctt

SEQ ID NO: 115611 - DNA, 25 bp, Artificial
  probe
  misc_feature (1)..(25): SEQ ID NO: 2403; WAN024CER_at; Start 111; Stop 135
gaacagttgcaagttaccaccgata

SEQ ID NO: 115612 - DNA, 25 bp, Artificial
  probe
  misc_feature (1)..(25): SEQ ID NO: 2403; WAN024CER_at; Start 179; Stop 203
aaccagcaaatacaggggaacctgc

SEQ ID NO: 115613 - DNA, 25 bp, Artificial
  probe
  misc_feature (1)..(25): SEQ ID NO: 2403; WAN024CER_at; Start 72; Stop 96
gatacgagaagcaccaccgaaggta

SEQ ID NO: 115614 - DNA, 25 bp, Artificial
  probe
  misc_feature (1)..(25): SEQ ID NO: 2403; WAN024CER_at; Start 171; Stop 195
agtaatgaaaccagcaaatacaggg

SEQ ID NO: 115615 - DNA, 25 bp, Artificial
  probe
  misc_feature (1)..(25): SEQ ID NO: 2403; WAN024CER_at; Start 6; Stop 30
aagcggtgcatcaattccttgtgaa

SEQ ID NO: 115616 - DNA, 25 bp, Artificial
  probe
  misc_feature (1)..(25): SEQ ID NO: 5646; WAN024CES_at; Start 318; Stop 342
caaagattgtatccccaagaggagc

SEQ ID NO: 115617 - DNA, 25 bp, Artificial
  probe
  misc_feature (1)..(25): SEQ ID NO: 5646; WAN024CES_at; Start 134; Stop 158
gctgtcaaggtactttgcatgttgt

SEQ ID NO: 115618 - DNA, 25 bp, Artificial
  probe
  misc_feature (1)..(25): SEQ ID NO: 5646; WAN024CES_at; Start 53; Stop 77
taagaaatttcaaagttaatcactg

SEQ ID NO: 115619 - DNA, 25 bp, Artificial
  probe
  misc_feature (1)..(25): SEQ ID NO: 5646; WAN024CES_at; Start 253; Stop 277
ccaaggttggccagcgatagccata

SEQ ID NO: 115620 - DNA, 25 bp, Artificial
  probe
  misc_feature (1)..(25): SEQ ID NO: 5646; WAN024CES_at; Start 198; Stop 222
gtttccaacggaagatgtcatacgc

SEQ ID NO: 115621 - DNA, 25 bp, Artificial
  probe
  misc_feature (1)..(25): SEQ ID NO: 5646; WAN024CES_at; Start 229; Stop 253
aactgcaatccaaaggaagatcccc

SEQ ID NO: 115622 - DNA, 25 bp, Artificial
  probe
  misc_feature (1)..(25): SEQ ID NO: 5646; WAN024CES_at; Start 268; Stop 292
gatagccatagttgctgcgactgac

SEQ ID NO: 115623 - DNA, 25 bp, Artificial
  probe
  misc_feature (1)..(25): SEQ ID NO: 5646; WAN024CES_at; Start 428; Stop 452
ccagcgataatggtatggaagaatg

SEQ ID NO: 115624 - DNA, 25 bp, Artificial
  probe
  misc_feature (1)..(25): SEQ ID NO: 5646; WAN024CES_at; Start 87; Stop 111
gagcacccatcatgaagacaccaag

SEQ ID NO: 115625 - DNA, 25 bp, Artificial
  probe
  misc_feature (1)..(25): SEQ ID NO: 5646; WAN024CES_at; Start 24; Stop 48
caatcatcttttcaccgattggcaa

SEQ ID NO: 115626 - DNA, 25 bp, Artificial
  probe
  misc_feature (1)..(25): SEQ ID NO: 5646; WAN024CES_at; Start 309; Stop 333
caagtgaaccaaagattgtatcccc

SEQ ID NO: 115627 - DNA, 25 bp, Artificial
  probe
  misc_feature (1)..(25): SEQ ID NO: 5646; WAN024CES_at; Start 36; Stop 60
caccgattggcaacttgtaagaaat

SEQ ID NO: 115628 - DNA, 25 bp, Artificial
  probe
  misc_feature (1)..(25): SEQ ID NO: 5646; WAN024CES_at; Start 69; Stop 93
taatcactgttgctacaagagcacc

SEQ ID NO: 115629 - DNA, 25 bp, Artificial
  probe
  misc_feature (1)..(25): SEQ ID NO: 5646; WAN024CES_at; Start 409; Stop 433
ttccatggcaaggtcaaaaccagcg

SEQ ID NO: 115630 - DNA, 25 bp, Artificial
  probe
  misc_feature (1)..(25): SEQ ID NO: 5646; WAN024CES_at; Start 7; Stop 31
caagatgtcttggaaatcaatcatc

SEQ ID NO: 115631 - DNA, 25 bp, Artificial
  probe
  misc_feature (1)..(25): SEQ ID NO: 5646; WAN024CES_at; Start 354; Stop 378
tcaaacctgtcttgataccgttaac

SEQ ID NO: 115632 - DNA, 25 bp, Artificial
  probe
  misc_feature (1)..(25): SEQ ID NO: 5646; WAN024CES_at; Start 416; Stop 440
gcaaggtcaaaaccagcgataatgg

SEQ ID NO: 115633 - DNA, 25 bp, Artificial
  probe
  misc_feature (1)..(25): SEQ ID NO: 5646; WAN024CES_at; Start 100; Stop 124
gaagacaccaagtacagatgcagcg

SEQ ID NO: 115634 - DNA, 25 bp, Artificial
  probe
  misc_feature (1)..(25): SEQ ID NO: 5646; WAN024CES_at; Start 122; Stop 146
gcgtcaatcaaagctgtcaaggtac

SEQ ID NO: 115635 - DNA, 25 bp, Artificial
  probe
  misc_feature (1)..(25): SEQ ID NO: 5646; WAN024CES_at; Start 150; Stop 174
gcatgttgttgataaggttaacccc

SEQ ID NO: 115636 - DNA, 25 bp, Artificial
  probe
  misc_feature (1)..(25): SEQ ID NO: 5646; WAN024CES_at; Start 211; Stop 235
gatgtcatacgctactgcaactgca

SEQ ID NO: 115637 - DNA, 25 bp, Artificial
  probe
  misc_feature (1)..(25): SEQ ID NO: 5646; WAN024CES_at; Start 286; Stop 310
gactgaccccatgatagcaggtaca

SEQ ID NO: 115638 - DNA, 25 bp, Artificial
  probe
  misc_feature (1)..(25): SEQ ID NO: 5646; WAN024CES_at; Start 80; Stop 104
gctacaagagcacccatcatgaaga

SEQ ID NO: 115639 - DNA, 25 bp, Artificial
  probe
  misc_feature (1)..(25): SEQ ID NO: 5646; WAN024CES_at; Start 327; Stop 351
tatccccaagaggagcgaatggtcc

SEQ ID NO: 115640 - DNA, 25 bp, Artificial
  probe
  misc_feature (1)..(25): SEQ ID NO: 5646; WAN024CES_at; Start 278; Stop 302
gttgctgcgactgaccccatgatag

SEQ ID NO: 115641 - DNA, 25 bp, Artificial
  probe
  misc_feature (1)..(25): SEQ ID NO: 5646; WAN024CES_at; Start 396; Stop 420
caccatctttttcttccatggcaag

SEQ ID NO: 115642 - DNA, 25 bp, Artificial
  probe
  misc_feature (1)..(25): SEQ ID NO: 5646; WAN024CES_at; Start 223; Stop 247
tactgcaactgcaatccaaaggaag

SEQ ID NO: 115643 - DNA, 25 bp, Artificial
  probe
  misc_feature (1)..(25): SEQ ID NO: 5646; WAN024CES_at; Start 380; Stop 404
gcgtcttttgaacctacaccatctt

SEQ ID NO: 115644 - DNA, 25 bp, Artificial
  probe
  misc_feature (1)..(25): SEQ ID NO: 5646; WAN024CES_at; Start 185; Stop 209
gcaaattccaactgtttccaacgga

SEQ ID NO: 115645 - DNA, 25 bp, Artificial
  probe
  misc_feature (1)..(25): SEQ ID NO: 5646; WAN024CES_at; Start 173; Stop 197
ccttctttgtaagcaaattccaact

SEQ ID NO: 115646 - DNA, 25 bp, Artificial
  probe
  misc_feature (1)..(25): SEQ ID NO: 5646; WAN024CES_at; Start 295; Stop 319
catgatagcaggtacaagtgaacca

SEQ ID NO: 115647 - DNA, 25 bp, Artificial
  probe
  misc_feature (1)..(25): SEQ ID NO: 5646; WAN024CES_at; Start 343; Stop 367
gaatggtcccatcaaacctgtcttg

SEQ ID NO: 115648 - DNA, 25 bp, Artificial
  probe
  misc_feature (1)..(25): SEQ ID NO: 5646; WAN024CES_at; Start 333; Stop 357
caagaggagcgaatggtcccatcaa

SEQ ID NO: 115649 - DNA, 25 bp, Artificial
  probe
  misc_feature (1)..(25): SEQ ID NO: 5646; WAN024CES_at; Start 108; Stop 132
caagtacagatgcagcgtcaatcaa

SEQ ID NO: 115650 - DNA, 25 bp, Artificial
  probe
  misc_feature (1)..(25): SEQ ID NO: 4182; WAN024CET_at; Start 405; Stop 429
tatggctatcgctggccaaccttgg

SEQ ID NO: 115651 - DNA, 25 bp, Artificial
  probe
  misc_feature (1)..(25): SEQ ID NO: 4182; WAN024CET_at; Start 365; Stop 389
gttcacttgtacctgctatcatggg

SEQ ID NO: 115652 - DNA, 25 bp, Artificial
  probe
  misc_feature (1)..(25): SEQ ID NO: 4182; WAN024CET_at; Start 261; Stop 285
ccttgccatggaagaaaaagatggt

SEQ ID NO: 115653 - DNA, 25 bp, Artificial
  probe
  misc_feature (1)..(25): SEQ ID NO: 4182; WAN024CET_at; Start 447; Stop 471
tgcagttgcagtagcgtatgacatc

SEQ ID NO: 115654 - DNA, 25 bp, Artificial
  probe
  misc_feature (1)..(25): SEQ ID NO: 4182; WAN024CET_at; Start 388; Stop 412
gggtcagtcgcagcaactatggcta

SEQ ID NO: 115655 - DNA, 25 bp, Artificial
  probe
  misc_feature (1)..(25): SEQ ID NO: 4182; WAN024CET_at; Start 552; Stop 576
gattgacgctgcatctgtacttggt

SEQ ID NO: 115656 - DNA, 25 bp, Artificial
  probe
  misc_feature (1)..(25): SEQ ID NO: 4182; WAN024CET_at; Start 278; Stop 302
aagatggtgtaggttcaaaagacgc

SEQ ID NO: 115657 - DNA, 25 bp, Artificial
  probe
  misc_feature (1)..(25): SEQ ID NO: 4182; WAN024CET_at; Start 537; Stop 561
taccttgacagctttgattgacgct

SEQ ID NO: 115658 - DNA, 25 bp, Artificial
  probe
  misc_feature (1)..(25): SEQ ID NO: 4182; WAN024CET_at; Start 172; Stop 196
ggaactcctgaattgaaagaaatga

SEQ ID NO: 115659 - DNA, 25 bp, Artificial
  probe
  misc_feature (1)..(25): SEQ ID NO: 4182; WAN024CET_at; Start 715; Stop 739
gcctttatcttctggttgcttggta

SEQ ID NO: 115660 - DNA, 25 bp, Artificial
  probe
  misc_feature (1)..(25): SEQ ID NO: 4182; WAN024CET_at; Start 646; Stop 670
gaaaagatgattgatttccaagaca

SEQ ID NO: 115661 - DNA, 25 bp, Artificial
  probe
  misc_feature (1)..(25): SEQ ID NO: 4182; WAN024CET_at; Start 802; Stop 826
gcccttggtcactttgcacttggaa

SEQ ID NO: 115662 - DNA, 25 bp, Artificial
  probe
  misc_feature (1)..(25): SEQ ID NO: 4182; WAN024CET_at; Start 628; Stop 652
tacaagttgccaatcggtgaaaaga

SEQ ID NO: 115663 - DNA, 25 bp, Artificial
  probe
  misc_feature (1)..(25): SEQ ID NO: 4182; WAN024CET_at; Start 786; Stop 810
tgctttggctctttctgcccttggt

SEQ ID NO: 115664 - DNA, 25 bp, Artificial
  probe
  misc_feature (1)..(25): SEQ ID NO: 4182; WAN024CET_at; Start 460; Stop 484
gcgtatgacatcttccgttggaaac

SEQ ID NO: 115665 - DNA, 25 bp, Artificial
  probe
  misc_feature (1)..(25): SEQ ID NO: 4182; WAN024CET_at; Start 666; Stop 690
agacatcttgaaccaaatcttccca

SEQ ID NO: 115666 - DNA, 25 bp, Artificial
  probe
  misc_feature (1)..(25): SEQ ID NO: 4182; WAN024CET_at; Start 145; Stop 169
cctcagttgcgtaaaatgtatggtg

SEQ ID NO: 115667 - DNA, 25 bp, Artificial
  probe
  misc_feature (1)..(25): SEQ ID NO: 4182; WAN024CET_at; Start 681; Stop 705
aatcttcccacgtttgcttccagca

SEQ ID NO: 115668 - DNA, 25 bp, Artificial
  probe
  misc_feature (1)..(25): SEQ ID NO: 4182; WAN024CET_at; Start 509; Stop 533
gggttaaccttatcaacaacatgca

SEQ ID NO: 115669 - DNA, 25 bp, Artificial
  probe
  misc_feature (1)..(25): SEQ ID NO: 4182; WAN024CET_at; Start 158; Stop 182
aaatgtatggtgatggaactcctga

SEQ ID NO: 115670 - DNA, 25 bp, Artificial
  probe
  misc_feature (1)..(25): SEQ ID NO: 4182; WAN024CET_at; Start 522; Stop 546
caacaacatgcaaagtaccttgaca

SEQ ID NO: 115671 - DNA, 25 bp, Artificial
  probe
  misc_feature (1)..(25): SEQ ID NO: 4182; WAN024CET_at; Start 91; Stop 115
ttaggttggaactacgaacgtatgc

SEQ ID NO: 115672 - DNA, 25 bp, Artificial
  probe
  misc_feature (1)..(25): SEQ ID NO: 4182; WAN024CET_at; Start 230; Stop 254
cattcttccataccattatcgctgg

SEQ ID NO: 115673 - DNA, 25 bp, Artificial
  probe
  misc_feature (1)..(25): SEQ ID NO: 4182; WAN024CET_at; Start 106; Stop 130
gaacgtatgcaagcttctggttacc

SEQ ID NO: 115674 - DNA, 25 bp, Artificial
  probe
  misc_feature (1)..(25): SEQ ID NO: 4182; WAN024CET_at; Start 432; Stop 456
gatcttcctttggattgcagttgca

SEQ ID NO: 115675 - DNA, 25 bp, Artificial
  probe
  misc_feature (1)..(25): SEQ ID NO: 4182; WAN024CET_at; Start 246; Stop 270
tatcgctggttttgaccttgccatg

SEQ ID NO: 115676 - DNA, 25 bp, Artificial
  probe
  misc_feature (1)..(25): SEQ ID NO: 4182; WAN024CET_at; Start 695; Stop 719
tgcttccagcaatctttactgcctt

SEQ ID NO: 115677 - DNA, 25 bp, Artificial
  probe
  misc_feature (1)..(25): SEQ ID NO: 4182; WAN024CET_at; Start 569; Stop 593
tacttggtgtcttcatgatgggtgc

SEQ ID NO: 115678 - DNA, 25 bp, Artificial
  probe
  misc_feature (1)..(25): SEQ ID NO: 4182; WAN024CET_at; Start 591; Stop 615
tgctcttgtagcaacagtgattaac

SEQ ID NO: 115679 - DNA, 25 bp, Artificial
  probe
  misc_feature (1)..(25): SEQ ID NO: 4182; WAN024CET_at; Start 327; Stop 351
gatgggaccattcgctcctcttggg

SEQ ID NO: 115680 - DNA, 25 bp, Artificial
  probe
  misc_feature (1)..(25): SEQ ID NO: 4182; WAN024CET_at; Start 747; Stop 771
tatgaactctactaaagctatcggt

SEQ ID NO: 115681 - DNA, 25 bp, Artificial
  probe
  misc_feature (1)..(25): SEQ ID NO: 4182; WAN024CET_at; Start 314; Stop 338
tcaagacaggtttgatgggaccatt

SEQ ID NO: 115682 - DNA, 25 bp, Artificial
  probe
  misc_feature (1)..(25): SEQ ID NO: 4182; WAN024CET_at; Start 474; Stop 498
ccgttggaaacagttggaatttgct

SEQ ID NO: 115683 - DNA, 25 bp, Artificial
  probe
  misc_feature (1)..(25): SEQ ID NO: 4182; WAN024CET_at; Start 771; Stop 795
tattattatcgtacttgctttggct

SEQ ID NO: 115684 - DNA, 25 bp, Artificial
  probe
  misc_feature (1)..(25): SEQ ID NO: 1685; WAN024CEU_at; Start 432; Stop 456
gattccgtgggctctatctcgtgcc

SEQ ID NO: 115685 - DNA, 25 bp, Artificial
  probe
  misc_feature (1)..(25): SEQ ID NO: 1685; WAN024CEU_at; Start 630; Stop 654
ccttgctatgggatttggtttgaca

SEQ ID NO: 115686 - DNA, 25 bp, Artificial
  probe
  misc_feature (1)..(25): SEQ ID NO: 1685; WAN024CEU_at; Start 150; Stop 174
tatcggtggtaacttgcaactgttc

SEQ ID NO: 115687 - DNA, 25 bp, Artificial
  probe
  misc_feature (1)..(25): SEQ ID NO: 1685; WAN024CEU_at; Start 700; Stop 724
gctgttgctggtatcgtaggtactc

SEQ ID NO: 115688 - DNA, 25 bp, Artificial
  probe
  misc_feature (1)..(25): SEQ ID NO: 1685; WAN024CEU_at; Start 528; Stop 552
caaatgggttgcagatggcttgaca

SEQ ID NO: 115689 - DNA, 25 bp, Artificial
  probe
  misc_feature (1)..(25): SEQ ID NO: 1685; WAN024CEU_at; Start 276; Stop 300
gcttgccattactacaatcgctgta

SEQ ID NO: 115690 - DNA, 25 bp, Artificial
  probe
  misc_feature (1)..(25): SEQ ID NO: 1685; WAN024CEU_at; Start 489; Stop 513
tgcctttgtacaatcagtagtagac

SEQ ID NO: 115691 - DNA, 25 bp, Artificial
  probe
  misc_feature (1)..(25): SEQ ID NO: 1685; WAN024CEU_at; Start 586; Stop 610
gcaatcttgcttcgttaccttccag

SEQ ID NO: 115692 - DNA, 25 bp, Artificial
  probe
  misc_feature (1)..(25): SEQ ID NO: 1685; WAN024CEU_at; Start 372; Stop 396
ggatgctgcaatcgaacgctttgac

SEQ ID NO: 115693 - DNA, 25 bp, Artificial
  probe
  misc_feature (1)..(25): SEQ ID NO: 1685; WAN024CEU_at; Start 259; Stop 283
caaggaattgatgcaccgcttgcca

SEQ ID NO: 115694 - DNA, 25 bp, Artificial
  probe
  misc_feature (1)..(25): SEQ ID NO: 1685; WAN024CEU_at; Start 225; Stop 249
tggtgcggttcttgcgacagccttc

SEQ ID NO: 115695 - DNA, 25 bp, Artificial
  probe
  misc_feature (1)..(25): SEQ ID NO: 1685; WAN024CEU_at; Start 210; Stop 234
tatcgacgcaacttctggtgcggtt

SEQ ID NO: 115696 - DNA, 25 bp, Artificial
  probe
  misc_feature (1)..(25): SEQ ID NO: 1685; WAN024CEU_at; Start 851; Stop 875
tagcagcaccttctacaccatcaga

SEQ ID NO: 115697 - DNA, 25 bp, Artificial
  probe
  misc_feature (1)..(25): SEQ ID NO: 1685; WAN024CEU_at; Start 66; Stop 90
gacgatcgtttcatctgcaggttcc

SEQ ID NO: 115698 - DNA, 25 bp, Artificial
  probe
  misc_feature (1)..(25): SEQ ID NO: 1685; WAN024CEU_at; Start 557; Stop 581
caggacgtatgcttccaggtcttgg

SEQ ID NO: 115699 - DNA, 25 bp, Artificial
  probe
  misc_feature (1)..(25): SEQ ID NO: 1685; WAN024CEU_at; Start 616; Stop 640
cgtaaccttcactaccttgctatgg

SEQ ID NO: 115700 - DNA, 25 bp, Artificial
  probe
  misc_feature (1)..(25): SEQ ID NO: 1685; WAN024CEU_at; Start 394; Stop 418
gactataaaggtattgaacgcaact

SEQ ID NO: 115701 - DNA, 25 bp, Artificial
  probe
  misc_feature (1)..(25): SEQ ID NO: 1685; WAN024CEU_at; Start 240; Stop 264
gacagccttctctgtttcacaagga

SEQ ID NO: 115702 - DNA, 25 bp, Artificial
  probe
  misc_feature (1)..(25): SEQ ID NO: 1685; WAN024CEU_at; Start 134; Stop 158
tgactactggtttacttatcggtgg

SEQ ID NO: 115703 - DNA, 25 bp, Artificial
  probe
  misc_feature (1)..(25): SEQ ID NO: 1685; WAN024CEU_at; Start 418; Stop 442
tacttgcttggtgcgattccgtggg

SEQ ID NO: 115704 - DNA, 25 bp, Artificial
  probe
  misc_feature (1)..(25): SEQ ID NO: 1685; WAN024CEU_at; Start 82; Stop 106
gcaggttcccctgtatttgctggtt

SEQ ID NO: 115705 - DNA, 25 bp, Artificial
  probe
  misc_feature (1)..(25): SEQ ID NO: 1685; WAN024CEU_at; Start 834; Stop 858
tagccaaaaagtagctgtagcagca

SEQ ID NO: 115706 - DNA, 25 bp, Artificial
  probe
  misc_feature (1)..(25): SEQ ID NO: 1685; WAN024CEU_at; Start 314; Stop 338
tcttgacttacttcgacgttcttgg

SEQ ID NO: 115707 - DNA, 25 bp, Artificial
  probe
  misc_feature (1)..(25): SEQ ID NO: 1685; WAN024CEU_at; Start 356; Stop 380
tcttcgctcaccgtgtggatgctgc

SEQ ID NO: 115708 - DNA, 25 bp, Artificial
  probe
  misc_feature (1)..(25): SEQ ID NO: 1685; WAN024CEU_at; Start 468; Stop 492
ctttgcccttgcttttggtggtgcc

SEQ ID NO: 115709 - DNA, 25 bp, Artificial
  probe
  misc_feature (1)..(25): SEQ ID NO: 1685; WAN024CEU_at; Start 119; Stop 143
taatcatgggagatgtgactactgg

SEQ ID NO: 115710 - DNA, 25 bp, Artificial
  probe
  misc_feature (1)..(25): SEQ ID NO: 1685; WAN024CEU_at; Start 49; Stop 73
caaatctgtgatgagttgacgatcg

SEQ ID NO: 115711 - DNA, 25 bp, Artificial
  probe
  misc_feature (1)..(25): SEQ ID NO: 1685; WAN024CEU_at; Start 330; Stop 354
cgttcttggtcgtatgactactacc

SEQ ID NO: 115712 - DNA, 25 bp, Artificial
  probe
  misc_feature (1)..(25): SEQ ID NO: 1685; WAN024CEU_at; Start 7; Stop 31
caatggtggcaaattttacttctca

SEQ ID NO: 115713 - DNA, 25 bp, Artificial
  probe
  misc_feature (1)..(25): SEQ ID NO: 1685; WAN024CEU_at; Start 677; Stop 701
catatgtaacaggtcttggtggcgc

SEQ ID NO: 115714 - DNA, 25 bp, Artificial
  probe
  misc_feature (1)..(25): SEQ ID NO: 1685; WAN024CEU_at; Start 511; Stop 535
gacttcgttgaagcctacaaatggg

SEQ ID NO: 115715 - DNA, 25 bp, Artificial
  probe
  misc_feature (1)..(25): SEQ ID NO: 1685; WAN024CEU_at; Start 716; Stop 740
taggtactcttcctgctgaagttgc

SEQ ID NO: 115716 - DNA, 25 bp, Artificial
  probe
  misc_feature (1)..(25): SEQ ID NO: 1685; WAN024CEU_at; Start 801; Stop 825
aggtattttccttgcagtgcttcac

SEQ ID NO: 115717 - DNA, 25 bp, Artificial
  probe
  misc_feature (1)..(25): SEQ ID NO: 1685; WAN024CEU_at; Start 194; Stop 218
tcggtggtgcttctcgtatcgacgc

SEQ ID NO: 115718 - DNA, 25 bp, Artificial
  probe
  misc_feature (1)..(25): SEQ ID NO: 2197; WAN024CEV_at; Start 156; Stop 180
tattgtggtggtgcttcctgctgaa

SEQ ID NO: 115719 - DNA, 25 bp, Artificial
  probe
  misc_feature (1)..(25): SEQ ID NO: 2197; WAN024CEV_at; Start 63; Stop 87
cgaggataaagtcgttcagcgaaga

SEQ ID NO: 115720 - DNA, 25 bp, Artificial
  probe
  misc_feature (1)..(25): SEQ ID NO: 2197; WAN024CEV_at; Start 240; Stop 264
cgcagagggctacaaaatcggcact

SEQ ID NO: 115721 - DNA, 25 bp, Artificial
  probe
  misc_feature (1)..(25): SEQ ID NO: 2197; WAN024CEV_at; Start 128; Stop 152
tctattctgatgttcaaagagcaga

SEQ ID NO: 115722 - DNA, 25 bp, Artificial
  probe
  misc_feature (1)..(25): SEQ ID NO: 2197; WAN024CEV_at; Start 197; Stop 221
tcggctttgaggaacgtgtgaagtt

SEQ ID NO: 115723 - DNA, 25 bp, Artificial
  probe
  misc_feature (1)..(25): SEQ ID NO: 2197; WAN024CEV_at; Start 224; Stop 248
tcaatccacgtattaccgcagaggg

SEQ ID NO: 115724 - DNA, 25 bp, Artificial
  probe
  misc_feature (1)..(25): SEQ ID NO: 2197; WAN024CEV_at; Start 4; Stop 28
gaacttaaatttgtgattcccaaca

SEQ ID NO: 115725 - DNA, 25 bp, Artificial
  probe
  misc_feature (1)..(25): SEQ ID NO: 2197; WAN024CEV_at; Start 234; Stop 258
tattaccgcagagggctacaaaatc

SEQ ID NO: 115726 - DNA, 25 bp, Artificial
  probe
  misc_feature (1)..(25): SEQ ID NO: 2197; WAN024CEV_at; Start 44; Stop 68
gcaatttagaatttgctggcgagga

SEQ ID NO: 115727 - DNA, 25 bp, Artificial
  probe
  misc_feature (1)..(25): SEQ ID NO: 2197; WAN024CEV_at; Start 21; Stop 45
tcccaacatggaaaaaacattcggc

SEQ ID NO: 115728 - DNA, 25 bp, Artificial
  probe
  misc_feature (1)..(25): SEQ ID NO: 2197; WAN024CEV_at; Start 171; Stop 195
tcctgctgaagctggcgaaaaacat

SEQ ID NO: 115729 - DNA, 25 bp, Artificial
  probe
  misc_feature (1)..(25): SEQ ID NO: 2197; WAN024CEV_at; Start 95; Stop 119
gacggctaactgtcttatcaagaag

SEQ ID NO: 115730 - DNA, 25 bp, Artificial
  probe
  misc_feature (1)..(25): SEQ ID NO: 2197; WAN024CEV_at; Start 105; Stop 129
tgtcttatcaagaagctataatctc

SEQ ID NO: 115731 - DNA, 25 bp, Artificial
  probe
  misc_feature (1)..(25): SEQ ID NO: 2197; WAN024CEV_at; Start 257; Stop 281
tcggcactcgtggttttacaaatta

SEQ ID NO: 115732 - DNA, 25 bp, Artificial
  probe
  misc_feature (1)..(25): SEQ ID NO: 2197; WAN024CEV_at; Start 216; Stop 240
gaagttagtcaatccacgtattacc

SEQ ID NO: 115733 - DNA, 25 bp, Artificial
  probe
  misc_feature (1)..(25): SEQ ID NO: 2197; WAN024CEV_at; Start 190; Stop 214
aaacatttcggctttgaggaacgtg

SEQ ID NO: 115734 - DNA, 25 bp, Artificial
  probe
  misc_feature (1)..(25): SEQ ID NO: 2197; WAN024CEV_at; Start 165; Stop 189
ggtgcttcctgctgaagctggcgaa

SEQ ID NO: 115735 - DNA, 25 bp, Artificial
  probe
  misc_feature (1)..(25): SEQ ID NO: 2197; WAN024CEV_at; Start 149; Stop 173
cagatgatattgtggtggtgcttcc

SEQ ID NO: 115736 - DNA, 25 bp, Artificial
  probe
  misc_feature (1)..(25): SEQ ID NO: 2197; WAN024CEV_at; Start 177; Stop 201
tgaagctggcgaaaaacatttcggc

SEQ ID NO: 115737 - DNA, 25 bp, Artificial
  probe
  misc_feature (1)..(25): SEQ ID NO: 2197; WAN024CEV_at; Start 55; Stop 79
tttgctggcgaggataaagtcgttc

SEQ ID NO: 115738 - DNA, 25 bp, Artificial
  probe
  misc_feature (1)..(25): SEQ ID NO: 2197; WAN024CEV_at; Start 136; Stop 160
gatgttcaaagagcagatgatattg

SEQ ID NO: 115739 - DNA, 25 bp, Artificial
  probe
  misc_feature (1)..(25): SEQ ID NO: 2197; WAN024CEV_at; Start 9; Stop 33
taaatttgtgattcccaacatggaa

SEQ ID NO: 115740 - DNA, 25 bp, Artificial
  probe
  misc_feature (1)..(25): SEQ ID NO: 2197; WAN024CEV_at; Start 69; Stop 93
taaagtcgttcagcgaagaatcaac

SEQ ID NO: 115741 - DNA, 25 bp, Artificial
  probe
  misc_feature (1)..(25): SEQ ID NO: 2197; WAN024CEV_at; Start 275; Stop 299
caaattaccttttacatgctgacga

SEQ ID NO: 115742 - DNA, 25 bp, Artificial
  probe
  misc_feature (1)..(25): SEQ ID NO: 2197; WAN024CEV_at; Start 29; Stop 53
tggaaaaaacattcggcaatttaga

SEQ ID NO: 115743 - DNA, 25 bp, Artificial
  probe
  misc_feature (1)..(25): SEQ ID NO: 2197; WAN024CEV_at; Start 252; Stop 276
caaaatcggcactcgtggttttaca

SEQ ID NO: 115744 - DNA, 25 bp, Artificial
  probe
  misc_feature (1)..(25): SEQ ID NO: 2197; WAN024CEV_at; Start 280; Stop 304
taccttttacatgctgacgacatga

SEQ ID NO: 115745 - DNA, 25 bp, Artificial
  probe
  misc_feature (1)..(25): SEQ ID NO: 2197; WAN024CEV_at; Start 116; Stop 140
gaagctataatctctattctgatgt

SEQ ID NO: 115746 - DNA, 25 bp, Artificial
  probe
  misc_feature (1)..(25): SEQ ID NO: 2197; WAN024CEV_at; Start 230; Stop 254
cacgtattaccgcagagggctacaa

SEQ ID NO: 115747 - DNA, 25 bp, Artificial
  probe
  misc_feature (1)..(25): SEQ ID NO: 2197; WAN024CEV_at; Start 246; Stop 270
gggctacaaaatcggcactcgtggt

SEQ ID NO: 115748 - DNA, 25 bp, Artificial
  probe
  misc_feature (1)..(25): SEQ ID NO: 2197; WAN024CEV_at; Start 208; Stop 232
gaacgtgtgaagttagtcaatccac

SEQ ID NO: 115749 - DNA, 25 bp, Artificial
  probe
  misc_feature (1)..(25): SEQ ID NO: 2197; WAN024CEV_at; Start 83; Stop 107
gaagaatcaacggacggctaactgt

SEQ ID NO: 115750 - DNA, 25 bp, Artificial
  probe
  misc_feature (1)..(25): SEQ ID NO: 2197; WAN024CEV_at; Start 77; Stop 101
ttcagcgaagaatcaacggacggct

SEQ ID NO: 115751 - DNA, 25 bp, Artificial
  probe
  misc_feature (1)..(25): SEQ ID NO: 2197; WAN024CEV_at; Start 90; Stop 114
caacggacggctaactgtcttatca

SEQ ID NO: 115752 - DNA, 25 bp, Artificial
  probe
  misc_feature (1)..(25): SEQ ID NO: 1743; WAN024CEW_at; Start 56; Stop 80
tgaaattctctgctctacgtcgtga

SEQ ID NO: 115753 - DNA, 25 bp, Artificial
  probe
  misc_feature (1)..(25): SEQ ID NO: 1743; WAN024CEW_at; Start 289; Stop 313
gactggtatatcaaggcagacgata

SEQ ID NO: 115754 - DNA, 25 bp, Artificial
  probe
  misc_feature (1)..(25): SEQ ID NO: 1743; WAN024CEW_at; Start 238; Stop 262
aatcccattgcggacaccgttgcta

SEQ ID NO: 115755 - DNA, 25 bp, Artificial
  probe
  misc_feature (1)..(25): SEQ ID NO: 1743; WAN024CEW_at; Start 265; Stop 289
gccacctatcaaggagcagatgttg

SEQ ID NO: 115756 - DNA, 25 bp, Artificial
  probe
  misc_feature (1)..(25): SEQ ID NO: 1743; WAN024CEW_at; Start 33; Stop 57
taaagacacgacttttggagaattg

SEQ ID NO: 115757 - DNA, 25 bp, Artificial
  probe
  misc_feature (1)..(25): SEQ ID NO: 1743; WAN024CEW_at; Start 293; Stop 317
ggtatatcaaggcagacgatattgt

SEQ ID NO: 115758 - DNA, 25 bp, Artificial
  probe
  misc_feature (1)..(25): SEQ ID NO: 1743; WAN024CEW_at; Start 127; Stop 151
gaacgtacctatgacttaaaatcca

SEQ ID NO: 115759 - DNA, 25 bp, Artificial
  probe
  misc_feature (1)..(25): SEQ ID NO: 1743; WAN024CEW_at; Start 157; Stop 181
caaggacgcatgattcaagtaagta

SEQ ID NO: 115760 - DNA, 25 bp, Artificial
  probe
  misc_feature (1)..(25): SEQ ID NO: 1743; WAN024CEW_at; Start 71; Stop 95
tacgtcgtgaagtgagaatccaaaa

SEQ ID NO: 115761 - DNA, 25 bp, Artificial
  probe
  misc_feature (1)..(25): SEQ ID NO: 1743; WAN024CEW_at; Start 98; Stop 122
aagacgggtcggtttcagatgaaat

SEQ ID NO: 115762 - DNA, 25 bp, Artificial
  probe
  misc_feature (1)..(25): SEQ ID NO: 1743; WAN024CEW_at; Start 172; Stop 196
caagtaagtattcctgccagcgtgc

SEQ ID NO: 115763 - DNA, 25 bp, Artificial
  probe
  misc_feature (1)..(25): SEQ ID NO: 1743; WAN024CEW_at; Start 323; Stop 347
caaaggattctagttcattcaaagc

SEQ ID NO: 115764 - DNA, 25 bp, Artificial
  probe
  misc_feature (1)..(25): SEQ ID NO: 1743; WAN024CEW_at; Start 349; Stop 373
caaccacaagcaaagaaagaaccga

SEQ ID NO: 115765 - DNA, 25 bp, Artificial
  probe
  misc_feature (1)..(25): SEQ ID NO: 1743; WAN024CEW_at; Start 142; Stop 166
ttaaaatccaaaggacaaggacgca

SEQ ID NO: 115766 - DNA, 25 bp, Artificial
  probe
  misc_feature (1)..(25): SEQ ID NO: 1743; WAN024CEW_at; Start 39; Stop 63
cacgacttttggagaattgaaattc

SEQ ID NO: 115767 - DNA, 25 bp, Artificial
  probe
  misc_feature (1)..(25): SEQ ID NO: 1743; WAN024CEW_at; Start 334; Stop 358
agttcattcaaagctcaaccacaag

SEQ ID NO: 115768 - DNA, 25 bp, Artificial
  probe
  misc_feature (1)..(25): SEQ ID NO: 1743; WAN024CEW_at; Start 3; Stop 27
gatgagattagcaaatggcattgta

SEQ ID NO: 115769 - DNA, 25 bp, Artificial
  probe
  misc_feature (1)..(25): SEQ ID NO: 1743; WAN024CEW_at; Start 217; Stop 241
aacgcacgggtggaacttatcaatc

SEQ ID NO: 115770 - DNA, 25 bp, Artificial
  probe
  misc_feature (1)..(25): SEQ ID NO: 1743; WAN024CEW_at; Start 168; Stop 192
gattcaagtaagtattcctgccagc

SEQ ID NO: 115771 - DNA, 25 bp, Artificial
  probe
  misc_feature (1)..(25): SEQ ID NO: 1743; WAN024CEW_at; Start 358; Stop 382
gcaaagaaagaaccgacacaagaca

SEQ ID NO: 115772 - DNA, 25 bp, Artificial
  probe
  misc_feature (1)..(25): SEQ ID NO: 1743; WAN024CEW_at; Start 244; Stop 268
attgcggacaccgttgctactgcca

SEQ ID NO: 115773 - DNA, 25 bp, Artificial
  probe
  misc_feature (1)..(25): SEQ ID NO: 1743; WAN024CEW_at; Start 281; Stop 305
cagatgttgactggtatatcaaggc

SEQ ID NO: 115774 - DNA, 25 bp, Artificial
  probe
  misc_feature (1)..(25): SEQ ID NO: 1743; WAN024CEW_at; Start 271; Stop 295
tatcaaggagcagatgttgactggt

SEQ ID NO: 115775 - DNA, 25 bp, Artificial
  probe
  misc_feature (1)..(25): SEQ ID NO: 1743; WAN024CEW_at; Start 183; Stop 207
tcctgccagcgtgcctttgaaagag

SEQ ID NO: 115776 - DNA, 25 bp, Artificial
  probe
  misc_feature (1)..(25): SEQ ID NO: 1743; WAN024CEW_at; Start 64; Stop 88
tctgctctacgtcgtgaagtgagaa

SEQ ID NO: 115777 - DNA, 25 bp, Artificial
  probe
  misc_feature (1)..(25): SEQ ID NO: 1743; WAN024CEW_at; Start 18; Stop 42
tggcattgtattagataaagacacg

SEQ ID NO: 115778 - DNA, 25 bp, Artificial
  probe
  misc_feature (1)..(25): SEQ ID NO: 1743; WAN024CEW_at; Start 112; Stop 136
tcagatgaaatcaaggaacgtacct

SEQ ID NO: 115779 - DNA, 25 bp, Artificial
  probe
  misc_feature (1)..(25): SEQ ID NO: 1743; WAN024CEW_at; Start 83; Stop 107
tgagaatccaaaatgaagacgggtc

SEQ ID NO: 115780 - DNA, 25 bp, Artificial
  probe
  misc_feature (1)..(25): SEQ ID NO: 1743; WAN024CEW_at; Start 202; Stop 226
aaagagtttgattataacgcacggg

SEQ ID NO: 115781 - DNA, 25 bp, Artificial
  probe
  misc_feature (1)..(25): SEQ ID NO: 1743; WAN024CEW_at; Start 256; Stop 280
gttgctactgccacctatcaaggag

SEQ ID NO: 115782 - DNA, 25 bp, Artificial
  probe
  misc_feature (1)..(25): SEQ ID NO: 1743; WAN024CEW_at; Start 207; Stop 231
gtttgattataacgcacgggtggaa

SEQ ID NO: 115783 - DNA, 25 bp, Artificial
  probe
  misc_feature (1)..(25): SEQ ID NO: 1743; WAN024CEW_at; Start 229; Stop 253
gaacttatcaatcccattgcggaca

SEQ ID NO: 115784 - DNA, 25 bp, Artificial
  probe
  misc_feature (1)..(25): SEQ ID NO: 1743; WAN024CEW_at; Start 149; Stop 173
ccaaaggacaaggacgcatgattca

SEQ ID NO: 115785 - DNA, 25 bp, Artificial
  probe
  misc_feature (1)..(25): SEQ ID NO: 1743; WAN024CEW_at; Start 188; Stop 212
ccagcgtgcctttgaaagagtttga

SEQ ID NO: 115786 - DNA, 25 bp, Artificial
  probe
  misc_feature (1)..(25): SEQ ID NO: 818; WAN024CEX_at; Start 102; Stop 126
gtttcatgtgaagacaatccagcag

SEQ ID NO: 115787 - DNA, 25 bp, Artificial
  probe
  misc_feature (1)..(25): SEQ ID NO: 818; WAN024CEX_at; Start 1323; Stop 1347
gttatccaacagcagacagtccacg

SEQ ID NO: 115788 - DNA, 25 bp, Artificial
  probe
  misc_feature (1)..(25): SEQ ID NO: 818; WAN024CEX_at; Start 57; Stop 81
tacgatagcgtcactcctgcctgtt

SEQ ID NO: 115789 - DNA, 25 bp, Artificial
  probe
  misc_feature (1)..(25): SEQ ID NO: 818; WAN024CEX_at; Start 324; Stop 348
tgaacaggtcaaaacagagggtttc

SEQ ID NO: 115790 - DNA, 25 bp, Artificial
  probe
  misc_feature (1)..(25): SEQ ID NO: 818; WAN024CEX_at; Start 237; Stop 261
caaacgggttcgctatgatacggtt

SEQ ID NO: 115791 - DNA, 25 bp, Artificial
  probe
  misc_feature (1)..(25): SEQ ID NO: 818; WAN024CEX_at; Start 1041; Stop 1065
catgttaggtcgtcaagctggcttc

SEQ ID NO: 115792 - DNA, 25 bp, Artificial
  probe
  misc_feature (1)..(25): SEQ ID NO: 818; WAN024CEX_at; Start 759; Stop 783
tattcttgacccgaaaaatgctgac

SEQ ID NO: 115793 - DNA, 25 bp, Artificial
  probe
  misc_feature (1)..(25): SEQ ID NO: 818; WAN024CEX_at; Start 967; Stop 991
gaatacgtcgctttcatggaaatgc

SEQ ID NO: 115794 - DNA, 25 bp, Artificial
  probe
  misc_feature (1)..(25): SEQ ID NO: 818; WAN024CEX_at; Start 355; Stop 379
gatagtgctggtcgtacaaaggaaa

SEQ ID NO: 115795 - DNA, 25 bp, Artificial
  probe
  misc_feature (1)..(25): SEQ ID NO: 818; WAN024CEX_at; Start 414; Stop 438
taaaaatggcttgatacagatacgg

SEQ ID NO: 115796 - DNA, 25 bp, Artificial
  probe
  misc_feature (1)..(25): SEQ ID NO: 818; WAN024CEX_at; Start 989; Stop 1013
tgctgggaacaaaagaaaacaccgc

SEQ ID NO: 115797 - DNA, 25 bp, Artificial
  probe
  misc_feature (1)..(25): SEQ ID NO: 818; WAN024CEX_at; Start 1136; Stop 1160
tcagagtggctttaggtcgtatgtc

SEQ ID NO: 115798 - DNA, 25 bp, Artificial
  probe
  misc_feature (1)..(25): SEQ ID NO: 818; WAN024CEX_at; Start 641; Stop 665
tatggtgggaatatgataagctccc

SEQ ID NO: 115799 - DNA, 25 bp, Artificial
  probe
  misc_feature (1)..(25): SEQ ID NO: 818; WAN024CEX_at; Start 1211; Stop 1235
tcttaaagcgaatcaaaggtcgtgg

SEQ ID NO: 115800 - DNA, 25 bp, Artificial
  probe
  misc_feature (1)..(25): SEQ ID NO: 818; WAN024CEX_at; Start 1068; Stop 1092
tctaatactggcttgtcaacgtcca

SEQ ID NO: 115801 - DNA, 25 bp, Artificial
  probe
  misc_feature (1)..(25): SEQ ID NO: 818; WAN024CEX_at; Start 1099; Stop 1123
aaatatttaggcgacggaatccgtg

SEQ ID NO: 115802 - DNA, 25 bp, Artificial
  probe
  misc_feature (1)..(25): SEQ ID NO: 818; WAN024CEX_at; Start 204; Stop 228
aattcttatctgcttgctggtagcg

SEQ ID NO: 115803 - DNA, 25 bp, Artificial
  probe
  misc_feature (1)..(25): SEQ ID NO: 818; WAN024CEX_at; Start 6; Stop 30
acagcgtggtaaaaggattcgccca

SEQ ID NO: 115804 - DNA, 25 bp, Artificial
  probe
  misc_feature (1)..(25): SEQ ID NO: 818; WAN024CEX_at; Start 1186; Stop 1210
ggcagtgacgtacaaaaggatttct

SEQ ID NO: 115805 - DNA, 25 bp, Artificial
  probe
  misc_feature (1)..(25): SEQ ID NO: 818; WAN024CEX_at; Start 788; Stop 812
cggacttaggttctgtgatggcaaa

SEQ ID NO: 115806 - DNA, 25 bp, Artificial
  probe
  misc_feature (1)..(25): SEQ ID NO: 818; WAN024CEX_at; Start 83; Stop 107
tcctgctggttgtcggactgtttca

SEQ ID NO: 115807 - DNA, 25 bp, Artificial
  probe
  misc_feature (1)..(25): SEQ ID NO: 818; WAN024CEX_at; Start 713; Stop 737
tactgacactgattgaagccttgct

SEQ ID NO: 115808 - DNA, 25 bp, Artificial
  probe
  misc_feature (1)..(25): SEQ ID NO: 818; WAN024CEX_at; Start 925; Stop 949
tatgcttacttaggtctcccggcac

SEQ ID NO: 115809 - DNA, 25 bp, Artificial
  probe
  misc_feature (1)..(25): SEQ ID NO: 818; WAN024CEX_at; Start 428; Stop 452
tacagatacgggtggaaatcacgct

SEQ ID NO: 115810 - DNA, 25 bp, Artificial
  probe
  misc_feature (1)..(25): SEQ ID NO: 818; WAN024CEX_at; Start 550; Stop 574
gaatatactttgctctatgacacca

SEQ ID NO: 115811 - DNA, 25 bp, Artificial
  probe
  misc_feature (1)..(25): SEQ ID NO: 818; WAN024CEX_at; Start 1153; Stop 1177
cgtatgtctgaaatgggctatggca

SEQ ID NO: 115812 - DNA, 25 bp, Artificial
  probe
  misc_feature (1)..(25): SEQ ID NO: 818; WAN024CEX_at; Start 506; Stop 530
tgtactgtgagctgacggataaaga

SEQ ID NO: 115813 - DNA, 25 bp, Artificial
  probe
  misc_feature (1)..(25): SEQ ID NO: 818; WAN024CEX_at; Start 21; Stop 45
gattcgcccatctggtaaagattta

SEQ ID NO: 115814 - DNA, 25 bp, Artificial
  probe
  misc_feature (1)..(25): SEQ ID NO: 818; WAN024CEX_at; Start 1171; Stop 1195
tatggcatgatgtttggcagtgacg

SEQ ID NO: 115815 - DNA, 25 bp, Artificial
  probe
  misc_feature (1)..(25): SEQ ID NO: 818; WAN024CEX_at; Start 309; Stop 333
caagtggtatgaatctgaacaggtc

SEQ ID NO: 115816 - DNA, 25 bp, Artificial
  probe
  misc_feature (1)..(25): SEQ ID NO: 818; WAN024CEX_at; Start 271; Stop 295
taccaccgtcaaaaactggcaaaga

SEQ ID NO: 115817 - DNA, 25 bp, Artificial
  probe
  misc_feature (1)..(25): SEQ ID NO: 818; WAN024CEX_at; Start 773; Stop 797
aaaatgctgaccttgcggacttagg

SEQ ID NO: 115818 - DNA, 25 bp, Artificial
  probe
  misc_feature (1)..(25): SEQ ID NO: 818; WAN024CEX_at; Start 444; Stop 468
aatcacgctgggaaaatatcaagac

SEQ ID NO: 115819 - DNA, 25 bp, Artificial
  probe
  misc_feature (1)..(25): SEQ ID NO: 818; WAN024CEX_at; Start 624; Stop 648
tcgcttaatgaaaaacgtatggtgg

SEQ ID NO: 115820 - DNA, 25 bp, Artificial
  probe
  misc_feature (1)..(25): SEQ ID NO: 5473; WAN024CEY_at; Start 714; Stop 738
tatctatgaaaaggactacgagcag

SEQ ID NO: 115821 - DNA, 25 bp, Artificial
  probe
  misc_feature (1)..(25): SEQ ID NO: 5473; WAN024CEY_at; Start 202; Stop 226
gacgctccccttgaaatgctgtttg

SEQ ID NO: 115822 - DNA, 25 bp, Artificial
  probe
  misc_feature (1)..(25): SEQ ID NO: 5473; WAN024CEY_at; Start 1080; Stop 1104
tgatgaaatcaaccagacgcaggtt

SEQ ID NO: 115823 - DNA, 25 bp, Artificial
  probe
  misc_feature (1)..(25): SEQ ID NO: 5473; WAN024CEY_at; Start 1118; Stop 1142
tcgaccatgcgaaactgacagaccg

SEQ ID NO: 115824 - DNA, 25 bp, Artificial
  probe
  misc_feature (1)..(25): SEQ ID NO: 5473; WAN024CEY_at; Start 1016; Stop 1040
tccaaaggacgctgaactggctatc

SEQ ID NO: 115825 - DNA, 25 bp, Artificial
  probe
  misc_feature (1)..(25): SEQ ID NO: 5473; WAN024CEY_at; Start 154; Stop 178
gaggatttacagcagtccctttggg

SEQ ID NO: 115826 - DNA, 25 bp, Artificial
  probe
  misc_feature (1)..(25): SEQ ID NO: 5473; WAN024CEY_at; Start 666; Stop 690
gggaaacaccctctatatcggttca

SEQ ID NO: 115827 - DNA, 25 bp, Artificial
  probe
  misc_feature (1)..(25): SEQ ID NO: 5473; WAN024CEY_at; Start 915; Stop 939
caaacctcgttctgattggaaactg

SEQ ID NO: 115828 - DNA, 25 bp, Artificial
  probe
  misc_feature (1)..(25): SEQ ID NO: 5473; WAN024CEY_at; Start 563; Stop 587
tactcactgaaaagtgccaacagga

SEQ ID NO: 115829 - DNA, 25 bp, Artificial
  probe
  misc_feature (1)..(25): SEQ ID NO: 5473; WAN024CEY_at; Start 53; Stop 77
aacgcttggcttatggactatctca

SEQ ID NO: 115830 - DNA, 25 bp, Artificial
  probe
  misc_feature (1)..(25): SEQ ID NO: 5473; WAN024CEY_at; Start 1133; Stop 1157
tgacagaccgacacaagcagatttt

SEQ ID NO: 115831 - DNA, 25 bp, Artificial
  probe
  misc_feature (1)..(25): SEQ ID NO: 5473; WAN024CEY_at; Start 505; Stop 529
gtgatgaaacgccttgaccttgcca

SEQ ID NO: 115832 - DNA, 25 bp, Artificial
  probe
  misc_feature (1)..(25): SEQ ID NO: 5473; WAN024CEY_at; Start 1104; Stop 1128
tgtaaaagacattctcgaccatgcg

SEQ ID NO: 115833 - DNA, 25 bp, Artificial
  probe
  misc_feature (1)..(25): SEQ ID NO: 5473; WAN024CEY_at; Start 246; Stop 270
tccgacaacagacgtacagcaggtg

SEQ ID NO: 115834 - DNA, 25 bp, Artificial
  probe
  misc_feature (1)..(25): SEQ ID NO: 5473; WAN024CEY_at; Start 624; Stop 648
tcgcagtggcgaactggtacgcaaa

SEQ ID NO: 115835 - DNA, 25 bp, Artificial
  probe
  misc_feature (1)..(25): SEQ ID NO: 5473; WAN024CEY_at; Start 417; Stop 441
tcgtgggtgcagacaatttgaaagc

SEQ ID NO: 115836 - DNA, 25 bp, Artificial
  probe
  misc_feature (1)..(25): SEQ ID NO: 5473; WAN024CEY_at; Start 1265; Stop 1289
cggttcgtgttcgtgctgacttgca

SEQ ID NO: 115837 - DNA, 25 bp, Artificial
  probe
  misc_feature (1)..(25): SEQ ID NO: 5473; WAN024CEY_at; Start 1301; Stop 1325
aaatcgaaacagcaaagaatggcgg

SEQ ID NO: 115838 - DNA, 25 bp, Artificial
  probe
  misc_feature (1)..(25): SEQ ID NO: 5473; WAN024CEY_at; Start 134; Stop 158
caggaaaagtcaagccatcagagga

SEQ ID NO: 115839 - DNA, 25 bp, Artificial
  probe
  misc_feature (1)..(25): SEQ ID NO: 5473; WAN024CEY_at; Start 589; Stop 613
gaatgtatctccgtcttccgcagtt

SEQ ID NO: 115840 - DNA, 25 bp, Artificial
  probe
  misc_feature (1)..(25): SEQ ID NO: 5473; WAN024CEY_at; Start 899; Stop 923
tagataaagacgattccaaacctcg

SEQ ID NO: 115841 - DNA, 25 bp, Artificial
  probe
  misc_feature (1)..(25): SEQ ID NO: 5473; WAN024CEY_at; Start 846; Stop 870
tgacaatccagagcataccgccttt

SEQ ID NO: 115842 - DNA, 25 bp, Artificial
  probe
  misc_feature (1)..(25): SEQ ID NO: 5473; WAN024CEY_at; Start 609; Stop 633
cagttttaaaagctatcgcagtggc

SEQ ID NO: 115843 - DNA, 25 bp, Artificial
  probe
  misc_feature (1)..(25): SEQ ID NO: 5473; WAN024CEY_at; Start 77; Stop 101
aaaaccgtttagctgttgcgactgg

SEQ ID NO: 115844 - DNA, 25 bp, Artificial
  probe
  misc_feature (1)..(25): SEQ ID NO: 5473; WAN024CEY_at; Start 751; Stop 775
gatattcccattgaagacgcagaag

SEQ ID NO: 115845 - DNA, 25 bp, Artificial
  probe
  misc_feature (1)..(25): SEQ ID NO: 5473; WAN024CEY_at; Start 792; Stop 816
gattcgattgaaaaatgagcgtgcc

SEQ ID NO: 115846 - DNA, 25 bp, Artificial
  probe
  misc_feature (1)..(25): SEQ ID NO: 5473; WAN024CEY_at; Start 262; Stop 286
cagcaggtggtcgaaaacatcttac

SEQ ID NO: 115847 - DNA, 25 bp, Artificial
  probe
  misc_feature (1)..(25): SEQ ID NO: 5473; WAN024CEY_at; Start 522; Stop 546
ccttgccattaacgataagacaggg

SEQ ID NO: 115848 - DNA, 25 bp, Artificial
  probe
  misc_feature (1)..(25): SEQ ID NO: 5473; WAN024CEY_at; Start 346; Stop 370
tatgctttaggcgacatattcgtcc

SEQ ID NO: 115849 - DNA, 25 bp, Artificial
  probe
  misc_feature (1)..(25): SEQ ID NO: 5473; WAN024CEY_at; Start 1248; Stop 1272
tataatgggagataagacggttcgt

SEQ ID NO: 115850 - DNA, 25 bp, Artificial
  probe
  misc_feature (1)..(25): SEQ ID NO: 5473; WAN024CEY_at; Start 807; Stop 831
tgagcgtgcctattatgcagtccgt

SEQ ID NO: 115851 - DNA, 25 bp, Artificial
  probe
  misc_feature (1)..(25): SEQ ID NO: 5473; WAN024CEY_at; Start 169; Stop 193
tccctttgggaagctctggaacgct

SEQ ID NO: 115852 - DNA, 25 bp, Artificial
  probe
  misc_feature (1)..(25): SEQ ID NO: 5473; WAN024CEY_at; Start 373; Stop 397
tgctcccatgaactggacaaaggag

SEQ ID NO: 115853 - DNA, 25 bp, Artificial
  probe
  misc_feature (1)..(25): SEQ ID NO: 5473; WAN024CEY_at; Start 447; Stop 471
tctggcacaacaaagaagctggtat

SEQ ID NO: 115854 - DNA, 25 bp, Artificial
  probe
  misc_feature (1)..(25): SEQ ID NO: 3065; WAN024CEZ_at; Start 5; Stop 29
tggtattccaaatgcgtaatgtaga

SEQ ID NO: 115855 - DNA, 25 bp, Artificial
  probe
  misc_feature (1)..(25): SEQ ID NO: 3065; WAN024CEZ_at; Start 33; Stop 57
aacatctactgttttgaaacagact

SEQ ID NO: 115856 - DNA, 25 bp, Artificial
  probe
  misc_feature (1)..(25): SEQ ID NO: 3065; WAN024CEZ_at; Start 44; Stop 68
ttttgaaacagactaaaaacagtga

SEQ ID NO: 115857 - DNA, 25 bp, Artificial
  probe
  misc_feature (1)..(25): SEQ ID NO: 3065; WAN024CEZ_at; Start 50; Stop 74
aacagactaaaaacagtgattacgc

SEQ ID NO: 115858 - DNA, 25 bp, Artificial
  probe
  misc_feature (1)..(25): SEQ ID NO: 3065; WAN024CEZ_at; Start 56; Stop 80
ctaaaaacagtgattacgcagataa

SEQ ID NO: 115859 - DNA, 25 bp, Artificial
  probe
  misc_feature (1)..(25): SEQ ID NO: 3065; WAN024CEZ_at; Start 54; Stop 78
gactaaaaacagtgattacgcagat

SEQ ID NO: 115860 - DNA, 25 bp, Artificial
  probe
  misc_feature (1)..(25): SEQ ID NO: 3065; WAN024CEZ_at; Start 45; Stop 69
tttgaaacagactaaaaacagtgat

SEQ ID NO: 115861 - DNA, 25 bp, Artificial
  probe
  misc_feature (1)..(25): SEQ ID NO: 3065; WAN024CEZ_at; Start 32; Stop 56
aaacatctactgttttgaaacagac

SEQ ID NO: 115862 - DNA, 25 bp, Artificial
  probe
  misc_feature (1)..(25): SEQ ID NO: 3065; WAN024CEZ_at; Start 35; Stop 59
catctactgttttgaaacagactaa

SEQ ID NO: 115863 - DNA, 25 bp, Artificial
  probe
  misc_feature (1)..(25): SEQ ID NO: 3065; WAN024CEZ_at; Start 10; Stop 34
ttccaaatgcgtaatgtagataaaa

SEQ ID NO: 115864 - DNA, 25 bp, Artificial
  probe
  misc_feature (1)..(25): SEQ ID NO: 3065; WAN024CEZ_at; Start 51; Stop 75
acagactaaaaacagtgattacgca

SEQ ID NO: 115865 - DNA, 25 bp, Artificial
  probe
  misc_feature (1)..(25): SEQ ID NO: 3065; WAN024CEZ_at; Start 11; Stop 35
tccaaatgcgtaatgtagataaaac

SEQ ID NO: 115866 - DNA, 25 bp, Artificial
  probe
  misc_feature (1)..(25): SEQ ID NO: 3065; WAN024CEZ_at; Start 37; Stop 61
tctactgttttgaaacagactaaaa

SEQ ID NO: 115867 - DNA, 25 bp, Artificial
  probe
  misc_feature (1)..(25): SEQ ID NO: 3065; WAN024CEZ_at; Start 3; Stop 27
gttggtattccaaatgcgtaatgta

SEQ ID NO: 115868 - DNA, 25 bp, Artificial
  probe
  misc_feature (1)..(25): SEQ ID NO: 3065; WAN024CEZ_at; Start 4; Stop 28
ttggtattccaaatgcgtaatgtag

SEQ ID NO: 115869 - DNA, 25 bp, Artificial
  probe
  misc_feature (1)..(25): SEQ ID NO: 3065; WAN024CEZ_at; Start 57; Stop 81
taaaaacagtgattacgcagataaa

SEQ ID NO: 115870 - DNA, 25 bp, Artificial
  probe
  misc_feature (1)..(25): SEQ ID NO: 3065; WAN024CEZ_at; Start 52; Stop 76
cagactaaaaacagtgattacgcag

SEQ ID NO: 115871 - DNA, 25 bp, Artificial
  probe
  misc_feature (1)..(25): SEQ ID NO: 3065; WAN024CEZ_at; Start 59; Stop 83
aaaacagtgattacgcagataaata

SEQ ID NO: 115872 - DNA, 25 bp, Artificial
  probe
  misc_feature (1)..(25): SEQ ID NO: 3065; WAN024CEZ_at; Start 55; Stop 79
actaaaaacagtgattacgcagata

SEQ ID NO: 115873 - DNA, 25 bp, Artificial
  probe
  misc_feature (1)..(25): SEQ ID NO: 3065; WAN024CEZ_at; Start 13; Stop 37
caaatgcgtaatgtagataaaacat

SEQ ID NO: 115874 - DNA, 25 bp, Artificial
  probe
  misc_feature (1)..(25): SEQ ID NO: 3065; WAN024CEZ_at; Start 6; Stop 30
ggtattccaaatgcgtaatgtagat

SEQ ID NO: 115875 - DNA, 25 bp, Artificial
  probe
  misc_feature (1)..(25): SEQ ID NO: 3065; WAN024CEZ_at; Start 48; Stop 72
gaaacagactaaaaacagtgattac

SEQ ID NO: 115876 - DNA, 25 bp, Artificial
  probe
  misc_feature (1)..(25): SEQ ID NO: 3065; WAN024CEZ_at; Start 24; Stop 48
tgtagataaaacatctactgttttg

SEQ ID NO: 115877 - DNA, 25 bp, Artificial
  probe
  misc_feature (1)..(25): SEQ ID NO: 3065; WAN024CEZ_at; Start 8; Stop 32
tattccaaatgcgtaatgtagataa

SEQ ID NO: 115878 - DNA, 25 bp, Artificial
  probe
  misc_feature (1)..(25): SEQ ID NO: 3065; WAN024CEZ_at; Start 19; Stop 43
cgtaatgtagataaaacatctactg

SEQ ID NO: 115879 - DNA, 25 bp, Artificial
  probe
  misc_feature (1)..(25): SEQ ID NO: 3065; WAN024CEZ_at; Start 46; Stop 70
ttgaaacagactaaaaacagtgatt

SEQ ID NO: 115880 - DNA, 25 bp, Artificial
  probe
  misc_feature (1)..(25): SEQ ID NO: 3065; WAN024CEZ_at; Start 53; Stop 77
agactaaaaacagtgattacgcaga

SEQ ID NO: 115881 - DNA, 25 bp, Artificial
  probe
  misc_feature (1)..(25): SEQ ID NO: 3065; WAN024CEZ_at; Start 17; Stop 41
tgcgtaatgtagataaaacatctac

SEQ ID NO: 115882 - DNA, 25 bp, Artificial
  probe
  misc_feature (1)..(25): SEQ ID NO: 3065; WAN024CEZ_at; Start 2; Stop 26
tgttggtattccaaatgcgtaatgt

SEQ ID NO: 115883 - DNA, 25 bp, Artificial
  probe
  misc_feature (1)..(25): SEQ ID NO: 3065; WAN024CEZ_at; Start 15; Stop 39
aatgcgtaatgtagataaaacatct

SEQ ID NO: 115884 - DNA, 25 bp, Artificial
  probe
  misc_feature (1)..(25): SEQ ID NO: 3065; WAN024CEZ_at; Start 58; Stop 82
aaaaacagtgattacgcagataaat

SEQ ID NO: 115885 - DNA, 25 bp, Artificial
  probe
  misc_feature (1)..(25): SEQ ID NO: 3065; WAN024CEZ_at; Start 60; Stop 84
aaacagtgattacgcagataaataa

SEQ ID NO: 115886 - DNA, 25 bp, Artificial
  probe
  misc_feature (1)..(25): SEQ ID NO: 3065; WAN024CEZ_at; Start 30; Stop 54
taaaacatctactgttttgaaacag

SEQ ID NO: 115887 - DNA, 25 bp, Artificial
  probe
  misc_feature (1)..(25): SEQ ID NO: 3065; WAN024CEZ_at; Start 12; Stop 36
ccaaatgcgtaatgtagataaaaca

SEQ ID NO: 115888 - DNA, 25 bp, Artificial
  probe
  misc_feature (1)..(25): SEQ ID NO: 998; WAN024CF2_at; Start 241; Stop 265
caccaagatattctacagtttcaat

SEQ ID NO: 115889 - DNA, 25 bp, Artificial
  probe
  misc_feature (1)..(25): SEQ ID NO: 998; WAN024CF2_at; Start 164; Stop 188
cgtctattgaattagacagtcatct

SEQ ID NO: 115890 - DNA, 25 bp, Artificial
  probe
  misc_feature (1)..(25): SEQ ID NO: 998; WAN024CF2_at; Start 475; Stop 499
gcggaatgctttcatcctaaaccaa

SEQ ID NO: 115891 - DNA, 25 bp, Artificial
  probe
  misc_feature (1)..(25): SEQ ID NO: 998; WAN024CF2_at; Start 35; Stop 59
taacgagtgaaaaagtactcaacca

SEQ ID NO: 115892 - DNA, 25 bp, Artificial
  probe
  misc_feature (1)..(25): SEQ ID NO: 998; WAN024CF2_at; Start 121; Stop 145
gggcatttaacgacgaaactggcta

SEQ ID NO: 115893 - DNA, 25 bp, Artificial
  probe
  misc_feature (1)..(25): SEQ ID NO: 998; WAN024CF2_at; Start 591; Stop 615
ggtcaatcgagaatatcgtcaactg

SEQ ID NO: 115894 - DNA, 25 bp, Artificial
  probe
  misc_feature (1)..(25): SEQ ID NO: 998; WAN024CF2_at; Start 363; Stop 387
catctatctgattgttgaagaagga

SEQ ID NO: 115895 - DNA, 25 bp, Artificial
  probe
  misc_feature (1)..(25): SEQ ID NO: 998; WAN024CF2_at; Start 226; Stop 250
cgtgtcactttaattcaccaagata

SEQ ID NO: 115896 - DNA, 25 bp, Artificial
  probe
  misc_feature (1)..(25): SEQ ID NO: 998; WAN024CF2_at; Start 439; Stop 463
actcaagtctcgattcagcaattgc

SEQ ID NO: 115897 - DNA, 25 bp, Artificial
  probe
  misc_feature (1)..(25): SEQ ID NO: 998; WAN024CF2_at; Start 564; Stop 588
gctatatacgtactttgtttcaaaa

SEQ ID NO: 115898 - DNA, 25 bp, Artificial
  probe
  misc_feature (1)..(25): SEQ ID NO: 998; WAN024CF2_at; Start 537; Stop 561
cacagatgttccagataaatattgg

SEQ ID NO: 115899 - DNA, 25 bp, Artificial
  probe
  misc_feature (1)..(25): SEQ ID NO: 998; WAN024CF2_at; Start 354; Stop 378
tgcgtctgacatctatctgattgtt

SEQ ID NO: 115900 - DNA, 25 bp, Artificial
  probe
  misc_feature (1)..(25): SEQ ID NO: 998; WAN024CF2_at; Start 195; Stop 219
cttatcgtcagaaaaattaaaactg

SEQ ID NO: 115901 - DNA, 25 bp, Artificial
  probe
  misc_feature (1)..(25): SEQ ID NO: 998; WAN024CF2_at; Start 260; Stop 284
ttcaattccctaacaaacagaggta

SEQ ID NO: 115902 - DNA, 25 bp, Artificial
  probe
  misc_feature (1)..(25): SEQ ID NO: 998; WAN024CF2_at; Start 707; Stop 731
atagttatctattatttaacgggag

SEQ ID NO: 115903 - DNA, 25 bp, Artificial
  probe
  misc_feature (1)..(25): SEQ ID NO: 998; WAN024CF2_at; Start 552; Stop 576
taaatattggaagctatatacgtac

SEQ ID NO: 115904 - DNA, 25 bp, Artificial
  probe
  misc_feature (1)..(25): SEQ ID NO: 998; WAN024CF2_at; Start 273; Stop 297
caaacagaggtataaaattgttggg

SEQ ID NO: 115905 - DNA, 25 bp, Artificial
  probe
  misc_feature (1)..(25): SEQ ID NO: 998; WAN024CF2_at; Start 520; Stop 544
aaacttacccgccataccacagatg

SEQ ID NO: 115906 - DNA, 25 bp, Artificial
  probe
  misc_feature (1)..(25): SEQ ID NO: 998; WAN024CF2_at; Start 102; Stop 126
cgaaattggaacaggtaaagggcat

SEQ ID NO: 115907 - DNA, 25 bp, Artificial
  probe
  misc_feature (1)..(25): SEQ ID NO: 998; WAN024CF2_at; Start 149; Stop 173
taagtaaacaggtaacgtctattga

SEQ ID NO: 115908 - DNA, 25 bp, Artificial
  probe
  misc_feature (1)..(25): SEQ ID NO: 998; WAN024CF2_at; Start 577; Stop 601
tttgtttcaaaatgggtcaatcgag

SEQ ID NO: 115909 - DNA, 25 bp, Artificial
  probe
  misc_feature (1)..(25): SEQ ID NO: 998; WAN024CF2_at; Start 181; Stop 205
agtcatctattcaacttatcgtcag

SEQ ID NO: 115910 - DNA, 25 bp, Artificial
  probe
  misc_feature (1)..(25): SEQ ID NO: 998; WAN024CF2_at; Start 487; Stop 511
catcctaaaccaaaagtaaacagtg

SEQ ID NO: 115911 - DNA, 25 bp, Artificial
  probe
  misc_feature (1)..(25): SEQ ID NO: 998; WAN024CF2_at; Start 606; Stop 630
tcgtcaactgtttactaaaaatcag

SEQ ID NO: 115912 - DNA, 25 bp, Artificial
  probe
  misc_feature (1)..(25): SEQ ID NO: 998; WAN024CF2_at; Start 678; Stop 702
tacttatgagcaagtattgtctatt

SEQ ID NO: 115913 - DNA, 25 bp, Artificial
  probe
  misc_feature (1)..(25): SEQ ID NO: 998; WAN024CF2_at; Start 530; Stop 554
gccataccacagatgttccagataa

SEQ ID NO: 115914 - DNA, 25 bp, Artificial
  probe
  misc_feature (1)..(25): SEQ ID NO: 998; WAN024CF2_at; Start 621; Stop 645
taaaaatcagtttcatcaagcaatg

SEQ ID NO: 115915 - DNA, 25 bp, Artificial
  probe
  misc_feature (1)..(25): SEQ ID NO: 998; WAN024CF2_at; Start 412; Stop 436
caccgaacactagggttgctcttgc

SEQ ID NO: 115916 - DNA, 25 bp, Artificial
  probe
  misc_feature (1)..(25): SEQ ID NO: 998; WAN024CF2_at; Start 406; Stop 430
gatattcaccgaacactagggttgc

SEQ ID NO: 115917 - DNA, 25 bp, Artificial
  probe
  misc_feature (1)..(25): SEQ ID NO: 998; WAN024CF2_at; Start 393; Stop 417
caagcgtaccttggatattcaccga

SEQ ID NO: 115918 - DNA, 25 bp, Artificial
  probe
  misc_feature (1)..(25): SEQ ID NO: 998; WAN024CF2_at; Start 378; Stop 402
tgaagaaggattctacaagcgtacc

SEQ ID NO: 115919 - DNA, 25 bp, Artificial
  probe
  misc_feature (1)..(25): SEQ ID NO: 998; WAN024CF2_at; Start 466; Stop 490
aagctgccagcggaatgctttcatc

SEQ ID NO: 115920 - DNA, 25 bp, Artificial
  probe
  misc_feature (1)..(25): SEQ ID NO: 998; WAN024CF2_at; Start 637; Stop 661
caagcaatgaaacacgccaaagtaa

SEQ ID NO: 115921 - DNA, 25 bp, Artificial
  probe
  misc_feature (1)..(25): SEQ ID NO: 998; WAN024CF2_at; Start 455; Stop 479
agcaattgcttaagctgccagcgga

SEQ ID NO: 115922 - DNA, 25 bp, Artificial
  probe
  misc_feature (1)..(25): SEQ ID NO: 7666; WAN024CF3_at; Start 49; Stop 73
gcgatagataaaactttgatattga

SEQ ID NO: 115923 - DNA, 25 bp, Artificial
  probe
  misc_feature (1)..(25): SEQ ID NO: 7666; WAN024CF3_at; Start 48; Stop 72
ggcgatagataaaactttgatattg

SEQ ID NO: 115924 - DNA, 25 bp, Artificial
  probe
  misc_feature (1)..(25): SEQ ID NO: 7666; WAN024CF3_at; Start 21; Stop 45
caataatgatattggcattagggaa

SEQ ID NO: 115925 - DNA, 25 bp, Artificial
  probe
  misc_feature (1)..(25): SEQ ID NO: 7666; WAN024CF3_at; Start 18; Stop 42
gatcaataatgatattggcattagg

SEQ ID NO: 115926 - DNA, 25 bp, Artificial
  probe
  misc_feature (1)..(25): SEQ ID NO: 7666; WAN024CF3_at; Start 43; Stop 67
gaaaaggcgatagataaaactttga

SEQ ID NO: 115927 - DNA, 25 bp, Artificial
  probe
  misc_feature (1)..(25): SEQ ID NO: 7666; WAN024CF3_at; Start 3; Stop 27
gtacaaggtggaagcgatcaataat

SEQ ID NO: 115928 - DNA, 25 bp, Artificial
  probe
  misc_feature (1)..(25): SEQ ID NO: 7666; WAN024CF3_at; Start 32; Stop 56
ttggcattagggaaaaggcgataga

SEQ ID NO: 115929 - DNA, 25 bp, Artificial
  probe
  misc_feature (1)..(25): SEQ ID NO: 7666; WAN024CF3_at; Start 51; Stop 75
gatagataaaactttgatattgagc

SEQ ID NO: 115930 - DNA, 25 bp, Artificial
  probe
  misc_feature (1)..(25): SEQ ID NO: 7666; WAN024CF3_at; Start 54; Stop 78
agataaaactttgatattgagcatt

SEQ ID NO: 115931 - DNA, 25 bp, Artificial
  probe
  misc_feature (1)..(25): SEQ ID NO: 7666; WAN024CF3_at; Start 36; Stop 60
cattagggaaaaggcgatagataaa

SEQ ID NO: 115932 - DNA, 25 bp, Artificial
  probe
  misc_feature (1)..(25): SEQ ID NO: 7666; WAN024CF3_at; Start 1; Stop 25
ttgtacaaggtggaagcgatcaata

SEQ ID NO: 115933 - DNA, 25 bp, Artificial
  probe
  misc_feature (1)..(25): SEQ ID NO: 7666; WAN024CF3_at; Start 29; Stop 53
atattggcattagggaaaaggcgat

SEQ ID NO: 115934 - DNA, 25 bp, Artificial
  probe
  misc_feature (1)..(25): SEQ ID NO: 7666; WAN024CF3_at; Start 10; Stop 34
gtggaagcgatcaataatgatattg

SEQ ID NO: 115935 - DNA, 25 bp, Artificial
  probe
  misc_feature (1)..(25): SEQ ID NO: 7666; WAN024CF3_at; Start 24; Stop 48
taatgatattggcattagggaaaag

SEQ ID NO: 115936 - DNA, 25 bp, Artificial
  probe
  misc_feature (1)..(25): SEQ ID NO: 7666; WAN024CF3_at; Start 53; Stop 77
tagataaaactttgatattgagcat

SEQ ID NO: 115937 - DNA, 25 bp, Artificial
  probe
  misc_feature (1)..(25): SEQ ID NO: 7666; WAN024CF3_at; Start 9; Stop 33
ggtggaagcgatcaataatgatatt

SEQ ID NO: 115938 - DNA, 25 bp, Artificial
  probe
  misc_feature (1)..(25): SEQ ID NO: 7666; WAN024CF3_at; Start 26; Stop 50
atgatattggcattagggaaaaggc

SEQ ID NO: 115939 - DNA, 25 bp, Artificial
  probe
  misc_feature (1)..(25): SEQ ID NO: 7666; WAN024CF3_at; Start 20; Stop 44
tcaataatgatattggcattaggga

SEQ ID NO: 115940 - DNA, 25 bp, Artificial
  probe
  misc_feature (1)..(25): SEQ ID NO: 7666; WAN024CF3_at; Start 6; Stop 30
caaggtggaagcgatcaataatgat

SEQ ID NO: 115941 - DNA, 25 bp, Artificial
  probe
  misc_feature (1)..(25): SEQ ID NO: 7666; WAN024CF3_at; Start 31; Stop 55
attggcattagggaaaaggcgatag

SEQ ID NO: 115942 - DNA, 25 bp, Artificial
  probe
  misc_feature (1)..(25): SEQ ID NO: 7666; WAN024CF3_at; Start 7; Stop 31
aaggtggaagcgatcaataatgata

SEQ ID NO: 115943 - DNA, 25 bp, Artificial
  probe
  misc_feature (1)..(25): SEQ ID NO: 7666; WAN024CF3_at; Start 12; Stop 36
ggaagcgatcaataatgatattggc

SEQ ID NO: 115944 - DNA, 25 bp, Artificial
  probe
  misc_feature (1)..(25): SEQ ID NO: 7666; WAN024CF3_at; Start 46; Stop 70
aaggcgatagataaaactttgatat

SEQ ID NO: 115945 - DNA, 25 bp, Artificial
  probe
  misc_feature (1)..(25): SEQ ID NO: 7666; WAN024CF3_at; Start 27; Stop 51
tgatattggcattagggaaaaggcg

SEQ ID NO: 115946 - DNA, 25 bp, Artificial
  probe
  misc_feature (1)..(25): SEQ ID NO: 7666; WAN024CF3_at; Start 28; Stop 52
gatattggcattagggaaaaggcga

SEQ ID NO: 115947 - DNA, 25 bp, Artificial
  probe
  misc_feature (1)..(25): SEQ ID NO: 7666; WAN024CF3_at; Start 11; Stop 35
tggaagcgatcaataatgatattgg

SEQ ID NO: 115948 - DNA, 25 bp, Artificial
  probe
  misc_feature (1)..(25): SEQ ID NO: 7666; WAN024CF3_at; Start 35; Stop 59
gcattagggaaaaggcgatagataa

SEQ ID NO: 115949 - DNA, 25 bp, Artificial
  probe
  misc_feature (1)..(25): SEQ ID NO: 7666; WAN024CF3_at; Start 45; Stop 69
aaaggcgatagataaaactttgata

SEQ ID NO: 115950 - DNA, 25 bp, Artificial
  probe
  misc_feature (1)..(25): SEQ ID NO: 7666; WAN024CF3_at; Start 33; Stop 57
tggcattagggaaaaggcgatagat

SEQ ID NO: 115951 - DNA, 25 bp, Artificial
  probe
  misc_feature (1)..(25): SEQ ID NO: 7666; WAN024CF3_at; Start 16; Stop 40
gcgatcaataatgatattggcatta

SEQ ID NO: 115952 - DNA, 25 bp, Artificial
  probe
  misc_feature (1)..(25): SEQ ID NO: 7666; WAN024CF3_at; Start 34; Stop 58
ggcattagggaaaaggcgatagata

SEQ ID NO: 115953 - DNA, 25 bp, Artificial
  probe
  misc_feature (1)..(25): SEQ ID NO: 7666; WAN024CF3_at; Start 4; Stop 28
tacaaggtggaagcgatcaataatg

SEQ ID NO: 115954 - DNA, 25 bp, Artificial
  probe
  misc_feature (1)..(25): SEQ ID NO: 7666; WAN024CF3_at; Start 2; Stop 26
tgtacaaggtggaagcgatcaataa

SEQ ID NO: 115955 - DNA, 25 bp, Artificial
  probe
  misc_feature (1)..(25): SEQ ID NO: 7666; WAN024CF3_at; Start 13; Stop 37
gaagcgatcaataatgatattggca

SEQ ID NO: 115956 - DNA, 25 bp, Artificial
  probe
  misc_feature (1)..(25): SEQ ID NO: 2890; WAN024CF4_at; Start 148; Stop 172
cgttgtcgtaactgtggctttccca

SEQ ID NO: 115957 - DNA, 25 bp, Artificial
  probe
  misc_feature (1)..(25): SEQ ID NO: 2890; WAN024CF4_at; Start 397; Stop 421
gaaatgtgtcactgctctcctagca

SEQ ID NO: 115958 - DNA, 25 bp, Artificial
  probe
  misc_feature (1)..(25): SEQ ID NO: 2890; WAN024CF4_at; Start 351; Stop 375
aatcatgcttttagctcgtaaaggc

SEQ ID NO: 115959 - DNA, 25 bp, Artificial
  probe
  misc_feature (1)..(25): SEQ ID NO: 2890; WAN024CF4_at; Start 409; Stop 433
tgctctcctagcagtgttcgtcgaa

SEQ ID NO: 115960 - DNA, 25 bp, Artificial
  probe
  misc_feature (1)..(25): SEQ ID NO: 2890; WAN024CF4_at; Start 853; Stop 877
aaagctgaagatcttcaccctgaag

SEQ ID NO: 115961 - DNA, 25 bp, Artificial
  probe
  misc_feature (1)..(25): SEQ ID NO: 2890; WAN024CF4_at; Start 440; Stop 464
tagagcgcatggaaccacactatcg

SEQ ID NO: 115962 - DNA, 25 bp, Artificial
  probe
  misc_feature (1)..(25): SEQ ID NO: 2890; WAN024CF4_at; Start 822; Stop 846
tatgaagtcacattggaagctattc

SEQ ID NO: 115963 - DNA, 25 bp, Artificial
  probe
  misc_feature (1)..(25): SEQ ID NO: 2890; WAN024CF4_at; Start 785; Stop 809
taaagcaacttgataaacagagcca

SEQ ID NO: 115964 - DNA, 25 bp, Artificial
  probe
  misc_feature (1)..(25): SEQ ID NO: 2890; WAN024CF4_at; Start 724; Stop 748
gatcgcttccaccttgtacaattag

SEQ ID NO: 115965 - DNA, 25 bp, Artificial
  probe
  misc_feature (1)..(25): SEQ ID NO: 2890; WAN024CF4_at; Start 498; Stop 522
cgagtttcgttcaattaagtctgtg

SEQ ID NO: 115966 - DNA, 25 bp, Artificial
  probe
  misc_feature (1)..(25): SEQ ID NO: 2890; WAN024CF4_at; Start 763; Stop 787
gacaattgtcgtatctctatcctaa

SEQ ID NO: 115967 - DNA, 25 bp, Artificial
  probe
  misc_feature (1)..(25): SEQ ID NO: 2890; WAN024CF4_at; Start 1001; Stop 1025
taaacgagcgcaatagtgaattact

SEQ ID NO: 115968 - DNA, 25 bp, Artificial
  probe
  misc_feature (1)..(25): SEQ ID NO: 2890; WAN024CF4_at; Start 424; Stop 448
gttcgtcgaacaatcttagagcgca

SEQ ID NO: 115969 - DNA, 25 bp, Artificial
  probe
  misc_feature (1)..(25): SEQ ID NO: 2890; WAN024CF4_at; Start 237; Stop 261
tgaactagagcttcgtaaacaacgc

SEQ ID NO: 115970 - DNA, 25 bp, Artificial
  probe
  misc_feature (1)..(25): SEQ ID NO: 2890; WAN024CF4_at; Start 180; Stop 204
taaggatggctttcgcaaaactcat

SEQ ID NO: 115971 - DNA, 25 bp, Artificial
  probe
  misc_feature (1)..(25): SEQ ID NO: 2890; WAN024CF4_at; Start 366; Stop 390
tcgtaaaggcttatctggtcagctt

SEQ ID NO: 115972 - DNA, 25 bp, Artificial
  probe
  misc_feature (1)..(25): SEQ ID NO: 2890; WAN024CF4_at; Start 907; Stop 931
tatatgactcgccaaaatgctgttg

SEQ ID NO: 115973 - DNA, 25 bp, Artificial
  probe
  misc_feature (1)..(25): SEQ ID NO: 2890; WAN024CF4_at; Start 163; Stop 187
ggctttcccacagttaataaggatg

SEQ ID NO: 115974 - DNA, 25 bp, Artificial
  probe
  misc_feature (1)..(25): SEQ ID NO: 2890; WAN024CF4_at; Start 1067; Stop 1091
tggatactgctattcaaacccttcg

SEQ ID NO: 115975 - DNA, 25 bp, Artificial
  probe
  misc_feature (1)..(25): SEQ ID NO: 2890; WAN024CF4_at; Start 194; Stop 218
gcaaaactcatgtacgactggcaag

SEQ ID NO: 115976 - DNA, 25 bp, Artificial
  probe
  misc_feature (1)..(25): SEQ ID NO: 2890; WAN024CF4_at; Start 531; Stop 555
tatctgttgtgacgctgaaacccac

SEQ ID NO: 115977 - DNA, 25 bp, Artificial
  probe
  misc_feature (1)..(25): SEQ ID NO: 2890; WAN024CF4_at; Start 1141; Stop 1165
ggtcctttagaaggcatcaatcgca

SEQ ID NO: 115978 - DNA, 25 bp, Artificial
  probe
  misc_feature (1)..(25): SEQ ID NO: 2890; WAN024CF4_at; Start 477; Stop 501
gcctaagcatctatgttttgacgag

SEQ ID NO: 115979 - DNA, 25 bp, Artificial
  probe
  misc_feature (1)..(25): SEQ ID NO: 2890; WAN024CF4_at; Start 455; Stop 479
cacactatcgtgtggctaagttgcc

SEQ ID NO: 115980 - DNA, 25 bp, Artificial
  probe
  misc_feature (1)..(25): SEQ ID NO: 2890; WAN024CF4_at; Start 562; Stop 586
gtcacaaagttacaggatcgtctat

SEQ ID NO: 115981 - DNA, 25 bp, Artificial
  probe
  misc_feature (1)..(25): SEQ ID NO: 2890; WAN024CF4_at; Start 985; Stop 1009
gatatcacgaaagccctaaacgagc

SEQ ID NO: 115982 - DNA, 25 bp, Artificial
  probe
  misc_feature (1)..(25): SEQ ID NO: 2890; WAN024CF4_at; Start 952; Stop 976
tccaagttcgctgaagtataccaaa

SEQ ID NO: 115983 - DNA, 25 bp, Artificial
  probe
  misc_feature (1)..(25): SEQ ID NO: 2890; WAN024CF4_at; Start 546; Stop 570
tgaaacccaccaaattgtcacaaag

SEQ ID NO: 115984 - DNA, 25 bp, Artificial
  probe
  misc_feature (1)..(25): SEQ ID NO: 2890; WAN024CF4_at; Start 208; Stop 232
cgactggcaagtttaaatgggagaa

SEQ ID NO: 115985 - DNA, 25 bp, Artificial
  probe
  misc_feature (1)..(25): SEQ ID NO: 2890; WAN024CF4_at; Start 73; Stop 97
gaagctgaacacaacaacgattctg

SEQ ID NO: 115986 - DNA, 25 bp, Artificial
  probe
  misc_feature (1)..(25): SEQ ID NO: 2890; WAN024CF4_at; Start 890; Stop 914
ttcgcggcgttaaacaatatatgac

SEQ ID NO: 115987 - DNA, 25 bp, Artificial
  probe
  misc_feature (1)..(25): SEQ ID NO: 2890; WAN024CF4_at; Start 1018; Stop 1042
gaattactagagtcaaccatcttag

SEQ ID NO: 115988 - DNA, 25 bp, Artificial
  probe
  misc_feature (1)..(25): SEQ ID NO: 2890; WAN024CF4_at; Start 577; Stop 601
gatcgtctatcacctaccattgttg

SEQ ID NO: 115989 - DNA, 25 bp, Artificial
  probe
  misc_feature (1)..(25): SEQ ID NO: 2890; WAN024CF4_at; Start 742; Stop 766
caattagctggtcgcgctttggaca

SEQ ID NO: 115990 - DNA, 25 bp, Artificial
  probe
  misc_feature (1)..(25): SEQ ID NO: 1285; WAN024CF5_at; Start 183; Stop 207
cattttactagagctattcaatcgc

SEQ ID NO: 115991 - DNA, 25 bp, Artificial
  probe
  misc_feature (1)..(25): SEQ ID NO: 1285; WAN024CF5_at; Start 147; Stop 171
ggttggcttagtcttcaacgctgct

SEQ ID NO: 115992 - DNA, 25 bp, Artificial
  probe
  misc_feature (1)..(25): SEQ ID NO: 1285; WAN024CF5_at; Start 37; Stop 61
tcaaacgctcaatcactggtgcttt

SEQ ID NO: 115993 - DNA, 25 bp, Artificial
  probe
  misc_feature (1)..(25): SEQ ID NO: 1285; WAN024CF5_at; Start 46; Stop 70
caatcactggtgcttttagcaatcg

SEQ ID NO: 115994 - DNA, 25 bp, Artificial
  probe
  misc_feature (1)..(25): SEQ ID NO: 1285; WAN024CF5_at; Start 57; Stop 81
gcttttagcaatcgttgtgattggc

SEQ ID NO: 115995 - DNA, 25 bp, Artificial
  probe
  misc_feature (1)..(25): SEQ ID NO: 1285; WAN024CF5_at; Start 193; Stop 217
gagctattcaatcgcattattggtg

SEQ ID NO: 115996 - DNA, 25 bp, Artificial
  probe
  misc_feature (1)..(25): SEQ ID NO: 1285; WAN024CF5_at; Start 157; Stop 181
gtcttcaacgctgctggagtaaaag

SEQ ID NO: 115997 - DNA, 25 bp, Artificial
  probe
  misc_feature (1)..(25): SEQ ID NO: 1285; WAN024CF5_at; Start 136; Stop 160
gcgattattgcggttggcttagtct

SEQ ID NO: 115998 - DNA, 25 bp, Artificial
  probe
  misc_feature (1)..(25): SEQ ID NO: 1285; WAN024CF5_at; Start 114; Stop 138
actgattggctttttaattattgcg

SEQ ID NO: 115999 - DNA, 25 bp, Artificial
  probe
  misc_feature (1)..(25): SEQ ID NO: 1285; WAN024CF5_at; Start 40; Stop 64
aacgctcaatcactggtgcttttag

SEQ ID NO: 116000 - DNA, 25 bp, Artificial
  probe
  misc_feature (1)..(25): SEQ ID NO: 1285; WAN024CF5_at; Start 35; Stop 59
tatcaaacgctcaatcactggtgct

SEQ ID NO: 116001 - DNA, 25 bp, Artificial
  probe
  misc_feature (1)..(25): SEQ ID NO: 1285; WAN024CF5_at; Start 91; Stop 115
ggcttcaagcgtgagtttagcaaac

SEQ ID NO: 116002 - DNA, 25 bp, Artificial
  probe
  misc_feature (1)..(25): SEQ ID NO: 1285; WAN024CF5_at; Start 161; Stop 185
tcaacgctgctggagtaaaagacat

SEQ ID NO: 116003 - DNA, 25 bp, Artificial
  probe
  misc_feature (1)..(25): SEQ ID NO: 1285; WAN024CF5_at; Start 52; Stop 76
ctggtgcttttagcaatcgttgtga

SEQ ID NO: 116004 - DNA, 25 bp, Artificial
  probe
  misc_feature (1)..(25): SEQ ID NO: 1285; WAN024CF5_at; Start 87; Stop 111
tcttggcttcaagcgtgagtttagc

SEQ ID NO: 116005 - DNA, 25 bp, Artificial
  probe
  misc_feature (1)..(25): SEQ ID NO: 1285; WAN024CF5_at; Start 100; Stop 124
cgtgagtttagcaaactgattggct

SEQ ID NO: 116006 - DNA, 25 bp, Artificial
  probe
  misc_feature (1)..(25): SEQ ID NO: 1285; WAN024CF5_at; Start 177; Stop 201
aaaagacattttactagagctattc

SEQ ID NO: 116007 - DNA, 25 bp, Artificial
  probe
  misc_feature (1)..(25): SEQ ID NO: 1285; WAN024CF5_at; Start 64; Stop 88
gcaatcgttgtgattggcttgtatc

SEQ ID NO: 116008 - DNA, 25 bp, Artificial
  probe
  misc_feature (1)..(25): SEQ ID NO: 1285; WAN024CF5_at; Start 195; Stop 219
gctattcaatcgcattattggtgct

SEQ ID NO: 116009 - DNA, 25 bp, Artificial
  probe
  misc_feature (1)..(25): SEQ ID NO: 1285; WAN024CF5_at; Start 187; Stop 211
ttactagagctattcaatcgcatta

SEQ ID NO: 116010 - DNA, 25 bp, Artificial
  probe
  misc_feature (1)..(25): SEQ ID NO: 1285; WAN024CF5_at; Start 155; Stop 179
tagtcttcaacgctgctggagtaaa

SEQ ID NO: 116011 - DNA, 25 bp, Artificial
  probe
  misc_feature (1)..(25): SEQ ID NO: 1285; WAN024CF5_at; Start 95; Stop 119
tcaagcgtgagtttagcaaactgat

SEQ ID NO: 116012 - DNA, 25 bp, Artificial
  probe
  misc_feature (1)..(25): SEQ ID NO: 1285; WAN024CF5_at; Start 24; Stop 48
taactggtttctatcaaacgctcaa

SEQ ID NO: 116013 - DNA, 25 bp, Artificial
  probe
  misc_feature (1)..(25): SEQ ID NO: 1285; WAN024CF5_at; Start 141; Stop 165
tattgcggttggcttagtcttcaac

SEQ ID NO: 116014 - DNA, 25 bp, Artificial
  probe
  misc_feature (1)..(25): SEQ ID NO: 1285; WAN024CF5_at; Start 81; Stop 105
cttgtatcttggcttcaagcgtgag

SEQ ID NO: 116015 - DNA, 25 bp, Artificial
  probe
  misc_feature (1)..(25): SEQ ID NO: 1285; WAN024CF5_at; Start 129; Stop 153
aattattgcgattattgcggttggc

SEQ ID NO: 116016 - DNA, 25 bp, Artificial
  probe
  misc_feature (1)..(25): SEQ ID NO: 1285; WAN024CF5_at; Start 69; Stop 93
cgttgtgattggcttgtatcttggc

SEQ ID NO: 116017 - DNA, 25 bp, Artificial
  probe
  misc_feature (1)..(25): SEQ ID NO: 1285; WAN024CF5_at; Start 152; Stop 176
gcttagtcttcaacgctgctggagt

SEQ ID NO: 116018 - DNA, 25 bp, Artificial
  probe
  misc_feature (1)..(25): SEQ ID NO: 1285; WAN024CF5_at; Start 150; Stop 174
tggcttagtcttcaacgctgctgga

SEQ ID NO: 116019 - DNA, 25 bp, Artificial
  probe
  misc_feature (1)..(25): SEQ ID NO: 1285; WAN024CF5_at; Start 165; Stop 189
cgctgctggagtaaaagacatttta

SEQ ID NO: 116020 - DNA, 25 bp, Artificial
  probe
  misc_feature (1)..(25): SEQ ID NO: 1285; WAN024CF5_at; Start 75; Stop 99
gattggcttgtatcttggcttcaag

SEQ ID NO: 116021 - DNA, 25 bp, Artificial
  probe
  misc_feature (1)..(25): SEQ ID NO: 1285; WAN024CF5_at; Start 103; Stop 127
gagtttagcaaactgattggctttt

SEQ ID NO: 116022 - DNA, 25 bp, Artificial
  probe
  misc_feature (1)..(25): SEQ ID NO: 1285; WAN024CF5_at; Start 22; Stop 46
tataactggtttctatcaaacgctc

SEQ ID NO: 116023 - DNA, 25 bp, Artificial
  probe
  misc_feature (1)..(25): SEQ ID NO: 1285; WAN024CF5_at; Start 33; Stop 57
tctatcaaacgctcaatcactggtg

SEQ ID NO: 116024 - DNA, 25 bp, Artificial
  probe
  misc_feature (1)..(25): SEQ ID NO: 2258; WAN024CF6_at; Start 322; Stop 346
tccgattgtgatgatatgtatgacg

SEQ ID NO: 116025 - DNA, 25 bp, Artificial
  probe
  misc_feature (1)..(25): SEQ ID NO: 2258; WAN024CF6_at; Start 363; Stop 387
tgaagaaacgggtgctttaggcgaa

SEQ ID NO: 116026 - DNA, 25 bp, Artificial
  probe
  misc_feature (1)..(25): SEQ ID NO: 2258; WAN024CF6_at; Start 175; Stop 199
gaatacacttccattggcgaactca

SEQ ID NO: 116027 - DNA, 25 bp, Artificial
  probe
  misc_feature (1)..(25): SEQ ID NO: 2258; WAN024CF6_at; Start 62; Stop 86
gtgcgtggtttacctttcccattga

SEQ ID NO: 116028 - DNA, 25 bp, Artificial
  probe
  misc_feature (1)..(25): SEQ ID NO: 2258; WAN024CF6_at; Start 28; Stop 52
aatttaggcaaatacaatgagggcg

SEQ ID NO: 116029 - DNA, 25 bp, Artificial
  probe
  misc_feature (1)..(25): SEQ ID NO: 2258; WAN024CF6_at; Start 36; Stop 60
caaatacaatgagggcgaattggtc

SEQ ID NO: 116030 - DNA, 25 bp, Artificial
  probe
  misc_feature (1)..(25): SEQ ID NO: 2258; WAN024CF6_at; Start 411; Stop 435
tattgattatcaagcctatggtcgg

SEQ ID NO: 116031 - DNA, 25 bp, Artificial
  probe
  misc_feature (1)..(25): SEQ ID NO: 2258; WAN024CF6_at; Start 352; Stop 376
cgctactacattgaagaaacgggtg

SEQ ID NO: 116032 - DNA, 25 bp, Artificial
  probe
  misc_feature (1)..(25): SEQ ID NO: 2258; WAN024CF6_at; Start 132; Stop 156
ggaatacgccattcatgactacgag

SEQ ID NO: 116033 - DNA, 25 bp, Artificial
  probe
  misc_feature (1)..(25): SEQ ID NO: 2258; WAN024CF6_at; Start 163; Stop 187
tttacggttgacgaatacacttcca

SEQ ID NO: 116034 - DNA, 25 bp, Artificial
  probe
  misc_feature (1)..(25): SEQ ID NO: 2258; WAN024CF6_at; Start 72; Stop 96
tacctttcccattgactttgaggaa

SEQ ID NO: 116035 - DNA, 25 bp, Artificial
  probe
  misc_feature (1)..(25): SEQ ID NO: 2258; WAN024CF6_at; Start 117; Stop 141
gaatgatgaatatgaggaatacgcc

SEQ ID NO: 116036 - DNA, 25 bp, Artificial
  probe
  misc_feature (1)..(25): SEQ ID NO: 2258; WAN024CF6_at; Start 375; Stop 399
tgctttaggcgaagtaccagctagt

SEQ ID NO: 116037 - DNA, 25 bp, Artificial
  probe
  misc_feature (1)..(25): SEQ ID NO: 2258; WAN024CF6_at; Start 206; Stop 230
tatgggaaatggtatcggaattacc

SEQ ID NO: 116038 - DNA, 25 bp, Artificial
  probe
  misc_feature (1)..(25): SEQ ID NO: 2258; WAN024CF6_at; Start 427; Stop 451
tatggtcgggatttagacctttcag

SEQ ID NO: 116039 - DNA, 25 bp, Artificial
  probe
  misc_feature (1)..(25): SEQ ID NO: 2258; WAN024CF6_at; Start 3; Stop 27
ggacgatatgcaagtctatattgcg

SEQ ID NO: 116040 - DNA, 25 bp, Artificial
  probe
  misc_feature (1)..(25): SEQ ID NO: 2258; WAN024CF6_at; Start 343; Stop 367
gacgtggcacgctactacattgaag

SEQ ID NO: 116041 - DNA, 25 bp, Artificial
  probe
  misc_feature (1)..(25): SEQ ID NO: 2258; WAN024CF6_at; Start 246; Stop 270
ggagctatctgctctgctcactcat

SEQ ID NO: 116042 - DNA, 25 bp, Artificial
  probe
  misc_feature (1)..(25): SEQ ID NO: 2258; WAN024CF6_at; Start 283; Stop 307
gaagaactaagcgaacatcaagagg

SEQ ID NO: 116043 - DNA, 25 bp, Artificial
  probe
  misc_feature (1)..(25): SEQ ID NO: 2258; WAN024CF6_at; Start 261; Stop 285
gctcactcatttttcaagcattgaa

SEQ ID NO: 116044 - DNA, 25 bp, Artificial
  probe
  misc_feature (1)..(25): SEQ ID NO: 2258; WAN024CF6_at; Start 235; Stop 259
gaattacaatcggagctatctgctc

SEQ ID NO: 116045 - DNA, 25 bp, Artificial
  probe
  misc_feature (1)..(25): SEQ ID NO: 2258; WAN024CF6_at; Start 455; Stop 479
cgtttatctcaaccaatcatgggat

SEQ ID NO: 116046 - DNA, 25 bp, Artificial
  probe
  misc_feature (1)..(25): SEQ ID NO: 2258; WAN024CF6_at; Start 307; Stop 331
gatattatcattcattccgattgtg

SEQ ID NO: 116047 - DNA, 25 bp, Artificial
  probe
  misc_feature (1)..(25): SEQ ID NO: 2258; WAN024CF6_at; Start 190; Stop 214
ggcgaactcaatcgactatgggaaa

SEQ ID NO: 116048 - DNA, 25 bp, Artificial
  probe
  misc_feature (1)..(25): SEQ ID NO: 2258; WAN024CF6_at; Start 90; Stop 114
tgaggaagtcaaagagaaaatcggc

SEQ ID NO: 116049 - DNA, 25 bp, Artificial
  probe
  misc_feature (1)..(25): SEQ ID NO: 2258; WAN024CF6_at; Start 226; Stop 250
ttacccgaagaattacaatcggagc

SEQ ID NO: 116050 - DNA, 25 bp, Artificial
  probe
  misc_feature (1)..(25): SEQ ID NO: 2258; WAN024CF6_at; Start 274; Stop 298
tcaagcattgaagaactaagcgaac

SEQ ID NO: 116051 - DNA, 25 bp, Artificial
  probe
  misc_feature (1)..(25): SEQ ID NO: 2258; WAN024CF6_at; Start 13; Stop 37
caagtctatattgcgaatttaggca

SEQ ID NO: 116052 - DNA, 25 bp, Artificial
  probe
  misc_feature (1)..(25): SEQ ID NO: 2258; WAN024CF6_at; Start 145; Stop 169
catgactacgagttaccctttacgg

SEQ ID NO: 116053 - DNA, 25 bp, Artificial
  probe
  misc_feature (1)..(25): SEQ ID NO: 2258; WAN024CF6_at; Start 331; Stop 355
gatgatatgtatgacgtggcacgct

SEQ ID NO: 116054 - DNA, 25 bp, Artificial
  probe
  misc_feature (1)..(25): SEQ ID NO: 2258; WAN024CF6_at; Start 442; Stop 466
gacctttcaggaacgtttatctcaa

SEQ ID NO: 116055 - DNA, 25 bp, Artificial
  probe
  misc_feature (1)..(25): SEQ ID NO: 2258; WAN024CF6_at; Start 385; Stop 409
gaagtaccagctagtcttcaaaact

SEQ ID NO: 116056 - DNA, 25 bp, Artificial
  probe
  misc_feature (1)..(25): SEQ ID NO: 2258; WAN024CF6_at; Start 293; Stop 317
gcgaacatcaagaggatattatcat

SEQ ID NO: 116057 - DNA, 25 bp, Artificial
  probe
  misc_feature (1)..(25): SEQ ID NO: 2258; WAN024CF6_at; Start 103; Stop 127
gagaaaatcggcttgaatgatgaat

SEQ ID NO: 116058 - DNA, 25 bp, Artificial
  probe
  misc_feature (1)..(25): SEQ ID NO: 2564; WAN024CF7_at; Start 318; Stop 342
ggctttcacatggtttatgtctaca

SEQ ID NO: 116059 - DNA, 25 bp, Artificial
  probe
  misc_feature (1)..(25): SEQ ID NO: 2564; WAN024CF7_at; Start 125; Stop 149
tacgaagctataccagtatctggtc

SEQ ID NO: 116060 - DNA, 25 bp, Artificial
  probe
  misc_feature (1)..(25): SEQ ID NO: 2564; WAN024CF7_at; Start 457; Stop 481
caagaagccattacagcagttagga

SEQ ID NO: 116061 - DNA, 25 bp, Artificial
  probe
  misc_feature (1)..(25): SEQ ID NO: 2564; WAN024CF7_at; Start 26; Stop 50
aatctgtcggtacattactactggc

SEQ ID NO: 116062 - DNA, 25 bp, Artificial
  probe
  misc_feature (1)..(25): SEQ ID NO: 2564; WAN024CF7_at; Start 240; Stop 264
tgcagtgatgatacttggcaacttg

SEQ ID NO: 116063 - DNA, 25 bp, Artificial
  probe
  misc_feature (1)..(25): SEQ ID NO: 2564; WAN024CF7_at; Start 114; Stop 138
catgaagaaaatacgaagctatacc

SEQ ID NO: 116064 - DNA, 25 bp, Artificial
  probe
  misc_feature (1)..(25): SEQ ID NO: 2564; WAN024CF7_at; Start 69; Stop 93
ggtggctcaatcagctacccctatt

SEQ ID NO: 116065 - DNA, 25 bp, Artificial
  probe
  misc_feature (1)..(25): SEQ ID NO: 2564; WAN024CF7_at; Start 443; Stop 467
gcagaaaccagccacaagaagccat

SEQ ID NO: 116066 - DNA, 25 bp, Artificial
  probe
  misc_feature (1)..(25): SEQ ID NO: 2564; WAN024CF7_at; Start 306; Stop 330
tgggattcctgtggctttcacatgg

SEQ ID NO: 116067 - DNA, 25 bp, Artificial
  probe
  misc_feature (1)..(25): SEQ ID NO: 2564; WAN024CF7_at; Start 154; Stop 178
gaaaaggtactgtattctatcaatg

SEQ ID NO: 116068 - DNA, 25 bp, Artificial
  probe
  misc_feature (1)..(25): SEQ ID NO: 2564; WAN024CF7_at; Start 177; Stop 201
tgattttagacttccgtttcccata

SEQ ID NO: 116069 - DNA, 25 bp, Artificial
  probe
  misc_feature (1)..(25): SEQ ID NO: 2564; WAN024CF7_at; Start 99; Stop 123
tgaaaggattgattacatgaagaaa

SEQ ID NO: 116070 - DNA, 25 bp, Artificial
  probe
  misc_feature (1)..(25): SEQ ID NO: 2564; WAN024CF7_at; Start 348; Stop 372
ttttgatggtaaaaagccttatgga

SEQ ID NO: 116071 - DNA, 25 bp, Artificial
  probe
  misc_feature (1)..(25): SEQ ID NO: 2564; WAN024CF7_at; Start 407; Stop 431
caaagctgacctatgcaggaaaaaa

SEQ ID NO: 116072 - DNA, 25 bp, Artificial
  probe
  misc_feature (1)..(25): SEQ ID NO: 2564; WAN024CF7_at; Start 225; Stop 249
tgtcgtgtcactctttgcagtgatg

SEQ ID NO: 116073 - DNA, 25 bp, Artificial
  probe
  misc_feature (1)..(25): SEQ ID NO: 2564; WAN024CF7_at; Start 197; Stop 221
ccataacctttacgcaaatgacatg

SEQ ID NO: 116074 - DNA, 25 bp, Artificial
  probe
  misc_feature (1)..(25): SEQ ID NO: 2564; WAN024CF7_at; Start 401; Stop 425
tgcgaccaaagctgacctatgcagg

SEQ ID NO: 116075 - DNA, 25 bp, Artificial
  probe
  misc_feature (1)..(25): SEQ ID NO: 2564; WAN024CF7_at; Start 45; Stop 69
actggcagattttctattttacggg

SEQ ID NO: 116076 - DNA, 25 bp, Artificial
  probe
  misc_feature (1)..(25): SEQ ID NO: 2564; WAN024CF7_at; Start 286; Stop 310
ggagcatttctcaaatactttggga

SEQ ID NO: 116077 - DNA, 25 bp, Artificial
  probe
  misc_feature (1)..(25): SEQ ID NO: 2564; WAN024CF7_at; Start 378; Stop 402
gaagtctgtcattgcttatgcactg

SEQ ID NO: 116078 - DNA, 25 bp, Artificial
  probe
  misc_feature (1)..(25): SEQ ID NO: 2564; WAN024CF7_at; Start 333; Stop 357
tatgtctacaaaaacttttgatggt

SEQ ID NO: 116079 - DNA, 25 bp, Artificial
  probe
  misc_feature (1)..(25): SEQ ID NO: 2564; WAN024CF7_at; Start 211; Stop 235
caaatgacatggtttgtcgtgtcac

SEQ ID NO: 116080 - DNA, 25 bp, Artificial
  probe
  misc_feature (1)..(25): SEQ ID NO: 2564; WAN024CF7_at; Start 430; Stop 454
aaagtaacgcttggcagaaaccagc

SEQ ID NO: 116081 - DNA, 25 bp, Artificial
  probe
  misc_feature (1)..(25): SEQ ID NO: 2564; WAN024CF7_at; Start 364; Stop 388
ccttatggatttttgaagtctgtca

SEQ ID NO: 116082 - DNA, 25 bp, Artificial
  probe
  misc_feature (1)..(25): SEQ ID NO: 2564; WAN024CF7_at; Start 463; Stop 487
gccattacagcagttaggagtgaat

SEQ ID NO: 116083 - DNA, 25 bp, Artificial
  probe
  misc_feature (1)..(25): SEQ ID NO: 2564; WAN024CF7_at; Start 80; Stop 104
cagctacccctattttttatgaaag

SEQ ID NO: 116084 - DNA, 25 bp, Artificial
  probe
  misc_feature (1)..(25): SEQ ID NO: 2564; WAN024CF7_at; Start 141; Stop 165
tatctggtctgtggaaaaggtactg

SEQ ID NO: 116085 - DNA, 25 bp, Artificial
  probe
  misc_feature (1)..(25): SEQ ID NO: 2564; WAN024CF7_at; Start 11; Stop 35
tgaaatcgtctattaaatctgtcgg

SEQ ID NO: 116086 - DNA, 25 bp, Artificial
  probe
  misc_feature (1)..(25): SEQ ID NO: 2564; WAN024CF7_at; Start 268; Stop 292
cctctttccatgatagagggagcat

SEQ ID NO: 116087 - DNA, 25 bp, Artificial
  probe
  misc_feature (1)..(25): SEQ ID NO: 2564; WAN024CF7_at; Start 393; Stop 417
ttatgcactgcgaccaaagctgacc

SEQ ID NO: 116088 - DNA, 25 bp, Artificial
  probe
  misc_feature (1)..(25): SEQ ID NO: 2564; WAN024CF7_at; Start 472; Stop 496
gcagttaggagtgaattttatggca

SEQ ID NO: 116089 - DNA, 25 bp, Artificial
  probe
  misc_feature (1)..(25): SEQ ID NO: 2564; WAN024CF7_at; Start 30; Stop 54
tgtcggtacattactactggcagat

SEQ ID NO: 116090 - DNA, 25 bp, Artificial
  probe
  misc_feature (1)..(25): SEQ ID NO: 2564; WAN024CF7_at; Start 301; Stop 325
tactttgggattcctgtggctttca

SEQ ID NO: 116091 - DNA, 25 bp, Artificial
  probe
  misc_feature (1)..(25): SEQ ID NO: 2564; WAN024CF7_at; Start 275; Stop 299
ccatgatagagggagcatttctcaa

SEQ ID NO: 116092 - DNA, 25 bp, Artificial
  probe
  misc_feature (1)..(25): SEQ ID NO: 3917; WAN024CF8_at; Start 2067; Stop 2091
tgtagatttagacgaagcatggagc

SEQ ID NO: 116093 - DNA, 25 bp, Artificial
  probe
  misc_feature (1)..(25): SEQ ID NO: 3917; WAN024CF8_at; Start 1922; Stop 1946
tacaggttgcggacttggtacttcc

SEQ ID NO: 116094 - DNA, 25 bp, Artificial
  probe
  misc_feature (1)..(25): SEQ ID NO: 3917; WAN024CF8_at; Start 1780; Stop 1804
gaattacgggttgagaatacgccac

SEQ ID NO: 116095 - DNA, 25 bp, Artificial
  probe
  misc_feature (1)..(25): SEQ ID NO: 3917; WAN024CF8_at; Start 1353; Stop 1377
gaaacctgctcttgccagtcaaggg

SEQ ID NO: 116096 - DNA, 25 bp, Artificial
  probe
  misc_feature (1)..(25): SEQ ID NO: 3917; WAN024CF8_at; Start 1336; Stop 1360
ggacgcaatgtctatctgaaacctg

SEQ ID NO: 116097 - DNA, 25 bp, Artificial
  probe
  misc_feature (1)..(25): SEQ ID NO: 3917; WAN024CF8_at; Start 1321; Stop 1345
tacagcttagatactggacgcaatg

SEQ ID NO: 116098 - DNA, 25 bp, Artificial
  probe
  misc_feature (1)..(25): SEQ ID NO: 3917; WAN024CF8_at; Start 944; Stop 968
tggataaccacgcttggcaaagtga

SEQ ID NO: 116099 - DNA, 25 bp, Artificial
  probe
  misc_feature (1)..(25): SEQ ID NO: 3917; WAN024CF8_at; Start 2136; Stop 2160
tcgggctggtcgtgctatgaacgct

SEQ ID NO: 116100 - DNA, 25 bp, Artificial
  probe
  misc_feature (1)..(25): SEQ ID NO: 3917; WAN024CF8_at; Start 2293; Stop 2317
gacccagaggacgaaaacaatcaga

SEQ ID NO: 116101 - DNA, 25 bp, Artificial
  probe
  misc_feature (1)..(25): SEQ ID NO: 3917; WAN024CF8_at; Start 696; Stop 720
gcctactcgctgtttggtggaagaa

SEQ ID NO: 116102 - DNA, 25 bp, Artificial
  probe
  misc_feature (1)..(25): SEQ ID NO: 3917; WAN024CF8_at; Start 1535; Stop 1559
aaaccttgccagagatttcccatga

SEQ ID NO: 116103 - DNA, 25 bp, Artificial
  probe
  misc_feature (1)..(25): SEQ ID NO: 3917; WAN024CF8_at; Start 2117; Stop 2141
cactatctatgaagctggttcgggc

SEQ ID NO: 116104 - DNA, 25 bp, Artificial
  probe
  misc_feature (1)..(25): SEQ ID NO: 3917; WAN024CF8_at; Start 2326; Stop 2350
cgtgatttggaaaacgggcaatgcc

SEQ ID NO: 116105 - DNA, 25 bp, Artificial
  probe
  misc_feature (1)..(25): SEQ ID NO: 3917; WAN024CF8_at; Start 357; Stop 381
taagttgcttctcaacgatcaggag

SEQ ID NO: 116106 - DNA, 25 bp, Artificial
  probe
  misc_feature (1)..(25): SEQ ID NO: 3917; WAN024CF8_at; Start 261; Stop 285
caaagcggttgcctatgacaaaatc

SEQ ID NO: 116107 - DNA, 25 bp, Artificial
  probe
  misc_feature (1)..(25): SEQ ID NO: 3917; WAN024CF8_at; Start 1516; Stop 1540
gaacgtggcagatggaaagaaacct

SEQ ID NO: 116108 - DNA, 25 bp, Artificial
  probe
  misc_feature (1)..(25): SEQ ID NO: 3917; WAN024CF8_at; Start 279; Stop 303
caaaatcgaccaacagacagacgct

SEQ ID NO: 116109 - DNA, 25 bp, Artificial
  probe
  misc_feature (1)..(25): SEQ ID NO: 3917; WAN024CF8_at; Start 2173; Stop 2197
gtgacccaaaatacagacgacctct

SEQ ID NO: 116110 - DNA, 25 bp, Artificial
  probe
  misc_feature (1)..(25): SEQ ID NO: 3917; WAN024CF8_at; Start 969; Stop 993
taatgaaaccagctccaatgtggcg

SEQ ID NO: 116111 - DNA, 25 bp, Artificial
  probe
  misc_feature (1)..(25): SEQ ID NO: 3917; WAN024CF8_at; Start 2276; Stop 2300
tagccttttttggtgtagacccaga

SEQ ID NO: 116112 - DNA, 25 bp, Artificial
  probe
  misc_feature (1)..(25): SEQ ID NO: 3917; WAN024CF8_at; Start 555; Stop 579
caggttagataaggacgacttcggc

SEQ ID NO: 116113 - DNA, 25 bp, Artificial
  probe
  misc_feature (1)..(25): SEQ ID NO: 3917; WAN024CF8_at; Start 2425; Stop 2449
gataccagaccacctgtgcgaaaag

SEQ ID NO: 116114 - DNA, 25 bp, Artificial
  probe
  misc_feature (1)..(25): SEQ ID NO: 3917; WAN024CF8_at; Start 1719; Stop 1743
tagaaaagccattcgtgcagtaacc

SEQ ID NO: 116115 - DNA, 25 bp, Artificial
  probe
  misc_feature (1)..(25): SEQ ID NO: 3917; WAN024CF8_at; Start 984; Stop 1008
caatgtggcggaagctctggaaagt

SEQ ID NO: 116116 - DNA, 25 bp, Artificial
  probe
  misc_feature (1)..(25): SEQ ID NO: 3917; WAN024CF8_at; Start 538; Stop 562
cgtcgtttcaaaatccgcaggttag

SEQ ID NO: 116117 - DNA, 25 bp, Artificial
  probe
  misc_feature (1)..(25): SEQ ID NO: 3917; WAN024CF8_at; Start 738; Stop 762
aatccagcaggaagatgaaaccgtc

SEQ ID NO: 116118 - DNA, 25 bp, Artificial
  probe
  misc_feature (1)..(25): SEQ ID NO: 3917; WAN024CF8_at; Start 789; Stop 813
cattgtcggagaactggacttcccg

SEQ ID NO: 116119 - DNA, 25 bp, Artificial
  probe
  misc_feature (1)..(25): SEQ ID NO: 3917; WAN024CF8_at; Start 1192; Stop 1216
gaagaatttttacctgccagcaagc

SEQ ID NO: 116120 - DNA, 25 bp, Artificial
  probe
  misc_feature (1)..(25): SEQ ID NO: 3917; WAN024CF8_at; Start 1500; Stop 1524
tgtagacccaaaagcagaacgtggc

SEQ ID NO: 116121 - DNA, 25 bp, Artificial
  probe
  misc_feature (1)..(25): SEQ ID NO: 3917; WAN024CF8_at; Start 1805; Stop 1829
taagtaccagtatagccgaccatat

SEQ ID NO: 116122 - DNA, 25 bp, Artificial
  probe
  misc_feature (1)..(25): SEQ ID NO: 3917; WAN024CF8_at; Start 588; Stop 612
tgaacacctttacggacagacaggc

SEQ ID NO: 116123 - DNA, 25 bp, Artificial
  probe
  misc_feature (1)..(25): SEQ ID NO: 3917; WAN024CF8_at; Start 215; Stop 239
tacgttctgcacaagagcgttccaa

SEQ ID NO: 116124 - DNA, 25 bp, Artificial
  probe
  misc_feature (1)..(25): SEQ ID NO: 3917; WAN024CF8_at; Start 244; Stop 268
gaagtcactggcaagctcaaagcgg

SEQ ID NO: 116125 - DNA, 25 bp, Artificial
  probe
  misc_feature (1)..(25): SEQ ID NO: 3917; WAN024CF8_at; Start 2397; Stop 2421
tgtatttgaagaactgctccatgcc

SEQ ID NO: 116126 - DNA, 25 bp, Artificial
  probe
  misc_feature (1)..(25): SEQ ID NO: 3851; WAN024CF9_at; Start 1392; Stop 1416
tctacagcggaaacttggacgttcc

SEQ ID NO: 116127 - DNA, 25 bp, Artificial
  probe
  misc_feature (1)..(25): SEQ ID NO: 3851; WAN024CF9_at; Start 689; Stop 713
tcatgccccattccgatagtcaagg

SEQ ID NO: 116128 - DNA, 25 bp, Artificial
  probe
  misc_feature (1)..(25): SEQ ID NO: 3851; WAN024CF9_at; Start 1763; Stop 1787
aaaggcgaaaaaccattgcgaagcg

SEQ ID NO: 116129 - DNA, 25 bp, Artificial
  probe
  misc_feature (1)..(25): SEQ ID NO: 3851; WAN024CF9_at; Start 418; Stop 442
accttagctggtgtgagtgcaaacg

SEQ ID NO: 116130 - DNA, 25 bp, Artificial
  probe
  misc_feature (1)..(25): SEQ ID NO: 3851; WAN024CF9_at; Start 1940; Stop 1964
aagagcgtccagcagttaagtccga

SEQ ID NO: 116131 - DNA, 25 bp, Artificial
  probe
  misc_feature (1)..(25): SEQ ID NO: 3851; WAN024CF9_at; Start 1580; Stop 1604
ccaaagacagaatggtagacactgc

SEQ ID NO: 116132 - DNA, 25 bp, Artificial
  probe
  misc_feature (1)..(25): SEQ ID NO: 3851; WAN024CF9_at; Start 2123; Stop 2147
gaagtagaccaccaatcaaaaccgc

SEQ ID NO: 116133 - DNA, 25 bp, Artificial
  probe
  misc_feature (1)..(25): SEQ ID NO: 3851; WAN024CF9_at; Start 1623; Stop 1647
ggttaaagatttgccgaccaatgca

SEQ ID NO: 116134 - DNA, 25 bp, Artificial
  probe
  misc_feature (1)..(25): SEQ ID NO: 3851; WAN024CF9_at; Start 1746; Stop 1770
caaggaacagcaggaacaaaggcga

SEQ ID NO: 116135 - DNA, 25 bp, Artificial
  probe
  misc_feature (1)..(25): SEQ ID NO: 3851; WAN024CF9_at; Start 41; Stop 65
cgctgaaacgtctaggtaaagtggc

SEQ ID NO: 116136 - DNA, 25 bp, Artificial
  probe
  misc_feature (1)..(25): SEQ ID NO: 3851; WAN024CF9_at; Start 705; Stop 729
tagtcaaggcaaggacagcgtggac

SEQ ID NO: 116137 - DNA, 25 bp, Artificial
  probe
  misc_feature (1)..(25): SEQ ID NO: 3851; WAN024CF9_at; Start 1407; Stop 1431
tggacgttccatgactactctaggg

SEQ ID NO: 116138 - DNA, 25 bp, Artificial
  probe
  misc_feature (1)..(25): SEQ ID NO: 3851; WAN024CF9_at; Start 816; Stop 840
tattgaccgtgtggaaagcctgctc

SEQ ID NO: 116139 - DNA, 25 bp, Artificial
  probe
  misc_feature (1)..(25): SEQ ID NO: 3851; WAN024CF9_at; Start 720; Stop 744
cagcgtggacttaatcagagatagc

SEQ ID NO: 116140 - DNA, 25 bp, Artificial
  probe
  misc_feature (1)..(25): SEQ ID NO: 3851; WAN024CF9_at; Start 1672; Stop 1696
tccaaagtaaaagagaatgtccgtg

SEQ ID NO: 116141 - DNA, 25 bp, Artificial
  probe
  misc_feature (1)..(25): SEQ ID NO: 3851; WAN024CF9_at; Start 1974; Stop 1998
tccaaaagtggaacgccaaggcaat

SEQ ID NO: 116142 - DNA, 25 bp, Artificial
  probe
  misc_feature (1)..(25): SEQ ID NO: 3851; WAN024CF9_at; Start 371; Stop 395
tagacttcatttccgctacagcaga

SEQ ID NO: 116143 - DNA, 25 bp, Artificial
  probe
  misc_feature (1)..(25): SEQ ID NO: 3851; WAN024CF9_at; Start 1551; Stop 1575
cggtcaaaccatcggtacagtagct

SEQ ID NO: 116144 - DNA, 25 bp, Artificial
  probe
  misc_feature (1)..(25): SEQ ID NO: 3851; WAN024CF9_at; Start 1709; Stop 1733
gtatttctcaaaccaaagcggacag

SEQ ID NO: 116145 - DNA, 25 bp, Artificial
  probe
  misc_feature (1)..(25): SEQ ID NO: 3851; WAN024CF9_at; Start 1531; Stop 1555
tcaacacttggaaaacgtatcggtc

SEQ ID NO: 116146 - DNA, 25 bp, Artificial
  probe
  misc_feature (1)..(25): SEQ ID NO: 3851; WAN024CF9_at; Start 1500; Stop 1524
agatcactcccgaccagacggaaag

SEQ ID NO: 116147 - DNA, 25 bp, Artificial
  probe
  misc_feature (1)..(25): SEQ ID NO: 3851; WAN024CF9_at; Start 26; Stop 50
taaaatcaaactggacgctgaaacg

SEQ ID NO: 116148 - DNA, 25 bp, Artificial
  probe
  misc_feature (1)..(25): SEQ ID NO: 3851; WAN024CF9_at; Start 1268; Stop 1292
caggaatctacttcaagctgggcga

SEQ ID NO: 116149 - DNA, 25 bp, Artificial
  probe
  misc_feature (1)..(25): SEQ ID NO: 3851; WAN024CF9_at; Start 102; Stop 126
tcttttagccatgctgggaacggtg

SEQ ID NO: 116150 - DNA, 25 bp, Artificial
  probe
  misc_feature (1)..(25): SEQ ID NO: 3851; WAN024CF9_at; Start 158; Stop 182
tcaatgtggcaaatgaatacagccg

SEQ ID NO: 116151 - DNA, 25 bp, Artificial
  probe
  misc_feature (1)..(25): SEQ ID NO: 3851; WAN024CF9_at; Start 1248; Stop 1272
tctacagattgtgacctttgcagga

SEQ ID NO: 116152 - DNA, 25 bp, Artificial
  probe
  misc_feature (1)..(25): SEQ ID NO: 3851; WAN024CF9_at; Start 1924; Stop 1948
tctcaacaagccaaacaagagcgtc

SEQ ID NO: 116153 - DNA, 25 bp, Artificial
  probe
  misc_feature (1)..(25): SEQ ID NO: 3851; WAN024CF9_at; Start 766; Stop 790
caaccgtggctactgcttcaataca

SEQ ID NO: 116154 - DNA, 25 bp, Artificial
  probe
  misc_feature (1)..(25): SEQ ID NO: 3851; WAN024CF9_at; Start 328; Stop 352
gtttccaatgcgacaggttacttag

SEQ ID NO: 116155 - DNA, 25 bp, Artificial
  probe
  misc_feature (1)..(25): SEQ ID NO: 3851; WAN024CF9_at; Start 1340; Stop 1364
gaagtcgtgtgatgagaaaacctcg

SEQ ID NO: 116156 - DNA, 25 bp, Artificial
  probe
  misc_feature (1)..(25): SEQ ID NO: 3851; WAN024CF9_at; Start 1355; Stop 1379
gaaaacctcgtatgcttatgcacgc

SEQ ID NO: 116157 - DNA, 25 bp, Artificial
  probe
  misc_feature (1)..(25): SEQ ID NO: 3851; WAN024CF9_at; Start 516; Stop 540
tacgggactgataaagagagaaacc

SEQ ID NO: 116158 - DNA, 25 bp, Artificial
  probe
  misc_feature (1)..(25): SEQ ID NO: 3851; WAN024CF9_at; Start 1140; Stop 1164
taccattttgacacgagctggaatc

SEQ ID NO: 116159 - DNA, 25 bp, Artificial
  probe
  misc_feature (1)..(25): SEQ ID NO: 3851; WAN024CF9_at; Start 172; Stop 196
gaatacagccgatacccacttgaaa

SEQ ID NO: 116160 - DNA, 25 bp, Artificial
  probe
  misc_feature (1)..(25): SEQ ID NO: 3418; WAN024CFA_at; Start 544; Stop 568
aagaccgtccactctgcttatatag

SEQ ID NO: 116161 - DNA, 25 bp, Artificial
  probe
  misc_feature (1)..(25): SEQ ID NO: 3418; WAN024CFA_at; Start 408; Stop 432
tgatacagtacgcaaagatattcct

SEQ ID NO: 116162 - DNA, 25 bp, Artificial
  probe
  misc_feature (1)..(25): SEQ ID NO: 3418; WAN024CFA_at; Start 118; Stop 142
cgtgtctactataaggtcaatcctc

SEQ ID NO: 116163 - DNA, 25 bp, Artificial
  probe
  misc_feature (1)..(25): SEQ ID NO: 3418; WAN024CFA_at; Start 351; Stop 375
taatcgaatggaaagtctaaaaggc

SEQ ID NO: 116164 - DNA, 25 bp, Artificial
  probe
  misc_feature (1)..(25): SEQ ID NO: 3418; WAN024CFA_at; Start 446; Stop 470
taagaggatttcagatatggacggt

SEQ ID NO: 116165 - DNA, 25 bp, Artificial
  probe
  misc_feature (1)..(25): SEQ ID NO: 3418; WAN024CFA_at; Start 195; Stop 219
tgcgatattcaagcactttacagct

SEQ ID NO: 116166 - DNA, 25 bp, Artificial
  probe
  misc_feature (1)..(25): SEQ ID NO: 3418; WAN024CFA_at; Start 510; Stop 534
tgtagaccagctcattacagaggga

SEQ ID NO: 116167 - DNA, 25 bp, Artificial
  probe
  misc_feature (1)..(25): SEQ ID NO: 3418; WAN024CFA_at; Start 762; Stop 786
actttcctactatgtgaatgacggg

SEQ ID NO: 116168 - DNA, 25 bp, Artificial
  probe
  misc_feature (1)..(25): SEQ ID NO: 3418; WAN024CFA_at; Start 597; Stop 621
tatggtactggttaagaatccgacc

SEQ ID NO: 116169 - DNA, 25 bp, Artificial
  probe
  misc_feature (1)..(25): SEQ ID NO: 3418; WAN024CFA_at; Start 843; Stop 867
caatcgtaaggataatcaagtcacg

SEQ ID NO: 116170 - DNA, 25 bp, Artificial
  probe
  misc_feature (1)..(25): SEQ ID NO: 3418; WAN024CFA_at; Start 883; Stop 907
gagtatatcgaccagcagaccaaag

SEQ ID NO: 116171 - DNA, 25 bp, Artificial
  probe
  misc_feature (1)..(25): SEQ ID NO: 3418; WAN024CFA_at; Start 256; Stop 280
gaaaaggaatacgttgatactcatc

SEQ ID NO: 116172 - DNA, 25 bp, Artificial
  probe
  misc_feature (1)..(25): SEQ ID NO: 3418; WAN024CFA_at; Start 461; Stop 485
tatggacggtagagccaactggcga

SEQ ID NO: 116173 - DNA, 25 bp, Artificial
  probe
  misc_feature (1)..(25): SEQ ID NO: 3418; WAN024CFA_at; Start 828; Stop 852
ggtaaatcctattcacaatcgtaag

SEQ ID NO: 116174 - DNA, 25 bp, Artificial
  probe
  misc_feature (1)..(25): SEQ ID NO: 3418; WAN024CFA_at; Start 429; Stop 453
tcctgtatcgtcttctgtaagagga

SEQ ID NO: 116175 - DNA, 25 bp, Artificial
  probe
  misc_feature (1)..(25): SEQ ID NO: 3418; WAN024CFA_at; Start 138; Stop 162
tcctcataaaaaggttgtgattgcc

SEQ ID NO: 116176 - DNA, 25 bp, Artificial
  probe
  misc_feature (1)..(25): SEQ ID NO: 3418; WAN024CFA_at; Start 525; Stop 549
tacagagggagaaaatacaaagacc

SEQ ID NO: 116177 - DNA, 25 bp, Artificial
  probe
  misc_feature (1)..(25): SEQ ID NO: 3418; WAN024CFA_at; Start 322; Stop 346
tcatgggagcaatccgataagtcca

SEQ ID NO: 116178 - DNA, 25 bp, Artificial
  probe
  misc_feature (1)..(25): SEQ ID NO: 3418; WAN024CFA_at; Start 474; Stop 498
gccaactggcgacaatgagtttaat

SEQ ID NO: 116179 - DNA, 25 bp, Artificial
  probe
  misc_feature (1)..(25): SEQ ID NO: 3418; WAN024CFA_at; Start 744; Stop 768
tacagcgacagccagtgaactttcc

SEQ ID NO: 116180 - DNA, 25 bp, Artificial
  probe
  misc_feature (1)..(25): SEQ ID NO: 3418; WAN024CFA_at; Start 495; Stop 519
taatgtaacctacagtgtagaccag

SEQ ID NO: 116181 - DNA, 25 bp, Artificial
  probe
  misc_feature (1)..(25): SEQ ID NO: 3418; WAN024CFA_at; Start 871; Stop 895
tcgctgacagtggagtatatcgacc

SEQ ID NO: 116182 - DNA, 25 bp, Artificial
  probe
  misc_feature (1)..(25): SEQ ID NO: 3418; WAN024CFA_at; Start 385; Stop 409
gatgaacttcaagctctcaatgttg

SEQ ID NO: 116183 - DNA, 25 bp, Artificial
  probe
  misc_feature (1)..(25): SEQ ID NO: 3418; WAN024CFA_at; Start 780; Stop 804
tgacgggatattaaaaccaatcgga

SEQ ID NO: 116184 - DNA, 25 bp, Artificial
  probe
  misc_feature (1)..(25): SEQ ID NO: 3418; WAN024CFA_at; Start 897; Stop 921
gcagaccaaagcaacgcaggtatct

SEQ ID NO: 116185 - DNA, 25 bp, Artificial
  probe
  misc_feature (1)..(25): SEQ ID NO: 3418; WAN024CFA_at; Start 366; Stop 390
tctaaaaggctatctgacagatgaa

SEQ ID NO: 116186 - DNA, 25 bp, Artificial
  probe
  misc_feature (1)..(25): SEQ ID NO: 3418; WAN024CFA_at; Start 308; Stop 332
cgaaagtctactattcatgggagca

SEQ ID NO: 116187 - DNA, 25 bp, Artificial
  probe
  misc_feature (1)..(25): SEQ ID NO: 3418; WAN024CFA_at; Start 813; Stop 837
catctttcaagaactggtaaatcct

SEQ ID NO: 116188 - DNA, 25 bp, Artificial
  probe
  misc_feature (1)..(25): SEQ ID NO: 3418; WAN024CFA_at; Start 731; Stop 755
tcaagctctatcctacagcgacagc

SEQ ID NO: 116189 - DNA, 25 bp, Artificial
  probe
  misc_feature (1)..(25): SEQ ID NO: 3418; WAN024CFA_at; Start 615; Stop 639
tccgaccattaccaacatacctaag

SEQ ID NO: 116190 - DNA, 25 bp, Artificial
  probe
  misc_feature (1)..(25): SEQ ID NO: 3418; WAN024CFA_at; Start 176; Stop 200
tagggcttagtttcagctttgcgat

SEQ ID NO: 116191 - DNA, 25 bp, Artificial
  probe
  misc_feature (1)..(25): SEQ ID NO: 3418; WAN024CFA_at; Start 653; Stop 677
aaccaaaagccattgaaagtgaggg

SEQ ID NO: 116192 - DNA, 25 bp, Artificial
  probe
  misc_feature (1)..(25): SEQ ID NO: 3418; WAN024CFA_at; Start 676; Stop 700
gggacggttgattccattacaacca

SEQ ID NO: 116193 - DNA, 25 bp, Artificial
  probe
  misc_feature (1)..(25): SEQ ID NO: 3418; WAN024CFA_at; Start 858; Stop 882
tcaagtcacggtatcgctgacagtg

SEQ ID NO: 116194 - DNA, 25 bp, Artificial
  probe
  misc_feature (1)..(25): SEQ ID NO: 1149; WAN024CFB_at; Start 718; Stop 742
tgtagcggactgacacaatggacgt

SEQ ID NO: 116195 - DNA, 25 bp, Artificial
  probe
  misc_feature (1)..(25): SEQ ID NO: 1149; WAN024CFB_at; Start 211; Stop 235
aacatacttcttgcgattatacagg

SEQ ID NO: 116196 - DNA, 25 bp, Artificial
  probe
  misc_feature (1)..(25): SEQ ID NO: 1149; WAN024CFB_at; Start 675; Stop 699
gcgatacgtttacggtggagcttcc

SEQ ID NO: 116197 - DNA, 25 bp, Artificial
  probe
  misc_feature (1)..(25): SEQ ID NO: 1149; WAN024CFB_at; Start 876; Stop 900
tactcatgttgggatataccttggc

SEQ ID NO: 116198 - DNA, 25 bp, Artificial
  probe
  misc_feature (1)..(25): SEQ ID NO: 1149; WAN024CFB_at; Start 159; Stop 183
taagcctatggtagaaaaatatgcc

SEQ ID NO: 116199 - DNA, 25 bp, Artificial
  probe
  misc_feature (1)..(25): SEQ ID NO: 1149; WAN024CFB_at; Start 918; Stop 942
tgcaggcgacccaatcggttatgcc

SEQ ID NO: 116200 - DNA, 25 bp, Artificial
  probe
  misc_feature (1)..(25): SEQ ID NO: 1149; WAN024CFB_at; Start 640; Stop 664
gccatcatggacgaagcactgaaat

SEQ ID NO: 116201 - DNA, 25 bp, Artificial
  probe
  misc_feature (1)..(25): SEQ ID NO: 1149; WAN024CFB_at; Start 227; Stop 251
ttatacaggtggaatcgggcggtac

SEQ ID NO: 116202 - DNA, 25 bp, Artificial
  probe
  misc_feature (1)..(25): SEQ ID NO: 1149; WAN024CFB_at; Start 386; Stop 410
tagaatcggttatccagtcctacaa

SEQ ID NO: 116203 - DNA, 25 bp, Artificial
  probe
  misc_feature (1)..(25): SEQ ID NO: 1149; WAN024CFB_at; Start 939; Stop 963
tgccgacttaacaagcccctactgg

SEQ ID NO: 116204 - DNA, 25 bp, Artificial
  probe
  misc_feature (1)..(25): SEQ ID NO: 1149; WAN024CFB_at; Start 792; Stop 816
tgtgacccagcatatcccactatcg

SEQ ID NO: 116205 - DNA, 25 bp, Artificial
  probe
  misc_feature (1)..(25): SEQ ID NO: 1149; WAN024CFB_at; Start 656; Stop 680
cactgaaatatgagggctggcgata

SEQ ID NO: 116206 - DNA, 25 bp, Artificial
  probe
  misc_feature (1)..(25): SEQ ID NO: 1149; WAN024CFB_at; Start 85; Stop 109
tcagatgaacaggacagcggaattt

SEQ ID NO: 116207 - DNA, 25 bp, Artificial
  probe
  misc_feature (1)..(25): SEQ ID NO: 1149; WAN024CFB_at; Start 628; Stop 652
gatacggtacaagccatcatggacg

SEQ ID NO: 116208 - DNA, 25 bp, Artificial
  probe
  misc_feature (1)..(25): SEQ ID NO: 1149; WAN024CFB_at; Start 245; Stop 269
gcggtactgcggaagatgttatgca

SEQ ID NO: 116209 - DNA, 25 bp, Artificial
  probe
  misc_feature (1)..(25): SEQ ID NO: 1149; WAN024CFB_at; Start 809; Stop 833
cactatcggaagcacaagctggcga

SEQ ID NO: 116210 - DNA, 25 bp, Artificial
  probe
  misc_feature (1)..(25): SEQ ID NO: 1149; WAN024CFB_at; Start 285; Stop 309
cggtcttccacctaattcattgagt

SEQ ID NO: 116211 - DNA, 25 bp, Artificial
  probe
  misc_feature (1)..(25): SEQ ID NO: 1149; WAN024CFB_at; Start 549; Stop 573
gggctggcgatacaactatggcaat

SEQ ID NO: 116212 - DNA, 25 bp, Artificial
  probe
  misc_feature (1)..(25): SEQ ID NO: 1149; WAN024CFB_at; Start 778; Stop 802
caacagcaatatgatgtgacccagc

SEQ ID NO: 116213 - DNA, 25 bp, Artificial
  probe
  misc_feature (1)..(25): SEQ ID NO: 1149; WAN024CFB_at; Start 692; Stop 716
gagcttccccgactacttcttttga

SEQ ID NO: 116214 - DNA, 25 bp, Artificial
  probe
  misc_feature (1)..(25): SEQ ID NO: 1149; WAN024CFB_at; Start 733; Stop 757
caatggacgtatggaaaagctggaa

SEQ ID NO: 116215 - DNA, 25 bp, Artificial
  probe
  misc_feature (1)..(25): SEQ ID NO: 1149; WAN024CFB_at; Start 369; Stop 393
aaggctcagtgtagatttagaatcg

SEQ ID NO: 116216 - DNA, 25 bp, Artificial
  probe
  misc_feature (1)..(25): SEQ ID NO: 1149; WAN024CFB_at; Start 145; Stop 169
gaagtgctggctcataagcctatgg

SEQ ID NO: 116217 - DNA, 25 bp, Artificial
  probe
  misc_feature (1)..(25): SEQ ID NO: 1149; WAN024CFB_at; Start 755; Stop 779
gaattaacttaccacgaaccgcaca

SEQ ID NO: 116218 - DNA, 25 bp, Artificial
  probe
  misc_feature (1)..(25): SEQ ID NO: 1149; WAN024CFB_at; Start 592; Stop 616
gtaacgcagtatcttgtcacaacag

SEQ ID NO: 116219 - DNA, 25 bp, Artificial
  probe
  misc_feature (1)..(25): SEQ ID NO: 1149; WAN024CFB_at; Start 903; Stop 927
taaccgtatgtttcatgcaggcgac

SEQ ID NO: 116220 - DNA, 25 bp, Artificial
  probe
  misc_feature (1)..(25): SEQ ID NO: 1149; WAN024CFB_at; Start 263; Stop 287
ttatgcagtcctcggaatccctcgg

SEQ ID NO: 116221 - DNA, 25 bp, Artificial
  probe
  misc_feature (1)..(25): SEQ ID NO: 1149; WAN024CFB_at; Start 131; Stop 155
tgaatgtttccgcagaagtgctggc

SEQ ID NO: 116222 - DNA, 25 bp, Artificial
  probe
  misc_feature (1)..(25): SEQ ID NO: 1149; WAN024CFB_at; Start 481; Stop 505
ttctcaaaagagtattcaggtggcg

SEQ ID NO: 116223 - DNA, 25 bp, Artificial
  probe
  misc_feature (1)..(25): SEQ ID NO: 1149; WAN024CFB_at; Start 311; Stop 335
cagaagaatccattaagcaaggtgt

SEQ ID NO: 116224 - DNA, 25 bp, Artificial
  probe
  misc_feature (1)..(25): SEQ ID NO: 1149; WAN024CFB_at; Start 846; Stop 870
tcattctacctataacgctggctct

SEQ ID NO: 116225 - DNA, 25 bp, Artificial
  probe
  misc_feature (1)..(25): SEQ ID NO: 1149; WAN024CFB_at; Start 576; Stop 600
gttttatgtgcaactggtaacgcag

SEQ ID NO: 116226 - DNA, 25 bp, Artificial
  probe
  misc_feature (1)..(25): SEQ ID NO: 1149; WAN024CFB_at; Start 496; Stop 520
tcaggtggcgaaaaagtgtcttacc

SEQ ID NO: 116227 - DNA, 25 bp, Artificial
  probe
  misc_feature (1)..(25): SEQ ID NO: 1149; WAN024CFB_at; Start 611; Stop 635
caacagagtttgatgatgatacggt

SEQ ID NO: 116228 - DNA, 25 bp, Artificial
  probe
  misc_feature (1)..(25): SEQ ID NO: 781; WAN024CFC_at; Start 581; Stop 605
cattagaagcattggaactcgaaca

SEQ ID NO: 116229 - DNA, 25 bp, Artificial
  probe
  misc_feature (1)..(25): SEQ ID NO: 781; WAN024CFC_at; Start 1468; Stop 1492
tatggttggaatgtgacggactgta

SEQ ID NO: 116230 - DNA, 25 bp, Artificial
  probe
  misc_feature (1)..(25): SEQ ID NO: 781; WAN024CFC_at; Start 116; Stop 140
gtacaacgaggacggataatacgct

SEQ ID NO: 116231 - DNA, 25 bp, Artificial
  probe
  misc_feature (1)..(25): SEQ ID NO: 781; WAN024CFC_at; Start 1116; Stop 1140
cccgcttctgcgatattatgtggat

SEQ ID NO: 116232 - DNA, 25 bp, Artificial
  probe
  misc_feature (1)..(25): SEQ ID NO: 781; WAN024CFC_at; Start 1011; Stop 1035
gagaattgaaaatcccctccctctg

SEQ ID NO: 116233 - DNA, 25 bp, Artificial
  probe
  misc_feature (1)..(25): SEQ ID NO: 781; WAN024CFC_at; Start 1527; Stop 1551
tgttagtaccccagcagattttcgg

SEQ ID NO: 116234 - DNA, 25 bp, Artificial
  probe
  misc_feature (1)..(25): SEQ ID NO: 781; WAN024CFC_at; Start 785; Stop 809
gacagcgtcttgcatatatacgtct

SEQ ID NO: 116235 - DNA, 25 bp, Artificial
  probe
  misc_feature (1)..(25): SEQ ID NO: 781; WAN024CFC_at; Start 1836; Stop 1860
tactaccggtgaacctgtttgccag

SEQ ID NO: 116236 - DNA, 25 bp, Artificial
  probe
  misc_feature (1)..(25): SEQ ID NO: 781; WAN024CFC_at; Start 137; Stop 161
cgcttttagaacgtcagagaggaat

SEQ ID NO: 116237 - DNA, 25 bp, Artificial
  probe
  misc_feature (1)..(25): SEQ ID NO: 781; WAN024CFC_at; Start 1282; Stop 1306
gcagagtataccattcacatcgaag

SEQ ID NO: 116238 - DNA, 25 bp, Artificial
  probe
  misc_feature (1)..(25): SEQ ID NO: 781; WAN024CFC_at; Start 1440; Stop 1464
gatacgctatggctgtgaacaagga

SEQ ID NO: 116239 - DNA, 25 bp, Artificial
  probe
  misc_feature (1)..(25): SEQ ID NO: 781; WAN024CFC_at; Start 190; Stop 214
cagtgggaaaatacgaaggtgaaca

SEQ ID NO: 116240 - DNA, 25 bp, Artificial
  probe
  misc_feature (1)..(25): SEQ ID NO: 781; WAN024CFC_at; Start 1743; Stop 1767
ccctgctcggtgtattcaagaatat

SEQ ID NO: 116241 - DNA, 25 bp, Artificial
  probe
  misc_feature (1)..(25): SEQ ID NO: 781; WAN024CFC_at; Start 811; Stop 835
tatagtggcgtactgcatttgcgag

SEQ ID NO: 116242 - DNA, 25 bp, Artificial
  probe
  misc_feature (1)..(25): SEQ ID NO: 781; WAN024CFC_at; Start 489; Stop 513
tatgtgtgtgacgaactttaccgaa

SEQ ID NO: 116243 - DNA, 25 bp, Artificial
  probe
  misc_feature (1)..(25): SEQ ID NO: 781; WAN024CFC_at; Start 528; Stop 552
tacggtaatagagggaaacgatgac

SEQ ID NO: 116244 - DNA, 25 bp, Artificial
  probe
  misc_feature (1)..(25): SEQ ID NO: 781; WAN024CFC_at; Start 1203; Stop 1227
tctgctgcaagaaaagtatcatgtg

SEQ ID NO: 116245 - DNA, 25 bp, Artificial
  probe
  misc_feature (1)..(25): SEQ ID NO: 781; WAN024CFC_at; Start 1096; Stop 1120
ttagaaatctccgacagtgacccgc

SEQ ID NO: 116246 - DNA, 25 bp, Artificial
  probe
  misc_feature (1)..(25): SEQ ID NO: 781; WAN024CFC_at; Start 989; Stop 1013
caaagctattgccacagagagagag

SEQ ID NO: 116247 - DNA, 25 bp, Artificial
  probe
  misc_feature (1)..(25): SEQ ID NO: 781; WAN024CFC_at; Start 1669; Stop 1693
gatgctcctaaatattgtgcgaaca

SEQ ID NO: 116248 - DNA, 25 bp, Artificial
  probe
  misc_feature (1)..(25): SEQ ID NO: 781; WAN024CFC_at; Start 1686; Stop 1710
tgcgaacatcgtagacactcaattg

SEQ ID NO: 116249 - DNA, 25 bp, Artificial
  probe
  misc_feature (1)..(25): SEQ ID NO: 781; WAN024CFC_at; Start 1858; Stop 1882
cagccccgtcgtccaaatagtcgga

SEQ ID NO: 116250 - DNA, 25 bp, Artificial
  probe
  misc_feature (1)..(25): SEQ ID NO: 781; WAN024CFC_at; Start 712; Stop 736
ttttattcatcaacacatcgaggtc

SEQ ID NO: 116251 - DNA, 25 bp, Artificial
  probe
  misc_feature (1)..(25): SEQ ID NO: 781; WAN024CFC_at; Start 292; Stop 316
ctgatttctgcaaaagatggcgtac

SEQ ID NO: 116252 - DNA, 25 bp, Artificial
  probe
  misc_feature (1)..(25): SEQ ID NO: 781; WAN024CFC_at; Start 1633; Stop 1657
tatgcgccacaggaatatctttcac

SEQ ID NO: 116253 - DNA, 25 bp, Artificial
  probe
  misc_feature (1)..(25): SEQ ID NO: 781; WAN024CFC_at; Start 210; Stop 234
gaacatcatagacacgccaggacat

SEQ ID NO: 116254 - DNA, 25 bp, Artificial
  probe
  misc_feature (1)..(25): SEQ ID NO: 781; WAN024CFC_at; Start 507; Stop 531
taccgaatctgaacaatgggatacg

SEQ ID NO: 116255 - DNA, 25 bp, Artificial
  probe
  misc_feature (1)..(25): SEQ ID NO: 781; WAN024CFC_at; Start 227; Stop 251
caggacatatggatttcttagcaga

SEQ ID NO: 116256 - DNA, 25 bp, Artificial
  probe
  misc_feature (1)..(25): SEQ ID NO: 781; WAN024CFC_at; Start 307; Stop 331
gatggcgtacaagcacaaactcgta

SEQ ID NO: 116257 - DNA, 25 bp, Artificial
  probe
  misc_feature (1)..(25): SEQ ID NO: 781; WAN024CFC_at; Start 1728; Stop 1752
tcttagtggagaaatccctgctcgg

SEQ ID NO: 116258 - DNA, 25 bp, Artificial
  probe
  misc_feature (1)..(25): SEQ ID NO: 781; WAN024CFC_at; Start 1034; Stop 1058
tgctgcaaacgactgttgaaccgag

SEQ ID NO: 116259 - DNA, 25 bp, Artificial
  probe
  misc_feature (1)..(25): SEQ ID NO: 781; WAN024CFC_at; Start 1069; Stop 1093
caaagggaaatgttacttgatgcac

SEQ ID NO: 116260 - DNA, 25 bp, Artificial
  probe
  misc_feature (1)..(25): SEQ ID NO: 781; WAN024CFC_at; Start 1050; Stop 1074
tgaaccgagcaaacctcaacaaagg

SEQ ID NO: 116261 - DNA, 25 bp, Artificial
  probe
  misc_feature (1)..(25): SEQ ID NO: 781; WAN024CFC_at; Start 1187; Stop 1211
tggaagtgacttgtgctctgctgca

SEQ ID NO: 116262 - DNA, 25 bp, Artificial
  probe
  misc_feature (1)..(25): SEQ ID NO: 2046; WAN024CFD_at; Start 102; Stop 126
gattgaaattgacccacggtactta

SEQ ID NO: 116263 - DNA, 25 bp, Artificial
  probe
  misc_feature (1)..(25): SEQ ID NO: 2046; WAN024CFD_at; Start 307; Stop 331
gaatctttagccagcggtatcaacg

SEQ ID NO: 116264 - DNA, 25 bp, Artificial
  probe
  misc_feature (1)..(25): SEQ ID NO: 2046; WAN024CFD_at; Start 144; Stop 168
agggcaacaccccagcatacaagtt

SEQ ID NO: 116265 - DNA, 25 bp, Artificial
  probe
  misc_feature (1)..(25): SEQ ID NO: 2046; WAN024CFD_at; Start 272; Stop 296
tggatagctttacagacaaagaact

SEQ ID NO: 116266 - DNA, 25 bp, Artificial
  probe
  misc_feature (1)..(25): SEQ ID NO: 2046; WAN024CFD_at; Start 80; Stop 104
ctcgtgaacaagtgggagcattgat

SEQ ID NO: 116267 - DNA, 25 bp, Artificial
  probe
  misc_feature (1)..(25): SEQ ID NO: 2046; WAN024CFD_at; Start 137; Stop 161
aaaataaagggcaacaccccagcat

SEQ ID NO: 116268 - DNA, 25 bp, Artificial
  probe
  misc_feature (1)..(25): SEQ ID NO: 2046; WAN024CFD_at; Start 125; Stop 149
taactaatattgaaaataaagggca

SEQ ID NO: 116269 - DNA, 25 bp, Artificial
  probe
  misc_feature (1)..(25): SEQ ID NO: 2046; WAN024CFD_at; Start 74; Stop 98
gtttaactcgtgaacaagtgggagc

SEQ ID NO: 116270 - DNA, 25 bp, Artificial
  probe
  misc_feature (1)..(25): SEQ ID NO: 2046; WAN024CFD_at; Start 2; Stop 26
tgcgtaaaaaagaagataaatatga

SEQ ID NO: 116271 - DNA, 25 bp, Artificial
  probe
  misc_feature (1)..(25): SEQ ID NO: 2046; WAN024CFD_at; Start 98; Stop 122
cattgattgaaattgacccacggta

SEQ ID NO: 116272 - DNA, 25 bp, Artificial
  probe
  misc_feature (1)..(25): SEQ ID NO: 2046; WAN024CFD_at; Start 316; Stop 340
gccagcggtatcaacgaagcaagaa

SEQ ID NO: 116273 - DNA, 25 bp, Artificial
  probe
  misc_feature (1)..(25): SEQ ID NO: 2046; WAN024CFD_at; Start 151; Stop 175
caccccagcatacaagttctttatg

SEQ ID NO: 116274 - DNA, 25 bp, Artificial
  probe
  misc_feature (1)..(25): SEQ ID NO: 2046; WAN024CFD_at; Start 40; Stop 64
ggtttagccattaaagaagctcgat

SEQ ID NO: 116275 - DNA, 25 bp, Artificial
  probe
  misc_feature (1)..(25): SEQ ID NO: 2046; WAN024CFD_at; Start 327; Stop 351
caacgaagcaagaaacatcgaagac

SEQ ID NO: 116276 - DNA, 25 bp, Artificial
  probe
  misc_feature (1)..(25): SEQ ID NO: 2046; WAN024CFD_at; Start 284; Stop 308
cagacaaagaactatccttaatgga

SEQ ID NO: 116277 - DNA, 25 bp, Artificial
  probe
  misc_feature (1)..(25): SEQ ID NO: 2046; WAN024CFD_at; Start 222; Stop 246
tgctaataacttggtaaaaagcacc

SEQ ID NO: 116278 - DNA, 25 bp, Artificial
  probe
  misc_feature (1)..(25): SEQ ID NO: 2046; WAN024CFD_at; Start 58; Stop 82
gctcgattgaaacgaggtttaactc

SEQ ID NO: 116279 - DNA, 25 bp, Artificial
  probe
  misc_feature (1)..(25): SEQ ID NO: 2046; WAN024CFD_at; Start 200; Stop 224
ccgttgatgaatttttcttacctgc

SEQ ID NO: 116280 - DNA, 25 bp, Artificial
  probe
  misc_feature (1)..(25): SEQ ID NO: 2046; WAN024CFD_at; Start 172; Stop 196
tatgaccttgtatcgttacttcatg

SEQ ID NO: 116281 - DNA, 25 bp, Artificial
  probe
  misc_feature (1)..(25): SEQ ID NO: 2046; WAN024CFD_at; Start 299; Stop 323
ccttaatggaatctttagccagcgg

SEQ ID NO: 116282 - DNA, 25 bp, Artificial
  probe
  misc_feature (1)..(25): SEQ ID NO: 2046; WAN024CFD_at; Start 95; Stop 119
gagcattgattgaaattgacccacg

SEQ ID NO: 116283 - DNA, 25 bp, Artificial
  probe
  misc_feature (1)..(25): SEQ ID NO: 2046; WAN024CFD_at; Start 185; Stop 209
cgttacttcatgtttccgttgatga

SEQ ID NO: 116284 - DNA, 25 bp, Artificial
  probe
  misc_feature (1)..(25): SEQ ID NO: 2046; WAN024CFD_at; Start 163; Stop 187
caagttctttatgaccttgtatcgt

SEQ ID NO: 116285 - DNA, 25 bp, Artificial
  probe
  misc_feature (1)..(25): SEQ ID NO: 2046; WAN024CFD_at; Start 47; Stop 71
ccattaaagaagctcgattgaaacg

SEQ ID NO: 116286 - DNA, 25 bp, Artificial
  probe
  misc_feature (1)..(25): SEQ ID NO: 2046; WAN024CFD_at; Start 242; Stop 266
gcacccgacgattacagatagagaa

SEQ ID NO: 116287 - DNA, 25 bp, Artificial
  probe
  misc_feature (1)..(25): SEQ ID NO: 2046; WAN024CFD_at; Start 312; Stop 336
tttagccagcggtatcaacgaagca

SEQ ID NO: 116288 - DNA, 25 bp, Artificial
  probe
  misc_feature (1)..(25): SEQ ID NO: 2046; WAN024CFD_at; Start 264; Stop 288
gaaatacatggatagctttacagac

SEQ ID NO: 116289 - DNA, 25 bp, Artificial
  probe
  misc_feature (1)..(25): SEQ ID NO: 2046; WAN024CFD_at; Start 25; Stop 49
gattttagagcctttggtttagcca

SEQ ID NO: 116290 - DNA, 25 bp, Artificial
  probe
  misc_feature (1)..(25): SEQ ID NO: 2046; WAN024CFD_at; Start 13; Stop 37
gaagataaatatgattttagagcct

SEQ ID NO: 116291 - DNA, 25 bp, Artificial
  probe
  misc_feature (1)..(25): SEQ ID NO: 2046; WAN024CFD_at; Start 207; Stop 231
tgaatttttcttacctgctaataac

SEQ ID NO: 116292 - DNA, 25 bp, Artificial
  probe
  misc_feature (1)..(25): SEQ ID NO: 2046; WAN024CFD_at; Start 322; Stop 346
ggtatcaacgaagcaagaaacatcg

SEQ ID NO: 116293 - DNA, 25 bp, Artificial
  probe
  misc_feature (1)..(25): SEQ ID NO: 2046; WAN024CFD_at; Start 32; Stop 56
gagcctttggtttagccattaaaga

SEQ ID NO: 116294 - DNA, 25 bp, Artificial
  probe
  misc_feature (1)..(25): SEQ ID NO: 2046; WAN024CFD_at; Start 236; Stop 260
taaaaagcacccgacgattacagat

SEQ ID NO: 116295 - DNA, 25 bp, Artificial
  probe
  misc_feature (1)..(25): SEQ ID NO: 2046; WAN024CFD_at; Start 256; Stop 280
cagatagagaaatacatggatagct

SEQ ID NO: 116296 - DNA, 25 bp, Artificial
  probe
  misc_feature (1)..(25): SEQ ID NO: 832; WAN024CFE_at; Start 256; Stop 280
cgtgagttgccagacaagaaacgtg

SEQ ID NO: 116297 - DNA, 25 bp, Artificial
  probe
  misc_feature (1)..(25): SEQ ID NO: 832; WAN024CFE_at; Start 375; Stop 399
cagtggactagccttaattaaaaag

SEQ ID NO: 116298 - DNA, 25 bp, Artificial
  probe
  misc_feature (1)..(25): SEQ ID NO: 832; WAN024CFE_at; Start 359; Stop 383
tctatcggcatagaaccagtggact

SEQ ID NO: 116299 - DNA, 25 bp, Artificial
  probe
  misc_feature (1)..(25): SEQ ID NO: 832; WAN024CFE_at; Start 54; Stop 78
taaacgtgctatggaagacgagcga

SEQ ID NO: 116300 - DNA, 25 bp, Artificial
  probe
  misc_feature (1)..(25): SEQ ID NO: 832; WAN024CFE_at; Start 345; Stop 369
gaaccgttctactgtctatcggcat

SEQ ID NO: 116301 - DNA, 25 bp, Artificial
  probe
  misc_feature (1)..(25): SEQ ID NO: 832; WAN024CFE_at; Start 316; Stop 340
gattcagaaattgcagacctgttga

SEQ ID NO: 116302 - DNA, 25 bp, Artificial
  probe
  misc_feature (1)..(25): SEQ ID NO: 832; WAN024CFE_at; Start 81; Stop 105
gaattatatgctttatctttcaagg

SEQ ID NO: 116303 - DNA, 25 bp, Artificial
  probe
  misc_feature (1)..(25): SEQ ID NO: 832; WAN024CFE_at; Start 18; Stop 42
tcagaccacaatagaaaatcagttt

SEQ ID NO: 116304 - DNA, 25 bp, Artificial
  probe
  misc_feature (1)..(25): SEQ ID NO: 832; WAN024CFE_at; Start 218; Stop 242
cagtaggcgttgaaaatgatttgtt

SEQ ID NO: 116305 - DNA, 25 bp, Artificial
  probe
  misc_feature (1)..(25): SEQ ID NO: 832; WAN024CFE_at; Start 327; Stop 351
tgcagacctgttgaaattgaaccgt

SEQ ID NO: 116306 - DNA, 25 bp, Artificial
  probe
  misc_feature (1)..(25): SEQ ID NO: 832; WAN024CFE_at; Start 67; Stop 91
gaagacgagcgaaagaattatatgc

SEQ ID NO: 116307 - DNA, 25 bp, Artificial
  probe
  misc_feature (1)..(25): SEQ ID NO: 832; WAN024CFE_at; Start 201; Stop 225
tacactcaatgggttatcagtaggc

SEQ ID NO: 116308 - DNA, 25 bp, Artificial
  probe
  misc_feature (1)..(25): SEQ ID NO: 832; WAN024CFE_at; Start 153; Stop 177
tagccagtttgcgacaacagataac

SEQ ID NO: 116309 - DNA, 25 bp, Artificial
  probe
  misc_feature (1)..(25): SEQ ID NO: 832; WAN024CFE_at; Start 235; Stop 259
gatttgttgagtgaagcattacgtg

SEQ ID NO: 116310 - DNA, 25 bp, Artificial
  probe
  misc_feature (1)..(25): SEQ ID NO: 832; WAN024CFE_at; Start 187; Stop 211
gactttcagatttttacactcaatg

SEQ ID NO: 116311 - DNA, 25 bp, Artificial
  probe
  misc_feature (1)..(25): SEQ ID NO: 832; WAN024CFE_at; Start 172; Stop 196
gataactattcaactgactttcaga

SEQ ID NO: 116312 - DNA, 25 bp, Artificial
  probe
  misc_feature (1)..(25): SEQ ID NO: 832; WAN024CFE_at; Start 367; Stop 391
catagaaccagtggactagccttaa

SEQ ID NO: 116313 - DNA, 25 bp, Artificial
  probe
  misc_feature (1)..(25): SEQ ID NO: 832; WAN024CFE_at; Start 101; Stop 125
caaggattgcaaagcgtgaggtgtc

SEQ ID NO: 116314 - DNA, 25 bp, Artificial
  probe
  misc_feature (1)..(25): SEQ ID NO: 832; WAN024CFE_at; Start 142; Stop 166
gattatcttgttagccagtttgcga

SEQ ID NO: 116315 - DNA, 25 bp, Artificial
  probe
  misc_feature (1)..(25): SEQ ID NO: 832; WAN024CFE_at; Start 3; Stop 27
gaaaccatcttcttttcagaccaca

SEQ ID NO: 116316 - DNA, 25 bp, Artificial
  probe
  misc_feature (1)..(25): SEQ ID NO: 832; WAN024CFE_at; Start 285; Stop 309
tctactgctgttttactttatggac

SEQ ID NO: 116317 - DNA, 25 bp, Artificial
  probe
  misc_feature (1)..(25): SEQ ID NO: 832; WAN024CFE_at; Start 309; Stop 333
catgagcgattcagaaattgcagac

SEQ ID NO: 116318 - DNA, 25 bp, Artificial
  probe
  misc_feature (1)..(25): SEQ ID NO: 832; WAN024CFE_at; Start 247; Stop 271
gaagcattacgtgagttgccagaca

SEQ ID NO: 116319 - DNA, 25 bp, Artificial
  probe
  misc_feature (1)..(25): SEQ ID NO: 832; WAN024CFE_at; Start 110; Stop 134
caaagcgtgaggtgtccttttcgga

SEQ ID NO: 116320 - DNA, 25 bp, Artificial
  probe
  misc_feature (1)..(25): SEQ ID NO: 832; WAN024CFE_at; Start 159; Stop 183
gtttgcgacaacagataactattca

SEQ ID NO: 116321 - DNA, 25 bp, Artificial
  probe
  misc_feature (1)..(25): SEQ ID NO: 832; WAN024CFE_at; Start 331; Stop 355
gacctgttgaaattgaaccgttcta

SEQ ID NO: 116322 - DNA, 25 bp, Artificial
  probe
  misc_feature (1)..(25): SEQ ID NO: 832; WAN024CFE_at; Start 207; Stop 231
caatgggttatcagtaggcgttgaa

SEQ ID NO: 116323 - DNA, 25 bp, Artificial
  probe
  misc_feature (1)..(25): SEQ ID NO: 832; WAN024CFE_at; Start 270; Stop 294
caagaaacgtgaaattctactgctg

SEQ ID NO: 116324 - DNA, 25 bp, Artificial
  probe
  misc_feature (1)..(25): SEQ ID NO: 832; WAN024CFE_at; Start 29; Stop 53
tagaaaatcagtttgactatatctg

SEQ ID NO: 116325 - DNA, 25 bp, Artificial
  probe
  misc_feature (1)..(25): SEQ ID NO: 832; WAN024CFE_at; Start 43; Stop 67
gactatatctgtaaacgtgctatgg

SEQ ID NO: 116326 - DNA, 25 bp, Artificial
  probe
  misc_feature (1)..(25): SEQ ID NO: 832; WAN024CFE_at; Start 133; Stop 157
gatgttggcgattatcttgttagcc

SEQ ID NO: 116327 - DNA, 25 bp, Artificial
  probe
  misc_feature (1)..(25): SEQ ID NO: 832; WAN024CFE_at; Start 298; Stop 322
tactttatggacatgagcgattcag

SEQ ID NO: 116328 - DNA, 25 bp, Artificial
  probe
  misc_feature (1)..(25): SEQ ID NO: 832; WAN024CFE_at; Start 124; Stop 148
tccttttcggatgttggcgattatc

SEQ ID NO: 116329 - DNA, 25 bp, Artificial
  probe
  misc_feature (1)..(25): SEQ ID NO: 832; WAN024CFE_at; Start 94; Stop 118
tatctttcaaggattgcaaagcgtg

SEQ ID NO: 116330 - DNA, 25 bp, Artificial
  probe
  misc_feature (1)..(25): SEQ ID NO: 1107; WAN024CFF_at; Start 74; Stop 98
ttggcgaaaacaagctacgacgctt

SEQ ID NO: 116331 - DNA, 25 bp, Artificial
  probe
  misc_feature (1)..(25): SEQ ID NO: 1107; WAN024CFF_at; Start 105; Stop 129
ggaaaataaaaatgcaaattggctg

SEQ ID NO: 116332 - DNA, 25 bp, Artificial
  probe
  misc_feature (1)..(25): SEQ ID NO: 1107; WAN024CFF_at; Start 31; Stop 55
cgttataccctaaccattgaagaag

SEQ ID NO: 116333 - DNA, 25 bp, Artificial
  probe
  misc_feature (1)..(25): SEQ ID NO: 1107; WAN024CFF_at; Start 5; Stop 29
agcagactgacattcctatttggga

SEQ ID NO: 116334 - DNA, 25 bp, Artificial
  probe
  misc_feature (1)..(25): SEQ ID NO: 1107; WAN024CFF_at; Start 9; Stop 33
gactgacattcctatttgggaacgt

SEQ ID NO: 116335 - DNA, 25 bp, Artificial
  probe
  misc_feature (1)..(25): SEQ ID NO: 1107; WAN024CFF_at; Start 177; Stop 201
aattatagatacattggacgcaatc

SEQ ID NO: 116336 - DNA, 25 bp, Artificial
  probe
  misc_feature (1)..(25): SEQ ID NO: 1107; WAN024CFF_at; Start 71; Stop 95
gtattggcgaaaacaagctacgacg

SEQ ID NO: 116337 - DNA, 25 bp, Artificial
  probe
  misc_feature (1)..(25): SEQ ID NO: 1107; WAN024CFF_at; Start 7; Stop 31
cagactgacattcctatttgggaac

SEQ ID NO: 116338 - DNA, 25 bp, Artificial
  probe
  misc_feature (1)..(25): SEQ ID NO: 1107; WAN024CFF_at; Start 81; Stop 105
aaacaagctacgacgcttggcagag

SEQ ID NO: 116339 - DNA, 25 bp, Artificial
  probe
  misc_feature (1)..(25): SEQ ID NO: 1107; WAN024CFF_at; Start 84; Stop 108
caagctacgacgcttggcagaggaa

SEQ ID NO: 116340 - DNA, 25 bp, Artificial
  probe
  misc_feature (1)..(25): SEQ ID NO: 1107; WAN024CFF_at; Start 55; Stop 79
gcgtcaaaatattttcgtattggcg

SEQ ID NO: 116341 - DNA, 25 bp, Artificial
  probe
  misc_feature (1)..(25): SEQ ID NO: 1107; WAN024CFF_at; Start 94; Stop 118
cgcttggcagaggaaaataaaaatg

SEQ ID NO: 116342 - DNA, 25 bp, Artificial
  probe
  misc_feature (1)..(25): SEQ ID NO: 1107; WAN024CFF_at; Start 150; Stop 174
tcagattaaacgaaaacaatttgaa

SEQ ID NO: 116343 - DNA, 25 bp, Artificial
  probe
  misc_feature (1)..(25): SEQ ID NO: 1107; WAN024CFF_at; Start 119; Stop 143
caaattggctgattatgaatggcaa

SEQ ID NO: 116344 - DNA, 25 bp, Artificial
  probe
  misc_feature (1)..(25): SEQ ID NO: 1107; WAN024CFF_at; Start 117; Stop 141
tgcaaattggctgattatgaatggc

SEQ ID NO: 116345 - DNA, 25 bp, Artificial
  probe
  misc_feature (1)..(25): SEQ ID NO: 1107; WAN024CFF_at; Start 87; Stop 111
gctacgacgcttggcagaggaaaat

SEQ ID NO: 116346 - DNA, 25 bp, Artificial
  probe
  misc_feature (1)..(25): SEQ ID NO: 1107; WAN024CFF_at; Start 13; Stop 37
gacattcctatttgggaacgttata

SEQ ID NO: 116347 - DNA, 25 bp, Artificial
  probe
  misc_feature (1)..(25): SEQ ID NO: 1107; WAN024CFF_at; Start 68; Stop 92
ttcgtattggcgaaaacaagctacg

SEQ ID NO: 116348 - DNA, 25 bp, Artificial
  probe
  misc_feature (1)..(25): SEQ ID NO: 1107; WAN024CFF_at; Start 96; Stop 120
cttggcagaggaaaataaaaatgca

SEQ ID NO: 116349 - DNA, 25 bp, Artificial
  probe
  misc_feature (1)..(25): SEQ ID NO: 1107; WAN024CFF_at; Start 2; Stop 26
tgaagcagactgacattcctatttg

SEQ ID NO: 116350 - DNA, 25 bp, Artificial
  probe
  misc_feature (1)..(25): SEQ ID NO: 1107; WAN024CFF_at; Start 173; Stop 197
aaaaaattatagatacattggacgc

SEQ ID NO: 116351 - DNA, 25 bp, Artificial
  probe
  misc_feature (1)..(25): SEQ ID NO: 1107; WAN024CFF_at; Start 72; Stop 96
tattggcgaaaacaagctacgacgc

SEQ ID NO: 116352 - DNA, 25 bp, Artificial
  probe
  misc_feature (1)..(25): SEQ ID NO: 1107; WAN024CFF_at; Start 92; Stop 116
gacgcttggcagaggaaaataaaaa

SEQ ID NO: 116353 - DNA, 25 bp, Artificial
  probe
  misc_feature (1)..(25): SEQ ID NO: 1107; WAN024CFF_at; Start 145; Stop 169
cgtattcagattaaacgaaaacaat

SEQ ID NO: 116354 - DNA, 25 bp, Artificial
  probe
  misc_feature (1)..(25): SEQ ID NO: 1107; WAN024CFF_at; Start 48; Stop 72
tgaagaagcgtcaaaatattttcgt

SEQ ID NO: 116355 - DNA, 25 bp, Artificial
  probe
  misc_feature (1)..(25): SEQ ID NO: 1107; WAN024CFF_at; Start 180; Stop 204
tatagatacattggacgcaatctag

SEQ ID NO: 116356 - DNA, 25 bp, Artificial
  probe
  misc_feature (1)..(25): SEQ ID NO: 1107; WAN024CFF_at; Start 139; Stop 163
ggcaatcgtattcagattaaacgaa

SEQ ID NO: 116357 - DNA, 25 bp, Artificial
  probe
  misc_feature (1)..(25): SEQ ID NO: 1107; WAN024CFF_at; Start 125; Stop 149
ggctgattatgaatggcaatcgtat

SEQ ID NO: 116358 - DNA, 25 bp, Artificial
  probe
  misc_feature (1)..(25): SEQ ID NO: 1107; WAN024CFF_at; Start 34; Stop 58
tataccctaaccattgaagaagcgt

SEQ ID NO: 116359 - DNA, 25 bp, Artificial
  probe
  misc_feature (1)..(25): SEQ ID NO: 1107; WAN024CFF_at; Start 33; Stop 57
ttataccctaaccattgaagaagcg

SEQ ID NO: 116360 - DNA, 25 bp, Artificial
  probe
  misc_feature (1)..(25): SEQ ID NO: 1107; WAN024CFF_at; Start 79; Stop 103
gaaaacaagctacgacgcttggcag

SEQ ID NO: 116361 - DNA, 25 bp, Artificial
  probe
  misc_feature (1)..(25): SEQ ID NO: 1107; WAN024CFF_at; Start 76; Stop 100
ggcgaaaacaagctacgacgcttgg

SEQ ID NO: 116362 - DNA, 25 bp, Artificial
  probe
  misc_feature (1)..(25): SEQ ID NO: 1107; WAN024CFF_at; Start 42; Stop 66
aaccattgaagaagcgtcaaaatat

SEQ ID NO: 116363 - DNA, 25 bp, Artificial
  probe
  misc_feature (1)..(25): SEQ ID NO: 1107; WAN024CFF_at; Start 89; Stop 113
tacgacgcttggcagaggaaaataa

SEQ ID NO: 116364 - DNA, 25 bp, Artificial
  probe
  misc_feature (1)..(25): SEQ ID NO: 2857; WAN024CFG_at; Start 1046; Stop 1070
tctgtaccaactatgcaaatgcagg

SEQ ID NO: 116365 - DNA, 25 bp, Artificial
  probe
  misc_feature (1)..(25): SEQ ID NO: 2857; WAN024CFG_at; Start 273; Stop 297
gaacgctcaaagaccaaaggttaga

SEQ ID NO: 116366 - DNA, 25 bp, Artificial
  probe
  misc_feature (1)..(25): SEQ ID NO: 2857; WAN024CFG_at; Start 191; Stop 215
tcgcagagttacagaaagacattca

SEQ ID NO: 116367 - DNA, 25 bp, Artificial
  probe
  misc_feature (1)..(25): SEQ ID NO: 2857; WAN024CFG_at; Start 795; Stop 819
caaaagtggcgaacgtcaagttcct

SEQ ID NO: 116368 - DNA, 25 bp, Artificial
  probe
  misc_feature (1)..(25): SEQ ID NO: 2857; WAN024CFG_at; Start 1122; Stop 1146
gacgctgaactattacgcacatgca

SEQ ID NO: 116369 - DNA, 25 bp, Artificial
  probe
  misc_feature (1)..(25): SEQ ID NO: 2857; WAN024CFG_at; Start 846; Stop 870
taagcgagtgttagcgaatcgaaag

SEQ ID NO: 116370 - DNA, 25 bp, Artificial
  probe
  misc_feature (1)..(25): SEQ ID NO: 2857; WAN024CFG_at; Start 952; Stop 976
tacaacggcatgatgaaaggtcttg

SEQ ID NO: 116371 - DNA, 25 bp, Artificial
  probe
  misc_feature (1)..(25): SEQ ID NO: 2857; WAN024CFG_at; Start 258; Stop 282
gctttacgcaaaacagaacgctcaa

SEQ ID NO: 116372 - DNA, 25 bp, Artificial
  probe
  misc_feature (1)..(25): SEQ ID NO: 2857; WAN024CFG_at; Start 994; Stop 1018
tataacgaggataaattgccacaca

SEQ ID NO: 116373 - DNA, 25 bp, Artificial
  probe
  misc_feature (1)..(25): SEQ ID NO: 2857; WAN024CFG_at; Start 810; Stop 834
tcaagttcctatggttgaagaagcc

SEQ ID NO: 116374 - DNA, 25 bp, Artificial
  probe
  misc_feature (1)..(25): SEQ ID NO: 2857; WAN024CFG_at; Start 538; Stop 562
gttcttgatgatgatactgtcccta

SEQ ID NO: 116375 - DNA, 25 bp, Artificial
  probe
  misc_feature (1)..(25): SEQ ID NO: 2857; WAN024CFG_at; Start 118; Stop 142
tactcgtggaaacttgtggctacag

SEQ ID NO: 116376 - DNA, 25 bp, Artificial
  probe
  misc_feature (1)..(25): SEQ ID NO: 2857; WAN024CFG_at; Start 35; Stop 59
tcttaaagactggagagagccaacg

SEQ ID NO: 116377 - DNA, 25 bp, Artificial
  probe
  misc_feature (1)..(25): SEQ ID NO: 2857; WAN024CFG_at; Start 87; Stop 111
tatagattcatttggagaaccgcaa

SEQ ID NO: 116378 - DNA, 25 bp, Artificial
  probe
  misc_feature (1)..(25): SEQ ID NO: 2857; WAN024CFG_at; Start 739; Stop 763
gaccatcagctattgagagatactg

SEQ ID NO: 116379 - DNA, 25 bp, Artificial
  probe
  misc_feature (1)..(25): SEQ ID NO: 2857; WAN024CFG_at; Start 294; Stop 318
tagaaaaaacactgaaactggacgc

SEQ ID NO: 116380 - DNA, 25 bp, Artificial
  probe
  misc_feature (1)..(25): SEQ ID NO: 2857; WAN024CFG_at; Start 921; Stop 945
tagaaagaactatccaaaagtggca

SEQ ID NO: 116381 - DNA, 25 bp, Artificial
  probe
  misc_feature (1)..(25): SEQ ID NO: 2857; WAN024CFG_at; Start 937; Stop 961
aaagtggcaagtgattacaacggca

SEQ ID NO: 116382 - DNA, 25 bp, Artificial
  probe
  misc_feature (1)..(25): SEQ ID NO: 2857; WAN024CFG_at; Start 175; Stop 199
tcacttagagagaaaatcgcagagt

SEQ ID NO: 116383 - DNA, 25 bp, Artificial
  probe
  misc_feature (1)..(25): SEQ ID NO: 2857; WAN024CFG_at; Start 383; Stop 407
catcagacgctaaagaatgggctat

SEQ ID NO: 116384 - DNA, 25 bp, Artificial
  probe
  misc_feature (1)..(25): SEQ ID NO: 2857; WAN024CFG_at; Start 1061; Stop 1085
caaatgcaggaatgaatccaaaggc

SEQ ID NO: 116385 - DNA, 25 bp, Artificial
  probe
  misc_feature (1)..(25): SEQ ID NO: 2857; WAN024CFG_at; Start 780; Stop 804
tgaaacaccaaagaccaaaagtggc

SEQ ID NO: 116386 - DNA, 25 bp, Artificial
  probe
  misc_feature (1)..(25): SEQ ID NO: 2857; WAN024CFG_at; Start 1183; Stop 1207
aataaagagaagcaacaggagcgtc

SEQ ID NO: 116387 - DNA, 25 bp, Artificial
  probe
  misc_feature (1)..(25): SEQ ID NO: 2857; WAN024CFG_at; Start 150; Stop 174
accagcaggaaagcgtgattgtatc

SEQ ID NO: 116388 - DNA, 25 bp, Artificial
  probe
  misc_feature (1)..(25): SEQ ID NO: 2857; WAN024CFG_at; Start 601; Stop 625
gcctttgcaaaagctgataaaacct

SEQ ID NO: 116389 - DNA, 25 bp, Artificial
  probe
  misc_feature (1)..(25): SEQ ID NO: 2857; WAN024CFG_at; Start 1085; Stop 1109
cattacagtacattatgggacatgc

SEQ ID NO: 116390 - DNA, 25 bp, Artificial
  probe
  misc_feature (1)..(25): SEQ ID NO: 2857; WAN024CFG_at; Start 680; Stop 704
cagagtttggtggtttgacacttcc

SEQ ID NO: 116391 - DNA, 25 bp, Artificial
  probe
  misc_feature (1)..(25): SEQ ID NO: 2857; WAN024CFG_at; Start 103; Stop 127
gaaccgcaatttgtttactcgtgga

SEQ ID NO: 116392 - DNA, 25 bp, Artificial
  probe
  misc_feature (1)..(25): SEQ ID NO: 2857; WAN024CFG_at; Start 236; Stop 260
gaaagaaaatgacactctgccagct

SEQ ID NO: 116393 - DNA, 25 bp, Artificial
  probe
  misc_feature (1)..(25): SEQ ID NO: 2857; WAN024CFG_at; Start 368; Stop 392
ttgacagtattaagccatcagacgc

SEQ ID NO: 116394 - DNA, 25 bp, Artificial
  probe
  misc_feature (1)..(25): SEQ ID NO: 2857; WAN024CFG_at; Start 829; Stop 853
gaagcctatcaagcatttaagcgag

SEQ ID NO: 116395 - DNA, 25 bp, Artificial
  probe
  misc_feature (1)..(25): SEQ ID NO: 2857; WAN024CFG_at; Start 307; Stop 331
gaaactggacgcaaatatcttatgg

SEQ ID NO: 116396 - DNA, 25 bp, Artificial
  probe
  misc_feature (1)..(25): SEQ ID NO: 2857; WAN024CFG_at; Start 650; Stop 674
tgatactcttaaaaacaggtcttcg

SEQ ID NO: 116397 - DNA, 25 bp, Artificial
  probe
  misc_feature (1)..(25): SEQ ID NO: 2857; WAN024CFG_at; Start 1156; Stop 1180
tctgcaatggcagaaatgaaacgct

SEQ ID NO: 116398 - DNA, 25 bp, Artificial
  probe
  misc_feature (1)..(25): SEQ ID NO: 6821; WAN024CFH_at; Start 213; Stop 237
tcagccttcagacttcaataccttg

SEQ ID NO: 116399 - DNA, 25 bp, Artificial
  probe
  misc_feature (1)..(25): SEQ ID NO: 6821; WAN024CFH_at; Start 121; Stop 145
ggagagacagaaatctcatttttta

SEQ ID NO: 116400 - DNA, 25 bp, Artificial
  probe
  misc_feature (1)..(25): SEQ ID NO: 6821; WAN024CFH_at; Start 458; Stop 482
gatattacgaaattcttattcttgg

SEQ ID NO: 116401 - DNA, 25 bp, Artificial
  probe
  misc_feature (1)..(25): SEQ ID NO: 6821; WAN024CFH_at; Start 374; Stop 398
tctatggaattgataatactcatca

SEQ ID NO: 116402 - DNA, 25 bp, Artificial
  probe
  misc_feature (1)..(25): SEQ ID NO: 6821; WAN024CFH_at; Start 608; Stop 632
cacttcttattatgattgaaaacag

SEQ ID NO: 116403 - DNA, 25 bp, Artificial
  probe
  misc_feature (1)..(25): SEQ ID NO: 6821; WAN024CFH_at; Start 151; Stop 175
ttatatctacttgaaaaaataggtg

SEQ ID NO: 116404 - DNA, 25 bp, Artificial
  probe
  misc_feature (1)..(25): SEQ ID NO: 6821; WAN024CFH_at; Start 223; Stop 247
gacttcaataccttgatacgcttag

SEQ ID NO: 116405 - DNA, 25 bp, Artificial
  probe
  misc_feature (1)..(25): SEQ ID NO: 6821; WAN024CFH_at; Start 562; Stop 586
tctatacctagaaataaacaagctc

SEQ ID NO: 116406 - DNA, 25 bp, Artificial
  probe
  misc_feature (1)..(25): SEQ ID NO: 6821; WAN024CFH_at; Start 276; Stop 300
caaatcattacttaatatggtaagc

SEQ ID NO: 116407 - DNA, 25 bp, Artificial
  probe
  misc_feature (1)..(25): SEQ ID NO: 6821; WAN024CFH_at; Start 200; Stop 224
catgtaataattatcagccttcaga

SEQ ID NO: 116408 - DNA, 25 bp, Artificial
  probe
  misc_feature (1)..(25): SEQ ID NO: 6821; WAN024CFH_at; Start 291; Stop 315
tatggtaagcaaagagatggaactg

SEQ ID NO: 116409 - DNA, 25 bp, Artificial
  probe
  misc_feature (1)..(25): SEQ ID NO: 6821; WAN024CFH_at; Start 661; Stop 685
caagctactaagaatatattatcta

SEQ ID NO: 116410 - DNA, 25 bp, Artificial
  probe
  misc_feature (1)..(25): SEQ ID NO: 6821; WAN024CFH_at; Start 248; Stop 272
ttcaacaggctgcatacaatcaaga

SEQ ID NO: 116411 - DNA, 25 bp, Artificial
  probe
  misc_feature (1)..(25): SEQ ID NO: 6821; WAN024CFH_at; Start 487; Stop 511
tgttgtcgagcaatattaccaaatt

SEQ ID NO: 116412 - DNA, 25 bp, Artificial
  probe
  misc_feature (1)..(25): SEQ ID NO: 6821; WAN024CFH_at; Start 396; Stop 420
tcaattgagtaatcaagacacctct

SEQ ID NO: 116413 - DNA, 25 bp, Artificial
  probe
  misc_feature (1)..(25): SEQ ID NO: 6821; WAN024CFH_at; Start 337; Stop 361
tatcataagttaaacgctattttca

SEQ ID NO: 116414 - DNA, 25 bp, Artificial
  probe
  misc_feature (1)..(25): SEQ ID NO: 6821; WAN024CFH_at; Start 359; Stop 383
tcattgaaagtattatctatggaat

SEQ ID NO: 116415 - DNA, 25 bp, Artificial
  probe
  misc_feature (1)..(25): SEQ ID NO: 6821; WAN024CFH_at; Start 474; Stop 498
tattcttggaaattgttgtcgagca

SEQ ID NO: 116416 - DNA, 25 bp, Artificial
  probe
  misc_feature (1)..(25): SEQ ID NO: 6821; WAN024CFH_at; Start 184; Stop 208
gaggagtttttgctttcatgtaata

SEQ ID NO: 116417 - DNA, 25 bp, Artificial
  probe
  misc_feature (1)..(25): SEQ ID NO: 6821; WAN024CFH_at; Start 237; Stop 261
gatacgcttagttcaacaggctgca

SEQ ID NO: 116418 - DNA, 25 bp, Artificial
  probe
  misc_feature (1)..(25): SEQ ID NO: 6821; WAN024CFH_at; Start 108; Stop 132
tagatttgaattaggagagacagaa

SEQ ID NO: 116419 - DNA, 25 bp, Artificial
  probe
  misc_feature (1)..(25): SEQ ID NO: 6821; WAN024CFH_at; Start 766; Stop 790
tcaattttaaaaatagaagatgctt

SEQ ID NO: 116420 - DNA, 25 bp, Artificial
  probe
  misc_feature (1)..(25): SEQ ID NO: 6821; WAN024CFH_at; Start 580; Stop 604
caagctctcgttcaattacttctta

SEQ ID NO: 116421 - DNA, 25 bp, Artificial
  probe
  misc_feature (1)..(25): SEQ ID NO: 6821; WAN024CFH_at; Start 568; Stop 592
cctagaaataaacaagctctcgttc

SEQ ID NO: 116422 - DNA, 25 bp, Artificial
  probe
  misc_feature (1)..(25): SEQ ID NO: 6821; WAN024CFH_at; Start 706; Stop 730
caaactattcttttgtatttagaag

SEQ ID NO: 116423 - DNA, 25 bp, Artificial
  probe
  misc_feature (1)..(25): SEQ ID NO: 6821; WAN024CFH_at; Start 255; Stop 279
ggctgcatacaatcaagaaatcaaa

SEQ ID NO: 116424 - DNA, 25 bp, Artificial
  probe
  misc_feature (1)..(25): SEQ ID NO: 6821; WAN024CFH_at; Start 322; Stop 346
gaaaccaaatctcattatcataagt

SEQ ID NO: 116425 - DNA, 25 bp, Artificial
  probe
  misc_feature (1)..(25): SEQ ID NO: 6821; WAN024CFH_at; Start 624; Stop 648
tgaaaacagcttatatgaggaagct

SEQ ID NO: 116426 - DNA, 25 bp, Artificial
  probe
  misc_feature (1)..(25): SEQ ID NO: 6821; WAN024CFH_at; Start 306; Stop 330
gatggaactgtttagagaaaccaaa

SEQ ID NO: 116427 - DNA, 25 bp, Artificial
  probe
  misc_feature (1)..(25): SEQ ID NO: 6821; WAN024CFH_at; Start 646; Stop 670
gctttatttttagaacaagctacta

SEQ ID NO: 116428 - DNA, 25 bp, Artificial
  probe
  misc_feature (1)..(25): SEQ ID NO: 6821; WAN024CFH_at; Start 172; Stop 196
ggtgtaacactagaggagtttttgc

SEQ ID NO: 116429 - DNA, 25 bp, Artificial
  probe
  misc_feature (1)..(25): SEQ ID NO: 6821; WAN024CFH_at; Start 408; Stop 432
tcaagacacctcttatcttactaat

SEQ ID NO: 116430 - DNA, 25 bp, Artificial
  probe
  misc_feature (1)..(25): SEQ ID NO: 6821; WAN024CFH_at; Start 672; Stop 696
gaatatattatctaattccacagat

SEQ ID NO: 116431 - DNA, 25 bp, Artificial
  probe
  misc_feature (1)..(25): SEQ ID NO: 6821; WAN024CFH_at; Start 869; Stop 893
tacaatgtggtaattcctattttga

SEQ ID NO: 116432 - DNA, 25 bp, Artificial
  probe
  misc_feature (1)..(25): SEQ ID NO: 6822; WAN024CFI_at; Start 738; Stop 762
ggaactgaaattctatcataatcaa

SEQ ID NO: 116433 - DNA, 25 bp, Artificial
  probe
  misc_feature (1)..(25): SEQ ID NO: 6822; WAN024CFI_at; Start 200; Stop 224
tctgtaatcattatcaaccttcgga

SEQ ID NO: 116434 - DNA, 25 bp, Artificial
  probe
  misc_feature (1)..(25): SEQ ID NO: 6822; WAN024CFI_at; Start 291; Stop 315
tatggtagagaaagaaatggaactt

SEQ ID NO: 116435 - DNA, 25 bp, Artificial
  probe
  misc_feature (1)..(25): SEQ ID NO: 6822; WAN024CFI_at; Start 627; Stop 651
gaacgacttatatgaggaatcttta

SEQ ID NO: 116436 - DNA, 25 bp, Artificial
  probe
  misc_feature (1)..(25): SEQ ID NO: 6822; WAN024CFI_at; Start 834; Stop 858
caaacaatactttgagaaacacatc

SEQ ID NO: 116437 - DNA, 25 bp, Artificial
  probe
  misc_feature (1)..(25): SEQ ID NO: 6822; WAN024CFI_at; Start 562; Stop 586
cctatacctagaaatagacaatctc

SEQ ID NO: 116438 - DNA, 25 bp, Artificial
  probe
  misc_feature (1)..(25): SEQ ID NO: 6822; WAN024CFI_at; Start 236; Stop 260
taatagcttctgttaaacaggccgc

SEQ ID NO: 116439 - DNA, 25 bp, Artificial
  probe
  misc_feature (1)..(25): SEQ ID NO: 6822; WAN024CFI_at; Start 374; Stop 398
tttcgggaatggataagaatcatca

SEQ ID NO: 116440 - DNA, 25 bp, Artificial
  probe
  misc_feature (1)..(25): SEQ ID NO: 6822; WAN024CFI_at; Start 458; Stop 482
gttattacgaaacgctcatccttgg

SEQ ID NO: 116441 - DNA, 25 bp, Artificial
  probe
  misc_feature (1)..(25): SEQ ID NO: 6822; WAN024CFI_at; Start 802; Stop 826
gaactcttcaataaaacaatctaca

SEQ ID NO: 116442 - DNA, 25 bp, Artificial
  probe
  misc_feature (1)..(25): SEQ ID NO: 6822; WAN024CFI_at; Start 184; Stop 208
gaagaatttctgcttatctgtaatc

SEQ ID NO: 116443 - DNA, 25 bp, Artificial
  probe
  misc_feature (1)..(25): SEQ ID NO: 6822; WAN024CFI_at; Start 277; Stop 301
caaacattactagatatggtagaga

SEQ ID NO: 116444 - DNA, 25 bp, Artificial
  probe
  misc_feature (1)..(25): SEQ ID NO: 6822; WAN024CFI_at; Start 124; Stop 148
gaaacagagatttctgtctttaagt

SEQ ID NO: 116445 - DNA, 25 bp, Artificial
  probe
  misc_feature (1)..(25): SEQ ID NO: 6822; WAN024CFI_at; Start 393; Stop 417
tcatcaattgagtcgtcaggacgcc

SEQ ID NO: 116446 - DNA, 25 bp, Artificial
  probe
  misc_feature (1)..(25): SEQ ID NO: 6822; WAN024CFI_at; Start 108; Stop 132
taggtttgaattaggagaaacagag

SEQ ID NO: 116447 - DNA, 25 bp, Artificial
  probe
  misc_feature (1)..(25): SEQ ID NO: 6822; WAN024CFI_at; Start 668; Stop 692
cgaagaatatattagcggattccac

SEQ ID NO: 116448 - DNA, 25 bp, Artificial
  probe
  misc_feature (1)..(25): SEQ ID NO: 6822; WAN024CFI_at; Start 576; Stop 600
tagacaatctctcattcaactactt

SEQ ID NO: 116449 - DNA, 25 bp, Artificial
  probe
  misc_feature (1)..(25): SEQ ID NO: 6822; WAN024CFI_at; Start 675; Stop 699
tatattagcggattccacagatttt

SEQ ID NO: 116450 - DNA, 25 bp, Artificial
  probe
  misc_feature (1)..(25): SEQ ID NO: 6822; WAN024CFI_at; Start 726; Stop 750
agatggatatttggaactgaaattc

SEQ ID NO: 116451 - DNA, 25 bp, Artificial
  probe
  misc_feature (1)..(25): SEQ ID NO: 6822; WAN024CFI_at; Start 144; Stop 168
taagttattgtatcttcttgaaaga

SEQ ID NO: 116452 - DNA, 25 bp, Artificial
  probe
  misc_feature (1)..(25): SEQ ID NO: 6822; WAN024CFI_at; Start 312; Stop 336
actttttcgtgggacaaattctcat

SEQ ID NO: 116453 - DNA, 25 bp, Artificial
  probe
  misc_feature (1)..(25): SEQ ID NO: 6822; WAN024CFI_at; Start 267; Stop 291
tgaagatactcaaacattactagat

SEQ ID NO: 116454 - DNA, 25 bp, Artificial
  probe
  misc_feature (1)..(25): SEQ ID NO: 6822; WAN024CFI_at; Start 654; Stop 678
tttaaaacaggctacgaagaatata

SEQ ID NO: 116455 - DNA, 25 bp, Artificial
  probe
  misc_feature (1)..(25): SEQ ID NO: 6822; WAN024CFI_at; Start 849; Stop 873
gaaacacatcattcatttagtagac

SEQ ID NO: 116456 - DNA, 25 bp, Artificial
  probe
  misc_feature (1)..(25): SEQ ID NO: 6822; WAN024CFI_at; Start 612; Stop 636
gattataatgattgagaacgactta

SEQ ID NO: 116457 - DNA, 25 bp, Artificial
  probe
  misc_feature (1)..(25): SEQ ID NO: 6822; WAN024CFI_at; Start 223; Stop 247
gattttaataccttaatagcttctg

SEQ ID NO: 116458 - DNA, 25 bp, Artificial
  probe
  misc_feature (1)..(25): SEQ ID NO: 6822; WAN024CFI_at; Start 172; Stop 196
ggagtaacactagaagaatttctgc

SEQ ID NO: 116459 - DNA, 25 bp, Artificial
  probe
  misc_feature (1)..(25): SEQ ID NO: 6822; WAN024CFI_at; Start 359; Stop 383
tcattgaaagtattgtttcgggaat

SEQ ID NO: 116460 - DNA, 25 bp, Artificial
  probe
  misc_feature (1)..(25): SEQ ID NO: 6822; WAN024CFI_at; Start 159; Stop 183
tcttgaaagaataggagtaacacta

SEQ ID NO: 116461 - DNA, 25 bp, Artificial
  probe
  misc_feature (1)..(25): SEQ ID NO: 6822; WAN024CFI_at; Start 322; Stop 346
gggacaaattctcattaccataaat

SEQ ID NO: 116462 - DNA, 25 bp, Artificial
  probe
  misc_feature (1)..(25): SEQ ID NO: 6822; WAN024CFI_at; Start 483; Stop 507
aaattgctgtcgtgttctatctcca

SEQ ID NO: 116463 - DNA, 25 bp, Artificial
  probe
  misc_feature (1)..(25): SEQ ID NO: 6822; WAN024CFI_at; Start 253; Stop 277
caggccgcatataatgaagatactc

SEQ ID NO: 116464 - DNA, 25 bp, Artificial
  probe
  misc_feature (1)..(25): SEQ ID NO: 6822; WAN024CFI_at; Start 472; Stop 496
ctcatccttggaaattgctgtcgtg

SEQ ID NO: 116465 - DNA, 25 bp, Artificial
  probe
  misc_feature (1)..(25): SEQ ID NO: 6822; WAN024CFI_at; Start 408; Stop 432
tcaggacgcctcttatcttacaaat

SEQ ID NO: 116466 - DNA, 25 bp, Artificial
  probe
  misc_feature (1)..(25): SEQ ID NO: 5598; WAN024CFJ_at; Start 55; Stop 79
gcagcaagtgtcactatagctattg

SEQ ID NO: 116467 - DNA, 25 bp, Artificial
  probe
  misc_feature (1)..(25): SEQ ID NO: 5598; WAN024CFJ_at; Start 35; Stop 59
ttgccttagacaacttaaaagcagc

SEQ ID NO: 116468 - DNA, 25 bp, Artificial
  probe
  misc_feature (1)..(25): SEQ ID NO: 5598; WAN024CFJ_at; Start 49; Stop 73
ttaaaagcagcaagtgtcactatag

SEQ ID NO: 116469 - DNA, 25 bp, Artificial
  probe
  misc_feature (1)..(25): SEQ ID NO: 5598; WAN024CFJ_at; Start 59; Stop 83
caagtgtcactatagctattgatgt

SEQ ID NO: 116470 - DNA, 25 bp, Artificial
  probe
  misc_feature (1)..(25): SEQ ID NO: 5598; WAN024CFJ_at; Start 36; Stop 60
tgccttagacaacttaaaagcagca

SEQ ID NO: 116471 - DNA, 25 bp, Artificial
  probe
  misc_feature (1)..(25): SEQ ID NO: 5598; WAN024CFJ_at; Start 79; Stop 103
gatgtcatagaaagtcctatttcaa

SEQ ID NO: 116472 - DNA, 25 bp, Artificial
  probe
  misc_feature (1)..(25): SEQ ID NO: 5598; WAN024CFJ_at; Start 77; Stop 101
ttgatgtcatagaaagtcctatttc

SEQ ID NO: 116473 - DNA, 25 bp, Artificial
  probe
  misc_feature (1)..(25): SEQ ID NO: 5598; WAN024CFJ_at; Start 5; Stop 29
tagaagatactcttcgttcttcagg

SEQ ID NO: 116474 - DNA, 25 bp, Artificial
  probe
  misc_feature (1)..(25): SEQ ID NO: 5598; WAN024CFJ_at; Start 52; Stop 76
aaagcagcaagtgtcactatagcta

SEQ ID NO: 116475 - DNA, 25 bp, Artificial
  probe
  misc_feature (1)..(25): SEQ ID NO: 5598; WAN024CFJ_at; Start 37; Stop 61
gccttagacaacttaaaagcagcaa

SEQ ID NO: 116476 - DNA, 25 bp, Artificial
  probe
  misc_feature (1)..(25): SEQ ID NO: 5598; WAN024CFJ_at; Start 48; Stop 72
cttaaaagcagcaagtgtcactata

SEQ ID NO: 116477 - DNA, 25 bp, Artificial
  probe
  misc_feature (1)..(25): SEQ ID NO: 5598; WAN024CFJ_at; Start 2; Stop 26
tggtagaagatactcttcgttcttc

SEQ ID NO: 116478 - DNA, 25 bp, Artificial
  probe
  misc_feature (1)..(25): SEQ ID NO: 5598; WAN024CFJ_at; Start 63; Stop 87
tgtcactatagctattgatgtcata

SEQ ID NO: 116479 - DNA, 25 bp, Artificial
  probe
  misc_feature (1)..(25): SEQ ID NO: 5598; WAN024CFJ_at; Start 46; Stop 70
aacttaaaagcagcaagtgtcacta

SEQ ID NO: 116480 - DNA, 25 bp, Artificial
  probe
  misc_feature (1)..(25): SEQ ID NO: 5598; WAN024CFJ_at; Start 50; Stop 74
taaaagcagcaagtgtcactatagc

SEQ ID NO: 116481 - DNA, 25 bp, Artificial
  probe
  misc_feature (1)..(25): SEQ ID NO: 5598; WAN024CFJ_at; Start 56; Stop 80
cagcaagtgtcactatagctattga

SEQ ID NO: 116482 - DNA, 25 bp, Artificial
  probe
  misc_feature (1)..(25): SEQ ID NO: 5598; WAN024CFJ_at; Start 66; Stop 90
cactatagctattgatgtcatagaa

SEQ ID NO: 116483 - DNA, 25 bp, Artificial
  probe
  misc_feature (1)..(25): SEQ ID NO: 5598; WAN024CFJ_at; Start 34; Stop 58
tttgccttagacaacttaaaagcag

SEQ ID NO: 116484 - DNA, 25 bp, Artificial
  probe
  misc_feature (1)..(25): SEQ ID NO: 5598; WAN024CFJ_at; Start 53; Stop 77
aagcagcaagtgtcactatagctat

SEQ ID NO: 116485 - DNA, 25 bp, Artificial
  probe
  misc_feature (1)..(25): SEQ ID NO: 5598; WAN024CFJ_at; Start 45; Stop 69
caacttaaaagcagcaagtgtcact

SEQ ID NO: 116486 - DNA, 25 bp, Artificial
  probe
  misc_feature (1)..(25): SEQ ID NO: 5598; WAN024CFJ_at; Start 71; Stop 95
tagctattgatgtcatagaaagtcc

SEQ ID NO: 116487 - DNA, 25 bp, Artificial
  probe
  misc_feature (1)..(25): SEQ ID NO: 5598; WAN024CFJ_at; Start 38; Stop 62
ccttagacaacttaaaagcagcaag

SEQ ID NO: 116488 - DNA, 25 bp, Artificial
  probe
  misc_feature (1)..(25): SEQ ID NO: 5598; WAN024CFJ_at; Start 75; Stop 99
tattgatgtcatagaaagtcctatt

SEQ ID NO: 116489 - DNA, 25 bp, Artificial
  probe
  misc_feature (1)..(25): SEQ ID NO: 5598; WAN024CFJ_at; Start 58; Stop 82
gcaagtgtcactatagctattgatg

SEQ ID NO: 116490 - DNA, 25 bp, Artificial
  probe
  misc_feature (1)..(25): SEQ ID NO: 5598; WAN024CFJ_at; Start 61; Stop 85
agtgtcactatagctattgatgtca

SEQ ID NO: 116491 - DNA, 25 bp, Artificial
  probe
  misc_feature (1)..(25): SEQ ID NO: 5598; WAN024CFJ_at; Start 64; Stop 88
gtcactatagctattgatgtcatag

SEQ ID NO: 116492 - DNA, 25 bp, Artificial
  probe
  misc_feature (1)..(25): SEQ ID NO: 5598; WAN024CFJ_at; Start 32; Stop 56
tatttgccttagacaacttaaaagc

SEQ ID NO: 116493 - DNA, 25 bp, Artificial
  probe
  misc_feature (1)..(25): SEQ ID NO: 5598; WAN024CFJ_at; Start 3; Stop 27
ggtagaagatactcttcgttcttca

SEQ ID NO: 116494 - DNA, 25 bp, Artificial
  probe
  misc_feature (1)..(25): SEQ ID NO: 5598; WAN024CFJ_at; Start 6; Stop 30
agaagatactcttcgttcttcaggt

SEQ ID NO: 116495 - DNA, 25 bp, Artificial
  probe
  misc_feature (1)..(25): SEQ ID NO: 5598; WAN024CFJ_at; Start 40; Stop 64
ttagacaacttaaaagcagcaagtg

SEQ ID NO: 116496 - DNA, 25 bp, Artificial
  probe
  misc_feature (1)..(25): SEQ ID NO: 5598; WAN024CFJ_at; Start 51; Stop 75
aaaagcagcaagtgtcactatagct

SEQ ID NO: 116497 - DNA, 25 bp, Artificial
  probe
  misc_feature (1)..(25): SEQ ID NO: 5598; WAN024CFJ_at; Start 41; Stop 65
tagacaacttaaaagcagcaagtgt

SEQ ID NO: 116498 - DNA, 25 bp, Artificial
  probe
  misc_feature (1)..(25): SEQ ID NO: 5598; WAN024CFJ_at; Start 43; Stop 67
gacaacttaaaagcagcaagtgtca

SEQ ID NO: 116499 - DNA, 25 bp, Artificial
  probe
  misc_feature (1)..(25): SEQ ID NO: 5598; WAN024CFJ_at; Start 73; Stop 97
gctattgatgtcatagaaagtccta

SEQ ID NO: 116500 - DNA, 25 bp, Artificial
  probe
  misc_feature (1)..(25): SEQ ID NO: 2612; WAN024CFK_at; Start 68; Stop 92
aacaagtttcgagcagtgtctatga

SEQ ID NO: 116501 - DNA, 25 bp, Artificial
  probe
  misc_feature (1)..(25): SEQ ID NO: 2612; WAN024CFK_at; Start 97; Stop 121
cctgaacacgattcatttcggattt

SEQ ID NO: 116502 - DNA, 25 bp, Artificial
  probe
  misc_feature (1)..(25): SEQ ID NO: 2612; WAN024CFK_at; Start 80; Stop 104
gcagtgtctatgaacatcctgaaca

SEQ ID NO: 116503 - DNA, 25 bp, Artificial
  probe
  misc_feature (1)..(25): SEQ ID NO: 2612; WAN024CFK_at; Start 386; Stop 410
ttcaacaaggtttgatagcacaagc

SEQ ID NO: 116504 - DNA, 25 bp, Artificial
  probe
  misc_feature (1)..(25): SEQ ID NO: 2612; WAN024CFK_at; Start 374; Stop 398
tacaaaagatgattcaacaaggttt

SEQ ID NO: 116505 - DNA, 25 bp, Artificial
  probe
  misc_feature (1)..(25): SEQ ID NO: 2612; WAN024CFK_at; Start 637; Stop 661
agctattacgaacttcatcaacaaa

SEQ ID NO: 116506 - DNA, 25 bp, Artificial
  probe
  misc_feature (1)..(25): SEQ ID NO: 2612; WAN024CFK_at; Start 109; Stop 133
tcatttcggattttttcaactacca

SEQ ID NO: 116507 - DNA, 25 bp, Artificial
  probe
  misc_feature (1)..(25): SEQ ID NO: 2612; WAN024CFK_at; Start 86; Stop 110
tctatgaacatcctgaacacgattc

SEQ ID NO: 116508 - DNA, 25 bp, Artificial
  probe
  misc_feature (1)..(25): SEQ ID NO: 2612; WAN024CFK_at; Start 103; Stop 127
cacgattcatttcggattttttcaa

SEQ ID NO: 116509 - DNA, 25 bp, Artificial
  probe
  misc_feature (1)..(25): SEQ ID NO: 2612; WAN024CFK_at; Start 75; Stop 99
ttcgagcagtgtctatgaacatcct

SEQ ID NO: 116510 - DNA, 25 bp, Artificial
  probe
  misc_feature (1)..(25): SEQ ID NO: 2612; WAN024CFK_at; Start 94; Stop 118
catcctgaacacgattcatttcgga

SEQ ID NO: 116511 - DNA, 25 bp, Artificial
  probe
  misc_feature (1)..(25): SEQ ID NO: 2612; WAN024CFK_at; Start 200; Stop 224
gaatttcctttaaagaagctctagc

SEQ ID NO: 116512 - DNA, 25 bp, Artificial
  probe
  misc_feature (1)..(25): SEQ ID NO: 2612; WAN024CFK_at; Start 598; Stop 622
aatagactggtcttttgtgaatcgt

SEQ ID NO: 116513 - DNA, 25 bp, Artificial
  probe
  misc_feature (1)..(25): SEQ ID NO: 2612; WAN024CFK_at; Start 61; Stop 85
tcctttaaacaagtttcgagcagtg

SEQ ID NO: 116514 - DNA, 25 bp, Artificial
  probe
  misc_feature (1)..(25): SEQ ID NO: 2612; WAN024CFK_at; Start 701; Stop 725
aaaggtctgttgttgcttatcaaac

SEQ ID NO: 116515 - DNA, 25 bp, Artificial
  probe
  misc_feature (1)..(25): SEQ ID NO: 2612; WAN024CFK_at; Start 143; Stop 167
aatggttttcaagagatattcaagg

SEQ ID NO: 116516 - DNA, 25 bp, Artificial
  probe
  misc_feature (1)..(25): SEQ ID NO: 2612; WAN024CFK_at; Start 155; Stop 179
gagatattcaaggtgatgtcattga

SEQ ID NO: 116517 - DNA, 25 bp, Artificial
  probe
  misc_feature (1)..(25): SEQ ID NO: 2612; WAN024CFK_at; Start 84; Stop 108
tgtctatgaacatcctgaacacgat

SEQ ID NO: 116518 - DNA, 25 bp, Artificial
  probe
  misc_feature (1)..(25): SEQ ID NO: 2612; WAN024CFK_at; Start 635; Stop 659
tgagctattacgaacttcatcaaca

SEQ ID NO: 116519 - DNA, 25 bp, Artificial
  probe
  misc_feature (1)..(25): SEQ ID NO: 2612; WAN024CFK_at; Start 64; Stop 88
tttaaacaagtttcgagcagtgtct

SEQ ID NO: 116520 - DNA, 25 bp, Artificial
  probe
  misc_feature (1)..(25): SEQ ID NO: 2612; WAN024CFK_at; Start 163; Stop 187
caaggtgatgtcattgattttgttc

SEQ ID NO: 116521 - DNA, 25 bp, Artificial
  probe
  misc_feature (1)..(25): SEQ ID NO: 2612; WAN024CFK_at; Start 709; Stop 733
gttgttgcttatcaaactttacgac

SEQ ID NO: 116522 - DNA, 25 bp, Artificial
  probe
  misc_feature (1)..(25): SEQ ID NO: 2612; WAN024CFK_at; Start 381; Stop 405
gatgattcaacaaggtttgatagca

SEQ ID NO: 116523 - DNA, 25 bp, Artificial
  probe
  misc_feature (1)..(25): SEQ ID NO: 2612; WAN024CFK_at; Start 835; Stop 859
gataatcatcctgatttattgacac

SEQ ID NO: 116524 - DNA, 25 bp, Artificial
  probe
  misc_feature (1)..(25): SEQ ID NO: 2612; WAN024CFK_at; Start 59; Stop 83
tctcctttaaacaagtttcgagcag

SEQ ID NO: 116525 - DNA, 25 bp, Artificial
  probe
  misc_feature (1)..(25): SEQ ID NO: 2612; WAN024CFK_at; Start 151; Stop 175
tcaagagatattcaaggtgatgtca

SEQ ID NO: 116526 - DNA, 25 bp, Artificial
  probe
  misc_feature (1)..(25): SEQ ID NO: 2612; WAN024CFK_at; Start 695; Stop 719
gattaaaaaggtctgttgttgctta

SEQ ID NO: 116527 - DNA, 25 bp, Artificial
  probe
  misc_feature (1)..(25): SEQ ID NO: 2612; WAN024CFK_at; Start 205; Stop 229
tcctttaaagaagctctagcctttc

SEQ ID NO: 116528 - DNA, 25 bp, Artificial
  probe
  misc_feature (1)..(25): SEQ ID NO: 2612; WAN024CFK_at; Start 210; Stop 234
taaagaagctctagcctttctttct

SEQ ID NO: 116529 - DNA, 25 bp, Artificial
  probe
  misc_feature (1)..(25): SEQ ID NO: 2612; WAN024CFK_at; Start 90; Stop 114
tgaacatcctgaacacgattcattt

SEQ ID NO: 116530 - DNA, 25 bp, Artificial
  probe
  misc_feature (1)..(25): SEQ ID NO: 2612; WAN024CFK_at; Start 146; Stop 170
ggttttcaagagatattcaaggtga

SEQ ID NO: 116531 - DNA, 25 bp, Artificial
  probe
  misc_feature (1)..(25): SEQ ID NO: 2612; WAN024CFK_at; Start 66; Stop 90
taaacaagtttcgagcagtgtctat

SEQ ID NO: 116532 - DNA, 25 bp, Artificial
  probe
  misc_feature (1)..(25): SEQ ID NO: 2612; WAN024CFK_at; Start 78; Stop 102
gagcagtgtctatgaacatcctgaa

SEQ ID NO: 116533 - DNA, 25 bp, Artificial
  probe
  misc_feature (1)..(25): SEQ ID NO: 2612; WAN024CFK_at; Start 70; Stop 94
caagtttcgagcagtgtctatgaac

SEQ ID NO: 116534 - DNA, 25 bp, Artificial
  probe
  misc_feature (1)..(25): SEQ ID NO: 1265; WAN024CFL_at; Start 78; Stop 102
tgaagaaggtaagcaactacctttc

SEQ ID NO: 116535 - DNA, 25 bp, Artificial
  probe
  misc_feature (1)..(25): SEQ ID NO: 1265; WAN024CFL_at; Start 214; Stop 238
aaacataagggcaaaattatacctg

SEQ ID NO: 116536 - DNA, 25 bp, Artificial
  probe
  misc_feature (1)..(25): SEQ ID NO: 1265; WAN024CFL_at; Start 134; Stop 158
tatcacatatcgatgaagcgcttac

SEQ ID NO: 116537 - DNA, 25 bp, Artificial
  probe
  misc_feature (1)..(25): SEQ ID NO: 1265; WAN024CFL_at; Start 121; Stop 145
ggaactcgcctaatatcacatatcg

SEQ ID NO: 116538 - DNA, 25 bp, Artificial
  probe
  misc_feature (1)..(25): SEQ ID NO: 1265; WAN024CFL_at; Start 90; Stop 114
gcaactacctttctatattggtaaa

SEQ ID NO: 116539 - DNA, 25 bp, Artificial
  probe
  misc_feature (1)..(25): SEQ ID NO: 1265; WAN024CFL_at; Start 74; Stop 98
tctatgaagaaggtaagcaactacc

SEQ ID NO: 116540 - DNA, 25 bp, Artificial
  probe
  misc_feature (1)..(25): SEQ ID NO: 1265; WAN024CFL_at; Start 152; Stop 176
cgcttacagagataaatcaagaaga

SEQ ID NO: 116541 - DNA, 25 bp, Artificial
  probe
  misc_feature (1)..(25): SEQ ID NO: 1265; WAN024CFL_at; Start 111; Stop 135
taaaggagagggaactcgcctaata

SEQ ID NO: 116542 - DNA, 25 bp, Artificial
  probe
  misc_feature (1)..(25): SEQ ID NO: 1265; WAN024CFL_at; Start 219; Stop 243
taagggcaaaattatacctgtaatc

SEQ ID NO: 116543 - DNA, 25 bp, Artificial
  probe
  misc_feature (1)..(25): SEQ ID NO: 1265; WAN024CFL_at; Start 101; Stop 125
tctatattggtaaaggagagggaac

SEQ ID NO: 116544 - DNA, 25 bp, Artificial
  probe
  misc_feature (1)..(25): SEQ ID NO: 1265; WAN024CFL_at; Start 52; Stop 76
gataaatactatgtttacggactct

SEQ ID NO: 116545 - DNA, 25 bp, Artificial
  probe
  misc_feature (1)..(25): SEQ ID NO: 1265; WAN024CFL_at; Start 115; Stop 139
ggagagggaactcgcctaatatcac

SEQ ID NO: 116546 - DNA, 25 bp, Artificial
  probe
  misc_feature (1)..(25): SEQ ID NO: 1265; WAN024CFL_at; Start 31; Stop 55
ggtgctaccaaaaatgaaaaagata

SEQ ID NO: 116547 - DNA, 25 bp, Artificial
  probe
  misc_feature (1)..(25): SEQ ID NO: 1265; WAN024CFL_at; Start 59; Stop 83
actatgtttacggactctatgaaga

SEQ ID NO: 116548 - DNA, 25 bp, Artificial
  probe
  misc_feature (1)..(25): SEQ ID NO: 1265; WAN024CFL_at; Start 222; Stop 246
gggcaaaattatacctgtaatcatt

SEQ ID NO: 116549 - DNA, 25 bp, Artificial
  probe
  misc_feature (1)..(25): SEQ ID NO: 1265; WAN024CFL_at; Start 22; Stop 46
gatattactggtgctaccaaaaatg

SEQ ID NO: 116550 - DNA, 25 bp, Artificial
  probe
  misc_feature (1)..(25): SEQ ID NO: 1265; WAN024CFL_at; Start 143; Stop 167
tcgatgaagcgcttacagagataaa

SEQ ID NO: 116551 - DNA, 25 bp, Artificial
  probe
  misc_feature (1)..(25): SEQ ID NO: 1265; WAN024CFL_at; Start 29; Stop 53
ctggtgctaccaaaaatgaaaaaga

SEQ ID NO: 116552 - DNA, 25 bp, Artificial
  probe
  misc_feature (1)..(25): SEQ ID NO: 1265; WAN024CFL_at; Start 108; Stop 132
tggtaaaggagagggaactcgccta

SEQ ID NO: 116553 - DNA, 25 bp, Artificial
  probe
  misc_feature (1)..(25): SEQ ID NO: 1265; WAN024CFL_at; Start 63; Stop 87
tgtttacggactctatgaagaaggt

SEQ ID NO: 116554 - DNA, 25 bp, Artificial
  probe
  misc_feature (1)..(25): SEQ ID NO: 1265; WAN024CFL_at; Start 131; Stop 155
taatatcacatatcgatgaagcgct

SEQ ID NO: 116555 - DNA, 25 bp, Artificial
  probe
  misc_feature (1)..(25): SEQ ID NO: 1265; WAN024CFL_at; Start 105; Stop 129
tattggtaaaggagagggaactcgc

SEQ ID NO: 116556 - DNA, 25 bp, Artificial
  probe
  misc_feature (1)..(25): SEQ ID NO: 1265; WAN024CFL_at; Start 71; Stop 95
gactctatgaagaaggtaagcaact

SEQ ID NO: 116557 - DNA, 25 bp, Artificial
  probe
  misc_feature (1)..(25): SEQ ID NO: 1265; WAN024CFL_at; Start 127; Stop 151
cgcctaatatcacatatcgatgaag

SEQ ID NO: 116558 - DNA, 25 bp, Artificial
  probe
  misc_feature (1)..(25): SEQ ID NO: 1265; WAN024CFL_at; Start 201; Stop 225
tcaaattattagaaaacataagggc

SEQ ID NO: 116559 - DNA, 25 bp, Artificial
  probe
  misc_feature (1)..(25): SEQ ID NO: 1265; WAN024CFL_at; Start 67; Stop 91
tacggactctatgaagaaggtaagc

SEQ ID NO: 116560 - DNA, 25 bp, Artificial
  probe
  misc_feature (1)..(25): SEQ ID NO: 1265; WAN024CFL_at; Start 168; Stop 192
tcaagaagaaaacatacaaattagt

SEQ ID NO: 116561 - DNA, 25 bp, Artificial
  probe
  misc_feature (1)..(25): SEQ ID NO: 1265; WAN024CFL_at; Start 139; Stop 163
catatcgatgaagcgcttacagaga

SEQ ID NO: 116562 - DNA, 25 bp, Artificial
  probe
  misc_feature (1)..(25): SEQ ID NO: 1265; WAN024CFL_at; Start 17; Stop 41
taaatgatattactggtgctaccaa

SEQ ID NO: 116563 - DNA, 25 bp, Artificial
  probe
  misc_feature (1)..(25): SEQ ID NO: 1265; WAN024CFL_at; Start 118; Stop 142
gagggaactcgcctaatatcacata

SEQ ID NO: 116564 - DNA, 25 bp, Artificial
  probe
  misc_feature (1)..(25): SEQ ID NO: 1265; WAN024CFL_at; Start 86; Stop 110
gtaagcaactacctttctatattgg

SEQ ID NO: 116565 - DNA, 25 bp, Artificial
  probe
  misc_feature (1)..(25): SEQ ID NO: 1265; WAN024CFL_at; Start 145; Stop 169
gatgaagcgcttacagagataaatc

SEQ ID NO: 116566 - DNA, 25 bp, Artificial
  probe
  misc_feature (1)..(25): SEQ ID NO: 1265; WAN024CFL_at; Start 136; Stop 160
tcacatatcgatgaagcgcttacag

SEQ ID NO: 116567 - DNA, 25 bp, Artificial
  probe
  misc_feature (1)..(25): SEQ ID NO: 1265; WAN024CFL_at; Start 148; Stop 172
gaagcgcttacagagataaatcaag

SEQ ID NO: 116568 - DNA, 25 bp, Artificial
  probe
  misc_feature (1)..(25): SEQ ID NO: 1050; WAN024CFM_at; Start 493; Stop 517
cccattattacagcaggaaaattca

SEQ ID NO: 116569 - DNA, 25 bp, Artificial
  probe
  misc_feature (1)..(25): SEQ ID NO: 1050; WAN024CFM_at; Start 173; Stop 197
caagggtgataaactcaaatacagc

SEQ ID NO: 116570 - DNA, 25 bp, Artificial
  probe
  misc_feature (1)..(25): SEQ ID NO: 1050; WAN024CFM_at; Start 150; Stop 174
ccctgcatttattttcttagtgaca

SEQ ID NO: 116571 - DNA, 25 bp, Artificial
  probe
  misc_feature (1)..(25): SEQ ID NO: 1050; WAN024CFM_at; Start 484; Stop 508
taccttctacccattattacagcag

SEQ ID NO: 116572 - DNA, 25 bp, Artificial
  probe
  misc_feature (1)..(25): SEQ ID NO: 1050; WAN024CFM_at; Start 201; Stop 225
tagaactggttacaatagcgacgga

SEQ ID NO: 116573 - DNA, 25 bp, Artificial
  probe
  misc_feature (1)..(25): SEQ ID NO: 1050; WAN024CFM_at; Start 133; Stop 157
gaaggatataaattttaccctgcat

SEQ ID NO: 116574 - DNA, 25 bp, Artificial
  probe
  misc_feature (1)..(25): SEQ ID NO: 1050; WAN024CFM_at; Start 250; Stop 274
gagccactttatacaatttttgatg

SEQ ID NO: 116575 - DNA, 25 bp, Artificial
  probe
  misc_feature (1)..(25): SEQ ID NO: 1050; WAN024CFM_at; Start 307; Stop 331
cctgtaaagaatgacttcaaagagt

SEQ ID NO: 116576 - DNA, 25 bp, Artificial
  probe
  misc_feature (1)..(25): SEQ ID NO: 1050; WAN024CFM_at; Start 213; Stop 237
caatagcgacggagagttaggttat

SEQ ID NO: 116577 - DNA, 25 bp, Artificial
  probe
  misc_feature (1)..(25): SEQ ID NO: 1050; WAN024CFM_at; Start 55; Stop 79
cattatttgaaccaacaaacgactt

SEQ ID NO: 116578 - DNA, 25 bp, Artificial
  probe
  misc_feature (1)..(25): SEQ ID NO: 1050; WAN024CFM_at; Start 383; Stop 407
tgtttcccaaaacacctatacctga

SEQ ID NO: 116579 - DNA, 25 bp, Artificial
  probe
  misc_feature (1)..(25): SEQ ID NO: 1050; WAN024CFM_at; Start 86; Stop 110
taaccacagaaattgatattagtgt

SEQ ID NO: 116580 - DNA, 25 bp, Artificial
  probe
  misc_feature (1)..(25): SEQ ID NO: 1050; WAN024CFM_at; Start 297; Stop 321
tatttggactcctgtaaagaatgac

SEQ ID NO: 116581 - DNA, 25 bp, Artificial
  probe
  misc_feature (1)..(25): SEQ ID NO: 1050; WAN024CFM_at; Start 352; Stop 376
gatgtagagaaatataatggttcgg

SEQ ID NO: 116582 - DNA, 25 bp, Artificial
  probe
  misc_feature (1)..(25): SEQ ID NO: 1050; WAN024CFM_at; Start 554; Stop 578
tacaggtacatcattctgtttgtga

SEQ ID NO: 116583 - DNA, 25 bp, Artificial
  probe
  misc_feature (1)..(25): SEQ ID NO: 1050; WAN024CFM_at; Start 271; Stop 295
gatggtgtatctaaaacattctctg

SEQ ID NO: 116584 - DNA, 25 bp, Artificial
  probe
  misc_feature (1)..(25): SEQ ID NO: 1050; WAN024CFM_at; Start 505; Stop 529
gcaggaaaattcattaataaaggta

SEQ ID NO: 116585 - DNA, 25 bp, Artificial
  probe
  misc_feature (1)..(25): SEQ ID NO: 1050; WAN024CFM_at; Start 613; Stop 637
caggaattgtcagataggcctaatg

SEQ ID NO: 116586 - DNA, 25 bp, Artificial
  probe
  misc_feature (1)..(25): SEQ ID NO: 1050; WAN024CFM_at; Start 70; Stop 94
caaacgacttttagtataaccacag

SEQ ID NO: 116587 - DNA, 25 bp, Artificial
  probe
  misc_feature (1)..(25): SEQ ID NO: 1050; WAN024CFM_at; Start 429; Stop 453
tattccatggacttcatttactggg

SEQ ID NO: 116588 - DNA, 25 bp, Artificial
  probe
  misc_feature (1)..(25): SEQ ID NO: 1050; WAN024CFM_at; Start 394; Stop 418
acacctatacctgaaaatgcttttt

SEQ ID NO: 116589 - DNA, 25 bp, Artificial
  probe
  misc_feature (1)..(25): SEQ ID NO: 1050; WAN024CFM_at; Start 186; Stop 210
ctcaaatacagcttttagaactggt

SEQ ID NO: 116590 - DNA, 25 bp, Artificial
  probe
  misc_feature (1)..(25): SEQ ID NO: 1050; WAN024CFM_at; Start 623; Stop 647
cagataggcctaatgactggctttt

SEQ ID NO: 116591 - DNA, 25 bp, Artificial
  probe
  misc_feature (1)..(25): SEQ ID NO: 1050; WAN024CFM_at; Start 337; Stop 361
gatttatacctttctgatgtagaga

SEQ ID NO: 116592 - DNA, 25 bp, Artificial
  probe
  misc_feature (1)..(25): SEQ ID NO: 1050; WAN024CFM_at; Start 570; Stop 594
tgtttgtgatggttatcatgcagga

SEQ ID NO: 116593 - DNA, 25 bp, Artificial
  probe
  misc_feature (1)..(25): SEQ ID NO: 1050; WAN024CFM_at; Start 284; Stop 308
aaacattctctggtatttggactcc

SEQ ID NO: 116594 - DNA, 25 bp, Artificial
  probe
  misc_feature (1)..(25): SEQ ID NO: 1050; WAN024CFM_at; Start 538; Stop 562
tatttaccgctatctttacaggtac

SEQ ID NO: 116595 - DNA, 25 bp, Artificial
  probe
  misc_feature (1)..(25): SEQ ID NO: 1050; WAN024CFM_at; Start 232; Stop 256
ggttattgggataagttagagccac

SEQ ID NO: 116596 - DNA, 25 bp, Artificial
  probe
  misc_feature (1)..(25): SEQ ID NO: 1050; WAN024CFM_at; Start 602; Stop 626
tgaactctattcaggaattgtcaga

SEQ ID NO: 116597 - DNA, 25 bp, Artificial
  probe
  misc_feature (1)..(25): SEQ ID NO: 1050; WAN024CFM_at; Start 23; Stop 47
tagacaattggaagagaaaagagat

SEQ ID NO: 116598 - DNA, 25 bp, Artificial
  probe
  misc_feature (1)..(25): SEQ ID NO: 1050; WAN024CFM_at; Start 117; Stop 141
ccgaaacataaaacaagaaggatat

SEQ ID NO: 116599 - DNA, 25 bp, Artificial
  probe
  misc_feature (1)..(25): SEQ ID NO: 1050; WAN024CFM_at; Start 586; Stop 610
catgcaggattgtttatgaactcta

SEQ ID NO: 116600 - DNA, 25 bp, Artificial
  probe
  misc_feature (1)..(25): SEQ ID NO: 1050; WAN024CFM_at; Start 100; Stop 124
gatattagtgttttataccgaaaca

SEQ ID NO: 116601 - DNA, 25 bp, Artificial
  probe
  misc_feature (1)..(25): SEQ ID NO: 1050; WAN024CFM_at; Start 164; Stop 188
tcttagtgacaagggtgataaactc

SEQ ID NO: 116602 - DNA, 25 bp, Artificial
  probe
  misc_feature (1)..(25): SEQ ID NO: 7340; WAN024CFN_at; Start 195; Stop 219
cccctattatcaagataagaaagaa

SEQ ID NO: 116603 - DNA, 25 bp, Artificial
  probe
  misc_feature (1)..(25): SEQ ID NO: 7340; WAN024CFN_at; Start 196; Stop 220
ccctattatcaagataagaaagaaa

SEQ ID NO: 116604 - DNA, 25 bp, Artificial
  probe
  misc_feature (1)..(25): SEQ ID NO: 7340; WAN024CFN_at; Start 201; Stop 225
ttatcaagataagaaagaaaaggat

SEQ ID NO: 116605 - DNA, 25 bp, Artificial
  probe
  misc_feature (1)..(25): SEQ ID NO: 7340; WAN024CFN_at; Start 217; Stop 241
gaaaaggatttttcgctacgctcaa

SEQ ID NO: 116606 - DNA, 25 bp, Artificial
  probe
  misc_feature (1)..(25): SEQ ID NO: 7340; WAN024CFN_at; Start 220; Stop 244
aaggatttttcgctacgctcaaatc

SEQ ID NO: 116607 - DNA, 25 bp, Artificial
  probe
  misc_feature (1)..(25): SEQ ID NO: 7340; WAN024CFN_at; Start 221; Stop 245
aggatttttcgctacgctcaaatcc

SEQ ID NO: 116608 - DNA, 25 bp, Artificial
  probe
  misc_feature (1)..(25): SEQ ID NO: 7340; WAN024CFN_at; Start 261; Stop 285
aagaccacattttttaatgtggtct

SEQ ID NO: 116609 - DNA, 25 bp, Artificial
  probe
  misc_feature (1)..(25): SEQ ID NO: 7340; WAN024CFN_at; Start 224; Stop 248
atttttcgctacgctcaaatccttt

SEQ ID NO: 116610 - DNA, 25 bp, Artificial
  probe
  misc_feature (1)..(25): SEQ ID NO: 7340; WAN024CFN_at; Start 258; Stop 282
caaaagaccacattttttaatgtgg

SEQ ID NO: 116611 - DNA, 25 bp, Artificial
  probe
  misc_feature (1)..(25): SEQ ID NO: 7340; WAN024CFN_at; Start 219; Stop 243
aaaggatttttcgctacgctcaaat

SEQ ID NO: 116612 - DNA, 25 bp, Artificial
  probe
  misc_feature (1)..(25): SEQ ID NO: 7340; WAN024CFN_at; Start 256; Stop 280
cacaaaagaccacattttttaatgt

SEQ ID NO: 116613 - DNA, 25 bp, Artificial
  probe
  misc_feature (1)..(25): SEQ ID NO: 7340; WAN024CFN_at; Start 194; Stop 218
acccctattatcaagataagaaaga

SEQ ID NO: 116614 - DNA, 25 bp, Artificial
  probe
  misc_feature (1)..(25): SEQ ID NO: 7340; WAN024CFN_at; Start 199; Stop 223
tattatcaagataagaaagaaaagg

SEQ ID NO: 116615 - DNA, 25 bp, Artificial
  probe
  misc_feature (1)..(25): SEQ ID NO: 7340; WAN024CFN_at; Start 202; Stop 226
tatcaagataagaaagaaaaggatt

SEQ ID NO: 116616 - DNA, 25 bp, Artificial
  probe
  misc_feature (1)..(25): SEQ ID NO: 7340; WAN024CFN_at; Start 227; Stop 251
tttcgctacgctcaaatcctttaaa

SEQ ID NO: 116617 - DNA, 25 bp, Artificial
  probe
  misc_feature (1)..(25): SEQ ID NO: 7340; WAN024CFN_at; Start 200; Stop 224
attatcaagataagaaagaaaagga

SEQ ID NO: 116618 - DNA, 25 bp, Artificial
  probe
  misc_feature (1)..(25): SEQ ID NO: 7340; WAN024CFN_at; Start 203; Stop 227
atcaagataagaaagaaaaggattt

SEQ ID NO: 116619 - DNA, 25 bp, Artificial
  probe
  misc_feature (1)..(25): SEQ ID NO: 7340; WAN024CFN_at; Start 228; Stop 252
ttcgctacgctcaaatcctttaaaa

SEQ ID NO: 116620 - DNA, 25 bp, Artificial
  probe
  misc_feature (1)..(25): SEQ ID NO: 7340; WAN024CFN_at; Start 197; Stop 221
cctattatcaagataagaaagaaaa

SEQ ID NO: 116621 - DNA, 25 bp, Artificial
  probe
  misc_feature (1)..(25): SEQ ID NO: 7340; WAN024CFN_at; Start 226; Stop 250
ttttcgctacgctcaaatcctttaa

SEQ ID NO: 116622 - DNA, 25 bp, Artificial
  probe
  misc_feature (1)..(25): SEQ ID NO: 7340; WAN024CFN_at; Start 223; Stop 247
gatttttcgctacgctcaaatcctt

SEQ ID NO: 116623 - DNA, 25 bp, Artificial
  probe
  misc_feature (1)..(25): SEQ ID NO: 7340; WAN024CFN_at; Start 257; Stop 281
acaaaagaccacattttttaatgtg

SEQ ID NO: 116624 - DNA, 25 bp, Artificial
  probe
  misc_feature (1)..(25): SEQ ID NO: 7340; WAN024CFN_at; Start 255; Stop 279
acacaaaagaccacattttttaatg

SEQ ID NO: 116625 - DNA, 25 bp, Artificial
  probe
  misc_feature (1)..(25): SEQ ID NO: 7340; WAN024CFN_at; Start 198; Stop 222
ctattatcaagataagaaagaaaag

SEQ ID NO: 116626 - DNA, 25 bp, Artificial
  probe
  misc_feature (1)..(25): SEQ ID NO: 7340; WAN024CFN_at; Start 222; Stop 246
ggatttttcgctacgctcaaatcct

SEQ ID NO: 116627 - DNA, 25 bp, Artificial
  probe
  misc_feature (1)..(25): SEQ ID NO: 7340; WAN024CFN_at; Start 216; Stop 240
agaaaaggatttttcgctacgctca

SEQ ID NO: 116628 - DNA, 25 bp, Artificial
  probe
  misc_feature (1)..(25): SEQ ID NO: 7340; WAN024CFN_at; Start 225; Stop 249
tttttcgctacgctcaaatccttta

SEQ ID NO: 116629 - DNA, 25 bp, Artificial
  probe
  misc_feature (1)..(25): SEQ ID NO: 7340; WAN024CFN_at; Start 229; Stop 253
tcgctacgctcaaatcctttaaaaa

SEQ ID NO: 116630 - DNA, 25 bp, Artificial
  probe
  misc_feature (1)..(25): SEQ ID NO: 7079; WAN024CFO_at; Start 535; Stop 559
aaggaattagacaaggtacttagct

SEQ ID NO: 116631 - DNA, 25 bp, Artificial
  probe
  misc_feature (1)..(25): SEQ ID NO: 7079; WAN024CFO_at; Start 324; Stop 348
gcacacctttatctcatcttatgaa

SEQ ID NO: 116632 - DNA, 25 bp, Artificial
  probe
  misc_feature (1)..(25): SEQ ID NO: 7079; WAN024CFO_at; Start 430; Stop 454
ggtggtcagcaacagcacatgtatc

SEQ ID NO: 116633 - DNA, 25 bp, Artificial
  probe
  misc_feature (1)..(25): SEQ ID NO: 7079; WAN024CFO_at; Start 618; Stop 642
tcagatttgggaaatcaaggatggg

SEQ ID NO: 116634 - DNA, 25 bp, Artificial
  probe
  misc_feature (1)..(25): SEQ ID NO: 7079; WAN024CFO_at; Start 643; Stop 667
gagttggttgtcgtgaaaagagttc

SEQ ID NO: 116635 - DNA, 25 bp, Artificial
  probe
  misc_feature (1)..(25): SEQ ID NO: 7079; WAN024CFO_at; Start 441; Stop 465
acagcacatgtatctcaatcgggag

SEQ ID NO: 116636 - DNA, 25 bp, Artificial
  probe
  misc_feature (1)..(25): SEQ ID NO: 7079; WAN024CFO_at; Start 306; Stop 330
tatgattttgcaacaggagcacacc

SEQ ID NO: 116637 - DNA, 25 bp, Artificial
  probe
  misc_feature (1)..(25): SEQ ID NO: 7079; WAN024CFO_at; Start 520; Stop 544
gccagccaatttcaaaaggaattag

SEQ ID NO: 116638 - DNA, 25 bp, Artificial
  probe
  misc_feature (1)..(25): SEQ ID NO: 7079; WAN024CFO_at; Start 315; Stop 339
gcaacaggagcacacctttatctca

SEQ ID NO: 116639 - DNA, 25 bp, Artificial
  probe
  misc_feature (1)..(25): SEQ ID NO: 7079; WAN024CFO_at; Start 335; Stop 359
tctcatcttatgaaaataatgtcac

SEQ ID NO: 116640 - DNA, 25 bp, Artificial
  probe
  misc_feature (1)..(25): SEQ ID NO: 7079; WAN024CFO_at; Start 546; Stop 570
caaggtacttagcttgtcaagtgct

SEQ ID NO: 116641 - DNA, 25 bp, Artificial
  probe
  misc_feature (1)..(25): SEQ ID NO: 7079; WAN024CFO_at; Start 241; Stop 265
ccctattatcaaggtgaaatcttac

SEQ ID NO: 116642 - DNA, 25 bp, Artificial
  probe
  misc_feature (1)..(25): SEQ ID NO: 7079; WAN024CFO_at; Start 256; Stop 280
gaaatcttacttgatcatctccctg

SEQ ID NO: 116643 - DNA, 25 bp, Artificial
  probe
  misc_feature (1)..(25): SEQ ID NO: 7079; WAN024CFO_at; Start 585; Stop 609
tcaccgtcaagaagagatgctatca

SEQ ID NO: 116644 - DNA, 25 bp, Artificial
  probe
  misc_feature (1)..(25): SEQ ID NO: 7079; WAN024CFO_at; Start 451; Stop 475
tatctcaatcgggagaaaaatcgtc

SEQ ID NO: 116645 - DNA, 25 bp, Artificial
  probe
  misc_feature (1)..(25): SEQ ID NO: 7079; WAN024CFO_at; Start 391; Stop 415
gatgaaaagtttgaaaagataccac

SEQ ID NO: 116646 - DNA, 25 bp, Artificial
  probe
  misc_feature (1)..(25): SEQ ID NO: 7079; WAN024CFO_at; Start 475; Stop 499
catagtccgctaattatcatggatg

SEQ ID NO: 116647 - DNA, 25 bp, Artificial
  probe
  misc_feature (1)..(25): SEQ ID NO: 7079; WAN024CFO_at; Start 402; Stop 426
tgaaaagataccaccccagtccctg

SEQ ID NO: 116648 - DNA, 25 bp, Artificial
  probe
  misc_feature (1)..(25): SEQ ID NO: 7079; WAN024CFO_at; Start 271; Stop 295
catctccctgttcatcaactctggg

SEQ ID NO: 116649 - DNA, 25 bp, Artificial
  probe
  misc_feature (1)..(25): SEQ ID NO: 7079; WAN024CFO_at; Start 488; Stop 512
ttatcatggatgagcctttttctgc

SEQ ID NO: 116650 - DNA, 25 bp, Artificial
  probe
  misc_feature (1)..(25): SEQ ID NO: 7079; WAN024CFO_at; Start 417; Stop 441
ccagtccctgtcaggtggtcagcaa

SEQ ID NO: 116651 - DNA, 25 bp, Artificial
  probe
  misc_feature (1)..(25): SEQ ID NO: 7079; WAN024CFO_at; Start 571; Stop 595
gtcgtccttacacttcaccgtcaag

SEQ ID NO: 116652 - DNA, 25 bp, Artificial
  probe
  misc_feature (1)..(25): SEQ ID NO: 7079; WAN024CFO_at; Start 557; Stop 581
gcttgtcaagtgctgtcgtccttac

SEQ ID NO: 116653 - DNA, 25 bp, Artificial
  probe
  misc_feature (1)..(25): SEQ ID NO: 7079; WAN024CFO_at; Start 463; Stop 487
gagaaaaatcgtcatagtccgctaa

SEQ ID NO: 116654 - DNA, 25 bp, Artificial
  probe
  misc_feature (1)..(25): SEQ ID NO: 7079; WAN024CFO_at; Start 503; Stop 527
ctttttctgctttggatgccagcca

SEQ ID NO: 116655 - DNA, 25 bp, Artificial
  probe
  misc_feature (1)..(25): SEQ ID NO: 7079; WAN024CFO_at; Start 515; Stop 539
tggatgccagccaatttcaaaagga

SEQ ID NO: 116656 - DNA, 25 bp, Artificial
  probe
  misc_feature (1)..(25): SEQ ID NO: 7079; WAN024CFO_at; Start 654; Stop 678
cgtgaaaagagttctaaaacatgac

SEQ ID NO: 116657 - DNA, 25 bp, Artificial
  probe
  misc_feature (1)..(25): SEQ ID NO: 7079; WAN024CFO_at; Start 607; Stop 631
tcacgctttgatcagatttgggaaa

SEQ ID NO: 116658 - DNA, 25 bp, Artificial
  probe
  misc_feature (1)..(25): SEQ ID NO: 7079; WAN024CFO_at; Start 30; Stop 54
cagtatacttttccatgttataaca

SEQ ID NO: 116659 - DNA, 25 bp, Artificial
  probe
  misc_feature (1)..(25): SEQ ID NO: 7079; WAN024CFO_at; Start 598; Stop 622
gagatgctatcacgctttgatcaga

SEQ ID NO: 116660 - DNA, 25 bp, Artificial
  probe
  misc_feature (1)..(25): SEQ ID NO: 7079; WAN024CFO_at; Start 375; Stop 399
tgaggctaattttagggatgaaaag

SEQ ID NO: 116661 - DNA, 25 bp, Artificial
  probe
  misc_feature (1)..(25): SEQ ID NO: 7079; WAN024CFO_at; Start 297; Stop 321
caaatttggtatgattttgcaacag

SEQ ID NO: 116662 - DNA, 25 bp, Artificial
  probe
  misc_feature (1)..(25): SEQ ID NO: 7079; WAN024CFO_at; Start 356; Stop 380
tcactattttcaagacttttgaggc

SEQ ID NO: 116663 - DNA, 25 bp, Artificial
  probe
  misc_feature (1)..(25): SEQ ID NO: 7079; WAN024CFO_at; Start 366; Stop 390
caagacttttgaggctaattttagg

SEQ ID NO: 116664 - DNA, 25 bp, Artificial
  probe
  misc_feature (1)..(25): SEQ ID NO: 2969; WAN024CFP_at; Start 785; Stop 809
taaaagaaattgatccaaccgaata

SEQ ID NO: 116665 - DNA, 25 bp, Artificial
  probe
  misc_feature (1)..(25): SEQ ID NO: 2969; WAN024CFP_at; Start 909; Stop 933
gatagacgaaatcgaggaagaacaa

SEQ ID NO: 116666 - DNA, 25 bp, Artificial
  probe
  misc_feature (1)..(25): SEQ ID NO: 2969; WAN024CFP_at; Start 245; Stop 269
tgatgatgcaatatattaagcagca

SEQ ID NO: 116667 - DNA, 25 bp, Artificial
  probe
  misc_feature (1)..(25): SEQ ID NO: 2969; WAN024CFP_at; Start 66; Stop 90
taaacgtcatattggagagaatcaa

SEQ ID NO: 116668 - DNA, 25 bp, Artificial
  probe
  misc_feature (1)..(25): SEQ ID NO: 2969; WAN024CFP_at; Start 541; Stop 565
gatttatggcgtgatgtaacgggca

SEQ ID NO: 116669 - DNA, 25 bp, Artificial
  probe
  misc_feature (1)..(25): SEQ ID NO: 2969; WAN024CFP_at; Start 403; Stop 427
aagggatatgttcgtaagttagaga

SEQ ID NO: 116670 - DNA, 25 bp, Artificial
  probe
  misc_feature (1)..(25): SEQ ID NO: 2969; WAN024CFP_at; Start 88; Stop 112
caaatggatttagttgaagattgca

SEQ ID NO: 116671 - DNA, 25 bp, Artificial
  probe
  misc_feature (1)..(25): SEQ ID NO: 2969; WAN024CFP_at; Start 196; Stop 220
cctgtctgtgcttggagaaaagcta

SEQ ID NO: 116672 - DNA, 25 bp, Artificial
  probe
  misc_feature (1)..(25): SEQ ID NO: 2969; WAN024CFP_at; Start 481; Stop 505
gcagtaaataaatcgtatttcacag

SEQ ID NO: 116673 - DNA, 25 bp, Artificial
  probe
  misc_feature (1)..(25): SEQ ID NO: 2969; WAN024CFP_at; Start 529; Stop 553
caagaatggttagatttatggcgtg

SEQ ID NO: 116674 - DNA, 25 bp, Artificial
  probe
  misc_feature (1)..(25): SEQ ID NO: 2969; WAN024CFP_at; Start 4; Stop 28
tgttataacatggaaaagtatactg

SEQ ID NO: 116675 - DNA, 25 bp, Artificial
  probe
  misc_feature (1)..(25): SEQ ID NO: 2969; WAN024CFP_at; Start 230; Stop 254
cattgggtttatctttgatgatgca

SEQ ID NO: 116676 - DNA, 25 bp, Artificial
  probe
  misc_feature (1)..(25): SEQ ID NO: 2969; WAN024CFP_at; Start 460; Stop 484
cctcattttcatgtgttaattgcag

SEQ ID NO: 116677 - DNA, 25 bp, Artificial
  probe
  misc_feature (1)..(25): SEQ ID NO: 2969; WAN024CFP_at; Start 553; Stop 577
gatgtaacgggcatttcagaaataa

SEQ ID NO: 116678 - DNA, 25 bp, Artificial
  probe
  misc_feature (1)..(25): SEQ ID NO: 2969; WAN024CFP_at; Start 727; Stop 751
tattcaggattatttaaagaggcta

SEQ ID NO: 116679 - DNA, 25 bp, Artificial
  probe
  misc_feature (1)..(25): SEQ ID NO: 2969; WAN024CFP_at; Start 261; Stop 285
taagcagcaagagaaaaaggagttt

SEQ ID NO: 116680 - DNA, 25 bp, Artificial
  probe
  misc_feature (1)..(25): SEQ ID NO: 2969; WAN024CFP_at; Start 182; Stop 206
aaaatcgattttgtcctgtctgtgc

SEQ ID NO: 116681 - DNA, 25 bp, Artificial
  probe
  misc_feature (1)..(25): SEQ ID NO: 2969; WAN024CFP_at; Start 22; Stop 46
tatactgagaaaaaacaaagaaatc

SEQ ID NO: 116682 - DNA, 25 bp, Artificial
  probe
  misc_feature (1)..(25): SEQ ID NO: 2969; WAN024CFP_at; Start 796; Stop 820
gatccaaccgaatatatctatcaaa

SEQ ID NO: 116683 - DNA, 25 bp, Artificial
  probe
  misc_feature (1)..(25): SEQ ID NO: 2969; WAN024CFP_at; Start 133; Stop 157
gctgataaaactttagaaaaacaga

SEQ ID NO: 116684 - DNA, 25 bp, Artificial
  probe
  misc_feature (1)..(25): SEQ ID NO: 2969; WAN024CFP_at; Start 391; Stop 415
ggtagtgttataaagggatatgttc

SEQ ID NO: 116685 - DNA, 25 bp, Artificial
  probe
  misc_feature (1)..(25): SEQ ID NO: 2969; WAN024CFP_at; Start 563; Stop 587
gcatttcagaaataacacaagttca

SEQ ID NO: 116686 - DNA, 25 bp, Artificial
  probe
  misc_feature (1)..(25): SEQ ID NO: 2969; WAN024CFP_at; Start 299; Stop 323
tgactacacctaatgtaatgagtga

SEQ ID NO: 116687 - DNA, 25 bp, Artificial
  probe
  misc_feature (1)..(25): SEQ ID NO: 2969; WAN024CFP_at; Start 165; Stop 189
taaagctaattcttgtaaaaatcga

SEQ ID NO: 116688 - DNA, 25 bp, Artificial
  probe
  misc_feature (1)..(25): SEQ ID NO: 2969; WAN024CFP_at; Start 838; Stop 862
caaaaagagtatttagctagtgaac

SEQ ID NO: 116689 - DNA, 25 bp, Artificial
  probe
  misc_feature (1)..(25): SEQ ID NO: 2969; WAN024CFP_at; Start 628; Stop 652
gaaatggctaagtattctggtaaag

SEQ ID NO: 116690 - DNA, 25 bp, Artificial
  probe
  misc_feature (1)..(25): SEQ ID NO: 2969; WAN024CFP_at; Start 900; Stop 924
tcacaaaatgatagacgaaatcgag

SEQ ID NO: 116691 - DNA, 25 bp, Artificial
  probe
  misc_feature (1)..(25): SEQ ID NO: 2969; WAN024CFP_at; Start 514; Stop 538
tattatattagccaacaagaatggt

SEQ ID NO: 116692 - DNA, 25 bp, Artificial
  probe
  misc_feature (1)..(25): SEQ ID NO: 2969; WAN024CFP_at; Start 578; Stop 602
cacaagttcaagttcaaaaaataag

SEQ ID NO: 116693 - DNA, 25 bp, Artificial
  probe
  misc_feature (1)..(25): SEQ ID NO: 2969; WAN024CFP_at; Start 116; Stop 140
catttctgtcttttgtagctgataa

SEQ ID NO: 116694 - DNA, 25 bp, Artificial
  probe
  misc_feature (1)..(25): SEQ ID NO: 2969; WAN024CFP_at; Start 853; Stop 877
gctagtgaactttatgacttaacag

SEQ ID NO: 116695 - DNA, 25 bp, Artificial
  probe
  misc_feature (1)..(25): SEQ ID NO: 2969; WAN024CFP_at; Start 212; Stop 236
gaaaagctagaaaagatgcattggg

SEQ ID NO: 116696 - DNA, 25 bp, Artificial
  probe
  misc_feature (1)..(25): SEQ ID NO: 2969; WAN024CFP_at; Start 714; Stop 738
acaggtattagtttattcaggatta

SEQ ID NO: 116697 - DNA, 25 bp, Artificial
  probe
  misc_feature (1)..(25): SEQ ID NO: 2969; WAN024CFP_at; Start 102; Stop 126
tgaagattgcaatacatttctgtct

SEQ ID NO: 116698 - DNA, 25 bp, Artificial
  probe
  misc_feature (1)..(25): SEQ ID NO: 1405; WAN024CFQ_at; Start 91; Stop 115
caactggagacagcgatgtttgcga

SEQ ID NO: 116699 - DNA, 25 bp, Artificial
  probe
  misc_feature (1)..(25): SEQ ID NO: 1405; WAN024CFQ_at; Start 50; Stop 74
aggtagcaagagagacagaaaaact

SEQ ID NO: 116700 - DNA, 25 bp, Artificial
  probe
  misc_feature (1)..(25): SEQ ID NO: 1405; WAN024CFQ_at; Start 109; Stop 133
tttgcgacgttcaaaaggcgtcaaa

SEQ ID NO: 116701 - DNA, 25 bp, Artificial
  probe
  misc_feature (1)..(25): SEQ ID NO: 1405; WAN024CFQ_at; Start 108; Stop 132
gtttgcgacgttcaaaaggcgtcaa

SEQ ID NO: 116702 - DNA, 25 bp, Artificial
  probe
  misc_feature (1)..(25): SEQ ID NO: 1405; WAN024CFQ_at; Start 22; Stop 46
gaagaaaaggtcactaggcaagaaa

SEQ ID NO: 116703 - DNA, 25 bp, Artificial
  probe
  misc_feature (1)..(25): SEQ ID NO: 1405; WAN024CFQ_at; Start 18; Stop 42
cttagaagaaaaggtcactaggcaa

SEQ ID NO: 116704 - DNA, 25 bp, Artificial
  probe
  misc_feature (1)..(25): SEQ ID NO: 1405; WAN024CFQ_at; Start 146; Stop 170
tgagttttgaagaagctcttgacca

SEQ ID NO: 116705 - DNA, 25 bp, Artificial
  probe
  misc_feature (1)..(25): SEQ ID NO: 1405; WAN024CFQ_at; Start 105; Stop 129
gatgtttgcgacgttcaaaaggcgt

SEQ ID NO: 116706 - DNA, 25 bp, Artificial
  probe
  misc_feature (1)..(25): SEQ ID NO: 1405; WAN024CFQ_at; Start 103; Stop 127
gcgatgtttgcgacgttcaaaaggc

SEQ ID NO: 116707 - DNA, 25 bp, Artificial
  probe
  misc_feature (1)..(25): SEQ ID NO: 1405; WAN024CFQ_at; Start 188; Stop 212
gacaattcgatgattctgaatttag

SEQ ID NO: 116708 - DNA, 25 bp, Artificial
  probe
  misc_feature (1)..(25): SEQ ID NO: 1405; WAN024CFQ_at; Start 95; Stop 119
tggagacagcgatgtttgcgacgtt

SEQ ID NO: 116709 - DNA, 25 bp, Artificial
  probe
  misc_feature (1)..(25): SEQ ID NO: 1405; WAN024CFQ_at; Start 98; Stop 122
agacagcgatgtttgcgacgttcaa

SEQ ID NO: 116710 - DNA, 25 bp, Artificial
  probe
  misc_feature (1)..(25): SEQ ID NO: 1405; WAN024CFQ_at; Start 184; Stop 208
gaaagacaattcgatgattctgaat

SEQ ID NO: 116711 - DNA, 25 bp, Artificial
  probe
  misc_feature (1)..(25): SEQ ID NO: 1405; WAN024CFQ_at; Start 181; Stop 205
aaagaaagacaattcgatgattctg

SEQ ID NO: 116712 - DNA, 25 bp, Artificial
  probe
  misc_feature (1)..(25): SEQ ID NO: 1405; WAN024CFQ_at; Start 100; Stop 124
acagcgatgtttgcgacgttcaaaa

SEQ ID NO: 116713 - DNA, 25 bp, Artificial
  probe
  misc_feature (1)..(25): SEQ ID NO: 1405; WAN024CFQ_at; Start 111; Stop 135
tgcgacgttcaaaaggcgtcaaagc

SEQ ID NO: 116714 - DNA, 25 bp, Artificial
  probe
  misc_feature (1)..(25): SEQ ID NO: 1405; WAN024CFQ_at; Start 94; Stop 118
ctggagacagcgatgtttgcgacgt

SEQ ID NO: 116715 - DNA, 25 bp, Artificial
  probe
  misc_feature (1)..(25): SEQ ID NO: 1405; WAN024CFQ_at; Start 49; Stop 73
aaggtagcaagagagacagaaaaac

SEQ ID NO: 116716 - DNA, 25 bp, Artificial
  probe
  misc_feature (1)..(25): SEQ ID NO: 1405; WAN024CFQ_at; Start 147; Stop 171
gagttttgaagaagctcttgaccat

SEQ ID NO: 116717 - DNA, 25 bp, Artificial
  probe
  misc_feature (1)..(25): SEQ ID NO: 1405; WAN024CFQ_at; Start 93; Stop 117
actggagacagcgatgtttgcgacg

SEQ ID NO: 116718 - DNA, 25 bp, Artificial
  probe
  misc_feature (1)..(25): SEQ ID NO: 1405; WAN024CFQ_at; Start 97; Stop 121
gagacagcgatgtttgcgacgttca

SEQ ID NO: 116719 - DNA, 25 bp, Artificial
  probe
  misc_feature (1)..(25): SEQ ID NO: 1405; WAN024CFQ_at; Start 139; Stop 163
agtcacatgagttttgaagaagctc

SEQ ID NO: 116720 - DNA, 25 bp, Artificial
  probe
  misc_feature (1)..(25): SEQ ID NO: 1405; WAN024CFQ_at; Start 149; Stop 173
gttttgaagaagctcttgaccatgc

SEQ ID NO: 116721 - DNA, 25 bp, Artificial
  probe
  misc_feature (1)..(25): SEQ ID NO: 1405; WAN024CFQ_at; Start 99; Stop 123
gacagcgatgtttgcgacgttcaaa

SEQ ID NO: 116722 - DNA, 25 bp, Artificial
  probe
  misc_feature (1)..(25): SEQ ID NO: 1405; WAN024CFQ_at; Start 16; Stop 40
cgcttagaagaaaaggtcactaggc

SEQ ID NO: 116723 - DNA, 25 bp, Artificial
  probe
  misc_feature (1)..(25): SEQ ID NO: 1405; WAN024CFQ_at; Start 144; Stop 168
catgagttttgaagaagctcttgac

SEQ ID NO: 116724 - DNA, 25 bp, Artificial
  probe
  misc_feature (1)..(25): SEQ ID NO: 1405; WAN024CFQ_at; Start 113; Stop 137
cgacgttcaaaaggcgtcaaagcat

SEQ ID NO: 116725 - DNA, 25 bp, Artificial
  probe
  misc_feature (1)..(25): SEQ ID NO: 1405; WAN024CFQ_at; Start 20; Stop 44
tagaagaaaaggtcactaggcaaga

SEQ ID NO: 116726 - DNA, 25 bp, Artificial
  probe
  misc_feature (1)..(25): SEQ ID NO: 1405; WAN024CFQ_at; Start 199; Stop 223
gattctgaatttagaaaggatgaaa

SEQ ID NO: 116727 - DNA, 25 bp, Artificial
  probe
  misc_feature (1)..(25): SEQ ID NO: 1405; WAN024CFQ_at; Start 17; Stop 41
gcttagaagaaaaggtcactaggca

SEQ ID NO: 116728 - DNA, 25 bp, Artificial
  probe
  misc_feature (1)..(25): SEQ ID NO: 1405; WAN024CFQ_at; Start 107; Stop 131
tgtttgcgacgttcaaaaggcgtca

SEQ ID NO: 116729 - DNA, 25 bp, Artificial
  probe
  misc_feature (1)..(25): SEQ ID NO: 1405; WAN024CFQ_at; Start 23; Stop 47
aagaaaaggtcactaggcaagaaag

SEQ ID NO: 116730 - DNA, 25 bp, Artificial
  probe
  misc_feature (1)..(25): SEQ ID NO: 1405; WAN024CFQ_at; Start 142; Stop 166
cacatgagttttgaagaagctcttg

SEQ ID NO: 116731 - DNA, 25 bp, Artificial
  probe
  misc_feature (1)..(25): SEQ ID NO: 1405; WAN024CFQ_at; Start 195; Stop 219
cgatgattctgaatttagaaaggat

SEQ ID NO: 116732 - DNA, 25 bp, Artificial
  probe
  misc_feature (1)..(25): SEQ ID NO: 5710; WAN024CFR_at; Start 120; Stop 144
acgtcgcaaacatcgctgtctccag

SEQ ID NO: 116733 - DNA, 25 bp, Artificial
  probe
  misc_feature (1)..(25): SEQ ID NO: 5710; WAN024CFR_at; Start 43; Stop 67
gaattgtctttctttaccaaaggca

SEQ ID NO: 116734 - DNA, 25 bp, Artificial
  probe
  misc_feature (1)..(25): SEQ ID NO: 5710; WAN024CFR_at; Start 49; Stop 73
tctttctttaccaaaggcatggtca

SEQ ID NO: 116735 - DNA, 25 bp, Artificial
  probe
  misc_feature (1)..(25): SEQ ID NO: 5710; WAN024CFR_at; Start 117; Stop 141
tgaacgtcgcaaacatcgctgtctc

SEQ ID NO: 116736 - DNA, 25 bp, Artificial
  probe
  misc_feature (1)..(25): SEQ ID NO: 5710; WAN024CFR_at; Start 46; Stop 70
ttgtctttctttaccaaaggcatgg

SEQ ID NO: 116737 - DNA, 25 bp, Artificial
  probe
  misc_feature (1)..(25): SEQ ID NO: 5710; WAN024CFR_at; Start 111; Stop 135
gccttttgaacgtcgcaaacatcgc

SEQ ID NO: 116738 - DNA, 25 bp, Artificial
  probe
  misc_feature (1)..(25): SEQ ID NO: 5710; WAN024CFR_at; Start 158; Stop 182
gcagcgagtttttctgtctctcttg

SEQ ID NO: 116739 - DNA, 25 bp, Artificial
  probe
  misc_feature (1)..(25): SEQ ID NO: 5710; WAN024CFR_at; Start 57; Stop 81
taccaaaggcatggtcaagagcttc

SEQ ID NO: 116740 - DNA, 25 bp, Artificial
  probe
  misc_feature (1)..(25): SEQ ID NO: 5710; WAN024CFR_at; Start 15; Stop 39
tttcatcctttctaaattcagaatc

SEQ ID NO: 116741 - DNA, 25 bp, Artificial
  probe
  misc_feature (1)..(25): SEQ ID NO: 5710; WAN024CFR_at; Start 163; Stop 187
gagtttttctgtctctcttgctacc

SEQ ID NO: 116742 - DNA, 25 bp, Artificial
  probe
  misc_feature (1)..(25): SEQ ID NO: 5710; WAN024CFR_at; Start 60; Stop 84
caaaggcatggtcaagagcttcttc

SEQ ID NO: 116743 - DNA, 25 bp, Artificial
  probe
  misc_feature (1)..(25): SEQ ID NO: 5710; WAN024CFR_at; Start 118; Stop 142
gaacgtcgcaaacatcgctgtctcc

SEQ ID NO: 116744 - DNA, 25 bp, Artificial
  probe
  misc_feature (1)..(25): SEQ ID NO: 5710; WAN024CFR_at; Start 27; Stop 51
taaattcagaatcatcgaattgtct

SEQ ID NO: 116745 - DNA, 25 bp, Artificial
  probe
  misc_feature (1)..(25): SEQ ID NO: 5710; WAN024CFR_at; Start 115; Stop 139
tttgaacgtcgcaaacatcgctgtc

SEQ ID NO: 116746 - DNA, 25 bp, Artificial
  probe
  misc_feature (1)..(25): SEQ ID NO: 5710; WAN024CFR_at; Start 121; Stop 145
cgtcgcaaacatcgctgtctccagt

SEQ ID NO: 116747 - DNA, 25 bp, Artificial
  probe
  misc_feature (1)..(25): SEQ ID NO: 5710; WAN024CFR_at; Start 107; Stop 131
tgacgccttttgaacgtcgcaaaca

SEQ ID NO: 116748 - DNA, 25 bp, Artificial
  probe
  misc_feature (1)..(25): SEQ ID NO: 5710; WAN024CFR_at; Start 55; Stop 79
tttaccaaaggcatggtcaagagct

SEQ ID NO: 116749 - DNA, 25 bp, Artificial
  probe
  misc_feature (1)..(25): SEQ ID NO: 5710; WAN024CFR_at; Start 192; Stop 216
tttcttgcctagtgaccttttcttc

SEQ ID NO: 116750 - DNA, 25 bp, Artificial
  probe
  misc_feature (1)..(25): SEQ ID NO: 5710; WAN024CFR_at; Start 114; Stop 138
ttttgaacgtcgcaaacatcgctgt

SEQ ID NO: 116751 - DNA, 25 bp, Artificial
  probe
  misc_feature (1)..(25): SEQ ID NO: 5710; WAN024CFR_at; Start 51; Stop 75
tttctttaccaaaggcatggtcaag

SEQ ID NO: 116752 - DNA, 25 bp, Artificial
  probe
  misc_feature (1)..(25): SEQ ID NO: 5710; WAN024CFR_at; Start 116; Stop 140
ttgaacgtcgcaaacatcgctgtct

SEQ ID NO: 116753 - DNA, 25 bp, Artificial
  probe
  misc_feature (1)..(25): SEQ ID NO: 5710; WAN024CFR_at; Start 155; Stop 179
taagcagcgagtttttctgtctctc

SEQ ID NO: 116754 - DNA, 25 bp, Artificial
  probe
  misc_feature (1)..(25): SEQ ID NO: 5710; WAN024CFR_at; Start 153; Stop 177
tgtaagcagcgagtttttctgtctc

SEQ ID NO: 116755 - DNA, 25 bp, Artificial
  probe
  misc_feature (1)..(25): SEQ ID NO: 5710; WAN024CFR_at; Start 108; Stop 132
gacgccttttgaacgtcgcaaacat

SEQ ID NO: 116756 - DNA, 25 bp, Artificial
  probe
  misc_feature (1)..(25): SEQ ID NO: 5710; WAN024CFR_at; Start 165; Stop 189
gtttttctgtctctcttgctacctt

SEQ ID NO: 116757 - DNA, 25 bp, Artificial
  probe
  misc_feature (1)..(25): SEQ ID NO: 5710; WAN024CFR_at; Start 101; Stop 125
atgctttgacgccttttgaacgtcg

SEQ ID NO: 116758 - DNA, 25 bp, Artificial
  probe
  misc_feature (1)..(25): SEQ ID NO: 5710; WAN024CFR_at; Start 105; Stop 129
tttgacgccttttgaacgtcgcaaa

SEQ ID NO: 116759 - DNA, 25 bp, Artificial
  probe
  misc_feature (1)..(25): SEQ ID NO: 5710; WAN024CFR_at; Start 30; Stop 54
attcagaatcatcgaattgtctttc

SEQ ID NO: 116760 - DNA, 25 bp, Artificial
  probe
  misc_feature (1)..(25): SEQ ID NO: 5710; WAN024CFR_at; Start 123; Stop 147
tcgcaaacatcgctgtctccagttg

SEQ ID NO: 116761 - DNA, 25 bp, Artificial
  probe
  misc_feature (1)..(25): SEQ ID NO: 5710; WAN024CFR_at; Start 39; Stop 63
catcgaattgtctttctttaccaaa

SEQ ID NO: 116762 - DNA, 25 bp, Artificial
  probe
  misc_feature (1)..(25): SEQ ID NO: 5710; WAN024CFR_at; Start 103; Stop 127
gctttgacgccttttgaacgtcgca

SEQ ID NO: 116763 - DNA, 25 bp, Artificial
  probe
  misc_feature (1)..(25): SEQ ID NO: 5710; WAN024CFR_at; Start 59; Stop 83
ccaaaggcatggtcaagagcttctt

SEQ ID NO: 116764 - DNA, 25 bp, Artificial
  probe
  misc_feature (1)..(25): SEQ ID NO: 5710; WAN024CFR_at; Start 21; Stop 45
cctttctaaattcagaatcatcgaa

SEQ ID NO: 116765 - DNA, 25 bp, Artificial
  probe
  misc_feature (1)..(25): SEQ ID NO: 5710; WAN024CFR_at; Start 149; Stop 173
tctttgtaagcagcgagtttttctg

SEQ ID NO: 116766 - DNA, 25 bp, Artificial
  probe
  misc_feature (1)..(25): SEQ ID NO: 4115; WAN024CFS_at; Start 3; Stop 27
ggaacatgtaaagattgatagagcc

SEQ ID NO: 116767 - DNA, 25 bp, Artificial
  probe
  misc_feature (1)..(25): SEQ ID NO: 4115; WAN024CFS_at; Start 36; Stop 60
aaacctctcgaactgcatctgccaa

SEQ ID NO: 116768 - DNA, 25 bp, Artificial
  probe
  misc_feature (1)..(25): SEQ ID NO: 4115; WAN024CFS_at; Start 172; Stop 196
catctgcgaaaagttgtaaggtgcc

SEQ ID NO: 116769 - DNA, 25 bp, Artificial
  probe
  misc_feature (1)..(25): SEQ ID NO: 4115; WAN024CFS_at; Start 63; Stop 87
ccttaggatcccgtgtgataatcgg

SEQ ID NO: 116770 - DNA, 25 bp, Artificial
  probe
  misc_feature (1)..(25): SEQ ID NO: 4115; WAN024CFS_at; Start 147; Stop 171
taccatgttcatcaaagaattcctg

SEQ ID NO: 116771 - DNA, 25 bp, Artificial
  probe
  misc_feature (1)..(25): SEQ ID NO: 4115; WAN024CFS_at; Start 117; Stop 141
agaactccatacacatgagtggcca

SEQ ID NO: 116772 - DNA, 25 bp, Artificial
  probe
  misc_feature (1)..(25): SEQ ID NO: 4115; WAN024CFS_at; Start 46; Stop 70
aactgcatctgccaattccttagga

SEQ ID NO: 116773 - DNA, 25 bp, Artificial
  probe
  misc_feature (1)..(25): SEQ ID NO: 4115; WAN024CFS_at; Start 15; Stop 39
gattgatagagccttgttccaaaac

SEQ ID NO: 116774 - DNA, 25 bp, Artificial
  probe
  misc_feature (1)..(25): SEQ ID NO: 4115; WAN024CFS_at; Start 53; Stop 77
tctgccaattccttaggatcccgtg

SEQ ID NO: 116775 - DNA, 25 bp, Artificial
  probe
  misc_feature (1)..(25): SEQ ID NO: 4115; WAN024CFS_at; Start 58; Stop 82
caattccttaggatcccgtgtgata

SEQ ID NO: 116776 - DNA, 25 bp, Artificial
  probe
  misc_feature (1)..(25): SEQ ID NO: 4115; WAN024CFS_at; Start 23; Stop 47
gagccttgttccaaaacctctcgaa

SEQ ID NO: 116777 - DNA, 25 bp, Artificial
  probe
  misc_feature (1)..(25): SEQ ID NO: 4115; WAN024CFS_at; Start 177; Stop 201
gcgaaaagttgtaaggtgccttaga

SEQ ID NO: 116778 - DNA, 25 bp, Artificial
  probe
  misc_feature (1)..(25): SEQ ID NO: 4115; WAN024CFS_at; Start 66; Stop 90
taggatcccgtgtgataatcggttc

SEQ ID NO: 116779 - DNA, 25 bp, Artificial
  probe
  misc_feature (1)..(25): SEQ ID NO: 4115; WAN024CFS_at; Start 167; Stop 191
tcctgcatctgcgaaaagttgtaag

SEQ ID NO: 116780 - DNA, 25 bp, Artificial
  probe
  misc_feature (1)..(25): SEQ ID NO: 4115; WAN024CFS_at; Start 99; Stop 123
gattgaaccaaccatcccagaactc

SEQ ID NO: 116781 - DNA, 25 bp, Artificial
  probe
  misc_feature (1)..(25): SEQ ID NO: 4115; WAN024CFS_at; Start 18; Stop 42
tgatagagccttgttccaaaacctc

SEQ ID NO: 116782 - DNA, 25 bp, Artificial
  probe
  misc_feature (1)..(25): SEQ ID NO: 4115; WAN024CFS_at; Start 113; Stop 137
tcccagaactccatacacatgagtg

SEQ ID NO: 116783 - DNA, 25 bp, Artificial
  probe
  misc_feature (1)..(25): SEQ ID NO: 4115; WAN024CFS_at; Start 82; Stop 106
aatcggttctttccagcgattgaac

SEQ ID NO: 116784 - DNA, 25 bp, Artificial
  probe
  misc_feature (1)..(25): SEQ ID NO: 4115; WAN024CFS_at; Start 174; Stop 198
tctgcgaaaagttgtaaggtgcctt

SEQ ID NO: 116785 - DNA, 25 bp, Artificial
  probe
  misc_feature (1)..(25): SEQ ID NO: 4115; WAN024CFS_at; Start 133; Stop 157
gagtggccatttcttaccatgttca

SEQ ID NO: 116786 - DNA, 25 bp, Artificial
  probe
  misc_feature (1)..(25): SEQ ID NO: 4115; WAN024CFS_at; Start 214; Stop 238
tgttacaaagaggtcctcttcaatt

SEQ ID NO: 116787 - DNA, 25 bp, Artificial
  probe
  misc_feature (1)..(25): SEQ ID NO: 4115; WAN024CFS_at; Start 159; Stop 183
caaagaattcctgcatctgcgaaaa

SEQ ID NO: 116788 - DNA, 25 bp, Artificial
  probe
  misc_feature (1)..(25): SEQ ID NO: 4115; WAN024CFS_at; Start 137; Stop 161
ggccatttcttaccatgttcatcaa

SEQ ID NO: 116789 - DNA, 25 bp, Artificial
  probe
  misc_feature (1)..(25): SEQ ID NO: 4115; WAN024CFS_at; Start 76; Stop 100
tgtgataatcggttctttccagcga

SEQ ID NO: 116790 - DNA, 25 bp, Artificial
  probe
  misc_feature (1)..(25): SEQ ID NO: 4115; WAN024CFS_at; Start 32; Stop 56
tccaaaacctctcgaactgcatctg

SEQ ID NO: 116791 - DNA, 25 bp, Artificial
  probe
  misc_feature (1)..(25): SEQ ID NO: 4115; WAN024CFS_at; Start 122; Stop 146
tccatacacatgagtggccatttct

SEQ ID NO: 116792 - DNA, 25 bp, Artificial
  probe
  misc_feature (1)..(25): SEQ ID NO: 4115; WAN024CFS_at; Start 11; Stop 35
taaagattgatagagccttgttcca

SEQ ID NO: 116793 - DNA, 25 bp, Artificial
  probe
  misc_feature (1)..(25): SEQ ID NO: 4115; WAN024CFS_at; Start 89; Stop 113
tctttccagcgattgaaccaaccat

SEQ ID NO: 116794 - DNA, 25 bp, Artificial
  probe
  misc_feature (1)..(25): SEQ ID NO: 4115; WAN024CFS_at; Start 163; Stop 187
gaattcctgcatctgcgaaaagttg

SEQ ID NO: 116795 - DNA, 25 bp, Artificial
  probe
  misc_feature (1)..(25): SEQ ID NO: 4115; WAN024CFS_at; Start 95; Stop 119
cagcgattgaaccaaccatcccaga

SEQ ID NO: 116796 - DNA, 25 bp, Artificial
  probe
  misc_feature (1)..(25): SEQ ID NO: 4115; WAN024CFS_at; Start 210; Stop 234
ttcctgttacaaagaggtcctcttc

SEQ ID NO: 116797 - DNA, 25 bp, Artificial
  probe
  misc_feature (1)..(25): SEQ ID NO: 4115; WAN024CFS_at; Start 155; Stop 179
tcatcaaagaattcctgcatctgcg

SEQ ID NO: 116798 - DNA, 25 bp, Artificial
  probe
  misc_feature (1)..(25): SEQ ID NO: 4115; WAN024CFS_at; Start 128; Stop 152
cacatgagtggccatttcttaccat

SEQ ID NO: 116799 - DNA, 25 bp, Artificial
  probe
  misc_feature (1)..(25): SEQ ID NO: 4115; WAN024CFS_at; Start 71; Stop 95
tcccgtgtgataatcggttctttcc

SEQ ID NO: 116800 - DNA, 25 bp, Artificial
  probe
  misc_feature (1)..(25): SEQ ID NO: 5092; WAN024CFT_at; Start 187; Stop 211
caaaccactcttttcaatatcgttg

SEQ ID NO: 116801 - DNA, 25 bp, Artificial
  probe
  misc_feature (1)..(25): SEQ ID NO: 5092; WAN024CFT_at; Start 81; Stop 105
ccacgataaagagacgttggctatc

SEQ ID NO: 116802 - DNA, 25 bp, Artificial
  probe
  misc_feature (1)..(25): SEQ ID NO: 5092; WAN024CFT_at; Start 280; Stop 304
ttgtccgtggatcaaacgtccatca

SEQ ID NO: 116803 - DNA, 25 bp, Artificial
  probe
  misc_feature (1)..(25): SEQ ID NO: 5092; WAN024CFT_at; Start 157; Stop 181
caatttcacacctggtggtgtcgca

SEQ ID NO: 116804 - DNA, 25 bp, Artificial
  probe
  misc_feature (1)..(25): SEQ ID NO: 5092; WAN024CFT_at; Start 26; Stop 50
gtttcaagtggtacacctgcttcta

SEQ ID NO: 116805 - DNA, 25 bp, Artificial
  probe
  misc_feature (1)..(25): SEQ ID NO: 5092; WAN024CFT_at; Start 270; Stop 294
gattggctacttgtccgtggatcaa

SEQ ID NO: 116806 - DNA, 25 bp, Artificial
  probe
  misc_feature (1)..(25): SEQ ID NO: 5092; WAN024CFT_at; Start 313; Stop 337
tcctacaattgtcataagttttccc

SEQ ID NO: 116807 - DNA, 25 bp, Artificial
  probe
  misc_feature (1)..(25): SEQ ID NO: 5092; WAN024CFT_at; Start 47; Stop 71
tctaccaaaccaaggaagcggtctg

SEQ ID NO: 116808 - DNA, 25 bp, Artificial
  probe
  misc_feature (1)..(25): SEQ ID NO: 5092; WAN024CFT_at; Start 150; Stop 174
aaatactcaatttcacacctggtgg

SEQ ID NO: 116809 - DNA, 25 bp, Artificial
  probe
  misc_feature (1)..(25): SEQ ID NO: 5092; WAN024CFT_at; Start 75; Stop 99
tacgagccacgataaagagacgttg

SEQ ID NO: 116810 - DNA, 25 bp, Artificial
  probe
  misc_feature (1)..(25): SEQ ID NO: 5092; WAN024CFT_at; Start 21; Stop 45
taagggtttcaagtggtacacctgc

SEQ ID NO: 116811 - DNA, 25 bp, Artificial
  probe
  misc_feature (1)..(25): SEQ ID NO: 5092; WAN024CFT_at; Start 296; Stop 320
cgtccatcaatacggcatcctacaa

SEQ ID NO: 116812 - DNA, 25 bp, Artificial
  probe
  misc_feature (1)..(25): SEQ ID NO: 5092; WAN024CFT_at; Start 306; Stop 330
tacggcatcctacaattgtcataag

SEQ ID NO: 116813 - DNA, 25 bp, Artificial
  probe
  misc_feature (1)..(25): SEQ ID NO: 5092; WAN024CFT_at; Start 123; Stop 147
tattggctgcagctttctcaactgg

SEQ ID NO: 116814 - DNA, 25 bp, Artificial
  probe
  misc_feature (1)..(25): SEQ ID NO: 5092; WAN024CFT_at; Start 231; Stop 255
caaccataatgcgtgaaacatttag

SEQ ID NO: 116815 - DNA, 25 bp, Artificial
  probe
  misc_feature (1)..(25): SEQ ID NO: 5092; WAN024CFT_at; Start 202; Stop 226
aatatcgttgttgacaacttcgtcg

SEQ ID NO: 116816 - DNA, 25 bp, Artificial
  probe
  misc_feature (1)..(25): SEQ ID NO: 5092; WAN024CFT_at; Start 7; Stop 31
catattcccaacattaagggtttca

SEQ ID NO: 116817 - DNA, 25 bp, Artificial
  probe
  misc_feature (1)..(25): SEQ ID NO: 5092; WAN024CFT_at; Start 214; Stop 238
gacaacttcgtcgtctacaaccata

SEQ ID NO: 116818 - DNA, 25 bp, Artificial
  probe
  misc_feature (1)..(25): SEQ ID NO: 5092; WAN024CFT_at; Start 127; Stop 151
ggctgcagctttctcaactggcaaa

SEQ ID NO: 116819 - DNA, 25 bp, Artificial
  probe
  misc_feature (1)..(25): SEQ ID NO: 5092; WAN024CFT_at; Start 117; Stop 141
caagaatattggctgcagctttctc

SEQ ID NO: 116820 - DNA, 25 bp, Artificial
  probe
  misc_feature (1)..(25): SEQ ID NO: 5092; WAN024CFT_at; Start 288; Stop 312
ggatcaaacgtccatcaatacggca

SEQ ID NO: 116821 - DNA, 25 bp, Artificial
  probe
  misc_feature (1)..(25): SEQ ID NO: 5092; WAN024CFT_at; Start 3; Stop 27
gagacatattcccaacattaagggt

SEQ ID NO: 116822 - DNA, 25 bp, Artificial
  probe
  misc_feature (1)..(25): SEQ ID NO: 5092; WAN024CFT_at; Start 254; Stop 278
agttttccagcccaaagattggcta

SEQ ID NO: 116823 - DNA, 25 bp, Artificial
  probe
  misc_feature (1)..(25): SEQ ID NO: 5092; WAN024CFT_at; Start 61; Stop 85
gaagcggtctggtttacgagccacg

SEQ ID NO: 116824 - DNA, 25 bp, Artificial
  probe
  misc_feature (1)..(25): SEQ ID NO: 5092; WAN024CFT_at; Start 165; Stop 189
cacctggtggtgtcgcaagtttcaa

SEQ ID NO: 116825 - DNA, 25 bp, Artificial
  probe
  misc_feature (1)..(25): SEQ ID NO: 5092; WAN024CFT_at; Start 173; Stop 197
ggtgtcgcaagtttcaaaccactct

SEQ ID NO: 116826 - DNA, 25 bp, Artificial
  probe
  misc_feature (1)..(25): SEQ ID NO: 5092; WAN024CFT_at; Start 244; Stop 268
tgaaacatttagttttccagcccaa

SEQ ID NO: 116827 - DNA, 25 bp, Artificial
  probe
  misc_feature (1)..(25): SEQ ID NO: 5092; WAN024CFT_at; Start 274; Stop 298
ggctacttgtccgtggatcaaacgt

SEQ ID NO: 116828 - DNA, 25 bp, Artificial
  probe
  misc_feature (1)..(25): SEQ ID NO: 5092; WAN024CFT_at; Start 37; Stop 61
tacacctgcttctaccaaaccaagg

SEQ ID NO: 116829 - DNA, 25 bp, Artificial
  probe
  misc_feature (1)..(25): SEQ ID NO: 5092; WAN024CFT_at; Start 87; Stop 111
taaagagacgttggctatcgtattt

SEQ ID NO: 116830 - DNA, 25 bp, Artificial
  probe
  misc_feature (1)..(25): SEQ ID NO: 5092; WAN024CFT_at; Start 222; Stop 246
cgtcgtctacaaccataatgcgtga

SEQ ID NO: 116831 - DNA, 25 bp, Artificial
  probe
  misc_feature (1)..(25): SEQ ID NO: 5092; WAN024CFT_at; Start 66; Stop 90
ggtctggtttacgagccacgataaa

SEQ ID NO: 116832 - DNA, 25 bp, Artificial
  probe
  misc_feature (1)..(25): SEQ ID NO: 5092; WAN024CFT_at; Start 134; Stop 158
gctttctcaactggcaaaatactca

SEQ ID NO: 116833 - DNA, 25 bp, Artificial
  probe
  misc_feature (1)..(25): SEQ ID NO: 5092; WAN024CFT_at; Start 266; Stop 290
caaagattggctacttgtccgtgga

SEQ ID NO: 116834 - DNA, 25 bp, Artificial
  probe
  misc_feature (1)..(25): SEQ ID NO: 1339; WAN024CFU_at; Start 177; Stop 201
tttgccagttgagaaagctgcagcc

SEQ ID NO: 116835 - DNA, 25 bp, Artificial
  probe
  misc_feature (1)..(25): SEQ ID NO: 1339; WAN024CFU_at; Start 187; Stop 211
gagaaagctgcagccaatattcttg

SEQ ID NO: 116836 - DNA, 25 bp, Artificial
  probe
  misc_feature (1)..(25): SEQ ID NO: 1339; WAN024CFU_at; Start 318; Stop 342
tatgtctcaaacaccagaaactcgt

SEQ ID NO: 116837 - DNA, 25 bp, Artificial
  probe
  misc_feature (1)..(25): SEQ ID NO: 1339; WAN024CFU_at; Start 229; Stop 253
caacgtctctttatcgtggctcgta

SEQ ID NO: 116838 - DNA, 25 bp, Artificial
  probe
  misc_feature (1)..(25): SEQ ID NO: 1339; WAN024CFU_at; Start 2; Stop 26
tgacaattgtaggatgccgtattga

SEQ ID NO: 116839 - DNA, 25 bp, Artificial
  probe
  misc_feature (1)..(25): SEQ ID NO: 1339; WAN024CFU_at; Start 138; Stop 162
tttgaaacttgcgacaccaccaggt

SEQ ID NO: 116840 - DNA, 25 bp, Artificial
  probe
  misc_feature (1)..(25): SEQ ID NO: 1339; WAN024CFU_at; Start 442; Stop 466
gatccaatttcagactttttgagct

SEQ ID NO: 116841 - DNA, 25 bp, Artificial
  probe
  misc_feature (1)..(25): SEQ ID NO: 1339; WAN024CFU_at; Start 17; Stop 41
gccgtattgatggacgtttgatcca

SEQ ID NO: 116842 - DNA, 25 bp, Artificial
  probe
  misc_feature (1)..(25): SEQ ID NO: 1339; WAN024CFU_at; Start 380; Stop 404
tggaagacttccacaaactggcaga

SEQ ID NO: 116843 - DNA, 25 bp, Artificial
  probe
  misc_feature (1)..(25): SEQ ID NO: 1339; WAN024CFU_at; Start 424; Stop 448
gctcagatggttccaaatgatccaa

SEQ ID NO: 116844 - DNA, 25 bp, Artificial
  probe
  misc_feature (1)..(25): SEQ ID NO: 1339; WAN024CFU_at; Start 217; Stop 241
aaatacgatagccaacgtctcttta

SEQ ID NO: 116845 - DNA, 25 bp, Artificial
  probe
  misc_feature (1)..(25): SEQ ID NO: 1339; WAN024CFU_at; Start 129; Stop 153
aaagagtggtttgaaacttgcgaca

SEQ ID NO: 116846 - DNA, 25 bp, Artificial
  probe
  misc_feature (1)..(25): SEQ ID NO: 1339; WAN024CFU_at; Start 152; Stop 176
caccaccaggtgtgaaattgagtat

SEQ ID NO: 116847 - DNA, 25 bp, Artificial
  probe
  misc_feature (1)..(25): SEQ ID NO: 1339; WAN024CFU_at; Start 25; Stop 49
gatggacgtttgatccacggacaag

SEQ ID NO: 116848 - DNA, 25 bp, Artificial
  probe
  misc_feature (1)..(25): SEQ ID NO: 1339; WAN024CFU_at; Start 46; Stop 70
caagtagccaatctttgggctggaa

SEQ ID NO: 116849 - DNA, 25 bp, Artificial
  probe
  misc_feature (1)..(25): SEQ ID NO: 1339; WAN024CFU_at; Start 368; Stop 392
tagacaaggatgtggaagacttcca

SEQ ID NO: 116850 - DNA, 25 bp, Artificial
  probe
  misc_feature (1)..(25): SEQ ID NO: 1339; WAN024CFU_at; Start 431; Stop 455
tggttccaaatgatccaatttcaga

SEQ ID NO: 116851 - DNA, 25 bp, Artificial
  probe
  misc_feature (1)..(25): SEQ ID NO: 1339; WAN024CFU_at; Start 278; Stop 302
tagaagcaggtgtaccacttgaaac

SEQ ID NO: 116852 - DNA, 25 bp, Artificial
  probe
  misc_feature (1)..(25): SEQ ID NO: 1339; WAN024CFU_at; Start 391; Stop 415
cacaaactggcagaaaaaggtgtta

SEQ ID NO: 116853 - DNA, 25 bp, Artificial
  probe
  misc_feature (1)..(25): SEQ ID NO: 1339; WAN024CFU_at; Start 348; Stop 372
tacacgttctatcaacgtagtagac

SEQ ID NO: 116854 - DNA, 25 bp, Artificial
  probe
  misc_feature (1)..(25): SEQ ID NO: 1339; WAN024CFU_at; Start 67; Stop 91
ggaaaactaaatgtttcacgcatta

SEQ ID NO: 116855 - DNA, 25 bp, Artificial
  probe
  misc_feature (1)..(25): SEQ ID NO: 1339; WAN024CFU_at; Start 35; Stop 59
tgatccacggacaagtagccaatct

SEQ ID NO: 116856 - DNA, 25 bp, Artificial
  probe
  misc_feature (1)..(25): SEQ ID NO: 1339; WAN024CFU_at; Start 83; Stop 107
cacgcattatggttgtagacgacga

SEQ ID NO: 116857 - DNA, 25 bp, Artificial
  probe
  misc_feature (1)..(25): SEQ ID NO: 1339; WAN024CFU_at; Start 114; Stop 138
caacaacgatattgaaaagagtggt

SEQ ID NO: 116858 - DNA, 25 bp, Artificial
  probe
  misc_feature (1)..(25): SEQ ID NO: 1339; WAN024CFU_at; Start 268; Stop 292
cttggtttggtagaagcaggtgtac

SEQ ID NO: 116859 - DNA, 25 bp, Artificial
  probe
  misc_feature (1)..(25): SEQ ID NO: 1339; WAN024CFU_at; Start 357; Stop 381
tatcaacgtagtagacaaggatgtg

SEQ ID NO: 116860 - DNA, 25 bp, Artificial
  probe
  misc_feature (1)..(25): SEQ ID NO: 1339; WAN024CFU_at; Start 242; Stop 266
tcgtggctcgtaaaccagaccgctt

SEQ ID NO: 116861 - DNA, 25 bp, Artificial
  probe
  misc_feature (1)..(25): SEQ ID NO: 1339; WAN024CFU_at; Start 165; Stop 189
gaaattgagtattttgccagttgag

SEQ ID NO: 116862 - DNA, 25 bp, Artificial
  probe
  misc_feature (1)..(25): SEQ ID NO: 1339; WAN024CFU_at; Start 409; Stop 433
ggtgttaaacttactgctcagatgg

SEQ ID NO: 116863 - DNA, 25 bp, Artificial
  probe
  misc_feature (1)..(25): SEQ ID NO: 1339; WAN024CFU_at; Start 54; Stop 78
caatctttgggctggaaaactaaat

SEQ ID NO: 116864 - DNA, 25 bp, Artificial
  probe
  misc_feature (1)..(25): SEQ ID NO: 1339; WAN024CFU_at; Start 98; Stop 122
tagacgacgaagttgtcaacaacga

SEQ ID NO: 116865 - DNA, 25 bp, Artificial
  probe
  misc_feature (1)..(25): SEQ ID NO: 1339; WAN024CFU_at; Start 257; Stop 281
cagaccgcttccttggtttggtaga

SEQ ID NO: 116866 - DNA, 25 bp, Artificial
  probe
  misc_feature (1)..(25): SEQ ID NO: 1339; WAN024CFU_at; Start 334; Stop 358
gaaactcgttctattacacgttcta

SEQ ID NO: 116867 - DNA, 25 bp, Artificial
  probe
  misc_feature (1)..(25): SEQ ID NO: 1339; WAN024CFU_at; Start 310; Stop 334
gttgggaatatgtctcaaacaccag

SEQ ID NO: 116868 - DNA, 25 bp, Artificial
  probe
  misc_feature (1)..(25): SEQ ID NO: 1345; WAN024CFV_at; Start 678; Stop 702
tgaacatggtaagaaatggccactc

SEQ ID NO: 116869 - DNA, 25 bp, Artificial
  probe
  misc_feature (1)..(25): SEQ ID NO: 1345; WAN024CFV_at; Start 1149; Stop 1173
tggctacctactttatcgaacagaa

SEQ ID NO: 116870 - DNA, 25 bp, Artificial
  probe
  misc_feature (1)..(25): SEQ ID NO: 1345; WAN024CFV_at; Start 88; Stop 112
cctccagaggattggtatcattcgc

SEQ ID NO: 116871 - DNA, 25 bp, Artificial
  probe
  misc_feature (1)..(25): SEQ ID NO: 1345; WAN024CFV_at; Start 220; Stop 244
gagaaatttctccaaatagcgcagg

SEQ ID NO: 116872 - DNA, 25 bp, Artificial
  probe
  misc_feature (1)..(25): SEQ ID NO: 1345; WAN024CFV_at; Start 1539; Stop 1563
tacagtcgaagagccaaaagatact

SEQ ID NO: 116873 - DNA, 25 bp, Artificial
  probe
  misc_feature (1)..(25): SEQ ID NO: 1345; WAN024CFV_at; Start 910; Stop 934
gattacgatgcccttctggatgaag

SEQ ID NO: 116874 - DNA, 25 bp, Artificial
  probe
  misc_feature (1)..(25): SEQ ID NO: 1345; WAN024CFV_at; Start 1224; Stop 1248
tagggcccagctgtatgtcgatggt

SEQ ID NO: 116875 - DNA, 25 bp, Artificial
  probe
  misc_feature (1)..(25): SEQ ID NO: 1345; WAN024CFV_at; Start 1002; Stop 1026
gcagttggaaccactctacaaagag

SEQ ID NO: 116876 - DNA, 25 bp, Artificial
  probe
  misc_feature (1)..(25): SEQ ID NO: 1345; WAN024CFV_at; Start 372; Stop 396
ggcagttggtcgctactatgatcag

SEQ ID NO: 116877 - DNA, 25 bp, Artificial
  probe
  misc_feature (1)..(25): SEQ ID NO: 1345; WAN024CFV_at; Start 475; Stop 499
tcttacggagaagataaggcttacc

SEQ ID NO: 116878 - DNA, 25 bp, Artificial
  probe
  misc_feature (1)..(25): SEQ ID NO: 1345; WAN024CFV_at; Start 239; Stop 263
cgcaggatttgggtctctacgcaat

SEQ ID NO: 116879 - DNA, 25 bp, Artificial
  probe
  misc_feature (1)..(25): SEQ ID NO: 1345; WAN024CFV_at; Start 985; Stop 1009
catttttcagagtatccgcagttgg

SEQ ID NO: 116880 - DNA, 25 bp, Artificial
  probe
  misc_feature (1)..(25): SEQ ID NO: 1345; WAN024CFV_at; Start 1386; Stop 1410
tacgcaacgtaagggaattcggaca

SEQ ID NO: 116881 - DNA, 25 bp, Artificial
  probe
  misc_feature (1)..(25): SEQ ID NO: 1345; WAN024CFV_at; Start 395; Stop 419
agttattgccaagactggtgcctcg

SEQ ID NO: 116882 - DNA, 25 bp, Artificial
  probe
  misc_feature (1)..(25): SEQ ID NO: 1345; WAN024CFV_at; Start 325; Stop 349
ttgaccaagaacatgcgaattcgct

SEQ ID NO: 116883 - DNA, 25 bp, Artificial
  probe
  misc_feature (1)..(25): SEQ ID NO: 1345; WAN024CFV_at; Start 1208; Stop 1232
tcattgatggtcgagatagggccca

SEQ ID NO: 116884 - DNA, 25 bp, Artificial
  probe
  misc_feature (1)..(25): SEQ ID NO: 1345; WAN024CFV_at; Start 1492; Stop 1516
tcaaaaggatggactcaaggacaac

SEQ ID NO: 116885 - DNA, 25 bp, Artificial
  probe
  misc_feature (1)..(25): SEQ ID NO: 1345; WAN024CFV_at; Start 815; Stop 839
tcaatctttacatgttccacggtgg

SEQ ID NO: 116886 - DNA, 25 bp, Artificial
  probe
  misc_feature (1)..(25): SEQ ID NO: 1345; WAN024CFV_at; Start 491; Stop 515
aggcttacctgagagcgattcgaca

SEQ ID NO: 116887 - DNA, 25 bp, Artificial
  probe
  misc_feature (1)..(25): SEQ ID NO: 1345; WAN024CFV_at; Start 355; Stop 379
gacccagcatatatcgaggcagttg

SEQ ID NO: 116888 - DNA, 25 bp, Artificial
  probe
  misc_feature (1)..(25): SEQ ID NO: 1345; WAN024CFV_at; Start 601; Stop 625
gaagaggacctctttgtaacaggaa

SEQ ID NO: 116889 - DNA, 25 bp, Artificial
  probe
  misc_feature (1)..(25): SEQ ID NO: 1345; WAN024CFV_at; Start 308; Stop 332
gcttaccagcttggctcttgaccaa

SEQ ID NO: 116890 - DNA, 25 bp, Artificial
  probe
  misc_feature (1)..(25): SEQ ID NO: 1345; WAN024CFV_at; Start 961; Stop 985
gcagtcaagaagatgatggcaacac

SEQ ID NO: 116891 - DNA, 25 bp, Artificial
  probe
  misc_feature (1)..(25): SEQ ID NO: 1345; WAN024CFV_at; Start 293; Stop 317
aatgggaattcggtggcttaccagc

SEQ ID NO: 116892 - DNA, 25 bp, Artificial
  probe
  misc_feature (1)..(25): SEQ ID NO: 1345; WAN024CFV_at; Start 574; Stop 598
gctactctgaaagctggaaccttaa

SEQ ID NO: 116893 - DNA, 25 bp, Artificial
  probe
  misc_feature (1)..(25): SEQ ID NO: 1345; WAN024CFV_at; Start 765; Stop 789
tcctaaggaattggcagatgcagtt

SEQ ID NO: 116894 - DNA, 25 bp, Artificial
  probe
  misc_feature (1)..(25): SEQ ID NO: 1345; WAN024CFV_at; Start 556; Stop 580
tcagatggtccatggcgagctactc

SEQ ID NO: 116895 - DNA, 25 bp, Artificial
  probe
  misc_feature (1)..(25): SEQ ID NO: 1345; WAN024CFV_at; Start 1670; Stop 1694
gctatctcaaggaaggtgccaaccg

SEQ ID NO: 116896 - DNA, 25 bp, Artificial
  probe
  misc_feature (1)..(25): SEQ ID NO: 1345; WAN024CFV_at; Start 1368; Stop 1392
gcataagttcttagcggatacgcaa

SEQ ID NO: 116897 - DNA, 25 bp, Artificial
  probe
  misc_feature (1)..(25): SEQ ID NO: 1345; WAN024CFV_at; Start 644; Stop 668
cttacaacttttcgcagatgcagga

SEQ ID NO: 116898 - DNA, 25 bp, Artificial
  probe
  misc_feature (1)..(25): SEQ ID NO: 1345; WAN024CFV_at; Start 873; Stop 897
tcgaggaactttggacctgccacaa

SEQ ID NO: 116899 - DNA, 25 bp, Artificial
  probe
  misc_feature (1)..(25): SEQ ID NO: 1345; WAN024CFV_at; Start 1134; Stop 1158
gctgggacaaagttatggctaccta

SEQ ID NO: 116900 - DNA, 25 bp, Artificial
  probe
  misc_feature (1)..(25): SEQ ID NO: 1345; WAN024CFV_at; Start 518; Stop 542
taatggaagagtgtggcgtaacctg

SEQ ID NO: 116901 - DNA, 25 bp, Artificial
  probe
  misc_feature (1)..(25): SEQ ID NO: 1345; WAN024CFV_at; Start 1119; Stop 1143
tcaaaagatggaggagctgggacaa

SEQ ID NO: 116902 - DNA, 25 bp, Artificial
  probe
  misc_feature (1)..(25): SEQ ID NO: 6628; WAN024CFW_at; Start 349; Stop 373
tctgaaattgatgaatctgaagtgc

SEQ ID NO: 116903 - DNA, 25 bp, Artificial
  probe
  misc_feature (1)..(25): SEQ ID NO: 6628; WAN024CFW_at; Start 312; Stop 336
ggttattgatactggcagtgtcgca

SEQ ID NO: 116904 - DNA, 25 bp, Artificial
  probe
  misc_feature (1)..(25): SEQ ID NO: 6628; WAN024CFW_at; Start 388; Stop 412
gaaaatctagagtttttggaggtca

SEQ ID NO: 116905 - DNA, 25 bp, Artificial
  probe
  misc_feature (1)..(25): SEQ ID NO: 6628; WAN024CFW_at; Start 301; Stop 325
gaagggtcttgggttattgatactg

SEQ ID NO: 116906 - DNA, 25 bp, Artificial
  probe
  misc_feature (1)..(25): SEQ ID NO: 6628; WAN024CFW_at; Start 327; Stop 351
cagtgtcgcagtgcgtttgtggtct

SEQ ID NO: 116907 - DNA, 25 bp, Artificial
  probe
  misc_feature (1)..(25): SEQ ID NO: 6628; WAN024CFW_at; Start 307; Stop 331
tcttgggttattgatactggcagtg

SEQ ID NO: 116908 - DNA, 25 bp, Artificial
  probe
  misc_feature (1)..(25): SEQ ID NO: 6628; WAN024CFW_at; Start 202; Stop 226
ggcgatattgtacgaactactagat

SEQ ID NO: 116909 - DNA, 25 bp, Artificial
  probe
  misc_feature (1)..(25): SEQ ID NO: 6628; WAN024CFW_at; Start 194; Stop 218
tctttgaaggcgatattgtacgaac

SEQ ID NO: 116910 - DNA, 25 bp, Artificial
  probe
  misc_feature (1)..(25): SEQ ID NO: 6628; WAN024CFW_at; Start 238; Stop 262
gctgacgaaattggcggtttctatg

SEQ ID NO: 116911 - DNA, 25 bp, Artificial
  probe
  misc_feature (1)..(25): SEQ ID NO: 6628; WAN024CFW_at; Start 215; Stop 239
gaactactagatttttgggtagagc

SEQ ID NO: 116912 - DNA, 25 bp, Artificial
  probe
  misc_feature (1)..(25): SEQ ID NO: 6628; WAN024CFW_at; Start 296; Stop 320
ttcttgaagggtcttgggttattga

SEQ ID NO: 116913 - DNA, 25 bp, Artificial
  probe
  misc_feature (1)..(25): SEQ ID NO: 6628; WAN024CFW_at; Start 357; Stop 381
tgatgaatctgaagtgcttggcaac

SEQ ID NO: 116914 - DNA, 25 bp, Artificial
  probe
  misc_feature (1)..(25): SEQ ID NO: 6628; WAN024CFW_at; Start 222; Stop 246
tagatttttgggtagagctgacgaa

SEQ ID NO: 116915 - DNA, 25 bp, Artificial
  probe
  misc_feature (1)..(25): SEQ ID NO: 6628; WAN024CFW_at; Start 319; Stop 343
gatactggcagtgtcgcagtgcgtt

SEQ ID NO: 116916 - DNA, 25 bp, Artificial
  probe
  misc_feature (1)..(25): SEQ ID NO: 6628; WAN024CFW_at; Start 315; Stop 339
tattgatactggcagtgtcgcagtg

SEQ ID NO: 116917 - DNA, 25 bp, Artificial
  probe
  misc_feature (1)..(25): SEQ ID NO: 6628; WAN024CFW_at; Start 234; Stop 258
tagagctgacgaaattggcggtttc

SEQ ID NO: 116918 - DNA, 25 bp, Artificial
  probe
  misc_feature (1)..(25): SEQ ID NO: 6628; WAN024CFW_at; Start 198; Stop 222
tgaaggcgatattgtacgaactact

SEQ ID NO: 116919 - DNA, 25 bp, Artificial
  probe
  misc_feature (1)..(25): SEQ ID NO: 6628; WAN024CFW_at; Start 251; Stop 275
gcggtttctatgaatatgagaaaga

SEQ ID NO: 116920 - DNA, 25 bp, Artificial
  probe
  misc_feature (1)..(25): SEQ ID NO: 6628; WAN024CFW_at; Start 265; Stop 289
tatgagaaagattatgtaggagttg

SEQ ID NO: 116921 - DNA, 25 bp, Artificial
  probe
  misc_feature (1)..(25): SEQ ID NO: 6628; WAN024CFW_at; Start 366; Stop 390
tgaagtgcttggcaacatctacgaa

SEQ ID NO: 116922 - DNA, 25 bp, Artificial
  probe
  misc_feature (1)..(25): SEQ ID NO: 6628; WAN024CFW_at; Start 183; Stop 207
cggaaaggaaatctttgaaggcgat

SEQ ID NO: 116923 - DNA, 25 bp, Artificial
  probe
  misc_feature (1)..(25): SEQ ID NO: 6628; WAN024CFW_at; Start 339; Stop 363
gcgtttgtggtctgaaattgatgaa

SEQ ID NO: 116924 - DNA, 25 bp, Artificial
  probe
  misc_feature (1)..(25): SEQ ID NO: 6628; WAN024CFW_at; Start 279; Stop 303
tgtaggagttgtaaaggttcttgaa

SEQ ID NO: 116925 - DNA, 25 bp, Artificial
  probe
  misc_feature (1)..(25): SEQ ID NO: 6628; WAN024CFW_at; Start 304; Stop 328
gggtcttgggttattgatactggca

SEQ ID NO: 116926 - DNA, 25 bp, Artificial
  probe
  misc_feature (1)..(25): SEQ ID NO: 6628; WAN024CFW_at; Start 354; Stop 378
aattgatgaatctgaagtgcttggc

SEQ ID NO: 116927 - DNA, 25 bp, Artificial
  probe
  misc_feature (1)..(25): SEQ ID NO: 6628; WAN024CFW_at; Start 331; Stop 355
gtcgcagtgcgtttgtggtctgaaa

SEQ ID NO: 116928 - DNA, 25 bp, Artificial
  probe
  misc_feature (1)..(25): SEQ ID NO: 6628; WAN024CFW_at; Start 364; Stop 388
tctgaagtgcttggcaacatctacg

SEQ ID NO: 116929 - DNA, 25 bp, Artificial
  probe
  misc_feature (1)..(25): SEQ ID NO: 6628; WAN024CFW_at; Start 391; Stop 415
aatctagagtttttggaggtcaacg

SEQ ID NO: 116930 - DNA, 25 bp, Artificial
  probe
  misc_feature (1)..(25): SEQ ID NO: 6628; WAN024CFW_at; Start 361; Stop 385
gaatctgaagtgcttggcaacatct

SEQ ID NO: 116931 - DNA, 25 bp, Artificial
  probe
  misc_feature (1)..(25): SEQ ID NO: 6628; WAN024CFW_at; Start 228; Stop 252
tttgggtagagctgacgaaattggc

SEQ ID NO: 116932 - DNA, 25 bp, Artificial
  probe
  misc_feature (1)..(25): SEQ ID NO: 6628; WAN024CFW_at; Start 335; Stop 359
cagtgcgtttgtggtctgaaattga

SEQ ID NO: 116933 - DNA, 25 bp, Artificial
  probe
  misc_feature (1)..(25): SEQ ID NO: 6628; WAN024CFW_at; Start 246; Stop 270
aattggcggtttctatgaatatgag

SEQ ID NO: 116934 - DNA, 25 bp, Artificial
  probe
  misc_feature (1)..(25): SEQ ID NO: 6628; WAN024CFW_at; Start 219; Stop 243
tactagatttttgggtagagctgac

SEQ ID NO: 116935 - DNA, 25 bp, Artificial
  probe
  misc_feature (1)..(25): SEQ ID NO: 6628; WAN024CFW_at; Start 277; Stop 301
tatgtaggagttgtaaaggttcttg

SEQ ID NO: 116936 - DNA, 25 bp, Artificial
  probe
  misc_feature (1)..(25): SEQ ID NO: 6626; WAN024CFX_at; Start 60; Stop 84
cggacatttaattgaagatagagga

SEQ ID NO: 116937 - DNA, 25 bp, Artificial
  probe
  misc_feature (1)..(25): SEQ ID NO: 6626; WAN024CFX_at; Start 31; Stop 55
gacgaaaaaagcaaaggagaatggc

SEQ ID NO: 116938 - DNA, 25 bp, Artificial
  probe
  misc_feature (1)..(25): SEQ ID NO: 6626; WAN024CFX_at; Start 46; Stop 70
ggagaatggcaatacggacatttaa

SEQ ID NO: 116939 - DNA, 25 bp, Artificial
  probe
  misc_feature (1)..(25): SEQ ID NO: 6626; WAN024CFX_at; Start 108; Stop 132
ggtagaagccaatgaacaatacatt

SEQ ID NO: 116940 - DNA, 25 bp, Artificial
  probe
  misc_feature (1)..(25): SEQ ID NO: 6626; WAN024CFX_at; Start 102; Stop 126
cgaagtggtagaagccaatgaacaa

SEQ ID NO: 116941 - DNA, 25 bp, Artificial
  probe
  misc_feature (1)..(25): SEQ ID NO: 6626; WAN024CFX_at; Start 299; Stop 323
gaatgccttccatatatctaaaggg

SEQ ID NO: 116942 - DNA, 25 bp, Artificial
  probe
  misc_feature (1)..(25): SEQ ID NO: 6626; WAN024CFX_at; Start 19; Stop 43
gggttatccattgacgaaaaaagca

SEQ ID NO: 116943 - DNA, 25 bp, Artificial
  probe
  misc_feature (1)..(25): SEQ ID NO: 6626; WAN024CFX_at; Start 308; Stop 332
ccatatatctaaagggattgctaag

SEQ ID NO: 116944 - DNA, 25 bp, Artificial
  probe
  misc_feature (1)..(25): SEQ ID NO: 6626; WAN024CFX_at; Start 295; Stop 319
ggcggaatgccttccatatatctaa

SEQ ID NO: 116945 - DNA, 25 bp, Artificial
  probe
  misc_feature (1)..(25): SEQ ID NO: 6626; WAN024CFX_at; Start 354; Stop 378
cgaggaaatcatcggaaacgtctat

SEQ ID NO: 116946 - DNA, 25 bp, Artificial
  probe
  misc_feature (1)..(25): SEQ ID NO: 6626; WAN024CFX_at; Start 337; Stop 361
tatgcgtggactgaagacgaggaaa

SEQ ID NO: 116947 - DNA, 25 bp, Artificial
  probe
  misc_feature (1)..(25): SEQ ID NO: 6626; WAN024CFX_at; Start 317; Stop 341
taaagggattgctaagtgggtatgc

SEQ ID NO: 116948 - DNA, 25 bp, Artificial
  probe
  misc_feature (1)..(25): SEQ ID NO: 6626; WAN024CFX_at; Start 41; Stop 65
gcaaaggagaatggcaatacggaca

SEQ ID NO: 116949 - DNA, 25 bp, Artificial
  probe
  misc_feature (1)..(25): SEQ ID NO: 6626; WAN024CFX_at; Start 149; Stop 173
gtcctgtaaatccagcaacattagg

SEQ ID NO: 116950 - DNA, 25 bp, Artificial
  probe
  misc_feature (1)..(25): SEQ ID NO: 6626; WAN024CFX_at; Start 93; Stop 117
tattatcaacgaagtggtagaagcc

SEQ ID NO: 116951 - DNA, 25 bp, Artificial
  probe
  misc_feature (1)..(25): SEQ ID NO: 6626; WAN024CFX_at; Start 10; Stop 34
aaatttagagggttatccattgacg

SEQ ID NO: 116952 - DNA, 25 bp, Artificial
  probe
  misc_feature (1)..(25): SEQ ID NO: 6626; WAN024CFX_at; Start 161; Stop 185
cagcaacattaggacaatcaacagg

SEQ ID NO: 116953 - DNA, 25 bp, Artificial
  probe
  misc_feature (1)..(25): SEQ ID NO: 6626; WAN024CFX_at; Start 287; Stop 311
cattcataggcggaatgccttccat

SEQ ID NO: 116954 - DNA, 25 bp, Artificial
  probe
  misc_feature (1)..(25): SEQ ID NO: 6626; WAN024CFX_at; Start 129; Stop 153
cattactataggttcttggtgtcct

SEQ ID NO: 116955 - DNA, 25 bp, Artificial
  probe
  misc_feature (1)..(25): SEQ ID NO: 6626; WAN024CFX_at; Start 362; Stop 386
tcatcggaaacgtctatgaaaatcc

SEQ ID NO: 116956 - DNA, 25 bp, Artificial
  probe
  misc_feature (1)..(25): SEQ ID NO: 6626; WAN024CFX_at; Start 23; Stop 47
tatccattgacgaaaaaagcaaagg

SEQ ID NO: 116957 - DNA, 25 bp, Artificial
  probe
  misc_feature (1)..(25): SEQ ID NO: 6626; WAN024CFX_at; Start 88; Stop 112
gcatttattatcaacgaagtggtag

SEQ ID NO: 116958 - DNA, 25 bp, Artificial
  probe
  misc_feature (1)..(25): SEQ ID NO: 6626; WAN024CFX_at; Start 115; Stop 139
gccaatgaacaatacattactatag

SEQ ID NO: 116959 - DNA, 25 bp, Artificial
  probe
  misc_feature (1)..(25): SEQ ID NO: 6626; WAN024CFX_at; Start 143; Stop 167
cttggtgtcctgtaaatccagcaac

SEQ ID NO: 116960 - DNA, 25 bp, Artificial
  probe
  misc_feature (1)..(25): SEQ ID NO: 6626; WAN024CFX_at; Start 68; Stop 92
taattgaagatagaggaagagcatt

SEQ ID NO: 116961 - DNA, 25 bp, Artificial
  probe
  misc_feature (1)..(25): SEQ ID NO: 6626; WAN024CFX_at; Start 324; Stop 348
attgctaagtgggtatgcgtggact

SEQ ID NO: 116962 - DNA, 25 bp, Artificial
  probe
  misc_feature (1)..(25): SEQ ID NO: 6626; WAN024CFX_at; Start 165; Stop 189
aacattaggacaatcaacaggactc

SEQ ID NO: 116963 - DNA, 25 bp, Artificial
  probe
  misc_feature (1)..(25): SEQ ID NO: 6626; WAN024CFX_at; Start 96; Stop 120
tatcaacgaagtggtagaagccaat

SEQ ID NO: 116964 - DNA, 25 bp, Artificial
  probe
  misc_feature (1)..(25): SEQ ID NO: 6626; WAN024CFX_at; Start 80; Stop 104
gaggaagagcatttattatcaacga

SEQ ID NO: 116965 - DNA, 25 bp, Artificial
  probe
  misc_feature (1)..(25): SEQ ID NO: 6626; WAN024CFX_at; Start 368; Stop 392
gaaacgtctatgaaaatccagagct

SEQ ID NO: 116966 - DNA, 25 bp, Artificial
  probe
  misc_feature (1)..(25): SEQ ID NO: 6626; WAN024CFX_at; Start 283; Stop 307
ggcacattcataggcggaatgcctt

SEQ ID NO: 116967 - DNA, 25 bp, Artificial
  probe
  misc_feature (1)..(25): SEQ ID NO: 6626; WAN024CFX_at; Start 345; Stop 369
gactgaagacgaggaaatcatcgga

SEQ ID NO: 116968 - DNA, 25 bp, Artificial
  probe
  misc_feature (1)..(25): SEQ ID NO: 6626; WAN024CFX_at; Start 2; Stop 26
tgataccaaaatttagagggttatc

SEQ ID NO: 116969 - DNA, 25 bp, Artificial
  probe
  misc_feature (1)..(25): SEQ ID NO: 6626; WAN024CFX_at; Start 139; Stop 163
ggttcttggtgtcctgtaaatccag

SEQ ID NO: 116970 - DNA, 25 bp, Artificial
  probe
  misc_feature (1)..(25): SEQ ID NO: 6629; WAN024CFY_at; Start 368; Stop 392
cagagcttttggaggtaactcatga

SEQ ID NO: 116971 - DNA, 25 bp, Artificial
  probe
  misc_feature (1)..(25): SEQ ID NO: 6629; WAN024CFY_at; Start 269; Stop 293
catacataggtggaatgcctgctgt

SEQ ID NO: 116972 - DNA, 25 bp, Artificial
  probe
  misc_feature (1)..(25): SEQ ID NO: 6629; WAN024CFY_at; Start 284; Stop 308
tgcctgctgtatacctaaaaggatt

SEQ ID NO: 116973 - DNA, 25 bp, Artificial
  probe
  misc_feature (1)..(25): SEQ ID NO: 6629; WAN024CFY_at; Start 282; Stop 306
aatgcctgctgtatacctaaaagga

SEQ ID NO: 116974 - DNA, 25 bp, Artificial
  probe
  misc_feature (1)..(25): SEQ ID NO: 6629; WAN024CFY_at; Start 323; Stop 347
cgtggacggaatatgaggaaatcat

SEQ ID NO: 116975 - DNA, 25 bp, Artificial
  probe
  misc_feature (1)..(25): SEQ ID NO: 6629; WAN024CFY_at; Start 327; Stop 351
gacggaatatgaggaaatcatcggc

SEQ ID NO: 116976 - DNA, 25 bp, Artificial
  probe
  misc_feature (1)..(25): SEQ ID NO: 6629; WAN024CFY_at; Start 278; Stop 302
gtggaatgcctgctgtatacctaaa

SEQ ID NO: 116977 - DNA, 25 bp, Artificial
  probe
  misc_feature (1)..(25): SEQ ID NO: 6629; WAN024CFY_at; Start 319; Stop 343
tatgcgtggacggaatatgaggaaa

SEQ ID NO: 116978 - DNA, 25 bp, Artificial
  probe
  misc_feature (1)..(25): SEQ ID NO: 6629; WAN024CFY_at; Start 164; Stop 188
caggacttaaggacaagaacggcaa

SEQ ID NO: 116979 - DNA, 25 bp, Artificial
  probe
  misc_feature (1)..(25): SEQ ID NO: 6629; WAN024CFY_at; Start 312; Stop 336
agatggatatgcgtggacggaatat

SEQ ID NO: 116980 - DNA, 25 bp, Artificial
  probe
  misc_feature (1)..(25): SEQ ID NO: 6629; WAN024CFY_at; Start 281; Stop 305
gaatgcctgctgtatacctaaaagg

SEQ ID NO: 116981 - DNA, 25 bp, Artificial
  probe
  misc_feature (1)..(25): SEQ ID NO: 6629; WAN024CFY_at; Start 301; Stop 325
aaaggatttggagatggatatgcgt

SEQ ID NO: 116982 - DNA, 25 bp, Artificial
  probe
  misc_feature (1)..(25): SEQ ID NO: 6629; WAN024CFY_at; Start 267; Stop 291
cacatacataggtggaatgcctgct

SEQ ID NO: 116983 - DNA, 25 bp, Artificial
  probe
  misc_feature (1)..(25): SEQ ID NO: 6629; WAN024CFY_at; Start 277; Stop 301
ggtggaatgcctgctgtatacctaa

SEQ ID NO: 116984 - DNA, 25 bp, Artificial
  probe
  misc_feature (1)..(25): SEQ ID NO: 6629; WAN024CFY_at; Start 295; Stop 319
tacctaaaaggatttggagatggat

SEQ ID NO: 116985 - DNA, 25 bp, Artificial
  probe
  misc_feature (1)..(25): SEQ ID NO: 6629; WAN024CFY_at; Start 369; Stop 393
agagcttttggaggtaactcatgaa

SEQ ID NO: 116986 - DNA, 25 bp, Artificial
  probe
  misc_feature (1)..(25): SEQ ID NO: 6629; WAN024CFY_at; Start 297; Stop 321
cctaaaaggatttggagatggatat

SEQ ID NO: 116987 - DNA, 25 bp, Artificial
  probe
  misc_feature (1)..(25): SEQ ID NO: 6629; WAN024CFY_at; Start 339; Stop 363
ggaaatcatcggcaacatctacgaa

SEQ ID NO: 116988 - DNA, 25 bp, Artificial
  probe
  misc_feature (1)..(25): SEQ ID NO: 6629; WAN024CFY_at; Start 271; Stop 295
tacataggtggaatgcctgctgtat

SEQ ID NO: 116989 - DNA, 25 bp, Artificial
  probe
  misc_feature (1)..(25): SEQ ID NO: 6629; WAN024CFY_at; Start 275; Stop 299
taggtggaatgcctgctgtatacct

SEQ ID NO: 116990 - DNA, 25 bp, Artificial
  probe
  misc_feature (1)..(25): SEQ ID NO: 6629; WAN024CFY_at; Start 165; Stop 189
aggacttaaggacaagaacggcaag

SEQ ID NO: 116991 - DNA, 25 bp, Artificial
  probe
  misc_feature (1)..(25): SEQ ID NO: 6629; WAN024CFY_at; Start 273; Stop 297
cataggtggaatgcctgctgtatac

SEQ ID NO: 116992 - DNA, 25 bp, Artificial
  probe
  misc_feature (1)..(25): SEQ ID NO: 6629; WAN024CFY_at; Start 299; Stop 323
taaaaggatttggagatggatatgc

SEQ ID NO: 116993 - DNA, 25 bp, Artificial
  probe
  misc_feature (1)..(25): SEQ ID NO: 6629; WAN024CFY_at; Start 329; Stop 353
cggaatatgaggaaatcatcggcaa

SEQ ID NO: 116994 - DNA, 25 bp, Artificial
  probe
  misc_feature (1)..(25): SEQ ID NO: 6629; WAN024CFY_at; Start 325; Stop 349
tggacggaatatgaggaaatcatcg

SEQ ID NO: 116995 - DNA, 25 bp, Artificial
  probe
  misc_feature (1)..(25): SEQ ID NO: 6629; WAN024CFY_at; Start 289; Stop 313
gctgtatacctaaaaggatttggag

SEQ ID NO: 116996 - DNA, 25 bp, Artificial
  probe
  misc_feature (1)..(25): SEQ ID NO: 6629; WAN024CFY_at; Start 280; Stop 304
ggaatgcctgctgtatacctaaaag

SEQ ID NO: 116997 - DNA, 25 bp, Artificial
  probe
  misc_feature (1)..(25): SEQ ID NO: 6629; WAN024CFY_at; Start 336; Stop 360
tgaggaaatcatcggcaacatctac

SEQ ID NO: 116998 - DNA, 25 bp, Artificial
  probe
  misc_feature (1)..(25): SEQ ID NO: 6629; WAN024CFY_at; Start 266; Stop 290
gcacatacataggtggaatgcctgc

SEQ ID NO: 116999 - DNA, 25 bp, Artificial
  probe
  misc_feature (1)..(25): SEQ ID NO: 6629; WAN024CFY_at; Start 321; Stop 345
tgcgtggacggaatatgaggaaatc

SEQ ID NO: 117000 - DNA, 25 bp, Artificial
  probe
  misc_feature (1)..(25): SEQ ID NO: 6629; WAN024CFY_at; Start 293; Stop 317
tatacctaaaaggatttggagatgg

SEQ ID NO: 117001 - DNA, 25 bp, Artificial
  probe
  misc_feature (1)..(25): SEQ ID NO: 6629; WAN024CFY_at; Start 286; Stop 310
cctgctgtatacctaaaaggatttg

SEQ ID NO: 117002 - DNA, 25 bp, Artificial
  probe
  misc_feature (1)..(25): SEQ ID NO: 6629; WAN024CFY_at; Start 331; Stop 355
gaatatgaggaaatcatcggcaaca

SEQ ID NO: 117003 - DNA, 25 bp, Artificial
  probe
  misc_feature (1)..(25): SEQ ID NO: 6629; WAN024CFY_at; Start 334; Stop 358
tatgaggaaatcatcggcaacatct

SEQ ID NO: 117004 - DNA, 25 bp, Artificial
  probe
  misc_feature (1)..(25): SEQ ID NO: 4015; WAN024CFZ_at; Start 127; Stop 151
gaccgtgaatttacaattactgtag

SEQ ID NO: 117005 - DNA, 25 bp, Artificial
  probe
  misc_feature (1)..(25): SEQ ID NO: 4015; WAN024CFZ_at; Start 50; Stop 74
agcaagttttagaaattgtattgga

SEQ ID NO: 117006 - DNA, 25 bp, Artificial
  probe
  misc_feature (1)..(25): SEQ ID NO: 4015; WAN024CFZ_at; Start 70; Stop 94
ttggatttgctaaaagacgattcaa

SEQ ID NO: 117007 - DNA, 25 bp, Artificial
  probe
  misc_feature (1)..(25): SEQ ID NO: 4015; WAN024CFZ_at; Start 148; Stop 172
gtagaaaaggaggtcacagatcgtg

SEQ ID NO: 117008 - DNA, 25 bp, Artificial
  probe
  misc_feature (1)..(25): SEQ ID NO: 4015; WAN024CFZ_at; Start 1; Stop 25
gtgatggaagatgagcaaaatattt

SEQ ID NO: 117009 - DNA, 25 bp, Artificial
  probe
  misc_feature (1)..(25): SEQ ID NO: 4015; WAN024CFZ_at; Start 23; Stop 47
ttttagagacacaattgattttagg

SEQ ID NO: 117010 - DNA, 25 bp, Artificial
  probe
  misc_feature (1)..(25): SEQ ID NO: 4015; WAN024CFZ_at; Start 15; Stop 39
gcaaaatattttagagacacaattg

SEQ ID NO: 117011 - DNA, 25 bp, Artificial
  probe
  misc_feature (1)..(25): SEQ ID NO: 4015; WAN024CFZ_at; Start 32; Stop 56
cacaattgattttaggtaagcaagt

SEQ ID NO: 117012 - DNA, 25 bp, Artificial
  probe
  misc_feature (1)..(25): SEQ ID NO: 4015; WAN024CFZ_at; Start 38; Stop 62
tgattttaggtaagcaagttttaga

SEQ ID NO: 117013 - DNA, 25 bp, Artificial
  probe
  misc_feature (1)..(25): SEQ ID NO: 4015; WAN024CFZ_at; Start 124; Stop 148
aatgaccgtgaatttacaattactg

SEQ ID NO: 117014 - DNA, 25 bp, Artificial
  probe
  misc_feature (1)..(25): SEQ ID NO: 4015; WAN024CFZ_at; Start 10; Stop 34
gatgagcaaaatattttagagacac

SEQ ID NO: 117015 - DNA, 25 bp, Artificial
  probe
  misc_feature (1)..(25): SEQ ID NO: 4015; WAN024CFZ_at; Start 13; Stop 37
gagcaaaatattttagagacacaat

SEQ ID NO: 117016 - DNA, 25 bp, Artificial
  probe
  misc_feature (1)..(25): SEQ ID NO: 4015; WAN024CFZ_at; Start 146; Stop 170
ctgtagaaaaggaggtcacagatcg

SEQ ID NO: 117017 - DNA, 25 bp, Artificial
  probe
  misc_feature (1)..(25): SEQ ID NO: 4015; WAN024CFZ_at; Start 109; Stop 133
ctacctttaaacataaatgaccgtg

SEQ ID NO: 117018 - DNA, 25 bp, Artificial
  probe
  misc_feature (1)..(25): SEQ ID NO: 4015; WAN024CFZ_at; Start 110; Stop 134
tacctttaaacataaatgaccgtga

SEQ ID NO: 117019 - DNA, 25 bp, Artificial
  probe
  misc_feature (1)..(25): SEQ ID NO: 4015; WAN024CFZ_at; Start 138; Stop 162
tacaattactgtagaaaaggaggtc

SEQ ID NO: 117020 - DNA, 25 bp, Artificial
  probe
  misc_feature (1)..(25): SEQ ID NO: 4015; WAN024CFZ_at; Start 72; Stop 96
ggatttgctaaaagacgattcaaaa

SEQ ID NO: 117021 - DNA, 25 bp, Artificial
  probe
  misc_feature (1)..(25): SEQ ID NO: 4015; WAN024CFZ_at; Start 144; Stop 168
tactgtagaaaaggaggtcacagat

SEQ ID NO: 117022 - DNA, 25 bp, Artificial
  probe
  misc_feature (1)..(25): SEQ ID NO: 4015; WAN024CFZ_at; Start 34; Stop 58
caattgattttaggtaagcaagttt

SEQ ID NO: 117023 - DNA, 25 bp, Artificial
  probe
  misc_feature (1)..(25): SEQ ID NO: 4015; WAN024CFZ_at; Start 68; Stop 92
tattggatttgctaaaagacgattc

SEQ ID NO: 117024 - DNA, 25 bp, Artificial
  probe
  misc_feature (1)..(25): SEQ ID NO: 4015; WAN024CFZ_at; Start 140; Stop 164
caattactgtagaaaaggaggtcac

SEQ ID NO: 117025 - DNA, 25 bp, Artificial
  probe
  misc_feature (1)..(25): SEQ ID NO: 4015; WAN024CFZ_at; Start 141; Stop 165
aattactgtagaaaaggaggtcaca

SEQ ID NO: 117026 - DNA, 25 bp, Artificial
  probe
  misc_feature (1)..(25): SEQ ID NO: 4015; WAN024CFZ_at; Start 129; Stop 153
ccgtgaatttacaattactgtagaa

SEQ ID NO: 117027 - DNA, 25 bp, Artificial
  probe
  misc_feature (1)..(25): SEQ ID NO: 4015; WAN024CFZ_at; Start 150; Stop 174
agaaaaggaggtcacagatcgtgac

SEQ ID NO: 117028 - DNA, 25 bp, Artificial
  probe
  misc_feature (1)..(25): SEQ ID NO: 4015; WAN024CFZ_at; Start 28; Stop 52
gagacacaattgattttaggtaagc

SEQ ID NO: 117029 - DNA, 25 bp, Artificial
  probe
  misc_feature (1)..(25): SEQ ID NO: 4015; WAN024CFZ_at; Start 143; Stop 167
ttactgtagaaaaggaggtcacaga

SEQ ID NO: 117030 - DNA, 25 bp, Artificial
  probe
  misc_feature (1)..(25): SEQ ID NO: 4015; WAN024CFZ_at; Start 147; Stop 171
tgtagaaaaggaggtcacagatcgt

SEQ ID NO: 117031 - DNA, 25 bp, Artificial
  probe
  misc_feature (1)..(25): SEQ ID NO: 4015; WAN024CFZ_at; Start 65; Stop 89
ttgtattggatttgctaaaagacga

SEQ ID NO: 117032 - DNA, 25 bp, Artificial
  probe
  misc_feature (1)..(25): SEQ ID NO: 4015; WAN024CFZ_at; Start 112; Stop 136
cctttaaacataaatgaccgtgaat

SEQ ID NO: 117033 - DNA, 25 bp, Artificial
  probe
  misc_feature (1)..(25): SEQ ID NO: 4015; WAN024CFZ_at; Start 149; Stop 173
tagaaaaggaggtcacagatcgtga

SEQ ID NO: 117034 - DNA, 25 bp, Artificial
  probe
  misc_feature (1)..(25): SEQ ID NO: 4015; WAN024CFZ_at; Start 30; Stop 54
gacacaattgattttaggtaagcaa

SEQ ID NO: 117035 - DNA, 25 bp, Artificial
  probe
  misc_feature (1)..(25): SEQ ID NO: 4015; WAN024CFZ_at; Start 77; Stop 101
tgctaaaagacgattcaaaaatagg

SEQ ID NO: 117036 - DNA, 25 bp, Artificial
  probe
  misc_feature (1)..(25): SEQ ID NO: 4015; WAN024CFZ_at; Start 5; Stop 29
tggaagatgagcaaaatattttaga

SEQ ID NO: 117037 - DNA, 25 bp, Artificial
  probe
  misc_feature (1)..(25): SEQ ID NO: 4015; WAN024CFZ_at; Start 116; Stop 140
taaacataaatgaccgtgaatttac

SEQ ID NO: 117038 - DNA, 25 bp, Artificial
  probe
  misc_feature (1)..(25): SEQ ID NO: 6496; WAN024CG2_at; Start 441; Stop 465
cgcaaacttcggctgggtgtttgat

SEQ ID NO: 117039 - DNA, 25 bp, Artificial
  probe
  misc_feature (1)..(25): SEQ ID NO: 6496; WAN024CG2_at; Start 36; Stop 60
attgtggaatgaacacagccctttt

SEQ ID NO: 117040 - DNA, 25 bp, Artificial
  probe
  misc_feature (1)..(25): SEQ ID NO: 6496; WAN024CG2_at; Start 51; Stop 75
cagccctttttatgaacctgtacct

SEQ ID NO: 117041 - DNA, 25 bp, Artificial
  probe
  misc_feature (1)..(25): SEQ ID NO: 6496; WAN024CG2_at; Start 462; Stop 486
tgattgtgaaggaattgagattgag

SEQ ID NO: 117042 - DNA, 25 bp, Artificial
  probe
  misc_feature (1)..(25): SEQ ID NO: 6496; WAN024CG2_at; Start 73; Stop 97
ccttatacttcaatggttgaacttt

SEQ ID NO: 117043 - DNA, 25 bp, Artificial
  probe
  misc_feature (1)..(25): SEQ ID NO: 6496; WAN024CG2_at; Start 49; Stop 73
cacagccctttttatgaacctgtac

SEQ ID NO: 117044 - DNA, 25 bp, Artificial
  probe
  misc_feature (1)..(25): SEQ ID NO: 6496; WAN024CG2_at; Start 46; Stop 70
gaacacagccctttttatgaacctg

SEQ ID NO: 117045 - DNA, 25 bp, Artificial
  probe
  misc_feature (1)..(25): SEQ ID NO: 6496; WAN024CG2_at; Start 447; Stop 471
cttcggctgggtgtttgattgtgaa

SEQ ID NO: 117046 - DNA, 25 bp, Artificial
  probe
  misc_feature (1)..(25): SEQ ID NO: 6496; WAN024CG2_at; Start 32; Stop 56
aagaattgtggaatgaacacagccc

SEQ ID NO: 117047 - DNA, 25 bp, Artificial
  probe
  misc_feature (1)..(25): SEQ ID NO: 6496; WAN024CG2_at; Start 106; Stop 130
gagttgaaacaactagacgaaccag

SEQ ID NO: 117048 - DNA, 25 bp, Artificial
  probe
  misc_feature (1)..(25): SEQ ID NO: 6496; WAN024CG2_at; Start 436; Stop 460
gaagacgcaaacttcggctgggtgt

SEQ ID NO: 117049 - DNA, 25 bp, Artificial
  probe
  misc_feature (1)..(25): SEQ ID NO: 6496; WAN024CG2_at; Start 453; Stop 477
ctgggtgtttgattgtgaaggaatt

SEQ ID NO: 117050 - DNA, 25 bp, Artificial
  probe
  misc_feature (1)..(25): SEQ ID NO: 6496; WAN024CG2_at; Start 429; Stop 453
agaactagaagacgcaaacttcggc

SEQ ID NO: 117051 - DNA, 25 bp, Artificial
  probe
  misc_feature (1)..(25): SEQ ID NO: 6496; WAN024CG2_at; Start 433; Stop 457
ctagaagacgcaaacttcggctggg

SEQ ID NO: 117052 - DNA, 25 bp, Artificial
  probe
  misc_feature (1)..(25): SEQ ID NO: 6496; WAN024CG2_at; Start 3; Stop 27
gaatattaaagcattgattaagaag

SEQ ID NO: 117053 - DNA, 25 bp, Artificial
  probe
  misc_feature (1)..(25): SEQ ID NO: 6496; WAN024CG2_at; Start 115; Stop 139
caactagacgaaccagaaaaagtca

SEQ ID NO: 117054 - DNA, 25 bp, Artificial
  probe
  misc_feature (1)..(25): SEQ ID NO: 6496; WAN024CG2_at; Start 438; Stop 462
agacgcaaacttcggctgggtgttt

SEQ ID NO: 117055 - DNA, 25 bp, Artificial
  probe
  misc_feature (1)..(25): SEQ ID NO: 6496; WAN024CG2_at; Start 18; Stop 42
gattaagaagtatgaagaattgtgg

SEQ ID NO: 117056 - DNA, 25 bp, Artificial
  probe
  misc_feature (1)..(25): SEQ ID NO: 6496; WAN024CG2_at; Start 108; Stop 132
gttgaaacaactagacgaaccagaa

SEQ ID NO: 117057 - DNA, 25 bp, Artificial
  probe
  misc_feature (1)..(25): SEQ ID NO: 6496; WAN024CG2_at; Start 10; Stop 34
aaagcattgattaagaagtatgaag

SEQ ID NO: 117058 - DNA, 25 bp, Artificial
  probe
  misc_feature (1)..(25): SEQ ID NO: 6496; WAN024CG2_at; Start 41; Stop 65
ggaatgaacacagccctttttatga

SEQ ID NO: 117059 - DNA, 25 bp, Artificial
  probe
  misc_feature (1)..(25): SEQ ID NO: 6496; WAN024CG2_at; Start 427; Stop 451
aaagaactagaagacgcaaacttcg

SEQ ID NO: 117060 - DNA, 25 bp, Artificial
  probe
  misc_feature (1)..(25): SEQ ID NO: 6496; WAN024CG2_at; Start 30; Stop 54
tgaagaattgtggaatgaacacagc

SEQ ID NO: 117061 - DNA, 25 bp, Artificial
  probe
  misc_feature (1)..(25): SEQ ID NO: 6496; WAN024CG2_at; Start 110; Stop 134
tgaaacaactagacgaaccagaaaa

SEQ ID NO: 117062 - DNA, 25 bp, Artificial
  probe
  misc_feature (1)..(25): SEQ ID NO: 6496; WAN024CG2_at; Start 45; Stop 69
tgaacacagccctttttatgaacct

SEQ ID NO: 117063 - DNA, 25 bp, Artificial
  probe
  misc_feature (1)..(25): SEQ ID NO: 6496; WAN024CG2_at; Start 67; Stop 91
cctgtaccttatacttcaatggttg

SEQ ID NO: 117064 - DNA, 25 bp, Artificial
  probe
  misc_feature (1)..(25): SEQ ID NO: 6496; WAN024CG2_at; Start 434; Stop 458
tagaagacgcaaacttcggctgggt

SEQ ID NO: 117065 - DNA, 25 bp, Artificial
  probe
  misc_feature (1)..(25): SEQ ID NO: 6496; WAN024CG2_at; Start 38; Stop 62
tgtggaatgaacacagcccttttta

SEQ ID NO: 117066 - DNA, 25 bp, Artificial
  probe
  misc_feature (1)..(25): SEQ ID NO: 6496; WAN024CG2_at; Start 445; Stop 469
aacttcggctgggtgtttgattgtg

SEQ ID NO: 117067 - DNA, 25 bp, Artificial
  probe
  misc_feature (1)..(25): SEQ ID NO: 6496; WAN024CG2_at; Start 34; Stop 58
gaattgtggaatgaacacagccctt

SEQ ID NO: 117068 - DNA, 25 bp, Artificial
  probe
  misc_feature (1)..(25): SEQ ID NO: 6496; WAN024CG2_at; Start 70; Stop 94
gtaccttatacttcaatggttgaac

SEQ ID NO: 117069 - DNA, 25 bp, Artificial
  probe
  misc_feature (1)..(25): SEQ ID NO: 6496; WAN024CG2_at; Start 64; Stop 88
gaacctgtaccttatacttcaatgg

SEQ ID NO: 117070 - DNA, 25 bp, Artificial
  probe
  misc_feature (1)..(25): SEQ ID NO: 6496; WAN024CG2_at; Start 99; Stop 123
tttgaaagagttgaaacaactagac

SEQ ID NO: 117071 - DNA, 25 bp, Artificial
  probe
  misc_feature (1)..(25): SEQ ID NO: 6496; WAN024CG2_at; Start 431; Stop 455
aactagaagacgcaaacttcggctg

SEQ ID NO: 117072 - DNA, 25 bp, Artificial
  probe
  misc_feature (1)..(25): SEQ ID NO: 867; WAN024CG3_at; Start 182; Stop 206
tgccattgcatgatagagaggtttg

SEQ ID NO: 117073 - DNA, 25 bp, Artificial
  probe
  misc_feature (1)..(25): SEQ ID NO: 867; WAN024CG3_at; Start 231; Stop 255
tgaacaggattttagccgtgcaaaa

SEQ ID NO: 117074 - DNA, 25 bp, Artificial
  probe
  misc_feature (1)..(25): SEQ ID NO: 867; WAN024CG3_at; Start 107; Stop 131
tagacgaatccgaaataggttacgc

SEQ ID NO: 117075 - DNA, 25 bp, Artificial
  probe
  misc_feature (1)..(25): SEQ ID NO: 867; WAN024CG3_at; Start 36; Stop 60
acttgagggtgtatggaatgctgaa

SEQ ID NO: 117076 - DNA, 25 bp, Artificial
  probe
  misc_feature (1)..(25): SEQ ID NO: 867; WAN024CG3_at; Start 116; Stop 140
ccgaaataggttacgcagatgaagc

SEQ ID NO: 117077 - DNA, 25 bp, Artificial
  probe
  misc_feature (1)..(25): SEQ ID NO: 867; WAN024CG3_at; Start 54; Stop 78
tgctgaaggagcagaactagctcgt

SEQ ID NO: 117078 - DNA, 25 bp, Artificial
  probe
  misc_feature (1)..(25): SEQ ID NO: 867; WAN024CG3_at; Start 240; Stop 264
ttttagccgtgcaaaatggcgagag

SEQ ID NO: 117079 - DNA, 25 bp, Artificial
  probe
  misc_feature (1)..(25): SEQ ID NO: 867; WAN024CG3_at; Start 79; Stop 103
caaatttttctgcaagacttggaac

SEQ ID NO: 117080 - DNA, 25 bp, Artificial
  probe
  misc_feature (1)..(25): SEQ ID NO: 867; WAN024CG3_at; Start 281; Stop 305
aaattgagggtatggttgaacgtga

SEQ ID NO: 117081 - DNA, 25 bp, Artificial
  probe
  misc_feature (1)..(25): SEQ ID NO: 867; WAN024CG3_at; Start 87; Stop 111
tctgcaagacttggaacaactagac

SEQ ID NO: 117082 - DNA, 25 bp, Artificial
  probe
  misc_feature (1)..(25): SEQ ID NO: 867; WAN024CG3_at; Start 167; Stop 191
cacgattgcgagaattgccattgca

SEQ ID NO: 117083 - DNA, 25 bp, Artificial
  probe
  misc_feature (1)..(25): SEQ ID NO: 867; WAN024CG3_at; Start 127; Stop 151
tacgcagatgaagctccacgctacg

SEQ ID NO: 117084 - DNA, 25 bp, Artificial
  probe
  misc_feature (1)..(25): SEQ ID NO: 867; WAN024CG3_at; Start 47; Stop 71
tatggaatgctgaaggagcagaact

SEQ ID NO: 117085 - DNA, 25 bp, Artificial
  probe
  misc_feature (1)..(25): SEQ ID NO: 867; WAN024CG3_at; Start 142; Stop 166
ccacgctacgtaaagaacatactag

SEQ ID NO: 117086 - DNA, 25 bp, Artificial
  probe
  misc_feature (1)..(25): SEQ ID NO: 867; WAN024CG3_at; Start 289; Stop 313
ggtatggttgaacgtgaaaaagtca

SEQ ID NO: 117087 - DNA, 25 bp, Artificial
  probe
  misc_feature (1)..(25): SEQ ID NO: 867; WAN024CG3_at; Start 122; Stop 146
taggttacgcagatgaagctccacg

SEQ ID NO: 117088 - DNA, 25 bp, Artificial
  probe
  misc_feature (1)..(25): SEQ ID NO: 867; WAN024CG3_at; Start 266; Stop 290
gctacgagcaaggtaaaattgaggg

SEQ ID NO: 117089 - DNA, 25 bp, Artificial
  probe
  misc_feature (1)..(25): SEQ ID NO: 867; WAN024CG3_at; Start 259; Stop 283
cgagagggctacgagcaaggtaaaa

SEQ ID NO: 117090 - DNA, 25 bp, Artificial
  probe
  misc_feature (1)..(25): SEQ ID NO: 867; WAN024CG3_at; Start 100; Stop 124
gaacaactagacgaatccgaaatag

SEQ ID NO: 117091 - DNA, 25 bp, Artificial
  probe
  misc_feature (1)..(25): SEQ ID NO: 867; WAN024CG3_at; Start 133; Stop 157
gatgaagctccacgctacgtaaaga

SEQ ID NO: 117092 - DNA, 25 bp, Artificial
  probe
  misc_feature (1)..(25): SEQ ID NO: 867; WAN024CG3_at; Start 175; Stop 199
cgagaattgccattgcatgatagag

SEQ ID NO: 117093 - DNA, 25 bp, Artificial
  probe
  misc_feature (1)..(25): SEQ ID NO: 867; WAN024CG3_at; Start 227; Stop 251
aatttgaacaggattttagccgtgc

SEQ ID NO: 117094 - DNA, 25 bp, Artificial
  probe
  misc_feature (1)..(25): SEQ ID NO: 867; WAN024CG3_at; Start 252; Stop 276
aaaatggcgagagggctacgagcaa

SEQ ID NO: 117095 - DNA, 25 bp, Artificial
  probe
  misc_feature (1)..(25): SEQ ID NO: 867; WAN024CG3_at; Start 61; Stop 85
ggagcagaactagctcgtcaaattt

SEQ ID NO: 117096 - DNA, 25 bp, Artificial
  probe
  misc_feature (1)..(25): SEQ ID NO: 867; WAN024CG3_at; Start 203; Stop 227
tttggttaaaggctatcatgagcga

SEQ ID NO: 117097 - DNA, 25 bp, Artificial
  probe
  misc_feature (1)..(25): SEQ ID NO: 867; WAN024CG3_at; Start 136; Stop 160
gaagctccacgctacgtaaagaaca

SEQ ID NO: 117098 - DNA, 25 bp, Artificial
  probe
  misc_feature (1)..(25): SEQ ID NO: 867; WAN024CG3_at; Start 156; Stop 180
gaacatactagcacgattgcgagaa

SEQ ID NO: 117099 - DNA, 25 bp, Artificial
  probe
  misc_feature (1)..(25): SEQ ID NO: 867; WAN024CG3_at; Start 67; Stop 91
gaactagctcgtcaaatttttctgc

SEQ ID NO: 117100 - DNA, 25 bp, Artificial
  probe
  misc_feature (1)..(25): SEQ ID NO: 867; WAN024CG3_at; Start 32; Stop 56
aaaaacttgagggtgtatggaatgc

SEQ ID NO: 117101 - DNA, 25 bp, Artificial
  probe
  misc_feature (1)..(25): SEQ ID NO: 867; WAN024CG3_at; Start 161; Stop 185
tactagcacgattgcgagaattgcc

SEQ ID NO: 117102 - DNA, 25 bp, Artificial
  probe
  misc_feature (1)..(25): SEQ ID NO: 867; WAN024CG3_at; Start 195; Stop 219
tagagaggtttggttaaaggctatc

SEQ ID NO: 117103 - DNA, 25 bp, Artificial
  probe
  misc_feature (1)..(25): SEQ ID NO: 867; WAN024CG3_at; Start 94; Stop 118
gacttggaacaactagacgaatccg

SEQ ID NO: 117104 - DNA, 25 bp, Artificial
  probe
  misc_feature (1)..(25): SEQ ID NO: 867; WAN024CG3_at; Start 152; Stop 176
taaagaacatactagcacgattgcg

SEQ ID NO: 117105 - DNA, 25 bp, Artificial
  probe
  misc_feature (1)..(25): SEQ ID NO: 867; WAN024CG3_at; Start 214; Stop 238
gctatcatgagcgaatttgaacagg

SEQ ID NO: 117106 - DNA, 25 bp, Artificial
  probe
  misc_feature (1)..(25): SEQ ID NO: 6455; WAN024CG4_at; Start 66; Stop 90
gataatcgagtattcgaagccgtgc

SEQ ID NO: 117107 - DNA, 25 bp, Artificial
  probe
  misc_feature (1)..(25): SEQ ID NO: 6455; WAN024CG4_at; Start 12; Stop 36
taaacaggctgagattgacggactg

SEQ ID NO: 117108 - DNA, 25 bp, Artificial
  probe
  misc_feature (1)..(25): SEQ ID NO: 6455; WAN024CG4_at; Start 2; Stop 26
tgaagtacgataaacaggctgagat

SEQ ID NO: 117109 - DNA, 25 bp, Artificial
  probe
  misc_feature (1)..(25): SEQ ID NO: 6455; WAN024CG4_at; Start 68; Stop 92
taatcgagtattcgaagccgtgcga

SEQ ID NO: 117110 - DNA, 25 bp, Artificial
  probe
  misc_feature (1)..(25): SEQ ID NO: 6455; WAN024CG4_at; Start 79; Stop 103
tcgaagccgtgcgatgcacgcaaga

SEQ ID NO: 117111 - DNA, 25 bp, Artificial
  probe
  misc_feature (1)..(25): SEQ ID NO: 6455; WAN024CG4_at; Start 25; Stop 49
attgacggactgaaacgcacgatcg

SEQ ID NO: 117112 - DNA, 25 bp, Artificial
  probe
  misc_feature (1)..(25): SEQ ID NO: 6455; WAN024CG4_at; Start 16; Stop 40
caggctgagattgacggactgaaac

SEQ ID NO: 117113 - DNA, 25 bp, Artificial
  probe
  misc_feature (1)..(25): SEQ ID NO: 6455; WAN024CG4_at; Start 35; Stop 59
tgaaacgcacgatcgagcaaaacga

SEQ ID NO: 117114 - DNA, 25 bp, Artificial
  probe
  misc_feature (1)..(25): SEQ ID NO: 6455; WAN024CG4_at; Start 110; Stop 134
ttagagcgctggagcgcgatttgtt

SEQ ID NO: 117115 - DNA, 25 bp, Artificial
  probe
  misc_feature (1)..(25): SEQ ID NO: 6455; WAN024CG4_at; Start 134; Stop 158
tgaggaaaaagaataaagaattgag

SEQ ID NO: 117116 - DNA, 25 bp, Artificial
  probe
  misc_feature (1)..(25): SEQ ID NO: 6455; WAN024CG4_at; Start 20; Stop 44
ctgagattgacggactgaaacgcac

SEQ ID NO: 117117 - DNA, 25 bp, Artificial
  probe
  misc_feature (1)..(25): SEQ ID NO: 6455; WAN024CG4_at; Start 118; Stop 142
ctggagcgcgatttgttgaggaaaa

SEQ ID NO: 117118 - DNA, 25 bp, Artificial
  probe
  misc_feature (1)..(25): SEQ ID NO: 6455; WAN024CG4_at; Start 88; Stop 112
tgcgatgcacgcaagagacggatta

SEQ ID NO: 117119 - DNA, 25 bp, Artificial
  probe
  misc_feature (1)..(25): SEQ ID NO: 6455; WAN024CG4_at; Start 76; Stop 100
tattcgaagccgtgcgatgcacgca

SEQ ID NO: 117120 - DNA, 25 bp, Artificial
  probe
  misc_feature (1)..(25): SEQ ID NO: 6455; WAN024CG4_at; Start 72; Stop 96
cgagtattcgaagccgtgcgatgca

SEQ ID NO: 117121 - DNA, 25 bp, Artificial
  probe
  misc_feature (1)..(25): SEQ ID NO: 6455; WAN024CG4_at; Start 147; Stop 171
taaagaattgagacggaaattggag

SEQ ID NO: 117122 - DNA, 25 bp, Artificial
  probe
  misc_feature (1)..(25): SEQ ID NO: 6455; WAN024CG4_at; Start 152; Stop 176
aattgagacggaaattggaggagtt

SEQ ID NO: 117123 - DNA, 25 bp, Artificial
  probe
  misc_feature (1)..(25): SEQ ID NO: 6455; WAN024CG4_at; Start 63; Stop 87
gaagataatcgagtattcgaagccg

SEQ ID NO: 117124 - DNA, 25 bp, Artificial
  probe
  misc_feature (1)..(25): SEQ ID NO: 6455; WAN024CG4_at; Start 158; Stop 182
gacggaaattggaggagttggaaga

SEQ ID NO: 117125 - DNA, 25 bp, Artificial
  probe
  misc_feature (1)..(25): SEQ ID NO: 6455; WAN024CG4_at; Start 96; Stop 120
acgcaagagacggattagagcgctg

SEQ ID NO: 117126 - DNA, 25 bp, Artificial
  probe
  misc_feature (1)..(25): SEQ ID NO: 6455; WAN024CG4_at; Start 81; Stop 105
gaagccgtgcgatgcacgcaagaga

SEQ ID NO: 117127 - DNA, 25 bp, Artificial
  probe
  misc_feature (1)..(25): SEQ ID NO: 6455; WAN024CG4_at; Start 27; Stop 51
tgacggactgaaacgcacgatcgag

SEQ ID NO: 117128 - DNA, 25 bp, Artificial
  probe
  misc_feature (1)..(25): SEQ ID NO: 6455; WAN024CG4_at; Start 30; Stop 54
cggactgaaacgcacgatcgagcaa

SEQ ID NO: 117129 - DNA, 25 bp, Artificial
  probe
  misc_feature (1)..(25): SEQ ID NO: 6455; WAN024CG4_at; Start 48; Stop 72
cgagcaaaacgaagagaagataatc

SEQ ID NO: 117130 - DNA, 25 bp, Artificial
  probe
  misc_feature (1)..(25): SEQ ID NO: 6455; WAN024CG4_at; Start 52; Stop 76
caaaacgaagagaagataatcgagt

SEQ ID NO: 117131 - DNA, 25 bp, Artificial
  probe
  misc_feature (1)..(25): SEQ ID NO: 6455; WAN024CG4_at; Start 124; Stop 148
cgcgatttgttgaggaaaaagaata

SEQ ID NO: 117132 - DNA, 25 bp, Artificial
  probe
  misc_feature (1)..(25): SEQ ID NO: 6455; WAN024CG4_at; Start 38; Stop 62
aacgcacgatcgagcaaaacgaaga

SEQ ID NO: 117133 - DNA, 25 bp, Artificial
  probe
  misc_feature (1)..(25): SEQ ID NO: 6455; WAN024CG4_at; Start 44; Stop 68
cgatcgagcaaaacgaagagaagat

SEQ ID NO: 117134 - DNA, 25 bp, Artificial
  probe
  misc_feature (1)..(25): SEQ ID NO: 6455; WAN024CG4_at; Start 41; Stop 65
gcacgatcgagcaaaacgaagagaa

SEQ ID NO: 117135 - DNA, 25 bp, Artificial
  probe
  misc_feature (1)..(25): SEQ ID NO: 6455; WAN024CG4_at; Start 22; Stop 46
gagattgacggactgaaacgcacga

SEQ ID NO: 117136 - DNA, 25 bp, Artificial
  probe
  misc_feature (1)..(25): SEQ ID NO: 6455; WAN024CG4_at; Start 93; Stop 117
tgcacgcaagagacggattagagcg

SEQ ID NO: 117137 - DNA, 25 bp, Artificial
  probe
  misc_feature (1)..(25): SEQ ID NO: 6455; WAN024CG4_at; Start 32; Stop 56
gactgaaacgcacgatcgagcaaaa

SEQ ID NO: 117138 - DNA, 25 bp, Artificial
  probe
  misc_feature (1)..(25): SEQ ID NO: 6455; WAN024CG4_at; Start 10; Stop 34
gataaacaggctgagattgacggac

SEQ ID NO: 117139 - DNA, 25 bp, Artificial
  probe
  misc_feature (1)..(25): SEQ ID NO: 6455; WAN024CG4_at; Start 91; Stop 115
gatgcacgcaagagacggattagag

SEQ ID NO: 117140 - DNA, 25 bp, Artificial
  probe
  misc_feature (1)..(25): SEQ ID NO: 5125; WAN024CG5_at; Start 156; Stop 180
tatgacgtttatgggagcgatggaa

SEQ ID NO: 117141 - DNA, 25 bp, Artificial
  probe
  misc_feature (1)..(25): SEQ ID NO: 5125; WAN024CG5_at; Start 181; Stop 205
tgcatcttcgctgatgaaaagccta

SEQ ID NO: 117142 - DNA, 25 bp, Artificial
  probe
  misc_feature (1)..(25): SEQ ID NO: 5125; WAN024CG5_at; Start 46; Stop 70
gaagtatacaactggacggtagaag

SEQ ID NO: 117143 - DNA, 25 bp, Artificial
  probe
  misc_feature (1)..(25): SEQ ID NO: 5125; WAN024CG5_at; Start 45; Stop 69
tgaagtatacaactggacggtagaa

SEQ ID NO: 117144 - DNA, 25 bp, Artificial
  probe
  misc_feature (1)..(25): SEQ ID NO: 5125; WAN024CG5_at; Start 144; Stop 168
ggcagaagatggtatgacgtttatg

SEQ ID NO: 117145 - DNA, 25 bp, Artificial
  probe
  misc_feature (1)..(25): SEQ ID NO: 5125; WAN024CG5_at; Start 84; Stop 108
acctcccaagcaagatttaccacaa

SEQ ID NO: 117146 - DNA, 25 bp, Artificial
  probe
  misc_feature (1)..(25): SEQ ID NO: 5125; WAN024CG5_at; Start 177; Stop 201
ggaatgcatcttcgctgatgaaaag

SEQ ID NO: 117147 - DNA, 25 bp, Artificial
  probe
  misc_feature (1)..(25): SEQ ID NO: 5125; WAN024CG5_at; Start 43; Stop 67
aatgaagtatacaactggacggtag

SEQ ID NO: 117148 - DNA, 25 bp, Artificial
  probe
  misc_feature (1)..(25): SEQ ID NO: 5125; WAN024CG5_at; Start 240; Stop 264
gccaaaatctaaggagtttgatgat

SEQ ID NO: 117149 - DNA, 25 bp, Artificial
  probe
  misc_feature (1)..(25): SEQ ID NO: 5125; WAN024CG5_at; Start 170; Stop 194
gagcgatggaatgcatcttcgctga

SEQ ID NO: 117150 - DNA, 25 bp, Artificial
  probe
  misc_feature (1)..(25): SEQ ID NO: 5125; WAN024CG5_at; Start 174; Stop 198
gatggaatgcatcttcgctgatgaa

SEQ ID NO: 117151 - DNA, 25 bp, Artificial
  probe
  misc_feature (1)..(25): SEQ ID NO: 5125; WAN024CG5_at; Start 167; Stop 191
tgggagcgatggaatgcatcttcgc

SEQ ID NO: 117152 - DNA, 25 bp, Artificial
  probe
  misc_feature (1)..(25): SEQ ID NO: 5125; WAN024CG5_at; Start 162; Stop 186
gtttatgggagcgatggaatgcatc

SEQ ID NO: 117153 - DNA, 25 bp, Artificial
  probe
  misc_feature (1)..(25): SEQ ID NO: 5125; WAN024CG5_at; Start 296; Stop 320
tagttattgcagtttatttgattta

SEQ ID NO: 117154 - DNA, 25 bp, Artificial
  probe
  misc_feature (1)..(25): SEQ ID NO: 5125; WAN024CG5_at; Start 50; Stop 74
tatacaactggacggtagaagacgg

SEQ ID NO: 117155 - DNA, 25 bp, Artificial
  probe
  misc_feature (1)..(25): SEQ ID NO: 5125; WAN024CG5_at; Start 160; Stop 184
acgtttatgggagcgatggaatgca

SEQ ID NO: 117156 - DNA, 25 bp, Artificial
  probe
  misc_feature (1)..(25): SEQ ID NO: 5125; WAN024CG5_at; Start 48; Stop 72
agtatacaactggacggtagaagac

SEQ ID NO: 117157 - DNA, 25 bp, Artificial
  probe
  misc_feature (1)..(25): SEQ ID NO: 5125; WAN024CG5_at; Start 179; Stop 203
aatgcatcttcgctgatgaaaagcc

SEQ ID NO: 117158 - DNA, 25 bp, Artificial
  probe
  misc_feature (1)..(25): SEQ ID NO: 5125; WAN024CG5_at; Start 182; Stop 206
gcatcttcgctgatgaaaagcctac

SEQ ID NO: 117159 - DNA, 25 bp, Artificial
  probe
  misc_feature (1)..(25): SEQ ID NO: 5125; WAN024CG5_at; Start 146; Stop 170
cagaagatggtatgacgtttatggg

SEQ ID NO: 117160 - DNA, 25 bp, Artificial
  probe
  misc_feature (1)..(25): SEQ ID NO: 5125; WAN024CG5_at; Start 76; Stop 100
aagccgcaacctcccaagcaagatt

SEQ ID NO: 117161 - DNA, 25 bp, Artificial
  probe
  misc_feature (1)..(25): SEQ ID NO: 5125; WAN024CG5_at; Start 208; Stop 232
gactatgatttgggagctactaagg

SEQ ID NO: 117162 - DNA, 25 bp, Artificial
  probe
  misc_feature (1)..(25): SEQ ID NO: 5125; WAN024CG5_at; Start 176; Stop 200
tggaatgcatcttcgctgatgaaaa

SEQ ID NO: 117163 - DNA, 25 bp, Artificial
  probe
  misc_feature (1)..(25): SEQ ID NO: 5125; WAN024CG5_at; Start 40; Stop 64
gttaatgaagtatacaactggacgg

SEQ ID NO: 117164 - DNA, 25 bp, Artificial
  probe
  misc_feature (1)..(25): SEQ ID NO: 5125; WAN024CG5_at; Start 33; Stop 57
gcaaaaagttaatgaagtatacaac

SEQ ID NO: 117165 - DNA, 25 bp, Artificial
  probe
  misc_feature (1)..(25): SEQ ID NO: 5125; WAN024CG5_at; Start 235; Stop 259
tggttgccaaaatctaaggagtttg

SEQ ID NO: 117166 - DNA, 25 bp, Artificial
  probe
  misc_feature (1)..(25): SEQ ID NO: 5125; WAN024CG5_at; Start 142; Stop 166
atggcagaagatggtatgacgttta

SEQ ID NO: 117167 - DNA, 25 bp, Artificial
  probe
  misc_feature (1)..(25): SEQ ID NO: 5125; WAN024CG5_at; Start 42; Stop 66
taatgaagtatacaactggacggta

SEQ ID NO: 117168 - DNA, 25 bp, Artificial
  probe
  misc_feature (1)..(25): SEQ ID NO: 5125; WAN024CG5_at; Start 243; Stop 267
aaaatctaaggagtttgatgattgg

SEQ ID NO: 117169 - DNA, 25 bp, Artificial
  probe
  misc_feature (1)..(25): SEQ ID NO: 5125; WAN024CG5_at; Start 152; Stop 176
atggtatgacgtttatgggagcgat

SEQ ID NO: 117170 - DNA, 25 bp, Artificial
  probe
  misc_feature (1)..(25): SEQ ID NO: 5125; WAN024CG5_at; Start 165; Stop 189
tatgggagcgatggaatgcatcttc

SEQ ID NO: 117171 - DNA, 25 bp, Artificial
  probe
  misc_feature (1)..(25): SEQ ID NO: 5125; WAN024CG5_at; Start 236; Stop 260
ggttgccaaaatctaaggagtttga

SEQ ID NO: 117172 - DNA, 25 bp, Artificial
  probe
  misc_feature (1)..(25): SEQ ID NO: 5125; WAN024CG5_at; Start 172; Stop 196
gcgatggaatgcatcttcgctgatg

SEQ ID NO: 117173 - DNA, 25 bp, Artificial
  probe
  misc_feature (1)..(25): SEQ ID NO: 5125; WAN024CG5_at; Start 78; Stop 102
gccgcaacctcccaagcaagattta

SEQ ID NO: 117174 - DNA, 25 bp, Artificial
  probe
  misc_feature (1)..(25): SEQ ID NO: 5658; WAN024CG6_at; Start 33; Stop 57
gcaccaagtcataggcttgctcacg

SEQ ID NO: 117175 - DNA, 25 bp, Artificial
  probe
  misc_feature (1)..(25): SEQ ID NO: 5658; WAN024CG6_at; Start 76; Stop 100
caatgtcaacatagcccgttggcta

SEQ ID NO: 117176 - DNA, 25 bp, Artificial
  probe
  misc_feature (1)..(25): SEQ ID NO: 5658; WAN024CG6_at; Start 108; Stop 132
gaccaaaagtcgagttcatgtttcg

SEQ ID NO: 117177 - DNA, 25 bp, Artificial
  probe
  misc_feature (1)..(25): SEQ ID NO: 5658; WAN024CG6_at; Start 103; Stop 127
gataagaccaaaagtcgagttcatg

SEQ ID NO: 117178 - DNA, 25 bp, Artificial
  probe
  misc_feature (1)..(25): SEQ ID NO: 5658; WAN024CG6_at; Start 19; Stop 43
ggctgtttttggttgcaccaagtca

SEQ ID NO: 117179 - DNA, 25 bp, Artificial
  probe
  misc_feature (1)..(25): SEQ ID NO: 5658; WAN024CG6_at; Start 194; Stop 218
tagtcaatcaaaatggtcgtatctg

SEQ ID NO: 117180 - DNA, 25 bp, Artificial
  probe
  misc_feature (1)..(25): SEQ ID NO: 5658; WAN024CG6_at; Start 42; Stop 66
cataggcttgctcacgggtcatgcc

SEQ ID NO: 117181 - DNA, 25 bp, Artificial
  probe
  misc_feature (1)..(25): SEQ ID NO: 5658; WAN024CG6_at; Start 73; Stop 97
aatcaatgtcaacatagcccgttgg

SEQ ID NO: 117182 - DNA, 25 bp, Artificial
  probe
  misc_feature (1)..(25): SEQ ID NO: 5658; WAN024CG6_at; Start 124; Stop 148
catgtttcggatcatattttctggg

SEQ ID NO: 117183 - DNA, 25 bp, Artificial
  probe
  misc_feature (1)..(25): SEQ ID NO: 5658; WAN024CG6_at; Start 144; Stop 168
ctgggaagactgtcaagttcttgac

SEQ ID NO: 117184 - DNA, 25 bp, Artificial
  probe
  misc_feature (1)..(25): SEQ ID NO: 5658; WAN024CG6_at; Start 190; Stop 214
catgtagtcaatcaaaatggtcgta

SEQ ID NO: 117185 - DNA, 25 bp, Artificial
  probe
  misc_feature (1)..(25): SEQ ID NO: 5658; WAN024CG6_at; Start 169; Stop 193
gatatttccaaaacggttgagcatg

SEQ ID NO: 117186 - DNA, 25 bp, Artificial
  probe
  misc_feature (1)..(25): SEQ ID NO: 5658; WAN024CG6_at; Start 69; Stop 93
tttcaatcaatgtcaacatagcccg

SEQ ID NO: 117187 - DNA, 25 bp, Artificial
  probe
  misc_feature (1)..(25): SEQ ID NO: 5658; WAN024CG6_at; Start 95; Stop 119
tggctaaagataagaccaaaagtcg

SEQ ID NO: 117188 - DNA, 25 bp, Artificial
  probe
  misc_feature (1)..(25): SEQ ID NO: 5658; WAN024CG6_at; Start 28; Stop 52
tggttgcaccaagtcataggcttgc

SEQ ID NO: 117189 - DNA, 25 bp, Artificial
  probe
  misc_feature (1)..(25): SEQ ID NO: 5658; WAN024CG6_at; Start 213; Stop 237
tatctggtgtgatgatacgctcagc

SEQ ID NO: 117190 - DNA, 25 bp, Artificial
  probe
  misc_feature (1)..(25): SEQ ID NO: 5658; WAN024CG6_at; Start 156; Stop 180
tcaagttcttgacgatatttccaaa

SEQ ID NO: 117191 - DNA, 25 bp, Artificial
  probe
  misc_feature (1)..(25): SEQ ID NO: 5658; WAN024CG6_at; Start 202; Stop 226
caaaatggtcgtatctggtgtgatg

SEQ ID NO: 117192 - DNA, 25 bp, Artificial
  probe
  misc_feature (1)..(25): SEQ ID NO: 5658; WAN024CG6_at; Start 175; Stop 199
tccaaaacggttgagcatgtagtca

SEQ ID NO: 117193 - DNA, 25 bp, Artificial
  probe
  misc_feature (1)..(25): SEQ ID NO: 5658; WAN024CG6_at; Start 198; Stop 222
caatcaaaatggtcgtatctggtgt

SEQ ID NO: 117194 - DNA, 25 bp, Artificial
  probe
  misc_feature (1)..(25): SEQ ID NO: 5658; WAN024CG6_at; Start 57; Stop 81
gggtcatgcctttttcaatcaatgt

SEQ ID NO: 117195 - DNA, 25 bp, Artificial
  probe
  misc_feature (1)..(25): SEQ ID NO: 5658; WAN024CG6_at; Start 180; Stop 204
aacggttgagcatgtagtcaatcaa

SEQ ID NO: 117196 - DNA, 25 bp, Artificial
  probe
  misc_feature (1)..(25): SEQ ID NO: 5658; WAN024CG6_at; Start 2; Stop 26
tggttgtcccaagagtaggctgttt

SEQ ID NO: 117197 - DNA, 25 bp, Artificial
  probe
  misc_feature (1)..(25): SEQ ID NO: 5658; WAN024CG6_at; Start 81; Stop 105
tcaacatagcccgttggctaaagat

SEQ ID NO: 117198 - DNA, 25 bp, Artificial
  probe
  misc_feature (1)..(25): SEQ ID NO: 5658; WAN024CG6_at; Start 166; Stop 190
gacgatatttccaaaacggttgagc

SEQ ID NO: 117199 - DNA, 25 bp, Artificial
  probe
  misc_feature (1)..(25): SEQ ID NO: 5658; WAN024CG6_at; Start 50; Stop 74
tgctcacgggtcatgcctttttcaa

SEQ ID NO: 117200 - DNA, 25 bp, Artificial
  probe
  misc_feature (1)..(25): SEQ ID NO: 5658; WAN024CG6_at; Start 89; Stop 113
gcccgttggctaaagataagaccaa

SEQ ID NO: 117201 - DNA, 25 bp, Artificial
  probe
  misc_feature (1)..(25): SEQ ID NO: 5658; WAN024CG6_at; Start 14; Stop 38
gagtaggctgtttttggttgcacca

SEQ ID NO: 117202 - DNA, 25 bp, Artificial
  probe
  misc_feature (1)..(25): SEQ ID NO: 5658; WAN024CG6_at; Start 113; Stop 137
aaagtcgagttcatgtttcggatca

SEQ ID NO: 117203 - DNA, 25 bp, Artificial
  probe
  misc_feature (1)..(25): SEQ ID NO: 5658; WAN024CG6_at; Start 216; Stop 240
ctggtgtgatgatacgctcagctga

SEQ ID NO: 117204 - DNA, 25 bp, Artificial
  probe
  misc_feature (1)..(25): SEQ ID NO: 5658; WAN024CG6_at; Start 54; Stop 78
cacgggtcatgcctttttcaatcaa

SEQ ID NO: 117205 - DNA, 25 bp, Artificial
  probe
  misc_feature (1)..(25): SEQ ID NO: 5658; WAN024CG6_at; Start 138; Stop 162
tattttctgggaagactgtcaagtt

SEQ ID NO: 117206 - DNA, 25 bp, Artificial
  probe
  misc_feature (1)..(25): SEQ ID NO: 5658; WAN024CG6_at; Start 87; Stop 111
tagcccgttggctaaagataagacc

SEQ ID NO: 117207 - DNA, 25 bp, Artificial
  probe
  misc_feature (1)..(25): SEQ ID NO: 5658; WAN024CG6_at; Start 38; Stop 62
aagtcataggcttgctcacgggtca

SEQ ID NO: 117208 - DNA, 25 bp, Artificial
  probe
  misc_feature (1)..(25): SEQ ID NO: 3895; WAN024CG7_at; Start 311; Stop 335
tcacgacggatgatgtcgttggcct

SEQ ID NO: 117209 - DNA, 25 bp, Artificial
  probe
  misc_feature (1)..(25): SEQ ID NO: 3895; WAN024CG7_at; Start 235; Stop 259
atgagtacgccccatcatgatggtg

SEQ ID NO: 117210 - DNA, 25 bp, Artificial
  probe
  misc_feature (1)..(25): SEQ ID NO: 3895; WAN024CG7_at; Start 260; Stop 284
aacttgtgctccttggccttgtcag

SEQ ID NO: 117211 - DNA, 25 bp, Artificial
  probe
  misc_feature (1)..(25): SEQ ID NO: 3895; WAN024CG7_at; Start 141; Stop 165
cagccgcatgctcgaaacgctcgat

SEQ ID NO: 117212 - DNA, 25 bp, Artificial
  probe
  misc_feature (1)..(25): SEQ ID NO: 3895; WAN024CG7_at; Start 27; Stop 51
tagagatttcttgagcacggatacc

SEQ ID NO: 117213 - DNA, 25 bp, Artificial
  probe
  misc_feature (1)..(25): SEQ ID NO: 3895; WAN024CG7_at; Start 159; Stop 183
gctcgatattgcgtttcatttcgct

SEQ ID NO: 117214 - DNA, 25 bp, Artificial
  probe
  misc_feature (1)..(25): SEQ ID NO: 3895; WAN024CG7_at; Start 303; Stop 327
tttcaaggtcacgacggatgatgtc

SEQ ID NO: 117215 - DNA, 25 bp, Artificial
  probe
  misc_feature (1)..(25): SEQ ID NO: 3895; WAN024CG7_at; Start 271; Stop 295
cttggccttgtcagcgatgatatta

SEQ ID NO: 117216 - DNA, 25 bp, Artificial
  probe
  misc_feature (1)..(25): SEQ ID NO: 3895; WAN024CG7_at; Start 64; Stop 88
gacatactcctctacaaatggtggg

SEQ ID NO: 117217 - DNA, 25 bp, Artificial
  probe
  misc_feature (1)..(25): SEQ ID NO: 3895; WAN024CG7_at; Start 360; Stop 384
tatccaccacgtcggtagaagttaa

SEQ ID NO: 117218 - DNA, 25 bp, Artificial
  probe
  misc_feature (1)..(25): SEQ ID NO: 3895; WAN024CG7_at; Start 282; Stop 306
cagcgatgatattagtgaagttttc

SEQ ID NO: 117219 - DNA, 25 bp, Artificial
  probe
  misc_feature (1)..(25): SEQ ID NO: 3895; WAN024CG7_at; Start 351; Stop 375
cataagcagtatccaccacgtcggt

SEQ ID NO: 117220 - DNA, 25 bp, Artificial
  probe
  misc_feature (1)..(25): SEQ ID NO: 3895; WAN024CG7_at; Start 74; Stop 98
tctacaaatggtgggatattggcaa

SEQ ID NO: 117221 - DNA, 25 bp, Artificial
  probe
  misc_feature (1)..(25): SEQ ID NO: 3895; WAN024CG7_at; Start 201; Stop 225
taagaccaaaagttgtcggctcagc

SEQ ID NO: 117222 - DNA, 25 bp, Artificial
  probe
  misc_feature (1)..(25): SEQ ID NO: 3895; WAN024CG7_at; Start 100; Stop 124
gttcccaaccgcaccagaaatctta

SEQ ID NO: 117223 - DNA, 25 bp, Artificial
  probe
  misc_feature (1)..(25): SEQ ID NO: 3895; WAN024CG7_at; Start 247; Stop 271
catcatgatggtgaacttgtgctcc

SEQ ID NO: 117224 - DNA, 25 bp, Artificial
  probe
  misc_feature (1)..(25): SEQ ID NO: 3895; WAN024CG7_at; Start 12; Stop 36
gaggaaggacttgtgtagagatttc

SEQ ID NO: 117225 - DNA, 25 bp, Artificial
  probe
  misc_feature (1)..(25): SEQ ID NO: 3895; WAN024CG7_at; Start 51; Stop 75
caagcttgttgcagacatactcctc

SEQ ID NO: 117226 - DNA, 25 bp, Artificial
  probe
  misc_feature (1)..(25): SEQ ID NO: 3895; WAN024CG7_at; Start 319; Stop 343
gatgatgtcgttggcctgcttgtag

SEQ ID NO: 117227 - DNA, 25 bp, Artificial
  probe
  misc_feature (1)..(25): SEQ ID NO: 3895; WAN024CG7_at; Start 4; Stop 28
aaggtcacgaggaaggacttgtgta

SEQ ID NO: 117228 - DNA, 25 bp, Artificial
  probe
  misc_feature (1)..(25): SEQ ID NO: 3895; WAN024CG7_at; Start 253; Stop 277
gatggtgaacttgtgctccttggcc

SEQ ID NO: 117229 - DNA, 25 bp, Artificial
  probe
  misc_feature (1)..(25): SEQ ID NO: 3895; WAN024CG7_at; Start 208; Stop 232
aaaagttgtcggctcagcgtgcaca

SEQ ID NO: 117230 - DNA, 25 bp, Artificial
  probe
  misc_feature (1)..(25): SEQ ID NO: 3895; WAN024CG7_at; Start 88; Stop 112
gatattggcaaagttcccaaccgca

SEQ ID NO: 117231 - DNA, 25 bp, Artificial
  probe
  misc_feature (1)..(25): SEQ ID NO: 3895; WAN024CG7_at; Start 149; Stop 173
tgctcgaaacgctcgatattgcgtt

SEQ ID NO: 117232 - DNA, 25 bp, Artificial
  probe
  misc_feature (1)..(25): SEQ ID NO: 3895; WAN024CG7_at; Start 332; Stop 356
gcctgcttgtagaggtaaccataag

SEQ ID NO: 117233 - DNA, 25 bp, Artificial
  probe
  misc_feature (1)..(25): SEQ ID NO: 3895; WAN024CG7_at; Start 188; Stop 212
caagttgccaatttaagaccaaaag

SEQ ID NO: 117234 - DNA, 25 bp, Artificial
  probe
  misc_feature (1)..(25): SEQ ID NO: 3895; WAN024CG7_at; Start 38; Stop 62
tgagcacggataccaagcttgttgc

SEQ ID NO: 117235 - DNA, 25 bp, Artificial
  probe
  misc_feature (1)..(25): SEQ ID NO: 3895; WAN024CG7_at; Start 116; Stop 140
gaaatcttaccagcttctacaccag

SEQ ID NO: 117236 - DNA, 25 bp, Artificial
  probe
  misc_feature (1)..(25): SEQ ID NO: 3895; WAN024CG7_at; Start 297; Stop 321
tgaagttttcaaggtcacgacggat

SEQ ID NO: 117237 - DNA, 25 bp, Artificial
  probe
  misc_feature (1)..(25): SEQ ID NO: 3895; WAN024CG7_at; Start 221; Stop 245
tcagcgtgcacaccatgagtacgcc

SEQ ID NO: 117238 - DNA, 25 bp, Artificial
  probe
  misc_feature (1)..(25): SEQ ID NO: 3895; WAN024CG7_at; Start 216; Stop 240
tcggctcagcgtgcacaccatgagt

SEQ ID NO: 117239 - DNA, 25 bp, Artificial
  probe
  misc_feature (1)..(25): SEQ ID NO: 3895; WAN024CG7_at; Start 42; Stop 66
cacggataccaagcttgttgcagac

SEQ ID NO: 117240 - DNA, 25 bp, Artificial
  probe
  misc_feature (1)..(25): SEQ ID NO: 3895; WAN024CG7_at; Start 174; Stop 198
tcatttcgctataccaagttgccaa

SEQ ID NO: 117241 - DNA, 25 bp, Artificial
  probe
  misc_feature (1)..(25): SEQ ID NO: 3895; WAN024CG7_at; Start 341; Stop 365
tagaggtaaccataagcagtatcca

SEQ ID NO: 117242 - DNA, 25 bp, Artificial
  probe
  misc_feature (1)..(25): SEQ ID NO: 3877; WAN024CG8_at; Start 131; Stop 155
gccacatcttccttagggatttccc

SEQ ID NO: 117243 - DNA, 25 bp, Artificial
  probe
  misc_feature (1)..(25): SEQ ID NO: 3877; WAN024CG8_at; Start 123; Stop 147
gaatcaaagccacatcttccttagg

SEQ ID NO: 117244 - DNA, 25 bp, Artificial
  probe
  misc_feature (1)..(25): SEQ ID NO: 3877; WAN024CG8_at; Start 48; Stop 72
tgaaagccaccacatcgtggcgcgt

SEQ ID NO: 117245 - DNA, 25 bp, Artificial
  probe
  misc_feature (1)..(25): SEQ ID NO: 3877; WAN024CG8_at; Start 88; Stop 112
caaaatacggtcgatgtcaaagtcc

SEQ ID NO: 117246 - DNA, 25 bp, Artificial
  probe
  misc_feature (1)..(25): SEQ ID NO: 3877; WAN024CG8_at; Start 67; Stop 91
gcgcgtctcctgctcaatttccaaa

SEQ ID NO: 117247 - DNA, 25 bp, Artificial
  probe
  misc_feature (1)..(25): SEQ ID NO: 3877; WAN024CG8_at; Start 238; Stop 262
catctcagggcgagagtaacggttg

SEQ ID NO: 117248 - DNA, 25 bp, Artificial
  probe
  misc_feature (1)..(25): SEQ ID NO: 3877; WAN024CG8_at; Start 81; Stop 105
caatttccaaaatacggtcgatgtc

SEQ ID NO: 117249 - DNA, 25 bp, Artificial
  probe
  misc_feature (1)..(25): SEQ ID NO: 3877; WAN024CG8_at; Start 117; Stop 141
tcttgcgaatcaaagccacatcttc

SEQ ID NO: 117250 - DNA, 25 bp, Artificial
  probe
  misc_feature (1)..(25): SEQ ID NO: 3877; WAN024CG8_at; Start 32; Stop 56
tcagaaaccgcacgcgtgaaagcca

SEQ ID NO: 117251 - DNA, 25 bp, Artificial
  probe
  misc_feature (1)..(25): SEQ ID NO: 3877; WAN024CG8_at; Start 107; Stop 131
aagtccgccttcttgcgaatcaaag

SEQ ID NO: 117252 - DNA, 25 bp, Artificial
  probe
  misc_feature (1)..(25): SEQ ID NO: 3877; WAN024CG8_at; Start 26; Stop 50
agagtctcagaaaccgcacgcgtga

SEQ ID NO: 117253 - DNA, 25 bp, Artificial
  probe
  misc_feature (1)..(25): SEQ ID NO: 3877; WAN024CG8_at; Start 127; Stop 151
caaagccacatcttccttagggatt

SEQ ID NO: 117254 - DNA, 25 bp, Artificial
  probe
  misc_feature (1)..(25): SEQ ID NO: 3877; WAN024CG8_at; Start 257; Stop 281
cggttgatcatgtgttaatttttcc

SEQ ID NO: 117255 - DNA, 25 bp, Artificial
  probe
  misc_feature (1)..(25): SEQ ID NO: 3877; WAN024CG8_at; Start 8; Stop 32
cacttgcgctcttcaccaagagtct

SEQ ID NO: 117256 - DNA, 25 bp, Artificial
  probe
  misc_feature (1)..(25): SEQ ID NO: 3877; WAN024CG8_at; Start 17; Stop 41
tcttcaccaagagtctcagaaaccg

SEQ ID NO: 117257 - DNA, 25 bp, Artificial
  probe
  misc_feature (1)..(25): SEQ ID NO: 3877; WAN024CG8_at; Start 99; Stop 123
cgatgtcaaagtccgccttcttgcg

SEQ ID NO: 117258 - DNA, 25 bp, Artificial
  probe
  misc_feature (1)..(25): SEQ ID NO: 3877; WAN024CG8_at; Start 93; Stop 117
tacggtcgatgtcaaagtccgcctt

SEQ ID NO: 117259 - DNA, 25 bp, Artificial
  probe
  misc_feature (1)..(25): SEQ ID NO: 3877; WAN024CG8_at; Start 170; Stop 194
gcctcgtcagagaggatttccacct

SEQ ID NO: 117260 - DNA, 25 bp, Artificial
  probe
  misc_feature (1)..(25): SEQ ID NO: 3877; WAN024CG8_at; Start 279; Stop 303
tcctttcttcttaagctgttgggaa

SEQ ID NO: 117261 - DNA, 25 bp, Artificial
  probe
  misc_feature (1)..(25): SEQ ID NO: 3877; WAN024CG8_at; Start 248; Stop 272
cgagagtaacggttgatcatgtgtt

SEQ ID NO: 117262 - DNA, 25 bp, Artificial
  probe
  misc_feature (1)..(25): SEQ ID NO: 3877; WAN024CG8_at; Start 43; Stop 67
acgcgtgaaagccaccacatcgtgg

SEQ ID NO: 117263 - DNA, 25 bp, Artificial
  probe
  misc_feature (1)..(25): SEQ ID NO: 3877; WAN024CG8_at; Start 218; Stop 242
tcttcactccaaatattcgccatct

SEQ ID NO: 117264 - DNA, 25 bp, Artificial
  probe
  misc_feature (1)..(25): SEQ ID NO: 3877; WAN024CG8_at; Start 161; Stop 185
tcagcccatgcctcgtcagagagga

SEQ ID NO: 117265 - DNA, 25 bp, Artificial
  probe
  misc_feature (1)..(25): SEQ ID NO: 3877; WAN024CG8_at; Start 179; Stop 203
gagaggatttccacctcaagccaag

SEQ ID NO: 117266 - DNA, 25 bp, Artificial
  probe
  misc_feature (1)..(25): SEQ ID NO: 3877; WAN024CG8_at; Start 62; Stop 86
tcgtggcgcgtctcctgctcaattt

SEQ ID NO: 117267 - DNA, 25 bp, Artificial
  probe
  misc_feature (1)..(25): SEQ ID NO: 3877; WAN024CG8_at; Start 242; Stop 266
tcagggcgagagtaacggttgatca

SEQ ID NO: 117268 - DNA, 25 bp, Artificial
  probe
  misc_feature (1)..(25): SEQ ID NO: 3877; WAN024CG8_at; Start 185; Stop 209
atttccacctcaagccaagcacggt

SEQ ID NO: 117269 - DNA, 25 bp, Artificial
  probe
  misc_feature (1)..(25): SEQ ID NO: 3877; WAN024CG8_at; Start 227; Stop 251
caaatattcgccatctcagggcgag

SEQ ID NO: 117270 - DNA, 25 bp, Artificial
  probe
  misc_feature (1)..(25): SEQ ID NO: 3877; WAN024CG8_at; Start 204; Stop 228
cacggtatttattttcttcactcca

SEQ ID NO: 117271 - DNA, 25 bp, Artificial
  probe
  misc_feature (1)..(25): SEQ ID NO: 3877; WAN024CG8_at; Start 223; Stop 247
actccaaatattcgccatctcaggg

SEQ ID NO: 117272 - DNA, 25 bp, Artificial
  probe
  misc_feature (1)..(25): SEQ ID NO: 3877; WAN024CG8_at; Start 113; Stop 137
gccttcttgcgaatcaaagccacat

SEQ ID NO: 117273 - DNA, 25 bp, Artificial
  probe
  misc_feature (1)..(25): SEQ ID NO: 3877; WAN024CG8_at; Start 21; Stop 45
caccaagagtctcagaaaccgcacg

SEQ ID NO: 117274 - DNA, 25 bp, Artificial
  probe
  misc_feature (1)..(25): SEQ ID NO: 3877; WAN024CG8_at; Start 190; Stop 214
cacctcaagccaagcacggtattta

SEQ ID NO: 117275 - DNA, 25 bp, Artificial
  probe
  misc_feature (1)..(25): SEQ ID NO: 3877; WAN024CG8_at; Start 194; Stop 218
tcaagccaagcacggtatttatttt

SEQ ID NO: 117276 - DNA, 25 bp, Artificial
  probe
  misc_feature (1)..(25): SEQ ID NO: 1717; WAN024CG9_at; Start 417; Stop 441
tactcatggtgtgcacgctgagccg

SEQ ID NO: 117277 - DNA, 25 bp, Artificial
  probe
  misc_feature (1)..(25): SEQ ID NO: 1717; WAN024CG9_at; Start 1133; Stop 1157
aaacagcctactcttgggacaacca

SEQ ID NO: 117278 - DNA, 25 bp, Artificial
  probe
  misc_feature (1)..(25): SEQ ID NO: 1717; WAN024CG9_at; Start 304; Stop 328
tatggttacctctacaagcaggcca

SEQ ID NO: 117279 - DNA, 25 bp, Artificial
  probe
  misc_feature (1)..(25): SEQ ID NO: 1717; WAN024CG9_at; Start 1079; Stop 1103
cattgattgaaaaaggcatgacccg

SEQ ID NO: 117280 - DNA, 25 bp, Artificial
  probe
  misc_feature (1)..(25): SEQ ID NO: 1717; WAN024CG9_at; Start 363; Stop 387
taatatcatcgctgacaaggccaag

SEQ ID NO: 117281 - DNA, 25 bp, Artificial
  probe
  misc_feature (1)..(25): SEQ ID NO: 1717; WAN024CG9_at; Start 379; Stop 403
aaggccaaggagcacaagttcacca

SEQ ID NO: 117282 - DNA, 25 bp, Artificial
  probe
  misc_feature (1)..(25): SEQ ID NO: 1717; WAN024CG9_at; Start 1108; Stop 1132
caagcctatgacttggtgcaaccaa

SEQ ID NO: 117283 - DNA, 25 bp, Artificial
  probe
  misc_feature (1)..(25): SEQ ID NO: 1717; WAN024CG9_at; Start 3; Stop 27
gatcaaccgttactctcgccctgag

SEQ ID NO: 117284 - DNA, 25 bp, Artificial
  probe
  misc_feature (1)..(25): SEQ ID NO: 1717; WAN024CG9_at; Start 147; Stop 171
caagaaggcggactttgacatcgac

SEQ ID NO: 117285 - DNA, 25 bp, Artificial
  probe
  misc_feature (1)..(25): SEQ ID NO: 1717; WAN024CG9_at; Start 690; Stop 714
gacttcaatcgaacgtatggcgact

SEQ ID NO: 117286 - DNA, 25 bp, Artificial
  probe
  misc_feature (1)..(25): SEQ ID NO: 1717; WAN024CG9_at; Start 218; Stop 242
tcacgcgtgcggtttctgagactct

SEQ ID NO: 117287 - DNA, 25 bp, Artificial
  probe
  misc_feature (1)..(25): SEQ ID NO: 1717; WAN024CG9_at; Start 117; Stop 141
aatccctaaggaagatgtggctttg

SEQ ID NO: 117288 - DNA, 25 bp, Artificial
  probe
  misc_feature (1)..(25): SEQ ID NO: 1717; WAN024CG9_at; Start 79; Stop 103
gaaatcctctctgacgaggcatggg

SEQ ID NO: 117289 - DNA, 25 bp, Artificial
  probe
  misc_feature (1)..(25): SEQ ID NO: 1717; WAN024CG9_at; Start 849; Stop 873
cattcgtggtcacatgattacggct

SEQ ID NO: 117290 - DNA, 25 bp, Artificial
  probe
  misc_feature (1)..(25): SEQ ID NO: 1717; WAN024CG9_at; Start 1186; Stop 1210
gattcagaagtaacatcacgtctca

SEQ ID NO: 117291 - DNA, 25 bp, Artificial
  probe
  misc_feature (1)..(25): SEQ ID NO: 1717; WAN024CG9_at; Start 726; Stop 750
tctacaaaaatctgagcaacgcgaa

SEQ ID NO: 117292 - DNA, 25 bp, Artificial
  probe
  misc_feature (1)..(25): SEQ ID NO: 1717; WAN024CG9_at; Start 541; Stop 565
tctggtgcggttgggaactttgcca

SEQ ID NO: 117293 - DNA, 25 bp, Artificial
  probe
  misc_feature (1)..(25): SEQ ID NO: 1717; WAN024CG9_at; Start 765; Stop 789
tgctaaagggcaaaaagggtcttca

SEQ ID NO: 117294 - DNA, 25 bp, Artificial
  probe
  misc_feature (1)..(25): SEQ ID NO: 1717; WAN024CG9_at; Start 870; Stop 894
ggcttatgaaaacgtcgctctctgg

SEQ ID NO: 117295 - DNA, 25 bp, Artificial
  probe
  misc_feature (1)..(25): SEQ ID NO: 1717; WAN024CG9_at; Start 1094; Stop 1118
gcatgacccgtgagcaagcctatga

SEQ ID NO: 117296 - DNA, 25 bp, Artificial
  probe
  misc_feature (1)..(25): SEQ ID NO: 1717; WAN024CG9_at; Start 919; Stop 943
tcagctgagcgtatcatcacaccag

SEQ ID NO: 117297 - DNA, 25 bp, Artificial
  probe
  misc_feature (1)..(25): SEQ ID NO: 1717; WAN024CG9_at; Start 1020; Stop 1044
tatgatccgaaacatgaactcgact

SEQ ID NO: 117298 - DNA, 25 bp, Artificial
  probe
  misc_feature (1)..(25): SEQ ID NO: 1717; WAN024CG9_at; Start 1162; Stop 1186
gactttaaaccacttcttgaggcag

SEQ ID NO: 117299 - DNA, 25 bp, Artificial
  probe
  misc_feature (1)..(25): SEQ ID NO: 1717; WAN024CG9_at; Start 331; Stop 355
gacatcatccgtcgtgaccttgaaa

SEQ ID NO: 117300 - DNA, 25 bp, Artificial
  probe
  misc_feature (1)..(25): SEQ ID NO: 1717; WAN024CG9_at; Start 21; Stop 45
ccctgagatggcgaatatttggagt

SEQ ID NO: 117301 - DNA, 25 bp, Artificial
  probe
  misc_feature (1)..(25): SEQ ID NO: 1717; WAN024CG9_at; Start 177; Stop 201
tttggaaattgagcaggagacgcgc

SEQ ID NO: 117302 - DNA, 25 bp, Artificial
  probe
  misc_feature (1)..(25): SEQ ID NO: 1717; WAN024CG9_at; Start 52; Stop 76
aataaataccgtgcttggcttgagg

SEQ ID NO: 117303 - DNA, 25 bp, Artificial
  probe
  misc_feature (1)..(25): SEQ ID NO: 1717; WAN024CG9_at; Start 825; Stop 849
aaatatgactggtctggcgcgtgtc

SEQ ID NO: 117304 - DNA, 25 bp, Artificial
  probe
  misc_feature (1)..(25): SEQ ID NO: 1717; WAN024CG9_at; Start 741; Stop 765
gcaacgcgaagtagaagagttcttt

SEQ ID NO: 117305 - DNA, 25 bp, Artificial
  probe
  misc_feature (1)..(25): SEQ ID NO: 1717; WAN024CG9_at; Start 960; Stop 984
tgactacatgctcaaccgttttgga

SEQ ID NO: 117306 - DNA, 25 bp, Artificial
  probe
  misc_feature (1)..(25): SEQ ID NO: 1717; WAN024CG9_at; Start 132; Stop 156
tgtggctttgattcgcaagaaggcg

SEQ ID NO: 117307 - DNA, 25 bp, Artificial
  probe
  misc_feature (1)..(25): SEQ ID NO: 1717; WAN024CG9_at; Start 1047; Stop 1071
tggtcttatctttagccaacgggct

SEQ ID NO: 117308 - DNA, 25 bp, Artificial
  probe
  misc_feature (1)..(25): SEQ ID NO: 1717; WAN024CG9_at; Start 710; Stop 734
cgactgagattcgtggtctacaaaa

SEQ ID NO: 117309 - DNA, 25 bp, Artificial
  probe
  misc_feature (1)..(25): SEQ ID NO: 1717; WAN024CG9_at; Start 570; Stop 594
cccaccatttgtagaggagtatgtc

SEQ ID NO: 117310 - DNA, 25 bp, Artificial
  probe
  misc_feature (1)..(25): SEQ ID NO: 5827; WAN024CGA_at; Start 4; Stop 28
ttgagtataaaaagtcatacctcgc

SEQ ID NO: 117311 - DNA, 25 bp, Artificial
  probe
  misc_feature (1)..(25): SEQ ID NO: 5827; WAN024CGA_at; Start 7; Stop 31
agtataaaaagtcatacctcgcaaa

SEQ ID NO: 117312 - DNA, 25 bp, Artificial
  probe
  misc_feature (1)..(25): SEQ ID NO: 5827; WAN024CGA_at; Start 1; Stop 25
ttgttgagtataaaaagtcatacct

SEQ ID NO: 117313 - DNA, 25 bp, Artificial
  probe
  misc_feature (1)..(25): SEQ ID NO: 5827; WAN024CGA_at; Start 94; Stop 118
atagactataaaattagttgtcttt

SEQ ID NO: 117314 - DNA, 25 bp, Artificial
  probe
  misc_feature (1)..(25): SEQ ID NO: 5827; WAN024CGA_at; Start 102; Stop 126
taaaattagttgtcttttcttctca

SEQ ID NO: 117315 - DNA, 25 bp, Artificial
  probe
  misc_feature (1)..(25): SEQ ID NO: 5827; WAN024CGA_at; Start 76; Stop 100
cgtgatacaatgcgtttaatagact

SEQ ID NO: 117316 - DNA, 25 bp, Artificial
  probe
  misc_feature (1)..(25): SEQ ID NO: 5827; WAN024CGA_at; Start 9; Stop 33
tataaaaagtcatacctcgcaaatt

SEQ ID NO: 117317 - DNA, 25 bp, Artificial
  probe
  misc_feature (1)..(25): SEQ ID NO: 5827; WAN024CGA_at; Start 71; Stop 95
aaaaacgtgatacaatgcgtttaat

SEQ ID NO: 117318 - DNA, 25 bp, Artificial
  probe
  misc_feature (1)..(25): SEQ ID NO: 5827; WAN024CGA_at; Start 8; Stop 32
gtataaaaagtcatacctcgcaaat

SEQ ID NO: 117319 - DNA, 25 bp, Artificial
  probe
  misc_feature (1)..(25): SEQ ID NO: 5827; WAN024CGA_at; Start 78; Stop 102
tgatacaatgcgtttaatagactat

SEQ ID NO: 117320 - DNA, 25 bp, Artificial
  probe
  misc_feature (1)..(25): SEQ ID NO: 5827; WAN024CGA_at; Start 105; Stop 129
aattagttgtcttttcttctcaaat

SEQ ID NO: 117321 - DNA, 25 bp, Artificial
  probe
  misc_feature (1)..(25): SEQ ID NO: 5827; WAN024CGA_at; Start 18; Stop 42
tcatacctcgcaaatttttaaaata

SEQ ID NO: 117322 - DNA, 25 bp, Artificial
  probe
  misc_feature (1)..(25): SEQ ID NO: 5827; WAN024CGA_at; Start 75; Stop 99
acgtgatacaatgcgtttaatagac

SEQ ID NO: 117323 - DNA, 25 bp, Artificial
  probe
  misc_feature (1)..(25): SEQ ID NO: 5827; WAN024CGA_at; Start 74; Stop 98
aacgtgatacaatgcgtttaataga

SEQ ID NO: 117324 - DNA, 25 bp, Artificial
  probe
  misc_feature (1)..(25): SEQ ID NO: 5827; WAN024CGA_at; Start 73; Stop 97
aaacgtgatacaatgcgtttaatag

SEQ ID NO: 117325 - DNA, 25 bp, Artificial
  probe
  misc_feature (1)..(25): SEQ ID NO: 5827; WAN024CGA_at; Start 68; Stop 92
ttcaaaaacgtgatacaatgcgttt

SEQ ID NO: 117326 - DNA, 25 bp, Artificial
  probe
  misc_feature (1)..(25): SEQ ID NO: 5827; WAN024CGA_at; Start 37; Stop 61
aaaataaataaaaaacgcatcatat

SEQ ID NO: 117327 - DNA, 25 bp, Artificial
  probe
  misc_feature (1)..(25): SEQ ID NO: 5827; WAN024CGA_at; Start 36; Stop 60
taaaataaataaaaaacgcatcata

SEQ ID NO: 117328 - DNA, 25 bp, Artificial
  probe
  misc_feature (1)..(25): SEQ ID NO: 5827; WAN024CGA_at; Start 93; Stop 117
aatagactataaaattagttgtctt

SEQ ID NO: 117329 - DNA, 25 bp, Artificial
  probe
  misc_feature (1)..(25): SEQ ID NO: 5827; WAN024CGA_at; Start 3; Stop 27
gttgagtataaaaagtcatacctcg

SEQ ID NO: 117330 - DNA, 25 bp, Artificial
  probe
  misc_feature (1)..(25): SEQ ID NO: 5827; WAN024CGA_at; Start 70; Stop 94
caaaaacgtgatacaatgcgtttaa

SEQ ID NO: 117331 - DNA, 25 bp, Artificial
  probe
  misc_feature (1)..(25): SEQ ID NO: 5827; WAN024CGA_at; Start 2; Stop 26
tgttgagtataaaaagtcatacctc

SEQ ID NO: 117332 - DNA, 25 bp, Artificial
  probe
  misc_feature (1)..(25): SEQ ID NO: 5827; WAN024CGA_at; Start 80; Stop 104
atacaatgcgtttaatagactataa

SEQ ID NO: 117333 - DNA, 25 bp, Artificial
  probe
  misc_feature (1)..(25): SEQ ID NO: 5827; WAN024CGA_at; Start 38; Stop 62
aaataaataaaaaacgcatcatatc

SEQ ID NO: 117334 - DNA, 25 bp, Artificial
  probe
  misc_feature (1)..(25): SEQ ID NO: 5827; WAN024CGA_at; Start 10; Stop 34
ataaaaagtcatacctcgcaaattt

SEQ ID NO: 117335 - DNA, 25 bp, Artificial
  probe
  misc_feature (1)..(25): SEQ ID NO: 5827; WAN024CGA_at; Start 69; Stop 93
tcaaaaacgtgatacaatgcgttta

SEQ ID NO: 117336 - DNA, 25 bp, Artificial
  probe
  misc_feature (1)..(25): SEQ ID NO: 5827; WAN024CGA_at; Start 79; Stop 103
gatacaatgcgtttaatagactata

SEQ ID NO: 117337 - DNA, 25 bp, Artificial
  probe
  misc_feature (1)..(25): SEQ ID NO: 5827; WAN024CGA_at; Start 5; Stop 29
tgagtataaaaagtcatacctcgca

SEQ ID NO: 117338 - DNA, 25 bp, Artificial
  probe
  misc_feature (1)..(25): SEQ ID NO: 5827; WAN024CGA_at; Start 6; Stop 30
gagtataaaaagtcatacctcgcaa

SEQ ID NO: 117339 - DNA, 25 bp, Artificial
  probe
  misc_feature (1)..(25): SEQ ID NO: 5827; WAN024CGA_at; Start 77; Stop 101
gtgatacaatgcgtttaatagacta

SEQ ID NO: 117340 - DNA, 25 bp, Artificial
  probe
  misc_feature (1)..(25): SEQ ID NO: 5827; WAN024CGA_at; Start 72; Stop 96
aaaacgtgatacaatgcgtttaata

SEQ ID NO: 117341 - DNA, 25 bp, Artificial
  probe
  misc_feature (1)..(25): SEQ ID NO: 5674; WAN024CGB_at; Start 283; Stop 307
aagcataacggctggcgcatggagt

SEQ ID NO: 117342 - DNA, 25 bp, Artificial
  probe
  misc_feature (1)..(25): SEQ ID NO: 5674; WAN024CGB_at; Start 238; Stop 262
tgtgacatatttttcagcagcctcg

SEQ ID NO: 117343 - DNA, 25 bp, Artificial
  probe
  misc_feature (1)..(25): SEQ ID NO: 5674; WAN024CGB_at; Start 11; Stop 35
tcttggtcagcactggcatacaaca

SEQ ID NO: 117344 - DNA, 25 bp, Artificial
  probe
  misc_feature (1)..(25): SEQ ID NO: 5674; WAN024CGB_at; Start 199; Stop 223
tattttaccatacatgtggaggtgg

SEQ ID NO: 117345 - DNA, 25 bp, Artificial
  probe
  misc_feature (1)..(25): SEQ ID NO: 5674; WAN024CGB_at; Start 241; Stop 265
gacatatttttcagcagcctcgaca

SEQ ID NO: 117346 - DNA, 25 bp, Artificial
  probe
  misc_feature (1)..(25): SEQ ID NO: 5674; WAN024CGB_at; Start 260; Stop 284
tcgacatgctgaccgaggacattaa

SEQ ID NO: 117347 - DNA, 25 bp, Artificial
  probe
  misc_feature (1)..(25): SEQ ID NO: 5674; WAN024CGB_at; Start 6; Stop 30
ccttatcttggtcagcactggcata

SEQ ID NO: 117348 - DNA, 25 bp, Artificial
  probe
  misc_feature (1)..(25): SEQ ID NO: 5674; WAN024CGB_at; Start 297; Stop 321
gcgcatggagtttgatgactggtaa

SEQ ID NO: 117349 - DNA, 25 bp, Artificial
  probe
  misc_feature (1)..(25): SEQ ID NO: 5674; WAN024CGB_at; Start 262; Stop 286
gacatgctgaccgaggacattaagc

SEQ ID NO: 117350 - DNA, 25 bp, Artificial
  probe
  misc_feature (1)..(25): SEQ ID NO: 5674; WAN024CGB_at; Start 245; Stop 269
tatttttcagcagcctcgacatgct

SEQ ID NO: 117351 - DNA, 25 bp, Artificial
  probe
  misc_feature (1)..(25): SEQ ID NO: 5674; WAN024CGB_at; Start 274; Stop 298
gaggacattaagcataacggctggc

SEQ ID NO: 117352 - DNA, 25 bp, Artificial
  probe
  misc_feature (1)..(25): SEQ ID NO: 5674; WAN024CGB_at; Start 284; Stop 308
agcataacggctggcgcatggagtt

SEQ ID NO: 117353 - DNA, 25 bp, Artificial
  probe
  misc_feature (1)..(25): SEQ ID NO: 5674; WAN024CGB_at; Start 25; Stop 49
ggcatacaacacttcaacaactgct

SEQ ID NO: 117354 - DNA, 25 bp, Artificial
  probe
  misc_feature (1)..(25): SEQ ID NO: 5674; WAN024CGB_at; Start 272; Stop 296
ccgaggacattaagcataacggctg

SEQ ID NO: 117355 - DNA, 25 bp, Artificial
  probe
  misc_feature (1)..(25): SEQ ID NO: 5674; WAN024CGB_at; Start 20; Stop 44
gcactggcatacaacacttcaacaa

SEQ ID NO: 117356 - DNA, 25 bp, Artificial
  probe
  misc_feature (1)..(25): SEQ ID NO: 5674; WAN024CGB_at; Start 34; Stop 58
cacttcaacaactgctccagtctta

SEQ ID NO: 117357 - DNA, 25 bp, Artificial
  probe
  misc_feature (1)..(25): SEQ ID NO: 5674; WAN024CGB_at; Start 235; Stop 259
ttctgtgacatatttttcagcagcc

SEQ ID NO: 117358 - DNA, 25 bp, Artificial
  probe
  misc_feature (1)..(25): SEQ ID NO: 5674; WAN024CGB_at; Start 269; Stop 293
tgaccgaggacattaagcataacgg

SEQ ID NO: 117359 - DNA, 25 bp, Artificial
  probe
  misc_feature (1)..(25): SEQ ID NO: 5674; WAN024CGB_at; Start 2; Stop 26
tgtaccttatcttggtcagcactgg

SEQ ID NO: 117360 - DNA, 25 bp, Artificial
  probe
  misc_feature (1)..(25): SEQ ID NO: 5674; WAN024CGB_at; Start 17; Stop 41
tcagcactggcatacaacacttcaa

SEQ ID NO: 117361 - DNA, 25 bp, Artificial
  probe
  misc_feature (1)..(25): SEQ ID NO: 5674; WAN024CGB_at; Start 4; Stop 28
taccttatcttggtcagcactggca

SEQ ID NO: 117362 - DNA, 25 bp, Artificial
  probe
  misc_feature (1)..(25): SEQ ID NO: 5674; WAN024CGB_at; Start 96; Stop 120
tagacttgtcctaaaaatcaatccc

SEQ ID NO: 117363 - DNA, 25 bp, Artificial
  probe
  misc_feature (1)..(25): SEQ ID NO: 5674; WAN024CGB_at; Start 205; Stop 229
accatacatgtggaggtgggcgctt

SEQ ID NO: 117364 - DNA, 25 bp, Artificial
  probe
  misc_feature (1)..(25): SEQ ID NO: 5674; WAN024CGB_at; Start 277; Stop 301
gacattaagcataacggctggcgca

SEQ ID NO: 117365 - DNA, 25 bp, Artificial
  probe
  misc_feature (1)..(25): SEQ ID NO: 5674; WAN024CGB_at; Start 248; Stop 272
ttttcagcagcctcgacatgctgac

SEQ ID NO: 117366 - DNA, 25 bp, Artificial
  probe
  misc_feature (1)..(25): SEQ ID NO: 5674; WAN024CGB_at; Start 82; Stop 106
gataatttgtatcatagacttgtcc

SEQ ID NO: 117367 - DNA, 25 bp, Artificial
  probe
  misc_feature (1)..(25): SEQ ID NO: 5674; WAN024CGB_at; Start 15; Stop 39
ggtcagcactggcatacaacacttc

SEQ ID NO: 117368 - DNA, 25 bp, Artificial
  probe
  misc_feature (1)..(25): SEQ ID NO: 5674; WAN024CGB_at; Start 254; Stop 278
gcagcctcgacatgctgaccgagga

SEQ ID NO: 117369 - DNA, 25 bp, Artificial
  probe
  misc_feature (1)..(25): SEQ ID NO: 5674; WAN024CGB_at; Start 9; Stop 33
tatcttggtcagcactggcatacaa

SEQ ID NO: 117370 - DNA, 25 bp, Artificial
  probe
  misc_feature (1)..(25): SEQ ID NO: 5674; WAN024CGB_at; Start 267; Stop 291
gctgaccgaggacattaagcataac

SEQ ID NO: 117371 - DNA, 25 bp, Artificial
  probe
  misc_feature (1)..(25): SEQ ID NO: 5674; WAN024CGB_at; Start 29; Stop 53
tacaacacttcaacaactgctccag

SEQ ID NO: 117372 - DNA, 25 bp, Artificial
  probe
  misc_feature (1)..(25): SEQ ID NO: 5674; WAN024CGB_at; Start 66; Stop 90
caataaatgtattaacgataatttg

SEQ ID NO: 117373 - DNA, 25 bp, Artificial
  probe
  misc_feature (1)..(25): SEQ ID NO: 5674; WAN024CGB_at; Start 279; Stop 303
cattaagcataacggctggcgcatg

SEQ ID NO: 117374 - DNA, 25 bp, Artificial
  probe
  misc_feature (1)..(25): SEQ ID NO: 5674; WAN024CGB_at; Start 203; Stop 227
ttaccatacatgtggaggtgggcgc

SEQ ID NO: 117375 - DNA, 25 bp, Artificial
  probe
  misc_feature (1)..(25): SEQ ID NO: 5357; WAN024CGC_at; Start 241; Stop 265
ggccatcatctgacccagttgaccg

SEQ ID NO: 117376 - DNA, 25 bp, Artificial
  probe
  misc_feature (1)..(25): SEQ ID NO: 5357; WAN024CGC_at; Start 260; Stop 284
tgaccgccaccgataattccgattg

SEQ ID NO: 117377 - DNA, 25 bp, Artificial
  probe
  misc_feature (1)..(25): SEQ ID NO: 5357; WAN024CGC_at; Start 198; Stop 222
gatccagcgcgataaccttgtggcc

SEQ ID NO: 117378 - DNA, 25 bp, Artificial
  probe
  misc_feature (1)..(25): SEQ ID NO: 5357; WAN024CGC_at; Start 13; Stop 37
gagcagatctgttccttgagggagt

SEQ ID NO: 117379 - DNA, 25 bp, Artificial
  probe
  misc_feature (1)..(25): SEQ ID NO: 5357; WAN024CGC_at; Start 213; Stop 237
ccttgtggcccatgtagatagcaga

SEQ ID NO: 117380 - DNA, 25 bp, Artificial
  probe
  misc_feature (1)..(25): SEQ ID NO: 5357; WAN024CGC_at; Start 187; Stop 211
atccgccgcaggatccagcgcgata

SEQ ID NO: 117381 - DNA, 25 bp, Artificial
  probe
  misc_feature (1)..(25): SEQ ID NO: 5357; WAN024CGC_at; Start 100; Stop 124
gacatcgcaacggtctgccaactga

SEQ ID NO: 117382 - DNA, 25 bp, Artificial
  probe
  misc_feature (1)..(25): SEQ ID NO: 5357; WAN024CGC_at; Start 34; Stop 58
gagttgtccatccttgataacggca

SEQ ID NO: 117383 - DNA, 25 bp, Artificial
  probe
  misc_feature (1)..(25): SEQ ID NO: 5357; WAN024CGC_at; Start 137; Stop 161
acatcgttataaggtgccacaatga

SEQ ID NO: 117384 - DNA, 25 bp, Artificial
  probe
  misc_feature (1)..(25): SEQ ID NO: 5357; WAN024CGC_at; Start 39; Stop 63
gtccatccttgataacggcatccaa

SEQ ID NO: 117385 - DNA, 25 bp, Artificial
  probe
  misc_feature (1)..(25): SEQ ID NO: 5357; WAN024CGC_at; Start 61; Stop 85
caaaccgtcagcgtcgacattttca

SEQ ID NO: 117386 - DNA, 25 bp, Artificial
  probe
  misc_feature (1)..(25): SEQ ID NO: 5357; WAN024CGC_at; Start 56; Stop 80
gcatccaaaccgtcagcgtcgacat

SEQ ID NO: 117387 - DNA, 25 bp, Artificial
  probe
  misc_feature (1)..(25): SEQ ID NO: 5357; WAN024CGC_at; Start 147; Stop 171
aaggtgccacaatgatttccgccac

SEQ ID NO: 117388 - DNA, 25 bp, Artificial
  probe
  misc_feature (1)..(25): SEQ ID NO: 5357; WAN024CGC_at; Start 7; Stop 31
aatgcggagcagatctgttccttga

SEQ ID NO: 117389 - DNA, 25 bp, Artificial
  probe
  misc_feature (1)..(25): SEQ ID NO: 5357; WAN024CGC_at; Start 256; Stop 280
cagttgaccgccaccgataattccg

SEQ ID NO: 117390 - DNA, 25 bp, Artificial
  probe
  misc_feature (1)..(25): SEQ ID NO: 5357; WAN024CGC_at; Start 22; Stop 46
tgttccttgagggagttgtccatcc

SEQ ID NO: 117391 - DNA, 25 bp, Artificial
  probe
  misc_feature (1)..(25): SEQ ID NO: 5357; WAN024CGC_at; Start 66; Stop 90
cgtcagcgtcgacattttcaaactc

SEQ ID NO: 117392 - DNA, 25 bp, Artificial
  probe
  misc_feature (1)..(25): SEQ ID NO: 5357; WAN024CGC_at; Start 204; Stop 228
gcgcgataaccttgtggcccatgta

SEQ ID NO: 117393 - DNA, 25 bp, Artificial
  probe
  misc_feature (1)..(25): SEQ ID NO: 5357; WAN024CGC_at; Start 108; Stop 132
aacggtctgccaactgacggagggc

SEQ ID NO: 117394 - DNA, 25 bp, Artificial
  probe
  misc_feature (1)..(25): SEQ ID NO: 5357; WAN024CGC_at; Start 2; Stop 26
tgcgaaatgcggagcagatctgttc

SEQ ID NO: 117395 - DNA, 25 bp, Artificial
  probe
  misc_feature (1)..(25): SEQ ID NO: 5357; WAN024CGC_at; Start 26; Stop 50
ccttgagggagttgtccatccttga

SEQ ID NO: 117396 - DNA, 25 bp, Artificial
  probe
  misc_feature (1)..(25): SEQ ID NO: 5357; WAN024CGC_at; Start 18; Stop 42
gatctgttccttgagggagttgtcc

SEQ ID NO: 117397 - DNA, 25 bp, Artificial
  probe
  misc_feature (1)..(25): SEQ ID NO: 5357; WAN024CGC_at; Start 223; Stop 247
catgtagatagcagaaatggccatc

SEQ ID NO: 117398 - DNA, 25 bp, Artificial
  probe
  misc_feature (1)..(25): SEQ ID NO: 5357; WAN024CGC_at; Start 92; Stop 116
taagtgaggacatcgcaacggtctg

SEQ ID NO: 117399 - DNA, 25 bp, Artificial
  probe
  misc_feature (1)..(25): SEQ ID NO: 5357; WAN024CGC_at; Start 229; Stop 253
gatagcagaaatggccatcatctga

SEQ ID NO: 117400 - DNA, 25 bp, Artificial
  probe
  misc_feature (1)..(25): SEQ ID NO: 5357; WAN024CGC_at; Start 96; Stop 120
tgaggacatcgcaacggtctgccaa

SEQ ID NO: 117401 - DNA, 25 bp, Artificial
  probe
  misc_feature (1)..(25): SEQ ID NO: 5357; WAN024CGC_at; Start 236; Stop 260
gaaatggccatcatctgacccagtt

SEQ ID NO: 117402 - DNA, 25 bp, Artificial
  probe
  misc_feature (1)..(25): SEQ ID NO: 5357; WAN024CGC_at; Start 30; Stop 54
gagggagttgtccatccttgataac

SEQ ID NO: 117403 - DNA, 25 bp, Artificial
  probe
  misc_feature (1)..(25): SEQ ID NO: 5357; WAN024CGC_at; Start 270; Stop 294
cgataattccgattgttttagatga

SEQ ID NO: 117404 - DNA, 25 bp, Artificial
  probe
  misc_feature (1)..(25): SEQ ID NO: 5357; WAN024CGC_at; Start 144; Stop 168
tataaggtgccacaatgatttccgc

SEQ ID NO: 117405 - DNA, 25 bp, Artificial
  probe
  misc_feature (1)..(25): SEQ ID NO: 5357; WAN024CGC_at; Start 207; Stop 231
cgataaccttgtggcccatgtagat

SEQ ID NO: 117406 - DNA, 25 bp, Artificial
  probe
  misc_feature (1)..(25): SEQ ID NO: 5357; WAN024CGC_at; Start 216; Stop 240
tgtggcccatgtagatagcagaaat

SEQ ID NO: 117407 - DNA, 25 bp, Artificial
  probe
  misc_feature (1)..(25): SEQ ID NO: 5357; WAN024CGC_at; Start 265; Stop 289
gccaccgataattccgattgtttta

SEQ ID NO: 117408 - DNA, 25 bp, Artificial
  probe
  misc_feature (1)..(25): SEQ ID NO: 5357; WAN024CGC_at; Start 49; Stop 73
gataacggcatccaaaccgtcagcg

SEQ ID NO: 117409 - DNA, 25 bp, Artificial
  probe
  misc_feature (1)..(25): SEQ ID NO: 3858; WAN024CGD_at; Start 72; Stop 96
tgagacacctttggtggctgctgcc

SEQ ID NO: 117410 - DNA, 25 bp, Artificial
  probe
  misc_feature (1)..(25): SEQ ID NO: 3858; WAN024CGD_at; Start 61; Stop 85
caatttaggcatgagacacctttgg

SEQ ID NO: 117411 - DNA, 25 bp, Artificial
  probe
  misc_feature (1)..(25): SEQ ID NO: 3858; WAN024CGD_at; Start 49; Stop 73
accttgggtttccaatttaggcatg

SEQ ID NO: 117412 - DNA, 25 bp, Artificial
  probe
  misc_feature (1)..(25): SEQ ID NO: 3858; WAN024CGD_at; Start 54; Stop 78
gggtttccaatttaggcatgagaca

SEQ ID NO: 117413 - DNA, 25 bp, Artificial
  probe
  misc_feature (1)..(25): SEQ ID NO: 3858; WAN024CGD_at; Start 15; Stop 39
ggatgataatccaatcgttcaggga

SEQ ID NO: 117414 - DNA, 25 bp, Artificial
  probe
  misc_feature (1)..(25): SEQ ID NO: 3858; WAN024CGD_at; Start 21; Stop 45
taatccaatcgttcagggaaattgg

SEQ ID NO: 117415 - DNA, 25 bp, Artificial
  probe
  misc_feature (1)..(25): SEQ ID NO: 3858; WAN024CGD_at; Start 93; Stop 117
tgccgtccctcacaagctaaggtga

SEQ ID NO: 117416 - DNA, 25 bp, Artificial
  probe
  misc_feature (1)..(25): SEQ ID NO: 3858; WAN024CGD_at; Start 92; Stop 116
ctgccgtccctcacaagctaaggtg

SEQ ID NO: 117417 - DNA, 25 bp, Artificial
  probe
  misc_feature (1)..(25): SEQ ID NO: 3858; WAN024CGD_at; Start 62; Stop 86
aatttaggcatgagacacctttggt

SEQ ID NO: 117418 - DNA, 25 bp, Artificial
  probe
  misc_feature (1)..(25): SEQ ID NO: 3858; WAN024CGD_at; Start 16; Stop 40
gatgataatccaatcgttcagggaa

SEQ ID NO: 117419 - DNA, 25 bp, Artificial
  probe
  misc_feature (1)..(25): SEQ ID NO: 3858; WAN024CGD_at; Start 56; Stop 80
gtttccaatttaggcatgagacacc

SEQ ID NO: 117420 - DNA, 25 bp, Artificial
  probe
  misc_feature (1)..(25): SEQ ID NO: 3858; WAN024CGD_at; Start 80; Stop 104
ctttggtggctgctgccgtccctca

SEQ ID NO: 117421 - DNA, 25 bp, Artificial
  probe
  misc_feature (1)..(25): SEQ ID NO: 3858; WAN024CGD_at; Start 60; Stop 84
ccaatttaggcatgagacacctttg

SEQ ID NO: 117422 - DNA, 25 bp, Artificial
  probe
  misc_feature (1)..(25): SEQ ID NO: 3858; WAN024CGD_at; Start 78; Stop 102
acctttggtggctgctgccgtccct

SEQ ID NO: 117423 - DNA, 25 bp, Artificial
  probe
  misc_feature (1)..(25): SEQ ID NO: 3858; WAN024CGD_at; Start 26; Stop 50
caatcgttcagggaaattggaagac

SEQ ID NO: 117424 - DNA, 25 bp, Artificial
  probe
  misc_feature (1)..(25): SEQ ID NO: 3858; WAN024CGD_at; Start 18; Stop 42
tgataatccaatcgttcagggaaat

SEQ ID NO: 117425 - DNA, 25 bp, Artificial
  probe
  misc_feature (1)..(25): SEQ ID NO: 3858; WAN024CGD_at; Start 65; Stop 89
ttaggcatgagacacctttggtggc

SEQ ID NO: 117426 - DNA, 25 bp, Artificial
  probe
  misc_feature (1)..(25): SEQ ID NO: 3858; WAN024CGD_at; Start 64; Stop 88
tttaggcatgagacacctttggtgg

SEQ ID NO: 117427 - DNA, 25 bp, Artificial
  probe
  misc_feature (1)..(25): SEQ ID NO: 3858; WAN024CGD_at; Start 58; Stop 82
ttccaatttaggcatgagacacctt

SEQ ID NO: 117428 - DNA, 25 bp, Artificial
  probe
  misc_feature (1)..(25): SEQ ID NO: 3858; WAN024CGD_at; Start 73; Stop 97
gagacacctttggtggctgctgccg

SEQ ID NO: 117429 - DNA, 25 bp, Artificial
  probe
  misc_feature (1)..(25): SEQ ID NO: 3858; WAN024CGD_at; Start 66; Stop 90
taggcatgagacacctttggtggct

SEQ ID NO: 117430 - DNA, 25 bp, Artificial
  probe
  misc_feature (1)..(25): SEQ ID NO: 3858; WAN024CGD_at; Start 91; Stop 115
gctgccgtccctcacaagctaaggt

SEQ ID NO: 117431 - DNA, 25 bp, Artificial
  probe
  misc_feature (1)..(25): SEQ ID NO: 3858; WAN024CGD_at; Start 81; Stop 105
tttggtggctgctgccgtccctcac

SEQ ID NO: 117432 - DNA, 25 bp, Artificial
  probe
  misc_feature (1)..(25): SEQ ID NO: 3858; WAN024CGD_at; Start 3; Stop 27
gaaagaacgattggatgataatcca

SEQ ID NO: 117433 - DNA, 25 bp, Artificial
  probe
  misc_feature (1)..(25): SEQ ID NO: 3858; WAN024CGD_at; Start 53; Stop 77
tgggtttccaatttaggcatgagac

SEQ ID NO: 117434 - DNA, 25 bp, Artificial
  probe
  misc_feature (1)..(25): SEQ ID NO: 3858; WAN024CGD_at; Start 2; Stop 26
tgaaagaacgattggatgataatcc

SEQ ID NO: 117435 - DNA, 25 bp, Artificial
  probe
  misc_feature (1)..(25): SEQ ID NO: 3858; WAN024CGD_at; Start 69; Stop 93
gcatgagacacctttggtggctgct

SEQ ID NO: 117436 - DNA, 25 bp, Artificial
  probe
  misc_feature (1)..(25): SEQ ID NO: 3858; WAN024CGD_at; Start 55; Stop 79
ggtttccaatttaggcatgagacac

SEQ ID NO: 117437 - DNA, 25 bp, Artificial
  probe
  misc_feature (1)..(25): SEQ ID NO: 3858; WAN024CGD_at; Start 30; Stop 54
cgttcagggaaattggaagaccttg

SEQ ID NO: 117438 - DNA, 25 bp, Artificial
  probe
  misc_feature (1)..(25): SEQ ID NO: 3858; WAN024CGD_at; Start 70; Stop 94
catgagacacctttggtggctgctg

SEQ ID NO: 117439 - DNA, 25 bp, Artificial
  probe
  misc_feature (1)..(25): SEQ ID NO: 3858; WAN024CGD_at; Start 51; Stop 75
cttgggtttccaatttaggcatgag

SEQ ID NO: 117440 - DNA, 25 bp, Artificial
  probe
  misc_feature (1)..(25): SEQ ID NO: 3858; WAN024CGD_at; Start 28; Stop 52
atcgttcagggaaattggaagacct

SEQ ID NO: 117441 - DNA, 25 bp, Artificial
  probe
  misc_feature (1)..(25): SEQ ID NO: 3858; WAN024CGD_at; Start 75; Stop 99
gacacctttggtggctgctgccgtc

SEQ ID NO: 117442 - DNA, 25 bp, Artificial
  probe
  misc_feature (1)..(25): SEQ ID NO: 3858; WAN024CGD_at; Start 19; Stop 43
gataatccaatcgttcagggaaatt

SEQ ID NO: 117443 - DNA, 25 bp, Artificial
  probe
  misc_feature (1)..(25): SEQ ID NO: 2714; WAN024CGE_at; Start 105; Stop 129
gcagcagccaccaaaggtgtctcat

SEQ ID NO: 117444 - DNA, 25 bp, Artificial
  probe
  misc_feature (1)..(25): SEQ ID NO: 2714; WAN024CGE_at; Start 81; Stop 105
aatcaccttagcttgtgagggacgg

SEQ ID NO: 117445 - DNA, 25 bp, Artificial
  probe
  misc_feature (1)..(25): SEQ ID NO: 2714; WAN024CGE_at; Start 20; Stop 44
ttgagcccatgatgatggaaattac

SEQ ID NO: 117446 - DNA, 25 bp, Artificial
  probe
  misc_feature (1)..(25): SEQ ID NO: 2714; WAN024CGE_at; Start 1; Stop 25
atggttgcccagtcggattttgagc

SEQ ID NO: 117447 - DNA, 25 bp, Artificial
  probe
  misc_feature (1)..(25): SEQ ID NO: 2714; WAN024CGE_at; Start 104; Stop 128
ggcagcagccaccaaaggtgtctca

SEQ ID NO: 117448 - DNA, 25 bp, Artificial
  probe
  misc_feature (1)..(25): SEQ ID NO: 2714; WAN024CGE_at; Start 112; Stop 136
ccaccaaaggtgtctcatgccctaa

SEQ ID NO: 117449 - DNA, 25 bp, Artificial
  probe
  misc_feature (1)..(25): SEQ ID NO: 2714; WAN024CGE_at; Start 83; Stop 107
tcaccttagcttgtgagggacggca

SEQ ID NO: 117450 - DNA, 25 bp, Artificial
  probe
  misc_feature (1)..(25): SEQ ID NO: 2714; WAN024CGE_at; Start 35; Stop 59
tggaaattactggtttcatttcttc

SEQ ID NO: 117451 - DNA, 25 bp, Artificial
  probe
  misc_feature (1)..(25): SEQ ID NO: 2714; WAN024CGE_at; Start 117; Stop 141
aaaggtgtctcatgccctaactaat

SEQ ID NO: 117452 - DNA, 25 bp, Artificial
  probe
  misc_feature (1)..(25): SEQ ID NO: 2714; WAN024CGE_at; Start 107; Stop 131
agcagccaccaaaggtgtctcatgc

SEQ ID NO: 117453 - DNA, 25 bp, Artificial
  probe
  misc_feature (1)..(25): SEQ ID NO: 2714; WAN024CGE_at; Start 9; Stop 33
ccagtcggattttgagcccatgatg

SEQ ID NO: 117454 - DNA, 25 bp, Artificial
  probe
  misc_feature (1)..(25): SEQ ID NO: 2714; WAN024CGE_at; Start 2; Stop 26
tggttgcccagtcggattttgagcc

SEQ ID NO: 117455 - DNA, 25 bp, Artificial
  probe
  misc_feature (1)..(25): SEQ ID NO: 2714; WAN024CGE_at; Start 80; Stop 104
caatcaccttagcttgtgagggacg

SEQ ID NO: 117456 - DNA, 25 bp, Artificial
  probe
  misc_feature (1)..(25): SEQ ID NO: 2714; WAN024CGE_at; Start 86; Stop 110
ccttagcttgtgagggacggcagca

SEQ ID NO: 117457 - DNA, 25 bp, Artificial
  probe
  misc_feature (1)..(25): SEQ ID NO: 2714; WAN024CGE_at; Start 67; Stop 91
tcctctttttcaacaatcaccttag

SEQ ID NO: 117458 - DNA, 25 bp, Artificial
  probe
  misc_feature (1)..(25): SEQ ID NO: 2714; WAN024CGE_at; Start 22; Stop 46
gagcccatgatgatggaaattactg

SEQ ID NO: 117459 - DNA, 25 bp, Artificial
  probe
  misc_feature (1)..(25): SEQ ID NO: 2714; WAN024CGE_at; Start 4; Stop 28
gttgcccagtcggattttgagccca

SEQ ID NO: 117460 - DNA, 25 bp, Artificial
  probe
  misc_feature (1)..(25): SEQ ID NO: 2714; WAN024CGE_at; Start 102; Stop 126
acggcagcagccaccaaaggtgtct

SEQ ID NO: 117461 - DNA, 25 bp, Artificial
  probe
  misc_feature (1)..(25): SEQ ID NO: 2714; WAN024CGE_at; Start 12; Stop 36
gtcggattttgagcccatgatgatg

SEQ ID NO: 117462 - DNA, 25 bp, Artificial
  probe
  misc_feature (1)..(25): SEQ ID NO: 2714; WAN024CGE_at; Start 10; Stop 34
cagtcggattttgagcccatgatga

SEQ ID NO: 117463 - DNA, 25 bp, Artificial
  probe
  misc_feature (1)..(25): SEQ ID NO: 2714; WAN024CGE_at; Start 78; Stop 102
aacaatcaccttagcttgtgaggga

SEQ ID NO: 117464 - DNA, 25 bp, Artificial
  probe
  misc_feature (1)..(25): SEQ ID NO: 2714; WAN024CGE_at; Start 8; Stop 32
cccagtcggattttgagcccatgat

SEQ ID NO: 117465 - DNA, 25 bp, Artificial
  probe
  misc_feature (1)..(25): SEQ ID NO: 2714; WAN024CGE_at; Start 27; Stop 51
catgatgatggaaattactggtttc

SEQ ID NO: 117466 - DNA, 25 bp, Artificial
  probe
  misc_feature (1)..(25): SEQ ID NO: 2714; WAN024CGE_at; Start 25; Stop 49
cccatgatgatggaaattactggtt

SEQ ID NO: 117467 - DNA, 25 bp, Artificial
  probe
  misc_feature (1)..(25): SEQ ID NO: 2714; WAN024CGE_at; Start 113; Stop 137
caccaaaggtgtctcatgccctaac

SEQ ID NO: 117468 - DNA, 25 bp, Artificial
  probe
  misc_feature (1)..(25): SEQ ID NO: 2714; WAN024CGE_at; Start 116; Stop 140
caaaggtgtctcatgccctaactaa

SEQ ID NO: 117469 - DNA, 25 bp, Artificial
  probe
  misc_feature (1)..(25): SEQ ID NO: 2714; WAN024CGE_at; Start 95; Stop 119
gtgagggacggcagcagccaccaaa

SEQ ID NO: 117470 - DNA, 25 bp, Artificial
  probe
  misc_feature (1)..(25): SEQ ID NO: 2714; WAN024CGE_at; Start 84; Stop 108
caccttagcttgtgagggacggcag

SEQ ID NO: 117471 - DNA, 25 bp, Artificial
  probe
  misc_feature (1)..(25): SEQ ID NO: 2714; WAN024CGE_at; Start 30; Stop 54
gatgatggaaattactggtttcatt

SEQ ID NO: 117472 - DNA, 25 bp, Artificial
  probe
  misc_feature (1)..(25): SEQ ID NO: 2714; WAN024CGE_at; Start 7; Stop 31
gcccagtcggattttgagcccatga

SEQ ID NO: 117473 - DNA, 25 bp, Artificial
  probe
  misc_feature (1)..(25): SEQ ID NO: 2714; WAN024CGE_at; Start 6; Stop 30
tgcccagtcggattttgagcccatg

SEQ ID NO: 117474 - DNA, 25 bp, Artificial
  probe
  misc_feature (1)..(25): SEQ ID NO: 2714; WAN024CGE_at; Start 98; Stop 122
agggacggcagcagccaccaaaggt

SEQ ID NO: 117475 - DNA, 25 bp, Artificial
  probe
  misc_feature (1)..(25): SEQ ID NO: 2714; WAN024CGE_at; Start 15; Stop 39
ggattttgagcccatgatgatggaa

SEQ ID NO: 117476 - DNA, 25 bp, Artificial
  probe
  misc_feature (1)..(25): SEQ ID NO: 2714; WAN024CGE_at; Start 76; Stop 100
tcaacaatcaccttagcttgtgagg

SEQ ID NO: 117477 - DNA, 25 bp, Artificial
  probe
  misc_feature (1)..(25): SEQ ID NO: 1684; WAN024CGF_at; Start 71; Stop 95
ccagtgctgaccaagataaggtaca

SEQ ID NO: 117478 - DNA, 25 bp, Artificial
  probe
  misc_feature (1)..(25): SEQ ID NO: 1684; WAN024CGF_at; Start 75; Stop 99
tgctgaccaagataaggtacaagct

SEQ ID NO: 117479 - DNA, 25 bp, Artificial
  probe
  misc_feature (1)..(25): SEQ ID NO: 1684; WAN024CGF_at; Start 184; Stop 208
gatcattacccgtctgtgtttattg

SEQ ID NO: 117480 - DNA, 25 bp, Artificial
  probe
  misc_feature (1)..(25): SEQ ID NO: 1684; WAN024CGF_at; Start 50; Stop 74
cagttgttgaagtgttgtatgccag

SEQ ID NO: 117481 - DNA, 25 bp, Artificial
  probe
  misc_feature (1)..(25): SEQ ID NO: 1684; WAN024CGF_at; Start 99; Stop 123
taaatatgaagaactagctgcacaa

SEQ ID NO: 117482 - DNA, 25 bp, Artificial
  probe
  misc_feature (1)..(25): SEQ ID NO: 1684; WAN024CGF_at; Start 69; Stop 93
tgccagtgctgaccaagataaggta

SEQ ID NO: 117483 - DNA, 25 bp, Artificial
  probe
  misc_feature (1)..(25): SEQ ID NO: 1684; WAN024CGF_at; Start 39; Stop 63
taagactggagcagttgttgaagtg

SEQ ID NO: 117484 - DNA, 25 bp, Artificial
  probe
  misc_feature (1)..(25): SEQ ID NO: 1684; WAN024CGF_at; Start 58; Stop 82
gaagtgttgtatgccagtgctgacc

SEQ ID NO: 117485 - DNA, 25 bp, Artificial
  probe
  misc_feature (1)..(25): SEQ ID NO: 1684; WAN024CGF_at; Start 90; Stop 114
ggtacaagctaaatatgaagaacta

SEQ ID NO: 117486 - DNA, 25 bp, Artificial
  probe
  misc_feature (1)..(25): SEQ ID NO: 1684; WAN024CGF_at; Start 126; Stop 150
ccccgaaaattatttagctatctat

SEQ ID NO: 117487 - DNA, 25 bp, Artificial
  probe
  misc_feature (1)..(25): SEQ ID NO: 1684; WAN024CGF_at; Start 65; Stop 89
tgtatgccagtgctgaccaagataa

SEQ ID NO: 117488 - DNA, 25 bp, Artificial
  probe
  misc_feature (1)..(25): SEQ ID NO: 1684; WAN024CGF_at; Start 173; Stop 197
tgaatacactagatcattacccgtc

SEQ ID NO: 117489 - DNA, 25 bp, Artificial
  probe
  misc_feature (1)..(25): SEQ ID NO: 1684; WAN024CGF_at; Start 79; Stop 103
gaccaagataaggtacaagctaaat

SEQ ID NO: 117490 - DNA, 25 bp, Artificial
  probe
  misc_feature (1)..(25): SEQ ID NO: 1684; WAN024CGF_at; Start 171; Stop 195
tttgaatacactagatcattacccg

SEQ ID NO: 117491 - DNA, 25 bp, Artificial
  probe
  misc_feature (1)..(25): SEQ ID NO: 1684; WAN024CGF_at; Start 97; Stop 121
gctaaatatgaagaactagctgcac

SEQ ID NO: 117492 - DNA, 25 bp, Artificial
  probe
  misc_feature (1)..(25): SEQ ID NO: 1684; WAN024CGF_at; Start 85; Stop 109
gataaggtacaagctaaatatgaag

SEQ ID NO: 117493 - DNA, 25 bp, Artificial
  probe
  misc_feature (1)..(25): SEQ ID NO: 1684; WAN024CGF_at; Start 152; Stop 176
atgtaccgctggatacggatttgaa

SEQ ID NO: 117494 - DNA, 25 bp, Artificial
  probe
  misc_feature (1)..(25): SEQ ID NO: 1684; WAN024CGF_at; Start 103; Stop 127
tatgaagaactagctgcacaatacc

SEQ ID NO: 117495 - DNA, 25 bp, Artificial
  probe
  misc_feature (1)..(25): SEQ ID NO: 1684; WAN024CGF_at; Start 113; Stop 137
tagctgcacaataccccgaaaatta

SEQ ID NO: 117496 - DNA, 25 bp, Artificial
  probe
  misc_feature (1)..(25): SEQ ID NO: 1684; WAN024CGF_at; Start 67; Stop 91
tatgccagtgctgaccaagataagg

SEQ ID NO: 117497 - DNA, 25 bp, Artificial
  probe
  misc_feature (1)..(25): SEQ ID NO: 1684; WAN024CGF_at; Start 44; Stop 68
ctggagcagttgttgaagtgttgta

SEQ ID NO: 117498 - DNA, 25 bp, Artificial
  probe
  misc_feature (1)..(25): SEQ ID NO: 1684; WAN024CGF_at; Start 161; Stop 185
tggatacggatttgaatacactaga

SEQ ID NO: 117499 - DNA, 25 bp, Artificial
  probe
  misc_feature (1)..(25): SEQ ID NO: 1684; WAN024CGF_at; Start 165; Stop 189
tacggatttgaatacactagatcat

SEQ ID NO: 117500 - DNA, 25 bp, Artificial
  probe
  misc_feature (1)..(25): SEQ ID NO: 1684; WAN024CGF_at; Start 158; Stop 182
cgctggatacggatttgaatacact

SEQ ID NO: 117501 - DNA, 25 bp, Artificial
  probe
  misc_feature (1)..(25): SEQ ID NO: 1684; WAN024CGF_at; Start 108; Stop 132
agaactagctgcacaataccccgaa

SEQ ID NO: 117502 - DNA, 25 bp, Artificial
  probe
  misc_feature (1)..(25): SEQ ID NO: 1684; WAN024CGF_at; Start 54; Stop 78
tgttgaagtgttgtatgccagtgct

SEQ ID NO: 117503 - DNA, 25 bp, Artificial
  probe
  misc_feature (1)..(25): SEQ ID NO: 1684; WAN024CGF_at; Start 155; Stop 179
taccgctggatacggatttgaatac

SEQ ID NO: 117504 - DNA, 25 bp, Artificial
  probe
  misc_feature (1)..(25): SEQ ID NO: 1684; WAN024CGF_at; Start 110; Stop 134
aactagctgcacaataccccgaaaa

SEQ ID NO: 117505 - DNA, 25 bp, Artificial
  probe
  misc_feature (1)..(25): SEQ ID NO: 1684; WAN024CGF_at; Start 106; Stop 130
gaagaactagctgcacaataccccg

SEQ ID NO: 117506 - DNA, 25 bp, Artificial
  probe
  misc_feature (1)..(25): SEQ ID NO: 1684; WAN024CGF_at; Start 177; Stop 201
tacactagatcattacccgtctgtg

SEQ ID NO: 117507 - DNA, 25 bp, Artificial
  probe
  misc_feature (1)..(25): SEQ ID NO: 1684; WAN024CGF_at; Start 179; Stop 203
cactagatcattacccgtctgtgtt

SEQ ID NO: 117508 - DNA, 25 bp, Artificial
  probe
  misc_feature (1)..(25): SEQ ID NO: 1684; WAN024CGF_at; Start 62; Stop 86
tgttgtatgccagtgctgaccaaga

SEQ ID NO: 117509 - DNA, 25 bp, Artificial
  probe
  misc_feature (1)..(25): SEQ ID NO: 1684; WAN024CGF_at; Start 3; Stop 27
gatacaaattatcgttaatacattt

SEQ ID NO: 117510 - DNA, 25 bp, Artificial
  probe
  misc_feature (1)..(25): SEQ ID NO: 1684; WAN024CGF_at; Start 12; Stop 36
tatcgttaatacatttattgaaaag

SEQ ID NO: 117511 - DNA, 25 bp, Artificial
  probe
  misc_feature (1)..(25): SEQ ID NO: 1757; WAN024CGG-3_at; Start 457; Stop 481
tcagcagactgcgtcttggaagaat

SEQ ID NO: 117512 - DNA, 25 bp, Artificial
  probe
  misc_feature (1)..(25): SEQ ID NO: 1757; WAN024CGG-3_at; Start 224; Stop 248
gaacagatctgctccgcatttcgca

SEQ ID NO: 117513 - DNA, 25 bp, Artificial
  probe
  misc_feature (1)..(25): SEQ ID NO: 1757; WAN024CGG-3_at; Start 665; Stop 689
tcaacttgtctggaactctctgtgt

SEQ ID NO: 117514 - DNA, 25 bp, Artificial
  probe
  misc_feature (1)..(25): SEQ ID NO: 1757; WAN024CGG-3_at; Start 22; Stop 46
tacatgggccacaaggttatcgcgc

SEQ ID NO: 117515 - DNA, 25 bp, Artificial
  probe
  misc_feature (1)..(25): SEQ ID NO: 1757; WAN024CGG-3_at; Start 594; Stop 618
cgtaccagcccgcatttctgaaagt

SEQ ID NO: 117516 - DNA, 25 bp, Artificial
  probe
  misc_feature (1)..(25): SEQ ID NO: 1757; WAN024CGG-3_at; Start 81; Stop 105
ggcggaaatcattgtggcaccttat

SEQ ID NO: 117517 - DNA, 25 bp, Artificial
  probe
  misc_feature (1)..(25): SEQ ID NO: 1757; WAN024CGG-3_at; Start 160; Stop 184
gagtttgaaaatgtcgacgctgacg

SEQ ID NO: 117518 - DNA, 25 bp, Artificial
  probe
  misc_feature (1)..(25): SEQ ID NO: 1757; WAN024CGG-3_at; Start 920; Stop 944
gcgcccacctccacatgtatggtaa

SEQ ID NO: 117519 - DNA, 25 bp, Artificial
  probe
  misc_feature (1)..(25): SEQ ID NO: 1757; WAN024CGG-3_at; Start 578; Stop 602
tcctgtctaagaccatcgtaccagc

SEQ ID NO: 117520 - DNA, 25 bp, Artificial
  probe
  misc_feature (1)..(25): SEQ ID NO: 1757; WAN024CGG-3_at; Start 719; Stop 743
ttgtcaatgaaatcgccccacgacc

SEQ ID NO: 117521 - DNA, 25 bp, Artificial
  probe
  misc_feature (1)..(25): SEQ ID NO: 1757; WAN024CGG-3_at; Start 118; Stop 142
gccctccgtcagttggcagaccgtt

SEQ ID NO: 117522 - DNA, 25 bp, Artificial
  probe
  misc_feature (1)..(25): SEQ ID NO: 1757; WAN024CGG-3_at; Start 307; Stop 331
tacaaggtcgtgacttctagcctag

SEQ ID NO: 117523 - DNA, 25 bp, Artificial
  probe
  misc_feature (1)..(25): SEQ ID NO: 1757; WAN024CGG-3_at; Start 379; Stop 403
actggtggctacgatggtcatggac

SEQ ID NO: 117524 - DNA, 25 bp, Artificial
  probe
  misc_feature (1)..(25): SEQ ID NO: 1757; WAN024CGG-3_at; Start 442; Stop 466
tatgcgctagcagactcagcagact

SEQ ID NO: 117525 - DNA, 25 bp, Artificial
  probe
  misc_feature (1)..(25): SEQ ID NO: 1757; WAN024CGG-3_at; Start 327; Stop 351
cctagacttggcagatatcgacttg

SEQ ID NO: 117526 - DNA, 25 bp, Artificial
  probe
  misc_feature (1)..(25): SEQ ID NO: 1757; WAN024CGG-3_at; Start 648; Stop 672
gcgaatcgcagaacaactcaacttg

SEQ ID NO: 117527 - DNA, 25 bp, Artificial
  probe
  misc_feature (1)..(25): SEQ ID NO: 1757; WAN024CGG-3_at; Start 826; Stop 850
ttaccagtcatcaaactccatgcgc

SEQ ID NO: 117528 - DNA, 25 bp, Artificial
  probe
  misc_feature (1)..(25): SEQ ID NO: 1757; WAN024CGG-3_at; Start 344; Stop 368
tcgacttgtcgaaaaactatgtcct

SEQ ID NO: 117529 - DNA, 25 bp, Artificial
  probe
  misc_feature (1)..(25): SEQ ID NO: 1757; WAN024CGG-3_at; Start 680; Stop 704
ctctctgtgtggaaatgtttgcgac

SEQ ID NO: 117530 - DNA, 25 bp, Artificial
  probe
  misc_feature (1)..(25): SEQ ID NO: 1757; WAN024CGG-3_at; Start 38; Stop 62
ttatcgcgctggatcctgcggcgga

SEQ ID NO: 117531 - DNA, 25 bp, Artificial
  probe
  misc_feature (1)..(25): SEQ ID NO: 1757; WAN024CGG-3_at; Start 133; Stop 157
gcagaccgttgcgatgtcctcactt

SEQ ID NO: 117532 - DNA, 25 bp, Artificial
  probe
  misc_feature (1)..(25): SEQ ID NO: 1757; WAN024CGG-3_at; Start 359; Stop 383
actatgtcctcaagactgcgactgg

SEQ ID NO: 117533 - DNA, 25 bp, Artificial
  probe
  misc_feature (1)..(25): SEQ ID NO: 1757; WAN024CGG-3_at; Start 740; Stop 764
gaccacataactctgggcactattc

SEQ ID NO: 117534 - DNA, 25 bp, Artificial
  probe
  misc_feature (1)..(25): SEQ ID NO: 1757; WAN024CGG-3_at; Start 755; Stop 779
ggcactattctattgaagcctgtga

SEQ ID NO: 117535 - DNA, 25 bp, Artificial
  probe
  misc_feature (1)..(25): SEQ ID NO: 1757; WAN024CGG-3_at; Start 525; Stop 549
tggcaaggaggtgacgtttttccca

SEQ ID NO: 117536 - DNA, 25 bp, Artificial
  probe
  misc_feature (1)..(25): SEQ ID NO: 1757; WAN024CGG-3_at; Start 633; Stop 657
taaagctatggcagtgcgaatcgca

SEQ ID NO: 117537 - DNA, 25 bp, Artificial
  probe
  misc_feature (1)..(25): SEQ ID NO: 1757; WAN024CGG-3_at; Start 9; Stop 33
catttctgctatctacatgggccac

SEQ ID NO: 117538 - DNA, 25 bp, Artificial
  probe
  misc_feature (1)..(25): SEQ ID NO: 1757; WAN024CGG-3_at; Start 192; Stop 216
tgccgttatcaaggatggacaactc

SEQ ID NO: 117539 - DNA, 25 bp, Artificial
  probe
  misc_feature (1)..(25): SEQ ID NO: 1757; WAN024CGG-3_at; Start 427; Stop 451
gacttggaagcagcctatgcgctag

SEQ ID NO: 117540 - DNA, 25 bp, Artificial
  probe
  misc_feature (1)..(25): SEQ ID NO: 1757; WAN024CGG-3_at; Start 545; Stop 569
tcccagttcaggaaaatatccaccg

SEQ ID NO: 117541 - DNA, 25 bp, Artificial
  probe
  misc_feature (1)..(25): SEQ ID NO: 1757; WAN024CGG-3_at; Start 175; Stop 199
gacgctgacggtttggatgccgtta

SEQ ID NO: 117542 - DNA, 25 bp, Artificial
  probe
  misc_feature (1)..(25): SEQ ID NO: 1757; WAN024CGG-3_at; Start 810; Stop 834
tgttctcggagcaccattaccagtc

SEQ ID NO: 117543 - DNA, 25 bp, Artificial
  probe
  misc_feature (1)..(25): SEQ ID NO: 1757; WAN024CGG-3_at; Start 207; Stop 231
tggacaactccctcaaggaacagat

SEQ ID NO: 117544 - DNA, 25 bp, Artificial
  probe
  misc_feature (1)..(25): SEQ ID NO: 1757; WAN024CGG-3_at; Start 288; Stop 312
tcaagtcactgtggcaccctacaag

SEQ ID NO: 117545 - DNA, 25 bp, Artificial
  probe
  misc_feature (1)..(25): SEQ ID NO: 4030; WAN024CGG-5_at; Start 371; Stop 395
ccatggctatcggtgaagctggagc

SEQ ID NO: 117546 - DNA, 25 bp, Artificial
  probe
  misc_feature (1)..(25): SEQ ID NO: 4030; WAN024CGG-5_at; Start 41; Stop 65
cagtaatttccatcatcatgggctc

SEQ ID NO: 117547 - DNA, 25 bp, Artificial
  probe
  misc_feature (1)..(25): SEQ ID NO: 4030; WAN024CGG-5_at; Start 321; Stop 345
ggattcactctattctatcgttcag

SEQ ID NO: 117548 - DNA, 25 bp, Artificial
  probe
  misc_feature (1)..(25): SEQ ID NO: 4030; WAN024CGG-5_at; Start 359; Stop 383
tgcctgttgcgaccatggctatcgg

SEQ ID NO: 117549 - DNA, 25 bp, Artificial
  probe
  misc_feature (1)..(25): SEQ ID NO: 4030; WAN024CGG-5_at; Start 109; Stop 133
gaccgcttcggtgtagcctacgaaa

SEQ ID NO: 117550 - DNA, 25 bp, Artificial
  probe
  misc_feature (1)..(25): SEQ ID NO: 4030; WAN024CGG-5_at; Start 56; Stop 80
tcatgggctcaaaatccgactgggc

SEQ ID NO: 117551 - DNA, 25 bp, Artificial
  probe
  misc_feature (1)..(25): SEQ ID NO: 4030; WAN024CGG-5_at; Start 306; Stop 330
tgctcttagtggagtggattcactc

SEQ ID NO: 117552 - DNA, 25 bp, Artificial
  probe
  misc_feature (1)..(25): SEQ ID NO: 4030; WAN024CGG-5_at; Start 430; Stop 454
tctgtagaagataagtccattgcgg

SEQ ID NO: 117553 - DNA, 25 bp, Artificial
  probe
  misc_feature (1)..(25): SEQ ID NO: 4030; WAN024CGG-5_at; Start 392; Stop 416
gagcgactaacgcagctctctttgc

SEQ ID NO: 117554 - DNA, 25 bp, Artificial
  probe
  misc_feature (1)..(25): SEQ ID NO: 4030; WAN024CGG-5_at; Start 192; Stop 216
ccgtagtcgtggcatcaagatcatc

SEQ ID NO: 117555 - DNA, 25 bp, Artificial
  probe
  misc_feature (1)..(25): SEQ ID NO: 4030; WAN024CGG-5_at; Start 470; Stop 494
ttgctgaagaacaaggaaaaatcgc

SEQ ID NO: 117556 - DNA, 25 bp, Artificial
  probe
  misc_feature (1)..(25): SEQ ID NO: 4030; WAN024CGG-5_at; Start 178; Stop 202
catgcagaagaagcccgtagtcgtg

SEQ ID NO: 117557 - DNA, 25 bp, Artificial
  probe
  misc_feature (1)..(25): SEQ ID NO: 4030; WAN024CGG-5_at; Start 24; Stop 48
aggagaagaaatgaaaccagtaatt

SEQ ID NO: 117558 - DNA, 25 bp, Artificial
  probe
  misc_feature (1)..(25): SEQ ID NO: 4030; WAN024CGG-5_at; Start 285; Stop 309
tggtgtgccagtcaagtctcgtgct

SEQ ID NO: 117559 - DNA, 25 bp, Artificial
  probe
  misc_feature (1)..(25): SEQ ID NO: 4030; WAN024CGG-5_at; Start 333; Stop 357
ttctatcgttcagatgccgggtggg

SEQ ID NO: 117560 - DNA, 25 bp, Artificial
  probe
  misc_feature (1)..(25): SEQ ID NO: 4030; WAN024CGG-5_at; Start 138; Stop 162
agttgtttccgcacaccgtacacca

SEQ ID NO: 117561 - DNA, 25 bp, Artificial
  probe
  misc_feature (1)..(25): SEQ ID NO: 4030; WAN024CGG-5_at; Start 97; Stop 121
gcagaagtcctagaccgcttcggtg

SEQ ID NO: 117562 - DNA, 25 bp, Artificial
  probe
  misc_feature (1)..(25): SEQ ID NO: 4030; WAN024CGG-5_at; Start 225; Stop 249
tgctggtggcgcagcgcatttgcca

SEQ ID NO: 117563 - DNA, 25 bp, Artificial
  probe
  misc_feature (1)..(25): SEQ ID NO: 4030; WAN024CGG-5_at; Start 443; Stop 467
agtccattgcggatgcacttgccaa

SEQ ID NO: 117564 - DNA, 25 bp, Artificial
  probe
  misc_feature (1)..(25): SEQ ID NO: 4030; WAN024CGG-5_at; Start 380; Stop 404
tcggtgaagctggagcgactaacgc

SEQ ID NO: 117565 - DNA, 25 bp, Artificial
  probe
  misc_feature (1)..(25): SEQ ID NO: 4030; WAN024CGG-5_at; Start 213; Stop 237
catcatcgcaggtgctggtggcgca

SEQ ID NO: 117566 - DNA, 25 bp, Artificial
  probe
  misc_feature (1)..(25): SEQ ID NO: 4030; WAN024CGG-5_at; Start 170; Stop 194
tgttcaaacatgcagaagaagcccg

SEQ ID NO: 117567 - DNA, 25 bp, Artificial
  probe
  misc_feature (1)..(25): SEQ ID NO: 4030; WAN024CGG-5_at; Start 241; Stop 265
catttgccaggcatggtagctgcca

SEQ ID NO: 117568 - DNA, 25 bp, Artificial
  probe
  misc_feature (1)..(25): SEQ ID NO: 4030; WAN024CGG-5_at; Start 296; Stop 320
tcaagtctcgtgctcttagtggagt

SEQ ID NO: 117569 - DNA, 25 bp, Artificial
  probe
  misc_feature (1)..(25): SEQ ID NO: 4030; WAN024CGG-5_at; Start 270; Stop 294
aacccttccagtcattggtgtgcca

SEQ ID NO: 117570 - DNA, 25 bp, Artificial
  probe
  misc_feature (1)..(25): SEQ ID NO: 4030; WAN024CGG-5_at; Start 153; Stop 177
ccgtacaccagacctcatgttcaaa

SEQ ID NO: 117571 - DNA, 25 bp, Artificial
  probe
  misc_feature (1)..(25): SEQ ID NO: 4030; WAN024CGG-5_at; Start 83; Stop 107
ccatgcaaaaaacagcagaagtcct

SEQ ID NO: 117572 - DNA, 25 bp, Artificial
  probe
  misc_feature (1)..(25): SEQ ID NO: 4030; WAN024CGG-5_at; Start 417; Stop 441
cctccgtctcctctctgtagaagat

SEQ ID NO: 117573 - DNA, 25 bp, Artificial
  probe
  misc_feature (1)..(25): SEQ ID NO: 4030; WAN024CGG-5_at; Start 493; Stop 517
gcagaggagtcgtcaaatgagctca

SEQ ID NO: 117574 - DNA, 25 bp, Artificial
  probe
  misc_feature (1)..(25): SEQ ID NO: 4030; WAN024CGG-5_at; Start 256; Stop 280
gtagctgccaaaacaacccttccag

SEQ ID NO: 117575 - DNA, 25 bp, Artificial
  probe
  misc_feature (1)..(25): SEQ ID NO: 4030; WAN024CGG-5_at; Start 484; Stop 508
ggaaaaatcgcagaggagtcgtcaa

SEQ ID NO: 117576 - DNA, 25 bp, Artificial
  probe
  misc_feature (1)..(25): SEQ ID NO: 4030; WAN024CGG-5_at; Start 65; Stop 89
caaaatccgactgggcaaccatgca

SEQ ID NO: 117577 - DNA, 25 bp, Artificial
  probe
  misc_feature (1)..(25): SEQ ID NO: 4030; WAN024CGG-5_at; Start 206; Stop 230
tcaagatcatcatcgcaggtgctgg

SEQ ID NO: 117578 - DNA, 25 bp, Artificial
  probe
  misc_feature (1)..(25): SEQ ID NO: 4030; WAN024CGG-5_at; Start 454; Stop 478
gatgcacttgccaactttgctgaag

SEQ ID NO: 117579 - DNA, 25 bp, Artificial
  probe
  misc_feature (1)..(25): SEQ ID NO: 2473; WAN024CGH_at; Start 41; Stop 65
aagagttgaagctacgtttgacatc

SEQ ID NO: 117580 - DNA, 25 bp, Artificial
  probe
  misc_feature (1)..(25): SEQ ID NO: 2473; WAN024CGH_at; Start 120; Stop 144
catgcctgaagctggcgaagagttc

SEQ ID NO: 117581 - DNA, 25 bp, Artificial
  probe
  misc_feature (1)..(25): SEQ ID NO: 2473; WAN024CGH_at; Start 136; Stop 160
gaagagttcactttaccgcctttga

SEQ ID NO: 117582 - DNA, 25 bp, Artificial
  probe
  misc_feature (1)..(25): SEQ ID NO: 2473; WAN024CGH_at; Start 64; Stop 88
tctcatcaagctgcaactgtggaag

SEQ ID NO: 117583 - DNA, 25 bp, Artificial
  probe
  misc_feature (1)..(25): SEQ ID NO: 2473; WAN024CGH_at; Start 336; Stop 360
caaggacaagaaaacttccaagaag

SEQ ID NO: 117584 - DNA, 25 bp, Artificial
  probe
  misc_feature (1)..(25): SEQ ID NO: 2473; WAN024CGH_at; Start 178; Stop 202
gttcacggcgccttgcagcagtatg

SEQ ID NO: 117585 - DNA, 25 bp, Artificial
  probe
  misc_feature (1)..(25): SEQ ID NO: 2473; WAN024CGH_at; Start 244; Stop 268
gaatacgtggacaatggtggagacc

SEQ ID NO: 117586 - DNA, 25 bp, Artificial
  probe
  misc_feature (1)..(25): SEQ ID NO: 2473; WAN024CGH_at; Start 114; Stop 138
gattttcatgcctgaagctggcgaa

SEQ ID NO: 117587 - DNA, 25 bp, Artificial
  probe
  misc_feature (1)..(25): SEQ ID NO: 2473; WAN024CGH_at; Start 351; Stop 375
ttccaagaagaaaatgacagtagtc

SEQ ID NO: 117588 - DNA, 25 bp, Artificial
  probe
  misc_feature (1)..(25): SEQ ID NO: 2473; WAN024CGH_at; Start 2; Stop 26
tggcgttaaaatacacaacttggaa

SEQ ID NO: 117589 - DNA, 25 bp, Artificial
  probe
  misc_feature (1)..(25): SEQ ID NO: 2473; WAN024CGH_at; Start 220; Stop 244
gaggatgtctatgatttatacgatg

SEQ ID NO: 117590 - DNA, 25 bp, Artificial
  probe
  misc_feature (1)..(25): SEQ ID NO: 2473; WAN024CGH_at; Start 293; Stop 317
taatgccactctttgaagtatcggg

SEQ ID NO: 117591 - DNA, 25 bp, Artificial
  probe
  misc_feature (1)..(25): SEQ ID NO: 2473; WAN024CGH_at; Start 313; Stop 337
tcgggttttactccacgaggaagca

SEQ ID NO: 117592 - DNA, 25 bp, Artificial
  probe
  misc_feature (1)..(25): SEQ ID NO: 2473; WAN024CGH_at; Start 102; Stop 126
gaacttgctaaagattttcatgcct

SEQ ID NO: 117593 - DNA, 25 bp, Artificial
  probe
  misc_feature (1)..(25): SEQ ID NO: 2473; WAN024CGH_at; Start 165; Stop 189
tatgctgttgttagttcacggcgcc

SEQ ID NO: 117594 - DNA, 25 bp, Artificial
  probe
  misc_feature (1)..(25): SEQ ID NO: 2473; WAN024CGH_at; Start 90; Stop 114
aaaaatcggcatgaacttgctaaag

SEQ ID NO: 117595 - DNA, 25 bp, Artificial
  probe
  misc_feature (1)..(25): SEQ ID NO: 2473; WAN024CGH_at; Start 75; Stop 99
tgcaactgtggaagaaaaaatcggc

SEQ ID NO: 117596 - DNA, 25 bp, Artificial
  probe
  misc_feature (1)..(25): SEQ ID NO: 2473; WAN024CGH_at; Start 326; Stop 350
cacgaggaagcaaggacaagaaaac

SEQ ID NO: 117597 - DNA, 25 bp, Artificial
  probe
  misc_feature (1)..(25): SEQ ID NO: 2473; WAN024CGH_at; Start 187; Stop 211
gccttgcagcagtatgaacatgggt

SEQ ID NO: 117598 - DNA, 25 bp, Artificial
  probe
  misc_feature (1)..(25): SEQ ID NO: 2473; WAN024CGH_at; Start 53; Stop 77
tacgtttgacatctcatcaagctgc

SEQ ID NO: 117599 - DNA, 25 bp, Artificial
  probe
  misc_feature (1)..(25): SEQ ID NO: 2473; WAN024CGH_at; Start 192; Stop 216
gcagcagtatgaacatgggtattct

SEQ ID NO: 117600 - DNA, 25 bp, Artificial
  probe
  misc_feature (1)..(25): SEQ ID NO: 2473; WAN024CGH_at; Start 127; Stop 151
gaagctggcgaagagttcactttac

SEQ ID NO: 117601 - DNA, 25 bp, Artificial
  probe
  misc_feature (1)..(25): SEQ ID NO: 2473; WAN024CGH_at; Start 306; Stop 330
tgaagtatcgggttttactccacga

SEQ ID NO: 117602 - DNA, 25 bp, Artificial
  probe
  misc_feature (1)..(25): SEQ ID NO: 2473; WAN024CGH_at; Start 15; Stop 39
cacaacttggaaagttactgacgaa

SEQ ID NO: 117603 - DNA, 25 bp, Artificial
  probe
  misc_feature (1)..(25): SEQ ID NO: 2473; WAN024CGH_at; Start 205; Stop 229
catgggtattcttttgaggatgtct

SEQ ID NO: 117604 - DNA, 25 bp, Artificial
  probe
  misc_feature (1)..(25): SEQ ID NO: 2473; WAN024CGH_at; Start 279; Stop 303
catgacagaggttttaatgccactc

SEQ ID NO: 117605 - DNA, 25 bp, Artificial
  probe
  misc_feature (1)..(25): SEQ ID NO: 2473; WAN024CGH_at; Start 170; Stop 194
tgttgttagttcacggcgccttgca

SEQ ID NO: 117606 - DNA, 25 bp, Artificial
  probe
  misc_feature (1)..(25): SEQ ID NO: 2473; WAN024CGH_at; Start 151; Stop 175
ccgcctttgaaagttatgctgttgt

SEQ ID NO: 117607 - DNA, 25 bp, Artificial
  probe
  misc_feature (1)..(25): SEQ ID NO: 2473; WAN024CGH_at; Start 265; Stop 289
gaccaaacaacattcatgacagagg

SEQ ID NO: 117608 - DNA, 25 bp, Artificial
  probe
  misc_feature (1)..(25): SEQ ID NO: 2473; WAN024CGH_at; Start 232; Stop 256
gatttatacgatgaatacgtggaca

SEQ ID NO: 117609 - DNA, 25 bp, Artificial
  probe
  misc_feature (1)..(25): SEQ ID NO: 2473; WAN024CGH_at; Start 321; Stop 345
tactccacgaggaagcaaggacaag

SEQ ID NO: 117610 - DNA, 25 bp, Artificial
  probe
  misc_feature (1)..(25): SEQ ID NO: 2473; WAN024CGH_at; Start 81; Stop 105
tgtggaagaaaaaatcggcatgaac

SEQ ID NO: 117611 - DNA, 25 bp, Artificial
  probe
  misc_feature (1)..(25): SEQ ID NO: 2473; WAN024CGH_at; Start 258; Stop 282
tggtggagaccaaacaacattcatg

SEQ ID NO: 117612 - DNA, 25 bp, Artificial
  probe
  misc_feature (1)..(25): SEQ ID NO: 2473; WAN024CGH_at; Start 32; Stop 56
ctgacgaaaaagagttgaagctacg

SEQ ID NO: 117613 - DNA, 25 bp, Artificial
  probe
  misc_feature (1)..(25): SEQ ID NO: 3112; WAN024CGI_at; Start 1; Stop 25
atgtttttggacatcgggggcaagc

SEQ ID NO: 117614 - DNA, 25 bp, Artificial
  probe
  misc_feature (1)..(25): SEQ ID NO: 3112; WAN024CGI_at; Start 272; Stop 296
tgttgcataaggaacggatgcgtga

SEQ ID NO: 117615 - DNA, 25 bp, Artificial
  probe
  misc_feature (1)..(25): SEQ ID NO: 3112; WAN024CGI_at; Start 24; Stop 48
gcctcttgatttttgggatttgacg

SEQ ID NO: 117616 - DNA, 25 bp, Artificial
  probe
  misc_feature (1)..(25): SEQ ID NO: 3112; WAN024CGI_at; Start 232; Stop 256
caacaagcggtagaactggaacgac

SEQ ID NO: 117617 - DNA, 25 bp, Artificial
  probe
  misc_feature (1)..(25): SEQ ID NO: 3112; WAN024CGI_at; Start 238; Stop 262
gcggtagaactggaacgacagaaac

SEQ ID NO: 117618 - DNA, 25 bp, Artificial
  probe
  misc_feature (1)..(25): SEQ ID NO: 3112; WAN024CGI_at; Start 162; Stop 186
tttattactgtccaatgacgctaag

SEQ ID NO: 117619 - DNA, 25 bp, Artificial
  probe
  misc_feature (1)..(25): SEQ ID NO: 3112; WAN024CGI_at; Start 180; Stop 204
cgctaagattgttgagttctgggag

SEQ ID NO: 117620 - DNA, 25 bp, Artificial
  probe
  misc_feature (1)..(25): SEQ ID NO: 3112; WAN024CGI_at; Start 191; Stop 215
ttgagttctgggagtatgcgcctga

SEQ ID NO: 117621 - DNA, 25 bp, Artificial
  probe
  misc_feature (1)..(25): SEQ ID NO: 3112; WAN024CGI_at; Start 136; Stop 160
tcgcagatgatttccaatcacgttt

SEQ ID NO: 117622 - DNA, 25 bp, Artificial
  probe
  misc_feature (1)..(25): SEQ ID NO: 3112; WAN024CGI_at; Start 117; Stop 141
tattgactcatacagactttcgcag

SEQ ID NO: 117623 - DNA, 25 bp, Artificial
  probe
  misc_feature (1)..(25): SEQ ID NO: 3112; WAN024CGI_at; Start 249; Stop 273
ggaacgacagaaacaagcacttttg

SEQ ID NO: 117624 - DNA, 25 bp, Artificial
  probe
  misc_feature (1)..(25): SEQ ID NO: 3112; WAN024CGI_at; Start 150; Stop 174
caatcacgtttctttattactgtcc

SEQ ID NO: 117625 - DNA, 25 bp, Artificial
  probe
  misc_feature (1)..(25): SEQ ID NO: 3112; WAN024CGI_at; Start 44; Stop 68
tgacggtgcttgaaatcagggaaat

SEQ ID NO: 117626 - DNA, 25 bp, Artificial
  probe
  misc_feature (1)..(25): SEQ ID NO: 3112; WAN024CGI_at; Start 167; Stop 191
tactgtccaatgacgctaagattgt

SEQ ID NO: 117627 - DNA, 25 bp, Artificial
  probe
  misc_feature (1)..(25): SEQ ID NO: 3112; WAN024CGI_at; Start 31; Stop 55
gatttttgggatttgacggtgcttg

SEQ ID NO: 117628 - DNA, 25 bp, Artificial
  probe
  misc_feature (1)..(25): SEQ ID NO: 3112; WAN024CGI_at; Start 292; Stop 316
cgtgaatttgcagagagacataatc

SEQ ID NO: 117629 - DNA, 25 bp, Artificial
  probe
  misc_feature (1)..(25): SEQ ID NO: 3112; WAN024CGI_at; Start 59; Stop 83
tcagggaaatgatagaaagctacaa

SEQ ID NO: 117630 - DNA, 25 bp, Artificial
  probe
  misc_feature (1)..(25): SEQ ID NO: 3112; WAN024CGI_at; Start 301; Stop 325
gcagagagacataatcgaaaaagga

SEQ ID NO: 117631 - DNA, 25 bp, Artificial
  probe
  misc_feature (1)..(25): SEQ ID NO: 3112; WAN024CGI_at; Start 324; Stop 348
gaaggaggaagtaaatggcaactct

SEQ ID NO: 117632 - DNA, 25 bp, Artificial
  probe
  misc_feature (1)..(25): SEQ ID NO: 3112; WAN024CGI_at; Start 279; Stop 303
taaggaacggatgcgtgaatttgca

SEQ ID NO: 117633 - DNA, 25 bp, Artificial
  probe
  misc_feature (1)..(25): SEQ ID NO: 3112; WAN024CGI_at; Start 79; Stop 103
tacaaccgtgtcaaaacccaagagc

SEQ ID NO: 117634 - DNA, 25 bp, Artificial
  probe
  misc_feature (1)..(25): SEQ ID NO: 3112; WAN024CGI_at; Start 218; Stop 242
tatttgtagaagaacaacaagcggt

SEQ ID NO: 117635 - DNA, 25 bp, Artificial
  probe
  misc_feature (1)..(25): SEQ ID NO: 3112; WAN024CGI_at; Start 205; Stop 229
tatgcgcctgagttatttgtagaag

SEQ ID NO: 117636 - DNA, 25 bp, Artificial
  probe
  misc_feature (1)..(25): SEQ ID NO: 3112; WAN024CGI_at; Start 95; Stop 119
cccaagagcgtaaagagaagattat

SEQ ID NO: 117637 - DNA, 25 bp, Artificial
  probe
  misc_feature (1)..(25): SEQ ID NO: 3112; WAN024CGI_at; Start 109; Stop 133
gagaagattattgactcatacagac

SEQ ID NO: 117638 - DNA, 25 bp, Artificial
  probe
  misc_feature (1)..(25): SEQ ID NO: 3112; WAN024CGI_at; Start 87; Stop 111
tgtcaaaacccaagagcgtaaagag

SEQ ID NO: 117639 - DNA, 25 bp, Artificial
  probe
  misc_feature (1)..(25): SEQ ID NO: 3112; WAN024CGI_at; Start 226; Stop 250
gaagaacaacaagcggtagaactgg

SEQ ID NO: 117640 - DNA, 25 bp, Artificial
  probe
  misc_feature (1)..(25): SEQ ID NO: 3112; WAN024CGI_at; Start 286; Stop 310
cggatgcgtgaatttgcagagagac

SEQ ID NO: 117641 - DNA, 25 bp, Artificial
  probe
  misc_feature (1)..(25): SEQ ID NO: 3112; WAN024CGI_at; Start 18; Stop 42
gggcaagcctcttgatttttgggat

SEQ ID NO: 117642 - DNA, 25 bp, Artificial
  probe
  misc_feature (1)..(25): SEQ ID NO: 3112; WAN024CGI_at; Start 310; Stop 334
cataatcgaaaaaggaaggaggaag

SEQ ID NO: 117643 - DNA, 25 bp, Artificial
  probe
  misc_feature (1)..(25): SEQ ID NO: 3112; WAN024CGI_at; Start 262; Stop 286
caagcacttttgttgcataaggaac

SEQ ID NO: 117644 - DNA, 25 bp, Artificial
  probe
  misc_feature (1)..(25): SEQ ID NO: 3112; WAN024CGI_at; Start 127; Stop 151
tacagactttcgcagatgatttcca

SEQ ID NO: 117645 - DNA, 25 bp, Artificial
  probe
  misc_feature (1)..(25): SEQ ID NO: 3112; WAN024CGI_at; Start 69; Stop 93
gatagaaagctacaaccgtgtcaaa

SEQ ID NO: 117646 - DNA, 25 bp, Artificial
  probe
  misc_feature (1)..(25): SEQ ID NO: 3112; WAN024CGI_at; Start 196; Stop 220
ttctgggagtatgcgcctgagttat

SEQ ID NO: 117647 - DNA, 25 bp, Artificial
  probe
  misc_feature (1)..(25): SEQ ID NO: 3419; WAN024CGJ_at; Start 411; Stop 435
tgagtccactgaagcctttaagaag

SEQ ID NO: 117648 - DNA, 25 bp, Artificial
  probe
  misc_feature (1)..(25): SEQ ID NO: 3419; WAN024CGJ_at; Start 821; Stop 845
tagacgacgctggagattcagcagg

SEQ ID NO: 117649 - DNA, 25 bp, Artificial
  probe
  misc_feature (1)..(25): SEQ ID NO: 3419; WAN024CGJ_at; Start 1128; Stop 1152
caagaaaggttttgatgcagctaac

SEQ ID NO: 117650 - DNA, 25 bp, Artificial
  probe
  misc_feature (1)..(25): SEQ ID NO: 3419; WAN024CGJ_at; Start 352; Stop 376
ttactagggaacaccgaagcgattg

SEQ ID NO: 117651 - DNA, 25 bp, Artificial
  probe
  misc_feature (1)..(25): SEQ ID NO: 3419; WAN024CGJ_at; Start 1034; Stop 1058
tcttgccagaagtcgagttgaccga

SEQ ID NO: 117652 - DNA, 25 bp, Artificial
  probe
  misc_feature (1)..(25): SEQ ID NO: 3419; WAN024CGJ_at; Start 147; Stop 171
ggttaacgataatgccaacgctatg

SEQ ID NO: 117653 - DNA, 25 bp, Artificial
  probe
  misc_feature (1)..(25): SEQ ID NO: 3419; WAN024CGJ_at; Start 304; Stop 328
ggttcagggcgcacgattacagacg

SEQ ID NO: 117654 - DNA, 25 bp, Artificial
  probe
  misc_feature (1)..(25): SEQ ID NO: 3419; WAN024CGJ_at; Start 501; Stop 525
tattctggaacaggctacagccaag

SEQ ID NO: 117655 - DNA, 25 bp, Artificial
  probe
  misc_feature (1)..(25): SEQ ID NO: 3419; WAN024CGJ_at; Start 51; Stop 75
tgggatgtattcaacgcagacggct

SEQ ID NO: 117656 - DNA, 25 bp, Artificial
  probe
  misc_feature (1)..(25): SEQ ID NO: 3419; WAN024CGJ_at; Start 363; Stop 387
caccgaagcgattgaggacctagga

SEQ ID NO: 117657 - DNA, 25 bp, Artificial
  probe
  misc_feature (1)..(25): SEQ ID NO: 3419; WAN024CGJ_at; Start 675; Stop 699
gaacgttactgctaaactcgctgag

SEQ ID NO: 117658 - DNA, 25 bp, Artificial
  probe
  misc_feature (1)..(25): SEQ ID NO: 3419; WAN024CGJ_at; Start 1056; Stop 1080
cgacatggacaacaaattcaagagc

SEQ ID NO: 117659 - DNA, 25 bp, Artificial
  probe
  misc_feature (1)..(25): SEQ ID NO: 3419; WAN024CGJ_at; Start 429; Stop 453
taagaagttcgcaaacggacagagc

SEQ ID NO: 117660 - DNA, 25 bp, Artificial
  probe
  misc_feature (1)..(25): SEQ ID NO: 3419; WAN024CGJ_at; Start 184; Stop 208
ggtgaggctaccaactacggtgcag

SEQ ID NO: 117661 - DNA, 25 bp, Artificial
  probe
  misc_feature (1)..(25): SEQ ID NO: 3419; WAN024CGJ_at; Start 1010; Stop 1034
gcggtggcggacctttcaaagacat

SEQ ID NO: 117662 - DNA, 25 bp, Artificial
  probe
  misc_feature (1)..(25): SEQ ID NO: 3419; WAN024CGJ_at; Start 588; Stop 612
ggacgcagcattgaaccttggtaac

SEQ ID NO: 117663 - DNA, 25 bp, Artificial
  probe
  misc_feature (1)..(25): SEQ ID NO: 3419; WAN024CGJ_at; Start 950; Stop 974
caaaagacgacgatgcaggcggttc

SEQ ID NO: 117664 - DNA, 25 bp, Artificial
  probe
  misc_feature (1)..(25): SEQ ID NO: 3419; WAN024CGJ_at; Start 771; Stop 795
taacgccatgaaggatgctgcaggc

SEQ ID NO: 117665 - DNA, 25 bp, Artificial
  probe
  misc_feature (1)..(25): SEQ ID NO: 3419; WAN024CGJ_at; Start 104; Stop 128
tcaagcgacagatgggcgagagttc

SEQ ID NO: 117666 - DNA, 25 bp, Artificial
  probe
  misc_feature (1)..(25): SEQ ID NO: 3419; WAN024CGJ_at; Start 448; Stop 472
cagagctggcaacagttggattacc

SEQ ID NO: 117667 - DNA, 25 bp, Artificial
  probe
  misc_feature (1)..(25): SEQ ID NO: 3419; WAN024CGJ_at; Start 379; Stop 403
gacctaggaatcaacgtcaacgtgg

SEQ ID NO: 117668 - DNA, 25 bp, Artificial
  probe
  misc_feature (1)..(25): SEQ ID NO: 3419; WAN024CGJ_at; Start 336; Stop 360
gcggattcgctcaggtttactaggg

SEQ ID NO: 117669 - DNA, 25 bp, Artificial
  probe
  misc_feature (1)..(25): SEQ ID NO: 3419; WAN024CGJ_at; Start 4; Stop 28
gctaagttcgctggttttgcaatcc

SEQ ID NO: 117670 - DNA, 25 bp, Artificial
  probe
  misc_feature (1)..(25): SEQ ID NO: 3419; WAN024CGJ_at; Start 66; Stop 90
gcagacggctcttgaagtatcagcg

SEQ ID NO: 117671 - DNA, 25 bp, Artificial
  probe
  misc_feature (1)..(25): SEQ ID NO: 3419; WAN024CGJ_at; Start 569; Stop 593
tatttaagtcgctgatgaaggacgc

SEQ ID NO: 117672 - DNA, 25 bp, Artificial
  probe
  misc_feature (1)..(25): SEQ ID NO: 3419; WAN024CGJ_at; Start 259; Stop 283
gcctataccgctaagatgttgcaga

SEQ ID NO: 117673 - DNA, 25 bp, Artificial
  probe
  misc_feature (1)..(25): SEQ ID NO: 3419; WAN024CGJ_at; Start 803; Stop 827
gagaccttgctgacgcagtagacga

SEQ ID NO: 117674 - DNA, 25 bp, Artificial
  probe
  misc_feature (1)..(25): SEQ ID NO: 3419; WAN024CGJ_at; Start 284; Stop 308
catcggcagttgttgctgaaggttc

SEQ ID NO: 117675 - DNA, 25 bp, Artificial
  probe
  misc_feature (1)..(25): SEQ ID NO: 3419; WAN024CGJ_at; Start 85; Stop 109
tcagcgtctatgaaccaaatcaagc

SEQ ID NO: 117676 - DNA, 25 bp, Artificial
  probe
  misc_feature (1)..(25): SEQ ID NO: 3419; WAN024CGJ_at; Start 864; Stop 888
tggagactcagccaaaaacgctaag

SEQ ID NO: 117677 - DNA, 25 bp, Artificial
  probe
  misc_feature (1)..(25): SEQ ID NO: 3419; WAN024CGJ_at; Start 236; Stop 260
tcaaagataccaacaagctaagcgc

SEQ ID NO: 117678 - DNA, 25 bp, Artificial
  probe
  misc_feature (1)..(25): SEQ ID NO: 3419; WAN024CGJ_at; Start 321; Stop 345
tacagacgttatggagcggattcgc

SEQ ID NO: 117679 - DNA, 25 bp, Artificial
  probe
  misc_feature (1)..(25): SEQ ID NO: 3419; WAN024CGJ_at; Start 544; Stop 568
aattctgtaaatggtcgtatcagcc

SEQ ID NO: 117680 - DNA, 25 bp, Artificial
  probe
  misc_feature (1)..(25): SEQ ID NO: 3419; WAN024CGJ_at; Start 754; Stop 778
gcagttggagacatgggtaacgcca

SEQ ID NO: 117681 - DNA, 25 bp, Artificial
  probe
  misc_feature (1)..(25): SEQ ID NO: 1705; WAN024CGK_at; Start 314; Stop 338
ttttcttaaacacttacctagctga

SEQ ID NO: 117682 - DNA, 25 bp, Artificial
  probe
  misc_feature (1)..(25): SEQ ID NO: 1705; WAN024CGK_at; Start 132; Stop 156
tgaactaactagcacagaataccgt

SEQ ID NO: 117683 - DNA, 25 bp, Artificial
  probe
  misc_feature (1)..(25): SEQ ID NO: 1705; WAN024CGK_at; Start 163; Stop 187
caggaaacacttaaggaacagacgg

SEQ ID NO: 117684 - DNA, 25 bp, Artificial
  probe
  misc_feature (1)..(25): SEQ ID NO: 1705; WAN024CGK_at; Start 397; Stop 421
gaactcatagcggttgatatcgcaa

SEQ ID NO: 117685 - DNA, 25 bp, Artificial
  probe
  misc_feature (1)..(25): SEQ ID NO: 1705; WAN024CGK_at; Start 356; Stop 380
cctacccaatggaacaaagtcaatt

SEQ ID NO: 117686 - DNA, 25 bp, Artificial
  probe
  misc_feature (1)..(25): SEQ ID NO: 1705; WAN024CGK_at; Start 438; Stop 462
aaagaacgttttggattcatggaca

SEQ ID NO: 117687 - DNA, 25 bp, Artificial
  probe
  misc_feature (1)..(25): SEQ ID NO: 1705; WAN024CGK_at; Start 111; Stop 135
cgacttggacgatgtttataatgaa

SEQ ID NO: 117688 - DNA, 25 bp, Artificial
  probe
  misc_feature (1)..(25): SEQ ID NO: 1705; WAN024CGK_at; Start 28; Stop 52
tcaacaaatttagaagaaatacaag

SEQ ID NO: 117689 - DNA, 25 bp, Artificial
  probe
  misc_feature (1)..(25): SEQ ID NO: 1705; WAN024CGK_at; Start 67; Stop 91
gatggaactgcattagctaaaagag

SEQ ID NO: 117690 - DNA, 25 bp, Artificial
  probe
  misc_feature (1)..(25): SEQ ID NO: 1705; WAN024CGK_at; Start 120; Stop 144
cgatgtttataatgaactaactagc

SEQ ID NO: 117691 - DNA, 25 bp, Artificial
  probe
  misc_feature (1)..(25): SEQ ID NO: 1705; WAN024CGK_at; Start 284; Stop 308
taaagctactttccaactttgatgg

SEQ ID NO: 117692 - DNA, 25 bp, Artificial
  probe
  misc_feature (1)..(25): SEQ ID NO: 1705; WAN024CGK_at; Start 303; Stop 327
tgatggatttcttttcttaaacact

SEQ ID NO: 117693 - DNA, 25 bp, Artificial
  probe
  misc_feature (1)..(25): SEQ ID NO: 1705; WAN024CGK_at; Start 206; Stop 230
tagttgctgaagtaataggaggact

SEQ ID NO: 117694 - DNA, 25 bp, Artificial
  probe
  misc_feature (1)..(25): SEQ ID NO: 1705; WAN024CGK_at; Start 444; Stop 468
cgttttggattcatggacagattca

SEQ ID NO: 117695 - DNA, 25 bp, Artificial
  probe
  misc_feature (1)..(25): SEQ ID NO: 1705; WAN024CGK_at; Start 99; Stop 123
cagggtattgaacgacttggacgat

SEQ ID NO: 117696 - DNA, 25 bp, Artificial
  probe
  misc_feature (1)..(25): SEQ ID NO: 1705; WAN024CGK_at; Start 91; Stop 115
gaaatcagcagggtattgaacgact

SEQ ID NO: 117697 - DNA, 25 bp, Artificial
  probe
  misc_feature (1)..(25): SEQ ID NO: 1705; WAN024CGK_at; Start 458; Stop 482
ggacagattcatccttatatactcg

SEQ ID NO: 117698 - DNA, 25 bp, Artificial
  probe
  misc_feature (1)..(25): SEQ ID NO: 1705; WAN024CGK_at; Start 244; Stop 268
gagtcttattacagaaattattggg

SEQ ID NO: 117699 - DNA, 25 bp, Artificial
  probe
  misc_feature (1)..(25): SEQ ID NO: 1705; WAN024CGK_at; Start 192; Stop 216
gatgaaacagagagtagttgctgaa

SEQ ID NO: 117700 - DNA, 25 bp, Artificial
  probe
  misc_feature (1)..(25): SEQ ID NO: 1705; WAN024CGK_at; Start 268; Stop 292
ggtgatactaagtttataaagctac

SEQ ID NO: 117701 - DNA, 25 bp, Artificial
  probe
  misc_feature (1)..(25): SEQ ID NO: 1705; WAN024CGK_at; Start 470; Stop 494
ccttatatactcgtggaatgatgat

SEQ ID NO: 117702 - DNA, 25 bp, Artificial
  probe
  misc_feature (1)..(25): SEQ ID NO: 1705; WAN024CGK_at; Start 388; Stop 412
tatgtatgggaactcatagcggttg

SEQ ID NO: 117703 - DNA, 25 bp, Artificial
  probe
  misc_feature (1)..(25): SEQ ID NO: 1705; WAN024CGK_at; Start 170; Stop 194
cacttaaggaacagacggaaaggat

SEQ ID NO: 117704 - DNA, 25 bp, Artificial
  probe
  misc_feature (1)..(25): SEQ ID NO: 1705; WAN024CGK_at; Start 143; Stop 167
gcacagaataccgtgaacaacagga

SEQ ID NO: 117705 - DNA, 25 bp, Artificial
  probe
  misc_feature (1)..(25): SEQ ID NO: 1705; WAN024CGK_at; Start 181; Stop 205
cagacggaaaggatgaaacagagag

SEQ ID NO: 117706 - DNA, 25 bp, Artificial
  probe
  misc_feature (1)..(25): SEQ ID NO: 1705; WAN024CGK_at; Start 7; Stop 31
gcagatcaattaaaagctatttcaa

SEQ ID NO: 117707 - DNA, 25 bp, Artificial
  probe
  misc_feature (1)..(25): SEQ ID NO: 1705; WAN024CGK_at; Start 221; Stop 245
taggaggactagaagaacgagaaga

SEQ ID NO: 117708 - DNA, 25 bp, Artificial
  probe
  misc_feature (1)..(25): SEQ ID NO: 1705; WAN024CGK_at; Start 154; Stop 178
cgtgaacaacaggaaacacttaagg

SEQ ID NO: 117709 - DNA, 25 bp, Artificial
  probe
  misc_feature (1)..(25): SEQ ID NO: 1705; WAN024CGK_at; Start 376; Stop 400
caattattgaattatgtatgggaac

SEQ ID NO: 117710 - DNA, 25 bp, Artificial
  probe
  misc_feature (1)..(25): SEQ ID NO: 1705; WAN024CGK_at; Start 328; Stop 352
tacctagctgaaataactaaagaaa

SEQ ID NO: 117711 - DNA, 25 bp, Artificial
  probe
  misc_feature (1)..(25): SEQ ID NO: 1705; WAN024CGK_at; Start 232; Stop 256
gaagaacgagaagagtcttattaca

SEQ ID NO: 117712 - DNA, 25 bp, Artificial
  probe
  misc_feature (1)..(25): SEQ ID NO: 1705; WAN024CGK_at; Start 53; Stop 77
aaattcttgtaggagatggaactgc

SEQ ID NO: 117713 - DNA, 25 bp, Artificial
  probe
  misc_feature (1)..(25): SEQ ID NO: 1705; WAN024CGK_at; Start 80; Stop 104
tagctaaaagagaaatcagcagggt

SEQ ID NO: 117714 - DNA, 25 bp, Artificial
  probe
  misc_feature (1)..(25): SEQ ID NO: 1705; WAN024CGK_at; Start 411; Stop 435
tgatatcgcaaagaaaaaacgagga

SEQ ID NO: 117715 - DNA, 25 bp, Artificial
  probe
  misc_feature (1)..(25): SEQ ID NO: 2330; WAN024CGL_at; Start 681; Stop 705
tcgaccgaatcgaaaatattcaaga

SEQ ID NO: 117716 - DNA, 25 bp, Artificial
  probe
  misc_feature (1)..(25): SEQ ID NO: 2330; WAN024CGL_at; Start 468; Stop 492
gaagggagggattctccaagaaatc

SEQ ID NO: 117717 - DNA, 25 bp, Artificial
  probe
  misc_feature (1)..(25): SEQ ID NO: 2330; WAN024CGL_at; Start 83; Stop 107
gaaaacaatccatgccttcctcctt

SEQ ID NO: 117718 - DNA, 25 bp, Artificial
  probe
  misc_feature (1)..(25): SEQ ID NO: 2330; WAN024CGL_at; Start 522; Stop 546
tcgttgggtaacctcgcaagttgcc

SEQ ID NO: 117719 - DNA, 25 bp, Artificial
  probe
  misc_feature (1)..(25): SEQ ID NO: 2330; WAN024CGL_at; Start 286; Stop 310
tatgaacttccttttcgtatggtgc

SEQ ID NO: 117720 - DNA, 25 bp, Artificial
  probe
  misc_feature (1)..(25): SEQ ID NO: 2330; WAN024CGL_at; Start 190; Stop 214
tatcgtgattttcccaatgactatc

SEQ ID NO: 117721 - DNA, 25 bp, Artificial
  probe
  misc_feature (1)..(25): SEQ ID NO: 2330; WAN024CGL_at; Start 548; Stop 572
tcgacagtagtcacaaaaaacaaag

SEQ ID NO: 117722 - DNA, 25 bp, Artificial
  probe
  misc_feature (1)..(25): SEQ ID NO: 2330; WAN024CGL_at; Start 537; Stop 561
gcaagttgccatcgacagtagtcac

SEQ ID NO: 117723 - DNA, 25 bp, Artificial
  probe
  misc_feature (1)..(25): SEQ ID NO: 2330; WAN024CGL_at; Start 104; Stop 128
ccttcaacttgccaaatacggagtg

SEQ ID NO: 117724 - DNA, 25 bp, Artificial
  probe
  misc_feature (1)..(25): SEQ ID NO: 2330; WAN024CGL_at; Start 336; Stop 360
cgaaactttagtgacgaatacagac

SEQ ID NO: 117725 - DNA, 25 bp, Artificial
  probe
  misc_feature (1)..(25): SEQ ID NO: 2330; WAN024CGL_at; Start 314; Stop 338
tagaagtggaagaaggaaaatacga

SEQ ID NO: 117726 - DNA, 25 bp, Artificial
  probe
  misc_feature (1)..(25): SEQ ID NO: 2330; WAN024CGL_at; Start 715; Stop 739
gctcaatcggtagttgatttcatct

SEQ ID NO: 117727 - DNA, 25 bp, Artificial
  probe
  misc_feature (1)..(25): SEQ ID NO: 2330; WAN024CGL_at; Start 663; Stop 687
gaaacagttatctattattcgaccg

SEQ ID NO: 117728 - DNA, 25 bp, Artificial
  probe
  misc_feature (1)..(25): SEQ ID NO: 2330; WAN024CGL_at; Start 115; Stop 139
ccaaatacggagtgttttgatcaaa

SEQ ID NO: 117729 - DNA, 25 bp, Artificial
  probe
  misc_feature (1)..(25): SEQ ID NO: 2330; WAN024CGL_at; Start 253; Stop 277
gaaacaagtcgaaaacaagatcctg

SEQ ID NO: 117730 - DNA, 25 bp, Artificial
  probe
  misc_feature (1)..(25): SEQ ID NO: 2330; WAN024CGL_at; Start 49; Stop 73
aaaggttggctttatatcatccgta

SEQ ID NO: 117731 - DNA, 25 bp, Artificial
  probe
  misc_feature (1)..(25): SEQ ID NO: 2330; WAN024CGL_at; Start 420; Stop 444
tcgtgacctgaaatacagtattggc

SEQ ID NO: 117732 - DNA, 25 bp, Artificial
  probe
  misc_feature (1)..(25): SEQ ID NO: 2330; WAN024CGL_at; Start 483; Stop 507
ccaagaaatctttgctcgctttaca

SEQ ID NO: 117733 - DNA, 25 bp, Artificial
  probe
  misc_feature (1)..(25): SEQ ID NO: 2330; WAN024CGL_at; Start 172; Stop 196
aatcagctcaaaaaactttatcgtg

SEQ ID NO: 117734 - DNA, 25 bp, Artificial
  probe
  misc_feature (1)..(25): SEQ ID NO: 2330; WAN024CGL_at; Start 300; Stop 324
tcgtatggtgcgtttagaagtggaa

SEQ ID NO: 117735 - DNA, 25 bp, Artificial
  probe
  misc_feature (1)..(25): SEQ ID NO: 2330; WAN024CGL_at; Start 589; Stop 613
tcagatgcggcttatgcctgccgtt

SEQ ID NO: 117736 - DNA, 25 bp, Artificial
  probe
  misc_feature (1)..(25): SEQ ID NO: 2330; WAN024CGL_at; Start 24; Stop 48
caatctcatggctcattttcaagaa

SEQ ID NO: 117737 - DNA, 25 bp, Artificial
  probe
  misc_feature (1)..(25): SEQ ID NO: 2330; WAN024CGL_at; Start 368; Stop 392
tccaagaattaaaaaatctctacgc

SEQ ID NO: 117738 - DNA, 25 bp, Artificial
  probe
  misc_feature (1)..(25): SEQ ID NO: 2330; WAN024CGL_at; Start 271; Stop 295
gatcctgtaacactctatgaacttc

SEQ ID NO: 117739 - DNA, 25 bp, Artificial
  probe
  misc_feature (1)..(25): SEQ ID NO: 2330; WAN024CGL_at; Start 154; Stop 178
ttatcacgaaagcaaactaatcagc

SEQ ID NO: 117740 - DNA, 25 bp, Artificial
  probe
  misc_feature (1)..(25): SEQ ID NO: 2330; WAN024CGL_at; Start 438; Stop 462
tattggcttggtcaattttcacgcc

SEQ ID NO: 117741 - DNA, 25 bp, Artificial
  probe
  misc_feature (1)..(25): SEQ ID NO: 2330; WAN024CGL_at; Start 700; Stop 724
tcaagaaagataaaagctcaatcgg

SEQ ID NO: 117742 - DNA, 25 bp, Artificial
  probe
  misc_feature (1)..(25): SEQ ID NO: 2330; WAN024CGL_at; Start 69; Stop 93
ccgtattcgagatggaaaacaatcc

SEQ ID NO: 117743 - DNA, 25 bp, Artificial
  probe
  misc_feature (1)..(25): SEQ ID NO: 2330; WAN024CGL_at; Start 241; Stop 265
gattttcttccagaaacaagtcgaa

SEQ ID NO: 117744 - DNA, 25 bp, Artificial
  probe
  misc_feature (1)..(25): SEQ ID NO: 2330; WAN024CGL_at; Start 404; Stop 428
gcatagagactagttttcgtgacct

SEQ ID NO: 117745 - DNA, 25 bp, Artificial
  probe
  misc_feature (1)..(25): SEQ ID NO: 2330; WAN024CGL_at; Start 574; Stop 598
tataaagtgtgtttctcagatgcgg

SEQ ID NO: 117746 - DNA, 25 bp, Artificial
  probe
  misc_feature (1)..(25): SEQ ID NO: 2330; WAN024CGL_at; Start 639; Stop 663
cctccagttgaaaaactacctcaag

SEQ ID NO: 117747 - DNA, 25 bp, Artificial
  probe
  misc_feature (1)..(25): SEQ ID NO: 2330; WAN024CGL_at; Start 351; Stop 375
gaatacagactattcagtccaagaa

SEQ ID NO: 117748 - DNA, 25 bp, Artificial
  probe
  misc_feature (1)..(25): SEQ ID NO: 2330; WAN024CGL_at; Start 6; Stop 30
tagaggctatgaaagttacaatctc

SEQ ID NO: 117749 - DNA, 25 bp, Artificial
  probe
  misc_feature (1)..(25): SEQ ID NO: 1670; WAN024CGM_at; Start 466; Stop 490
catgcacaacatgagcgcttagctc

SEQ ID NO: 117750 - DNA, 25 bp, Artificial
  probe
  misc_feature (1)..(25): SEQ ID NO: 1670; WAN024CGM_at; Start 95; Stop 119
ctcgtaaaagaaggttatcactaga

SEQ ID NO: 117751 - DNA, 25 bp, Artificial
  probe
  misc_feature (1)..(25): SEQ ID NO: 1670; WAN024CGM_at; Start 250; Stop 274
gctctatttaaagaatttacagcac

SEQ ID NO: 117752 - DNA, 25 bp, Artificial
  probe
  misc_feature (1)..(25): SEQ ID NO: 1670; WAN024CGM_at; Start 451; Stop 475
tctattcaagacaaacatgcacaac

SEQ ID NO: 117753 - DNA, 25 bp, Artificial
  probe
  misc_feature (1)..(25): SEQ ID NO: 1670; WAN024CGM_at; Start 391; Stop 415
tataatctcatacacataaatgccc

SEQ ID NO: 117754 - DNA, 25 bp, Artificial
  probe
  misc_feature (1)..(25): SEQ ID NO: 1670; WAN024CGM_at; Start 504; Stop 528
ggaggcttctccctttcgagaaagc

SEQ ID NO: 117755 - DNA, 25 bp, Artificial
  probe
  misc_feature (1)..(25): SEQ ID NO: 1670; WAN024CGM_at; Start 230; Stop 254
taaaacctgaagctttctatgctct

SEQ ID NO: 117756 - DNA, 25 bp, Artificial
  probe
  misc_feature (1)..(25): SEQ ID NO: 1670; WAN024CGM_at; Start 361; Stop 385
tctatccaaacccaaacggatgtta

SEQ ID NO: 117757 - DNA, 25 bp, Artificial
  probe
  misc_feature (1)..(25): SEQ ID NO: 1670; WAN024CGM_at; Start 478; Stop 502
gagcgcttagctctgattcagatga

SEQ ID NO: 117758 - DNA, 25 bp, Artificial
  probe
  misc_feature (1)..(25): SEQ ID NO: 1670; WAN024CGM_at; Start 519; Stop 543
tcgagaaagctcttgttatcatgga

SEQ ID NO: 117759 - DNA, 25 bp, Artificial
  probe
  misc_feature (1)..(25): SEQ ID NO: 1670; WAN024CGM_at; Start 492; Stop 516
gattcagatgatggaggcttctccc

SEQ ID NO: 117760 - DNA, 25 bp, Artificial
  probe
  misc_feature (1)..(25): SEQ ID NO: 1670; WAN024CGM_at; Start 67; Stop 91
ttcgtcaaacaagatgaacaggcct

SEQ ID NO: 117761 - DNA, 25 bp, Artificial
  probe
  misc_feature (1)..(25): SEQ ID NO: 1670; WAN024CGM_at; Start 299; Stop 323
caatattcgctgcagatgggagtga

SEQ ID NO: 117762 - DNA, 25 bp, Artificial
  probe
  misc_feature (1)..(25): SEQ ID NO: 1670; WAN024CGM_at; Start 138; Stop 162
tctgggcatgggaggaaaatcacta

SEQ ID NO: 117763 - DNA, 25 bp, Artificial
  probe
  misc_feature (1)..(25): SEQ ID NO: 1670; WAN024CGM_at; Start 205; Stop 229
gcctttgttcaaagacgctatcaga

SEQ ID NO: 117764 - DNA, 25 bp, Artificial
  probe
  misc_feature (1)..(25): SEQ ID NO: 1670; WAN024CGM_at; Start 163; Stop 187
tcaaaagaattactagatgccagac

SEQ ID NO: 117765 - DNA, 25 bp, Artificial
  probe
  misc_feature (1)..(25): SEQ ID NO: 1670; WAN024CGM_at; Start 19; Stop 43
gcccacttgaataagagtattcaga

SEQ ID NO: 117766 - DNA, 25 bp, Artificial
  probe
  misc_feature (1)..(25): SEQ ID NO: 1670; WAN024CGM_at; Start 126; Stop 150
gattcgtacaattctgggcatggga

SEQ ID NO: 117767 - DNA, 25 bp, Artificial
  probe
  misc_feature (1)..(25): SEQ ID NO: 1670; WAN024CGM_at; Start 326; Stop 350
tctgtattcctcgaaatcccatgga

SEQ ID NO: 117768 - DNA, 25 bp, Artificial
  probe
  misc_feature (1)..(25): SEQ ID NO: 1670; WAN024CGM_at; Start 311; Stop 335
cagatgggagtgatatctgtattcc

SEQ ID NO: 117769 - DNA, 25 bp, Artificial
  probe
  misc_feature (1)..(25): SEQ ID NO: 1670; WAN024CGM_at; Start 79; Stop 103
gatgaacaggcctttactcgtaaaa

SEQ ID NO: 117770 - DNA, 25 bp, Artificial
  probe
  misc_feature (1)..(25): SEQ ID NO: 1670; WAN024CGM_at; Start 48; Stop 72
cattggccaaaaagttgagttcgtc

SEQ ID NO: 117771 - DNA, 25 bp, Artificial
  probe
  misc_feature (1)..(25): SEQ ID NO: 1670; WAN024CGM_at; Start 218; Stop 242
gacgctatcagataaaacctgaagc

SEQ ID NO: 117772 - DNA, 25 bp, Artificial
  probe
  misc_feature (1)..(25): SEQ ID NO: 1670; WAN024CGM_at; Start 33; Stop 57
gagtattcagagtatcattggccaa

SEQ ID NO: 117773 - DNA, 25 bp, Artificial
  probe
  misc_feature (1)..(25): SEQ ID NO: 1670; WAN024CGM_at; Start 173; Stop 197
tactagatgccagactgacagtttc

SEQ ID NO: 117774 - DNA, 25 bp, Artificial
  probe
  misc_feature (1)..(25): SEQ ID NO: 1670; WAN024CGM_at; Start 112; Stop 136
tcactagaaactatgattcgtacaa

SEQ ID NO: 117775 - DNA, 25 bp, Artificial
  probe
  misc_feature (1)..(25): SEQ ID NO: 1670; WAN024CGM_at; Start 407; Stop 431
taaatgccctatacgacttgacgac

SEQ ID NO: 117776 - DNA, 25 bp, Artificial
  probe
  misc_feature (1)..(25): SEQ ID NO: 1670; WAN024CGM_at; Start 188; Stop 212
tgacagtttcaaattcagcctttgt

SEQ ID NO: 117777 - DNA, 25 bp, Artificial
  probe
  misc_feature (1)..(25): SEQ ID NO: 1670; WAN024CGM_at; Start 340; Stop 364
aatcccatggatacagaaacctcta

SEQ ID NO: 117778 - DNA, 25 bp, Artificial
  probe
  misc_feature (1)..(25): SEQ ID NO: 1670; WAN024CGM_at; Start 262; Stop 286
gaatttacagcacctattccactta

SEQ ID NO: 117779 - DNA, 25 bp, Artificial
  probe
  misc_feature (1)..(25): SEQ ID NO: 1670; WAN024CGM_at; Start 5; Stop 29
taaaacagataaaagcccacttgaa

SEQ ID NO: 117780 - DNA, 25 bp, Artificial
  probe
  misc_feature (1)..(25): SEQ ID NO: 1670; WAN024CGM_at; Start 288; Stop 312
tactgattttccaatattcgctgca

SEQ ID NO: 117781 - DNA, 25 bp, Artificial
  probe
  misc_feature (1)..(25): SEQ ID NO: 1670; WAN024CGM_at; Start 416; Stop 440
tatacgacttgacgactggagtgta

SEQ ID NO: 117782 - DNA, 25 bp, Artificial
  probe
  misc_feature (1)..(25): SEQ ID NO: 1670; WAN024CGM_at; Start 428; Stop 452
cgactggagtgtatagagatgtctc

SEQ ID NO: 117783 - DNA, 25 bp, Artificial
  probe
  misc_feature (1)..(25): SEQ ID NO: 6587; WAN024CGN_at; Start 219; Stop 243
gagttcttgggcaaattcaacaatg

SEQ ID NO: 117784 - DNA, 25 bp, Artificial
  probe
  misc_feature (1)..(25): SEQ ID NO: 6587; WAN024CGN_at; Start 83; Stop 107
ggtggagggtcttcacacgaccgtc

SEQ ID NO: 117785 - DNA, 25 bp, Artificial
  probe
  misc_feature (1)..(25): SEQ ID NO: 6587; WAN024CGN_at; Start 239; Stop 263
caatgcccgctttgtctgagacgct

SEQ ID NO: 117786 - DNA, 25 bp, Artificial
  probe
  misc_feature (1)..(25): SEQ ID NO: 6587; WAN024CGN_at; Start 103; Stop 127
ccgtccatcatttctgggaaaccag

SEQ ID NO: 117787 - DNA, 25 bp, Artificial
  probe
  misc_feature (1)..(25): SEQ ID NO: 6587; WAN024CGN_at; Start 25; Stop 49
gccgcttccaagtggctatccaagt

SEQ ID NO: 117788 - DNA, 25 bp, Artificial
  probe
  misc_feature (1)..(25): SEQ ID NO: 6587; WAN024CGN_at; Start 181; Stop 205
gttccacctgttgagataatctccc

SEQ ID NO: 117789 - DNA, 25 bp, Artificial
  probe
  misc_feature (1)..(25): SEQ ID NO: 6587; WAN024CGN_at; Start 98; Stop 122
cacgaccgtccatcatttctgggaa

SEQ ID NO: 117790 - DNA, 25 bp, Artificial
  probe
  misc_feature (1)..(25): SEQ ID NO: 6587; WAN024CGN_at; Start 228; Stop 252
ggcaaattcaacaatgcccgctttg

SEQ ID NO: 117791 - DNA, 25 bp, Artificial
  probe
  misc_feature (1)..(25): SEQ ID NO: 6587; WAN024CGN_at; Start 125; Stop 149
cagtcacatcatcgatagcaatggt

SEQ ID NO: 117792 - DNA, 25 bp, Artificial
  probe
  misc_feature (1)..(25): SEQ ID NO: 6587; WAN024CGN_at; Start 260; Stop 284
cgctgattaagacgcgtttagtcat

SEQ ID NO: 117793 - DNA, 25 bp, Artificial
  probe
  misc_feature (1)..(25): SEQ ID NO: 6587; WAN024CGN_at; Start 17; Stop 41
tgtccttagccgcttccaagtggct

SEQ ID NO: 117794 - DNA, 25 bp, Artificial
  probe
  misc_feature (1)..(25): SEQ ID NO: 6587; WAN024CGN_at; Start 118; Stop 142
gggaaaccagtcacatcatcgatag

SEQ ID NO: 117795 - DNA, 25 bp, Artificial
  probe
  misc_feature (1)..(25): SEQ ID NO: 6587; WAN024CGN_at; Start 60; Stop 84
gagaagccctccgtggatatttggg

SEQ ID NO: 117796 - DNA, 25 bp, Artificial
  probe
  misc_feature (1)..(25): SEQ ID NO: 6587; WAN024CGN_at; Start 77; Stop 101
tatttgggtggagggtcttcacacg

SEQ ID NO: 117797 - DNA, 25 bp, Artificial
  probe
  misc_feature (1)..(25): SEQ ID NO: 6587; WAN024CGN_at; Start 172; Stop 196
gcaaccttagttccacctgttgaga

SEQ ID NO: 117798 - DNA, 25 bp, Artificial
  probe
  misc_feature (1)..(25): SEQ ID NO: 6587; WAN024CGN_at; Start 56; Stop 80
gagcgagaagccctccgtggatatt

SEQ ID NO: 117799 - DNA, 25 bp, Artificial
  probe
  misc_feature (1)..(25): SEQ ID NO: 6587; WAN024CGN_at; Start 270; Stop 294
gacgcgtttagtcattatattctcc

SEQ ID NO: 117800 - DNA, 25 bp, Artificial
  probe
  misc_feature (1)..(25): SEQ ID NO: 6587; WAN024CGN_at; Start 244; Stop 268
cccgctttgtctgagacgctgatta

SEQ ID NO: 117801 - DNA, 25 bp, Artificial
  probe
  misc_feature (1)..(25): SEQ ID NO: 6587; WAN024CGN_at; Start 64; Stop 88
agccctccgtggatatttgggtgga

SEQ ID NO: 117802 - DNA, 25 bp, Artificial
  probe
  misc_feature (1)..(25): SEQ ID NO: 6587; WAN024CGN_at; Start 157; Stop 181
ccagcattatcaagggcaaccttag

SEQ ID NO: 117803 - DNA, 25 bp, Artificial
  probe
  misc_feature (1)..(25): SEQ ID NO: 6587; WAN024CGN_at; Start 46; Stop 70
aagtcacgacgagcgagaagccctc

SEQ ID NO: 117804 - DNA, 25 bp, Artificial
  probe
  misc_feature (1)..(25): SEQ ID NO: 6587; WAN024CGN_at; Start 191; Stop 215
ttgagataatctcccaaccaagttt

SEQ ID NO: 117805 - DNA, 25 bp, Artificial
  probe
  misc_feature (1)..(25): SEQ ID NO: 6587; WAN024CGN_at; Start 2; Stop 26
tgagctcaatcttgttgtccttagc

SEQ ID NO: 117806 - DNA, 25 bp, Artificial
  probe
  misc_feature (1)..(25): SEQ ID NO: 6587; WAN024CGN_at; Start 33; Stop 57
caagtggctatccaagtcacgacga

SEQ ID NO: 117807 - DNA, 25 bp, Artificial
  probe
  misc_feature (1)..(25): SEQ ID NO: 6587; WAN024CGN_at; Start 147; Stop 171
ggtatccaccccagcattatcaagg

SEQ ID NO: 117808 - DNA, 25 bp, Artificial
  probe
  misc_feature (1)..(25): SEQ ID NO: 6587; WAN024CGN_at; Start 251; Stop 275
tgtctgagacgctgattaagacgcg

SEQ ID NO: 117809 - DNA, 25 bp, Artificial
  probe
  misc_feature (1)..(25): SEQ ID NO: 6587; WAN024CGN_at; Start 138; Stop 162
gatagcaatggtatccaccccagca

SEQ ID NO: 117810 - DNA, 25 bp, Artificial
  probe
  misc_feature (1)..(25): SEQ ID NO: 6587; WAN024CGN_at; Start 90; Stop 114
ggtcttcacacgaccgtccatcatt

SEQ ID NO: 117811 - DNA, 25 bp, Artificial
  probe
  misc_feature (1)..(25): SEQ ID NO: 6587; WAN024CGN_at; Start 41; Stop 65
tatccaagtcacgacgagcgagaag

SEQ ID NO: 117812 - DNA, 25 bp, Artificial
  probe
  misc_feature (1)..(25): SEQ ID NO: 6587; WAN024CGN_at; Start 8; Stop 32
caatcttgttgtccttagccgcttc

SEQ ID NO: 117813 - DNA, 25 bp, Artificial
  probe
  misc_feature (1)..(25): SEQ ID NO: 6587; WAN024CGN_at; Start 164; Stop 188
tatcaagggcaaccttagttccacc

SEQ ID NO: 117814 - DNA, 25 bp, Artificial
  probe
  misc_feature (1)..(25): SEQ ID NO: 6587; WAN024CGN_at; Start 108; Stop 132
catcatttctgggaaaccagtcaca

SEQ ID NO: 117815 - DNA, 25 bp, Artificial
  probe
  misc_feature (1)..(25): SEQ ID NO: 6587; WAN024CGN_at; Start 131; Stop 155
catcatcgatagcaatggtatccac

SEQ ID NO: 117816 - DNA, 25 bp, Artificial
  probe
  misc_feature (1)..(25): SEQ ID NO: 6587; WAN024CGN_at; Start 38; Stop 62
ggctatccaagtcacgacgagcgag

SEQ ID NO: 117817 - DNA, 25 bp, Artificial
  probe
  misc_feature (1)..(25): SEQ ID NO: 7275; WAN024CGO_at; Start 200; Stop 224
gcatctgcatcacggatattattaa

SEQ ID NO: 117818 - DNA, 25 bp, Artificial
  probe
  misc_feature (1)..(25): SEQ ID NO: 7275; WAN024CGO_at; Start 187; Stop 211
gatacggatagcagcatctgcatca

SEQ ID NO: 117819 - DNA, 25 bp, Artificial
  probe
  misc_feature (1)..(25): SEQ ID NO: 7275; WAN024CGO_at; Start 87; Stop 111
cgtagtcccaagcagtctcgatgtc

SEQ ID NO: 117820 - DNA, 25 bp, Artificial
  probe
  misc_feature (1)..(25): SEQ ID NO: 7275; WAN024CGO_at; Start 203; Stop 227
tctgcatcacggatattattaaatg

SEQ ID NO: 117821 - DNA, 25 bp, Artificial
  probe
  misc_feature (1)..(25): SEQ ID NO: 7275; WAN024CGO_at; Start 39; Stop 63
tgaggacgacaatcccaccaaagat

SEQ ID NO: 117822 - DNA, 25 bp, Artificial
  probe
  misc_feature (1)..(25): SEQ ID NO: 7275; WAN024CGO_at; Start 182; Stop 206
cggatgatacggatagcagcatctg

SEQ ID NO: 117823 - DNA, 25 bp, Artificial
  probe
  misc_feature (1)..(25): SEQ ID NO: 7275; WAN024CGO_at; Start 189; Stop 213
tacggatagcagcatctgcatcacg

SEQ ID NO: 117824 - DNA, 25 bp, Artificial
  probe
  misc_feature (1)..(25): SEQ ID NO: 7275; WAN024CGO_at; Start 86; Stop 110
gcgtagtcccaagcagtctcgatgt

SEQ ID NO: 117825 - DNA, 25 bp, Artificial
  probe
  misc_feature (1)..(25): SEQ ID NO: 7275; WAN024CGO_at; Start 43; Stop 67
gacgacaatcccaccaaagatagac

SEQ ID NO: 117826 - DNA, 25 bp, Artificial
  probe
  misc_feature (1)..(25): SEQ ID NO: 7275; WAN024CGO_at; Start 127; Stop 151
tccacatggattcatgtgtttgaga

SEQ ID NO: 117827 - DNA, 25 bp, Artificial
  probe
  misc_feature (1)..(25): SEQ ID NO: 7275; WAN024CGO_at; Start 77; Stop 101
gactcataagcgtagtcccaagcag

SEQ ID NO: 117828 - DNA, 25 bp, Artificial
  probe
  misc_feature (1)..(25): SEQ ID NO: 7275; WAN024CGO_at; Start 28; Stop 52
cacctcacggttgaggacgacaatc

SEQ ID NO: 117829 - DNA, 25 bp, Artificial
  probe
  misc_feature (1)..(25): SEQ ID NO: 7275; WAN024CGO_at; Start 184; Stop 208
gatgatacggatagcagcatctgca

SEQ ID NO: 117830 - DNA, 25 bp, Artificial
  probe
  misc_feature (1)..(25): SEQ ID NO: 7275; WAN024CGO_at; Start 179; Stop 203
tcacggatgatacggatagcagcat

SEQ ID NO: 117831 - DNA, 25 bp, Artificial
  probe
  misc_feature (1)..(25): SEQ ID NO: 7275; WAN024CGO_at; Start 101; Stop 125
gtctcgatgtcatcagcttgaccaa

SEQ ID NO: 117832 - DNA, 25 bp, Artificial
  probe
  misc_feature (1)..(25): SEQ ID NO: 7275; WAN024CGO_at; Start 116; Stop 140
gcttgaccaattccacatggattca

SEQ ID NO: 117833 - DNA, 25 bp, Artificial
  probe
  misc_feature (1)..(25): SEQ ID NO: 7275; WAN024CGO_at; Start 176; Stop 200
aagtcacggatgatacggatagcag

SEQ ID NO: 117834 - DNA, 25 bp, Artificial
  probe
  misc_feature (1)..(25): SEQ ID NO: 7275; WAN024CGO_at; Start 34; Stop 58
acggttgaggacgacaatcccacca

SEQ ID NO: 117835 - DNA, 25 bp, Artificial
  probe
  misc_feature (1)..(25): SEQ ID NO: 7275; WAN024CGO_at; Start 106; Stop 130
gatgtcatcagcttgaccaattcca

SEQ ID NO: 117836 - DNA, 25 bp, Artificial
  probe
  misc_feature (1)..(25): SEQ ID NO: 7275; WAN024CGO_at; Start 37; Stop 61
gttgaggacgacaatcccaccaaag

SEQ ID NO: 117837 - DNA, 25 bp, Artificial
  probe
  misc_feature (1)..(25): SEQ ID NO: 7275; WAN024CGO_at; Start 114; Stop 138
cagcttgaccaattccacatggatt

SEQ ID NO: 117838 - DNA, 25 bp, Artificial
  probe
  misc_feature (1)..(25): SEQ ID NO: 7275; WAN024CGO_at; Start 26; Stop 50
tccacctcacggttgaggacgacaa

SEQ ID NO: 117839 - DNA, 25 bp, Artificial
  probe
  misc_feature (1)..(25): SEQ ID NO: 7275; WAN024CGO_at; Start 111; Stop 135
catcagcttgaccaattccacatgg

SEQ ID NO: 117840 - DNA, 25 bp, Artificial
  probe
  misc_feature (1)..(25): SEQ ID NO: 7275; WAN024CGO_at; Start 120; Stop 144
gaccaattccacatggattcatgtg

SEQ ID NO: 117841 - DNA, 25 bp, Artificial
  probe
  misc_feature (1)..(25): SEQ ID NO: 7275; WAN024CGO_at; Start 174; Stop 198
tgaagtcacggatgatacggatagc

SEQ ID NO: 117842 - DNA, 25 bp, Artificial
  probe
  misc_feature (1)..(25): SEQ ID NO: 7275; WAN024CGO_at; Start 42; Stop 66
ggacgacaatcccaccaaagataga

SEQ ID NO: 117843 - DNA, 25 bp, Artificial
  probe
  misc_feature (1)..(25): SEQ ID NO: 7275; WAN024CGO_at; Start 94; Stop 118
ccaagcagtctcgatgtcatcagct

SEQ ID NO: 117844 - DNA, 25 bp, Artificial
  probe
  misc_feature (1)..(25): SEQ ID NO: 7275; WAN024CGO_at; Start 172; Stop 196
tttgaagtcacggatgatacggata

SEQ ID NO: 117845 - DNA, 25 bp, Artificial
  probe
  misc_feature (1)..(25): SEQ ID NO: 7275; WAN024CGO_at; Start 84; Stop 108
aagcgtagtcccaagcagtctcgat

SEQ ID NO: 117846 - DNA, 25 bp, Artificial
  probe
  misc_feature (1)..(25): SEQ ID NO: 7275; WAN024CGO_at; Start 80; Stop 104
tcataagcgtagtcccaagcagtct

SEQ ID NO: 117847 - DNA, 25 bp, Artificial
  probe
  misc_feature (1)..(25): SEQ ID NO: 7275; WAN024CGO_at; Start 193; Stop 217
gatagcagcatctgcatcacggata

SEQ ID NO: 117848 - DNA, 25 bp, Artificial
  probe
  misc_feature (1)..(25): SEQ ID NO: 7275; WAN024CGO_at; Start 32; Stop 56
tcacggttgaggacgacaatcccac

SEQ ID NO: 117849 - DNA, 25 bp, Artificial
  probe
  misc_feature (1)..(25): SEQ ID NO: 7275; WAN024CGO_at; Start 81; Stop 105
cataagcgtagtcccaagcagtctc

SEQ ID NO: 117850 - DNA, 25 bp, Artificial
  probe
  misc_feature (1)..(25): SEQ ID NO: 7275; WAN024CGO_at; Start 97; Stop 121
agcagtctcgatgtcatcagcttga

SEQ ID NO: 117851 - DNA, 25 bp, Artificial
  probe
  misc_feature (1)..(25): SEQ ID NO: 7274; WAN024CGP_at; Start 114; Stop 138
ccgcctggccgataccacatggatt

SEQ ID NO: 117852 - DNA, 25 bp, Artificial
  probe
  misc_feature (1)..(25): SEQ ID NO: 7274; WAN024CGP_at; Start 203; Stop 227
tctgcatcgcggatattgttgaatg

SEQ ID NO: 117853 - DNA, 25 bp, Artificial
  probe
  misc_feature (1)..(25): SEQ ID NO: 7274; WAN024CGP_at; Start 35; Stop 59
cggttaagaacagcgataccaccaa

SEQ ID NO: 117854 - DNA, 25 bp, Artificial
  probe
  misc_feature (1)..(25): SEQ ID NO: 7274; WAN024CGP_at; Start 80; Stop 104
tcataagcataatcccaagccgtct

SEQ ID NO: 117855 - DNA, 25 bp, Artificial
  probe
  misc_feature (1)..(25): SEQ ID NO: 7274; WAN024CGP_at; Start 182; Stop 206
cggataatacgaatggcagcatctg

SEQ ID NO: 117856 - DNA, 25 bp, Artificial
  probe
  misc_feature (1)..(25): SEQ ID NO: 7274; WAN024CGP_at; Start 204; Stop 228
ctgcatcgcggatattgttgaatga

SEQ ID NO: 117857 - DNA, 25 bp, Artificial
  probe
  misc_feature (1)..(25): SEQ ID NO: 7274; WAN024CGP_at; Start 120; Stop 144
ggccgataccacatggattcatatg

SEQ ID NO: 117858 - DNA, 25 bp, Artificial
  probe
  misc_feature (1)..(25): SEQ ID NO: 7274; WAN024CGP_at; Start 25; Stop 49
atccacctcacggttaagaacagcg

SEQ ID NO: 117859 - DNA, 25 bp, Artificial
  probe
  misc_feature (1)..(25): SEQ ID NO: 7274; WAN024CGP_at; Start 43; Stop 67
aacagcgataccaccaaagatagac

SEQ ID NO: 117860 - DNA, 25 bp, Artificial
  probe
  misc_feature (1)..(25): SEQ ID NO: 7274; WAN024CGP_at; Start 101; Stop 125
gtctcgatgtcatccgcctggccga

SEQ ID NO: 117861 - DNA, 25 bp, Artificial
  probe
  misc_feature (1)..(25): SEQ ID NO: 7274; WAN024CGP_at; Start 39; Stop 63
taagaacagcgataccaccaaagat

SEQ ID NO: 117862 - DNA, 25 bp, Artificial
  probe
  misc_feature (1)..(25): SEQ ID NO: 7274; WAN024CGP_at; Start 77; Stop 101
gactcataagcataatcccaagccg

SEQ ID NO: 117863 - DNA, 25 bp, Artificial
  probe
  misc_feature (1)..(25): SEQ ID NO: 7274; WAN024CGP_at; Start 175; Stop 199
gaagtcacggataatacgaatggca

SEQ ID NO: 117864 - DNA, 25 bp, Artificial
  probe
  misc_feature (1)..(25): SEQ ID NO: 7274; WAN024CGP_at; Start 191; Stop 215
cgaatggcagcatctgcatcgcgga

SEQ ID NO: 117865 - DNA, 25 bp, Artificial
  probe
  misc_feature (1)..(25): SEQ ID NO: 7274; WAN024CGP_at; Start 28; Stop 52
cacctcacggttaagaacagcgata

SEQ ID NO: 117866 - DNA, 25 bp, Artificial
  probe
  misc_feature (1)..(25): SEQ ID NO: 7274; WAN024CGP_at; Start 184; Stop 208
gataatacgaatggcagcatctgca

SEQ ID NO: 117867 - DNA, 25 bp, Artificial
  probe
  misc_feature (1)..(25): SEQ ID NO: 7274; WAN024CGP_at; Start 118; Stop 142
ctggccgataccacatggattcata

SEQ ID NO: 117868 - DNA, 25 bp, Artificial
  probe
  misc_feature (1)..(25): SEQ ID NO: 7274; WAN024CGP_at; Start 186; Stop 210
taatacgaatggcagcatctgcatc

SEQ ID NO: 117869 - DNA, 25 bp, Artificial
  probe
  misc_feature (1)..(25): SEQ ID NO: 7274; WAN024CGP_at; Start 30; Stop 54
cctcacggttaagaacagcgatacc

SEQ ID NO: 117870 - DNA, 25 bp, Artificial
  probe
  misc_feature (1)..(25): SEQ ID NO: 7274; WAN024CGP_at; Start 178; Stop 202
gtcacggataatacgaatggcagca

SEQ ID NO: 117871 - DNA, 25 bp, Artificial
  probe
  misc_feature (1)..(25): SEQ ID NO: 7274; WAN024CGP_at; Start 83; Stop 107
taagcataatcccaagccgtctcga

SEQ ID NO: 117872 - DNA, 25 bp, Artificial
  probe
  misc_feature (1)..(25): SEQ ID NO: 7274; WAN024CGP_at; Start 124; Stop 148
gataccacatggattcatatgcttg

SEQ ID NO: 117873 - DNA, 25 bp, Artificial
  probe
  misc_feature (1)..(25): SEQ ID NO: 7274; WAN024CGP_at; Start 42; Stop 66
gaacagcgataccaccaaagataga

SEQ ID NO: 117874 - DNA, 25 bp, Artificial
  probe
  misc_feature (1)..(25): SEQ ID NO: 7274; WAN024CGP_at; Start 86; Stop 110
gcataatcccaagccgtctcgatgt

SEQ ID NO: 117875 - DNA, 25 bp, Artificial
  probe
  misc_feature (1)..(25): SEQ ID NO: 7274; WAN024CGP_at; Start 127; Stop 151
accacatggattcatatgcttgaga

SEQ ID NO: 117876 - DNA, 25 bp, Artificial
  probe
  misc_feature (1)..(25): SEQ ID NO: 7274; WAN024CGP_at; Start 172; Stop 196
tttgaagtcacggataatacgaatg

SEQ ID NO: 117877 - DNA, 25 bp, Artificial
  probe
  misc_feature (1)..(25): SEQ ID NO: 7274; WAN024CGP_at; Start 193; Stop 217
aatggcagcatctgcatcgcggata

SEQ ID NO: 117878 - DNA, 25 bp, Artificial
  probe
  misc_feature (1)..(25): SEQ ID NO: 7274; WAN024CGP_at; Start 96; Stop 120
aagccgtctcgatgtcatccgcctg

SEQ ID NO: 117879 - DNA, 25 bp, Artificial
  probe
  misc_feature (1)..(25): SEQ ID NO: 7274; WAN024CGP_at; Start 180; Stop 204
cacggataatacgaatggcagcatc

SEQ ID NO: 117880 - DNA, 25 bp, Artificial
  probe
  misc_feature (1)..(25): SEQ ID NO: 7274; WAN024CGP_at; Start 37; Stop 61
gttaagaacagcgataccaccaaag

SEQ ID NO: 117881 - DNA, 25 bp, Artificial
  probe
  misc_feature (1)..(25): SEQ ID NO: 7274; WAN024CGP_at; Start 32; Stop 56
tcacggttaagaacagcgataccac

SEQ ID NO: 117882 - DNA, 25 bp, Artificial
  probe
  misc_feature (1)..(25): SEQ ID NO: 7274; WAN024CGP_at; Start 116; Stop 140
gcctggccgataccacatggattca

SEQ ID NO: 117883 - DNA, 25 bp, Artificial
  probe
  misc_feature (1)..(25): SEQ ID NO: 7274; WAN024CGP_at; Start 189; Stop 213
tacgaatggcagcatctgcatcgcg

SEQ ID NO: 117884 - DNA, 25 bp, Artificial
  probe
  misc_feature (1)..(25): SEQ ID NO: 7274; WAN024CGP_at; Start 106; Stop 130
gatgtcatccgcctggccgatacca

SEQ ID NO: 117885 - DNA, 25 bp, Artificial
  probe
  misc_feature (1)..(25): SEQ ID NO: 5818; WAN024CGQ_at; Start 26; Stop 50
tcgcaaaccatacgatcattaacgt

SEQ ID NO: 117886 - DNA, 25 bp, Artificial
  probe
  misc_feature (1)..(25): SEQ ID NO: 5818; WAN024CGQ_at; Start 258; Stop 282
cttgcttccgatatctgttcggtag

SEQ ID NO: 117887 - DNA, 25 bp, Artificial
  probe
  misc_feature (1)..(25): SEQ ID NO: 5818; WAN024CGQ_at; Start 11; Stop 35
ttagctcgctaacgctcgcaaacca

SEQ ID NO: 117888 - DNA, 25 bp, Artificial
  probe
  misc_feature (1)..(25): SEQ ID NO: 5818; WAN024CGQ_at; Start 251; Stop 275
taattgccttgcttccgatatctgt

SEQ ID NO: 117889 - DNA, 25 bp, Artificial
  probe
  misc_feature (1)..(25): SEQ ID NO: 5818; WAN024CGQ_at; Start 17; Stop 41
cgctaacgctcgcaaaccatacgat

SEQ ID NO: 117890 - DNA, 25 bp, Artificial
  probe
  misc_feature (1)..(25): SEQ ID NO: 5818; WAN024CGQ_at; Start 201; Stop 225
gaccattatcgtgtttggcgactac

SEQ ID NO: 117891 - DNA, 25 bp, Artificial
  probe
  misc_feature (1)..(25): SEQ ID NO: 5818; WAN024CGQ_at; Start 188; Stop 212
ttttcaccacgacgaccattatcgt

SEQ ID NO: 117892 - DNA, 25 bp, Artificial
  probe
  misc_feature (1)..(25): SEQ ID NO: 5818; WAN024CGQ_at; Start 239; Stop 263
tatatctttacttaattgccttgct

SEQ ID NO: 117893 - DNA, 25 bp, Artificial
  probe
  misc_feature (1)..(25): SEQ ID NO: 5818; WAN024CGQ_at; Start 195; Stop 219
cacgacgaccattatcgtgtttggc

SEQ ID NO: 117894 - DNA, 25 bp, Artificial
  probe
  misc_feature (1)..(25): SEQ ID NO: 5818; WAN024CGQ_at; Start 9; Stop 33
tattagctcgctaacgctcgcaaac

SEQ ID NO: 117895 - DNA, 25 bp, Artificial
  probe
  misc_feature (1)..(25): SEQ ID NO: 5818; WAN024CGQ_at; Start 178; Stop 202
tgttctggtcttttcaccacgacga

SEQ ID NO: 117896 - DNA, 25 bp, Artificial
  probe
  misc_feature (1)..(25): SEQ ID NO: 5818; WAN024CGQ_at; Start 244; Stop 268
ctttacttaattgccttgcttccga

SEQ ID NO: 117897 - DNA, 25 bp, Artificial
  probe
  misc_feature (1)..(25): SEQ ID NO: 5818; WAN024CGQ_at; Start 150; Stop 174
caagtttccccctgaccagaacatt

SEQ ID NO: 117898 - DNA, 25 bp, Artificial
  probe
  misc_feature (1)..(25): SEQ ID NO: 5818; WAN024CGQ_at; Start 23; Stop 47
cgctcgcaaaccatacgatcattaa

SEQ ID NO: 117899 - DNA, 25 bp, Artificial
  probe
  misc_feature (1)..(25): SEQ ID NO: 5818; WAN024CGQ_at; Start 220; Stop 244
gactacggcgcgttattcttatatc

SEQ ID NO: 117900 - DNA, 25 bp, Artificial
  probe
  misc_feature (1)..(25): SEQ ID NO: 5818; WAN024CGQ_at; Start 2; Stop 26
tgttctatattagctcgctaacgct

SEQ ID NO: 117901 - DNA, 25 bp, Artificial
  probe
  misc_feature (1)..(25): SEQ ID NO: 5818; WAN024CGQ_at; Start 209; Stop 233
tcgtgtttggcgactacggcgcgtt

SEQ ID NO: 117902 - DNA, 25 bp, Artificial
  probe
  misc_feature (1)..(25): SEQ ID NO: 5818; WAN024CGQ_at; Start 205; Stop 229
attatcgtgtttggcgactacggcg

SEQ ID NO: 117903 - DNA, 25 bp, Artificial
  probe
  misc_feature (1)..(25): SEQ ID NO: 5818; WAN024CGQ_at; Start 7; Stop 31
tatattagctcgctaacgctcgcaa

SEQ ID NO: 117904 - DNA, 25 bp, Artificial
  probe
  misc_feature (1)..(25): SEQ ID NO: 5818; WAN024CGQ_at; Start 175; Stop 199
cactgttctggtcttttcaccacga

SEQ ID NO: 117905 - DNA, 25 bp, Artificial
  probe
  misc_feature (1)..(25): SEQ ID NO: 5818; WAN024CGQ_at; Start 255; Stop 279
tgccttgcttccgatatctgttcgg

SEQ ID NO: 117906 - DNA, 25 bp, Artificial
  probe
  misc_feature (1)..(25): SEQ ID NO: 5818; WAN024CGQ_at; Start 38; Stop 62
cgatcattaacgtattttgtgaatt

SEQ ID NO: 117907 - DNA, 25 bp, Artificial
  probe
  misc_feature (1)..(25): SEQ ID NO: 5818; WAN024CGQ_at; Start 159; Stop 183
ccctgaccagaacattcactgttct

SEQ ID NO: 117908 - DNA, 25 bp, Artificial
  probe
  misc_feature (1)..(25): SEQ ID NO: 5818; WAN024CGQ_at; Start 171; Stop 195
cattcactgttctggtcttttcacc

SEQ ID NO: 117909 - DNA, 25 bp, Artificial
  probe
  misc_feature (1)..(25): SEQ ID NO: 5818; WAN024CGQ_at; Start 225; Stop 249
cggcgcgttattcttatatctttac

SEQ ID NO: 117910 - DNA, 25 bp, Artificial
  probe
  misc_feature (1)..(25): SEQ ID NO: 5818; WAN024CGQ_at; Start 211; Stop 235
gtgtttggcgactacggcgcgttat

SEQ ID NO: 117911 - DNA, 25 bp, Artificial
  probe
  misc_feature (1)..(25): SEQ ID NO: 5818; WAN024CGQ_at; Start 203; Stop 227
ccattatcgtgtttggcgactacgg

SEQ ID NO: 117912 - DNA, 25 bp, Artificial
  probe
  misc_feature (1)..(25): SEQ ID NO: 5818; WAN024CGQ_at; Start 198; Stop 222
gacgaccattatcgtgtttggcgac

SEQ ID NO: 117913 - DNA, 25 bp, Artificial
  probe
  misc_feature (1)..(25): SEQ ID NO: 5818; WAN024CGQ_at; Start 13; Stop 37
agctcgctaacgctcgcaaaccata

SEQ ID NO: 117914 - DNA, 25 bp, Artificial
  probe
  misc_feature (1)..(25): SEQ ID NO: 5818; WAN024CGQ_at; Start 213; Stop 237
gtttggcgactacggcgcgttattc

SEQ ID NO: 117915 - DNA, 25 bp, Artificial
  probe
  misc_feature (1)..(25): SEQ ID NO: 5818; WAN024CGQ_at; Start 71; Stop 95
tctttttgataatggtcttaggtga

SEQ ID NO: 117916 - DNA, 25 bp, Artificial
  probe
  misc_feature (1)..(25): SEQ ID NO: 5818; WAN024CGQ_at; Start 184; Stop 208
ggtcttttcaccacgacgaccatta

SEQ ID NO: 117917 - DNA, 25 bp, Artificial
  probe
  misc_feature (1)..(25): SEQ ID NO: 5818; WAN024CGQ_at; Start 20; Stop 44
taacgctcgcaaaccatacgatcat

SEQ ID NO: 117918 - DNA, 25 bp, Artificial
  probe
  misc_feature (1)..(25): SEQ ID NO: 5818; WAN024CGQ_at; Start 115; Stop 139
tcggtttcattcctaaactttgagc

SEQ ID NO: 117919 - DNA, 25 bp, Artificial
  probe
  misc_feature (1)..(25): SEQ ID NO: 5548; WAN024CGR_at; Start 348; Stop 372
aatcgcatgctcacgaccaccagaa

SEQ ID NO: 117920 - DNA, 25 bp, Artificial
  probe
  misc_feature (1)..(25): SEQ ID NO: 5548; WAN024CGR_at; Start 262; Stop 286
aattccaaaccatccagagtcatcc

SEQ ID NO: 117921 - DNA, 25 bp, Artificial
  probe
  misc_feature (1)..(25): SEQ ID NO: 5548; WAN024CGR_at; Start 583; Stop 607
ttcttggtcacggacagagccaccg

SEQ ID NO: 117922 - DNA, 25 bp, Artificial
  probe
  misc_feature (1)..(25): SEQ ID NO: 5548; WAN024CGR_at; Start 29; Stop 53
catatgttgctgtcggaacgccgta

SEQ ID NO: 117923 - DNA, 25 bp, Artificial
  probe
  misc_feature (1)..(25): SEQ ID NO: 5548; WAN024CGR_at; Start 393; Stop 417
tcctcaacctcttttgcgaattatt

SEQ ID NO: 117924 - DNA, 25 bp, Artificial
  probe
  misc_feature (1)..(25): SEQ ID NO: 5548; WAN024CGR_at; Start 21; Stop 45
aaatgtgccatatgttgctgtcgga

SEQ ID NO: 117925 - DNA, 25 bp, Artificial
  probe
  misc_feature (1)..(25): SEQ ID NO: 5548; WAN024CGR_at; Start 101; Stop 125
ctgcagccctagtcggaccaaaggc

SEQ ID NO: 117926 - DNA, 25 bp, Artificial
  probe
  misc_feature (1)..(25): SEQ ID NO: 5548; WAN024CGR_at; Start 7; Stop 31
tcctcgaaatctgaaaatgtgccat

SEQ ID NO: 117927 - DNA, 25 bp, Artificial
  probe
  misc_feature (1)..(25): SEQ ID NO: 5548; WAN024CGR_at; Start 377; Stop 401
caacaagcagtttcattcctcaacc

SEQ ID NO: 117928 - DNA, 25 bp, Artificial
  probe
  misc_feature (1)..(25): SEQ ID NO: 5548; WAN024CGR_at; Start 333; Stop 357
aagtaactttttagcaatcgcatgc

SEQ ID NO: 117929 - DNA, 25 bp, Artificial
  probe
  misc_feature (1)..(25): SEQ ID NO: 5548; WAN024CGR_at; Start 163; Stop 187
gcagcaagggcatcatctggaccga

SEQ ID NO: 117930 - DNA, 25 bp, Artificial
  probe
  misc_feature (1)..(25): SEQ ID NO: 5548; WAN024CGR_at; Start 616; Stop 640
gatggccttaattcctgctttggcg

SEQ ID NO: 117931 - DNA, 25 bp, Artificial
  probe
  misc_feature (1)..(25): SEQ ID NO: 5548; WAN024CGR_at; Start 529; Stop 553
tctcacacctgtaaagaccatagtc

SEQ ID NO: 117932 - DNA, 25 bp, Artificial
  probe
  misc_feature (1)..(25): SEQ ID NO: 5548; WAN024CGR_at; Start 602; Stop 626
ccaccgggctggatgatggccttaa

SEQ ID NO: 117933 - DNA, 25 bp, Artificial
  probe
  misc_feature (1)..(25): SEQ ID NO: 5548; WAN024CGR_at; Start 544; Stop 568
gaccatagtcaagccgtatttatcc

SEQ ID NO: 117934 - DNA, 25 bp, Artificial
  probe
  misc_feature (1)..(25): SEQ ID NO: 5548; WAN024CGR_at; Start 186; Stop 210
gataaaggtccaagcaacatcattg

SEQ ID NO: 117935 - DNA, 25 bp, Artificial
  probe
  misc_feature (1)..(25): SEQ ID NO: 5548; WAN024CGR_at; Start 657; Stop 681
ccgcaaatgggaagaaggcatctga

SEQ ID NO: 117936 - DNA, 25 bp, Artificial
  probe
  misc_feature (1)..(25): SEQ ID NO: 5548; WAN024CGR_at; Start 248; Stop 272
tagagatatttaccaattccaaacc

SEQ ID NO: 117937 - DNA, 25 bp, Artificial
  probe
  misc_feature (1)..(25): SEQ ID NO: 5548; WAN024CGR_at; Start 314; Stop 338
tttccacgtcttttgattcaagtaa

SEQ ID NO: 117938 - DNA, 25 bp, Artificial
  probe
  misc_feature (1)..(25): SEQ ID NO: 5548; WAN024CGR_at; Start 277; Stop 301
agagtcatcccatcattcccaggag

SEQ ID NO: 117939 - DNA, 25 bp, Artificial
  probe
  misc_feature (1)..(25): SEQ ID NO: 5548; WAN024CGR_at; Start 644; Stop 668
tcttccacgttatccgcaaatggga

SEQ ID NO: 117940 - DNA, 25 bp, Artificial
  probe
  misc_feature (1)..(25): SEQ ID NO: 5548; WAN024CGR_at; Start 50; Stop 74
cgtatttgaccatgatttccttggc

SEQ ID NO: 117941 - DNA, 25 bp, Artificial
  probe
  misc_feature (1)..(25): SEQ ID NO: 5548; WAN024CGR_at; Start 41; Stop 65
tcggaacgccgtatttgaccatgat

SEQ ID NO: 117942 - DNA, 25 bp, Artificial
  probe
  misc_feature (1)..(25): SEQ ID NO: 5548; WAN024CGR_at; Start 170; Stop 194
gggcatcatctggaccgataaaggt

SEQ ID NO: 117943 - DNA, 25 bp, Artificial
  probe
  misc_feature (1)..(25): SEQ ID NO: 5548; WAN024CGR_at; Start 200; Stop 224
caacatcattggtctttgcgaagtc

SEQ ID NO: 117944 - DNA, 25 bp, Artificial
  probe
  misc_feature (1)..(25): SEQ ID NO: 5548; WAN024CGR_at; Start 210; Stop 234
ggtctttgcgaagtcaatcaattta

SEQ ID NO: 117945 - DNA, 25 bp, Artificial
  probe
  misc_feature (1)..(25): SEQ ID NO: 5548; WAN024CGR_at; Start 293; Stop 317
tcccaggagctacaaagactttttc

SEQ ID NO: 117946 - DNA, 25 bp, Artificial
  probe
  misc_feature (1)..(25): SEQ ID NO: 5548; WAN024CGR_at; Start 147; Stop 171
atcatccacgataccagcagcaagg

SEQ ID NO: 117947 - DNA, 25 bp, Artificial
  probe
  misc_feature (1)..(25): SEQ ID NO: 5548; WAN024CGR_at; Start 133; Stop 157
ccagcttggttaaaatcatccacga

SEQ ID NO: 117948 - DNA, 25 bp, Artificial
  probe
  misc_feature (1)..(25): SEQ ID NO: 5548; WAN024CGR_at; Start 515; Stop 539
taatgtctaaaatgtctcacacctg

SEQ ID NO: 117949 - DNA, 25 bp, Artificial
  probe
  misc_feature (1)..(25): SEQ ID NO: 5548; WAN024CGR_at; Start 364; Stop 388
ccaccagaaccgacaacaagcagtt

SEQ ID NO: 117950 - DNA, 25 bp, Artificial
  probe
  misc_feature (1)..(25): SEQ ID NO: 5548; WAN024CGR_at; Start 558; Stop 582
cgtatttatccgctgcttcgatgga

SEQ ID NO: 117951 - DNA, 25 bp, Artificial
  probe
  misc_feature (1)..(25): SEQ ID NO: 5548; WAN024CGR_at; Start 572; Stop 596
gcttcgatggattcttggtcacgga

SEQ ID NO: 117952 - DNA, 25 bp, Artificial
  probe
  misc_feature (1)..(25): SEQ ID NO: 5548; WAN024CGR_at; Start 628; Stop 652
tcctgctttggcgatttcttccacg

SEQ ID NO: 117953 - DNA, 25 bp, Artificial
  probe
  misc_feature (1)..(25): SEQ ID NO: 1770; WAN024CGS_at; Start 1085; Stop 1109
catttaatgctcaagaggctagcga

SEQ ID NO: 117954 - DNA, 25 bp, Artificial
  probe
  misc_feature (1)..(25): SEQ ID NO: 1770; WAN024CGS_at; Start 126; Stop 150
taaggttgcccttgataatgctggg

SEQ ID NO: 117955 - DNA, 25 bp, Artificial
  probe
  misc_feature (1)..(25): SEQ ID NO: 1770; WAN024CGS_at; Start 981; Stop 1005
gatgcacggcgttttcctcgaaatc

SEQ ID NO: 117956 - DNA, 25 bp, Artificial
  probe
  misc_feature (1)..(25): SEQ ID NO: 1770; WAN024CGS_at; Start 1159; Stop 1183
caagacgtggtcaaggaaagcccag

SEQ ID NO: 117957 - DNA, 25 bp, Artificial
  probe
  misc_feature (1)..(25): SEQ ID NO: 1770; WAN024CGS_at; Start 1356; Stop 1380
tgccattgaccaagccaaagatcgt

SEQ ID NO: 117958 - DNA, 25 bp, Artificial
  probe
  misc_feature (1)..(25): SEQ ID NO: 1770; WAN024CGS_at; Start 995; Stop 1019
tcctcgaaatcatcattgcaccaag

SEQ ID NO: 117959 - DNA, 25 bp, Artificial
  probe
  misc_feature (1)..(25): SEQ ID NO: 1770; WAN024CGS_at; Start 1273; Stop 1297
tcaaatggtattatcgtgaccaacg

SEQ ID NO: 117960 - DNA, 25 bp, Artificial
  probe
  misc_feature (1)..(25): SEQ ID NO: 1770; WAN024CGS_at; Start 581; Stop 605
cagaatacttcacagctcaagtggg

SEQ ID NO: 117961 - DNA, 25 bp, Artificial
  probe
  misc_feature (1)..(25): SEQ ID NO: 1770; WAN024CGS_at; Start 1530; Stop 1554
gactatggtctttacaggtgtgaga

SEQ ID NO: 117962 - DNA, 25 bp, Artificial
  probe
  misc_feature (1)..(25): SEQ ID NO: 1770; WAN024CGS_at; Start 1103; Stop 1127
ctagcgaagtggaagcagaatacac

SEQ ID NO: 117963 - DNA, 25 bp, Artificial
  probe
  misc_feature (1)..(25): SEQ ID NO: 1770; WAN024CGS_at; Start 1251; Stop 1275
gaaggctatcaagtacgtcaaatca

SEQ ID NO: 117964 - DNA, 25 bp, Artificial
  probe
  misc_feature (1)..(25): SEQ ID NO: 1770; WAN024CGS_at; Start 1403; Stop 1427
cagatgccttcttcccatttgcgga

SEQ ID NO: 117965 - DNA, 25 bp, Artificial
  probe
  misc_feature (1)..(25): SEQ ID NO: 1770; WAN024CGS_at; Start 54; Stop 78
caaagcgggcattgttgaatttgcc

SEQ ID NO: 117966 - DNA, 25 bp, Artificial
  probe
  misc_feature (1)..(25): SEQ ID NO: 1770; WAN024CGS_at; Start 1476; Stop 1500
cggtggctctgtccgtgaccaagaa

SEQ ID NO: 117967 - DNA, 25 bp, Artificial
  probe
  misc_feature (1)..(25): SEQ ID NO: 1770; WAN024CGS_at; Start 1133; Stop 1157
tagtcggtggacttctcgtgcaaaa

SEQ ID NO: 117968 - DNA, 25 bp, Artificial
  probe
  misc_feature (1)..(25): SEQ ID NO: 1770; WAN024CGS_at; Start 1334; Stop 1358
accgtgtggcttctgttcgccttgc

SEQ ID NO: 117969 - DNA, 25 bp, Artificial
  probe
  misc_feature (1)..(25): SEQ ID NO: 1770; WAN024CGS_at; Start 1511; Stop 1535
cagcggataaatacggcttgactat

SEQ ID NO: 117970 - DNA, 25 bp, Artificial
  probe
  misc_feature (1)..(25): SEQ ID NO: 1770; WAN024CGS_at; Start 1146; Stop 1170
tctcgtgcaaaatcaagacgtggtc

SEQ ID NO: 117971 - DNA, 25 bp, Artificial
  probe
  misc_feature (1)..(25): SEQ ID NO: 1770; WAN024CGS_at; Start 966; Stop 990
tgcgacagctgagaagatgcacggc

SEQ ID NO: 117972 - DNA, 25 bp, Artificial
  probe
  misc_feature (1)..(25): SEQ ID NO: 1770; WAN024CGS_at; Start 1438; Stop 1462
gaaatcgccaaagcaggaattaagg

SEQ ID NO: 117973 - DNA, 25 bp, Artificial
  probe
  misc_feature (1)..(25): SEQ ID NO: 1770; WAN024CGS_at; Start 1236; Stop 1260
tcttgagttcgcttggaaggctatc

SEQ ID NO: 117974 - DNA, 25 bp, Artificial
  probe
  misc_feature (1)..(25): SEQ ID NO: 1770; WAN024CGS_at; Start 38; Stop 62
taatcagcgtctcagacaaagcggg

SEQ ID NO: 117975 - DNA, 25 bp, Artificial
  probe
  misc_feature (1)..(25): SEQ ID NO: 1770; WAN024CGS_at; Start 1305; Stop 1329
gacacttggtgttggtccaggtcaa

SEQ ID NO: 117976 - DNA, 25 bp, Artificial
  probe
  misc_feature (1)..(25): SEQ ID NO: 1770; WAN024CGS_at; Start 12; Stop 36
ggagaatataatgactaaacgcgtc

SEQ ID NO: 117977 - DNA, 25 bp, Artificial
  probe
  misc_feature (1)..(25): SEQ ID NO: 1770; WAN024CGS_at; Start 1422; Stop 1446
tgcggataacgtggaagaaatcgcc

SEQ ID NO: 117978 - DNA, 25 bp, Artificial
  probe
  misc_feature (1)..(25): SEQ ID NO: 1770; WAN024CGS_at; Start 1121; Stop 1145
aatacacaggtgtagtcggtggact

SEQ ID NO: 117979 - DNA, 25 bp, Artificial
  probe
  misc_feature (1)..(25): SEQ ID NO: 1770; WAN024CGS_at; Start 1288; Stop 1312
gtgaccaacgaccacatgacacttg

SEQ ID NO: 117980 - DNA, 25 bp, Artificial
  probe
  misc_feature (1)..(25): SEQ ID NO: 1770; WAN024CGS_at; Start 1059; Stop 1083
gaaaaacttgcgtatccttgccttg

SEQ ID NO: 117981 - DNA, 25 bp, Artificial
  probe
  misc_feature (1)..(25): SEQ ID NO: 1770; WAN024CGS_at; Start 1174; Stop 1198
gaaagcccagctgactggcaagtgg

SEQ ID NO: 117982 - DNA, 25 bp, Artificial
  probe
  misc_feature (1)..(25): SEQ ID NO: 1770; WAN024CGS_at; Start 1219; Stop 1243
gagacagaagcgactgctcttgagt

SEQ ID NO: 117983 - DNA, 25 bp, Artificial
  probe
  misc_feature (1)..(25): SEQ ID NO: 1770; WAN024CGS_at; Start 1320; Stop 1344
tccaggtcaaaccaaccgtgtggct

SEQ ID NO: 117984 - DNA, 25 bp, Artificial
  probe
  misc_feature (1)..(25): SEQ ID NO: 1770; WAN024CGS_at; Start 1388; Stop 1412
gggcggtccttgcttcagatgcctt

SEQ ID NO: 117985 - DNA, 25 bp, Artificial
  probe
  misc_feature (1)..(25): SEQ ID NO: 1770; WAN024CGS_at; Start 1011; Stop 1035
tgcaccaagctatacggatgaagcg

SEQ ID NO: 117986 - DNA, 25 bp, Artificial
  probe
  misc_feature (1)..(25): SEQ ID NO: 1770; WAN024CGS_at; Start 1454; Stop 1478
gaattaaggccatcatccagcccgg

SEQ ID NO: 117987 - DNA, 25 bp, Artificial
  probe
  misc_feature (1)..(25): SEQ ID NO: 865; WAN024CGT_at; Start 955; Stop 979
aatatcatgtggacggacaagggtg

SEQ ID NO: 117988 - DNA, 25 bp, Artificial
  probe
  misc_feature (1)..(25): SEQ ID NO: 865; WAN024CGT_at; Start 1216; Stop 1240
gaaggactcttctaccgaacagata

SEQ ID NO: 117989 - DNA, 25 bp, Artificial
  probe
  misc_feature (1)..(25): SEQ ID NO: 865; WAN024CGT_at; Start 1093; Stop 1117
tttgcggaaaatagcagagcactgc

SEQ ID NO: 117990 - DNA, 25 bp, Artificial
  probe
  misc_feature (1)..(25): SEQ ID NO: 865; WAN024CGT_at; Start 730; Stop 754
gatacagcggttgacaccattgtca

SEQ ID NO: 117991 - DNA, 25 bp, Artificial
  probe
  misc_feature (1)..(25): SEQ ID NO: 865; WAN024CGT_at; Start 420; Stop 444
tatcgtagtcaaggcggatggcttg

SEQ ID NO: 117992 - DNA, 25 bp, Artificial
  probe
  misc_feature (1)..(25): SEQ ID NO: 865; WAN024CGT_at; Start 713; Stop 737
taccacagagtgtagttgatacagc

SEQ ID NO: 117993 - DNA, 25 bp, Artificial
  probe
  misc_feature (1)..(25): SEQ ID NO: 865; WAN024CGT_at; Start 607; Stop 631
gataagttctacatcatgccaacgg

SEQ ID NO: 117994 - DNA, 25 bp, Artificial
  probe
  misc_feature (1)..(25): SEQ ID NO: 865; WAN024CGT_at; Start 395; Stop 419
cctatatcgaaaagcatggtgcgcc

SEQ ID NO: 117995 - DNA, 25 bp, Artificial
  probe
  misc_feature (1)..(25): SEQ ID NO: 865; WAN024CGT_at; Start 1062; Stop 1086
cgatgtcatcacctactatgcaggg

SEQ ID NO: 117996 - DNA, 25 bp, Artificial
  probe
  misc_feature (1)..(25): SEQ ID NO: 865; WAN024CGT_at; Start 76; Stop 100
gaaaaagtctttgtagctcctggga

SEQ ID NO: 117997 - DNA, 25 bp, Artificial
  probe
  misc_feature (1)..(25): SEQ ID NO: 865; WAN024CGT_at; Start 1157; Stop 1181
cagataccgtcaaagaagcccaagc

SEQ ID NO: 117998 - DNA, 25 bp, Artificial
  probe
  misc_feature (1)..(25): SEQ ID NO: 865; WAN024CGT_at; Start 480; Stop 504
tgagcaagcggtcgaagccgctcat

SEQ ID NO: 117999 - DNA, 25 bp, Artificial
  probe
  misc_feature (1)..(25): SEQ ID NO: 865; WAN024CGT_at; Start 992; Stop 1016
tggttgtcgcatccaagggctaccc

SEQ ID NO: 118000 - DNA, 25 bp, Artificial
  probe
  misc_feature (1)..(25): SEQ ID NO: 865; WAN024CGT_at; Start 628; Stop 652
acggctcaggaccacaaacgtgcct

SEQ ID NO: 118001 - DNA, 25 bp, Artificial
  probe
  misc_feature (1)..(25): SEQ ID NO: 865; WAN024CGT_at; Start 361; Stop 385
tatggcacattttcagatttcgagg

SEQ ID NO: 118002 - DNA, 25 bp, Artificial
  probe
  misc_feature (1)..(25): SEQ ID NO: 865; WAN024CGT_at; Start 408; Stop 432
gcatggtgcgcctatcgtagtcaag

SEQ ID NO: 118003 - DNA, 25 bp, Artificial
  probe
  misc_feature (1)..(25): SEQ ID NO: 865; WAN024CGT_at; Start 1108; Stop 1132
agagcactgctctcaaacggcggac

SEQ ID NO: 118004 - DNA, 25 bp, Artificial
  probe
  misc_feature (1)..(25): SEQ ID NO: 865; WAN024CGT_at; Start 1142; Stop 1166
tgctcgttaccacagcagataccgt

SEQ ID NO: 118005 - DNA, 25 bp, Artificial
  probe
  misc_feature (1)..(25): SEQ ID NO: 865; WAN024CGT_at; Start 1008; Stop 1032
gggctacccgctagactatgaaagg

SEQ ID NO: 118006 - DNA, 25 bp, Artificial
  probe
  misc_feature (1)..(25): SEQ ID NO: 865; WAN024CGT_at; Start 944; Stop 968
gcaaggagccaaatatcatgtggac

SEQ ID NO: 118007 - DNA, 25 bp, Artificial
  probe
  misc_feature (1)..(25): SEQ ID NO: 865; WAN024CGT_at; Start 747; Stop 771
cattgtcaagccagttctagaaggg

SEQ ID NO: 118008 - DNA, 25 bp, Artificial
  probe
  misc_feature (1)..(25): SEQ ID NO: 865; WAN024CGT_at; Start 1242; Stop 1266
cggaagcaaggcaattaagtaacta

SEQ ID NO: 118009 - DNA, 25 bp, Artificial
  probe
  misc_feature (1)..(25): SEQ ID NO: 865; WAN024CGT_at; Start 655; Stop 679
gatggcgacaaagggcctaacacgg

SEQ ID NO: 118010 - DNA, 25 bp, Artificial
  probe
  misc_feature (1)..(25): SEQ ID NO: 865; WAN024CGT_at; Start 497; Stop 521
ccgctcatgagatgcttttggacaa

SEQ ID NO: 118011 - DNA, 25 bp, Artificial
  probe
  misc_feature (1)..(25): SEQ ID NO: 865; WAN024CGT_at; Start 36; Stop 60
gcatgcgattgctaaaaagttactt

SEQ ID NO: 118012 - DNA, 25 bp, Artificial
  probe
  misc_feature (1)..(25): SEQ ID NO: 865; WAN024CGT_at; Start 671; Stop 695
ctaacacgggtggtatgggtgccta

SEQ ID NO: 118013 - DNA, 25 bp, Artificial
  probe
  misc_feature (1)..(25): SEQ ID NO: 865; WAN024CGT_at; Start 564; Stop 588
ccttgaaggagaggaattttcactc

SEQ ID NO: 118014 - DNA, 25 bp, Artificial
  probe
  misc_feature (1)..(25): SEQ ID NO: 865; WAN024CGT_at; Start 1232; Stop 1256
gaacagatatcggaagcaaggcaat

SEQ ID NO: 118015 - DNA, 25 bp, Artificial
  probe
  misc_feature (1)..(25): SEQ ID NO: 865; WAN024CGT_at; Start 522; Stop 546
taaatttggtgactcaggtgcgcgc

SEQ ID NO: 118016 - DNA, 25 bp, Artificial
  probe
  misc_feature (1)..(25): SEQ ID NO: 865; WAN024CGT_at; Start 1122; Stop 1146
aaacggcggacgagtttatatgctc

SEQ ID NO: 118017 - DNA, 25 bp, Artificial
  probe
  misc_feature (1)..(25): SEQ ID NO: 865; WAN024CGT_at; Start 1046; Stop 1070
cagccaagacagaaggcgatgtcat

SEQ ID NO: 118018 - DNA, 25 bp, Artificial
  probe
  misc_feature (1)..(25): SEQ ID NO: 865; WAN024CGT_at; Start 981; Stop 1005
gactctgggtgtggttgtcgcatcc

SEQ ID NO: 118019 - DNA, 25 bp, Artificial
  probe
  misc_feature (1)..(25): SEQ ID NO: 865; WAN024CGT_at; Start 1032; Stop 1056
gggcgttgagttgccagccaagaca

SEQ ID NO: 118020 - DNA, 25 bp, Artificial
  probe
  misc_feature (1)..(25): SEQ ID NO: 865; WAN024CGT_at; Start 540; Stop 564
tgcgcgcgtggttattgaggaattc

SEQ ID NO: 118021 - DNA, 25 bp, Artificial
  probe
  misc_feature (1)..(25): SEQ ID NO: 770; WAN024CGU_at; Start 112; Stop 136
ctttcgataagtgttgttgaagaat

SEQ ID NO: 118022 - DNA, 25 bp, Artificial
  probe
  misc_feature (1)..(25): SEQ ID NO: 770; WAN024CGU_at; Start 128; Stop 152
ttgaagaattaaggccacgttggct

SEQ ID NO: 118023 - DNA, 25 bp, Artificial
  probe
  misc_feature (1)..(25): SEQ ID NO: 770; WAN024CGU_at; Start 125; Stop 149
ttgttgaagaattaaggccacgttg

SEQ ID NO: 118024 - DNA, 25 bp, Artificial
  probe
  misc_feature (1)..(25): SEQ ID NO: 770; WAN024CGU_at; Start 133; Stop 157
gaattaaggccacgttggctttctc

SEQ ID NO: 118025 - DNA, 25 bp, Artificial
  probe
  misc_feature (1)..(25): SEQ ID NO: 770; WAN024CGU_at; Start 54; Stop 78
gagcgtggggctttttttgtttgca

SEQ ID NO: 118026 - DNA, 25 bp, Artificial
  probe
  misc_feature (1)..(25): SEQ ID NO: 770; WAN024CGU_at; Start 134; Stop 158
aattaaggccacgttggctttctct

SEQ ID NO: 118027 - DNA, 25 bp, Artificial
  probe
  misc_feature (1)..(25): SEQ ID NO: 770; WAN024CGU_at; Start 144; Stop 168
acgttggctttctcttcctctgtca

SEQ ID NO: 118028 - DNA, 25 bp, Artificial
  probe
  misc_feature (1)..(25): SEQ ID NO: 770; WAN024CGU_at; Start 98; Stop 122
cagttggttttattctttcgataag

SEQ ID NO: 118029 - DNA, 25 bp, Artificial
  probe
  misc_feature (1)..(25): SEQ ID NO: 770; WAN024CGU_at; Start 5; Stop 29
aaatcttttcctgtcacatgcctca

SEQ ID NO: 118030 - DNA, 25 bp, Artificial
  probe
  misc_feature (1)..(25): SEQ ID NO: 770; WAN024CGU_at; Start 141; Stop 165
gccacgttggctttctcttcctctg

SEQ ID NO: 118031 - DNA, 25 bp, Artificial
  probe
  misc_feature (1)..(25): SEQ ID NO: 770; WAN024CGU_at; Start 36; Stop 60
gactcgccaaagttttgagagcgtg

SEQ ID NO: 118032 - DNA, 25 bp, Artificial
  probe
  misc_feature (1)..(25): SEQ ID NO: 770; WAN024CGU_at; Start 2; Stop 26
tgaaaatcttttcctgtcacatgcc

SEQ ID NO: 118033 - DNA, 25 bp, Artificial
  probe
  misc_feature (1)..(25): SEQ ID NO: 770; WAN024CGU_at; Start 33; Stop 57
tcagactcgccaaagttttgagagc

SEQ ID NO: 118034 - DNA, 25 bp, Artificial
  probe
  misc_feature (1)..(25): SEQ ID NO: 770; WAN024CGU_at; Start 6; Stop 30
aatcttttcctgtcacatgcctcac

SEQ ID NO: 118035 - DNA, 25 bp, Artificial
  probe
  misc_feature (1)..(25): SEQ ID NO: 770; WAN024CGU_at; Start 12; Stop 36
ttcctgtcacatgcctcacgctcag

SEQ ID NO: 118036 - DNA, 25 bp, Artificial
  probe
  misc_feature (1)..(25): SEQ ID NO: 770; WAN024CGU_at; Start 27; Stop 51
tcacgctcagactcgccaaagtttt

SEQ ID NO: 118037 - DNA, 25 bp, Artificial
  probe
  misc_feature (1)..(25): SEQ ID NO: 770; WAN024CGU_at; Start 120; Stop 144
aagtgttgttgaagaattaaggcca

SEQ ID NO: 118038 - DNA, 25 bp, Artificial
  probe
  misc_feature (1)..(25): SEQ ID NO: 770; WAN024CGU_at; Start 140; Stop 164
ggccacgttggctttctcttcctct

SEQ ID NO: 118039 - DNA, 25 bp, Artificial
  probe
  misc_feature (1)..(25): SEQ ID NO: 770; WAN024CGU_at; Start 119; Stop 143
taagtgttgttgaagaattaaggcc

SEQ ID NO: 118040 - DNA, 25 bp, Artificial
  probe
  misc_feature (1)..(25): SEQ ID NO: 770; WAN024CGU_at; Start 126; Stop 150
tgttgaagaattaaggccacgttgg

SEQ ID NO: 118041 - DNA, 25 bp, Artificial
  probe
  misc_feature (1)..(25): SEQ ID NO: 770; WAN024CGU_at; Start 34; Stop 58
cagactcgccaaagttttgagagcg

SEQ ID NO: 118042 - DNA, 25 bp, Artificial
  probe
  misc_feature (1)..(25): SEQ ID NO: 770; WAN024CGU_at; Start 38; Stop 62
ctcgccaaagttttgagagcgtggg

SEQ ID NO: 118043 - DNA, 25 bp, Artificial
  probe
  misc_feature (1)..(25): SEQ ID NO: 770; WAN024CGU_at; Start 28; Stop 52
cacgctcagactcgccaaagttttg

SEQ ID NO: 118044 - DNA, 25 bp, Artificial
  probe
  misc_feature (1)..(25): SEQ ID NO: 770; WAN024CGU_at; Start 37; Stop 61
actcgccaaagttttgagagcgtgg

SEQ ID NO: 118045 - DNA, 25 bp, Artificial
  probe
  misc_feature (1)..(25): SEQ ID NO: 770; WAN024CGU_at; Start 108; Stop 132
tattctttcgataagtgttgttgaa

SEQ ID NO: 118046 - DNA, 25 bp, Artificial
  probe
  misc_feature (1)..(25): SEQ ID NO: 770; WAN024CGU_at; Start 123; Stop 147
tgttgttgaagaattaaggccacgt

SEQ ID NO: 118047 - DNA, 25 bp, Artificial
  probe
  misc_feature (1)..(25): SEQ ID NO: 770; WAN024CGU_at; Start 7; Stop 31
atcttttcctgtcacatgcctcacg

SEQ ID NO: 118048 - DNA, 25 bp, Artificial
  probe
  misc_feature (1)..(25): SEQ ID NO: 770; WAN024CGU_at; Start 127; Stop 151
gttgaagaattaaggccacgttggc

SEQ ID NO: 118049 - DNA, 25 bp, Artificial
  probe
  misc_feature (1)..(25): SEQ ID NO: 770; WAN024CGU_at; Start 143; Stop 167
cacgttggctttctcttcctctgtc

SEQ ID NO: 118050 - DNA, 25 bp, Artificial
  probe
  misc_feature (1)..(25): SEQ ID NO: 770; WAN024CGU_at; Start 42; Stop 66
ccaaagttttgagagcgtggggctt

SEQ ID NO: 118051 - DNA, 25 bp, Artificial
  probe
  misc_feature (1)..(25): SEQ ID NO: 770; WAN024CGU_at; Start 137; Stop 161
taaggccacgttggctttctcttcc

SEQ ID NO: 118052 - DNA, 25 bp, Artificial
  probe
  misc_feature (1)..(25): SEQ ID NO: 770; WAN024CGU_at; Start 3; Stop 27
gaaaatcttttcctgtcacatgcct

SEQ ID NO: 118053 - DNA, 25 bp, Artificial
  probe
  misc_feature (1)..(25): SEQ ID NO: 770; WAN024CGU_at; Start 79; Stop 103
attatttccattttggaaacagttg

SEQ ID NO: 118054 - DNA, 25 bp, Artificial
  probe
  misc_feature (1)..(25): SEQ ID NO: 770; WAN024CGU_at; Start 31; Stop 55
gctcagactcgccaaagttttgaga

SEQ ID NO: 118055 - DNA, 25 bp, Artificial
  probe
  misc_feature (1)..(25): SEQ ID NO: 1175; WAN024CGV_at; Start 7; Stop 31
aacaacatgttgaccaatatcgcac

SEQ ID NO: 118056 - DNA, 25 bp, Artificial
  probe
  misc_feature (1)..(25): SEQ ID NO: 1175; WAN024CGV_at; Start 71; Stop 95
gaacacacagattggagaacttaga

SEQ ID NO: 118057 - DNA, 25 bp, Artificial
  probe
  misc_feature (1)..(25): SEQ ID NO: 1175; WAN024CGV_at; Start 65; Stop 89
gaaaacgaacacacagattggagaa

SEQ ID NO: 118058 - DNA, 25 bp, Artificial
  probe
  misc_feature (1)..(25): SEQ ID NO: 1175; WAN024CGV_at; Start 6; Stop 30
taacaacatgttgaccaatatcgca

SEQ ID NO: 118059 - DNA, 25 bp, Artificial
  probe
  misc_feature (1)..(25): SEQ ID NO: 1175; WAN024CGV_at; Start 14; Stop 38
tgttgaccaatatcgcacttaaagc

SEQ ID NO: 118060 - DNA, 25 bp, Artificial
  probe
  misc_feature (1)..(25): SEQ ID NO: 1175; WAN024CGV_at; Start 45; Stop 69
ggagcttgctcttgaaaatagaaaa

SEQ ID NO: 118061 - DNA, 25 bp, Artificial
  probe
  misc_feature (1)..(25): SEQ ID NO: 1175; WAN024CGV_at; Start 67; Stop 91
aaacgaacacacagattggagaact

SEQ ID NO: 118062 - DNA, 25 bp, Artificial
  probe
  misc_feature (1)..(25): SEQ ID NO: 1175; WAN024CGV_at; Start 88; Stop 112
aacttagaaaatgaacacagaacag

SEQ ID NO: 118063 - DNA, 25 bp, Artificial
  probe
  misc_feature (1)..(25): SEQ ID NO: 1175; WAN024CGV_at; Start 54; Stop 78
tcttgaaaatagaaaacgaacacac

SEQ ID NO: 118064 - DNA, 25 bp, Artificial
  probe
  misc_feature (1)..(25): SEQ ID NO: 1175; WAN024CGV_at; Start 48; Stop 72
gcttgctcttgaaaatagaaaacga

SEQ ID NO: 118065 - DNA, 25 bp, Artificial
  probe
  misc_feature (1)..(25): SEQ ID NO: 1175; WAN024CGV_at; Start 9; Stop 33
caacatgttgaccaatatcgcactt

SEQ ID NO: 118066 - DNA, 25 bp, Artificial
  probe
  misc_feature (1)..(25): SEQ ID NO: 1175; WAN024CGV_at; Start 15; Stop 39
gttgaccaatatcgcacttaaagca

SEQ ID NO: 118067 - DNA, 25 bp, Artificial
  probe
  misc_feature (1)..(25): SEQ ID NO: 1175; WAN024CGV_at; Start 17; Stop 41
tgaccaatatcgcacttaaagcaat

SEQ ID NO: 118068 - DNA, 25 bp, Artificial
  probe
  misc_feature (1)..(25): SEQ ID NO: 1175; WAN024CGV_at; Start 29; Stop 53
cacttaaagcaattcaggagcttgc

SEQ ID NO: 118069 - DNA, 25 bp, Artificial
  probe
  misc_feature (1)..(25): SEQ ID NO: 1175; WAN024CGV_at; Start 43; Stop 67
caggagcttgctcttgaaaatagaa

SEQ ID NO: 118070 - DNA, 25 bp, Artificial
  probe
  misc_feature (1)..(25): SEQ ID NO: 1175; WAN024CGV_at; Start 12; Stop 36
catgttgaccaatatcgcacttaaa

SEQ ID NO: 118071 - DNA, 25 bp, Artificial
  probe
  misc_feature (1)..(25): SEQ ID NO: 1175; WAN024CGV_at; Start 63; Stop 87
tagaaaacgaacacacagattggag

SEQ ID NO: 118072 - DNA, 25 bp, Artificial
  probe
  misc_feature (1)..(25): SEQ ID NO: 1175; WAN024CGV_at; Start 33; Stop 57
taaagcaattcaggagcttgctctt

SEQ ID NO: 118073 - DNA, 25 bp, Artificial
  probe
  misc_feature (1)..(25): SEQ ID NO: 1175; WAN024CGV_at; Start 76; Stop 100
cacagattggagaacttagaaaatg

SEQ ID NO: 118074 - DNA, 25 bp, Artificial
  probe
  misc_feature (1)..(25): SEQ ID NO: 1175; WAN024CGV_at; Start 38; Stop 62
caattcaggagcttgctcttgaaaa

SEQ ID NO: 118075 - DNA, 25 bp, Artificial
  probe
  misc_feature (1)..(25): SEQ ID NO: 1175; WAN024CGV_at; Start 27; Stop 51
cgcacttaaagcaattcaggagctt

SEQ ID NO: 118076 - DNA, 25 bp, Artificial
  probe
  misc_feature (1)..(25): SEQ ID NO: 1175; WAN024CGV_at; Start 74; Stop 98
cacacagattggagaacttagaaaa

SEQ ID NO: 118077 - DNA, 25 bp, Artificial
  probe
  misc_feature (1)..(25): SEQ ID NO: 1175; WAN024CGV_at; Start 24; Stop 48
tatcgcacttaaagcaattcaggag

SEQ ID NO: 118078 - DNA, 25 bp, Artificial
  probe
  misc_feature (1)..(25): SEQ ID NO: 1175; WAN024CGV_at; Start 61; Stop 85
aatagaaaacgaacacacagattgg

SEQ ID NO: 118079 - DNA, 25 bp, Artificial
  probe
  misc_feature (1)..(25): SEQ ID NO: 1175; WAN024CGV_at; Start 70; Stop 94
cgaacacacagattggagaacttag

SEQ ID NO: 118080 - DNA, 25 bp, Artificial
  probe
  misc_feature (1)..(25): SEQ ID NO: 1175; WAN024CGV_at; Start 87; Stop 111
gaacttagaaaatgaacacagaaca

SEQ ID NO: 118081 - DNA, 25 bp, Artificial
  probe
  misc_feature (1)..(25): SEQ ID NO: 1175; WAN024CGV_at; Start 52; Stop 76
gctcttgaaaatagaaaacgaacac

SEQ ID NO: 118082 - DNA, 25 bp, Artificial
  probe
  misc_feature (1)..(25): SEQ ID NO: 1175; WAN024CGV_at; Start 35; Stop 59
aagcaattcaggagcttgctcttga

SEQ ID NO: 118083 - DNA, 25 bp, Artificial
  probe
  misc_feature (1)..(25): SEQ ID NO: 1175; WAN024CGV_at; Start 58; Stop 82
gaaaatagaaaacgaacacacagat

SEQ ID NO: 118084 - DNA, 25 bp, Artificial
  probe
  misc_feature (1)..(25): SEQ ID NO: 1175; WAN024CGV_at; Start 31; Stop 55
cttaaagcaattcaggagcttgctc

SEQ ID NO: 118085 - DNA, 25 bp, Artificial
  probe
  misc_feature (1)..(25): SEQ ID NO: 1175; WAN024CGV_at; Start 26; Stop 50
tcgcacttaaagcaattcaggagct

SEQ ID NO: 118086 - DNA, 25 bp, Artificial
  probe
  misc_feature (1)..(25): SEQ ID NO: 1175; WAN024CGV_at; Start 79; Stop 103
agattggagaacttagaaaatgaac

SEQ ID NO: 118087 - DNA, 25 bp, Artificial
  probe
  misc_feature (1)..(25): SEQ ID NO: 1175; WAN024CGV_at; Start 18; Stop 42
gaccaatatcgcacttaaagcaatt

SEQ ID NO: 118088 - DNA, 25 bp, Artificial
  probe
  misc_feature (1)..(25): SEQ ID NO: 1175; WAN024CGV_at; Start 56; Stop 80
ttgaaaatagaaaacgaacacacag

SEQ ID NO: 118089 - DNA, 25 bp, Artificial
  probe
  misc_feature (1)..(25): SEQ ID NO: 4955; WAN024CGW_at; Start 77; Stop 101
taaatagagccttcactacttccgg

SEQ ID NO: 118090 - DNA, 25 bp, Artificial
  probe
  misc_feature (1)..(25): SEQ ID NO: 4955; WAN024CGW_at; Start 70; Stop 94
caatctgtaaatagagccttcacta

SEQ ID NO: 118091 - DNA, 25 bp, Artificial
  probe
  misc_feature (1)..(25): SEQ ID NO: 4955; WAN024CGW_at; Start 168; Stop 192
tggcacacgaacctgtttgatgacc

SEQ ID NO: 118092 - DNA, 25 bp, Artificial
  probe
  misc_feature (1)..(25): SEQ ID NO: 4955; WAN024CGW_at; Start 8; Stop 32
cgtcttcaacaaacactgactccaa

SEQ ID NO: 118093 - DNA, 25 bp, Artificial
  probe
  misc_feature (1)..(25): SEQ ID NO: 4955; WAN024CGW_at; Start 133; Stop 157
gcttcaaatctgtcaatggtatcat

SEQ ID NO: 118094 - DNA, 25 bp, Artificial
  probe
  misc_feature (1)..(25): SEQ ID NO: 4955; WAN024CGW_at; Start 152; Stop 176
tatcatcagctagtcgtggcacacg

SEQ ID NO: 118095 - DNA, 25 bp, Artificial
  probe
  misc_feature (1)..(25): SEQ ID NO: 4955; WAN024CGW_at; Start 62; Stop 86
caaaaagtcaatctgtaaatagagc

SEQ ID NO: 118096 - DNA, 25 bp, Artificial
  probe
  misc_feature (1)..(25): SEQ ID NO: 4955; WAN024CGW_at; Start 147; Stop 171
aatggtatcatcagctagtcgtggc

SEQ ID NO: 118097 - DNA, 25 bp, Artificial
  probe
  misc_feature (1)..(25): SEQ ID NO: 4955; WAN024CGW_at; Start 40; Stop 64
tcaaagatatcatatgaatcatcaa

SEQ ID NO: 118098 - DNA, 25 bp, Artificial
  probe
  misc_feature (1)..(25): SEQ ID NO: 4955; WAN024CGW_at; Start 122; Stop 146
catggatgcgagcttcaaatctgtc

SEQ ID NO: 118099 - DNA, 25 bp, Artificial
  probe
  misc_feature (1)..(25): SEQ ID NO: 4955; WAN024CGW_at; Start 117; Stop 141
tgcttcatggatgcgagcttcaaat

SEQ ID NO: 118100 - DNA, 25 bp, Artificial
  probe
  misc_feature (1)..(25): SEQ ID NO: 4955; WAN024CGW_at; Start 185; Stop 209
tgatgacctggcctgtatccacacc

SEQ ID NO: 118101 - DNA, 25 bp, Artificial
  probe
  misc_feature (1)..(25): SEQ ID NO: 4955; WAN024CGW_at; Start 126; Stop 150
gatgcgagcttcaaatctgtcaatg

SEQ ID NO: 118102 - DNA, 25 bp, Artificial
  probe
  misc_feature (1)..(25): SEQ ID NO: 4955; WAN024CGW_at; Start 108; Stop 132
cctgtactctgcttcatggatgcga

SEQ ID NO: 118103 - DNA, 25 bp, Artificial
  probe
  misc_feature (1)..(25): SEQ ID NO: 4955; WAN024CGW_at; Start 179; Stop 203
cctgtttgatgacctggcctgtatc

SEQ ID NO: 118104 - DNA, 25 bp, Artificial
  probe
  misc_feature (1)..(25): SEQ ID NO: 4955; WAN024CGW_at; Start 21; Stop 45
cactgactccaatttaaaatcaaag

SEQ ID NO: 118105 - DNA, 25 bp, Artificial
  probe
  misc_feature (1)..(25): SEQ ID NO: 4955; WAN024CGW_at; Start 201; Stop 225
atccacacccgaatccacccagtga

SEQ ID NO: 118106 - DNA, 25 bp, Artificial
  probe
  misc_feature (1)..(25): SEQ ID NO: 4955; WAN024CGW_at; Start 176; Stop 200
gaacctgtttgatgacctggcctgt

SEQ ID NO: 118107 - DNA, 25 bp, Artificial
  probe
  misc_feature (1)..(25): SEQ ID NO: 4955; WAN024CGW_at; Start 154; Stop 178
tcatcagctagtcgtggcacacgaa

SEQ ID NO: 118108 - DNA, 25 bp, Artificial
  probe
  misc_feature (1)..(25): SEQ ID NO: 4955; WAN024CGW_at; Start 82; Stop 106
agagccttcactacttccggataca

SEQ ID NO: 118109 - DNA, 25 bp, Artificial
  probe
  misc_feature (1)..(25): SEQ ID NO: 4955; WAN024CGW_at; Start 110; Stop 134
tgtactctgcttcatggatgcgagc

SEQ ID NO: 118110 - DNA, 25 bp, Artificial
  probe
  misc_feature (1)..(25): SEQ ID NO: 4955; WAN024CGW_at; Start 165; Stop 189
tcgtggcacacgaacctgtttgatg

SEQ ID NO: 118111 - DNA, 25 bp, Artificial
  probe
  misc_feature (1)..(25): SEQ ID NO: 4955; WAN024CGW_at; Start 157; Stop 181
tcagctagtcgtggcacacgaacct

SEQ ID NO: 118112 - DNA, 25 bp, Artificial
  probe
  misc_feature (1)..(25): SEQ ID NO: 4955; WAN024CGW_at; Start 162; Stop 186
tagtcgtggcacacgaacctgtttg

SEQ ID NO: 118113 - DNA, 25 bp, Artificial
  probe
  misc_feature (1)..(25): SEQ ID NO: 4955; WAN024CGW_at; Start 114; Stop 138
ctctgcttcatggatgcgagcttca

SEQ ID NO: 118114 - DNA, 25 bp, Artificial
  probe
  misc_feature (1)..(25): SEQ ID NO: 4955; WAN024CGW_at; Start 143; Stop 167
tgtcaatggtatcatcagctagtcg

SEQ ID NO: 118115 - DNA, 25 bp, Artificial
  probe
  misc_feature (1)..(25): SEQ ID NO: 4955; WAN024CGW_at; Start 67; Stop 91
agtcaatctgtaaatagagccttca

SEQ ID NO: 118116 - DNA, 25 bp, Artificial
  probe
  misc_feature (1)..(25): SEQ ID NO: 4955; WAN024CGW_at; Start 173; Stop 197
cacgaacctgtttgatgacctggcc

SEQ ID NO: 118117 - DNA, 25 bp, Artificial
  probe
  misc_feature (1)..(25): SEQ ID NO: 4955; WAN024CGW_at; Start 129; Stop 153
gcgagcttcaaatctgtcaatggta

SEQ ID NO: 118118 - DNA, 25 bp, Artificial
  probe
  misc_feature (1)..(25): SEQ ID NO: 4955; WAN024CGW_at; Start 55; Stop 79
gaatcatcaaaaagtcaatctgtaa

SEQ ID NO: 118119 - DNA, 25 bp, Artificial
  probe
  misc_feature (1)..(25): SEQ ID NO: 4955; WAN024CGW_at; Start 2; Stop 26
tgaagccgtcttcaacaaacactga

SEQ ID NO: 118120 - DNA, 25 bp, Artificial
  probe
  misc_feature (1)..(25): SEQ ID NO: 4955; WAN024CGW_at; Start 150; Stop 174
ggtatcatcagctagtcgtggcaca

SEQ ID NO: 118121 - DNA, 25 bp, Artificial
  probe
  misc_feature (1)..(25): SEQ ID NO: 4955; WAN024CGW_at; Start 137; Stop 161
caaatctgtcaatggtatcatcagc

SEQ ID NO: 118122 - DNA, 25 bp, Artificial
  probe
  misc_feature (1)..(25): SEQ ID NO: 4955; WAN024CGW_at; Start 52; Stop 76
tatgaatcatcaaaaagtcaatctg

SEQ ID NO: 118123 - DNA, 25 bp, Artificial
  probe
  misc_feature (1)..(25): SEQ ID NO: 1763; WAN024CGX_at; Start 156; Stop 180
aaagccaccaagagctcccatgaca

SEQ ID NO: 118124 - DNA, 25 bp, Artificial
  probe
  misc_feature (1)..(25): SEQ ID NO: 1763; WAN024CGX_at; Start 131; Stop 155
tcttggaaaggtcaaacataccacc

SEQ ID NO: 118125 - DNA, 25 bp, Artificial
  probe
  misc_feature (1)..(25): SEQ ID NO: 1763; WAN024CGX_at; Start 69; Stop 93
caacatgagcttggttccgacaccg

SEQ ID NO: 118126 - DNA, 25 bp, Artificial
  probe
  misc_feature (1)..(25): SEQ ID NO: 1763; WAN024CGX_at; Start 96; Stop 120
agtccctgaaatcaagacgggttct

SEQ ID NO: 118127 - DNA, 25 bp, Artificial
  probe
  misc_feature (1)..(25): SEQ ID NO: 1763; WAN024CGX_at; Start 183; Stop 207
tgcacgctccgtacgggccacgtgc

SEQ ID NO: 118128 - DNA, 25 bp, Artificial
  probe
  misc_feature (1)..(25): SEQ ID NO: 1763; WAN024CGX_at; Start 36; Stop 60
cccgatggtatcgtgcttgtcgtac

SEQ ID NO: 118129 - DNA, 25 bp, Artificial
  probe
  misc_feature (1)..(25): SEQ ID NO: 1763; WAN024CGX_at; Start 65; Stop 89
tagccaacatgagcttggttccgac

SEQ ID NO: 118130 - DNA, 25 bp, Artificial
  probe
  misc_feature (1)..(25): SEQ ID NO: 1763; WAN024CGX_at; Start 201; Stop 225
cacgtgctttttaatccgttcaaca

SEQ ID NO: 118131 - DNA, 25 bp, Artificial
  probe
  misc_feature (1)..(25): SEQ ID NO: 1763; WAN024CGX_at; Start 198; Stop 222
ggccacgtgctttttaatccgttca

SEQ ID NO: 118132 - DNA, 25 bp, Artificial
  probe
  misc_feature (1)..(25): SEQ ID NO: 1763; WAN024CGX_at; Start 79; Stop 103
ttggttccgacaccgtcagtccctg

SEQ ID NO: 118133 - DNA, 25 bp, Artificial
  probe
  misc_feature (1)..(25): SEQ ID NO: 1763; WAN024CGX_at; Start 128; Stop 152
cagtcttggaaaggtcaaacatacc

SEQ ID NO: 118134 - DNA, 25 bp, Artificial
  probe
  misc_feature (1)..(25): SEQ ID NO: 1763; WAN024CGX_at; Start 27; Stop 51
acagtcctgcccgatggtatcgtgc

SEQ ID NO: 118135 - DNA, 25 bp, Artificial
  probe
  misc_feature (1)..(25): SEQ ID NO: 1763; WAN024CGX_at; Start 175; Stop 199
atgacacctgcacgctccgtacggg

SEQ ID NO: 118136 - DNA, 25 bp, Artificial
  probe
  misc_feature (1)..(25): SEQ ID NO: 1763; WAN024CGX_at; Start 93; Stop 117
gtcagtccctgaaatcaagacgggt

SEQ ID NO: 118137 - DNA, 25 bp, Artificial
  probe
  misc_feature (1)..(25): SEQ ID NO: 1763; WAN024CGX_at; Start 47; Stop 71
cgtgcttgtcgtacttgatagccaa

SEQ ID NO: 118138 - DNA, 25 bp, Artificial
  probe
  misc_feature (1)..(25): SEQ ID NO: 1763; WAN024CGX_at; Start 125; Stop 149
ccccagtcttggaaaggtcaaacat

SEQ ID NO: 118139 - DNA, 25 bp, Artificial
  probe
  misc_feature (1)..(25): SEQ ID NO: 1763; WAN024CGX_at; Start 87; Stop 111
gacaccgtcagtccctgaaatcaag

SEQ ID NO: 118140 - DNA, 25 bp, Artificial
  probe
  misc_feature (1)..(25): SEQ ID NO: 1763; WAN024CGX_at; Start 53; Stop 77
tgtcgtacttgatagccaacatgag

SEQ ID NO: 118141 - DNA, 25 bp, Artificial
  probe
  misc_feature (1)..(25): SEQ ID NO: 1763; WAN024CGX_at; Start 72; Stop 96
catgagcttggttccgacaccgtca

SEQ ID NO: 118142 - DNA, 25 bp, Artificial
  probe
  misc_feature (1)..(25): SEQ ID NO: 1763; WAN024CGX_at; Start 50; Stop 74
gcttgtcgtacttgatagccaacat

SEQ ID NO: 118143 - DNA, 25 bp, Artificial
  probe
  misc_feature (1)..(25): SEQ ID NO: 1763; WAN024CGX_at; Start 31; Stop 55
tcctgcccgatggtatcgtgcttgt

SEQ ID NO: 118144 - DNA, 25 bp, Artificial
  probe
  misc_feature (1)..(25): SEQ ID NO: 1763; WAN024CGX_at; Start 22; Stop 46
gccacacagtcctgcccgatggtat

SEQ ID NO: 118145 - DNA, 25 bp, Artificial
  probe
  misc_feature (1)..(25): SEQ ID NO: 1763; WAN024CGX_at; Start 7; Stop 31
tcgttgacacacatggccacacagt

SEQ ID NO: 118146 - DNA, 25 bp, Artificial
  probe
  misc_feature (1)..(25): SEQ ID NO: 1763; WAN024CGX_at; Start 3; Stop 27
gatgtcgttgacacacatggccaca

SEQ ID NO: 118147 - DNA, 25 bp, Artificial
  probe
  misc_feature (1)..(25): SEQ ID NO: 1763; WAN024CGX_at; Start 136; Stop 160
gaaaggtcaaacataccaccaaagc

SEQ ID NO: 118148 - DNA, 25 bp, Artificial
  probe
  misc_feature (1)..(25): SEQ ID NO: 1763; WAN024CGX_at; Start 63; Stop 87
gatagccaacatgagcttggttccg

SEQ ID NO: 118149 - DNA, 25 bp, Artificial
  probe
  misc_feature (1)..(25): SEQ ID NO: 1763; WAN024CGX_at; Start 82; Stop 106
gttccgacaccgtcagtccctgaaa

SEQ ID NO: 118150 - DNA, 25 bp, Artificial
  probe
  misc_feature (1)..(25): SEQ ID NO: 1763; WAN024CGX_at; Start 39; Stop 63
gatggtatcgtgcttgtcgtacttg

SEQ ID NO: 118151 - DNA, 25 bp, Artificial
  probe
  misc_feature (1)..(25): SEQ ID NO: 1763; WAN024CGX_at; Start 145; Stop 169
aacataccaccaaagccaccaagag

SEQ ID NO: 118152 - DNA, 25 bp, Artificial
  probe
  misc_feature (1)..(25): SEQ ID NO: 1763; WAN024CGX_at; Start 139; Stop 163
aggtcaaacataccaccaaagccac

SEQ ID NO: 118153 - DNA, 25 bp, Artificial
  probe
  misc_feature (1)..(25): SEQ ID NO: 1763; WAN024CGX_at; Start 210; Stop 234
tttaatccgttcaacaacttcataa

SEQ ID NO: 118154 - DNA, 25 bp, Artificial
  probe
  misc_feature (1)..(25): SEQ ID NO: 1763; WAN024CGX_at; Start 75; Stop 99
gagcttggttccgacaccgtcagtc

SEQ ID NO: 118155 - DNA, 25 bp, Artificial
  probe
  misc_feature (1)..(25): SEQ ID NO: 1763; WAN024CGX_at; Start 58; Stop 82
tacttgatagccaacatgagcttgg

SEQ ID NO: 118156 - DNA, 25 bp, Artificial
  probe
  misc_feature (1)..(25): SEQ ID NO: 1763; WAN024CGX_at; Start 55; Stop 79
tcgtacttgatagccaacatgagct

SEQ ID NO: 118157 - DNA, 25 bp, Artificial
  probe
  misc_feature (1)..(25): SEQ ID NO: 5307; WAN024CGY_at; Start 261; Stop 285
acatttcttcgtgtttaatctgacc

SEQ ID NO: 118158 - DNA, 25 bp, Artificial
  probe
  misc_feature (1)..(25): SEQ ID NO: 5307; WAN024CGY_at; Start 301; Stop 325
tttgaaaattggaagcactggaact

SEQ ID NO: 118159 - DNA, 25 bp, Artificial
  probe
  misc_feature (1)..(25): SEQ ID NO: 5307; WAN024CGY_at; Start 154; Stop 178
gatgcgaccaatttcatagactgct

SEQ ID NO: 118160 - DNA, 25 bp, Artificial
  probe
  misc_feature (1)..(25): SEQ ID NO: 5307; WAN024CGY_at; Start 129; Stop 153
tgacactttcgttttctttcttgac

SEQ ID NO: 118161 - DNA, 25 bp, Artificial
  probe
  misc_feature (1)..(25): SEQ ID NO: 5307; WAN024CGY_at; Start 44; Stop 68
aaactccactggaaattcttcggca

SEQ ID NO: 118162 - DNA, 25 bp, Artificial
  probe
  misc_feature (1)..(25): SEQ ID NO: 5307; WAN024CGY_at; Start 168; Stop 192
catagactgcttcatccaacaattc

SEQ ID NO: 118163 - DNA, 25 bp, Artificial
  probe
  misc_feature (1)..(25): SEQ ID NO: 5307; WAN024CGY_at; Start 210; Stop 234
tttcagggctgaccgccaacataag

SEQ ID NO: 118164 - DNA, 25 bp, Artificial
  probe
  misc_feature (1)..(25): SEQ ID NO: 5307; WAN024CGY_at; Start 35; Stop 59
tgaaaagacaaactccactggaaat

SEQ ID NO: 118165 - DNA, 25 bp, Artificial
  probe
  misc_feature (1)..(25): SEQ ID NO: 5307; WAN024CGY_at; Start 234; Stop 258
gtcccacacccatattgaagatttc

SEQ ID NO: 118166 - DNA, 25 bp, Artificial
  probe
  misc_feature (1)..(25): SEQ ID NO: 5307; WAN024CGY_at; Start 249; Stop 273
tgaagatttcaaacatttcttcgtg

SEQ ID NO: 118167 - DNA, 25 bp, Artificial
  probe
  misc_feature (1)..(25): SEQ ID NO: 5307; WAN024CGY_at; Start 303; Stop 327
tgaaaattggaagcactggaacttt

SEQ ID NO: 118168 - DNA, 25 bp, Artificial
  probe
  misc_feature (1)..(25): SEQ ID NO: 5307; WAN024CGY_at; Start 150; Stop 174
tgacgatgcgaccaatttcatagac

SEQ ID NO: 118169 - DNA, 25 bp, Artificial
  probe
  misc_feature (1)..(25): SEQ ID NO: 5307; WAN024CGY_at; Start 119; Stop 143
catttgataatgacactttcgtttt

SEQ ID NO: 118170 - DNA, 25 bp, Artificial
  probe
  misc_feature (1)..(25): SEQ ID NO: 5307; WAN024CGY_at; Start 7; Stop 31
gctcaagcacataggcatcacgatg

SEQ ID NO: 118171 - DNA, 25 bp, Artificial
  probe
  misc_feature (1)..(25): SEQ ID NO: 5307; WAN024CGY_at; Start 76; Stop 100
gaaaatttgagccattaccagaggc

SEQ ID NO: 118172 - DNA, 25 bp, Artificial
  probe
  misc_feature (1)..(25): SEQ ID NO: 5307; WAN024CGY_at; Start 229; Stop 253
cataagtcccacacccatattgaag

SEQ ID NO: 118173 - DNA, 25 bp, Artificial
  probe
  misc_feature (1)..(25): SEQ ID NO: 5307; WAN024CGY_at; Start 63; Stop 87
tcggcaatcacctgaaaatttgagc

SEQ ID NO: 118174 - DNA, 25 bp, Artificial
  probe
  misc_feature (1)..(25): SEQ ID NO: 5307; WAN024CGY_at; Start 50; Stop 74
cactggaaattcttcggcaatcacc

SEQ ID NO: 118175 - DNA, 25 bp, Artificial
  probe
  misc_feature (1)..(25): SEQ ID NO: 5307; WAN024CGY_at; Start 88; Stop 112
cattaccagaggcaaaaaccgctat

SEQ ID NO: 118176 - DNA, 25 bp, Artificial
  probe
  misc_feature (1)..(25): SEQ ID NO: 5307; WAN024CGY_at; Start 139; Stop 163
gttttctttcttgacgatgcgacca

SEQ ID NO: 118177 - DNA, 25 bp, Artificial
  probe
  misc_feature (1)..(25): SEQ ID NO: 5307; WAN024CGY_at; Start 184; Stop 208
caacaattcttttacacgctctaca

SEQ ID NO: 118178 - DNA, 25 bp, Artificial
  probe
  misc_feature (1)..(25): SEQ ID NO: 5307; WAN024CGY_at; Start 31; Stop 55
ggtctgaaaagacaaactccactgg

SEQ ID NO: 118179 - DNA, 25 bp, Artificial
  probe
  misc_feature (1)..(25): SEQ ID NO: 5307; WAN024CGY_at; Start 172; Stop 196
gactgcttcatccaacaattctttt

SEQ ID NO: 118180 - DNA, 25 bp, Artificial
  probe
  misc_feature (1)..(25): SEQ ID NO: 5307; WAN024CGY_at; Start 215; Stop 239
gggctgaccgccaacataagtccca

SEQ ID NO: 118181 - DNA, 25 bp, Artificial
  probe
  misc_feature (1)..(25): SEQ ID NO: 5307; WAN024CGY_at; Start 14; Stop 38
cacataggcatcacgatggtctgaa

SEQ ID NO: 118182 - DNA, 25 bp, Artificial
  probe
  misc_feature (1)..(25): SEQ ID NO: 5307; WAN024CGY_at; Start 203; Stop 227
tctacattttcagggctgaccgcca

SEQ ID NO: 118183 - DNA, 25 bp, Artificial
  probe
  misc_feature (1)..(25): SEQ ID NO: 5307; WAN024CGY_at; Start 193; Stop 217
ttttacacgctctacattttcaggg

SEQ ID NO: 118184 - DNA, 25 bp, Artificial
  probe
  misc_feature (1)..(25): SEQ ID NO: 5307; WAN024CGY_at; Start 10; Stop 34
caagcacataggcatcacgatggtc

SEQ ID NO: 118185 - DNA, 25 bp, Artificial
  probe
  misc_feature (1)..(25): SEQ ID NO: 5307; WAN024CGY_at; Start 24; Stop 48
tcacgatggtctgaaaagacaaact

SEQ ID NO: 118186 - DNA, 25 bp, Artificial
  probe
  misc_feature (1)..(25): SEQ ID NO: 5307; WAN024CGY_at; Start 83; Stop 107
tgagccattaccagaggcaaaaacc

SEQ ID NO: 118187 - DNA, 25 bp, Artificial
  probe
  misc_feature (1)..(25): SEQ ID NO: 5307; WAN024CGY_at; Start 1; Stop 25
ttgcacgctcaagcacataggcatc

SEQ ID NO: 118188 - DNA, 25 bp, Artificial
  probe
  misc_feature (1)..(25): SEQ ID NO: 5307; WAN024CGY_at; Start 159; Stop 183
gaccaatttcatagactgcttcatc

SEQ ID NO: 118189 - DNA, 25 bp, Artificial
  probe
  misc_feature (1)..(25): SEQ ID NO: 5307; WAN024CGY_at; Start 198; Stop 222
cacgctctacattttcagggctgac

SEQ ID NO: 118190 - DNA, 25 bp, Artificial
  probe
  misc_feature (1)..(25): SEQ ID NO: 5307; WAN024CGY_at; Start 55; Stop 79
gaaattcttcggcaatcacctgaaa

SEQ ID NO: 118191 - DNA, 25 bp, Artificial
  probe
  misc_feature (1)..(25): SEQ ID NO: 613; WAN024CGZ_at; Start 38; Stop 62
caaattttcaggtgattgccgaaga

SEQ ID NO: 118192 - DNA, 25 bp, Artificial
  probe
  misc_feature (1)..(25): SEQ ID NO: 613; WAN024CGZ_at; Start 203; Stop 227
tcttggaagaacaccagattgactt

SEQ ID NO: 118193 - DNA, 25 bp, Artificial
  probe
  misc_feature (1)..(25): SEQ ID NO: 613; WAN024CGZ_at; Start 406; Stop 430
ggtgtggatacaggccaggtcatca

SEQ ID NO: 118194 - DNA, 25 bp, Artificial
  probe
  misc_feature (1)..(25): SEQ ID NO: 613; WAN024CGZ_at; Start 518; Stop 542
aagtagtgaaggctctatttacaga

SEQ ID NO: 118195 - DNA, 25 bp, Artificial
  probe
  misc_feature (1)..(25): SEQ ID NO: 613; WAN024CGZ_at; Start 366; Stop 390
cgtgggtcagtctggtgtgaccatt

SEQ ID NO: 118196 - DNA, 25 bp, Artificial
  probe
  misc_feature (1)..(25): SEQ ID NO: 613; WAN024CGZ_at; Start 216; Stop 240
ccagattgacttggtttgcctagca

SEQ ID NO: 118197 - DNA, 25 bp, Artificial
  probe
  misc_feature (1)..(25): SEQ ID NO: 613; WAN024CGZ_at; Start 176; Stop 200
cagactacgaagcagcccttgtcga

SEQ ID NO: 118198 - DNA, 25 bp, Artificial
  probe
  misc_feature (1)..(25): SEQ ID NO: 613; WAN024CGZ_at; Start 441; Stop 465
tgtgccacgactagctgatgatacc

SEQ ID NO: 118199 - DNA, 25 bp, Artificial
  probe
  misc_feature (1)..(25): SEQ ID NO: 613; WAN024CGZ_at; Start 477; Stop 501
tgaagctcgcatccatgaagcagag

SEQ ID NO: 118200 - DNA, 25 bp, Artificial
  probe
  misc_feature (1)..(25): SEQ ID NO: 613; WAN024CGZ_at; Start 9; Stop 33
aatagcggtttttgcctctggtaat

SEQ ID NO: 118201 - DNA, 25 bp, Artificial
  probe
  misc_feature (1)..(25): SEQ ID NO: 613; WAN024CGZ_at; Start 286; Stop 310
ggtcggattgtcaacattcatccag

SEQ ID NO: 118202 - DNA, 25 bp, Artificial
  probe
  misc_feature (1)..(25): SEQ ID NO: 613; WAN024CGZ_at; Start 82; Stop 106
ttttcagaccatcgtgatgcctatg

SEQ ID NO: 118203 - DNA, 25 bp, Artificial
  probe
  misc_feature (1)..(25): SEQ ID NO: 613; WAN024CGZ_at; Start 223; Stop 247
gacttggtttgcctagcaggctaca

SEQ ID NO: 118204 - DNA, 25 bp, Artificial
  probe
  misc_feature (1)..(25): SEQ ID NO: 613; WAN024CGZ_at; Start 274; Stop 298
tcggcttatgaaggtcggattgtca

SEQ ID NO: 118205 - DNA, 25 bp, Artificial
  probe
  misc_feature (1)..(25): SEQ ID NO: 613; WAN024CGZ_at; Start 509; Stop 533
tgtatccggaagtagtgaaggctct

SEQ ID NO: 118206 - DNA, 25 bp, Artificial
  probe
  misc_feature (1)..(25): SEQ ID NO: 613; WAN024CGZ_at; Start 51; Stop 75
gattgccgaagaatttccagtggag

SEQ ID NO: 118207 - DNA, 25 bp, Artificial
  probe
  misc_feature (1)..(25): SEQ ID NO: 613; WAN024CGZ_at; Start 67; Stop 91
ccagtggagtttgtcttttcagacc

SEQ ID NO: 118208 - DNA, 25 bp, Artificial
  probe
  misc_feature (1)..(25): SEQ ID NO: 613; WAN024CGZ_at; Start 121; Stop 145
aagcagctcggcgttctgtcctatg

SEQ ID NO: 118209 - DNA, 25 bp, Artificial
  probe
  misc_feature (1)..(25): SEQ ID NO: 613; WAN024CGZ_at; Start 300; Stop 324
cattcatccagcctacttgccagaa

SEQ ID NO: 118210 - DNA, 25 bp, Artificial
  probe
  misc_feature (1)..(25): SEQ ID NO: 613; WAN024CGZ_at; Start 483; Stop 507
tcgcatccatgaagcagagtacagg

SEQ ID NO: 118211 - DNA, 25 bp, Artificial
  probe
  misc_feature (1)..(25): SEQ ID NO: 613; WAN024CGZ_at; Start 135; Stop 159
tctgtcctatgcttttgaactcaag

SEQ ID NO: 118212 - DNA, 25 bp, Artificial
  probe
  misc_feature (1)..(25): SEQ ID NO: 613; WAN024CGZ_at; Start 25; Stop 49
tctggtaatggctcaaattttcagg

SEQ ID NO: 118213 - DNA, 25 bp, Artificial
  probe
  misc_feature (1)..(25): SEQ ID NO: 613; WAN024CGZ_at; Start 462; Stop 486
taccattgacagatttgaagctcgc

SEQ ID NO: 118214 - DNA, 25 bp, Artificial
  probe
  misc_feature (1)..(25): SEQ ID NO: 613; WAN024CGZ_at; Start 378; Stop 402
tggtgtgaccattcactgggtggat

SEQ ID NO: 118215 - DNA, 25 bp, Artificial
  probe
  misc_feature (1)..(25): SEQ ID NO: 613; WAN024CGZ_at; Start 260; Stop 284
gaccaaccttattgtcggcttatga

SEQ ID NO: 118216 - DNA, 25 bp, Artificial
  probe
  misc_feature (1)..(25): SEQ ID NO: 613; WAN024CGZ_at; Start 426; Stop 450
catcaaacaggttcgtgtgccacga

SEQ ID NO: 118217 - DNA, 25 bp, Artificial
  probe
  misc_feature (1)..(25): SEQ ID NO: 613; WAN024CGZ_at; Start 111; Stop 135
tgagcgtgcaaagcagctcggcgtt

SEQ ID NO: 118218 - DNA, 25 bp, Artificial
  probe
  misc_feature (1)..(25): SEQ ID NO: 613; WAN024CGZ_at; Start 327; Stop 351
tccaggagctcatgggattgaggat

SEQ ID NO: 118219 - DNA, 25 bp, Artificial
  probe
  misc_feature (1)..(25): SEQ ID NO: 613; WAN024CGZ_at; Start 313; Stop 337
tacttgccagaatttccaggagctc

SEQ ID NO: 118220 - DNA, 25 bp, Artificial
  probe
  misc_feature (1)..(25): SEQ ID NO: 613; WAN024CGZ_at; Start 418; Stop 442
ggccaggtcatcaaacaggttcgtg

SEQ ID NO: 118221 - DNA, 25 bp, Artificial
  probe
  misc_feature (1)..(25): SEQ ID NO: 613; WAN024CGZ_at; Start 97; Stop 121
gatgcctatgtgcttgagcgtgcaa

SEQ ID NO: 118222 - DNA, 25 bp, Artificial
  probe
  misc_feature (1)..(25): SEQ ID NO: 613; WAN024CGZ_at; Start 188; Stop 212
cagcccttgtcgaactcttggaaga

SEQ ID NO: 118223 - DNA, 25 bp, Artificial
  probe
  misc_feature (1)..(25): SEQ ID NO: 613; WAN024CGZ_at; Start 150; Stop 174
tgaactcaaggagtttgagagcaag

SEQ ID NO: 118224 - DNA, 25 bp, Artificial
  probe
  misc_feature (1)..(25): SEQ ID NO: 613; WAN024CGZ_at; Start 448; Stop 472
cgactagctgatgataccattgaca

SEQ ID NO: 118225 - DNA, 25 bp, Artificial
  probe
  misc_feature (1)..(25): SEQ ID NO: 2723; WAN024CH2_at; Start 769; Stop 793
gaagagttggtcaacggcattgccc

SEQ ID NO: 118226 - DNA, 25 bp, Artificial
  probe
  misc_feature (1)..(25): SEQ ID NO: 2723; WAN024CH2_at; Start 497; Stop 521
tgtacggcgaagacgactatgactt

SEQ ID NO: 118227 - DNA, 25 bp, Artificial
  probe
  misc_feature (1)..(25): SEQ ID NO: 2723; WAN024CH2_at; Start 581; Stop 605
tagagggagatgttcttctcggact

SEQ ID NO: 118228 - DNA, 25 bp, Artificial
  probe
  misc_feature (1)..(25): SEQ ID NO: 2723; WAN024CH2_at; Start 442; Stop 466
tgtgtgcaggctggtgctgccctca

SEQ ID NO: 118229 - DNA, 25 bp, Artificial
  probe
  misc_feature (1)..(25): SEQ ID NO: 2723; WAN024CH2_at; Start 724; Stop 748
gagccgactcgtatctatgtcaagg

SEQ ID NO: 118230 - DNA, 25 bp, Artificial
  probe
  misc_feature (1)..(25): SEQ ID NO: 2723; WAN024CH2_at; Start 614; Stop 638
gtgggattcactcaaatggttactc

SEQ ID NO: 118231 - DNA, 25 bp, Artificial
  probe
  misc_feature (1)..(25): SEQ ID NO: 2723; WAN024CH2_at; Start 223; Stop 247
gaacccgtcttgatttcagggactg

SEQ ID NO: 118232 - DNA, 25 bp, Artificial
  probe
  misc_feature (1)..(25): SEQ ID NO: 2723; WAN024CH2_at; Start 336; Stop 360
catcattgctgcaggtgcggaaccc

SEQ ID NO: 118233 - DNA, 25 bp, Artificial
  probe
  misc_feature (1)..(25): SEQ ID NO: 2723; WAN024CH2_at; Start 844; Stop 868
gacctagctgctgaaattgatgaaa

SEQ ID NO: 118234 - DNA, 25 bp, Artificial
  probe
  misc_feature (1)..(25): SEQ ID NO: 2723; WAN024CH2_at; Start 560; Stop 584
tcattgacggttcaaaggtggtaga

SEQ ID NO: 118235 - DNA, 25 bp, Artificial
  probe
  misc_feature (1)..(25): SEQ ID NO: 2723; WAN024CH2_at; Start 739; Stop 763
tatgtcaaggctgtcttgccgctca

SEQ ID NO: 118236 - DNA, 25 bp, Artificial
  probe
  misc_feature (1)..(25): SEQ ID NO: 2723; WAN024CH2_at; Start 282; Stop 306
gtacgacaagcacgataccatcggg

SEQ ID NO: 118237 - DNA, 25 bp, Artificial
  probe
  misc_feature (1)..(25): SEQ ID NO: 2723; WAN024CH2_at; Start 940; Stop 964
gaaatcttcaatatgggtgtgggac

SEQ ID NO: 118238 - DNA, 25 bp, Artificial
  probe
  misc_feature (1)..(25): SEQ ID NO: 2723; WAN024CH2_at; Start 247; Stop 271
gacggtgtcggaaccaagctcatgt

SEQ ID NO: 118239 - DNA, 25 bp, Artificial
  probe
  misc_feature (1)..(25): SEQ ID NO: 2723; WAN024CH2_at; Start 1035; Stop 1059
tggtcgcatcgtcaagaaagaaaac

SEQ ID NO: 118240 - DNA, 25 bp, Artificial
  probe
  misc_feature (1)..(25): SEQ ID NO: 2723; WAN024CH2_at; Start 974; Stop 998
cggtcagccctgaaaatgtagagcg

SEQ ID NO: 118241 - DNA, 25 bp, Artificial
  probe
  misc_feature (1)..(25): SEQ ID NO: 2723; WAN024CH2_at; Start 312; Stop 336
ctgtgtggccatgtgtgtcaacgac

SEQ ID NO: 118242 - DNA, 25 bp, Artificial
  probe
  misc_feature (1)..(25): SEQ ID NO: 2723; WAN024CH2_at; Start 784; Stop 808
ggcattgcccacatcacaggtggtg

SEQ ID NO: 118243 - DNA, 25 bp, Artificial
  probe
  misc_feature (1)..(25): SEQ ID NO: 2723; WAN024CH2_at; Start 826; Stop 850
cctcgtatgtttgcagatgacctag

SEQ ID NO: 118244 - DNA, 25 bp, Artificial
  probe
  misc_feature (1)..(25): SEQ ID NO: 2723; WAN024CH2_at; Start 754; Stop 778
ttgccgctcatcaaagaagagttgg

SEQ ID NO: 118245 - DNA, 25 bp, Artificial
  probe
  misc_feature (1)..(25): SEQ ID NO: 2723; WAN024CH2_at; Start 653; Stop 677
tctttgcggattacacaggtgagga

SEQ ID NO: 118246 - DNA, 25 bp, Artificial
  probe
  misc_feature (1)..(25): SEQ ID NO: 2723; WAN024CH2_at; Start 192; Stop 216
tatgtttgacctttccaagactggg

SEQ ID NO: 118247 - DNA, 25 bp, Artificial
  probe
  misc_feature (1)..(25): SEQ ID NO: 2723; WAN024CH2_at; Start 708; Stop 732
taaggaagttctacttgagccgact

SEQ ID NO: 118248 - DNA, 25 bp, Artificial
  probe
  misc_feature (1)..(25): SEQ ID NO: 2723; WAN024CH2_at; Start 267; Stop 291
catgttggctatcaagtacgacaag

SEQ ID NO: 118249 - DNA, 25 bp, Artificial
  probe
  misc_feature (1)..(25): SEQ ID NO: 2723; WAN024CH2_at; Start 143; Stop 167
cccgtacggagcgtgcaggtgtcat

SEQ ID NO: 118250 - DNA, 25 bp, Artificial
  probe
  misc_feature (1)..(25): SEQ ID NO: 2723; WAN024CH2_at; Start 798; Stop 822
cacaggtggtggctttatcgaaaat

SEQ ID NO: 118251 - DNA, 25 bp, Artificial
  probe
  misc_feature (1)..(25): SEQ ID NO: 2723; WAN024CH2_at; Start 401; Stop 425
cagctaagctagaacaagtggttgc

SEQ ID NO: 118252 - DNA, 25 bp, Artificial
  probe
  misc_feature (1)..(25): SEQ ID NO: 2723; WAN024CH2_at; Start 120; Stop 144
tgaacggattaaaaagcacgtggcc

SEQ ID NO: 118253 - DNA, 25 bp, Artificial
  probe
  misc_feature (1)..(25): SEQ ID NO: 2723; WAN024CH2_at; Start 475; Stop 499
gaaacggctgaaatgccgggcatgt

SEQ ID NO: 118254 - DNA, 25 bp, Artificial
  probe
  misc_feature (1)..(25): SEQ ID NO: 2723; WAN024CH2_at; Start 297; Stop 321
taccatcgggcaggactgtgtggcc

SEQ ID NO: 118255 - DNA, 25 bp, Artificial
  probe
  misc_feature (1)..(25): SEQ ID NO: 2723; WAN024CH2_at; Start 673; Stop 697
gaggaagtcctaccagaattggaag

SEQ ID NO: 118256 - DNA, 25 bp, Artificial
  probe
  misc_feature (1)..(25): SEQ ID NO: 2723; WAN024CH2_at; Start 533; Stop 557
cggtcggtgtggctgaaaaatctca

SEQ ID NO: 118257 - DNA, 25 bp, Artificial
  probe
  misc_feature (1)..(25): SEQ ID NO: 2723; WAN024CH2_at; Start 364; Stop 388
tattttctcgactacgtagcgacag

SEQ ID NO: 118258 - DNA, 25 bp, Artificial
  probe
  misc_feature (1)..(25): SEQ ID NO: 2723; WAN024CH2_at; Start 1018; Stop 1042
gaagcagtctatgaaattggtcgca

SEQ ID NO: 118259 - DNA, 25 bp, Artificial
  probe
  misc_feature (1)..(25): SEQ ID NO: 2762; WAN024CH3_at; Start 113; Stop 137
caaataccgaaaacaccacattctt

SEQ ID NO: 118260 - DNA, 25 bp, Artificial
  probe
  misc_feature (1)..(25): SEQ ID NO: 2762; WAN024CH3_at; Start 103; Stop 127
tggatgtccccaaataccgaaaaca

SEQ ID NO: 118261 - DNA, 25 bp, Artificial
  probe
  misc_feature (1)..(25): SEQ ID NO: 2762; WAN024CH3_at; Start 43; Stop 67
cccctcctgaccacggtgttgaaga

SEQ ID NO: 118262 - DNA, 25 bp, Artificial
  probe
  misc_feature (1)..(25): SEQ ID NO: 2762; WAN024CH3_at; Start 72; Stop 96
ggagtccaaaataggtcaacttagc

SEQ ID NO: 118263 - DNA, 25 bp, Artificial
  probe
  misc_feature (1)..(25): SEQ ID NO: 2762; WAN024CH3_at; Start 17; Stop 41
ccttgatcattggagaggattcctg

SEQ ID NO: 118264 - DNA, 25 bp, Artificial
  probe
  misc_feature (1)..(25): SEQ ID NO: 2762; WAN024CH3_at; Start 75; Stop 99
gtccaaaataggtcaacttagcagc

SEQ ID NO: 118265 - DNA, 25 bp, Artificial
  probe
  misc_feature (1)..(25): SEQ ID NO: 2762; WAN024CH3_at; Start 68; Stop 92
ctgtggagtccaaaataggtcaact

SEQ ID NO: 118266 - DNA, 25 bp, Artificial
  probe
  misc_feature (1)..(25): SEQ ID NO: 2762; WAN024CH3_at; Start 83; Stop 107
taggtcaacttagcagcatctggat

SEQ ID NO: 118267 - DNA, 25 bp, Artificial
  probe
  misc_feature (1)..(25): SEQ ID NO: 2762; WAN024CH3_at; Start 124; Stop 148
aacaccacattcttcattaagagat

SEQ ID NO: 118268 - DNA, 25 bp, Artificial
  probe
  misc_feature (1)..(25): SEQ ID NO: 2762; WAN024CH3_at; Start 28; Stop 52
ggagaggattcctgccccctcctga

SEQ ID NO: 118269 - DNA, 25 bp, Artificial
  probe
  misc_feature (1)..(25): SEQ ID NO: 2762; WAN024CH3_at; Start 81; Stop 105
aataggtcaacttagcagcatctgg

SEQ ID NO: 118270 - DNA, 25 bp, Artificial
  probe
  misc_feature (1)..(25): SEQ ID NO: 2762; WAN024CH3_at; Start 205; Stop 229
gatttacatgacttttacattactg

SEQ ID NO: 118271 - DNA, 25 bp, Artificial
  probe
  misc_feature (1)..(25): SEQ ID NO: 2762; WAN024CH3_at; Start 89; Stop 113
aacttagcagcatctggatgtcccc

SEQ ID NO: 118272 - DNA, 25 bp, Artificial
  probe
  misc_feature (1)..(25): SEQ ID NO: 2762; WAN024CH3_at; Start 193; Stop 217
catcaagagctagatttacatgact

SEQ ID NO: 118273 - DNA, 25 bp, Artificial
  probe
  misc_feature (1)..(25): SEQ ID NO: 2762; WAN024CH3_at; Start 10; Stop 34
cagttgtccttgatcattggagagg

SEQ ID NO: 118274 - DNA, 25 bp, Artificial
  probe
  misc_feature (1)..(25): SEQ ID NO: 2762; WAN024CH3_at; Start 151; Stop 175
tacttcgtatgtcattttttatacc

SEQ ID NO: 118275 - DNA, 25 bp, Artificial
  probe
  misc_feature (1)..(25): SEQ ID NO: 2762; WAN024CH3_at; Start 62; Stop 86
tgaagactgtggagtccaaaatagg

SEQ ID NO: 118276 - DNA, 25 bp, Artificial
  probe
  misc_feature (1)..(25): SEQ ID NO: 2762; WAN024CH3_at; Start 87; Stop 111
tcaacttagcagcatctggatgtcc

SEQ ID NO: 118277 - DNA, 25 bp, Artificial
  probe
  misc_feature (1)..(25): SEQ ID NO: 2762; WAN024CH3_at; Start 214; Stop 238
gacttttacattactgatactatct

SEQ ID NO: 118278 - DNA, 25 bp, Artificial
  probe
  misc_feature (1)..(25): SEQ ID NO: 2762; WAN024CH3_at; Start 54; Stop 78
cacggtgttgaagactgtggagtcc

SEQ ID NO: 118279 - DNA, 25 bp, Artificial
  probe
  misc_feature (1)..(25): SEQ ID NO: 2762; WAN024CH3_at; Start 199; Stop 223
gagctagatttacatgacttttaca

SEQ ID NO: 118280 - DNA, 25 bp, Artificial
  probe
  misc_feature (1)..(25): SEQ ID NO: 2762; WAN024CH3_at; Start 183; Stop 207
catttgtaatcatcaagagctagat

SEQ ID NO: 118281 - DNA, 25 bp, Artificial
  probe
  misc_feature (1)..(25): SEQ ID NO: 2762; WAN024CH3_at; Start 93; Stop 117
tagcagcatctggatgtccccaaat

SEQ ID NO: 118282 - DNA, 25 bp, Artificial
  probe
  misc_feature (1)..(25): SEQ ID NO: 2762; WAN024CH3_at; Start 134; Stop 158
tcttcattaagagattttacttcgt

SEQ ID NO: 118283 - DNA, 25 bp, Artificial
  probe
  misc_feature (1)..(25): SEQ ID NO: 2762; WAN024CH3_at; Start 47; Stop 71
tcctgaccacggtgttgaagactgt

SEQ ID NO: 118284 - DNA, 25 bp, Artificial
  probe
  misc_feature (1)..(25): SEQ ID NO: 2762; WAN024CH3_at; Start 98; Stop 122
gcatctggatgtccccaaataccga

SEQ ID NO: 118285 - DNA, 25 bp, Artificial
  probe
  misc_feature (1)..(25): SEQ ID NO: 2762; WAN024CH3_at; Start 101; Stop 125
tctggatgtccccaaataccgaaaa

SEQ ID NO: 118286 - DNA, 25 bp, Artificial
  probe
  misc_feature (1)..(25): SEQ ID NO: 2762; WAN024CH3_at; Start 121; Stop 145
gaaaacaccacattcttcattaaga

SEQ ID NO: 118287 - DNA, 25 bp, Artificial
  probe
  misc_feature (1)..(25): SEQ ID NO: 2762; WAN024CH3_at; Start 141; Stop 165
taagagattttacttcgtatgtcat

SEQ ID NO: 118288 - DNA, 25 bp, Artificial
  probe
  misc_feature (1)..(25): SEQ ID NO: 2762; WAN024CH3_at; Start 21; Stop 45
gatcattggagaggattcctgcccc

SEQ ID NO: 118289 - DNA, 25 bp, Artificial
  probe
  misc_feature (1)..(25): SEQ ID NO: 2762; WAN024CH3_at; Start 20; Stop 44
tgatcattggagaggattcctgccc

SEQ ID NO: 118290 - DNA, 25 bp, Artificial
  probe
  misc_feature (1)..(25): SEQ ID NO: 2762; WAN024CH3_at; Start 6; Stop 30
gcttcagttgtccttgatcattgga

SEQ ID NO: 118291 - DNA, 25 bp, Artificial
  probe
  misc_feature (1)..(25): SEQ ID NO: 2762; WAN024CH3_at; Start 172; Stop 196
tacctaattttcatttgtaatcatc

SEQ ID NO: 118292 - DNA, 25 bp, Artificial
  probe
  misc_feature (1)..(25): SEQ ID NO: 2762; WAN024CH3_at; Start 78; Stop 102
caaaataggtcaacttagcagcatc

SEQ ID NO: 118293 - DNA, 25 bp, Artificial
  probe
  misc_feature (1)..(25): SEQ ID NO: 2105; WAN024CH4_at; Start 572; Stop 596
tctacagaagcttcgccagcagtcg

SEQ ID NO: 118294 - DNA, 25 bp, Artificial
  probe
  misc_feature (1)..(25): SEQ ID NO: 2105; WAN024CH4_at; Start 390; Stop 414
tcaggctaggattatgactgcgacg

SEQ ID NO: 118295 - DNA, 25 bp, Artificial
  probe
  misc_feature (1)..(25): SEQ ID NO: 2105; WAN024CH4_at; Start 337; Stop 361
gatataggcaaaaccacctttgaca

SEQ ID NO: 118296 - DNA, 25 bp, Artificial
  probe
  misc_feature (1)..(25): SEQ ID NO: 2105; WAN024CH4_at; Start 376; Stop 400
cttgattttgcccatcaggctagga

SEQ ID NO: 118297 - DNA, 25 bp, Artificial
  probe
  misc_feature (1)..(25): SEQ ID NO: 2105; WAN024CH4_at; Start 149; Stop 173
tgaatgccctcgtcatcaatgatca

SEQ ID NO: 118298 - DNA, 25 bp, Artificial
  probe
  misc_feature (1)..(25): SEQ ID NO: 2105; WAN024CH4_at; Start 364; Stop 388
gctgagcgcttccttgattttgccc

SEQ ID NO: 118299 - DNA, 25 bp, Artificial
  probe
  misc_feature (1)..(25): SEQ ID NO: 2105; WAN024CH4_at; Start 274; Stop 298
aatcgaaagcggtcggaatccattt

SEQ ID NO: 118300 - DNA, 25 bp, Artificial
  probe
  misc_feature (1)..(25): SEQ ID NO: 2105; WAN024CH4_at; Start 645; Stop 669
tagctggatttctgaaaacttctga

SEQ ID NO: 118301 - DNA, 25 bp, Artificial
  probe
  misc_feature (1)..(25): SEQ ID NO: 2105; WAN024CH4_at; Start 422; Stop 446
tgagccaagatttcagagtccgaag

SEQ ID NO: 118302 - DNA, 25 bp, Artificial
  probe
  misc_feature (1)..(25): SEQ ID NO: 2105; WAN024CH4_at; Start 185; Stop 209
ggcttcaaatcacgaatccactcgg

SEQ ID NO: 118303 - DNA, 25 bp, Artificial
  probe
  misc_feature (1)..(25): SEQ ID NO: 2105; WAN024CH4_at; Start 440; Stop 464
tccgaagtcgcgctgaaaattgctc

SEQ ID NO: 118304 - DNA, 25 bp, Artificial
  probe
  misc_feature (1)..(25): SEQ ID NO: 2105; WAN024CH4_at; Start 304; Stop 328
aagagccgcaatcaacttgtcctca

SEQ ID NO: 118305 - DNA, 25 bp, Artificial
  probe
  misc_feature (1)..(25): SEQ ID NO: 2105; WAN024CH4_at; Start 261; Stop 285
tagccattttaccaatcgaaagcgg

SEQ ID NO: 118306 - DNA, 25 bp, Artificial
  probe
  misc_feature (1)..(25): SEQ ID NO: 2105; WAN024CH4_at; Start 351; Stop 375
cacctttgacaaggctgagcgcttc

SEQ ID NO: 118307 - DNA, 25 bp, Artificial
  probe
  misc_feature (1)..(25): SEQ ID NO: 2105; WAN024CH4_at; Start 289; Stop 313
gaatccatttgggtcaagagccgca

SEQ ID NO: 118308 - DNA, 25 bp, Artificial
  probe
  misc_feature (1)..(25): SEQ ID NO: 2105; WAN024CH4_at; Start 77; Stop 101
tcagggcgagcaaagtagatatact

SEQ ID NO: 118309 - DNA, 25 bp, Artificial
  probe
  misc_feature (1)..(25): SEQ ID NO: 2105; WAN024CH4_at; Start 405; Stop 429
gactgcgacgaatgaggtgagccaa

SEQ ID NO: 118310 - DNA, 25 bp, Artificial
  probe
  misc_feature (1)..(25): SEQ ID NO: 2105; WAN024CH4_at; Start 2; Stop 26
tgcttaaattctcgcgccaattgcg

SEQ ID NO: 118311 - DNA, 25 bp, Artificial
  probe
  misc_feature (1)..(25): SEQ ID NO: 2105; WAN024CH4_at; Start 203; Stop 227
cactcggcaccaatgacctcaaaag

SEQ ID NO: 118312 - DNA, 25 bp, Artificial
  probe
  misc_feature (1)..(25): SEQ ID NO: 2105; WAN024CH4_at; Start 217; Stop 241
gacctcaaaagcacaggtttcagaa

SEQ ID NO: 118313 - DNA, 25 bp, Artificial
  probe
  misc_feature (1)..(25): SEQ ID NO: 2105; WAN024CH4_at; Start 454; Stop 478
gaaaattgctcctctttgttccagt

SEQ ID NO: 118314 - DNA, 25 bp, Artificial
  probe
  misc_feature (1)..(25): SEQ ID NO: 2105; WAN024CH4_at; Start 135; Stop 159
tatagctgtcatactgaatgccctc

SEQ ID NO: 118315 - DNA, 25 bp, Artificial
  probe
  misc_feature (1)..(25): SEQ ID NO: 2105; WAN024CH4_at; Start 114; Stop 138
ccgccaactgggtatcatctgtata

SEQ ID NO: 118316 - DNA, 25 bp, Artificial
  probe
  misc_feature (1)..(25): SEQ ID NO: 2105; WAN024CH4_at; Start 94; Stop 118
gatatactccatagaacaaaccgcc

SEQ ID NO: 118317 - DNA, 25 bp, Artificial
  probe
  misc_feature (1)..(25): SEQ ID NO: 2105; WAN024CH4_at; Start 20; Stop 44
aattgcgctcccattctcttacgtg

SEQ ID NO: 118318 - DNA, 25 bp, Artificial
  probe
  misc_feature (1)..(25): SEQ ID NO: 2105; WAN024CH4_at; Start 321; Stop 345
tgtcctcaaacagcaagatataggc

SEQ ID NO: 118319 - DNA, 25 bp, Artificial
  probe
  misc_feature (1)..(25): SEQ ID NO: 2105; WAN024CH4_at; Start 239; Stop 263
gaagatacaacaactgctccattag

SEQ ID NO: 118320 - DNA, 25 bp, Artificial
  probe
  misc_feature (1)..(25): SEQ ID NO: 2105; WAN024CH4_at; Start 501; Stop 525
tggtcagatttccattatgagccaa

SEQ ID NO: 118321 - DNA, 25 bp, Artificial
  probe
  misc_feature (1)..(25): SEQ ID NO: 2105; WAN024CH4_at; Start 60; Stop 84
caccgtggatattagaatcagggcg

SEQ ID NO: 118322 - DNA, 25 bp, Artificial
  probe
  misc_feature (1)..(25): SEQ ID NO: 2105; WAN024CH4_at; Start 489; Stop 513
gagaggctgcattggtcagatttcc

SEQ ID NO: 118323 - DNA, 25 bp, Artificial
  probe
  misc_feature (1)..(25): SEQ ID NO: 2105; WAN024CH4_at; Start 43; Stop 67
tgccgtatggacattgacaccgtgg

SEQ ID NO: 118324 - DNA, 25 bp, Artificial
  probe
  misc_feature (1)..(25): SEQ ID NO: 2105; WAN024CH4_at; Start 527; Stop 551
ccaaactgcatatcgtgaaaacgga

SEQ ID NO: 118325 - DNA, 25 bp, Artificial
  probe
  misc_feature (1)..(25): SEQ ID NO: 2105; WAN024CH4_at; Start 164; Stop 188
tcaatgatcacaatctcacctggct

SEQ ID NO: 118326 - DNA, 25 bp, Artificial
  probe
  misc_feature (1)..(25): SEQ ID NO: 2105; WAN024CH4_at; Start 474; Stop 498
ccagttctttcttgagagaggctgc

SEQ ID NO: 118327 - DNA, 25 bp, Artificial
  probe
  misc_feature (1)..(25): SEQ ID NO: 3956; WAN024CH5_at; Start 57; Stop 81
tggagaatctgtcgcctacttgtaa

SEQ ID NO: 118328 - DNA, 25 bp, Artificial
  probe
  misc_feature (1)..(25): SEQ ID NO: 3956; WAN024CH5_at; Start 198; Stop 222
gataccaatcgactcaatcaagcca

SEQ ID NO: 118329 - DNA, 25 bp, Artificial
  probe
  misc_feature (1)..(25): SEQ ID NO: 3956; WAN024CH5_at; Start 177; Stop 201
accgttcggcgcatctgtttcgata

SEQ ID NO: 118330 - DNA, 25 bp, Artificial
  probe
  misc_feature (1)..(25): SEQ ID NO: 3956; WAN024CH5_at; Start 137; Stop 161
gcgttgggtagtcaccgtcaaagta

SEQ ID NO: 118331 - DNA, 25 bp, Artificial
  probe
  misc_feature (1)..(25): SEQ ID NO: 3956; WAN024CH5_at; Start 90; Stop 114
cttttcttccaaacttctacgatag

SEQ ID NO: 118332 - DNA, 25 bp, Artificial
  probe
  misc_feature (1)..(25): SEQ ID NO: 3956; WAN024CH5_at; Start 216; Stop 240
caagccatcaattgaaagataagtc

SEQ ID NO: 118333 - DNA, 25 bp, Artificial
  probe
  misc_feature (1)..(25): SEQ ID NO: 3956; WAN024CH5_at; Start 184; Stop 208
ggcgcatctgtttcgataccaatcg

SEQ ID NO: 118334 - DNA, 25 bp, Artificial
  probe
  misc_feature (1)..(25): SEQ ID NO: 3956; WAN024CH5_at; Start 212; Stop 236
caatcaagccatcaattgaaagata

SEQ ID NO: 118335 - DNA, 25 bp, Artificial
  probe
  misc_feature (1)..(25): SEQ ID NO: 3956; WAN024CH5_at; Start 107; Stop 131
tacgatagtcttcttcgtagtcata

SEQ ID NO: 118336 - DNA, 25 bp, Artificial
  probe
  misc_feature (1)..(25): SEQ ID NO: 3956; WAN024CH5_at; Start 10; Stop 34
gaggcatatgcatttttatttgtca

SEQ ID NO: 118337 - DNA, 25 bp, Artificial
  probe
  misc_feature (1)..(25): SEQ ID NO: 3956; WAN024CH5_at; Start 141; Stop 165
tgggtagtcaccgtcaaagtaagcg

SEQ ID NO: 118338 - DNA, 25 bp, Artificial
  probe
  misc_feature (1)..(25): SEQ ID NO: 3956; WAN024CH5_at; Start 158; Stop 182
agtaagcgacacagagaccaccgtt

SEQ ID NO: 118339 - DNA, 25 bp, Artificial
  probe
  misc_feature (1)..(25): SEQ ID NO: 3956; WAN024CH5_at; Start 51; Stop 75
ctttaatggagaatctgtcgcctac

SEQ ID NO: 118340 - DNA, 25 bp, Artificial
  probe
  misc_feature (1)..(25): SEQ ID NO: 3956; WAN024CH5_at; Start 161; Stop 185
aagcgacacagagaccaccgttcgg

SEQ ID NO: 118341 - DNA, 25 bp, Artificial
  probe
  misc_feature (1)..(25): SEQ ID NO: 3956; WAN024CH5_at; Start 133; Stop 157
agaggcgttgggtagtcaccgtcaa

SEQ ID NO: 118342 - DNA, 25 bp, Artificial
  probe
  misc_feature (1)..(25): SEQ ID NO: 3956; WAN024CH5_at; Start 200; Stop 224
taccaatcgactcaatcaagccatc

SEQ ID NO: 118343 - DNA, 25 bp, Artificial
  probe
  misc_feature (1)..(25): SEQ ID NO: 3956; WAN024CH5_at; Start 203; Stop 227
caatcgactcaatcaagccatcaat

SEQ ID NO: 118344 - DNA, 25 bp, Artificial
  probe
  misc_feature (1)..(25): SEQ ID NO: 3956; WAN024CH5_at; Start 206; Stop 230
tcgactcaatcaagccatcaattga

SEQ ID NO: 118345 - DNA, 25 bp, Artificial
  probe
  misc_feature (1)..(25): SEQ ID NO: 3956; WAN024CH5_at; Start 143; Stop 167
ggtagtcaccgtcaaagtaagcgac

SEQ ID NO: 118346 - DNA, 25 bp, Artificial
  probe
  misc_feature (1)..(25): SEQ ID NO: 3956; WAN024CH5_at; Start 148; Stop 172
tcaccgtcaaagtaagcgacacaga

SEQ ID NO: 118347 - DNA, 25 bp, Artificial
  probe
  misc_feature (1)..(25): SEQ ID NO: 3956; WAN024CH5_at; Start 154; Stop 178
tcaaagtaagcgacacagagaccac

SEQ ID NO: 118348 - DNA, 25 bp, Artificial
  probe
  misc_feature (1)..(25): SEQ ID NO: 3956; WAN024CH5_at; Start 66; Stop 90
tgtcgcctacttgtaaaaactggtc

SEQ ID NO: 118349 - DNA, 25 bp, Artificial
  probe
  misc_feature (1)..(25): SEQ ID NO: 3956; WAN024CH5_at; Start 156; Stop 180
aaagtaagcgacacagagaccaccg

SEQ ID NO: 118350 - DNA, 25 bp, Artificial
  probe
  misc_feature (1)..(25): SEQ ID NO: 3956; WAN024CH5_at; Start 190; Stop 214
tctgtttcgataccaatcgactcaa

SEQ ID NO: 118351 - DNA, 25 bp, Artificial
  probe
  misc_feature (1)..(25): SEQ ID NO: 3956; WAN024CH5_at; Start 54; Stop 78
taatggagaatctgtcgcctacttg

SEQ ID NO: 118352 - DNA, 25 bp, Artificial
  probe
  misc_feature (1)..(25): SEQ ID NO: 3956; WAN024CH5_at; Start 3; Stop 27
gagacgtgaggcatatgcattttta

SEQ ID NO: 118353 - DNA, 25 bp, Artificial
  probe
  misc_feature (1)..(25): SEQ ID NO: 3956; WAN024CH5_at; Start 64; Stop 88
tctgtcgcctacttgtaaaaactgg

SEQ ID NO: 118354 - DNA, 25 bp, Artificial
  probe
  misc_feature (1)..(25): SEQ ID NO: 3956; WAN024CH5_at; Start 171; Stop 195
gagaccaccgttcggcgcatctgtt

SEQ ID NO: 118355 - DNA, 25 bp, Artificial
  probe
  misc_feature (1)..(25): SEQ ID NO: 3956; WAN024CH5_at; Start 180; Stop 204
gttcggcgcatctgtttcgatacca

SEQ ID NO: 118356 - DNA, 25 bp, Artificial
  probe
  misc_feature (1)..(25): SEQ ID NO: 3956; WAN024CH5_at; Start 48; Stop 72
tttctttaatggagaatctgtcgcc

SEQ ID NO: 118357 - DNA, 25 bp, Artificial
  probe
  misc_feature (1)..(25): SEQ ID NO: 3956; WAN024CH5_at; Start 99; Stop 123
caaacttctacgatagtcttcttcg

SEQ ID NO: 118358 - DNA, 25 bp, Artificial
  probe
  misc_feature (1)..(25): SEQ ID NO: 3956; WAN024CH5_at; Start 166; Stop 190
acacagagaccaccgttcggcgcat

SEQ ID NO: 118359 - DNA, 25 bp, Artificial
  probe
  misc_feature (1)..(25): SEQ ID NO: 3956; WAN024CH5_at; Start 145; Stop 169
tagtcaccgtcaaagtaagcgacac

SEQ ID NO: 118360 - DNA, 25 bp, Artificial
  probe
  misc_feature (1)..(25): SEQ ID NO: 3956; WAN024CH5_at; Start 61; Stop 85
gaatctgtcgcctacttgtaaaaac

SEQ ID NO: 118361 - DNA, 25 bp, Artificial
  probe
  misc_feature (1)..(25): SEQ ID NO: 1382; WAN024CH6_at; Start 478; Stop 502
gaagcgctcagccttgtcaaaggtg

SEQ ID NO: 118362 - DNA, 25 bp, Artificial
  probe
  misc_feature (1)..(25): SEQ ID NO: 1382; WAN024CH6_at; Start 1314; Stop 1338
tatcgaaacagatgcgccgaacggt

SEQ ID NO: 118363 - DNA, 25 bp, Artificial
  probe
  misc_feature (1)..(25): SEQ ID NO: 1382; WAN024CH6_at; Start 1027; Stop 1051
gctgtttcgggtgttgtcaaaggca

SEQ ID NO: 118364 - DNA, 25 bp, Artificial
  probe
  misc_feature (1)..(25): SEQ ID NO: 1382; WAN024CH6_at; Start 873; Stop 897
tgtgcccaattcttccctaagcgcg

SEQ ID NO: 118365 - DNA, 25 bp, Artificial
  probe
  misc_feature (1)..(25): SEQ ID NO: 1382; WAN024CH6_at; Start 809; Stop 833
cacgtaagagaatgggagcgcaatt

SEQ ID NO: 118366 - DNA, 25 bp, Artificial
  probe
  misc_feature (1)..(25): SEQ ID NO: 1382; WAN024CH6_at; Start 1113; Stop 1137
gctcttgaaagaagcgggtgcgact

SEQ ID NO: 118367 - DNA, 25 bp, Artificial
  probe
  misc_feature (1)..(25): SEQ ID NO: 1382; WAN024CH6_at; Start 835; Stop 859
gcgcgagaatttaagcatgaggcag

SEQ ID NO: 118368 - DNA, 25 bp, Artificial
  probe
  misc_feature (1)..(25): SEQ ID NO: 1382; WAN024CH6_at; Start 351; Stop 375
caatgcagcctctctcaagaaagaa

SEQ ID NO: 118369 - DNA, 25 bp, Artificial
  probe
  misc_feature (1)..(25): SEQ ID NO: 1382; WAN024CH6_at; Start 1079; Stop 1103
ttgtacgtggaacaacctctcgtcg

SEQ ID NO: 118370 - DNA, 25 bp, Artificial
  probe
  misc_feature (1)..(25): SEQ ID NO: 1382; WAN024CH6_at; Start 529; Stop 553
gacaagttgattgcggctcttgacc

SEQ ID NO: 118371 - DNA, 25 bp, Artificial
  probe
  misc_feature (1)..(25): SEQ ID NO: 1382; WAN024CH6_at; Start 1134; Stop 1158
gactgaggttcacgttgccattgga

SEQ ID NO: 118372 - DNA, 25 bp, Artificial
  probe
  misc_feature (1)..(25): SEQ ID NO: 1382; WAN024CH6_at; Start 651; Stop 675
gattcgtgatttgaagccaggtgag

SEQ ID NO: 118373 - DNA, 25 bp, Artificial
  probe
  misc_feature (1)..(25): SEQ ID NO: 1382; WAN024CH6_at; Start 302; Stop 326
tccgttttcacgatatgcagtttgg

SEQ ID NO: 118374 - DNA, 25 bp, Artificial
  probe
  misc_feature (1)..(25): SEQ ID NO: 1382; WAN024CH6_at; Start 1096; Stop 1120
tctcgtcgtatcgttcagctcttga

SEQ ID NO: 118375 - DNA, 25 bp, Artificial
  probe
  misc_feature (1)..(25): SEQ ID NO: 1382; WAN024CH6_at; Start 1206; Stop 1230
ccgtcaggagctgattgcagccaat

SEQ ID NO: 118376 - DNA, 25 bp, Artificial
  probe
  misc_feature (1)..(25): SEQ ID NO: 1382; WAN024CH6_at; Start 783; Stop 807
tatccacggtgtcaatgtccatacg

SEQ ID NO: 118377 - DNA, 25 bp, Artificial
  probe
  misc_feature (1)..(25): SEQ ID NO: 1382; WAN024CH6_at; Start 1004; Stop 1028
aaggagtgcggatgaaactgtctgc

SEQ ID NO: 118378 - DNA, 25 bp, Artificial
  probe
  misc_feature (1)..(25): SEQ ID NO: 1382; WAN024CH6_at; Start 443; Stop 467
gcagtcataatcctagcctgatggg

SEQ ID NO: 118379 - DNA, 25 bp, Artificial
  probe
  misc_feature (1)..(25): SEQ ID NO: 1382; WAN024CH6_at; Start 888; Stop 912
cctaagcgcggctatgggatttgcg

SEQ ID NO: 118380 - DNA, 25 bp, Artificial
  probe
  misc_feature (1)..(25): SEQ ID NO: 1382; WAN024CH6_at; Start 857; Stop 881
cagatattgtagttggtgtgcccaa

SEQ ID NO: 118381 - DNA, 25 bp, Artificial
  probe
  misc_feature (1)..(25): SEQ ID NO: 1382; WAN024CH6_at; Start 944; Stop 968
tgatcaaaaaccaatacacccagcg

SEQ ID NO: 118382 - DNA, 25 bp, Artificial
  probe
  misc_feature (1)..(25): SEQ ID NO: 1382; WAN024CH6_at; Start 1043; Stop 1067
tcaaaggcaaacgtgtggtcatggt

SEQ ID NO: 118383 - DNA, 25 bp, Artificial
  probe
  misc_feature (1)..(25): SEQ ID NO: 1382; WAN024CH6_at; Start 980; Stop 1004
aaccgactcaagaattgcgggagca

SEQ ID NO: 118384 - DNA, 25 bp, Artificial
  probe
  misc_feature (1)..(25): SEQ ID NO: 1382; WAN024CH6_at; Start 72; Stop 96
taagttgacctattttggactccac

SEQ ID NO: 118385 - DNA, 25 bp, Artificial
  probe
  misc_feature (1)..(25): SEQ ID NO: 1382; WAN024CH6_at; Start 1191; Stop 1215
gattgatatccagacccgtcaggag

SEQ ID NO: 118386 - DNA, 25 bp, Artificial
  probe
  misc_feature (1)..(25): SEQ ID NO: 1382; WAN024CH6_at; Start 1243; Stop 1267
gaaactcgccaaatcattggtgcgg

SEQ ID NO: 118387 - DNA, 25 bp, Artificial
  probe
  misc_feature (1)..(25): SEQ ID NO: 1382; WAN024CH6_at; Start 1149; Stop 1173
tgccattggaagtcctgcactagcg

SEQ ID NO: 118388 - DNA, 25 bp, Artificial
  probe
  misc_feature (1)..(25): SEQ ID NO: 1382; WAN024CH6_at; Start 1169; Stop 1193
tagcgtatccatgtttctacgggat

SEQ ID NO: 118389 - DNA, 25 bp, Artificial
  probe
  misc_feature (1)..(25): SEQ ID NO: 1382; WAN024CH6_at; Start 922; Stop 946
ggcttaccaaatgaaatgggtctga

SEQ ID NO: 118390 - DNA, 25 bp, Artificial
  probe
  misc_feature (1)..(25): SEQ ID NO: 1382; WAN024CH6_at; Start 1228; Stop 1252
aatcatacggtcgaagaaactcgcc

SEQ ID NO: 118391 - DNA, 25 bp, Artificial
  probe
  misc_feature (1)..(25): SEQ ID NO: 1382; WAN024CH6_at; Start 1350; Stop 1374
cgcttactttgacggtgactaccca

SEQ ID NO: 118392 - DNA, 25 bp, Artificial
  probe
  misc_feature (1)..(25): SEQ ID NO: 1382; WAN024CH6_at; Start 1332; Stop 1356
gaacggtggtctctgtgtcgcttac

SEQ ID NO: 118393 - DNA, 25 bp, Artificial
  probe
  misc_feature (1)..(25): SEQ ID NO: 1382; WAN024CH6_at; Start 56; Stop 80
gacatccagatgctgctaagttgac

SEQ ID NO: 118394 - DNA, 25 bp, Artificial
  probe
  misc_feature (1)..(25): SEQ ID NO: 1382; WAN024CH6_at; Start 690; Stop 714
tgacgagggcattcagtatgacagc

SEQ ID NO: 118395 - DNA, 25 bp, Artificial
  probe
  misc_feature (1)..(25): SEQ ID NO: 2655; WAN024CH7_at; Start 89; Stop 113
tagtagatattttccccaacagctt

SEQ ID NO: 118396 - DNA, 25 bp, Artificial
  probe
  misc_feature (1)..(25): SEQ ID NO: 2655; WAN024CH7_at; Start 188; Stop 212
aattcttcaaaggtaccagacatgg

SEQ ID NO: 118397 - DNA, 25 bp, Artificial
  probe
  misc_feature (1)..(25): SEQ ID NO: 2655; WAN024CH7_at; Start 194; Stop 218
tcaaaggtaccagacatggagtcct

SEQ ID NO: 118398 - DNA, 25 bp, Artificial
  probe
  misc_feature (1)..(25): SEQ ID NO: 2655; WAN024CH7_at; Start 215; Stop 239
tccttaccaccgatagatggcaagc

SEQ ID NO: 118399 - DNA, 25 bp, Artificial
  probe
  misc_feature (1)..(25): SEQ ID NO: 2655; WAN024CH7_at; Start 122; Stop 146
ggagagagcaccttacggctatctg

SEQ ID NO: 118400 - DNA, 25 bp, Artificial
  probe
  misc_feature (1)..(25): SEQ ID NO: 2655; WAN024CH7_at; Start 204; Stop 228
cagacatggagtccttaccaccgat

SEQ ID NO: 118401 - DNA, 25 bp, Artificial
  probe
  misc_feature (1)..(25): SEQ ID NO: 2655; WAN024CH7_at; Start 51; Stop 75
caaaatcaatctctgcagagagggc

SEQ ID NO: 118402 - DNA, 25 bp, Artificial
  probe
  misc_feature (1)..(25): SEQ ID NO: 2655; WAN024CH7_at; Start 206; Stop 230
gacatggagtccttaccaccgatag

SEQ ID NO: 118403 - DNA, 25 bp, Artificial
  probe
  misc_feature (1)..(25): SEQ ID NO: 2655; WAN024CH7_at; Start 27; Stop 51
gagcaaaatttttcttaatcaagtc

SEQ ID NO: 118404 - DNA, 25 bp, Artificial
  probe
  misc_feature (1)..(25): SEQ ID NO: 2655; WAN024CH7_at; Start 116; Stop 140
aattctggagagagcaccttacggc

SEQ ID NO: 118405 - DNA, 25 bp, Artificial
  probe
  misc_feature (1)..(25): SEQ ID NO: 2655; WAN024CH7_at; Start 169; Stop 193
caaggttggcggaacggtcaattct

SEQ ID NO: 118406 - DNA, 25 bp, Artificial
  probe
  misc_feature (1)..(25): SEQ ID NO: 2655; WAN024CH7_at; Start 46; Stop 70
caagtcaaaatcaatctctgcagag

SEQ ID NO: 118407 - DNA, 25 bp, Artificial
  probe
  misc_feature (1)..(25): SEQ ID NO: 2655; WAN024CH7_at; Start 191; Stop 215
tcttcaaaggtaccagacatggagt

SEQ ID NO: 118408 - DNA, 25 bp, Artificial
  probe
  misc_feature (1)..(25): SEQ ID NO: 2655; WAN024CH7_at; Start 101; Stop 125
tccccaacagctttaaattctggag

SEQ ID NO: 118409 - DNA, 25 bp, Artificial
  probe
  misc_feature (1)..(25): SEQ ID NO: 2655; WAN024CH7_at; Start 219; Stop 243
taccaccgatagatggcaagccaag

SEQ ID NO: 118410 - DNA, 25 bp, Artificial
  probe
  misc_feature (1)..(25): SEQ ID NO: 2655; WAN024CH7_at; Start 131; Stop 155
accttacggctatctgccgtcgtca

SEQ ID NO: 118411 - DNA, 25 bp, Artificial
  probe
  misc_feature (1)..(25): SEQ ID NO: 2655; WAN024CH7_at; Start 114; Stop 138
taaattctggagagagcaccttacg

SEQ ID NO: 118412 - DNA, 25 bp, Artificial
  probe
  misc_feature (1)..(25): SEQ ID NO: 2655; WAN024CH7_at; Start 119; Stop 143
tctggagagagcaccttacggctat

SEQ ID NO: 118413 - DNA, 25 bp, Artificial
  probe
  misc_feature (1)..(25): SEQ ID NO: 2655; WAN024CH7_at; Start 84; Stop 108
ggatgtagtagatattttccccaac

SEQ ID NO: 118414 - DNA, 25 bp, Artificial
  probe
  misc_feature (1)..(25): SEQ ID NO: 2655; WAN024CH7_at; Start 17; Stop 41
gcttcaaactgagcaaaatttttct

SEQ ID NO: 118415 - DNA, 25 bp, Artificial
  probe
  misc_feature (1)..(25): SEQ ID NO: 2655; WAN024CH7_at; Start 125; Stop 149
gagagcaccttacggctatctgccg

SEQ ID NO: 118416 - DNA, 25 bp, Artificial
  probe
  misc_feature (1)..(25): SEQ ID NO: 2655; WAN024CH7_at; Start 60; Stop 84
tctctgcagagagggcttgacctgg

SEQ ID NO: 118417 - DNA, 25 bp, Artificial
  probe
  misc_feature (1)..(25): SEQ ID NO: 2655; WAN024CH7_at; Start 142; Stop 166
atctgccgtcgtcaccccaaaggca

SEQ ID NO: 118418 - DNA, 25 bp, Artificial
  probe
  misc_feature (1)..(25): SEQ ID NO: 2655; WAN024CH7_at; Start 57; Stop 81
caatctctgcagagagggcttgacc

SEQ ID NO: 118419 - DNA, 25 bp, Artificial
  probe
  misc_feature (1)..(25): SEQ ID NO: 2655; WAN024CH7_at; Start 175; Stop 199
tggcggaacggtcaattcttcaaag

SEQ ID NO: 118420 - DNA, 25 bp, Artificial
  probe
  misc_feature (1)..(25): SEQ ID NO: 2655; WAN024CH7_at; Start 105; Stop 129
caacagctttaaattctggagagag

SEQ ID NO: 118421 - DNA, 25 bp, Artificial
  probe
  misc_feature (1)..(25): SEQ ID NO: 2655; WAN024CH7_at; Start 42; Stop 66
taatcaagtcaaaatcaatctctgc

SEQ ID NO: 118422 - DNA, 25 bp, Artificial
  probe
  misc_feature (1)..(25): SEQ ID NO: 2655; WAN024CH7_at; Start 183; Stop 207
cggtcaattcttcaaaggtaccaga

SEQ ID NO: 118423 - DNA, 25 bp, Artificial
  probe
  misc_feature (1)..(25): SEQ ID NO: 2655; WAN024CH7_at; Start 73; Stop 97
ggcttgacctgggatgtagtagata

SEQ ID NO: 118424 - DNA, 25 bp, Artificial
  probe
  misc_feature (1)..(25): SEQ ID NO: 2655; WAN024CH7_at; Start 212; Stop 236
gagtccttaccaccgatagatggca

SEQ ID NO: 118425 - DNA, 25 bp, Artificial
  probe
  misc_feature (1)..(25): SEQ ID NO: 2655; WAN024CH7_at; Start 110; Stop 134
gctttaaattctggagagagcacct

SEQ ID NO: 118426 - DNA, 25 bp, Artificial
  probe
  misc_feature (1)..(25): SEQ ID NO: 2655; WAN024CH7_at; Start 199; Stop 223
ggtaccagacatggagtccttacca

SEQ ID NO: 118427 - DNA, 25 bp, Artificial
  probe
  misc_feature (1)..(25): SEQ ID NO: 2655; WAN024CH7_at; Start 78; Stop 102
gacctgggatgtagtagatattttc

SEQ ID NO: 118428 - DNA, 25 bp, Artificial
  probe
  misc_feature (1)..(25): SEQ ID NO: 2655; WAN024CH7_at; Start 210; Stop 234
tggagtccttaccaccgatagatgg

SEQ ID NO: 118429 - DNA, 25 bp, Artificial
  probe
  misc_feature (1)..(25): SEQ ID NO: 4929; WAN024CH8_at; Start 177; Stop 201
gttccatacgtttagctacaaagcc

SEQ ID NO: 118430 - DNA, 25 bp, Artificial
  probe
  misc_feature (1)..(25): SEQ ID NO: 4929; WAN024CH8_at; Start 116; Stop 140
cctgcttcaggtttttcacggacaa

SEQ ID NO: 118431 - DNA, 25 bp, Artificial
  probe
  misc_feature (1)..(25): SEQ ID NO: 4929; WAN024CH8_at; Start 23; Stop 47
tctacagactcaactgtttgaacct

SEQ ID NO: 118432 - DNA, 25 bp, Artificial
  probe
  misc_feature (1)..(25): SEQ ID NO: 4929; WAN024CH8_at; Start 200; Stop 224
cctgggtggaagtattcacgaacgt

SEQ ID NO: 118433 - DNA, 25 bp, Artificial
  probe
  misc_feature (1)..(25): SEQ ID NO: 4929; WAN024CH8_at; Start 187; Stop 211
tttagctacaaagcctgggtggaag

SEQ ID NO: 118434 - DNA, 25 bp, Artificial
  probe
  misc_feature (1)..(25): SEQ ID NO: 4929; WAN024CH8_at; Start 165; Stop 189
caacggcaccaagttccatacgttt

SEQ ID NO: 118435 - DNA, 25 bp, Artificial
  probe
  misc_feature (1)..(25): SEQ ID NO: 4929; WAN024CH8_at; Start 122; Stop 146
tcaggtttttcacggacaacattgc

SEQ ID NO: 118436 - DNA, 25 bp, Artificial
  probe
  misc_feature (1)..(25): SEQ ID NO: 4929; WAN024CH8_at; Start 233; Stop 257
gcaagcccaatctggttaccatatg

SEQ ID NO: 118437 - DNA, 25 bp, Artificial
  probe
  misc_feature (1)..(25): SEQ ID NO: 4929; WAN024CH8_at; Start 102; Stop 126
ggatgatcacatcacctgcttcagg

SEQ ID NO: 118438 - DNA, 25 bp, Artificial
  probe
  misc_feature (1)..(25): SEQ ID NO: 4929; WAN024CH8_at; Start 206; Stop 230
tggaagtattcacgaacgtaggttg

SEQ ID NO: 118439 - DNA, 25 bp, Artificial
  probe
  misc_feature (1)..(25): SEQ ID NO: 4929; WAN024CH8_at; Start 197; Stop 221
aagcctgggtggaagtattcacgaa

SEQ ID NO: 118440 - DNA, 25 bp, Artificial
  probe
  misc_feature (1)..(25): SEQ ID NO: 4929; WAN024CH8_at; Start 40; Stop 64
ttgaaccttagaagagcccgtcgca

SEQ ID NO: 118441 - DNA, 25 bp, Artificial
  probe
  misc_feature (1)..(25): SEQ ID NO: 4929; WAN024CH8_at; Start 173; Stop 197
ccaagttccatacgtttagctacaa

SEQ ID NO: 118442 - DNA, 25 bp, Artificial
  probe
  misc_feature (1)..(25): SEQ ID NO: 4929; WAN024CH8_at; Start 195; Stop 219
caaagcctgggtggaagtattcacg

SEQ ID NO: 118443 - DNA, 25 bp, Artificial
  probe
  misc_feature (1)..(25): SEQ ID NO: 4929; WAN024CH8_at; Start 191; Stop 215
gctacaaagcctgggtggaagtatt

SEQ ID NO: 118444 - DNA, 25 bp, Artificial
  probe
  misc_feature (1)..(25): SEQ ID NO: 4929; WAN024CH8_at; Start 92; Stop 116
cctccgagaaggatgatcacatcac

SEQ ID NO: 118445 - DNA, 25 bp, Artificial
  probe
  misc_feature (1)..(25): SEQ ID NO: 4929; WAN024CH8_at; Start 185; Stop 209
cgtttagctacaaagcctgggtgga

SEQ ID NO: 118446 - DNA, 25 bp, Artificial
  probe
  misc_feature (1)..(25): SEQ ID NO: 4929; WAN024CH8_at; Start 11; Stop 35
gcaccagcagtctctacagactcaa

SEQ ID NO: 118447 - DNA, 25 bp, Artificial
  probe
  misc_feature (1)..(25): SEQ ID NO: 4929; WAN024CH8_at; Start 162; Stop 186
caacaacggcaccaagttccatacg

SEQ ID NO: 118448 - DNA, 25 bp, Artificial
  probe
  misc_feature (1)..(25): SEQ ID NO: 4929; WAN024CH8_at; Start 169; Stop 193
ggcaccaagttccatacgtttagct

SEQ ID NO: 118449 - DNA, 25 bp, Artificial
  probe
  misc_feature (1)..(25): SEQ ID NO: 4929; WAN024CH8_at; Start 183; Stop 207
tacgtttagctacaaagcctgggtg

SEQ ID NO: 118450 - DNA, 25 bp, Artificial
  probe
  misc_feature (1)..(25): SEQ ID NO: 4929; WAN024CH8_at; Start 37; Stop 61
tgtttgaaccttagaagagcccgtc

SEQ ID NO: 118451 - DNA, 25 bp, Artificial
  probe
  misc_feature (1)..(25): SEQ ID NO: 4929; WAN024CH8_at; Start 27; Stop 51
cagactcaactgtttgaaccttaga

SEQ ID NO: 118452 - DNA, 25 bp, Artificial
  probe
  misc_feature (1)..(25): SEQ ID NO: 4929; WAN024CH8_at; Start 1; Stop 25
ttgaacctcagcaccagcagtctct

SEQ ID NO: 118453 - DNA, 25 bp, Artificial
  probe
  misc_feature (1)..(25): SEQ ID NO: 4929; WAN024CH8_at; Start 66; Stop 90
caccgacaccatcacgacctgtttt

SEQ ID NO: 118454 - DNA, 25 bp, Artificial
  probe
  misc_feature (1)..(25): SEQ ID NO: 4929; WAN024CH8_at; Start 97; Stop 121
gagaaggatgatcacatcacctgct

SEQ ID NO: 118455 - DNA, 25 bp, Artificial
  probe
  misc_feature (1)..(25): SEQ ID NO: 4929; WAN024CH8_at; Start 181; Stop 205
catacgtttagctacaaagcctggg

SEQ ID NO: 118456 - DNA, 25 bp, Artificial
  probe
  misc_feature (1)..(25): SEQ ID NO: 4929; WAN024CH8_at; Start 119; Stop 143
gcttcaggtttttcacggacaacat

SEQ ID NO: 118457 - DNA, 25 bp, Artificial
  probe
  misc_feature (1)..(25): SEQ ID NO: 4929; WAN024CH8_at; Start 131; Stop 155
tcacggacaacattgcccttgggag

SEQ ID NO: 118458 - DNA, 25 bp, Artificial
  probe
  misc_feature (1)..(25): SEQ ID NO: 4929; WAN024CH8_at; Start 42; Stop 66
gaaccttagaagagcccgtcgcacc

SEQ ID NO: 118459 - DNA, 25 bp, Artificial
  probe
  misc_feature (1)..(25): SEQ ID NO: 4929; WAN024CH8_at; Start 33; Stop 57
caactgtttgaaccttagaagagcc

SEQ ID NO: 118460 - DNA, 25 bp, Artificial
  probe
  misc_feature (1)..(25): SEQ ID NO: 4929; WAN024CH8_at; Start 234; Stop 258
caagcccaatctggttaccatatga

SEQ ID NO: 118461 - DNA, 25 bp, Artificial
  probe
  misc_feature (1)..(25): SEQ ID NO: 4929; WAN024CH8_at; Start 128; Stop 152
ttttcacggacaacattgcccttgg

SEQ ID NO: 118462 - DNA, 25 bp, Artificial
  probe
  misc_feature (1)..(25): SEQ ID NO: 4929; WAN024CH8_at; Start 18; Stop 42
cagtctctacagactcaactgtttg

SEQ ID NO: 118463 - DNA, 25 bp, Artificial
  probe
  misc_feature (1)..(25): SEQ ID NO: 5886; WAN024CH9_at; Start 143; Stop 167
ttgaaaccttgagcaatgaccgacg

SEQ ID NO: 118464 - DNA, 25 bp, Artificial
  probe
  misc_feature (1)..(25): SEQ ID NO: 5886; WAN024CH9_at; Start 139; Stop 163
tgggttgaaaccttgagcaatgacc

SEQ ID NO: 118465 - DNA, 25 bp, Artificial
  probe
  misc_feature (1)..(25): SEQ ID NO: 5886; WAN024CH9_at; Start 152; Stop 176
tgagcaatgaccgacgcagtatgag

SEQ ID NO: 118466 - DNA, 25 bp, Artificial
  probe
  misc_feature (1)..(25): SEQ ID NO: 5886; WAN024CH9_at; Start 225; Stop 249
tgagttggtaacgaccaccaagtgg

SEQ ID NO: 118467 - DNA, 25 bp, Artificial
  probe
  misc_feature (1)..(25): SEQ ID NO: 5886; WAN024CH9_at; Start 68; Stop 92
gccaccaaacgagcagttgcttcga

SEQ ID NO: 118468 - DNA, 25 bp, Artificial
  probe
  misc_feature (1)..(25): SEQ ID NO: 5886; WAN024CH9_at; Start 101; Stop 125
taagcagcaccgtggtatggagacc

SEQ ID NO: 118469 - DNA, 25 bp, Artificial
  probe
  misc_feature (1)..(25): SEQ ID NO: 5886; WAN024CH9_at; Start 128; Stop 152
tcagctacatatgggttgaaacctt

SEQ ID NO: 118470 - DNA, 25 bp, Artificial
  probe
  misc_feature (1)..(25): SEQ ID NO: 5886; WAN024CH9_at; Start 188; Stop 212
tgaactggcaatttctgcacagatg

SEQ ID NO: 118471 - DNA, 25 bp, Artificial
  probe
  misc_feature (1)..(25): SEQ ID NO: 5886; WAN024CH9_at; Start 118; Stop 142
tggagaccattcagctacatatggg

SEQ ID NO: 118472 - DNA, 25 bp, Artificial
  probe
  misc_feature (1)..(25): SEQ ID NO: 5886; WAN024CH9_at; Start 160; Stop 184
gaccgacgcagtatgagtcacaccg

SEQ ID NO: 118473 - DNA, 25 bp, Artificial
  probe
  misc_feature (1)..(25): SEQ ID NO: 5886; WAN024CH9_at; Start 145; Stop 169
gaaaccttgagcaatgaccgacgca

SEQ ID NO: 118474 - DNA, 25 bp, Artificial
  probe
  misc_feature (1)..(25): SEQ ID NO: 5886; WAN024CH9_at; Start 107; Stop 131
gcaccgtggtatggagaccattcag

SEQ ID NO: 118475 - DNA, 25 bp, Artificial
  probe
  misc_feature (1)..(25): SEQ ID NO: 5886; WAN024CH9_at; Start 205; Stop 229
cacagatgcctcagttggtgtgagt

SEQ ID NO: 118476 - DNA, 25 bp, Artificial
  probe
  misc_feature (1)..(25): SEQ ID NO: 5886; WAN024CH9_at; Start 63; Stop 87
cagcagccaccaaacgagcagttgc

SEQ ID NO: 118477 - DNA, 25 bp, Artificial
  probe
  misc_feature (1)..(25): SEQ ID NO: 5886; WAN024CH9_at; Start 221; Stop 245
ggtgtgagttggtaacgaccaccaa

SEQ ID NO: 118478 - DNA, 25 bp, Artificial
  probe
  misc_feature (1)..(25): SEQ ID NO: 5886; WAN024CH9_at; Start 230; Stop 254
tggtaacgaccaccaagtgggtgat

SEQ ID NO: 118479 - DNA, 25 bp, Artificial
  probe
  misc_feature (1)..(25): SEQ ID NO: 5886; WAN024CH9_at; Start 216; Stop 240
cagttggtgtgagttggtaacgacc

SEQ ID NO: 118480 - DNA, 25 bp, Artificial
  probe
  misc_feature (1)..(25): SEQ ID NO: 5886; WAN024CH9_at; Start 122; Stop 146
gaccattcagctacatatgggttga

SEQ ID NO: 118481 - DNA, 25 bp, Artificial
  probe
  misc_feature (1)..(25): SEQ ID NO: 5886; WAN024CH9_at; Start 88; Stop 112
ttcgataaccgcataagcagcaccg

SEQ ID NO: 118482 - DNA, 25 bp, Artificial
  probe
  misc_feature (1)..(25): SEQ ID NO: 5886; WAN024CH9_at; Start 76; Stop 100
acgagcagttgcttcgataaccgca

SEQ ID NO: 118483 - DNA, 25 bp, Artificial
  probe
  misc_feature (1)..(25): SEQ ID NO: 5886; WAN024CH9_at; Start 54; Stop 78
agttggcaccagcagccaccaaacg

SEQ ID NO: 118484 - DNA, 25 bp, Artificial
  probe
  misc_feature (1)..(25): SEQ ID NO: 5886; WAN024CH9_at; Start 133; Stop 157
tacatatgggttgaaaccttgagca

SEQ ID NO: 118485 - DNA, 25 bp, Artificial
  probe
  misc_feature (1)..(25): SEQ ID NO: 5886; WAN024CH9_at; Start 176; Stop 200
gtcacaccgtgttgaactggcaatt

SEQ ID NO: 118486 - DNA, 25 bp, Artificial
  probe
  misc_feature (1)..(25): SEQ ID NO: 5886; WAN024CH9_at; Start 93; Stop 117
taaccgcataagcagcaccgtggta

SEQ ID NO: 118487 - DNA, 25 bp, Artificial
  probe
  misc_feature (1)..(25): SEQ ID NO: 5886; WAN024CH9_at; Start 149; Stop 173
ccttgagcaatgaccgacgcagtat

SEQ ID NO: 118488 - DNA, 25 bp, Artificial
  probe
  misc_feature (1)..(25): SEQ ID NO: 5886; WAN024CH9_at; Start 182; Stop 206
ccgtgttgaactggcaatttctgca

SEQ ID NO: 118489 - DNA, 25 bp, Artificial
  probe
  misc_feature (1)..(25): SEQ ID NO: 5886; WAN024CH9_at; Start 156; Stop 180
caatgaccgacgcagtatgagtcac

SEQ ID NO: 118490 - DNA, 25 bp, Artificial
  probe
  misc_feature (1)..(25): SEQ ID NO: 5886; WAN024CH9_at; Start 111; Stop 135
cgtggtatggagaccattcagctac

SEQ ID NO: 118491 - DNA, 25 bp, Artificial
  probe
  misc_feature (1)..(25): SEQ ID NO: 5886; WAN024CH9_at; Start 80; Stop 104
gcagttgcttcgataaccgcataag

SEQ ID NO: 118492 - DNA, 25 bp, Artificial
  probe
  misc_feature (1)..(25): SEQ ID NO: 5886; WAN024CH9_at; Start 164; Stop 188
gacgcagtatgagtcacaccgtgtt

SEQ ID NO: 118493 - DNA, 25 bp, Artificial
  probe
  misc_feature (1)..(25): SEQ ID NO: 5886; WAN024CH9_at; Start 240; Stop 264
caccaagtgggtgattaaccgttga

SEQ ID NO: 118494 - DNA, 25 bp, Artificial
  probe
  misc_feature (1)..(25): SEQ ID NO: 5886; WAN024CH9_at; Start 200; Stop 224
ttctgcacagatgcctcagttggtg

SEQ ID NO: 118495 - DNA, 25 bp, Artificial
  probe
  misc_feature (1)..(25): SEQ ID NO: 5886; WAN024CH9_at; Start 167; Stop 191
gcagtatgagtcacaccgtgttgaa

SEQ ID NO: 118496 - DNA, 25 bp, Artificial
  probe
  misc_feature (1)..(25): SEQ ID NO: 5886; WAN024CH9_at; Start 195; Stop 219
gcaatttctgcacagatgcctcagt

SEQ ID NO: 118497 - DNA, 25 bp, Artificial
  probe
  misc_feature (1)..(25): SEQ ID NO: 5058; WAN024CHA_at; Start 264; Stop 288
ttctttttcgaaggccttagctgaa

SEQ ID NO: 118498 - DNA, 25 bp, Artificial
  probe
  misc_feature (1)..(25): SEQ ID NO: 5058; WAN024CHA_at; Start 47; Stop 71
cacgggcgataaagctatcaatagc

SEQ ID NO: 118499 - DNA, 25 bp, Artificial
  probe
  misc_feature (1)..(25): SEQ ID NO: 5058; WAN024CHA_at; Start 289; Stop 313
tcatattctgagttggttcctggaa

SEQ ID NO: 118500 - DNA, 25 bp, Artificial
  probe
  misc_feature (1)..(25): SEQ ID NO: 5058; WAN024CHA_at; Start 228; Stop 252
caaggtcacgaatggcaccaaattg

SEQ ID NO: 118501 - DNA, 25 bp, Artificial
  probe
  misc_feature (1)..(25): SEQ ID NO: 5058; WAN024CHA_at; Start 105; Stop 129
gataaacttagctgaaccatctggt

SEQ ID NO: 118502 - DNA, 25 bp, Artificial
  probe
  misc_feature (1)..(25): SEQ ID NO: 5058; WAN024CHA_at; Start 241; Stop 265
ggcaccaaattgacctctgcacctt

SEQ ID NO: 118503 - DNA, 25 bp, Artificial
  probe
  misc_feature (1)..(25): SEQ ID NO: 5058; WAN024CHA_at; Start 10; Stop 34
gcttggaatccattacaaataccga

SEQ ID NO: 118504 - DNA, 25 bp, Artificial
  probe
  misc_feature (1)..(25): SEQ ID NO: 5058; WAN024CHA_at; Start 126; Stop 150
tggttcatccgcagccgagaatcca

SEQ ID NO: 118505 - DNA, 25 bp, Artificial
  probe
  misc_feature (1)..(25): SEQ ID NO: 5058; WAN024CHA_at; Start 76; Stop 100
cgcactttttcattaagcaggatat

SEQ ID NO: 118506 - DNA, 25 bp, Artificial
  probe
  misc_feature (1)..(25): SEQ ID NO: 5058; WAN024CHA_at; Start 72; Stop 96
cacacgcactttttcattaagcagg

SEQ ID NO: 118507 - DNA, 25 bp, Artificial
  probe
  misc_feature (1)..(25): SEQ ID NO: 5058; WAN024CHA_at; Start 148; Stop 172
ccaccagcaaagaagagaatattag

SEQ ID NO: 118508 - DNA, 25 bp, Artificial
  probe
  misc_feature (1)..(25): SEQ ID NO: 5058; WAN024CHA_at; Start 223; Stop 247
tcattcaaggtcacgaatggcacca

SEQ ID NO: 118509 - DNA, 25 bp, Artificial
  probe
  misc_feature (1)..(25): SEQ ID NO: 5058; WAN024CHA_at; Start 215; Stop 239
tagcttcttcattcaaggtcacgaa

SEQ ID NO: 118510 - DNA, 25 bp, Artificial
  probe
  misc_feature (1)..(25): SEQ ID NO: 5058; WAN024CHA_at; Start 33; Stop 57
gataatcaaaccaccacgggcgata

SEQ ID NO: 118511 - DNA, 25 bp, Artificial
  probe
  misc_feature (1)..(25): SEQ ID NO: 5058; WAN024CHA_at; Start 29; Stop 53
taccgataatcaaaccaccacgggc

SEQ ID NO: 118512 - DNA, 25 bp, Artificial
  probe
  misc_feature (1)..(25): SEQ ID NO: 5058; WAN024CHA_at; Start 251; Stop 275
tgacctctgcaccttctttttcgaa

SEQ ID NO: 118513 - DNA, 25 bp, Artificial
  probe
  misc_feature (1)..(25): SEQ ID NO: 5058; WAN024CHA_at; Start 271; Stop 295
tcgaaggccttagctgaatcatatt

SEQ ID NO: 118514 - DNA, 25 bp, Artificial
  probe
  misc_feature (1)..(25): SEQ ID NO: 5058; WAN024CHA_at; Start 200; Stop 224
caactgacttgacaatagcttcttc

SEQ ID NO: 118515 - DNA, 25 bp, Artificial
  probe
  misc_feature (1)..(25): SEQ ID NO: 5058; WAN024CHA_at; Start 140; Stop 164
ccgagaatccaccagcaaagaagag

SEQ ID NO: 118516 - DNA, 25 bp, Artificial
  probe
  misc_feature (1)..(25): SEQ ID NO: 5058; WAN024CHA_at; Start 155; Stop 179
caaagaagagaatattagtcttgtc

SEQ ID NO: 118517 - DNA, 25 bp, Artificial
  probe
  misc_feature (1)..(25): SEQ ID NO: 5058; WAN024CHA_at; Start 188; Stop 212
caaccatagtttcaactgacttgac

SEQ ID NO: 118518 - DNA, 25 bp, Artificial
  probe
  misc_feature (1)..(25): SEQ ID NO: 5058; WAN024CHA_at; Start 237; Stop 261
gaatggcaccaaattgacctctgca

SEQ ID NO: 118519 - DNA, 25 bp, Artificial
  probe
  misc_feature (1)..(25): SEQ ID NO: 5058; WAN024CHA_at; Start 14; Stop 38
ggaatccattacaaataccgataat

SEQ ID NO: 118520 - DNA, 25 bp, Artificial
  probe
  misc_feature (1)..(25): SEQ ID NO: 5058; WAN024CHA_at; Start 303; Stop 327
ggttcctggaaagactgggatgtaa

SEQ ID NO: 118521 - DNA, 25 bp, Artificial
  probe
  misc_feature (1)..(25): SEQ ID NO: 5058; WAN024CHA_at; Start 43; Stop 67
ccaccacgggcgataaagctatcaa

SEQ ID NO: 118522 - DNA, 25 bp, Artificial
  probe
  misc_feature (1)..(25): SEQ ID NO: 5058; WAN024CHA_at; Start 92; Stop 116
gcaggatattgacgataaacttagc

SEQ ID NO: 118523 - DNA, 25 bp, Artificial
  probe
  misc_feature (1)..(25): SEQ ID NO: 5058; WAN024CHA_at; Start 179; Stop 203
cgatattgtcaaccatagtttcaac

SEQ ID NO: 118524 - DNA, 25 bp, Artificial
  probe
  misc_feature (1)..(25): SEQ ID NO: 5058; WAN024CHA_at; Start 170; Stop 194
tagtcttgtcgatattgtcaaccat

SEQ ID NO: 118525 - DNA, 25 bp, Artificial
  probe
  misc_feature (1)..(25): SEQ ID NO: 5058; WAN024CHA_at; Start 122; Stop 146
catctggttcatccgcagccgagaa

SEQ ID NO: 118526 - DNA, 25 bp, Artificial
  probe
  misc_feature (1)..(25): SEQ ID NO: 5058; WAN024CHA_at; Start 98; Stop 122
tattgacgataaacttagctgaacc

SEQ ID NO: 118527 - DNA, 25 bp, Artificial
  probe
  misc_feature (1)..(25): SEQ ID NO: 5058; WAN024CHA_at; Start 1; Stop 25
ttgactaaggcttggaatccattac

SEQ ID NO: 118528 - DNA, 25 bp, Artificial
  probe
  misc_feature (1)..(25): SEQ ID NO: 5058; WAN024CHA_at; Start 118; Stop 142
gaaccatctggttcatccgcagccg

SEQ ID NO: 118529 - DNA, 25 bp, Artificial
  probe
  misc_feature (1)..(25): SEQ ID NO: 5058; WAN024CHA_at; Start 276; Stop 300
ggccttagctgaatcatattctgag

SEQ ID NO: 118530 - DNA, 25 bp, Artificial
  probe
  misc_feature (1)..(25): SEQ ID NO: 5058; WAN024CHA_at; Start 60; Stop 84
gctatcaatagccacacgcactttt

SEQ ID NO: 118531 - DNA, 25 bp, Artificial
  probe
  misc_feature (1)..(25): SEQ ID NO: 5814; WAN024CHB_at; Start 52; Stop 76
ttgatggcgcgacgcaacggcatca

SEQ ID NO: 118532 - DNA, 25 bp, Artificial
  probe
  misc_feature (1)..(25): SEQ ID NO: 5814; WAN024CHB_at; Start 216; Stop 240
aatcatccacttccattcccaagta

SEQ ID NO: 118533 - DNA, 25 bp, Artificial
  probe
  misc_feature (1)..(25): SEQ ID NO: 5814; WAN024CHB_at; Start 60; Stop 84
gcgacgcaacggcatcatcaggata

SEQ ID NO: 118534 - DNA, 25 bp, Artificial
  probe
  misc_feature (1)..(25): SEQ ID NO: 5814; WAN024CHB_at; Start 151; Stop 175
tccttggacaaagccagcctgcaaa

SEQ ID NO: 118535 - DNA, 25 bp, Artificial
  probe
  misc_feature (1)..(25): SEQ ID NO: 5814; WAN024CHB_at; Start 180; Stop 204
ttacatctgccatgctagctgccag

SEQ ID NO: 118536 - DNA, 25 bp, Artificial
  probe
  misc_feature (1)..(25): SEQ ID NO: 5814; WAN024CHB_at; Start 146; Stop 170
gcatctccttggacaaagccagcct

SEQ ID NO: 118537 - DNA, 25 bp, Artificial
  probe
  misc_feature (1)..(25): SEQ ID NO: 5814; WAN024CHB_at; Start 116; Stop 140
tcgctttctttgagcatttgtgggc

SEQ ID NO: 118538 - DNA, 25 bp, Artificial
  probe
  misc_feature (1)..(25): SEQ ID NO: 5814; WAN024CHB_at; Start 65; Stop 89
gcaacggcatcatcaggataatagc

SEQ ID NO: 118539 - DNA, 25 bp, Artificial
  probe
  misc_feature (1)..(25): SEQ ID NO: 5814; WAN024CHB_at; Start 35; Stop 59
tcttggctagaagcaacttgatggc

SEQ ID NO: 118540 - DNA, 25 bp, Artificial
  probe
  misc_feature (1)..(25): SEQ ID NO: 5814; WAN024CHB_at; Start 81; Stop 105
gataatagccgacaggcaagtcact

SEQ ID NO: 118541 - DNA, 25 bp, Artificial
  probe
  misc_feature (1)..(25): SEQ ID NO: 5814; WAN024CHB_at; Start 105; Stop 129
tgatgaccacatcgctttctttgag

SEQ ID NO: 118542 - DNA, 25 bp, Artificial
  probe
  misc_feature (1)..(25): SEQ ID NO: 5814; WAN024CHB_at; Start 242; Stop 266
tccacctttttagtaagcgaggtca

SEQ ID NO: 118543 - DNA, 25 bp, Artificial
  probe
  misc_feature (1)..(25): SEQ ID NO: 5814; WAN024CHB_at; Start 199; Stop 223
tgccagatcaatcagcaaatcatcc

SEQ ID NO: 118544 - DNA, 25 bp, Artificial
  probe
  misc_feature (1)..(25): SEQ ID NO: 5814; WAN024CHB_at; Start 170; Stop 194
tgcaaaccaattacatctgccatgc

SEQ ID NO: 118545 - DNA, 25 bp, Artificial
  probe
  misc_feature (1)..(25): SEQ ID NO: 5814; WAN024CHB_at; Start 163; Stop 187
gccagcctgcaaaccaattacatct

SEQ ID NO: 118546 - DNA, 25 bp, Artificial
  probe
  misc_feature (1)..(25): SEQ ID NO: 5814; WAN024CHB_at; Start 96; Stop 120
gcaagtcactgatgaccacatcgct

SEQ ID NO: 118547 - DNA, 25 bp, Artificial
  probe
  misc_feature (1)..(25): SEQ ID NO: 5814; WAN024CHB_at; Start 13; Stop 37
caagtgatgggcgtaagtatgttct

SEQ ID NO: 118548 - DNA, 25 bp, Artificial
  probe
  misc_feature (1)..(25): SEQ ID NO: 5814; WAN024CHB_at; Start 255; Stop 279
taagcgaggtcaagaaaatagcgcc

SEQ ID NO: 118549 - DNA, 25 bp, Artificial
  probe
  misc_feature (1)..(25): SEQ ID NO: 5814; WAN024CHB_at; Start 74; Stop 98
tcatcaggataatagccgacaggca

SEQ ID NO: 118550 - DNA, 25 bp, Artificial
  probe
  misc_feature (1)..(25): SEQ ID NO: 5814; WAN024CHB_at; Start 188; Stop 212
gccatgctagctgccagatcaatca

SEQ ID NO: 118551 - DNA, 25 bp, Artificial
  probe
  misc_feature (1)..(25): SEQ ID NO: 5814; WAN024CHB_at; Start 141; Stop 165
gaacggcatctccttggacaaagcc

SEQ ID NO: 118552 - DNA, 25 bp, Artificial
  probe
  misc_feature (1)..(25): SEQ ID NO: 5814; WAN024CHB_at; Start 157; Stop 181
gacaaagccagcctgcaaaccaatt

SEQ ID NO: 118553 - DNA, 25 bp, Artificial
  probe
  misc_feature (1)..(25): SEQ ID NO: 5814; WAN024CHB_at; Start 132; Stop 156
tttgtgggcgaacggcatctccttg

SEQ ID NO: 118554 - DNA, 25 bp, Artificial
  probe
  misc_feature (1)..(25): SEQ ID NO: 5814; WAN024CHB_at; Start 137; Stop 161
gggcgaacggcatctccttggacaa

SEQ ID NO: 118555 - DNA, 25 bp, Artificial
  probe
  misc_feature (1)..(25): SEQ ID NO: 5814; WAN024CHB_at; Start 91; Stop 115
gacaggcaagtcactgatgaccaca

SEQ ID NO: 118556 - DNA, 25 bp, Artificial
  probe
  misc_feature (1)..(25): SEQ ID NO: 5814; WAN024CHB_at; Start 42; Stop 66
tagaagcaacttgatggcgcgacgc

SEQ ID NO: 118557 - DNA, 25 bp, Artificial
  probe
  misc_feature (1)..(25): SEQ ID NO: 5814; WAN024CHB_at; Start 2; Stop 26
tgttccatgagcaagtgatgggcgt

SEQ ID NO: 118558 - DNA, 25 bp, Artificial
  probe
  misc_feature (1)..(25): SEQ ID NO: 5814; WAN024CHB_at; Start 86; Stop 110
tagccgacaggcaagtcactgatga

SEQ ID NO: 118559 - DNA, 25 bp, Artificial
  probe
  misc_feature (1)..(25): SEQ ID NO: 5814; WAN024CHB_at; Start 129; Stop 153
gcatttgtgggcgaacggcatctcc

SEQ ID NO: 118560 - DNA, 25 bp, Artificial
  probe
  misc_feature (1)..(25): SEQ ID NO: 5814; WAN024CHB_at; Start 193; Stop 217
gctagctgccagatcaatcagcaaa

SEQ ID NO: 118561 - DNA, 25 bp, Artificial
  probe
  misc_feature (1)..(25): SEQ ID NO: 5814; WAN024CHB_at; Start 258; Stop 282
gcgaggtcaagaaaatagcgcctag

SEQ ID NO: 118562 - DNA, 25 bp, Artificial
  probe
  misc_feature (1)..(25): SEQ ID NO: 5814; WAN024CHB_at; Start 24; Stop 48
cgtaagtatgttcttggctagaagc

SEQ ID NO: 118563 - DNA, 25 bp, Artificial
  probe
  misc_feature (1)..(25): SEQ ID NO: 5814; WAN024CHB_at; Start 124; Stop 148
tttgagcatttgtgggcgaacggca

SEQ ID NO: 118564 - DNA, 25 bp, Artificial
  probe
  misc_feature (1)..(25): SEQ ID NO: 5814; WAN024CHB_at; Start 204; Stop 228
gatcaatcagcaaatcatccacttc

SEQ ID NO: 118565 - DNA, 25 bp, Artificial
  probe
  misc_feature (1)..(25): SEQ ID NO: 2456; WAN024CHC_at; Start 283; Stop 307
cacgtgttggttggcatcattgtag

SEQ ID NO: 118566 - DNA, 25 bp, Artificial
  probe
  misc_feature (1)..(25): SEQ ID NO: 2456; WAN024CHC_at; Start 16; Stop 40
gatgatttgaccattcttgctggta

SEQ ID NO: 118567 - DNA, 25 bp, Artificial
  probe
  misc_feature (1)..(25): SEQ ID NO: 2456; WAN024CHC_at; Start 53; Stop 77
gcatggacagaaccattcggattgt

SEQ ID NO: 118568 - DNA, 25 bp, Artificial
  probe
  misc_feature (1)..(25): SEQ ID NO: 2456; WAN024CHC_at; Start 144; Stop 168
ggagctctgcaaattcctcagccgt

SEQ ID NO: 118569 - DNA, 25 bp, Artificial
  probe
  misc_feature (1)..(25): SEQ ID NO: 2456; WAN024CHC_at; Start 126; Stop 150
aaatttgtccattgtcacggagctc

SEQ ID NO: 118570 - DNA, 25 bp, Artificial
  probe
  misc_feature (1)..(25): SEQ ID NO: 2456; WAN024CHC_at; Start 188; Stop 212
ccgtgcgaaacaggaatagcgtgga

SEQ ID NO: 118571 - DNA, 25 bp, Artificial
  probe
  misc_feature (1)..(25): SEQ ID NO: 2456; WAN024CHC_at; Start 34; Stop 58
gctggtaattccttcgatggcatgg

SEQ ID NO: 118572 - DNA, 25 bp, Artificial
  probe
  misc_feature (1)..(25): SEQ ID NO: 2456; WAN024CHC_at; Start 149; Stop 173
tctgcaaattcctcagccgtcacga

SEQ ID NO: 118573 - DNA, 25 bp, Artificial
  probe
  misc_feature (1)..(25): SEQ ID NO: 2456; WAN024CHC_at; Start 274; Stop 298
catcttggccacgtgttggttggca

SEQ ID NO: 118574 - DNA, 25 bp, Artificial
  probe
  misc_feature (1)..(25): SEQ ID NO: 2456; WAN024CHC_at; Start 257; Stop 281
gcaatgcgagtttccaccatcttgg

SEQ ID NO: 118575 - DNA, 25 bp, Artificial
  probe
  misc_feature (1)..(25): SEQ ID NO: 2456; WAN024CHC_at; Start 72; Stop 96
gattgtacttagaatccatacttgg

SEQ ID NO: 118576 - DNA, 25 bp, Artificial
  probe
  misc_feature (1)..(25): SEQ ID NO: 2456; WAN024CHC_at; Start 235; Stop 259
caaccatggtgagttggtattggca

SEQ ID NO: 118577 - DNA, 25 bp, Artificial
  probe
  misc_feature (1)..(25): SEQ ID NO: 2456; WAN024CHC_at; Start 2; Stop 26
tggcccatcttaccgatgatttgac

SEQ ID NO: 118578 - DNA, 25 bp, Artificial
  probe
  misc_feature (1)..(25): SEQ ID NO: 2456; WAN024CHC_at; Start 11; Stop 35
ttaccgatgatttgaccattcttgc

SEQ ID NO: 118579 - DNA, 25 bp, Artificial
  probe
  misc_feature (1)..(25): SEQ ID NO: 2456; WAN024CHC_at; Start 39; Stop 63
taattccttcgatggcatggacaga

SEQ ID NO: 118580 - DNA, 25 bp, Artificial
  probe
  misc_feature (1)..(25): SEQ ID NO: 2456; WAN024CHC_at; Start 111; Stop 135
caacgtattggctgaaaatttgtcc

SEQ ID NO: 118581 - DNA, 25 bp, Artificial
  probe
  misc_feature (1)..(25): SEQ ID NO: 2456; WAN024CHC_at; Start 185; Stop 209
tcaccgtgcgaaacaggaatagcgt

SEQ ID NO: 118582 - DNA, 25 bp, Artificial
  probe
  misc_feature (1)..(25): SEQ ID NO: 2456; WAN024CHC_at; Start 264; Stop 288
gagtttccaccatcttggccacgtg

SEQ ID NO: 118583 - DNA, 25 bp, Artificial
  probe
  misc_feature (1)..(25): SEQ ID NO: 2456; WAN024CHC_at; Start 49; Stop 73
gatggcatggacagaaccattcgga

SEQ ID NO: 118584 - DNA, 25 bp, Artificial
  probe
  misc_feature (1)..(25): SEQ ID NO: 2456; WAN024CHC_at; Start 101; Stop 125
ccgttaaagtcaacgtattggctga

SEQ ID NO: 118585 - DNA, 25 bp, Artificial
  probe
  misc_feature (1)..(25): SEQ ID NO: 2456; WAN024CHC_at; Start 131; Stop 155
tgtccattgtcacggagctctgcaa

SEQ ID NO: 118586 - DNA, 25 bp, Artificial
  probe
  misc_feature (1)..(25): SEQ ID NO: 2456; WAN024CHC_at; Start 239; Stop 263
catggtgagttggtattggcaatgc

SEQ ID NO: 118587 - DNA, 25 bp, Artificial
  probe
  misc_feature (1)..(25): SEQ ID NO: 2456; WAN024CHC_at; Start 250; Stop 274
ggtattggcaatgcgagtttccacc

SEQ ID NO: 118588 - DNA, 25 bp, Artificial
  probe
  misc_feature (1)..(25): SEQ ID NO: 2456; WAN024CHC_at; Start 182; Stop 206
ccttcaccgtgcgaaacaggaatag

SEQ ID NO: 118589 - DNA, 25 bp, Artificial
  probe
  misc_feature (1)..(25): SEQ ID NO: 2456; WAN024CHC_at; Start 79; Stop 103
cttagaatccatacttggtttaccg

SEQ ID NO: 118590 - DNA, 25 bp, Artificial
  probe
  misc_feature (1)..(25): SEQ ID NO: 2456; WAN024CHC_at; Start 196; Stop 220
aacaggaatagcgtggatatcgccc

SEQ ID NO: 118591 - DNA, 25 bp, Artificial
  probe
  misc_feature (1)..(25): SEQ ID NO: 2456; WAN024CHC_at; Start 208; Stop 232
gtggatatcgcccacttgcacacca

SEQ ID NO: 118592 - DNA, 25 bp, Artificial
  probe
  misc_feature (1)..(25): SEQ ID NO: 2456; WAN024CHC_at; Start 140; Stop 164
tcacggagctctgcaaattcctcag

SEQ ID NO: 118593 - DNA, 25 bp, Artificial
  probe
  misc_feature (1)..(25): SEQ ID NO: 2456; WAN024CHC_at; Start 60; Stop 84
cagaaccattcggattgtacttaga

SEQ ID NO: 118594 - DNA, 25 bp, Artificial
  probe
  misc_feature (1)..(25): SEQ ID NO: 2456; WAN024CHC_at; Start 43; Stop 67
tccttcgatggcatggacagaacca

SEQ ID NO: 118595 - DNA, 25 bp, Artificial
  probe
  misc_feature (1)..(25): SEQ ID NO: 2456; WAN024CHC_at; Start 172; Stop 196
gacaaacttcccttcaccgtgcgaa

SEQ ID NO: 118596 - DNA, 25 bp, Artificial
  probe
  misc_feature (1)..(25): SEQ ID NO: 2456; WAN024CHC_at; Start 26; Stop 50
ccattcttgctggtaattccttcga

SEQ ID NO: 118597 - DNA, 25 bp, Artificial
  probe
  misc_feature (1)..(25): SEQ ID NO: 2456; WAN024CHC_at; Start 156; Stop 180
attcctcagccgtcacgacaaactt

SEQ ID NO: 118598 - DNA, 25 bp, Artificial
  probe
  misc_feature (1)..(25): SEQ ID NO: 2456; WAN024CHC_at; Start 201; Stop 225
gaatagcgtggatatcgcccacttg

SEQ ID NO: 118599 - DNA, 25 bp, Artificial
  probe
  misc_feature (1)..(25): SEQ ID NO: 5052; WAN024CHD_at; Start 134; Stop 158
ggtttttcagttactgtcgccacca

SEQ ID NO: 118600 - DNA, 25 bp, Artificial
  probe
  misc_feature (1)..(25): SEQ ID NO: 5052; WAN024CHD_at; Start 162; Stop 186
cagcatcaatattttctttgttaca

SEQ ID NO: 118601 - DNA, 25 bp, Artificial
  probe
  misc_feature (1)..(25): SEQ ID NO: 5052; WAN024CHD_at; Start 393; Stop 417
tgacattgccattacggaagaggcg

SEQ ID NO: 118602 - DNA, 25 bp, Artificial
  probe
  misc_feature (1)..(25): SEQ ID NO: 5052; WAN024CHD_at; Start 259; Stop 283
aatttctgtaccattcaagccctgg

SEQ ID NO: 118603 - DNA, 25 bp, Artificial
  probe
  misc_feature (1)..(25): SEQ ID NO: 5052; WAN024CHD_at; Start 304; Stop 328
gaggtcgatttcaagaccgtctgcc

SEQ ID NO: 118604 - DNA, 25 bp, Artificial
  probe
  misc_feature (1)..(25): SEQ ID NO: 5052; WAN024CHD_at; Start 328; Stop 352
caattcaccgatagccacacagaca

SEQ ID NO: 118605 - DNA, 25 bp, Artificial
  probe
  misc_feature (1)..(25): SEQ ID NO: 5052; WAN024CHD_at; Start 119; Stop 143
tgcatgacaagatttggtttttcag

SEQ ID NO: 118606 - DNA, 25 bp, Artificial
  probe
  misc_feature (1)..(25): SEQ ID NO: 5052; WAN024CHD_at; Start 378; Stop 402
tcttgatcagacgagtgacattgcc

SEQ ID NO: 118607 - DNA, 25 bp, Artificial
  probe
  misc_feature (1)..(25): SEQ ID NO: 5052; WAN024CHD_at; Start 293; Stop 317
ggcaccttgttgaggtcgatttcaa

SEQ ID NO: 118608 - DNA, 25 bp, Artificial
  probe
  misc_feature (1)..(25): SEQ ID NO: 5052; WAN024CHD_at; Start 278; Stop 302
ccctggtatttaagaggcaccttgt

SEQ ID NO: 118609 - DNA, 25 bp, Artificial
  probe
  misc_feature (1)..(25): SEQ ID NO: 5052; WAN024CHD_at; Start 34; Stop 58
cacaactttggcatcgacaaccacg

SEQ ID NO: 118610 - DNA, 25 bp, Artificial
  probe
  misc_feature (1)..(25): SEQ ID NO: 5052; WAN024CHD_at; Start 14; Stop 38
gggagtttgacatccttgtccacaa

SEQ ID NO: 118611 - DNA, 25 bp, Artificial
  probe
  misc_feature (1)..(25): SEQ ID NO: 5052; WAN024CHD_at; Start 83; Stop 107
cgacgctccaagtcaacgattgtct

SEQ ID NO: 118612 - DNA, 25 bp, Artificial
  probe
  misc_feature (1)..(25): SEQ ID NO: 5052; WAN024CHD_at; Start 72; Stop 96
tgtcaaggaaacgacgctccaagtc

SEQ ID NO: 118613 - DNA, 25 bp, Artificial
  probe
  misc_feature (1)..(25): SEQ ID NO: 5052; WAN024CHD_at; Start 313; Stop 337
ttcaagaccgtctgccaattcaccg

SEQ ID NO: 118614 - DNA, 25 bp, Artificial
  probe
  misc_feature (1)..(25): SEQ ID NO: 5052; WAN024CHD_at; Start 5; Stop 29
cgctcttctgggagtttgacatcct

SEQ ID NO: 118615 - DNA, 25 bp, Artificial
  probe
  misc_feature (1)..(25): SEQ ID NO: 5052; WAN024CHD_at; Start 176; Stop 200
tctttgttacattcggcaacgaagg

SEQ ID NO: 118616 - DNA, 25 bp, Artificial
  probe
  misc_feature (1)..(25): SEQ ID NO: 5052; WAN024CHD_at; Start 1; Stop 25
ttgacgctcttctgggagtttgaca

SEQ ID NO: 118617 - DNA, 25 bp, Artificial
  probe
  misc_feature (1)..(25): SEQ ID NO: 5052; WAN024CHD_at; Start 369; Stop 393
cattggacttcttgatcagacgagt

SEQ ID NO: 118618 - DNA, 25 bp, Artificial
  probe
  misc_feature (1)..(25): SEQ ID NO: 5052; WAN024CHD_at; Start 22; Stop 46
gacatccttgtccacaactttggca

SEQ ID NO: 118619 - DNA, 25 bp, Artificial
  probe
  misc_feature (1)..(25): SEQ ID NO: 5052; WAN024CHD_at; Start 387; Stop 411
gacgagtgacattgccattacggaa

SEQ ID NO: 118620 - DNA, 25 bp, Artificial
  probe
  misc_feature (1)..(25): SEQ ID NO: 5052; WAN024CHD_at; Start 397; Stop 421
attgccattacggaagaggcgctga

SEQ ID NO: 118621 - DNA, 25 bp, Artificial
  probe
  misc_feature (1)..(25): SEQ ID NO: 5052; WAN024CHD_at; Start 100; Stop 124
gattgtctcaccattccagtgcatg

SEQ ID NO: 118622 - DNA, 25 bp, Artificial
  probe
  misc_feature (1)..(25): SEQ ID NO: 5052; WAN024CHD_at; Start 274; Stop 298
caagccctggtatttaagaggcacc

SEQ ID NO: 118623 - DNA, 25 bp, Artificial
  probe
  misc_feature (1)..(25): SEQ ID NO: 5052; WAN024CHD_at; Start 94; Stop 118
gtcaacgattgtctcaccattccag

SEQ ID NO: 118624 - DNA, 25 bp, Artificial
  probe
  misc_feature (1)..(25): SEQ ID NO: 5052; WAN024CHD_at; Start 111; Stop 135
cattccagtgcatgacaagatttgg

SEQ ID NO: 118625 - DNA, 25 bp, Artificial
  probe
  misc_feature (1)..(25): SEQ ID NO: 5052; WAN024CHD_at; Start 248; Stop 272
tcagagatggcaatttctgtaccat

SEQ ID NO: 118626 - DNA, 25 bp, Artificial
  probe
  misc_feature (1)..(25): SEQ ID NO: 5052; WAN024CHD_at; Start 235; Stop 259
ccgttcttgtgattcagagatggca

SEQ ID NO: 118627 - DNA, 25 bp, Artificial
  probe
  misc_feature (1)..(25): SEQ ID NO: 5052; WAN024CHD_at; Start 227; Stop 251
accgccatccgttcttgtgattcag

SEQ ID NO: 118628 - DNA, 25 bp, Artificial
  probe
  misc_feature (1)..(25): SEQ ID NO: 5052; WAN024CHD_at; Start 78; Stop 102
ggaaacgacgctccaagtcaacgat

SEQ ID NO: 118629 - DNA, 25 bp, Artificial
  probe
  misc_feature (1)..(25): SEQ ID NO: 5052; WAN024CHD_at; Start 40; Stop 64
tttggcatcgacaaccacgcgcaca

SEQ ID NO: 118630 - DNA, 25 bp, Artificial
  probe
  misc_feature (1)..(25): SEQ ID NO: 5052; WAN024CHD_at; Start 148; Stop 172
tgtcgccaccacaacagcatcaata

SEQ ID NO: 118631 - DNA, 25 bp, Artificial
  probe
  misc_feature (1)..(25): SEQ ID NO: 5052; WAN024CHD_at; Start 288; Stop 312
taagaggcaccttgttgaggtcgat

SEQ ID NO: 118632 - DNA, 25 bp, Artificial
  probe
  misc_feature (1)..(25): SEQ ID NO: 5052; WAN024CHD_at; Start 354; Stop 378
cgcctgccccaaagtcattggactt

SEQ ID NO: 118633 - DNA, 25 bp, Artificial
  probe
  misc_feature (1)..(25): SEQ ID NO: 2372; WAN024CHE_at; Start 476; Stop 500
tgcaggctggctttgtccaaggaga

SEQ ID NO: 118634 - DNA, 25 bp, Artificial
  probe
  misc_feature (1)..(25): SEQ ID NO: 2372; WAN024CHE_at; Start 57; Stop 81
catccaaagtgatttggcgaccaac

SEQ ID NO: 118635 - DNA, 25 bp, Artificial
  probe
  misc_feature (1)..(25): SEQ ID NO: 2372; WAN024CHE_at; Start 455; Stop 479
gcatggcagatgtaattggtttgca

SEQ ID NO: 118636 - DNA, 25 bp, Artificial
  probe
  misc_feature (1)..(25): SEQ ID NO: 2372; WAN024CHE_at; Start 83; Stop 107
tttatgacgccttggtggagcaaaa

SEQ ID NO: 118637 - DNA, 25 bp, Artificial
  probe
  misc_feature (1)..(25): SEQ ID NO: 2372; WAN024CHE_at; Start 235; Stop 259
caaacagaacccttgcaggccaatc

SEQ ID NO: 118638 - DNA, 25 bp, Artificial
  probe
  misc_feature (1)..(25): SEQ ID NO: 2372; WAN024CHE_at; Start 34; Stop 58
tatttactagagaatgtccaagtca

SEQ ID NO: 118639 - DNA, 25 bp, Artificial
  probe
  misc_feature (1)..(25): SEQ ID NO: 2372; WAN024CHE_at; Start 565; Stop 589
tatcctgatgatgccgttgcgtcgc

SEQ ID NO: 118640 - DNA, 25 bp, Artificial
  probe
  misc_feature (1)..(25): SEQ ID NO: 2372; WAN024CHE_at; Start 856; Stop 880
gagccttttgtttatccacttgcta

SEQ ID NO: 118641 - DNA, 25 bp, Artificial
  probe
  misc_feature (1)..(25): SEQ ID NO: 2372; WAN024CHE_at; Start 78; Stop 102
caacttttatgacgccttggtggag

SEQ ID NO: 118642 - DNA, 25 bp, Artificial
  probe
  misc_feature (1)..(25): SEQ ID NO: 2372; WAN024CHE_at; Start 67; Stop 91
gatttggcgaccaacttttatgacg

SEQ ID NO: 118643 - DNA, 25 bp, Artificial
  probe
  misc_feature (1)..(25): SEQ ID NO: 2372; WAN024CHE_at; Start 215; Stop 239
ttctcttgatgaaggctgggcaaac

SEQ ID NO: 118644 - DNA, 25 bp, Artificial
  probe
  misc_feature (1)..(25): SEQ ID NO: 2372; WAN024CHE_at; Start 863; Stop 887
ttgtttatccacttgctagcttgca

SEQ ID NO: 118645 - DNA, 25 bp, Artificial
  probe
  misc_feature (1)..(25): SEQ ID NO: 2372; WAN024CHE_at; Start 189; Stop 213
agaagaatggctcaagacctaccag

SEQ ID NO: 118646 - DNA, 25 bp, Artificial
  probe
  misc_feature (1)..(25): SEQ ID NO: 2372; WAN024CHE_at; Start 679; Stop 703
gctatttttctagctccgagtgatt

SEQ ID NO: 118647 - DNA, 25 bp, Artificial
  probe
  misc_feature (1)..(25): SEQ ID NO: 2372; WAN024CHE_at; Start 698; Stop 722
gtgatttgttgaccagtcctcaaag

SEQ ID NO: 118648 - DNA, 25 bp, Artificial
  probe
  misc_feature (1)..(25): SEQ ID NO: 2372; WAN024CHE_at; Start 333; Stop 357
tactatcctcgaaatgggttctggg

SEQ ID NO: 118649 - DNA, 25 bp, Artificial
  probe
  misc_feature (1)..(25): SEQ ID NO: 2372; WAN024CHE_at; Start 224; Stop 248
tgaaggctgggcaaacagaaccctt

SEQ ID NO: 118650 - DNA, 25 bp, Artificial
  probe
  misc_feature (1)..(25): SEQ ID NO: 2372; WAN024CHE_at; Start 872; Stop 896
cacttgctagcttgcaagatgcaag

SEQ ID NO: 118651 - DNA, 25 bp, Artificial
  probe
  misc_feature (1)..(25): SEQ ID NO: 2372; WAN024CHE_at; Start 689; Stop 713
tagctccgagtgatttgttgaccag

SEQ ID NO: 118652 - DNA, 25 bp, Artificial
  probe
  misc_feature (1)..(25): SEQ ID NO: 2372; WAN024CHE_at; Start 923; Stop 947
ttcaaaaatggactcaaggtactga

SEQ ID NO: 118653 - DNA, 25 bp, Artificial
  probe
  misc_feature (1)..(25): SEQ ID NO: 2372; WAN024CHE_at; Start 885; Stop 909
gcaagatgcaagtgttttaatgaaa

SEQ ID NO: 118654 - DNA, 25 bp, Artificial
  probe
  misc_feature (1)..(25): SEQ ID NO: 2372; WAN024CHE_at; Start 182; Stop 206
tacgcaaagaagaatggctcaagac

SEQ ID NO: 118655 - DNA, 25 bp, Artificial
  probe
  misc_feature (1)..(25): SEQ ID NO: 2372; WAN024CHE_at; Start 446; Stop 470
tggcagctagcatggcagatgtaat

SEQ ID NO: 118656 - DNA, 25 bp, Artificial
  probe
  misc_feature (1)..(25): SEQ ID NO: 2372; WAN024CHE_at; Start 204; Stop 228
gacctaccagtttctcttgatgaag

SEQ ID NO: 118657 - DNA, 25 bp, Artificial
  probe
  misc_feature (1)..(25): SEQ ID NO: 2372; WAN024CHE_at; Start 43; Stop 67
gagaatgtccaagtcatccaaagtg

SEQ ID NO: 118658 - DNA, 25 bp, Artificial
  probe
  misc_feature (1)..(25): SEQ ID NO: 2372; WAN024CHE_at; Start 336; Stop 360
tatcctcgaaatgggttctgggatg

SEQ ID NO: 118659 - DNA, 25 bp, Artificial
  probe
  misc_feature (1)..(25): SEQ ID NO: 2372; WAN024CHE_at; Start 175; Stop 199
ttagcactacgcaaagaagaatggc

SEQ ID NO: 118660 - DNA, 25 bp, Artificial
  probe
  misc_feature (1)..(25): SEQ ID NO: 2372; WAN024CHE_at; Start 164; Stop 188
cccttaagcgtttagcactacgcaa

SEQ ID NO: 118661 - DNA, 25 bp, Artificial
  probe
  misc_feature (1)..(25): SEQ ID NO: 2372; WAN024CHE_at; Start 321; Stop 345
agaggaggaaattactatcctcgaa

SEQ ID NO: 118662 - DNA, 25 bp, Artificial
  probe
  misc_feature (1)..(25): SEQ ID NO: 2372; WAN024CHE_at; Start 245; Stop 269
ccttgcaggccaatcaccagtttac

SEQ ID NO: 118663 - DNA, 25 bp, Artificial
  probe
  misc_feature (1)..(25): SEQ ID NO: 2372; WAN024CHE_at; Start 463; Stop 487
gatgtaattggtttgcaggctggct

SEQ ID NO: 118664 - DNA, 25 bp, Artificial
  probe
  misc_feature (1)..(25): SEQ ID NO: 2372; WAN024CHE_at; Start 560; Stop 584
gctattatcctgatgatgccgttgc

SEQ ID NO: 118665 - DNA, 25 bp, Artificial
  probe
  misc_feature (1)..(25): SEQ ID NO: 2372; WAN024CHE_at; Start 932; Stop 956
ggactcaaggtactgaaatataact

SEQ ID NO: 118666 - DNA, 25 bp, Artificial
  probe
  misc_feature (1)..(25): SEQ ID NO: 2372; WAN024CHE_at; Start 485; Stop 509
gctttgtccaaggagatgccgttcg

SEQ ID NO: 118667 - DNA, 25 bp, Artificial
  probe
  misc_feature (1)..(25): SEQ ID NO: 3210; WAN024CHF-3_at; Start 1604; Stop 1628
tgcagagctccgtgacaatggacaa

SEQ ID NO: 118668 - DNA, 25 bp, Artificial
  probe
  misc_feature (1)..(25): SEQ ID NO: 3210; WAN024CHF-3_at; Start 1452; Stop 1476
tacaatgatgccaaccaacacgtgg

SEQ ID NO: 118669 - DNA, 25 bp, Artificial
  probe
  misc_feature (1)..(25): SEQ ID NO: 3210; WAN024CHF-3_at; Start 1322; Stop 1346
tattgatagctttatcgcccgtggt

SEQ ID NO: 118670 - DNA, 25 bp, Artificial
  probe
  misc_feature (1)..(25): SEQ ID NO: 3210; WAN024CHF-3_at; Start 755; Stop 779
aaactatattggtgcagaggtgacc

SEQ ID NO: 118671 - DNA, 25 bp, Artificial
  probe
  misc_feature (1)..(25): SEQ ID NO: 3210; WAN024CHF-3_at; Start 990; Stop 1014
gaactagaagaagtaccagctgtgg

SEQ ID NO: 118672 - DNA, 25 bp, Artificial
  probe
  misc_feature (1)..(25): SEQ ID NO: 3210; WAN024CHF-3_at; Start 930; Stop 954
gacagtgcatttcaagggacattgg

SEQ ID NO: 118673 - DNA, 25 bp, Artificial
  probe
  misc_feature (1)..(25): SEQ ID NO: 3210; WAN024CHF-3_at; Start 194; Stop 218
tcaacacggtgtgactcatactgcg

SEQ ID NO: 118674 - DNA, 25 bp, Artificial
  probe
  misc_feature (1)..(25): SEQ ID NO: 3210; WAN024CHF-3_at; Start 1583; Stop 1607
tgtcgtgacggctgaggaatttgca

SEQ ID NO: 118675 - DNA, 25 bp, Artificial
  probe
  misc_feature (1)..(25): SEQ ID NO: 3210; WAN024CHF-3_at; Start 12; Stop 36
caaacatctgctgaaacactggaat

SEQ ID NO: 118676 - DNA, 25 bp, Artificial
  probe
  misc_feature (1)..(25): SEQ ID NO: 3210; WAN024CHF-3_at; Start 1537; Stop 1561
tgggcgatatccacgctattcctgt

SEQ ID NO: 118677 - DNA, 25 bp, Artificial
  probe
  misc_feature (1)..(25): SEQ ID NO: 3210; WAN024CHF-3_at; Start 590; Stop 614
tatctactacatcccaggtcaagcc

SEQ ID NO: 118678 - DNA, 25 bp, Artificial
  probe
  misc_feature (1)..(25): SEQ ID NO: 3210; WAN024CHF-3_at; Start 963; Stop 987
tacccaacagaatttacccaagcga

SEQ ID NO: 118679 - DNA, 25 bp, Artificial
  probe
  misc_feature (1)..(25): SEQ ID NO: 3210; WAN024CHF-3_at; Start 798; Stop 822
gctttgacagctcaattaggcggct

SEQ ID NO: 118680 - DNA, 25 bp, Artificial
  probe
  misc_feature (1)..(25): SEQ ID NO: 3210; WAN024CHF-3_at; Start 298; Stop 322
caactgctcgtttggtggctgctgg

SEQ ID NO: 118681 - DNA, 25 bp, Artificial
  probe
  misc_feature (1)..(25): SEQ ID NO: 3210; WAN024CHF-3_at; Start 1061; Stop 1085
ggtttacatcccagtctttccagga

SEQ ID NO: 118682 - DNA, 25 bp, Artificial
  probe
  misc_feature (1)..(25): SEQ ID NO: 3210; WAN024CHF-3_at; Start 120; Stop 144
tcaacggttaatcacccacttggtg

SEQ ID NO: 118683 - DNA, 25 bp, Artificial
  probe
  misc_feature (1)..(25): SEQ ID NO: 3210; WAN024CHF-3_at; Start 543; Stop 567
gatagccgtaaggtgctctctccag

SEQ ID NO: 118684 - DNA, 25 bp, Artificial
  probe
  misc_feature (1)..(25): SEQ ID NO: 3210; WAN024CHF-3_at; Start 1095; Stop 1119
gaatatgattcagctaaggccttcg

SEQ ID NO: 118685 - DNA, 25 bp, Artificial
  probe
  misc_feature (1)..(25): SEQ ID NO: 3210; WAN024CHF-3_at; Start 1470; Stop 1494
cacgtggccaagatggtggaaactc

SEQ ID NO: 118686 - DNA, 25 bp, Artificial
  probe
  misc_feature (1)..(25): SEQ ID NO: 3210; WAN024CHF-3_at; Start 210; Stop 234
catactgcgtcggtcattgctcaag

SEQ ID NO: 118687 - DNA, 25 bp, Artificial
  probe
  misc_feature (1)..(25): SEQ ID NO: 3210; WAN024CHF-3_at; Start 678; Stop 702
gctgaccataaagtgacatctgcat

SEQ ID NO: 118688 - DNA, 25 bp, Artificial
  probe
  misc_feature (1)..(25): SEQ ID NO: 3210; WAN024CHF-3_at; Start 913; Stop 937
tagatggacacaagcttgacagtgc

SEQ ID NO: 118689 - DNA, 25 bp, Artificial
  probe
  misc_feature (1)..(25): SEQ ID NO: 3210; WAN024CHF-3_at; Start 453; Stop 477
ccatctatcggtggtaaggactcca

SEQ ID NO: 118690 - DNA, 25 bp, Artificial
  probe
  misc_feature (1)..(25): SEQ ID NO: 3210; WAN024CHF-3_at; Start 1551; Stop 1575
gctattcctgtttcgcacggtgaag

SEQ ID NO: 118691 - DNA, 25 bp, Artificial
  probe
  misc_feature (1)..(25): SEQ ID NO: 3210; WAN024CHF-3_at; Start 898; Stop 922
tcaacggtgtgaagctagatggaca

SEQ ID NO: 118692 - DNA, 25 bp, Artificial
  probe
  misc_feature (1)..(25): SEQ ID NO: 3210; WAN024CHF-3_at; Start 102; Stop 126
gactgctctgttggacgctcaacgg

SEQ ID NO: 118693 - DNA, 25 bp, Artificial
  probe
  misc_feature (1)..(25): SEQ ID NO: 3210; WAN024CHF-3_at; Start 1377; Stop 1401
caagccttagtcaaatcgggtctcc

SEQ ID NO: 118694 - DNA, 25 bp, Artificial
  probe
  misc_feature (1)..(25): SEQ ID NO: 3210; WAN024CHF-3_at; Start 1688; Stop 1712
gaatggttctgtccatgccatcgaa

SEQ ID NO: 118695 - DNA, 25 bp, Artificial
  probe
  misc_feature (1)..(25): SEQ ID NO: 3210; WAN024CHF-3_at; Start 1246; Stop 1270
tctcggctgcggatgaaccagatgg

SEQ ID NO: 118696 - DNA, 25 bp, Artificial
  probe
  misc_feature (1)..(25): SEQ ID NO: 3210; WAN024CHF-3_at; Start 160; Stop 184
caccaactgaggcatctgtgcagaa

SEQ ID NO: 118697 - DNA, 25 bp, Artificial
  probe
  misc_feature (1)..(25): SEQ ID NO: 3210; WAN024CHF-3_at; Start 179; Stop 203
gcagaaattgccagttcaacacggt

SEQ ID NO: 118698 - DNA, 25 bp, Artificial
  probe
  misc_feature (1)..(25): SEQ ID NO: 3210; WAN024CHF-3_at; Start 696; Stop 720
tctgcatcagctgtcaaatacggtg

SEQ ID NO: 118699 - DNA, 25 bp, Artificial
  probe
  misc_feature (1)..(25): SEQ ID NO: 3210; WAN024CHF-3_at; Start 255; Stop 279
gaatggtctccataccacggtgctg

SEQ ID NO: 118700 - DNA, 25 bp, Artificial
  probe
  misc_feature (1)..(25): SEQ ID NO: 3210; WAN024CHF-3_at; Start 1704; Stop 1728
gccatcgaaggaattaccagcaaga

SEQ ID NO: 118701 - DNA, 25 bp, Artificial
  probe
  misc_feature (1)..(25): SEQ ID NO: 5226; WAN024CHF-5_at; Start 1466; Stop 1490
agattcagcgcctcttccgtaatgg

SEQ ID NO: 118702 - DNA, 25 bp, Artificial
  probe
  misc_feature (1)..(25): SEQ ID NO: 5226; WAN024CHF-5_at; Start 450; Stop 474
tatcacgacagggattgccaagcag

SEQ ID NO: 118703 - DNA, 25 bp, Artificial
  probe
  misc_feature (1)..(25): SEQ ID NO: 5226; WAN024CHF-5_at; Start 224; Stop 248
tgcaggcggatcttgctaactatgc

SEQ ID NO: 118704 - DNA, 25 bp, Artificial
  probe
  misc_feature (1)..(25): SEQ ID NO: 5226; WAN024CHF-5_at; Start 1287; Stop 1311
tcccaagggcaatgttgtccgtgaa

SEQ ID NO: 118705 - DNA, 25 bp, Artificial
  probe
  misc_feature (1)..(25): SEQ ID NO: 5226; WAN024CHF-5_at; Start 148; Stop 172
gaggacttgtttgcacctgcagaga

SEQ ID NO: 118706 - DNA, 25 bp, Artificial
  probe
  misc_feature (1)..(25): SEQ ID NO: 5226; WAN024CHF-5_at; Start 1232; Stop 1256
tccacccaggctttgtagctaaacg

SEQ ID NO: 118707 - DNA, 25 bp, Artificial
  probe
  misc_feature (1)..(25): SEQ ID NO: 5226; WAN024CHF-5_at; Start 1301; Stop 1325
ttgtccgtgaaaaacctgaagcagg

SEQ ID NO: 118708 - DNA, 25 bp, Artificial
  probe
  misc_feature (1)..(25): SEQ ID NO: 5226; WAN024CHF-5_at; Start 1444; Stop 1468
ggaaatgccatcgaagaacgcaaga

SEQ ID NO: 118709 - DNA, 25 bp, Artificial
  probe
  misc_feature (1)..(25): SEQ ID NO: 5226; WAN024CHF-5_at; Start 889; Stop 913
gacgaaatcaatgcctgctcagttg

SEQ ID NO: 118710 - DNA, 25 bp, Artificial
  probe
  misc_feature (1)..(25): SEQ ID NO: 5226; WAN024CHF-5_at; Start 680; Stop 704
gccgtcatacgacttttgagacaga

SEQ ID NO: 118711 - DNA, 25 bp, Artificial
  probe
  misc_feature (1)..(25): SEQ ID NO: 5226; WAN024CHF-5_at; Start 1483; Stop 1507
cgtaatggcaatgtcactcgtctga

SEQ ID NO: 118712 - DNA, 25 bp, Artificial
  probe
  misc_feature (1)..(25): SEQ ID NO: 5226; WAN024CHF-5_at; Start 1151; Stop 1175
tcatttctaaaacagcagctcatgg

SEQ ID NO: 118713 - DNA, 25 bp, Artificial
  probe
  misc_feature (1)..(25): SEQ ID NO: 5226; WAN024CHF-5_at; Start 763; Stop 787
gacaagtatattgccatgcgcgagg

SEQ ID NO: 118714 - DNA, 25 bp, Artificial
  probe
  misc_feature (1)..(25): SEQ ID NO: 5226; WAN024CHF-5_at; Start 1639; Stop 1663
tctgaatcacaagaacggatggcgg

SEQ ID NO: 118715 - DNA, 25 bp, Artificial
  probe
  misc_feature (1)..(25): SEQ ID NO: 5226; WAN024CHF-5_at; Start 1249; Stop 1273
gctaaacgtatggaacttggtgccg

SEQ ID NO: 118716 - DNA, 25 bp, Artificial
  probe
  misc_feature (1)..(25): SEQ ID NO: 5226; WAN024CHF-5_at; Start 57; Stop 81
gagtttggttagagagctccagcac

SEQ ID NO: 118717 - DNA, 25 bp, Artificial
  probe
  misc_feature (1)..(25): SEQ ID NO: 5226; WAN024CHF-5_at; Start 1380; Stop 1404
gacgggctcttctaaggttcaaaca

SEQ ID NO: 118718 - DNA, 25 bp, Artificial
  probe
  misc_feature (1)..(25): SEQ ID NO: 5226; WAN024CHF-5_at; Start 1417; Stop 1441
gagactgctggtgctgaggttcaaa

SEQ ID NO: 118719 - DNA, 25 bp, Artificial
  probe
  misc_feature (1)..(25): SEQ ID NO: 5226; WAN024CHF-5_at; Start 811; Stop 835
caaaccttgatggatatggcgacta

SEQ ID NO: 118720 - DNA, 25 bp, Artificial
  probe
  misc_feature (1)..(25): SEQ ID NO: 5226; WAN024CHF-5_at; Start 1098; Stop 1122
tgatattacagcaccgatttcggaa

SEQ ID NO: 118721 - DNA, 25 bp, Artificial
  probe
  misc_feature (1)..(25): SEQ ID NO: 5226; WAN024CHF-5_at; Start 1785; Stop 1809
gacaatcgttgacttggagcgtcgt

SEQ ID NO: 118722 - DNA, 25 bp, Artificial
  probe
  misc_feature (1)..(25): SEQ ID NO: 5226; WAN024CHF-5_at; Start 1184; Stop 1208
catatggtaaccagattgggcttgc

SEQ ID NO: 118723 - DNA, 25 bp, Artificial
  probe
  misc_feature (1)..(25): SEQ ID NO: 5226; WAN024CHF-5_at; Start 1757; Stop 1781
caaatcttgtcatgcactggaatgg

SEQ ID NO: 118724 - DNA, 25 bp, Artificial
  probe
  misc_feature (1)..(25): SEQ ID NO: 5226; WAN024CHF-5_at; Start 285; Stop 309
ccagcgtgcagcttcgtcacaggaa

SEQ ID NO: 118725 - DNA, 25 bp, Artificial
  probe
  misc_feature (1)..(25): SEQ ID NO: 5226; WAN024CHF-5_at; Start 696; Stop 720
tgagacagagttgaaacacatcgac

SEQ ID NO: 118726 - DNA, 25 bp, Artificial
  probe
  misc_feature (1)..(25): SEQ ID NO: 5226; WAN024CHF-5_at; Start 607; Stop 631
tactttaagtcaatcgggcgcgtgc

SEQ ID NO: 118727 - DNA, 25 bp, Artificial
  probe
  misc_feature (1)..(25): SEQ ID NO: 5226; WAN024CHF-5_at; Start 992; Stop 1016
aaattgagccatttggtggagcggc

SEQ ID NO: 118728 - DNA, 25 bp, Artificial
  probe
  misc_feature (1)..(25): SEQ ID NO: 5226; WAN024CHF-5_at; Start 1590; Stop 1614
caaggtgcctcttaaataccagggc

SEQ ID NO: 118729 - DNA, 25 bp, Artificial
  probe
  misc_feature (1)..(25): SEQ ID NO: 5226; WAN024CHF-5_at; Start 1035; Stop 1059
tattcgtgatccgttgtcaggccgt

SEQ ID NO: 118730 - DNA, 25 bp, Artificial
  probe
  misc_feature (1)..(25): SEQ ID NO: 5226; WAN024CHF-5_at; Start 1052; Stop 1076
caggccgttcctatgtttaccaagc

SEQ ID NO: 118731 - DNA, 25 bp, Artificial
  probe
  misc_feature (1)..(25): SEQ ID NO: 5226; WAN024CHF-5_at; Start 468; Stop 492
caagcaggagttttcagagtcagac

SEQ ID NO: 118732 - DNA, 25 bp, Artificial
  probe
  misc_feature (1)..(25): SEQ ID NO: 5226; WAN024CHF-5_at; Start 1575; Stop 1599
tgaaatcgacctcaacaaggtgcct

SEQ ID NO: 118733 - DNA, 25 bp, Artificial
  probe
  misc_feature (1)..(25): SEQ ID NO: 5226; WAN024CHF-5_at; Start 1827; Stop 1851
tgtgcgcgtggttgtcgatgccaaa

SEQ ID NO: 118734 - DNA, 25 bp, Artificial
  probe
  misc_feature (1)..(25): SEQ ID NO: 5226; WAN024CHF-5_at; Start 623; Stop 647
ggcgcgtgccaactgagactgaact

SEQ ID NO: 118735 - DNA, 25 bp, Artificial
  probe
  misc_feature (1)..(25): SEQ ID NO: 3468; WAN024CHG_at; Start 107; Stop 131
acgaaattgtctgggaaaagttgca

SEQ ID NO: 118736 - DNA, 25 bp, Artificial
  probe
  misc_feature (1)..(25): SEQ ID NO: 3468; WAN024CHG_at; Start 67; Stop 91
ttttcactctgtagagaactaggtg

SEQ ID NO: 118737 - DNA, 25 bp, Artificial
  probe
  misc_feature (1)..(25): SEQ ID NO: 3468; WAN024CHG_at; Start 80; Stop 104
gagaactaggtgaactaacagatgt

SEQ ID NO: 118738 - DNA, 25 bp, Artificial
  probe
  misc_feature (1)..(25): SEQ ID NO: 3468; WAN024CHG_at; Start 24; Stop 48
tctctcaactaaaaggactcaggct

SEQ ID NO: 118739 - DNA, 25 bp, Artificial
  probe
  misc_feature (1)..(25): SEQ ID NO: 3468; WAN024CHG_at; Start 82; Stop 106
gaactaggtgaactaacagatgttt

SEQ ID NO: 118740 - DNA, 25 bp, Artificial
  probe
  misc_feature (1)..(25): SEQ ID NO: 3468; WAN024CHG_at; Start 29; Stop 53
caactaaaaggactcaggctgaaaa

SEQ ID NO: 118741 - DNA, 25 bp, Artificial
  probe
  misc_feature (1)..(25): SEQ ID NO: 3468; WAN024CHG_at; Start 98; Stop 122
cagatgtttacgaaattgtctggga

SEQ ID NO: 118742 - DNA, 25 bp, Artificial
  probe
  misc_feature (1)..(25): SEQ ID NO: 3468; WAN024CHG_at; Start 26; Stop 50
tctcaactaaaaggactcaggctga

SEQ ID NO: 118743 - DNA, 25 bp, Artificial
  probe
  misc_feature (1)..(25): SEQ ID NO: 3468; WAN024CHG_at; Start 31; Stop 55
actaaaaggactcaggctgaaaagg

SEQ ID NO: 118744 - DNA, 25 bp, Artificial
  probe
  misc_feature (1)..(25): SEQ ID NO: 3468; WAN024CHG_at; Start 58; Stop 82
ccccagaccttttcactctgtagag

SEQ ID NO: 118745 - DNA, 25 bp, Artificial
  probe
  misc_feature (1)..(25): SEQ ID NO: 3468; WAN024CHG_at; Start 40; Stop 64
actcaggctgaaaaggtcccccaga

SEQ ID NO: 118746 - DNA, 25 bp, Artificial
  probe
  misc_feature (1)..(25): SEQ ID NO: 3468; WAN024CHG_at; Start 76; Stop 100
tgtagagaactaggtgaactaacag

SEQ ID NO: 118747 - DNA, 25 bp, Artificial
  probe
  misc_feature (1)..(25): SEQ ID NO: 3468; WAN024CHG_at; Start 100; Stop 124
gatgtttacgaaattgtctgggaaa

SEQ ID NO: 118748 - DNA, 25 bp, Artificial
  probe
  misc_feature (1)..(25): SEQ ID NO: 3468; WAN024CHG_at; Start 72; Stop 96
actctgtagagaactaggtgaacta

SEQ ID NO: 118749 - DNA, 25 bp, Artificial
  probe
  misc_feature (1)..(25): SEQ ID NO: 3468; WAN024CHG_at; Start 74; Stop 98
tctgtagagaactaggtgaactaac

SEQ ID NO: 118750 - DNA, 25 bp, Artificial
  probe
  misc_feature (1)..(25): SEQ ID NO: 3468; WAN024CHG_at; Start 22; Stop 46
cgtctctcaactaaaaggactcagg

SEQ ID NO: 118751 - DNA, 25 bp, Artificial
  probe
  misc_feature (1)..(25): SEQ ID NO: 3468; WAN024CHG_at; Start 93; Stop 117
actaacagatgtttacgaaattgtc

SEQ ID NO: 118752 - DNA, 25 bp, Artificial
  probe
  misc_feature (1)..(25): SEQ ID NO: 3468; WAN024CHG_at; Start 60; Stop 84
ccagaccttttcactctgtagagaa

SEQ ID NO: 118753 - DNA, 25 bp, Artificial
  probe
  misc_feature (1)..(25): SEQ ID NO: 3468; WAN024CHG_at; Start 63; Stop 87
gaccttttcactctgtagagaacta

SEQ ID NO: 118754 - DNA, 25 bp, Artificial
  probe
  misc_feature (1)..(25): SEQ ID NO: 3468; WAN024CHG_at; Start 70; Stop 94
tcactctgtagagaactaggtgaac

SEQ ID NO: 118755 - DNA, 25 bp, Artificial
  probe
  misc_feature (1)..(25): SEQ ID NO: 3468; WAN024CHG_at; Start 19; Stop 43
cttcgtctctcaactaaaaggactc

SEQ ID NO: 118756 - DNA, 25 bp, Artificial
  probe
  misc_feature (1)..(25): SEQ ID NO: 3468; WAN024CHG_at; Start 25; Stop 49
ctctcaactaaaaggactcaggctg

SEQ ID NO: 118757 - DNA, 25 bp, Artificial
  probe
  misc_feature (1)..(25): SEQ ID NO: 3468; WAN024CHG_at; Start 28; Stop 52
tcaactaaaaggactcaggctgaaa

SEQ ID NO: 118758 - DNA, 25 bp, Artificial
  probe
  misc_feature (1)..(25): SEQ ID NO: 3468; WAN024CHG_at; Start 33; Stop 57
taaaaggactcaggctgaaaaggtc

SEQ ID NO: 118759 - DNA, 25 bp, Artificial
  probe
  misc_feature (1)..(25): SEQ ID NO: 3468; WAN024CHG_at; Start 71; Stop 95
cactctgtagagaactaggtgaact

SEQ ID NO: 118760 - DNA, 25 bp, Artificial
  probe
  misc_feature (1)..(25): SEQ ID NO: 3468; WAN024CHG_at; Start 86; Stop 110
taggtgaactaacagatgtttacga

SEQ ID NO: 118761 - DNA, 25 bp, Artificial
  probe
  misc_feature (1)..(25): SEQ ID NO: 3468; WAN024CHG_at; Start 84; Stop 108
actaggtgaactaacagatgtttac

SEQ ID NO: 118762 - DNA, 25 bp, Artificial
  probe
  misc_feature (1)..(25): SEQ ID NO: 3468; WAN024CHG_at; Start 78; Stop 102
tagagaactaggtgaactaacagat

SEQ ID NO: 118763 - DNA, 25 bp, Artificial
  probe
  misc_feature (1)..(25): SEQ ID NO: 3468; WAN024CHG_at; Start 88; Stop 112
ggtgaactaacagatgtttacgaaa

SEQ ID NO: 118764 - DNA, 25 bp, Artificial
  probe
  misc_feature (1)..(25): SEQ ID NO: 3468; WAN024CHG_at; Start 21; Stop 45
tcgtctctcaactaaaaggactcag

SEQ ID NO: 118765 - DNA, 25 bp, Artificial
  probe
  misc_feature (1)..(25): SEQ ID NO: 3468; WAN024CHG_at; Start 5; Stop 29
ttgcaacggaaaaccttcgtctctc

SEQ ID NO: 118766 - DNA, 25 bp, Artificial
  probe
  misc_feature (1)..(25): SEQ ID NO: 3468; WAN024CHG_at; Start 65; Stop 89
ccttttcactctgtagagaactagg

SEQ ID NO: 118767 - DNA, 25 bp, Artificial
  probe
  misc_feature (1)..(25): SEQ ID NO: 3468; WAN024CHG_at; Start 106; Stop 130
tacgaaattgtctgggaaaagttgc

SEQ ID NO: 118768 - DNA, 25 bp, Artificial
  probe
  misc_feature (1)..(25): SEQ ID NO: 3468; WAN024CHG_at; Start 7; Stop 31
gcaacggaaaaccttcgtctctcaa

SEQ ID NO: 118769 - DNA, 25 bp, Artificial
  probe
  misc_feature (1)..(25): SEQ ID NO: 3396; WAN024CHH_at; Start 616; Stop 640
gagttcggttttgacaaggatggca

SEQ ID NO: 118770 - DNA, 25 bp, Artificial
  probe
  misc_feature (1)..(25): SEQ ID NO: 3396; WAN024CHH_at; Start 192; Stop 216
tgtcaagaaggagcagattgcaggt

SEQ ID NO: 118771 - DNA, 25 bp, Artificial
  probe
  misc_feature (1)..(25): SEQ ID NO: 3396; WAN024CHH_at; Start 52; Stop 76
tgtgctcaagtaatacgaaaggcga

SEQ ID NO: 118772 - DNA, 25 bp, Artificial
  probe
  misc_feature (1)..(25): SEQ ID NO: 3396; WAN024CHH_at; Start 153; Stop 177
tatttcaacttacaaggaccaggcg

SEQ ID NO: 118773 - DNA, 25 bp, Artificial
  probe
  misc_feature (1)..(25): SEQ ID NO: 3396; WAN024CHH_at; Start 353; Stop 377
tcgtgctccgcaactatactgctgg

SEQ ID NO: 118774 - DNA, 25 bp, Artificial
  probe
  misc_feature (1)..(25): SEQ ID NO: 3396; WAN024CHH_at; Start 722; Stop 746
tccgtagaggattgggagaactaac

SEQ ID NO: 118775 - DNA, 25 bp, Artificial
  probe
  misc_feature (1)..(25): SEQ ID NO: 3396; WAN024CHH_at; Start 701; Stop 725
accacatggataaggatgttttccg

SEQ ID NO: 118776 - DNA, 25 bp, Artificial
  probe
  misc_feature (1)..(25): SEQ ID NO: 3396; WAN024CHH_at; Start 747; Stop 771
cgacgtttatgagattgtttgggaa

SEQ ID NO: 118777 - DNA, 25 bp, Artificial
  probe
  misc_feature (1)..(25): SEQ ID NO: 3396; WAN024CHH_at; Start 487; Stop 511
catgtgaaattcctacagattgcgg

SEQ ID NO: 118778 - DNA, 25 bp, Artificial
  probe
  misc_feature (1)..(25): SEQ ID NO: 3396; WAN024CHH_at; Start 420; Stop 444
ggagactccgattgtcgaattttac

SEQ ID NO: 118779 - DNA, 25 bp, Artificial
  probe
  misc_feature (1)..(25): SEQ ID NO: 3396; WAN024CHH_at; Start 406; Stop 430
gagggaatcgccttggagactccga

SEQ ID NO: 118780 - DNA, 25 bp, Artificial
  probe
  misc_feature (1)..(25): SEQ ID NO: 3396; WAN024CHH_at; Start 368; Stop 392
atactgctggttccttttcaaaacg

SEQ ID NO: 118781 - DNA, 25 bp, Artificial
  probe
  misc_feature (1)..(25): SEQ ID NO: 3396; WAN024CHH_at; Start 514; Stop 538
gaccagcagattgcctacttgaagg

SEQ ID NO: 118782 - DNA, 25 bp, Artificial
  probe
  misc_feature (1)..(25): SEQ ID NO: 3396; WAN024CHH_at; Start 476; Stop 500
tcaatgatgagcatgtgaaattcct

SEQ ID NO: 118783 - DNA, 25 bp, Artificial
  probe
  misc_feature (1)..(25): SEQ ID NO: 3396; WAN024CHH_at; Start 582; Stop 606
tgagattgggcttaaattgattgac

SEQ ID NO: 118784 - DNA, 25 bp, Artificial
  probe
  misc_feature (1)..(25): SEQ ID NO: 3396; WAN024CHH_at; Start 645; Stop 669
tatcttggcagacgaattttcacca

SEQ ID NO: 118785 - DNA, 25 bp, Artificial
  probe
  misc_feature (1)..(25): SEQ ID NO: 3396; WAN024CHH_at; Start 293; Stop 317
tggagaaactttcagacacggaaca

SEQ ID NO: 118786 - DNA, 25 bp, Artificial
  probe
  misc_feature (1)..(25): SEQ ID NO: 3396; WAN024CHH_at; Start 385; Stop 409
tcaaaacgttttggtgtggatgagg

SEQ ID NO: 118787 - DNA, 25 bp, Artificial
  probe
  misc_feature (1)..(25): SEQ ID NO: 3396; WAN024CHH_at; Start 162; Stop 186
ttacaaggaccaggcgactgctttc

SEQ ID NO: 118788 - DNA, 25 bp, Artificial
  probe
  misc_feature (1)..(25): SEQ ID NO: 3396; WAN024CHH_at; Start 545; Stop 569
cgcgtcgtatcaatgaactattgaa

SEQ ID NO: 118789 - DNA, 25 bp, Artificial
  probe
  misc_feature (1)..(25): SEQ ID NO: 3396; WAN024CHH_at; Start 600; Stop 624
gattgactttaagctagagttcggt

SEQ ID NO: 118790 - DNA, 25 bp, Artificial
  probe
  misc_feature (1)..(25): SEQ ID NO: 3396; WAN024CHH_at; Start 212; Stop 236
caggtaagggagtcttgaataatca

SEQ ID NO: 118791 - DNA, 25 bp, Artificial
  probe
  misc_feature (1)..(25): SEQ ID NO: 3396; WAN024CHH_at; Start 672; Stop 696
taactgccgcttgtgggacgctgat

SEQ ID NO: 118792 - DNA, 25 bp, Artificial
  probe
  misc_feature (1)..(25): SEQ ID NO: 3396; WAN024CHH_at; Start 463; Stop 487
gatgatccatttatcaatgatgagc

SEQ ID NO: 118793 - DNA, 25 bp, Artificial
  probe
  misc_feature (1)..(25): SEQ ID NO: 3396; WAN024CHH_at; Start 35; Stop 59
ggttttttgtggtaaaatgtgctca

SEQ ID NO: 118794 - DNA, 25 bp, Artificial
  probe
  misc_feature (1)..(25): SEQ ID NO: 3396; WAN024CHH_at; Start 102; Stop 126
ctattcgggaaaagctaaagatatc

SEQ ID NO: 118795 - DNA, 25 bp, Artificial
  probe
  misc_feature (1)..(25): SEQ ID NO: 3396; WAN024CHH_at; Start 339; Stop 363
tattcctttggaagtcgtgctccgc

SEQ ID NO: 118796 - DNA, 25 bp, Artificial
  probe
  misc_feature (1)..(25): SEQ ID NO: 3396; WAN024CHH_at; Start 125; Stop 149
tctatacaactgaggatgaaaatct

SEQ ID NO: 118797 - DNA, 25 bp, Artificial
  probe
  misc_feature (1)..(25): SEQ ID NO: 3396; WAN024CHH_at; Start 630; Stop 654
caaggatggcaagattatcttggca

SEQ ID NO: 118798 - DNA, 25 bp, Artificial
  probe
  misc_feature (1)..(25): SEQ ID NO: 3396; WAN024CHH_at; Start 447; Stop 471
caaaaatgatgatttggatgatcca

SEQ ID NO: 118799 - DNA, 25 bp, Artificial
  probe
  misc_feature (1)..(25): SEQ ID NO: 3396; WAN024CHH_at; Start 278; Stop 302
tggcgactcactttgtggagaaact

SEQ ID NO: 118800 - DNA, 25 bp, Artificial
  probe
  misc_feature (1)..(25): SEQ ID NO: 3396; WAN024CHH_at; Start 86; Stop 110
tgtcaaaacaattgatctattcggg

SEQ ID NO: 118801 - DNA, 25 bp, Artificial
  probe
  misc_feature (1)..(25): SEQ ID NO: 3396; WAN024CHH_at; Start 658; Stop 682
gaattttcaccagataactgccgct

SEQ ID NO: 118802 - DNA, 25 bp, Artificial
  probe
  misc_feature (1)..(25): SEQ ID NO: 3396; WAN024CHH_at; Start 736; Stop 760
ggagaactaaccgacgtttatgaga

SEQ ID NO: 118803 - DNA, 25 bp, Artificial
  probe
  misc_feature (1)..(25): SEQ ID NO: 7116; WAN024CHI_at; Start 1; Stop 25
ctgcaagaagaatctttctcacagt

SEQ ID NO: 118804 - DNA, 25 bp, Artificial
  probe
  misc_feature (1)..(25): SEQ ID NO: 7116; WAN024CHI_at; Start 56; Stop 80
cattactctttgttcaaaaattgat

SEQ ID NO: 118805 - DNA, 25 bp, Artificial
  probe
  misc_feature (1)..(25): SEQ ID NO: 7116; WAN024CHI_at; Start 54; Stop 78
aacattactctttgttcaaaaattg

SEQ ID NO: 118806 - DNA, 25 bp, Artificial
  probe
  misc_feature (1)..(25): SEQ ID NO: 7116; WAN024CHI_at; Start 41; Stop 65
ctctaaaaacacgaacattactctt

SEQ ID NO: 118807 - DNA, 25 bp, Artificial
  probe
  misc_feature (1)..(25): SEQ ID NO: 7116; WAN024CHI_at; Start 48; Stop 72
aacacgaacattactctttgttcaa

SEQ ID NO: 118808 - DNA, 25 bp, Artificial
  probe
  misc_feature (1)..(25): SEQ ID NO: 7116; WAN024CHI_at; Start 57; Stop 81
attactctttgttcaaaaattgatc

SEQ ID NO: 118809 - DNA, 25 bp, Artificial
  probe
  misc_feature (1)..(25): SEQ ID NO: 7116; WAN024CHI_at; Start 55; Stop 79
acattactctttgttcaaaaattga

SEQ ID NO: 118810 - DNA, 25 bp, Artificial
  probe
  misc_feature (1)..(25): SEQ ID NO: 7116; WAN024CHI_at; Start 52; Stop 76
cgaacattactctttgttcaaaaat

SEQ ID NO: 118811 - DNA, 25 bp, Artificial
  probe
  misc_feature (1)..(25): SEQ ID NO: 7116; WAN024CHI_at; Start 47; Stop 71
aaacacgaacattactctttgttca

SEQ ID NO: 118812 - DNA, 25 bp, Artificial
  probe
  misc_feature (1)..(25): SEQ ID NO: 7116; WAN024CHI_at; Start 49; Stop 73
acacgaacattactctttgttcaaa

SEQ ID NO: 118813 - DNA, 25 bp, Artificial
  probe
  misc_feature (1)..(25): SEQ ID NO: 7116; WAN024CHI_at; Start 5; Stop 29
aagaagaatctttctcacagtttaa

SEQ ID NO: 118814 - DNA, 25 bp, Artificial
  probe
  misc_feature (1)..(25): SEQ ID NO: 7116; WAN024CHI_at; Start 40; Stop 64
actctaaaaacacgaacattactct

SEQ ID NO: 118815 - DNA, 25 bp, Artificial
  probe
  misc_feature (1)..(25): SEQ ID NO: 7116; WAN024CHI_at; Start 4; Stop 28
caagaagaatctttctcacagttta

SEQ ID NO: 118816 - DNA, 25 bp, Artificial
  probe
  misc_feature (1)..(25): SEQ ID NO: 7116; WAN024CHI_at; Start 12; Stop 36
atctttctcacagtttaaaaattat

SEQ ID NO: 118817 - DNA, 25 bp, Artificial
  probe
  misc_feature (1)..(25): SEQ ID NO: 7116; WAN024CHI_at; Start 43; Stop 67
ctaaaaacacgaacattactctttg

SEQ ID NO: 118818 - DNA, 25 bp, Artificial
  probe
  misc_feature (1)..(25): SEQ ID NO: 7116; WAN024CHI_at; Start 7; Stop 31
gaagaatctttctcacagtttaaaa

SEQ ID NO: 118819 - DNA, 25 bp, Artificial
  probe
  misc_feature (1)..(25): SEQ ID NO: 7116; WAN024CHI_at; Start 6; Stop 30
agaagaatctttctcacagtttaaa

SEQ ID NO: 118820 - DNA, 25 bp, Artificial
  probe
  misc_feature (1)..(25): SEQ ID NO: 7116; WAN024CHI_at; Start 3; Stop 27
gcaagaagaatctttctcacagttt

SEQ ID NO: 118821 - DNA, 25 bp, Artificial
  probe
  misc_feature (1)..(25): SEQ ID NO: 7116; WAN024CHI_at; Start 50; Stop 74
cacgaacattactctttgttcaaaa

SEQ ID NO: 118822 - DNA, 25 bp, Artificial
  probe
  misc_feature (1)..(25): SEQ ID NO: 7116; WAN024CHI_at; Start 2; Stop 26
tgcaagaagaatctttctcacagtt

SEQ ID NO: 118823 - DNA, 25 bp, Artificial
  probe
  misc_feature (1)..(25): SEQ ID NO: 7116; WAN024CHI_at; Start 9; Stop 33
agaatctttctcacagtttaaaaat

SEQ ID NO: 118824 - DNA, 25 bp, Artificial
  probe
  misc_feature (1)..(25): SEQ ID NO: 5072; WAN024CHJ_at; Start 34; Stop 58
ttggctagctgctgcattctgggac

SEQ ID NO: 118825 - DNA, 25 bp, Artificial
  probe
  misc_feature (1)..(25): SEQ ID NO: 5072; WAN024CHJ_at; Start 129; Stop 153
tggcttggtagccaaacttatcctc

SEQ ID NO: 118826 - DNA, 25 bp, Artificial
  probe
  misc_feature (1)..(25): SEQ ID NO: 5072; WAN024CHJ_at; Start 162; Stop 186
agtggttctccccttcttgcaggct

SEQ ID NO: 118827 - DNA, 25 bp, Artificial
  probe
  misc_feature (1)..(25): SEQ ID NO: 5072; WAN024CHJ_at; Start 165; Stop 189
ggttctccccttcttgcaggctctt

SEQ ID NO: 118828 - DNA, 25 bp, Artificial
  probe
  misc_feature (1)..(25): SEQ ID NO: 5072; WAN024CHJ_at; Start 39; Stop 63
tagctgctgcattctgggacgcgat

SEQ ID NO: 118829 - DNA, 25 bp, Artificial
  probe
  misc_feature (1)..(25): SEQ ID NO: 5072; WAN024CHJ_at; Start 51; Stop 75
tctgggacgcgatggtctcattttg

SEQ ID NO: 118830 - DNA, 25 bp, Artificial
  probe
  misc_feature (1)..(25): SEQ ID NO: 5072; WAN024CHJ_at; Start 84; Stop 108
tactagccctaagactgcctgcttg

SEQ ID NO: 118831 - DNA, 25 bp, Artificial
  probe
  misc_feature (1)..(25): SEQ ID NO: 5072; WAN024CHJ_at; Start 22; Stop 46
ttcggcttgggtttggctagctgct

SEQ ID NO: 118832 - DNA, 25 bp, Artificial
  probe
  misc_feature (1)..(25): SEQ ID NO: 5072; WAN024CHJ_at; Start 142; Stop 166
aaacttatcctcctctggaaagtgg

SEQ ID NO: 118833 - DNA, 25 bp, Artificial
  probe
  misc_feature (1)..(25): SEQ ID NO: 5072; WAN024CHJ_at; Start 1; Stop 25
ttgactgatgaggttgccgatttcg

SEQ ID NO: 118834 - DNA, 25 bp, Artificial
  probe
  misc_feature (1)..(25): SEQ ID NO: 5072; WAN024CHJ_at; Start 189; Stop 213
tttgcagatactccaattgcttttt

SEQ ID NO: 118835 - DNA, 25 bp, Artificial
  probe
  misc_feature (1)..(25): SEQ ID NO: 5072; WAN024CHJ_at; Start 183; Stop 207
ggctcttttgcagatactccaattg

SEQ ID NO: 118836 - DNA, 25 bp, Artificial
  probe
  misc_feature (1)..(25): SEQ ID NO: 5072; WAN024CHJ_at; Start 42; Stop 66
ctgctgcattctgggacgcgatggt

SEQ ID NO: 118837 - DNA, 25 bp, Artificial
  probe
  misc_feature (1)..(25): SEQ ID NO: 5072; WAN024CHJ_at; Start 101; Stop 125
cctgcttgactgatgtagtcgcgaa

SEQ ID NO: 118838 - DNA, 25 bp, Artificial
  probe
  misc_feature (1)..(25): SEQ ID NO: 5072; WAN024CHJ_at; Start 87; Stop 111
tagccctaagactgcctgcttgact

SEQ ID NO: 118839 - DNA, 25 bp, Artificial
  probe
  misc_feature (1)..(25): SEQ ID NO: 5072; WAN024CHJ_at; Start 68; Stop 92
tcattttgttgcgatgtactagccc

SEQ ID NO: 118840 - DNA, 25 bp, Artificial
  probe
  misc_feature (1)..(25): SEQ ID NO: 5072; WAN024CHJ_at; Start 91; Stop 115
cctaagactgcctgcttgactgatg

SEQ ID NO: 118841 - DNA, 25 bp, Artificial
  probe
  misc_feature (1)..(25): SEQ ID NO: 5072; WAN024CHJ_at; Start 106; Stop 130
ttgactgatgtagtcgcgaaaggtg

SEQ ID NO: 118842 - DNA, 25 bp, Artificial
  probe
  misc_feature (1)..(25): SEQ ID NO: 5072; WAN024CHJ_at; Start 159; Stop 183
gaaagtggttctccccttcttgcag

SEQ ID NO: 118843 - DNA, 25 bp, Artificial
  probe
  misc_feature (1)..(25): SEQ ID NO: 5072; WAN024CHJ_at; Start 139; Stop 163
gccaaacttatcctcctctggaaag

SEQ ID NO: 118844 - DNA, 25 bp, Artificial
  probe
  misc_feature (1)..(25): SEQ ID NO: 5072; WAN024CHJ_at; Start 46; Stop 70
tgcattctgggacgcgatggtctca

SEQ ID NO: 118845 - DNA, 25 bp, Artificial
  probe
  misc_feature (1)..(25): SEQ ID NO: 5072; WAN024CHJ_at; Start 134; Stop 158
tggtagccaaacttatcctcctctg

SEQ ID NO: 118846 - DNA, 25 bp, Artificial
  probe
  misc_feature (1)..(25): SEQ ID NO: 5072; WAN024CHJ_at; Start 94; Stop 118
aagactgcctgcttgactgatgtag

SEQ ID NO: 118847 - DNA, 25 bp, Artificial
  probe
  misc_feature (1)..(25): SEQ ID NO: 5072; WAN024CHJ_at; Start 17; Stop 41
ccgatttcggcttgggtttggctag

SEQ ID NO: 118848 - DNA, 25 bp, Artificial
  probe
  misc_feature (1)..(25): SEQ ID NO: 5072; WAN024CHJ_at; Start 147; Stop 171
tatcctcctctggaaagtggttctc

SEQ ID NO: 118849 - DNA, 25 bp, Artificial
  probe
  misc_feature (1)..(25): SEQ ID NO: 5072; WAN024CHJ_at; Start 74; Stop 98
tgttgcgatgtactagccctaagac

SEQ ID NO: 118850 - DNA, 25 bp, Artificial
  probe
  misc_feature (1)..(25): SEQ ID NO: 5072; WAN024CHJ_at; Start 121; Stop 145
gcgaaaggtggcttggtagccaaac

SEQ ID NO: 118851 - DNA, 25 bp, Artificial
  probe
  misc_feature (1)..(25): SEQ ID NO: 5072; WAN024CHJ_at; Start 27; Stop 51
cttgggtttggctagctgctgcatt

SEQ ID NO: 118852 - DNA, 25 bp, Artificial
  probe
  misc_feature (1)..(25): SEQ ID NO: 5072; WAN024CHJ_at; Start 154; Stop 178
ctctggaaagtggttctccccttct

SEQ ID NO: 118853 - DNA, 25 bp, Artificial
  probe
  misc_feature (1)..(25): SEQ ID NO: 5072; WAN024CHJ_at; Start 180; Stop 204
gcaggctcttttgcagatactccaa

SEQ ID NO: 118854 - DNA, 25 bp, Artificial
  probe
  misc_feature (1)..(25): SEQ ID NO: 5072; WAN024CHJ_at; Start 3; Stop 27
gactgatgaggttgccgatttcggc

SEQ ID NO: 118855 - DNA, 25 bp, Artificial
  probe
  misc_feature (1)..(25): SEQ ID NO: 5072; WAN024CHJ_at; Start 56; Stop 80
gacgcgatggtctcattttgttgcg

SEQ ID NO: 118856 - DNA, 25 bp, Artificial
  probe
  misc_feature (1)..(25): SEQ ID NO: 5072; WAN024CHJ_at; Start 80; Stop 104
gatgtactagccctaagactgcctg

SEQ ID NO: 118857 - DNA, 25 bp, Artificial
  probe
  misc_feature (1)..(25): SEQ ID NO: 5072; WAN024CHJ_at; Start 149; Stop 173
tcctcctctggaaagtggttctccc

SEQ ID NO: 118858 - DNA, 25 bp, Artificial
  probe
  misc_feature (1)..(25): SEQ ID NO: 831; WAN024CHK_at; Start 1241; Stop 1265
cggagcaggctgaaaaacttaggta

SEQ ID NO: 118859 - DNA, 25 bp, Artificial
  probe
  misc_feature (1)..(25): SEQ ID NO: 831; WAN024CHK_at; Start 889; Stop 913
tcaggtaagaaggtacagggaaatc

SEQ ID NO: 118860 - DNA, 25 bp, Artificial
  probe
  misc_feature (1)..(25): SEQ ID NO: 831; WAN024CHK_at; Start 561; Stop 585
aattcgcgattaccagacagctaag

SEQ ID NO: 118861 - DNA, 25 bp, Artificial
  probe
  misc_feature (1)..(25): SEQ ID NO: 831; WAN024CHK_at; Start 745; Stop 769
taccgtgtccagtatgcaggttcag

SEQ ID NO: 118862 - DNA, 25 bp, Artificial
  probe
  misc_feature (1)..(25): SEQ ID NO: 831; WAN024CHK_at; Start 974; Stop 998
ccagtgattctagcatggttgcaga

SEQ ID NO: 118863 - DNA, 25 bp, Artificial
  probe
  misc_feature (1)..(25): SEQ ID NO: 831; WAN024CHK_at; Start 441; Stop 465
tcaagcaggcagtcttagggctagt

SEQ ID NO: 118864 - DNA, 25 bp, Artificial
  probe
  misc_feature (1)..(25): SEQ ID NO: 831; WAN024CHK_at; Start 640; Stop 664
taccagtcctacaagtctcagggcg

SEQ ID NO: 118865 - DNA, 25 bp, Artificial
  probe
  misc_feature (1)..(25): SEQ ID NO: 831; WAN024CHK_at; Start 1225; Stop 1249
gagactaatctaacttcggagcagg

SEQ ID NO: 118866 - DNA, 25 bp, Artificial
  probe
  misc_feature (1)..(25): SEQ ID NO: 831; WAN024CHK_at; Start 61; Stop 85
agtagtgtgattgtacccatggccc

SEQ ID NO: 118867 - DNA, 25 bp, Artificial
  probe
  misc_feature (1)..(25): SEQ ID NO: 831; WAN024CHK_at; Start 1185; Stop 1209
tactaagactgagaaagggaatttc

SEQ ID NO: 118868 - DNA, 25 bp, Artificial
  probe
  misc_feature (1)..(25): SEQ ID NO: 831; WAN024CHK_at; Start 425; Stop 449
ttcgcgactacatcagtcaagcagg

SEQ ID NO: 118869 - DNA, 25 bp, Artificial
  probe
  misc_feature (1)..(25): SEQ ID NO: 831; WAN024CHK_at; Start 698; Stop 722
cacaggttgaagcacagatttctca

SEQ ID NO: 118870 - DNA, 25 bp, Artificial
  probe
  misc_feature (1)..(25): SEQ ID NO: 831; WAN024CHK_at; Start 727; Stop 751
gaatctagtcttgctacttaccgtg

SEQ ID NO: 118871 - DNA, 25 bp, Artificial
  probe
  misc_feature (1)..(25): SEQ ID NO: 831; WAN024CHK_at; Start 1170; Stop 1194
tattgatgcgacagctactaagact

SEQ ID NO: 118872 - DNA, 25 bp, Artificial
  probe
  misc_feature (1)..(25): SEQ ID NO: 831; WAN024CHK_at; Start 794; Stop 818
ggttaagcagtcaattggaatccct

SEQ ID NO: 118873 - DNA, 25 bp, Artificial
  probe
  misc_feature (1)..(25): SEQ ID NO: 831; WAN024CHK_at; Start 291; Stop 315
ccaagcggagtcctatgccagtcag

SEQ ID NO: 118874 - DNA, 25 bp, Artificial
  probe
  misc_feature (1)..(25): SEQ ID NO: 831; WAN024CHK_at; Start 676; Stop 700
caaactaaggttcaggcagttgcac

SEQ ID NO: 118875 - DNA, 25 bp, Artificial
  probe
  misc_feature (1)..(25): SEQ ID NO: 831; WAN024CHK_at; Start 140; Stop 164
tgtccactagagctactgtcgaacc

SEQ ID NO: 118876 - DNA, 25 bp, Artificial
  probe
  misc_feature (1)..(25): SEQ ID NO: 831; WAN024CHK_at; Start 1208; Stop 1232
tctttaaaatcgaggcggagactaa

SEQ ID NO: 118877 - DNA, 25 bp, Artificial
  probe
  misc_feature (1)..(25): SEQ ID NO: 831; WAN024CHK_at; Start 476; Stop 500
aaaatgagaccatcgcgtcccagaa

SEQ ID NO: 118878 - DNA, 25 bp, Artificial
  probe
  misc_feature (1)..(25): SEQ ID NO: 831; WAN024CHK_at; Start 1091; Stop 1115
tcaaggtcggtgattctgttcgcta

SEQ ID NO: 118879 - DNA, 25 bp, Artificial
  probe
  misc_feature (1)..(25): SEQ ID NO: 831; WAN024CHK_at; Start 621; Stop 645
gaatctagcctactctctttaccag

SEQ ID NO: 118880 - DNA, 25 bp, Artificial
  probe
  misc_feature (1)..(25): SEQ ID NO: 831; WAN024CHK_at; Start 458; Stop 482
gggctagtacatcgcaacaaaatga

SEQ ID NO: 118881 - DNA, 25 bp, Artificial
  probe
  misc_feature (1)..(25): SEQ ID NO: 831; WAN024CHK_at; Start 342; Stop 366
gcaattggagtatctgcaaaagagc

SEQ ID NO: 118882 - DNA, 25 bp, Artificial
  probe
  misc_feature (1)..(25): SEQ ID NO: 831; WAN024CHK_at; Start 377; Stop 401
gggagaaccactttccagaggagga

SEQ ID NO: 118883 - DNA, 25 bp, Artificial
  probe
  misc_feature (1)..(25): SEQ ID NO: 831; WAN024CHK_at; Start 185; Stop 209
tccagtcaactagcaacaatcgtat

SEQ ID NO: 118884 - DNA, 25 bp, Artificial
  probe
  misc_feature (1)..(25): SEQ ID NO: 831; WAN024CHK_at; Start 397; Stop 421
gaggataagtttggctaccaagcca

SEQ ID NO: 118885 - DNA, 25 bp, Artificial
  probe
  misc_feature (1)..(25): SEQ ID NO: 831; WAN024CHK_at; Start 492; Stop 516
gtcccagaatgcagcagctagccaa

SEQ ID NO: 118886 - DNA, 25 bp, Artificial
  probe
  misc_feature (1)..(25): SEQ ID NO: 831; WAN024CHK_at; Start 954; Stop 978
gcttcatcttaatcctgagaccagt

SEQ ID NO: 118887 - DNA, 25 bp, Artificial
  probe
  misc_feature (1)..(25): SEQ ID NO: 831; WAN024CHK_at; Start 1114; Stop 1138
tatactacgactcatgatgccggga

SEQ ID NO: 118888 - DNA, 25 bp, Artificial
  probe
  misc_feature (1)..(25): SEQ ID NO: 831; WAN024CHK_at; Start 508; Stop 532
gctagccaaacccaagccgaaatcg

SEQ ID NO: 118889 - DNA, 25 bp, Artificial
  probe
  misc_feature (1)..(25): SEQ ID NO: 831; WAN024CHK_at; Start 546; Stop 570
tcaaacagaggctaaaattcgcgat

SEQ ID NO: 118890 - DNA, 25 bp, Artificial
  probe
  misc_feature (1)..(25): SEQ ID NO: 831; WAN024CHK_at; Start 775; Stop 799
cagcaagcctatgcgtcagggttaa

SEQ ID NO: 118891 - DNA, 25 bp, Artificial
  probe
  misc_feature (1)..(25): SEQ ID NO: 831; WAN024CHK_at; Start 655; Stop 679
tctcagggcgaggaaaatccccaaa

SEQ ID NO: 118892 - DNA, 25 bp, Artificial
  probe
  misc_feature (1)..(25): SEQ ID NO: 6593; WAN024CHL_at; Start 180; Stop 204
catgggcaacaaaaggaaaagtcaa

SEQ ID NO: 118893 - DNA, 25 bp, Artificial
  probe
  misc_feature (1)..(25): SEQ ID NO: 6593; WAN024CHL_at; Start 307; Stop 331
ggtcgtcttagccaattctcgcaag

SEQ ID NO: 118894 - DNA, 25 bp, Artificial
  probe
  misc_feature (1)..(25): SEQ ID NO: 6593; WAN024CHL_at; Start 46; Stop 70
tgtccattcttcctcaaaacgctca

SEQ ID NO: 118895 - DNA, 25 bp, Artificial
  probe
  misc_feature (1)..(25): SEQ ID NO: 6593; WAN024CHL_at; Start 95; Stop 119
ccgggatctggatcggcaatatgaa

SEQ ID NO: 118896 - DNA, 25 bp, Artificial
  probe
  misc_feature (1)..(25): SEQ ID NO: 6593; WAN024CHL_at; Start 297; Stop 321
tcccatccatggtcgtcttagccaa

SEQ ID NO: 118897 - DNA, 25 bp, Artificial
  probe
  misc_feature (1)..(25): SEQ ID NO: 6593; WAN024CHL_at; Start 56; Stop 80
tcctcaaaacgctcacgtggcagtt

SEQ ID NO: 118898 - DNA, 25 bp, Artificial
  probe
  misc_feature (1)..(25): SEQ ID NO: 6593; WAN024CHL_at; Start 33; Stop 57
aaagagtcactcctgtccattcttc

SEQ ID NO: 118899 - DNA, 25 bp, Artificial
  probe
  misc_feature (1)..(25): SEQ ID NO: 6593; WAN024CHL_at; Start 131; Stop 155
tcctgcccagtcaccacatagtagt

SEQ ID NO: 118900 - DNA, 25 bp, Artificial
  probe
  misc_feature (1)..(25): SEQ ID NO: 6593; WAN024CHL_at; Start 23; Stop 47
ggtgccataaaaagagtcactcctg

SEQ ID NO: 118901 - DNA, 25 bp, Artificial
  probe
  misc_feature (1)..(25): SEQ ID NO: 6593; WAN024CHL_at; Start 195; Stop 219
gaaaagtcaaatccggcaagtcaaa

SEQ ID NO: 118902 - DNA, 25 bp, Artificial
  probe
  misc_feature (1)..(25): SEQ ID NO: 6593; WAN024CHL_at; Start 331; Stop 355
gtgagccaaaaaataataactacca

SEQ ID NO: 118903 - DNA, 25 bp, Artificial
  probe
  misc_feature (1)..(25): SEQ ID NO: 6593; WAN024CHL_at; Start 90; Stop 114
tcaccccgggatctggatcggcaat

SEQ ID NO: 118904 - DNA, 25 bp, Artificial
  probe
  misc_feature (1)..(25): SEQ ID NO: 6593; WAN024CHL_at; Start 225; Stop 249
tcatatccgccttaatggctcgcgt

SEQ ID NO: 118905 - DNA, 25 bp, Artificial
  probe
  misc_feature (1)..(25): SEQ ID NO: 6593; WAN024CHL_at; Start 317; Stop 341
gccaattctcgcaagtgagccaaaa

SEQ ID NO: 118906 - DNA, 25 bp, Artificial
  probe
  misc_feature (1)..(25): SEQ ID NO: 6593; WAN024CHL_at; Start 170; Stop 194
tccttaagcacatgggcaacaaaag

SEQ ID NO: 118907 - DNA, 25 bp, Artificial
  probe
  misc_feature (1)..(25): SEQ ID NO: 6593; WAN024CHL_at; Start 347; Stop 371
taactaccatagtagccaaaaacca

SEQ ID NO: 118908 - DNA, 25 bp, Artificial
  probe
  misc_feature (1)..(25): SEQ ID NO: 6593; WAN024CHL_at; Start 288; Stop 312
aagccgtcgtcccatccatggtcgt

SEQ ID NO: 118909 - DNA, 25 bp, Artificial
  probe
  misc_feature (1)..(25): SEQ ID NO: 6593; WAN024CHL_at; Start 238; Stop 262
aatggctcgcgtctcaaaaccaatc

SEQ ID NO: 118910 - DNA, 25 bp, Artificial
  probe
  misc_feature (1)..(25): SEQ ID NO: 6593; WAN024CHL_at; Start 209; Stop 233
ggcaagtcaaaaagcgtcatatccg

SEQ ID NO: 118911 - DNA, 25 bp, Artificial
  probe
  misc_feature (1)..(25): SEQ ID NO: 6593; WAN024CHL_at; Start 145; Stop 169
cacatagtagtggagcaatttccct

SEQ ID NO: 118912 - DNA, 25 bp, Artificial
  probe
  misc_feature (1)..(25): SEQ ID NO: 6593; WAN024CHL_at; Start 202; Stop 226
caaatccggcaagtcaaaaagcgtc

SEQ ID NO: 118913 - DNA, 25 bp, Artificial
  probe
  misc_feature (1)..(25): SEQ ID NO: 6593; WAN024CHL_at; Start 73; Stop 97
tggcagtttagtcaacttcaccccg

SEQ ID NO: 118914 - DNA, 25 bp, Artificial
  probe
  misc_feature (1)..(25): SEQ ID NO: 6593; WAN024CHL_at; Start 259; Stop 283
aatctcctctgccaccttaaccaag

SEQ ID NO: 118915 - DNA, 25 bp, Artificial
  probe
  misc_feature (1)..(25): SEQ ID NO: 6593; WAN024CHL_at; Start 64; Stop 88
acgctcacgtggcagtttagtcaac

SEQ ID NO: 118916 - DNA, 25 bp, Artificial
  probe
  misc_feature (1)..(25): SEQ ID NO: 6593; WAN024CHL_at; Start 116; Stop 140
tgaatgctatccttatcctgcccag

SEQ ID NO: 118917 - DNA, 25 bp, Artificial
  probe
  misc_feature (1)..(25): SEQ ID NO: 6593; WAN024CHL_at; Start 81; Stop 105
tagtcaacttcaccccgggatctgg

SEQ ID NO: 118918 - DNA, 25 bp, Artificial
  probe
  misc_feature (1)..(25): SEQ ID NO: 6593; WAN024CHL_at; Start 5; Stop 29
ggcttatagtctggactaggtgcca

SEQ ID NO: 118919 - DNA, 25 bp, Artificial
  probe
  misc_feature (1)..(25): SEQ ID NO: 6593; WAN024CHL_at; Start 14; Stop 38
tctggactaggtgccataaaaagag

SEQ ID NO: 118920 - DNA, 25 bp, Artificial
  probe
  misc_feature (1)..(25): SEQ ID NO: 6593; WAN024CHL_at; Start 233; Stop 257
gccttaatggctcgcgtctcaaaac

SEQ ID NO: 118921 - DNA, 25 bp, Artificial
  probe
  misc_feature (1)..(25): SEQ ID NO: 6593; WAN024CHL_at; Start 219; Stop 243
aaagcgtcatatccgccttaatggc

SEQ ID NO: 118922 - DNA, 25 bp, Artificial
  probe
  misc_feature (1)..(25): SEQ ID NO: 6593; WAN024CHL_at; Start 323; Stop 347
tctcgcaagtgagccaaaaaataat

SEQ ID NO: 118923 - DNA, 25 bp, Artificial
  probe
  misc_feature (1)..(25): SEQ ID NO: 6593; WAN024CHL_at; Start 354; Stop 378
catagtagccaaaaaccatggctaa

SEQ ID NO: 118924 - DNA, 25 bp, Artificial
  probe
  misc_feature (1)..(25): SEQ ID NO: 6593; WAN024CHL_at; Start 157; Stop 181
gagcaatttcccttccttaagcaca

SEQ ID NO: 118925 - DNA, 25 bp, Artificial
  probe
  misc_feature (1)..(25): SEQ ID NO: 6593; WAN024CHL_at; Start 101; Stop 125
tctggatcggcaatatgaatgctat

SEQ ID NO: 118926 - DNA, 25 bp, Artificial
  probe
  misc_feature (1)..(25): SEQ ID NO: 2573; WAN024CHM_at; Start 43; Stop 67
tccttcttcgacaatcttgccctga

SEQ ID NO: 118927 - DNA, 25 bp, Artificial
  probe
  misc_feature (1)..(25): SEQ ID NO: 2573; WAN024CHM_at; Start 180; Stop 204
tatccaaactgctagtcgcctcatc

SEQ ID NO: 118928 - DNA, 25 bp, Artificial
  probe
  misc_feature (1)..(25): SEQ ID NO: 2573; WAN024CHM_at; Start 211; Stop 235
caagaccggcgcatctgtcaagaga

SEQ ID NO: 118929 - DNA, 25 bp, Artificial
  probe
  misc_feature (1)..(25): SEQ ID NO: 2573; WAN024CHM_at; Start 203; Stop 227
tccaaaatcaagaccggcgcatctg

SEQ ID NO: 118930 - DNA, 25 bp, Artificial
  probe
  misc_feature (1)..(25): SEQ ID NO: 2573; WAN024CHM_at; Start 86; Stop 110
tctgtccgctcagcaatagtcaagc

SEQ ID NO: 118931 - DNA, 25 bp, Artificial
  probe
  misc_feature (1)..(25): SEQ ID NO: 2573; WAN024CHM_at; Start 22; Stop 46
tgcaagcaaatcagcatgctttcct

SEQ ID NO: 118932 - DNA, 25 bp, Artificial
  probe
  misc_feature (1)..(25): SEQ ID NO: 2573; WAN024CHM_at; Start 218; Stop 242
ggcgcatctgtcaagagagcacgcg

SEQ ID NO: 118933 - DNA, 25 bp, Artificial
  probe
  misc_feature (1)..(25): SEQ ID NO: 2573; WAN024CHM_at; Start 157; Stop 181
gacaatccgcttctctgtcaaaata

SEQ ID NO: 118934 - DNA, 25 bp, Artificial
  probe
  misc_feature (1)..(25): SEQ ID NO: 2573; WAN024CHM_at; Start 234; Stop 258
gagcacgcgccaaagcgattctctg

SEQ ID NO: 118935 - DNA, 25 bp, Artificial
  probe
  misc_feature (1)..(25): SEQ ID NO: 2573; WAN024CHM_at; Start 150; Stop 174
gattatcgacaatccgcttctctgt

SEQ ID NO: 118936 - DNA, 25 bp, Artificial
  probe
  misc_feature (1)..(25): SEQ ID NO: 2573; WAN024CHM_at; Start 170; Stop 194
tctgtcaaaatatccaaactgctag

SEQ ID NO: 118937 - DNA, 25 bp, Artificial
  probe
  misc_feature (1)..(25): SEQ ID NO: 2573; WAN024CHM_at; Start 132; Stop 156
tcttgtccaaagcaatgagattatc

SEQ ID NO: 118938 - DNA, 25 bp, Artificial
  probe
  misc_feature (1)..(25): SEQ ID NO: 2573; WAN024CHM_at; Start 95; Stop 119
tcagcaatagtcaagcggtgagcaa

SEQ ID NO: 118939 - DNA, 25 bp, Artificial
  probe
  misc_feature (1)..(25): SEQ ID NO: 2573; WAN024CHM_at; Start 240; Stop 264
gcgccaaagcgattctctgacgttg

SEQ ID NO: 118940 - DNA, 25 bp, Artificial
  probe
  misc_feature (1)..(25): SEQ ID NO: 2573; WAN024CHM_at; Start 127; Stop 151
caaggtcttgtccaaagcaatgaga

SEQ ID NO: 118941 - DNA, 25 bp, Artificial
  probe
  misc_feature (1)..(25): SEQ ID NO: 2573; WAN024CHM_at; Start 137; Stop 161
tccaaagcaatgagattatcgacaa

SEQ ID NO: 118942 - DNA, 25 bp, Artificial
  probe
  misc_feature (1)..(25): SEQ ID NO: 2573; WAN024CHM_at; Start 227; Stop 251
gtcaagagagcacgcgccaaagcga

SEQ ID NO: 118943 - DNA, 25 bp, Artificial
  probe
  misc_feature (1)..(25): SEQ ID NO: 2573; WAN024CHM_at; Start 223; Stop 247
atctgtcaagagagcacgcgccaaa

SEQ ID NO: 118944 - DNA, 25 bp, Artificial
  probe
  misc_feature (1)..(25): SEQ ID NO: 2573; WAN024CHM_at; Start 249; Stop 273
cgattctctgacgttgaccacctga

SEQ ID NO: 118945 - DNA, 25 bp, Artificial
  probe
  misc_feature (1)..(25): SEQ ID NO: 2573; WAN024CHM_at; Start 53; Stop 77
acaatcttgccctgatccaagacaa

SEQ ID NO: 118946 - DNA, 25 bp, Artificial
  probe
  misc_feature (1)..(25): SEQ ID NO: 2573; WAN024CHM_at; Start 83; Stop 107
ttctctgtccgctcagcaatagtca

SEQ ID NO: 118947 - DNA, 25 bp, Artificial
  probe
  misc_feature (1)..(25): SEQ ID NO: 2573; WAN024CHM_at; Start 214; Stop 238
gaccggcgcatctgtcaagagagca

SEQ ID NO: 118948 - DNA, 25 bp, Artificial
  probe
  misc_feature (1)..(25): SEQ ID NO: 2573; WAN024CHM_at; Start 106; Stop 130
caagcggtgagcaatgaaaatcaag

SEQ ID NO: 118949 - DNA, 25 bp, Artificial
  probe
  misc_feature (1)..(25): SEQ ID NO: 2573; WAN024CHM_at; Start 32; Stop 56
tcagcatgctttccttcttcgacaa

SEQ ID NO: 118950 - DNA, 25 bp, Artificial
  probe
  misc_feature (1)..(25): SEQ ID NO: 2573; WAN024CHM_at; Start 143; Stop 167
gcaatgagattatcgacaatccgct

SEQ ID NO: 118951 - DNA, 25 bp, Artificial
  probe
  misc_feature (1)..(25): SEQ ID NO: 2573; WAN024CHM_at; Start 110; Stop 134
cggtgagcaatgaaaatcaaggtct

SEQ ID NO: 118952 - DNA, 25 bp, Artificial
  probe
  misc_feature (1)..(25): SEQ ID NO: 2573; WAN024CHM_at; Start 49; Stop 73
ttcgacaatcttgccctgatccaag

SEQ ID NO: 118953 - DNA, 25 bp, Artificial
  probe
  misc_feature (1)..(25): SEQ ID NO: 2573; WAN024CHM_at; Start 245; Stop 269
aaagcgattctctgacgttgaccac

SEQ ID NO: 118954 - DNA, 25 bp, Artificial
  probe
  misc_feature (1)..(25): SEQ ID NO: 2573; WAN024CHM_at; Start 17; Stop 41
ccctgtgcaagcaaatcagcatgct

SEQ ID NO: 118955 - DNA, 25 bp, Artificial
  probe
  misc_feature (1)..(25): SEQ ID NO: 2573; WAN024CHM_at; Start 200; Stop 224
tcatccaaaatcaagaccggcgcat

SEQ ID NO: 118956 - DNA, 25 bp, Artificial
  probe
  misc_feature (1)..(25): SEQ ID NO: 2573; WAN024CHM_at; Start 163; Stop 187
ccgcttctctgtcaaaatatccaaa

SEQ ID NO: 118957 - DNA, 25 bp, Artificial
  probe
  misc_feature (1)..(25): SEQ ID NO: 2573; WAN024CHM_at; Start 174; Stop 198
tcaaaatatccaaactgctagtcgc

SEQ ID NO: 118958 - DNA, 25 bp, Artificial
  probe
  misc_feature (1)..(25): SEQ ID NO: 2573; WAN024CHM_at; Start 124; Stop 148
aatcaaggtcttgtccaaagcaatg

SEQ ID NO: 118959 - DNA, 25 bp, Artificial
  probe
  misc_feature (1)..(25): SEQ ID NO: 2573; WAN024CHM_at; Start 102; Stop 126
tagtcaagcggtgagcaatgaaaat

SEQ ID NO: 118960 - DNA, 25 bp, Artificial
  probe
  misc_feature (1)..(25): SEQ ID NO: 2568; WAN024CHN_at; Start 37; Stop 61
tgctcgactataggtaaaggatttc

SEQ ID NO: 118961 - DNA, 25 bp, Artificial
  probe
  misc_feature (1)..(25): SEQ ID NO: 2568; WAN024CHN_at; Start 234; Stop 258
taatcactgtgtagataggaagcgc

SEQ ID NO: 118962 - DNA, 25 bp, Artificial
  probe
  misc_feature (1)..(25): SEQ ID NO: 2568; WAN024CHN_at; Start 240; Stop 264
ctgtgtagataggaagcgccaataa

SEQ ID NO: 118963 - DNA, 25 bp, Artificial
  probe
  misc_feature (1)..(25): SEQ ID NO: 2568; WAN024CHN_at; Start 49; Stop 73
ggtaaaggatttcttcagataatcc

SEQ ID NO: 118964 - DNA, 25 bp, Artificial
  probe
  misc_feature (1)..(25): SEQ ID NO: 2568; WAN024CHN_at; Start 145; Stop 169
gatgtcctcaatgatagaagaagac

SEQ ID NO: 118965 - DNA, 25 bp, Artificial
  probe
  misc_feature (1)..(25): SEQ ID NO: 2568; WAN024CHN_at; Start 19; Stop 43
agccttttgctgactctctgctcga

SEQ ID NO: 118966 - DNA, 25 bp, Artificial
  probe
  misc_feature (1)..(25): SEQ ID NO: 2568; WAN024CHN_at; Start 175; Stop 199
cgcattggcttccatggtatcccga

SEQ ID NO: 118967 - DNA, 25 bp, Artificial
  probe
  misc_feature (1)..(25): SEQ ID NO: 2568; WAN024CHN_at; Start 127; Stop 151
gatagtctcaataccgttgatgtcc

SEQ ID NO: 118968 - DNA, 25 bp, Artificial
  probe
  misc_feature (1)..(25): SEQ ID NO: 2568; WAN024CHN_at; Start 1; Stop 25
atgggcaacctttttcagagccttt

SEQ ID NO: 118969 - DNA, 25 bp, Artificial
  probe
  misc_feature (1)..(25): SEQ ID NO: 2568; WAN024CHN_at; Start 26; Stop 50
tgctgactctctgctcgactatagg

SEQ ID NO: 118970 - DNA, 25 bp, Artificial
  probe
  misc_feature (1)..(25): SEQ ID NO: 2568; WAN024CHN_at; Start 219; Stop 243
tcataaaggcaaagataatcactgt

SEQ ID NO: 118971 - DNA, 25 bp, Artificial
  probe
  misc_feature (1)..(25): SEQ ID NO: 2568; WAN024CHN_at; Start 33; Stop 57
tctctgctcgactataggtaaagga

SEQ ID NO: 118972 - DNA, 25 bp, Artificial
  probe
  misc_feature (1)..(25): SEQ ID NO: 2568; WAN024CHN_at; Start 98; Stop 122
taacgctgactttcactggtcaagg

SEQ ID NO: 118973 - DNA, 25 bp, Artificial
  probe
  misc_feature (1)..(25): SEQ ID NO: 2568; WAN024CHN_at; Start 122; Stop 146
gacttgatagtctcaataccgttga

SEQ ID NO: 118974 - DNA, 25 bp, Artificial
  probe
  misc_feature (1)..(25): SEQ ID NO: 2568; WAN024CHN_at; Start 105; Stop 129
gactttcactggtcaaggacttgat

SEQ ID NO: 118975 - DNA, 25 bp, Artificial
  probe
  misc_feature (1)..(25): SEQ ID NO: 2568; WAN024CHN_at; Start 134; Stop 158
tcaataccgttgatgtcctcaatga

SEQ ID NO: 118976 - DNA, 25 bp, Artificial
  probe
  misc_feature (1)..(25): SEQ ID NO: 2568; WAN024CHN_at; Start 61; Stop 85
cttcagataatccacaaattccttg

SEQ ID NO: 118977 - DNA, 25 bp, Artificial
  probe
  misc_feature (1)..(25): SEQ ID NO: 2568; WAN024CHN_at; Start 190; Stop 214
ggtatcccgattcatcttttcaaac

SEQ ID NO: 118978 - DNA, 25 bp, Artificial
  probe
  misc_feature (1)..(25): SEQ ID NO: 2568; WAN024CHN_at; Start 30; Stop 54
gactctctgctcgactataggtaaa

SEQ ID NO: 118979 - DNA, 25 bp, Artificial
  probe
  misc_feature (1)..(25): SEQ ID NO: 2568; WAN024CHN_at; Start 214; Stop 238
cggcttcataaaggcaaagataatc

SEQ ID NO: 118980 - DNA, 25 bp, Artificial
  probe
  misc_feature (1)..(25): SEQ ID NO: 2568; WAN024CHN_at; Start 6; Stop 30
caacctttttcagagccttttgctg

SEQ ID NO: 118981 - DNA, 25 bp, Artificial
  probe
  misc_feature (1)..(25): SEQ ID NO: 2568; WAN024CHN_at; Start 153; Stop 177
caatgatagaagaagacagaaccgc

SEQ ID NO: 118982 - DNA, 25 bp, Artificial
  probe
  misc_feature (1)..(25): SEQ ID NO: 2568; WAN024CHN_at; Start 92; Stop 116
ttttggtaacgctgactttcactgg

SEQ ID NO: 118983 - DNA, 25 bp, Artificial
  probe
  misc_feature (1)..(25): SEQ ID NO: 2568; WAN024CHN_at; Start 208; Stop 232
ttcaaacggcttcataaaggcaaag

SEQ ID NO: 118984 - DNA, 25 bp, Artificial
  probe
  misc_feature (1)..(25): SEQ ID NO: 2568; WAN024CHN_at; Start 159; Stop 183
tagaagaagacagaaccgcattggc

SEQ ID NO: 118985 - DNA, 25 bp, Artificial
  probe
  misc_feature (1)..(25): SEQ ID NO: 2568; WAN024CHN_at; Start 140; Stop 164
ccgttgatgtcctcaatgatagaag

SEQ ID NO: 118986 - DNA, 25 bp, Artificial
  probe
  misc_feature (1)..(25): SEQ ID NO: 2568; WAN024CHN_at; Start 197; Stop 221
cgattcatcttttcaaacggcttca

SEQ ID NO: 118987 - DNA, 25 bp, Artificial
  probe
  misc_feature (1)..(25): SEQ ID NO: 2568; WAN024CHN_at; Start 66; Stop 90
gataatccacaaattccttgtcaat

SEQ ID NO: 118988 - DNA, 25 bp, Artificial
  probe
  misc_feature (1)..(25): SEQ ID NO: 2568; WAN024CHN_at; Start 111; Stop 135
cactggtcaaggacttgatagtctc

SEQ ID NO: 118989 - DNA, 25 bp, Artificial
  probe
  misc_feature (1)..(25): SEQ ID NO: 2568; WAN024CHN_at; Start 41; Stop 65
cgactataggtaaaggatttcttca

SEQ ID NO: 118990 - DNA, 25 bp, Artificial
  probe
  misc_feature (1)..(25): SEQ ID NO: 2568; WAN024CHN_at; Start 237; Stop 261
tcactgtgtagataggaagcgccaa

SEQ ID NO: 118991 - DNA, 25 bp, Artificial
  probe
  misc_feature (1)..(25): SEQ ID NO: 2568; WAN024CHN_at; Start 81; Stop 105
ccttgtcaattttttggtaacgctg

SEQ ID NO: 118992 - DNA, 25 bp, Artificial
  probe
  misc_feature (1)..(25): SEQ ID NO: 2568; WAN024CHN_at; Start 180; Stop 204
tggcttccatggtatcccgattcat

SEQ ID NO: 118993 - DNA, 25 bp, Artificial
  probe
  misc_feature (1)..(25): SEQ ID NO: 2568; WAN024CHN_at; Start 167; Stop 191
gacagaaccgcattggcttccatgg

SEQ ID NO: 118994 - DNA, 25 bp, Artificial
  probe
  misc_feature (1)..(25): SEQ ID NO: 5305; WAN024CHO_at; Start 232; Stop 256
tttcatgaccaagatcaagtctgca

SEQ ID NO: 118995 - DNA, 25 bp, Artificial
  probe
  misc_feature (1)..(25): SEQ ID NO: 5305; WAN024CHO_at; Start 293; Stop 317
gatgtgcgtccttccatcaaacggt

SEQ ID NO: 118996 - DNA, 25 bp, Artificial
  probe
  misc_feature (1)..(25): SEQ ID NO: 5305; WAN024CHO_at; Start 220; Stop 244
gatatttccatctttcatgaccaag

SEQ ID NO: 118997 - DNA, 25 bp, Artificial
  probe
  misc_feature (1)..(25): SEQ ID NO: 5305; WAN024CHO_at; Start 354; Stop 378
caacagaagaagtcgcctcatccaa

SEQ ID NO: 118998 - DNA, 25 bp, Artificial
  probe
  misc_feature (1)..(25): SEQ ID NO: 5305; WAN024CHO_at; Start 59; Stop 83
acttctctctttctatgtgtactag

SEQ ID NO: 118999 - DNA, 25 bp, Artificial
  probe
  misc_feature (1)..(25): SEQ ID NO: 5305; WAN024CHO_at; Start 241; Stop 265
caagatcaagtctgcatttcggatg

SEQ ID NO: 119000 - DNA, 25 bp, Artificial
  probe
  misc_feature (1)..(25): SEQ ID NO: 5305; WAN024CHO_at; Start 266; Stop 290
gttgacaagcggtgggcaatgacaa

SEQ ID NO: 119001 - DNA, 25 bp, Artificial
  probe
  misc_feature (1)..(25): SEQ ID NO: 5305; WAN024CHO_at; Start 251; Stop 275
tctgcatttcggatggttgacaagc

SEQ ID NO: 119002 - DNA, 25 bp, Artificial
  probe
  misc_feature (1)..(25): SEQ ID NO: 5305; WAN024CHO_at; Start 173; Stop 197
tagaagccaccttgcgccatcagtt

SEQ ID NO: 119003 - DNA, 25 bp, Artificial
  probe
  misc_feature (1)..(25): SEQ ID NO: 5305; WAN024CHO_at; Start 255; Stop 279
catttcggatggttgacaagcggtg

SEQ ID NO: 119004 - DNA, 25 bp, Artificial
  probe
  misc_feature (1)..(25): SEQ ID NO: 5305; WAN024CHO_at; Start 318; Stop 342
ccatggctttttggatcaattcctc

SEQ ID NO: 119005 - DNA, 25 bp, Artificial
  probe
  misc_feature (1)..(25): SEQ ID NO: 5305; WAN024CHO_at; Start 105; Stop 129
cgtcaagccttcttttgatttattc

SEQ ID NO: 119006 - DNA, 25 bp, Artificial
  probe
  misc_feature (1)..(25): SEQ ID NO: 5305; WAN024CHO_at; Start 138; Stop 162
catcttctgtaaattgactattgta

SEQ ID NO: 119007 - DNA, 25 bp, Artificial
  probe
  misc_feature (1)..(25): SEQ ID NO: 5305; WAN024CHO_at; Start 125; Stop 149
tattcttctgcttcatcttctgtaa

SEQ ID NO: 119008 - DNA, 25 bp, Artificial
  probe
  misc_feature (1)..(25): SEQ ID NO: 5305; WAN024CHO_at; Start 413; Stop 437
gcaatagtcaatagttgtttttgtc

SEQ ID NO: 119009 - DNA, 25 bp, Artificial
  probe
  misc_feature (1)..(25): SEQ ID NO: 5305; WAN024CHO_at; Start 1; Stop 25
ttgcaatcaaggctaagtagacagc

SEQ ID NO: 119010 - DNA, 25 bp, Artificial
  probe
  misc_feature (1)..(25): SEQ ID NO: 5305; WAN024CHO_at; Start 271; Stop 295
caagcggtgggcaatgacaaaggat

SEQ ID NO: 119011 - DNA, 25 bp, Artificial
  probe
  misc_feature (1)..(25): SEQ ID NO: 5305; WAN024CHO_at; Start 44; Stop 68
taatttctgactcatacttctctct

SEQ ID NO: 119012 - DNA, 25 bp, Artificial
  probe
  misc_feature (1)..(25): SEQ ID NO: 5305; WAN024CHO_at; Start 194; Stop 218
agttcctcatagttgccttgctcga

SEQ ID NO: 119013 - DNA, 25 bp, Artificial
  probe
  misc_feature (1)..(25): SEQ ID NO: 5305; WAN024CHO_at; Start 349; Stop 373
tgtgtcaacagaagaagtcgcctca

SEQ ID NO: 119014 - DNA, 25 bp, Artificial
  probe
  misc_feature (1)..(25): SEQ ID NO: 5305; WAN024CHO_at; Start 20; Stop 44
gacagcagcaaatttcatattgtat

SEQ ID NO: 119015 - DNA, 25 bp, Artificial
  probe
  misc_feature (1)..(25): SEQ ID NO: 5305; WAN024CHO_at; Start 185; Stop 209
tgcgccatcagttcctcatagttgc

SEQ ID NO: 119016 - DNA, 25 bp, Artificial
  probe
  misc_feature (1)..(25): SEQ ID NO: 5305; WAN024CHO_at; Start 280; Stop 304
ggcaatgacaaaggatgtgcgtcct

SEQ ID NO: 119017 - DNA, 25 bp, Artificial
  probe
  misc_feature (1)..(25): SEQ ID NO: 5305; WAN024CHO_at; Start 156; Stop 180
tattgtacaagtcagcgtagaagcc

SEQ ID NO: 119018 - DNA, 25 bp, Artificial
  probe
  misc_feature (1)..(25): SEQ ID NO: 5305; WAN024CHO_at; Start 439; Stop 463
tacagacaaggtcacggtgtcatcc

SEQ ID NO: 119019 - DNA, 25 bp, Artificial
  probe
  misc_feature (1)..(25): SEQ ID NO: 5305; WAN024CHO_at; Start 164; Stop 188
aagtcagcgtagaagccaccttgcg

SEQ ID NO: 119020 - DNA, 25 bp, Artificial
  probe
  misc_feature (1)..(25): SEQ ID NO: 5305; WAN024CHO_at; Start 301; Stop 325
tccttccatcaaacggtccatggct

SEQ ID NO: 119021 - DNA, 25 bp, Artificial
  probe
  misc_feature (1)..(25): SEQ ID NO: 5305; WAN024CHO_at; Start 345; Stop 369
tccgtgtgtcaacagaagaagtcgc

SEQ ID NO: 119022 - DNA, 25 bp, Artificial
  probe
  misc_feature (1)..(25): SEQ ID NO: 5305; WAN024CHO_at; Start 310; Stop 334
caaacggtccatggctttttggatc

SEQ ID NO: 119023 - DNA, 25 bp, Artificial
  probe
  misc_feature (1)..(25): SEQ ID NO: 5305; WAN024CHO_at; Start 205; Stop 229
gttgccttgctcgatgatatttcca

SEQ ID NO: 119024 - DNA, 25 bp, Artificial
  probe
  misc_feature (1)..(25): SEQ ID NO: 5305; WAN024CHO_at; Start 7; Stop 31
tcaaggctaagtagacagcagcaaa

SEQ ID NO: 119025 - DNA, 25 bp, Artificial
  probe
  misc_feature (1)..(25): SEQ ID NO: 5305; WAN024CHO_at; Start 445; Stop 469
caaggtcacggtgtcatccaagatg

SEQ ID NO: 119026 - DNA, 25 bp, Artificial
  probe
  misc_feature (1)..(25): SEQ ID NO: 5305; WAN024CHO_at; Start 331; Stop 355
gatcaattcctctgtccgtgtgtca

SEQ ID NO: 119027 - DNA, 25 bp, Artificial
  probe
  misc_feature (1)..(25): SEQ ID NO: 5305; WAN024CHO_at; Start 12; Stop 36
gctaagtagacagcagcaaatttca

SEQ ID NO: 119028 - DNA, 25 bp, Artificial
  probe
  misc_feature (1)..(25): SEQ ID NO: 1626; WAN024CHP_at; Start 250; Stop 274
gaaattgatgatcctctgatgcagg

SEQ ID NO: 119029 - DNA, 25 bp, Artificial
  probe
  misc_feature (1)..(25): SEQ ID NO: 1626; WAN024CHP_at; Start 97; Stop 121
caagtgaccagttggttgacagggt

SEQ ID NO: 119030 - DNA, 25 bp, Artificial
  probe
  misc_feature (1)..(25): SEQ ID NO: 1626; WAN024CHP_at; Start 151; Stop 175
gatagggatgttacttacggagatt

SEQ ID NO: 119031 - DNA, 25 bp, Artificial
  probe
  misc_feature (1)..(25): SEQ ID NO: 1626; WAN024CHP_at; Start 266; Stop 290
tgatgcaggaaatacgtcgcttgga

SEQ ID NO: 119032 - DNA, 25 bp, Artificial
  probe
  misc_feature (1)..(25): SEQ ID NO: 1626; WAN024CHP_at; Start 261; Stop 285
tcctctgatgcaggaaatacgtcgc

SEQ ID NO: 119033 - DNA, 25 bp, Artificial
  probe
  misc_feature (1)..(25): SEQ ID NO: 1626; WAN024CHP_at; Start 225; Stop 249
gaagatttgcggtgtccgtattgag

SEQ ID NO: 119034 - DNA, 25 bp, Artificial
  probe
  misc_feature (1)..(25): SEQ ID NO: 1626; WAN024CHP_at; Start 182; Stop 206
gacaagcaccatattatgtccctga

SEQ ID NO: 119035 - DNA, 25 bp, Artificial
  probe
  misc_feature (1)..(25): SEQ ID NO: 1626; WAN024CHP_at; Start 3; Stop 27
gagtcagaaattatacaatatgaaa

SEQ ID NO: 119036 - DNA, 25 bp, Artificial
  probe
  misc_feature (1)..(25): SEQ ID NO: 1626; WAN024CHP_at; Start 316; Stop 340
gggaaaacatctcaacaagttctag

SEQ ID NO: 119037 - DNA, 25 bp, Artificial
  probe
  misc_feature (1)..(25): SEQ ID NO: 1626; WAN024CHP_at; Start 52; Stop 76
attgcaaaagttgagcgaaagggtg

SEQ ID NO: 119038 - DNA, 25 bp, Artificial
  probe
  misc_feature (1)..(25): SEQ ID NO: 1626; WAN024CHP_at; Start 328; Stop 352
caacaagttctagaaaagtatgaga

SEQ ID NO: 119039 - DNA, 25 bp, Artificial
  probe
  misc_feature (1)..(25): SEQ ID NO: 1626; WAN024CHP_at; Start 239; Stop 263
tccgtattgaggaaattgatgatcc

SEQ ID NO: 119040 - DNA, 25 bp, Artificial
  probe
  misc_feature (1)..(25): SEQ ID NO: 1626; WAN024CHP_at; Start 198; Stop 222
tgtccctgaacgaattgcaattaca

SEQ ID NO: 119041 - DNA, 25 bp, Artificial
  probe
  misc_feature (1)..(25): SEQ ID NO: 1626; WAN024CHP_at; Start 18; Stop 42
caatatgaaatttgctgctgtctac

SEQ ID NO: 119042 - DNA, 25 bp, Artificial
  probe
  misc_feature (1)..(25): SEQ ID NO: 1626; WAN024CHP_at; Start 34; Stop 58
gctgtctacttagccttgattgcaa

SEQ ID NO: 119043 - DNA, 25 bp, Artificial
  probe
  misc_feature (1)..(25): SEQ ID NO: 1626; WAN024CHP_at; Start 47; Stop 71
ccttgattgcaaaagttgagcgaaa

SEQ ID NO: 119044 - DNA, 25 bp, Artificial
  probe
  misc_feature (1)..(25): SEQ ID NO: 1626; WAN024CHP_at; Start 292; Stop 316
aagctagtggattggcttgccaagg

SEQ ID NO: 119045 - DNA, 25 bp, Artificial
  probe
  misc_feature (1)..(25): SEQ ID NO: 1626; WAN024CHP_at; Start 193; Stop 217
tattatgtccctgaacgaattgcaa

SEQ ID NO: 119046 - DNA, 25 bp, Artificial
  probe
  misc_feature (1)..(25): SEQ ID NO: 1626; WAN024CHP_at; Start 78; Stop 102
aaaggcagagtcagttcaccaagtg

SEQ ID NO: 119047 - DNA, 25 bp, Artificial
  probe
  misc_feature (1)..(25): SEQ ID NO: 1626; WAN024CHP_at; Start 215; Stop 239
caattacagggaagatttgcggtgt

SEQ ID NO: 119048 - DNA, 25 bp, Artificial
  probe
  misc_feature (1)..(25): SEQ ID NO: 1626; WAN024CHP_at; Start 137; Stop 161
ttcttgcttgtctggatagggatgt

SEQ ID NO: 119049 - DNA, 25 bp, Artificial
  probe
  misc_feature (1)..(25): SEQ ID NO: 1626; WAN024CHP_at; Start 284; Stop 308
gcttggacaagctagtggattggct

SEQ ID NO: 119050 - DNA, 25 bp, Artificial
  probe
  misc_feature (1)..(25): SEQ ID NO: 1626; WAN024CHP_at; Start 24; Stop 48
gaaatttgctgctgtctacttagcc

SEQ ID NO: 119051 - DNA, 25 bp, Artificial
  probe
  misc_feature (1)..(25): SEQ ID NO: 1626; WAN024CHP_at; Start 102; Stop 126
gaccagttggttgacagggtatgaa

SEQ ID NO: 119052 - DNA, 25 bp, Artificial
  probe
  misc_feature (1)..(25): SEQ ID NO: 1626; WAN024CHP_at; Start 82; Stop 106
gcagagtcagttcaccaagtgacca

SEQ ID NO: 119053 - DNA, 25 bp, Artificial
  probe
  misc_feature (1)..(25): SEQ ID NO: 1626; WAN024CHP_at; Start 205; Stop 229
gaacgaattgcaattacagggaaga

SEQ ID NO: 119054 - DNA, 25 bp, Artificial
  probe
  misc_feature (1)..(25): SEQ ID NO: 1626; WAN024CHP_at; Start 219; Stop 243
tacagggaagatttgcggtgtccgt

SEQ ID NO: 119055 - DNA, 25 bp, Artificial
  probe
  misc_feature (1)..(25): SEQ ID NO: 1626; WAN024CHP_at; Start 271; Stop 295
caggaaatacgtcgcttggacaagc

SEQ ID NO: 119056 - DNA, 25 bp, Artificial
  probe
  misc_feature (1)..(25): SEQ ID NO: 1626; WAN024CHP_at; Start 278; Stop 302
tacgtcgcttggacaagctagtgga

SEQ ID NO: 119057 - DNA, 25 bp, Artificial
  probe
  misc_feature (1)..(25): SEQ ID NO: 1626; WAN024CHP_at; Start 88; Stop 112
tcagttcaccaagtgaccagttggt

SEQ ID NO: 119058 - DNA, 25 bp, Artificial
  probe
  misc_feature (1)..(25): SEQ ID NO: 1626; WAN024CHP_at; Start 44; Stop 68
tagccttgattgcaaaagttgagcg

SEQ ID NO: 119059 - DNA, 25 bp, Artificial
  probe
  misc_feature (1)..(25): SEQ ID NO: 1626; WAN024CHP_at; Start 74; Stop 98
gtggaaaggcagagtcagttcacca

SEQ ID NO: 119060 - DNA, 25 bp, Artificial
  probe
  misc_feature (1)..(25): SEQ ID NO: 1626; WAN024CHP_at; Start 145; Stop 169
tgtctggatagggatgttacttacg

SEQ ID NO: 119061 - DNA, 25 bp, Artificial
  probe
  misc_feature (1)..(25): SEQ ID NO: 1626; WAN024CHP_at; Start 187; Stop 211
gcaccatattatgtccctgaacgaa

SEQ ID NO: 119062 - DNA, 25 bp, Artificial
  probe
  misc_feature (1)..(25): SEQ ID NO: 1939; WAN024CHQ_at; Start 422; Stop 446
tgatgaagaaattggtggtgacagc

SEQ ID NO: 119063 - DNA, 25 bp, Artificial
  probe
  misc_feature (1)..(25): SEQ ID NO: 1939; WAN024CHQ_at; Start 757; Stop 781
cgtcagatgttccaagaaatctctg

SEQ ID NO: 119064 - DNA, 25 bp, Artificial
  probe
  misc_feature (1)..(25): SEQ ID NO: 1939; WAN024CHQ_at; Start 62; Stop 86
cacttttagatgtaaaacacgttca

SEQ ID NO: 119065 - DNA, 25 bp, Artificial
  probe
  misc_feature (1)..(25): SEQ ID NO: 1939; WAN024CHQ_at; Start 789; Stop 813
gactgtcatggcaagcgaggtgaat

SEQ ID NO: 119066 - DNA, 25 bp, Artificial
  probe
  misc_feature (1)..(25): SEQ ID NO: 1939; WAN024CHQ_at; Start 702; Stop 726
ctttatcaaagacggcattctttac

SEQ ID NO: 119067 - DNA, 25 bp, Artificial
  probe
  misc_feature (1)..(25): SEQ ID NO: 1939; WAN024CHQ_at; Start 118; Stop 142
caagtagaagccctcaaggatattc

SEQ ID NO: 119068 - DNA, 25 bp, Artificial
  probe
  misc_feature (1)..(25): SEQ ID NO: 1939; WAN024CHQ_at; Start 13; Stop 37
gcaagctacatttcatttgatggga

SEQ ID NO: 119069 - DNA, 25 bp, Artificial
  probe
  misc_feature (1)..(25): SEQ ID NO: 1939; WAN024CHQ_at; Start 114; Stop 138
caaccaagtagaagccctcaaggat

SEQ ID NO: 119070 - DNA, 25 bp, Artificial
  probe
  misc_feature (1)..(25): SEQ ID NO: 1939; WAN024CHQ_at; Start 174; Stop 198
catcatgggtgagtctggttctggt

SEQ ID NO: 119071 - DNA, 25 bp, Artificial
  probe
  misc_feature (1)..(25): SEQ ID NO: 1939; WAN024CHQ_at; Start 57; Stop 81
catgacacttttagatgtaaaacac

SEQ ID NO: 119072 - DNA, 25 bp, Artificial
  probe
  misc_feature (1)..(25): SEQ ID NO: 1939; WAN024CHQ_at; Start 49; Stop 73
gagattctcatgacacttttagatg

SEQ ID NO: 119073 - DNA, 25 bp, Artificial
  probe
  misc_feature (1)..(25): SEQ ID NO: 1939; WAN024CHQ_at; Start 337; Stop 361
caagactttaacttgctagatactc

SEQ ID NO: 119074 - DNA, 25 bp, Artificial
  probe
  misc_feature (1)..(25): SEQ ID NO: 1939; WAN024CHQ_at; Start 26; Stop 50
catttgatgggatattaagaaagga

SEQ ID NO: 119075 - DNA, 25 bp, Artificial
  probe
  misc_feature (1)..(25): SEQ ID NO: 1939; WAN024CHQ_at; Start 700; Stop 724
ctctttatcaaagacggcattcttt

SEQ ID NO: 119076 - DNA, 25 bp, Artificial
  probe
  misc_feature (1)..(25): SEQ ID NO: 1939; WAN024CHQ_at; Start 596; Stop 620
catctgcagccttacttgatgtctt

SEQ ID NO: 119077 - DNA, 25 bp, Artificial
  probe
  misc_feature (1)..(25): SEQ ID NO: 1939; WAN024CHQ_at; Start 731; Stop 755
aaatctaccgtggagagaagacaga

SEQ ID NO: 119078 - DNA, 25 bp, Artificial
  probe
  misc_feature (1)..(25): SEQ ID NO: 1939; WAN024CHQ_at; Start 105; Stop 129
ttttcagggcaaccaagtagaagcc

SEQ ID NO: 119079 - DNA, 25 bp, Artificial
  probe
  misc_feature (1)..(25): SEQ ID NO: 1939; WAN024CHQ_at; Start 108; Stop 132
tcagggcaaccaagtagaagccctc

SEQ ID NO: 119080 - DNA, 25 bp, Artificial
  probe
  misc_feature (1)..(25): SEQ ID NO: 1939; WAN024CHQ_at; Start 784; Stop 808
accttgactgtcatggcaagcgagg

SEQ ID NO: 119081 - DNA, 25 bp, Artificial
  probe
  misc_feature (1)..(25): SEQ ID NO: 1939; WAN024CHQ_at; Start 653; Stop 677
tcatggtaacccactcaacagcagc

SEQ ID NO: 119082 - DNA, 25 bp, Artificial
  probe
  misc_feature (1)..(25): SEQ ID NO: 1939; WAN024CHQ_at; Start 41; Stop 65
taagaaaggagattctcatgacact

SEQ ID NO: 119083 - DNA, 25 bp, Artificial
  probe
  misc_feature (1)..(25): SEQ ID NO: 1939; WAN024CHQ_at; Start 425; Stop 449
tgaagaaattggtggtgacagctga

SEQ ID NO: 119084 - DNA, 25 bp, Artificial
  probe
  misc_feature (1)..(25): SEQ ID NO: 1939; WAN024CHQ_at; Start 791; Stop 815
ctgtcatggcaagcgaggtgaatta

SEQ ID NO: 119085 - DNA, 25 bp, Artificial
  probe
  misc_feature (1)..(25): SEQ ID NO: 1939; WAN024CHQ_at; Start 128; Stop 152
ccctcaaggatattcactttaccgt

SEQ ID NO: 119086 - DNA, 25 bp, Artificial
  probe
  misc_feature (1)..(25): SEQ ID NO: 1939; WAN024CHQ_at; Start 592; Stop 616
aagtcatctgcagccttacttgatg

SEQ ID NO: 119087 - DNA, 25 bp, Artificial
  probe
  misc_feature (1)..(25): SEQ ID NO: 1939; WAN024CHQ_at; Start 177; Stop 201
catgggtgagtctggttctggtaaa

SEQ ID NO: 119088 - DNA, 25 bp, Artificial
  probe
  misc_feature (1)..(25): SEQ ID NO: 1939; WAN024CHQ_at; Start 103; Stop 127
cgttttcagggcaaccaagtagaag

SEQ ID NO: 119089 - DNA, 25 bp, Artificial
  probe
  misc_feature (1)..(25): SEQ ID NO: 1939; WAN024CHQ_at; Start 124; Stop 148
gaagccctcaaggatattcacttta

SEQ ID NO: 119090 - DNA, 25 bp, Artificial
  probe
  misc_feature (1)..(25): SEQ ID NO: 1939; WAN024CHQ_at; Start 331; Stop 355
gtcttccaagactttaacttgctag

SEQ ID NO: 119091 - DNA, 25 bp, Artificial
  probe
  misc_feature (1)..(25): SEQ ID NO: 1939; WAN024CHQ_at; Start 589; Stop 613
tccaagtcatctgcagccttacttg

SEQ ID NO: 119092 - DNA, 25 bp, Artificial
  probe
  misc_feature (1)..(25): SEQ ID NO: 1939; WAN024CHQ_at; Start 170; Stop 194
ttgccatcatgggtgagtctggttc

SEQ ID NO: 119093 - DNA, 25 bp, Artificial
  probe
  misc_feature (1)..(25): SEQ ID NO: 1939; WAN024CHQ_at; Start 3; Stop 27
gcactatgatgcaagctacatttca

SEQ ID NO: 119094 - DNA, 25 bp, Artificial
  probe
  misc_feature (1)..(25): SEQ ID NO: 1939; WAN024CHQ_at; Start 112; Stop 136
ggcaaccaagtagaagccctcaagg

SEQ ID NO: 119095 - DNA, 25 bp, Artificial
  probe
  misc_feature (1)..(25): SEQ ID NO: 1939; WAN024CHQ_at; Start 730; Stop 754
caaatctaccgtggagagaagacag

SEQ ID NO: 119096 - DNA, 25 bp, Artificial
  probe
  misc_feature (1)..(25): SEQ ID NO: 5148; WAN024CHR_at; Start 684; Stop 708
gcaaatcttgtcttacgctcaggag

SEQ ID NO: 119097 - DNA, 25 bp, Artificial
  probe
  misc_feature (1)..(25): SEQ ID NO: 5148; WAN024CHR_at; Start 1677; Stop 1701
gattgataaaaaagccctgcgccag

SEQ ID NO: 119098 - DNA, 25 bp, Artificial
  probe
  misc_feature (1)..(25): SEQ ID NO: 5148; WAN024CHR_at; Start 2109; Stop 2133
gattgtcgaagaaggaaagcatgct

SEQ ID NO: 119099 - DNA, 25 bp, Artificial
  probe
  misc_feature (1)..(25): SEQ ID NO: 5148; WAN024CHR_at; Start 1902; Stop 1926
tcaacgtcagagaatcgctttggcg

SEQ ID NO: 119100 - DNA, 25 bp, Artificial
  probe
  misc_feature (1)..(25): SEQ ID NO: 5148; WAN024CHR_at; Start 1826; Stop 1850
ttcgagaggatatcgagcgcatgcc

SEQ ID NO: 119101 - DNA, 25 bp, Artificial
  probe
  misc_feature (1)..(25): SEQ ID NO: 5148; WAN024CHR_at; Start 1799; Stop 1823
tcttacgggcggtcgaattggcaga

SEQ ID NO: 119102 - DNA, 25 bp, Artificial
  probe
  misc_feature (1)..(25): SEQ ID NO: 5148; WAN024CHR_at; Start 1366; Stop 1390
aagcttcagacagcgcaggttgcca

SEQ ID NO: 119103 - DNA, 25 bp, Artificial
  probe
  misc_feature (1)..(25): SEQ ID NO: 5148; WAN024CHR_at; Start 212; Stop 236
gttttgagacgcgagccattaaggc

SEQ ID NO: 119104 - DNA, 25 bp, Artificial
  probe
  misc_feature (1)..(25): SEQ ID NO: 5148; WAN024CHR_at; Start 2057; Stop 2081
gcttgactattgctgagcggacaga

SEQ ID NO: 119105 - DNA, 25 bp, Artificial
  probe
  misc_feature (1)..(25): SEQ ID NO: 5148; WAN024CHR_at; Start 1578; Stop 1602
gatttcagggtcaggtaagacgact

SEQ ID NO: 119106 - DNA, 25 bp, Artificial
  probe
  misc_feature (1)..(25): SEQ ID NO: 5148; WAN024CHR_at; Start 1780; Stop 1804
gggacgacacaggaagatatcttac

SEQ ID NO: 119107 - DNA, 25 bp, Artificial
  probe
  misc_feature (1)..(25): SEQ ID NO: 5148; WAN024CHR_at; Start 351; Stop 375
tcatattgccgatccagatcccggg

SEQ ID NO: 119108 - DNA, 25 bp, Artificial
  probe
  misc_feature (1)..(25): SEQ ID NO: 5148; WAN024CHR_at; Start 1932; Stop 1956
tctcttgacagatgcgccggtcttg

SEQ ID NO: 119109 - DNA, 25 bp, Artificial
  probe
  misc_feature (1)..(25): SEQ ID NO: 5148; WAN024CHR_at; Start 652; Stop 676
tctattgggctagtcatcgtctaca

SEQ ID NO: 119110 - DNA, 25 bp, Artificial
  probe
  misc_feature (1)..(25): SEQ ID NO: 5148; WAN024CHR_at; Start 1753; Stop 1777
gagaatcttcttttgggagccaagg

SEQ ID NO: 119111 - DNA, 25 bp, Artificial
  probe
  misc_feature (1)..(25): SEQ ID NO: 5148; WAN024CHR_at; Start 1258; Stop 1282
gctgttctggtcatggatggcaaga

SEQ ID NO: 119112 - DNA, 25 bp, Artificial
  probe
  misc_feature (1)..(25): SEQ ID NO: 5148; WAN024CHR_at; Start 314; Stop 338
actactatgtggtgactgggcagga

SEQ ID NO: 119113 - DNA, 25 bp, Artificial
  probe
  misc_feature (1)..(25): SEQ ID NO: 5148; WAN024CHR_at; Start 1107; Stop 1131
gaccagtgaaagtcagcgttaccaa

SEQ ID NO: 119114 - DNA, 25 bp, Artificial
  probe
  misc_feature (1)..(25): SEQ ID NO: 5148; WAN024CHR_at; Start 238; Stop 262
gatatgacgctttttgacttgccgg

SEQ ID NO: 119115 - DNA, 25 bp, Artificial
  probe
  misc_feature (1)..(25): SEQ ID NO: 5148; WAN024CHR_at; Start 1917; Stop 1941
cgctttggcgcgtgctctcttgaca

SEQ ID NO: 119116 - DNA, 25 bp, Artificial
  probe
  misc_feature (1)..(25): SEQ ID NO: 5148; WAN024CHR_at; Start 73; Stop 97
gactgcggtgtagcttcattagcca

SEQ ID NO: 119117 - DNA, 25 bp, Artificial
  probe
  misc_feature (1)..(25): SEQ ID NO: 5148; WAN024CHR_at; Start 1035; Stop 1059
catggaagccaatgcggttctgtct

SEQ ID NO: 119118 - DNA, 25 bp, Artificial
  probe
  misc_feature (1)..(25): SEQ ID NO: 5148; WAN024CHR_at; Start 1175; Stop 1199
cctatagtcgagcagagagtcagca

SEQ ID NO: 119119 - DNA, 25 bp, Artificial
  probe
  misc_feature (1)..(25): SEQ ID NO: 5148; WAN024CHR_at; Start 1485; Stop 1509
caagcaggttcattacaagtatggc

SEQ ID NO: 119120 - DNA, 25 bp, Artificial
  probe
  misc_feature (1)..(25): SEQ ID NO: 5148; WAN024CHR_at; Start 625; Stop 649
cagatgcgttcgacactagggatta

SEQ ID NO: 119121 - DNA, 25 bp, Artificial
  probe
  misc_feature (1)..(25): SEQ ID NO: 5148; WAN024CHR_at; Start 500; Stop 524
tccctatattagtgaagcagcgtgg

SEQ ID NO: 119122 - DNA, 25 bp, Artificial
  probe
  misc_feature (1)..(25): SEQ ID NO: 5148; WAN024CHR_at; Start 1204; Stop 1228
gctctgaaaaaggttgcccatctct

SEQ ID NO: 119123 - DNA, 25 bp, Artificial
  probe
  misc_feature (1)..(25): SEQ ID NO: 5148; WAN024CHR_at; Start 288; Stop 312
tgtgcttaaggaagggaaattgctc

SEQ ID NO: 119124 - DNA, 25 bp, Artificial
  probe
  misc_feature (1)..(25): SEQ ID NO: 5148; WAN024CHR_at; Start 609; Stop 633
tacctatgtgccagatcagatgcgt

SEQ ID NO: 119125 - DNA, 25 bp, Artificial
  probe
  misc_feature (1)..(25): SEQ ID NO: 5148; WAN024CHR_at; Start 1723; Stop 1747
cagccctatgtctttaacggaacga

SEQ ID NO: 119126 - DNA, 25 bp, Artificial
  probe
  misc_feature (1)..(25): SEQ ID NO: 5148; WAN024CHR_at; Start 727; Stop 751
gggcaacgcttgtcgattgacgtga

SEQ ID NO: 119127 - DNA, 25 bp, Artificial
  probe
  misc_feature (1)..(25): SEQ ID NO: 5148; WAN024CHR_at; Start 1593; Stop 1617
taagacgactttggccaagatgatg

SEQ ID NO: 119128 - DNA, 25 bp, Artificial
  probe
  misc_feature (1)..(25): SEQ ID NO: 5148; WAN024CHR_at; Start 138; Stop 162
cttgcgagaattggctaagacgacc

SEQ ID NO: 119129 - DNA, 25 bp, Artificial
  probe
  misc_feature (1)..(25): SEQ ID NO: 5148; WAN024CHR_at; Start 962; Stop 986
tattggcgcttcctatctacacagt

SEQ ID NO: 119130 - DNA, 25 bp, Artificial
  probe
  misc_feature (1)..(25): SEQ ID NO: 3749; WAN024CHS-3_at; Start 367; Stop 391
aaaggttgccattgttgggccgact

SEQ ID NO: 119131 - DNA, 25 bp, Artificial
  probe
  misc_feature (1)..(25): SEQ ID NO: 3749; WAN024CHS-3_at; Start 95; Stop 119
caagtgcagctgactgatgaaaact

SEQ ID NO: 119132 - DNA, 25 bp, Artificial
  probe
  misc_feature (1)..(25): SEQ ID NO: 3749; WAN024CHS-3_at; Start 764; Stop 788
gatgaggcgacttcttctgttgaca

SEQ ID NO: 119133 - DNA, 25 bp, Artificial
  probe
  misc_feature (1)..(25): SEQ ID NO: 3749; WAN024CHS-3_at; Start 986; Stop 1010
caatttacagaagatgaagcagaag

SEQ ID NO: 119134 - DNA, 25 bp, Artificial
  probe
  misc_feature (1)..(25): SEQ ID NO: 3749; WAN024CHS-3_at; Start 530; Stop 554
gatacctggctctttgaaggaacta

SEQ ID NO: 119135 - DNA, 25 bp, Artificial
  probe
  misc_feature (1)..(25): SEQ ID NO: 3749; WAN024CHS-3_at; Start 112; Stop 136
tgaaaacttcaaaggtcaggtcgag

SEQ ID NO: 119136 - DNA, 25 bp, Artificial
  probe
  misc_feature (1)..(25): SEQ ID NO: 3749; WAN024CHS-3_at; Start 487; Stop 511
gacgcgttcagaagtgcatgatgcc

SEQ ID NO: 119137 - DNA, 25 bp, Artificial
  probe
  misc_feature (1)..(25): SEQ ID NO: 3749; WAN024CHS-3_at; Start 799; Stop 823
ggaattgatccaaaaagccatggac

SEQ ID NO: 119138 - DNA, 25 bp, Artificial
  probe
  misc_feature (1)..(25): SEQ ID NO: 3749; WAN024CHS-3_at; Start 910; Stop 934
tggaaatatcatcgagcaaggcaac

SEQ ID NO: 119139 - DNA, 25 bp, Artificial
  probe
  misc_feature (1)..(25): SEQ ID NO: 3749; WAN024CHS-3_at; Start 79; Stop 103
tatccaaaaccctgttcaagtgcag

SEQ ID NO: 119140 - DNA, 25 bp, Artificial
  probe
  misc_feature (1)..(25): SEQ ID NO: 3749; WAN024CHS-3_at; Start 314; Stop 338
gacggtgtcaatgttcaagactatg

SEQ ID NO: 119141 - DNA, 25 bp, Artificial
  probe
  misc_feature (1)..(25): SEQ ID NO: 3749; WAN024CHS-3_at; Start 612; Stop 636
ctagtaaggctgtgggaattcacca

SEQ ID NO: 119142 - DNA, 25 bp, Artificial
  probe
  misc_feature (1)..(25): SEQ ID NO: 3749; WAN024CHS-3_at; Start 515; Stop 539
tcaatggtcttgcaggatacctggc

SEQ ID NO: 119143 - DNA, 25 bp, Artificial
  probe
  misc_feature (1)..(25): SEQ ID NO: 3749; WAN024CHS-3_at; Start 300; Stop 324
gagaaattctggtggacggtgtcaa

SEQ ID NO: 119144 - DNA, 25 bp, Artificial
  probe
  misc_feature (1)..(25): SEQ ID NO: 3749; WAN024CHS-3_at; Start 217; Stop 241
aacagtggcctttattgggtcaaca

SEQ ID NO: 119145 - DNA, 25 bp, Artificial
  probe
  misc_feature (1)..(25): SEQ ID NO: 3749; WAN024CHS-3_at; Start 662; Stop 686
tatgataccatcttggatgacaccg

SEQ ID NO: 119146 - DNA, 25 bp, Artificial
  probe
  misc_feature (1)..(25): SEQ ID NO: 3749; WAN024CHS-3_at; Start 545; Stop 569
gaaggaactattcgagacaatctca

SEQ ID NO: 119147 - DNA, 25 bp, Artificial
  probe
  misc_feature (1)..(25): SEQ ID NO: 3749; WAN024CHS-3_at; Start 203; Stop 227
gcagaaactggtcaaacagtggcct

SEQ ID NO: 119148 - DNA, 25 bp, Artificial
  probe
  misc_feature (1)..(25): SEQ ID NO: 3749; WAN024CHS-3_at; Start 597; Stop 621
aacgaatgatggaagctagtaaggc

SEQ ID NO: 119149 - DNA, 25 bp, Artificial
  probe
  misc_feature (1)..(25): SEQ ID NO: 3749; WAN024CHS-3_at; Start 951; Stop 975
cgcaaggtggcttctacgctgactt

SEQ ID NO: 119150 - DNA, 25 bp, Artificial
  probe
  misc_feature (1)..(25): SEQ ID NO: 3749; WAN024CHS-3_at; Start 469; Stop 493
tgtggataccaaggctatgacgcgt

SEQ ID NO: 119151 - DNA, 25 bp, Artificial
  probe
  misc_feature (1)..(25): SEQ ID NO: 3749; WAN024CHS-3_at; Start 266; Stop 290
aatctgattccacgtttctacgacg

SEQ ID NO: 119152 - DNA, 25 bp, Artificial
  probe
  misc_feature (1)..(25): SEQ ID NO: 3749; WAN024CHS-3_at; Start 931; Stop 955
caactatgaggaactgatggcgcaa

SEQ ID NO: 119153 - DNA, 25 bp, Artificial
  probe
  misc_feature (1)..(25): SEQ ID NO: 3749; WAN024CHS-3_at; Start 781; Stop 805
tgttgacacacggacagaggaattg

SEQ ID NO: 119154 - DNA, 25 bp, Artificial
  probe
  misc_feature (1)..(25): SEQ ID NO: 3749; WAN024CHS-3_at; Start 27; Stop 51
gaactatggtctctgctaagcggat

SEQ ID NO: 119155 - DNA, 25 bp, Artificial
  probe
  misc_feature (1)..(25): SEQ ID NO: 3749; WAN024CHS-3_at; Start 864; Stop 888
gcttgtcaaccatccgaaatgcaga

SEQ ID NO: 119156 - DNA, 25 bp, Artificial
  probe
  misc_feature (1)..(25): SEQ ID NO: 3749; WAN024CHS-3_at; Start 352; Stop 376
agctcatgctggtcaaaaggttgcc

SEQ ID NO: 119157 - DNA, 25 bp, Artificial
  probe
  misc_feature (1)..(25): SEQ ID NO: 3749; WAN024CHS-3_at; Start 676; Stop 700
ggatgacaccgtgaccttgtctgta

SEQ ID NO: 119158 - DNA, 25 bp, Artificial
  probe
  misc_feature (1)..(25): SEQ ID NO: 3749; WAN024CHS-3_at; Start 884; Stop 908
gcagacttgatcttggtcatgaaag

SEQ ID NO: 119159 - DNA, 25 bp, Artificial
  probe
  misc_feature (1)..(25): SEQ ID NO: 3749; WAN024CHS-3_at; Start 139; Stop 163
taaggatgtgaccttccgctatgcg

SEQ ID NO: 119160 - DNA, 25 bp, Artificial
  probe
  misc_feature (1)..(25): SEQ ID NO: 3749; WAN024CHS-3_at; Start 637; Stop 661
ctttattatgaccttgccagatggc

SEQ ID NO: 119161 - DNA, 25 bp, Artificial
  probe
  misc_feature (1)..(25): SEQ ID NO: 3749; WAN024CHS-3_at; Start 232; Stop 256
tgggtcaacaggttctggtaaatca

SEQ ID NO: 119162 - DNA, 25 bp, Artificial
  probe
  misc_feature (1)..(25): SEQ ID NO: 3749; WAN024CHS-3_at; Start 330; Stop 354
aagactatgacttctctgcgacagc

SEQ ID NO: 119163 - DNA, 25 bp, Artificial
  probe
  misc_feature (1)..(25): SEQ ID NO: 3749; WAN024CHS-3_at; Start 284; Stop 308
tacgacgtgtcagcaggagaaattc

SEQ ID NO: 119164 - DNA, 25 bp, Artificial
  probe
  misc_feature (1)..(25): SEQ ID NO: 2591; WAN024CHS-5_at; Start 206; Stop 230
gagtggcggcttcttatactagtag

SEQ ID NO: 119165 - DNA, 25 bp, Artificial
  probe
  misc_feature (1)..(25): SEQ ID NO: 2591; WAN024CHS-5_at; Start 286; Stop 310
aaattttcaattcctagcctcttga

SEQ ID NO: 119166 - DNA, 25 bp, Artificial
  probe
  misc_feature (1)..(25): SEQ ID NO: 2591; WAN024CHS-5_at; Start 743; Stop 767
gggcctatgtgattaacgacgctgc

SEQ ID NO: 119167 - DNA, 25 bp, Artificial
  probe
  misc_feature (1)..(25): SEQ ID NO: 2591; WAN024CHS-5_at; Start 19; Stop 43
gccattctctttacttgcttttcgg

SEQ ID NO: 119168 - DNA, 25 bp, Artificial
  probe
  misc_feature (1)..(25): SEQ ID NO: 2591; WAN024CHS-5_at; Start 756; Stop 780
taacgacgctgctccgatagcgcgt

SEQ ID NO: 119169 - DNA, 25 bp, Artificial
  probe
  misc_feature (1)..(25): SEQ ID NO: 2591; WAN024CHS-5_at; Start 594; Stop 618
caatgcagaggattatcaaaatgaa

SEQ ID NO: 119170 - DNA, 25 bp, Artificial
  probe
  misc_feature (1)..(25): SEQ ID NO: 2591; WAN024CHS-5_at; Start 609; Stop 633
tcaaaatgaaaaatttgcagcagta

SEQ ID NO: 119171 - DNA, 25 bp, Artificial
  probe
  misc_feature (1)..(25): SEQ ID NO: 2591; WAN024CHS-5_at; Start 58; Stop 82
gaagtgccgacctatatctcgaaaa

SEQ ID NO: 119172 - DNA, 25 bp, Artificial
  probe
  misc_feature (1)..(25): SEQ ID NO: 2591; WAN024CHS-5_at; Start 655; Stop 679
aatttgtttgtcaaccgtcttatgg

SEQ ID NO: 119173 - DNA, 25 bp, Artificial
  probe
  misc_feature (1)..(25): SEQ ID NO: 2591; WAN024CHS-5_at; Start 680; Stop 704
ctattttgaatcctatcatgatggg

SEQ ID NO: 119174 - DNA, 25 bp, Artificial
  probe
  misc_feature (1)..(25): SEQ ID NO: 2591; WAN024CHS-5_at; Start 265; Stop 289
tactcgcagacagagattaagaaat

SEQ ID NO: 119175 - DNA, 25 bp, Artificial
  probe
  misc_feature (1)..(25): SEQ ID NO: 2591; WAN024CHS-5_at; Start 166; Stop 190
gccttcttgtccgtagttgcagttg

SEQ ID NO: 119176 - DNA, 25 bp, Artificial
  probe
  misc_feature (1)..(25): SEQ ID NO: 2591; WAN024CHS-5_at; Start 473; Stop 497
tgatgacgaccgttttgatgacgct

SEQ ID NO: 119177 - DNA, 25 bp, Artificial
  probe
  misc_feature (1)..(25): SEQ ID NO: 2591; WAN024CHS-5_at; Start 626; Stop 650
cagcagtaaatgatgaattgacccg

SEQ ID NO: 119178 - DNA, 25 bp, Artificial
  probe
  misc_feature (1)..(25): SEQ ID NO: 2591; WAN024CHS-5_at; Start 552; Stop 576
cactcgtgagagtttaacaggtatt

SEQ ID NO: 119179 - DNA, 25 bp, Artificial
  probe
  misc_feature (1)..(25): SEQ ID NO: 2591; WAN024CHS-5_at; Start 567; Stop 591
aacaggtattcgtgtcgttcgtgcc

SEQ ID NO: 119180 - DNA, 25 bp, Artificial
  probe
  misc_feature (1)..(25): SEQ ID NO: 2591; WAN024CHS-5_at; Start 249; Stop 273
taaccgagttttggattactcgcag

SEQ ID NO: 119181 - DNA, 25 bp, Artificial
  probe
  misc_feature (1)..(25): SEQ ID NO: 2591; WAN024CHS-5_at; Start 176; Stop 200
ccgtagttgcagttggattttttgc

SEQ ID NO: 119182 - DNA, 25 bp, Artificial
  probe
  misc_feature (1)..(25): SEQ ID NO: 2591; WAN024CHS-5_at; Start 503; Stop 527
ttccaaaacagtccttgattcaggg

SEQ ID NO: 119183 - DNA, 25 bp, Artificial
  probe
  misc_feature (1)..(25): SEQ ID NO: 2591; WAN024CHS-5_at; Start 312; Stop 336
gcgtactaccaatgacattactcaa

SEQ ID NO: 119184 - DNA, 25 bp, Artificial
  probe
  misc_feature (1)..(25): SEQ ID NO: 2591; WAN024CHS-5_at; Start 582; Stop 606
cgttcgtgcctacaatgcagaggat

SEQ ID NO: 119185 - DNA, 25 bp, Artificial
  probe
  misc_feature (1)..(25): SEQ ID NO: 2591; WAN024CHS-5_at; Start 191; Stop 215
gattttttgcatcccgagtggcggc

SEQ ID NO: 119186 - DNA, 25 bp, Artificial
  probe
  misc_feature (1)..(25): SEQ ID NO: 2591; WAN024CHS-5_at; Start 413; Stop 437
ttttaggtcattcagaatactggct

SEQ ID NO: 119187 - DNA, 25 bp, Artificial
  probe
  misc_feature (1)..(25): SEQ ID NO: 2591; WAN024CHS-5_at; Start 325; Stop 349
gacattactcaagttcaaatgttga

SEQ ID NO: 119188 - DNA, 25 bp, Artificial
  probe
  misc_feature (1)..(25): SEQ ID NO: 2591; WAN024CHS-5_at; Start 35; Stop 59
gcttttcggtctatctagagttgga

SEQ ID NO: 119189 - DNA, 25 bp, Artificial
  probe
  misc_feature (1)..(25): SEQ ID NO: 2591; WAN024CHS-5_at; Start 45; Stop 69
ctatctagagttggaagtgccgacc

SEQ ID NO: 119190 - DNA, 25 bp, Artificial
  probe
  misc_feature (1)..(25): SEQ ID NO: 2591; WAN024CHS-5_at; Start 666; Stop 690
caaccgtcttatggctattttgaat

SEQ ID NO: 119191 - DNA, 25 bp, Artificial
  probe
  misc_feature (1)..(25): SEQ ID NO: 2591; WAN024CHS-5_at; Start 217; Stop 241
tcttatactagtaggctgagaagtg

SEQ ID NO: 119192 - DNA, 25 bp, Artificial
  probe
  misc_feature (1)..(25): SEQ ID NO: 2591; WAN024CHS-5_at; Start 108; Stop 132
aactaatttagatgagttgtggcag

SEQ ID NO: 119193 - DNA, 25 bp, Artificial
  probe
  misc_feature (1)..(25): SEQ ID NO: 2591; WAN024CHS-5_at; Start 66; Stop 90
gacctatatctcgaaaattacggat

SEQ ID NO: 119194 - DNA, 25 bp, Artificial
  probe
  misc_feature (1)..(25): SEQ ID NO: 2591; WAN024CHS-5_at; Start 398; Stop 422
gggctattgggaagattttaggtca

SEQ ID NO: 119195 - DNA, 25 bp, Artificial
  probe
  misc_feature (1)..(25): SEQ ID NO: 2591; WAN024CHS-5_at; Start 537; Stop 561
taaactgaacagtatcactcgtgag

SEQ ID NO: 119196 - DNA, 25 bp, Artificial
  probe
  misc_feature (1)..(25): SEQ ID NO: 2591; WAN024CHS-5_at; Start 4; Stop 28
gggatgattttactagccattctct

SEQ ID NO: 119197 - DNA, 25 bp, Artificial
  probe
  misc_feature (1)..(25): SEQ ID NO: 2591; WAN024CHS-5_at; Start 231; Stop 255
gctgagaagtgatatttttaaccga

SEQ ID NO: 119198 - DNA, 25 bp, Artificial
  probe
  misc_feature (1)..(25): SEQ ID NO: 5200; WAN024CHT_at; Start 28; Stop 52
gccttctataacttgatttatcagg

SEQ ID NO: 119199 - DNA, 25 bp, Artificial
  probe
  misc_feature (1)..(25): SEQ ID NO: 5200; WAN024CHT_at; Start 55; Stop 79
tcaaatgaacagaaagcccaatttg

SEQ ID NO: 119200 - DNA, 25 bp, Artificial
  probe
  misc_feature (1)..(25): SEQ ID NO: 5200; WAN024CHT_at; Start 30; Stop 54
cttctataacttgatttatcaggtt

SEQ ID NO: 119201 - DNA, 25 bp, Artificial
  probe
  misc_feature (1)..(25): SEQ ID NO: 5200; WAN024CHT_at; Start 57; Stop 81
aaatgaacagaaagcccaatttgaa

SEQ ID NO: 119202 - DNA, 25 bp, Artificial
  probe
  misc_feature (1)..(25): SEQ ID NO: 5200; WAN024CHT_at; Start 18; Stop 42
tccgtctaccgccttctataacttg

SEQ ID NO: 119203 - DNA, 25 bp, Artificial
  probe
  misc_feature (1)..(25): SEQ ID NO: 5200; WAN024CHT_at; Start 20; Stop 44
cgtctaccgccttctataacttgat

SEQ ID NO: 119204 - DNA, 25 bp, Artificial
  probe
  misc_feature (1)..(25): SEQ ID NO: 5200; WAN024CHT_at; Start 48; Stop 72
tcaggtttcaaatgaacagaaagcc

SEQ ID NO: 119205 - DNA, 25 bp, Artificial
  probe
  misc_feature (1)..(25): SEQ ID NO: 5200; WAN024CHT_at; Start 27; Stop 51
cgccttctataacttgatttatcag

SEQ ID NO: 119206 - DNA, 25 bp, Artificial
  probe
  misc_feature (1)..(25): SEQ ID NO: 5200; WAN024CHT_at; Start 46; Stop 70
tatcaggtttcaaatgaacagaaag

SEQ ID NO: 119207 - DNA, 25 bp, Artificial
  probe
  misc_feature (1)..(25): SEQ ID NO: 5200; WAN024CHT_at; Start 23; Stop 47
ctaccgccttctataacttgattta

SEQ ID NO: 119208 - DNA, 25 bp, Artificial
  probe
  misc_feature (1)..(25): SEQ ID NO: 5200; WAN024CHT_at; Start 56; Stop 80
caaatgaacagaaagcccaatttga

SEQ ID NO: 119209 - DNA, 25 bp, Artificial
  probe
  misc_feature (1)..(25): SEQ ID NO: 5200; WAN024CHT_at; Start 33; Stop 57
ctataacttgatttatcaggtttca

SEQ ID NO: 119210 - DNA, 25 bp, Artificial
  probe
  misc_feature (1)..(25): SEQ ID NO: 5200; WAN024CHT_at; Start 62; Stop 86
aacagaaagcccaatttgaagggct

SEQ ID NO: 119211 - DNA, 25 bp, Artificial
  probe
  misc_feature (1)..(25): SEQ ID NO: 5200; WAN024CHT_at; Start 54; Stop 78
ttcaaatgaacagaaagcccaattt

SEQ ID NO: 119212 - DNA, 25 bp, Artificial
  probe
  misc_feature (1)..(25): SEQ ID NO: 5200; WAN024CHT_at; Start 25; Stop 49
accgccttctataacttgatttatc

SEQ ID NO: 119213 - DNA, 25 bp, Artificial
  probe
  misc_feature (1)..(25): SEQ ID NO: 5200; WAN024CHT_at; Start 19; Stop 43
ccgtctaccgccttctataacttga

SEQ ID NO: 119214 - DNA, 25 bp, Artificial
  probe
  misc_feature (1)..(25): SEQ ID NO: 5200; WAN024CHT_at; Start 21; Stop 45
gtctaccgccttctataacttgatt

SEQ ID NO: 119215 - DNA, 25 bp, Artificial
  probe
  misc_feature (1)..(25): SEQ ID NO: 5200; WAN024CHT_at; Start 24; Stop 48
taccgccttctataacttgatttat

SEQ ID NO: 119216 - DNA, 25 bp, Artificial
  probe
  misc_feature (1)..(25): SEQ ID NO: 5200; WAN024CHT_at; Start 38; Stop 62
acttgatttatcaggtttcaaatga

SEQ ID NO: 119217 - DNA, 25 bp, Artificial
  probe
  misc_feature (1)..(25): SEQ ID NO: 5200; WAN024CHT_at; Start 61; Stop 85
gaacagaaagcccaatttgaagggc

SEQ ID NO: 119218 - DNA, 25 bp, Artificial
  probe
  misc_feature (1)..(25): SEQ ID NO: 5200; WAN024CHT_at; Start 26; Stop 50
ccgccttctataacttgatttatca

SEQ ID NO: 119219 - DNA, 25 bp, Artificial
  probe
  misc_feature (1)..(25): SEQ ID NO: 5200; WAN024CHT_at; Start 29; Stop 53
ccttctataacttgatttatcaggt

SEQ ID NO: 119220 - DNA, 25 bp, Artificial
  probe
  misc_feature (1)..(25): SEQ ID NO: 5200; WAN024CHT_at; Start 37; Stop 61
aacttgatttatcaggtttcaaatg

SEQ ID NO: 119221 - DNA, 25 bp, Artificial
  probe
  misc_feature (1)..(25): SEQ ID NO: 5200; WAN024CHT_at; Start 32; Stop 56
tctataacttgatttatcaggtttc

SEQ ID NO: 119222 - DNA, 25 bp, Artificial
  probe
  misc_feature (1)..(25): SEQ ID NO: 5200; WAN024CHT_at; Start 34; Stop 58
tataacttgatttatcaggtttcaa

SEQ ID NO: 119223 - DNA, 25 bp, Artificial
  probe
  misc_feature (1)..(25): SEQ ID NO: 5200; WAN024CHT_at; Start 45; Stop 69
ttatcaggtttcaaatgaacagaaa

SEQ ID NO: 119224 - DNA, 25 bp, Artificial
  probe
  misc_feature (1)..(25): SEQ ID NO: 5200; WAN024CHT_at; Start 64; Stop 88
cagaaagcccaatttgaagggcttt

SEQ ID NO: 119225 - DNA, 25 bp, Artificial
  probe
  misc_feature (1)..(25): SEQ ID NO: 5200; WAN024CHT_at; Start 58; Stop 82
aatgaacagaaagcccaatttgaag

SEQ ID NO: 119226 - DNA, 25 bp, Artificial
  probe
  misc_feature (1)..(25): SEQ ID NO: 5200; WAN024CHT_at; Start 36; Stop 60
taacttgatttatcaggtttcaaat

SEQ ID NO: 119227 - DNA, 25 bp, Artificial
  probe
  misc_feature (1)..(25): SEQ ID NO: 5200; WAN024CHT_at; Start 44; Stop 68
tttatcaggtttcaaatgaacagaa

SEQ ID NO: 119228 - DNA, 25 bp, Artificial
  probe
  misc_feature (1)..(25): SEQ ID NO: 5200; WAN024CHT_at; Start 39; Stop 63
cttgatttatcaggtttcaaatgaa

SEQ ID NO: 119229 - DNA, 25 bp, Artificial
  probe
  misc_feature (1)..(25): SEQ ID NO: 5200; WAN024CHT_at; Start 47; Stop 71
atcaggtttcaaatgaacagaaagc

SEQ ID NO: 119230 - DNA, 25 bp, Artificial
  probe
  misc_feature (1)..(25): SEQ ID NO: 5200; WAN024CHT_at; Start 63; Stop 87
acagaaagcccaatttgaagggctt

SEQ ID NO: 119231 - DNA, 25 bp, Artificial
  probe
  misc_feature (1)..(25): SEQ ID NO: 5200; WAN024CHT_at; Start 22; Stop 46
tctaccgccttctataacttgattt

SEQ ID NO: 119232 - DNA, 25 bp, Artificial
  probe
  misc_feature (1)..(25): SEQ ID NO: 3742; WAN024CHU_at; Start 28; Stop 52
gctctgcaaaagcttgatcgtcggt

SEQ ID NO: 119233 - DNA, 25 bp, Artificial
  probe
  misc_feature (1)..(25): SEQ ID NO: 3742; WAN024CHU_at; Start 6; Stop 30
tatagccaagtggtaaggcacggct

SEQ ID NO: 119234 - DNA, 25 bp, Artificial
  probe
  misc_feature (1)..(25): SEQ ID NO: 3742; WAN024CHU_at; Start 21; Stop 45
aggcacggctctgcaaaagcttgat

SEQ ID NO: 119235 - DNA, 25 bp, Artificial
  probe
  misc_feature (1)..(25): SEQ ID NO: 3742; WAN024CHU_at; Start 25; Stop 49
acggctctgcaaaagcttgatcgtc

SEQ ID NO: 119236 - DNA, 25 bp, Artificial
  probe
  misc_feature (1)..(25): SEQ ID NO: 3742; WAN024CHU_at; Start 11; Stop 35
ccaagtggtaaggcacggctctgca

SEQ ID NO: 119237 - DNA, 25 bp, Artificial
  probe
  misc_feature (1)..(25): SEQ ID NO: 3742; WAN024CHU_at; Start 10; Stop 34
gccaagtggtaaggcacggctctgc

SEQ ID NO: 119238 - DNA, 25 bp, Artificial
  probe
  misc_feature (1)..(25): SEQ ID NO: 3742; WAN024CHU_at; Start 8; Stop 32
tagccaagtggtaaggcacggctct

SEQ ID NO: 119239 - DNA, 25 bp, Artificial
  probe
  misc_feature (1)..(25): SEQ ID NO: 3742; WAN024CHU_at; Start 26; Stop 50
cggctctgcaaaagcttgatcgtcg

SEQ ID NO: 119240 - DNA, 25 bp, Artificial
  probe
  misc_feature (1)..(25): SEQ ID NO: 3742; WAN024CHU_at; Start 13; Stop 37
aagtggtaaggcacggctctgcaaa

SEQ ID NO: 119241 - DNA, 25 bp, Artificial
  probe
  misc_feature (1)..(25): SEQ ID NO: 3742; WAN024CHU_at; Start 18; Stop 42
gtaaggcacggctctgcaaaagctt

SEQ ID NO: 119242 - DNA, 25 bp, Artificial
  probe
  misc_feature (1)..(25): SEQ ID NO: 3742; WAN024CHU_at; Start 31; Stop 55
ctgcaaaagcttgatcgtcggttca

SEQ ID NO: 119243 - DNA, 25 bp, Artificial
  probe
  misc_feature (1)..(25): SEQ ID NO: 3742; WAN024CHU_at; Start 15; Stop 39
gtggtaaggcacggctctgcaaaag

SEQ ID NO: 119244 - DNA, 25 bp, Artificial
  probe
  misc_feature (1)..(25): SEQ ID NO: 3742; WAN024CHU_at; Start 27; Stop 51
ggctctgcaaaagcttgatcgtcgg

SEQ ID NO: 119245 - DNA, 25 bp, Artificial
  probe
  misc_feature (1)..(25): SEQ ID NO: 3742; WAN024CHU_at; Start 9; Stop 33
agccaagtggtaaggcacggctctg

SEQ ID NO: 119246 - DNA, 25 bp, Artificial
  probe
  misc_feature (1)..(25): SEQ ID NO: 3742; WAN024CHU_at; Start 30; Stop 54
tctgcaaaagcttgatcgtcggttc

SEQ ID NO: 119247 - DNA, 25 bp, Artificial
  probe
  misc_feature (1)..(25): SEQ ID NO: 3742; WAN024CHU_at; Start 20; Stop 44
aaggcacggctctgcaaaagcttga

SEQ ID NO: 119248 - DNA, 25 bp, Artificial
  probe
  misc_feature (1)..(25): SEQ ID NO: 3742; WAN024CHU_at; Start 17; Stop 41
ggtaaggcacggctctgcaaaagct

SEQ ID NO: 119249 - DNA, 25 bp, Artificial
  probe
  misc_feature (1)..(25): SEQ ID NO: 3742; WAN024CHU_at; Start 19; Stop 43
taaggcacggctctgcaaaagcttg

SEQ ID NO: 119250 - DNA, 25 bp, Artificial
  probe
  misc_feature (1)..(25): SEQ ID NO: 3742; WAN024CHU_at; Start 14; Stop 38
agtggtaaggcacggctctgcaaaa

SEQ ID NO: 119251 - DNA, 25 bp, Artificial
  probe
  misc_feature (1)..(25): SEQ ID NO: 3742; WAN024CHU_at; Start 23; Stop 47
gcacggctctgcaaaagcttgatcg

SEQ ID NO: 119252 - DNA, 25 bp, Artificial
  probe
  misc_feature (1)..(25): SEQ ID NO: 3742; WAN024CHU_at; Start 29; Stop 53
ctctgcaaaagcttgatcgtcggtt

SEQ ID NO: 119253 - DNA, 25 bp, Artificial
  probe
  misc_feature (1)..(25): SEQ ID NO: 3742; WAN024CHU_at; Start 7; Stop 31
atagccaagtggtaaggcacggctc

SEQ ID NO: 119254 - DNA, 25 bp, Artificial
  probe
  misc_feature (1)..(25): SEQ ID NO: 3742; WAN024CHU_at; Start 16; Stop 40
tggtaaggcacggctctgcaaaagc

SEQ ID NO: 119255 - DNA, 25 bp, Artificial
  probe
  misc_feature (1)..(25): SEQ ID NO: 3742; WAN024CHU_at; Start 22; Stop 46
ggcacggctctgcaaaagcttgatc

SEQ ID NO: 119256 - DNA, 25 bp, Artificial
  probe
  misc_feature (1)..(25): SEQ ID NO: 3742; WAN024CHU_at; Start 12; Stop 36
caagtggtaaggcacggctctgcaa

SEQ ID NO: 119257 - DNA, 25 bp, Artificial
  probe
  misc_feature (1)..(25): SEQ ID NO: 3742; WAN024CHU_at; Start 24; Stop 48
cacggctctgcaaaagcttgatcgt

SEQ ID NO: 119258 - DNA, 25 bp, Artificial
  probe
  misc_feature (1)..(25): SEQ ID NO: 3742; WAN024CHU_at; Start 5; Stop 29
gtatagccaagtggtaaggcacggc

SEQ ID NO: 119259 - DNA, 25 bp, Artificial
  probe
  misc_feature (1)..(25): SEQ ID NO: 7545; WAN024CHV_at; Start 1; Stop 25
ttgcaagtttggatccacactagac

SEQ ID NO: 119260 - DNA, 25 bp, Artificial
  probe
  misc_feature (1)..(25): SEQ ID NO: 7545; WAN024CHV_at; Start 58; Stop 82
gcgagtatgaatctttccatcagcc

SEQ ID NO: 119261 - DNA, 25 bp, Artificial
  probe
  misc_feature (1)..(25): SEQ ID NO: 7545; WAN024CHV_at; Start 72; Stop 96
ttccatcagccaaaatccagtcctg

SEQ ID NO: 119262 - DNA, 25 bp, Artificial
  probe
  misc_feature (1)..(25): SEQ ID NO: 7545; WAN024CHV_at; Start 197; Stop 221
actgctgtcgaataacctgtcttgg

SEQ ID NO: 119263 - DNA, 25 bp, Artificial
  probe
  misc_feature (1)..(25): SEQ ID NO: 7545; WAN024CHV_at; Start 9; Stop 33
ttggatccacactagacaaacgccc

SEQ ID NO: 119264 - DNA, 25 bp, Artificial
  probe
  misc_feature (1)..(25): SEQ ID NO: 7545; WAN024CHV_at; Start 77; Stop 101
tcagccaaaatccagtcctgcaagc

SEQ ID NO: 119265 - DNA, 25 bp, Artificial
  probe
  misc_feature (1)..(25): SEQ ID NO: 7545; WAN024CHV_at; Start 129; Stop 153
caatttgacggtaatccaggatttt

SEQ ID NO: 119266 - DNA, 25 bp, Artificial
  probe
  misc_feature (1)..(25): SEQ ID NO: 7545; WAN024CHV_at; Start 116; Stop 140
gattgaatcttagcaatttgacggt

SEQ ID NO: 119267 - DNA, 25 bp, Artificial
  probe
  misc_feature (1)..(25): SEQ ID NO: 7545; WAN024CHV_at; Start 156; Stop 180
taacaatcggagcaataggagcgag

SEQ ID NO: 119268 - DNA, 25 bp, Artificial
  probe
  misc_feature (1)..(25): SEQ ID NO: 7545; WAN024CHV_at; Start 32; Stop 56
ccggtctgggtcaaatcctgcacat

SEQ ID NO: 119269 - DNA, 25 bp, Artificial
  probe
  misc_feature (1)..(25): SEQ ID NO: 7545; WAN024CHV_at; Start 62; Stop 86
gtatgaatctttccatcagccaaaa

SEQ ID NO: 119270 - DNA, 25 bp, Artificial
  probe
  misc_feature (1)..(25): SEQ ID NO: 7545; WAN024CHV_at; Start 48; Stop 72
cctgcacatagcgagtatgaatctt

SEQ ID NO: 119271 - DNA, 25 bp, Artificial
  probe
  misc_feature (1)..(25): SEQ ID NO: 7545; WAN024CHV_at; Start 153; Stop 177
tcttaacaatcggagcaataggagc

SEQ ID NO: 119272 - DNA, 25 bp, Artificial
  probe
  misc_feature (1)..(25): SEQ ID NO: 7545; WAN024CHV_at; Start 52; Stop 76
cacatagcgagtatgaatctttcca

SEQ ID NO: 119273 - DNA, 25 bp, Artificial
  probe
  misc_feature (1)..(25): SEQ ID NO: 7545; WAN024CHV_at; Start 192; Stop 216
catccactgctgtcgaataacctgt

SEQ ID NO: 119274 - DNA, 25 bp, Artificial
  probe
  misc_feature (1)..(25): SEQ ID NO: 7545; WAN024CHV_at; Start 92; Stop 116
tcctgcaagccaattacataagtag

SEQ ID NO: 119275 - DNA, 25 bp, Artificial
  probe
  misc_feature (1)..(25): SEQ ID NO: 7545; WAN024CHV_at; Start 42; Stop 66
tcaaatcctgcacatagcgagtatg

SEQ ID NO: 119276 - DNA, 25 bp, Artificial
  probe
  misc_feature (1)..(25): SEQ ID NO: 7545; WAN024CHV_at; Start 85; Stop 109
aatccagtcctgcaagccaattaca

SEQ ID NO: 119277 - DNA, 25 bp, Artificial
  probe
  misc_feature (1)..(25): SEQ ID NO: 7545; WAN024CHV_at; Start 200; Stop 224
gctgtcgaataacctgtcttggttt

SEQ ID NO: 119278 - DNA, 25 bp, Artificial
  probe
  misc_feature (1)..(25): SEQ ID NO: 7545; WAN024CHV_at; Start 80; Stop 104
gccaaaatccagtcctgcaagccaa

SEQ ID NO: 119279 - DNA, 25 bp, Artificial
  probe
  misc_feature (1)..(25): SEQ ID NO: 7545; WAN024CHV_at; Start 183; Stop 207
gctccaaaacatccactgctgtcga

SEQ ID NO: 119280 - DNA, 25 bp, Artificial
  probe
  misc_feature (1)..(25): SEQ ID NO: 7545; WAN024CHV_at; Start 27; Stop 51
aacgcccggtctgggtcaaatcctg

SEQ ID NO: 119281 - DNA, 25 bp, Artificial
  probe
  misc_feature (1)..(25): SEQ ID NO: 7545; WAN024CHV_at; Start 100; Stop 124
gccaattacataagtagattgaatc

SEQ ID NO: 119282 - DNA, 25 bp, Artificial
  probe
  misc_feature (1)..(25): SEQ ID NO: 7545; WAN024CHV_at; Start 212; Stop 236
cctgtcttggttttcttagtgtatt

SEQ ID NO: 119283 - DNA, 25 bp, Artificial
  probe
  misc_feature (1)..(25): SEQ ID NO: 7545; WAN024CHV_at; Start 39; Stop 63
gggtcaaatcctgcacatagcgagt

SEQ ID NO: 119284 - DNA, 25 bp, Artificial
  probe
  misc_feature (1)..(25): SEQ ID NO: 7545; WAN024CHV_at; Start 124; Stop 148
cttagcaatttgacggtaatccagg

SEQ ID NO: 119285 - DNA, 25 bp, Artificial
  probe
  misc_feature (1)..(25): SEQ ID NO: 7545; WAN024CHV_at; Start 167; Stop 191
gcaataggagcgagacgctccaaaa

SEQ ID NO: 119286 - DNA, 25 bp, Artificial
  probe
  misc_feature (1)..(25): SEQ ID NO: 7545; WAN024CHV_at; Start 178; Stop 202
gagacgctccaaaacatccactgct

SEQ ID NO: 119287 - DNA, 25 bp, Artificial
  probe
  misc_feature (1)..(25): SEQ ID NO: 7545; WAN024CHV_at; Start 187; Stop 211
caaaacatccactgctgtcgaataa

SEQ ID NO: 119288 - DNA, 25 bp, Artificial
  probe
  misc_feature (1)..(25): SEQ ID NO: 7545; WAN024CHV_at; Start 145; Stop 169
caggattttcttaacaatcggagca

SEQ ID NO: 119289 - DNA, 25 bp, Artificial
  probe
  misc_feature (1)..(25): SEQ ID NO: 7545; WAN024CHV_at; Start 162; Stop 186
tcggagcaataggagcgagacgctc

SEQ ID NO: 119290 - DNA, 25 bp, Artificial
  probe
  misc_feature (1)..(25): SEQ ID NO: 7545; WAN024CHV_at; Start 36; Stop 60
tctgggtcaaatcctgcacatagcg

SEQ ID NO: 119291 - DNA, 25 bp, Artificial
  probe
  misc_feature (1)..(25): SEQ ID NO: 7545; WAN024CHV_at; Start 17; Stop 41
acactagacaaacgcccggtctggg

SEQ ID NO: 119292 - DNA, 25 bp, Artificial
  probe
  misc_feature (1)..(25): SEQ ID NO: 7545; WAN024CHV_at; Start 159; Stop 183
caatcggagcaataggagcgagacg

SEQ ID NO: 119293 - DNA, 25 bp, Artificial
  probe
  misc_feature (1)..(25): SEQ ID NO: 6638; WAN024CHW_at; Start 2; Stop 26
tgatccagcaactcacgaatgaaag

SEQ ID NO: 119294 - DNA, 25 bp, Artificial
  probe
  misc_feature (1)..(25): SEQ ID NO: 6638; WAN024CHW_at; Start 225; Stop 249
ggtccaactgctgatacagcgcaaa

SEQ ID NO: 119295 - DNA, 25 bp, Artificial
  probe
  misc_feature (1)..(25): SEQ ID NO: 6638; WAN024CHW_at; Start 127; Stop 151
caaaatatgactcggctcaacccgc

SEQ ID NO: 119296 - DNA, 25 bp, Artificial
  probe
  misc_feature (1)..(25): SEQ ID NO: 6638; WAN024CHW_at; Start 22; Stop 46
gaaaggaaattgctcacgaaactca

SEQ ID NO: 119297 - DNA, 25 bp, Artificial
  probe
  misc_feature (1)..(25): SEQ ID NO: 6638; WAN024CHW_at; Start 254; Stop 278
gcccgaaaagctacagaagacccat

SEQ ID NO: 119298 - DNA, 25 bp, Artificial
  probe
  misc_feature (1)..(25): SEQ ID NO: 6638; WAN024CHW_at; Start 162; Stop 186
gactcaacatcaactgaaaaccata

SEQ ID NO: 119299 - DNA, 25 bp, Artificial
  probe
  misc_feature (1)..(25): SEQ ID NO: 6638; WAN024CHW_at; Start 42; Stop 66
actcatcaggagtcttggcccgacc

SEQ ID NO: 119300 - DNA, 25 bp, Artificial
  probe
  misc_feature (1)..(25): SEQ ID NO: 6638; WAN024CHW_at; Start 32; Stop 56
tgctcacgaaactcatcaggagtct

SEQ ID NO: 119301 - DNA, 25 bp, Artificial
  probe
  misc_feature (1)..(25): SEQ ID NO: 6638; WAN024CHW_at; Start 72; Stop 96
tatagtccgcatacatctctgtccg

SEQ ID NO: 119302 - DNA, 25 bp, Artificial
  probe
  misc_feature (1)..(25): SEQ ID NO: 6638; WAN024CHW_at; Start 216; Stop 240
tcttaaaacggtccaactgctgata

SEQ ID NO: 119303 - DNA, 25 bp, Artificial
  probe
  misc_feature (1)..(25): SEQ ID NO: 6638; WAN024CHW_at; Start 191; Stop 215
gcattggtatgcaaaccagccgcat

SEQ ID NO: 119304 - DNA, 25 bp, Artificial
  probe
  misc_feature (1)..(25): SEQ ID NO: 6638; WAN024CHW_at; Start 195; Stop 219
tggtatgcaaaccagccgcattctt

SEQ ID NO: 119305 - DNA, 25 bp, Artificial
  probe
  misc_feature (1)..(25): SEQ ID NO: 6638; WAN024CHW_at; Start 173; Stop 197
aactgaaaaccataaatcgcattgg

SEQ ID NO: 119306 - DNA, 25 bp, Artificial
  probe
  misc_feature (1)..(25): SEQ ID NO: 6638; WAN024CHW_at; Start 117; Stop 141
caaaagccaccaaaatatgactcgg

SEQ ID NO: 119307 - DNA, 25 bp, Artificial
  probe
  misc_feature (1)..(25): SEQ ID NO: 6638; WAN024CHW_at; Start 85; Stop 109
catctctgtccggaaggtcgtcttt

SEQ ID NO: 119308 - DNA, 25 bp, Artificial
  probe
  misc_feature (1)..(25): SEQ ID NO: 6638; WAN024CHW_at; Start 149; Stop 173
cgctccaacaaatgactcaacatca

SEQ ID NO: 119309 - DNA, 25 bp, Artificial
  probe
  misc_feature (1)..(25): SEQ ID NO: 6638; WAN024CHW_at; Start 14; Stop 38
tcacgaatgaaaggaaattgctcac

SEQ ID NO: 119310 - DNA, 25 bp, Artificial
  probe
  misc_feature (1)..(25): SEQ ID NO: 6638; WAN024CHW_at; Start 201; Stop 225
gcaaaccagccgcattcttaaaacg

SEQ ID NO: 119311 - DNA, 25 bp, Artificial
  probe
  misc_feature (1)..(25): SEQ ID NO: 6638; WAN024CHW_at; Start 258; Stop 282
gaaaagctacagaagacccatcaat

SEQ ID NO: 119312 - DNA, 25 bp, Artificial
  probe
  misc_feature (1)..(25): SEQ ID NO: 6638; WAN024CHW_at; Start 227; Stop 251
tccaactgctgatacagcgcaaaaa

SEQ ID NO: 119313 - DNA, 25 bp, Artificial
  probe
  misc_feature (1)..(25): SEQ ID NO: 6638; WAN024CHW_at; Start 241; Stop 265
cagcgcaaaaaacgcccgaaaagct

SEQ ID NO: 119314 - DNA, 25 bp, Artificial
  probe
  misc_feature (1)..(25): SEQ ID NO: 6638; WAN024CHW_at; Start 97; Stop 121
gaaggtcgtctttcccgcatcaaaa

SEQ ID NO: 119315 - DNA, 25 bp, Artificial
  probe
  misc_feature (1)..(25): SEQ ID NO: 6638; WAN024CHW_at; Start 219; Stop 243
taaaacggtccaactgctgatacag

SEQ ID NO: 119316 - DNA, 25 bp, Artificial
  probe
  misc_feature (1)..(25): SEQ ID NO: 6638; WAN024CHW_at; Start 108; Stop 132
ttcccgcatcaaaagccaccaaaat

SEQ ID NO: 119317 - DNA, 25 bp, Artificial
  probe
  misc_feature (1)..(25): SEQ ID NO: 6638; WAN024CHW_at; Start 39; Stop 63
gaaactcatcaggagtcttggcccg

SEQ ID NO: 119318 - DNA, 25 bp, Artificial
  probe
  misc_feature (1)..(25): SEQ ID NO: 6638; WAN024CHW_at; Start 185; Stop 209
taaatcgcattggtatgcaaaccag

SEQ ID NO: 119319 - DNA, 25 bp, Artificial
  probe
  misc_feature (1)..(25): SEQ ID NO: 6638; WAN024CHW_at; Start 80; Stop 104
gcatacatctctgtccggaaggtcg

SEQ ID NO: 119320 - DNA, 25 bp, Artificial
  probe
  misc_feature (1)..(25): SEQ ID NO: 6638; WAN024CHW_at; Start 63; Stop 87
gaccacccttatagtccgcatacat

SEQ ID NO: 119321 - DNA, 25 bp, Artificial
  probe
  misc_feature (1)..(25): SEQ ID NO: 6638; WAN024CHW_at; Start 91; Stop 115
tgtccggaaggtcgtctttcccgca

SEQ ID NO: 119322 - DNA, 25 bp, Artificial
  probe
  misc_feature (1)..(25): SEQ ID NO: 6638; WAN024CHW_at; Start 27; Stop 51
gaaattgctcacgaaactcatcagg

SEQ ID NO: 119323 - DNA, 25 bp, Artificial
  probe
  misc_feature (1)..(25): SEQ ID NO: 6638; WAN024CHW_at; Start 264; Stop 288
ctacagaagacccatcaatcaataa

SEQ ID NO: 119324 - DNA, 25 bp, Artificial
  probe
  misc_feature (1)..(25): SEQ ID NO: 6638; WAN024CHW_at; Start 6; Stop 30
ccagcaactcacgaatgaaaggaaa

SEQ ID NO: 119325 - DNA, 25 bp, Artificial
  probe
  misc_feature (1)..(25): SEQ ID NO: 6638; WAN024CHW_at; Start 207; Stop 231
cagccgcattcttaaaacggtccaa

SEQ ID NO: 119326 - DNA, 25 bp, Artificial
  probe
  misc_feature (1)..(25): SEQ ID NO: 6638; WAN024CHW_at; Start 52; Stop 76
agtcttggcccgaccacccttatag

SEQ ID NO: 119327 - DNA, 25 bp, Artificial
  probe
  misc_feature (1)..(25): SEQ ID NO: 2081; WAN024CHX_at; Start 43; Stop 67
ggtcaccccagggatattatccgac

SEQ ID NO: 119328 - DNA, 25 bp, Artificial
  probe
  misc_feature (1)..(25): SEQ ID NO: 2081; WAN024CHX_at; Start 57; Stop 81
tattatccgacttatcacccatgag

SEQ ID NO: 119329 - DNA, 25 bp, Artificial
  probe
  misc_feature (1)..(25): SEQ ID NO: 2081; WAN024CHX_at; Start 35; Stop 59
ccgactttggtcaccccagggatat

SEQ ID NO: 119330 - DNA, 25 bp, Artificial
  probe
  misc_feature (1)..(25): SEQ ID NO: 2081; WAN024CHX_at; Start 213; Stop 237
tcaaatccttgtccccactgacaat

SEQ ID NO: 119331 - DNA, 25 bp, Artificial
  probe
  misc_feature (1)..(25): SEQ ID NO: 2081; WAN024CHX_at; Start 78; Stop 102
tgagcgccttgagatcgataaactg

SEQ ID NO: 119332 - DNA, 25 bp, Artificial
  probe
  misc_feature (1)..(25): SEQ ID NO: 2081; WAN024CHX_at; Start 99; Stop 123
actgagctggtgtgaggcccatttc

SEQ ID NO: 119333 - DNA, 25 bp, Artificial
  probe
  misc_feature (1)..(25): SEQ ID NO: 2081; WAN024CHX_at; Start 112; Stop 136
gaggcccatttcttccatgaggtaa

SEQ ID NO: 119334 - DNA, 25 bp, Artificial
  probe
  misc_feature (1)..(25): SEQ ID NO: 2081; WAN024CHX_at; Start 74; Stop 98
cccatgagcgccttgagatcgataa

SEQ ID NO: 119335 - DNA, 25 bp, Artificial
  probe
  misc_feature (1)..(25): SEQ ID NO: 2081; WAN024CHX_at; Start 200; Stop 224
tccgtcagctgaatcaaatccttgt

SEQ ID NO: 119336 - DNA, 25 bp, Artificial
  probe
  misc_feature (1)..(25): SEQ ID NO: 2081; WAN024CHX_at; Start 60; Stop 84
tatccgacttatcacccatgagcgc

SEQ ID NO: 119337 - DNA, 25 bp, Artificial
  probe
  misc_feature (1)..(25): SEQ ID NO: 2081; WAN024CHX_at; Start 118; Stop 142
catttcttccatgaggtaatctggc

SEQ ID NO: 119338 - DNA, 25 bp, Artificial
  probe
  misc_feature (1)..(25): SEQ ID NO: 2081; WAN024CHX_at; Start 139; Stop 163
tggcgtaaaggcctcaaactcagcc

SEQ ID NO: 119339 - DNA, 25 bp, Artificial
  probe
  misc_feature (1)..(25): SEQ ID NO: 2081; WAN024CHX_at; Start 153; Stop 177
caaactcagccacacctttcttgga

SEQ ID NO: 119340 - DNA, 25 bp, Artificial
  probe
  misc_feature (1)..(25): SEQ ID NO: 2081; WAN024CHX_at; Start 65; Stop 89
gacttatcacccatgagcgccttga

SEQ ID NO: 119341 - DNA, 25 bp, Artificial
  probe
  misc_feature (1)..(25): SEQ ID NO: 2081; WAN024CHX_at; Start 192; Stop 216
tatgctcatccgtcagctgaatcaa

SEQ ID NO: 119342 - DNA, 25 bp, Artificial
  probe
  misc_feature (1)..(25): SEQ ID NO: 2081; WAN024CHX_at; Start 175; Stop 199
ggaaatttcaaccaccgtatgctca

SEQ ID NO: 119343 - DNA, 25 bp, Artificial
  probe
  misc_feature (1)..(25): SEQ ID NO: 2081; WAN024CHX_at; Start 188; Stop 212
accgtatgctcatccgtcagctgaa

SEQ ID NO: 119344 - DNA, 25 bp, Artificial
  probe
  misc_feature (1)..(25): SEQ ID NO: 2081; WAN024CHX_at; Start 161; Stop 185
gccacacctttcttggaaatttcaa

SEQ ID NO: 119345 - DNA, 25 bp, Artificial
  probe
  misc_feature (1)..(25): SEQ ID NO: 2081; WAN024CHX_at; Start 132; Stop 156
ggtaatctggcgtaaaggcctcaaa

SEQ ID NO: 119346 - DNA, 25 bp, Artificial
  probe
  misc_feature (1)..(25): SEQ ID NO: 2081; WAN024CHX_at; Start 239; Stop 263
gtaatatcaaaaccatcctgctctg

SEQ ID NO: 119347 - DNA, 25 bp, Artificial
  probe
  misc_feature (1)..(25): SEQ ID NO: 2081; WAN024CHX_at; Start 143; Stop 167
gtaaaggcctcaaactcagccacac

SEQ ID NO: 119348 - DNA, 25 bp, Artificial
  probe
  misc_feature (1)..(25): SEQ ID NO: 2081; WAN024CHX_at; Start 69; Stop 93
tatcacccatgagcgccttgagatc

SEQ ID NO: 119349 - DNA, 25 bp, Artificial
  probe
  misc_feature (1)..(25): SEQ ID NO: 2081; WAN024CHX_at; Start 2; Stop 26
tgctccagcaagagcttaatacccg

SEQ ID NO: 119350 - DNA, 25 bp, Artificial
  probe
  misc_feature (1)..(25): SEQ ID NO: 2081; WAN024CHX_at; Start 10; Stop 34
caagagcttaatacccgtcttttca

SEQ ID NO: 119351 - DNA, 25 bp, Artificial
  probe
  misc_feature (1)..(25): SEQ ID NO: 2081; WAN024CHX_at; Start 94; Stop 118
gataaactgagctggtgtgaggccc

SEQ ID NO: 119352 - DNA, 25 bp, Artificial
  probe
  misc_feature (1)..(25): SEQ ID NO: 2081; WAN024CHX_at; Start 209; Stop 233
tgaatcaaatccttgtccccactga

SEQ ID NO: 119353 - DNA, 25 bp, Artificial
  probe
  misc_feature (1)..(25): SEQ ID NO: 2081; WAN024CHX_at; Start 243; Stop 267
tatcaaaaccatcctgctctgctag

SEQ ID NO: 119354 - DNA, 25 bp, Artificial
  probe
  misc_feature (1)..(25): SEQ ID NO: 2081; WAN024CHX_at; Start 96; Stop 120
taaactgagctggtgtgaggcccat

SEQ ID NO: 119355 - DNA, 25 bp, Artificial
  probe
  misc_feature (1)..(25): SEQ ID NO: 2081; WAN024CHX_at; Start 107; Stop 131
ggtgtgaggcccatttcttccatga

SEQ ID NO: 119356 - DNA, 25 bp, Artificial
  probe
  misc_feature (1)..(25): SEQ ID NO: 2081; WAN024CHX_at; Start 180; Stop 204
tttcaaccaccgtatgctcatccgt

SEQ ID NO: 119357 - DNA, 25 bp, Artificial
  probe
  misc_feature (1)..(25): SEQ ID NO: 2081; WAN024CHX_at; Start 5; Stop 29
tccagcaagagcttaatacccgtct

SEQ ID NO: 119358 - DNA, 25 bp, Artificial
  probe
  misc_feature (1)..(25): SEQ ID NO: 2081; WAN024CHX_at; Start 87; Stop 111
tgagatcgataaactgagctggtgt

SEQ ID NO: 119359 - DNA, 25 bp, Artificial
  probe
  misc_feature (1)..(25): SEQ ID NO: 2081; WAN024CHX_at; Start 127; Stop 151
catgaggtaatctggcgtaaaggcc

SEQ ID NO: 119360 - DNA, 25 bp, Artificial
  probe
  misc_feature (1)..(25): SEQ ID NO: 2081; WAN024CHX_at; Start 83; Stop 107
gccttgagatcgataaactgagctg

SEQ ID NO: 119361 - DNA, 25 bp, Artificial
  probe
  misc_feature (1)..(25): SEQ ID NO: 4300; WAN024CHY_at; Start 124; Stop 148
cacagtcgaaaggaggtatttagcc

SEQ ID NO: 119362 - DNA, 25 bp, Artificial
  probe
  misc_feature (1)..(25): SEQ ID NO: 4300; WAN024CHY_at; Start 216; Stop 240
taaagtcataaactctcagagatgt

SEQ ID NO: 119363 - DNA, 25 bp, Artificial
  probe
  misc_feature (1)..(25): SEQ ID NO: 4300; WAN024CHY_at; Start 91; Stop 115
aagactagcgatggtcgcaatttca

SEQ ID NO: 119364 - DNA, 25 bp, Artificial
  probe
  misc_feature (1)..(25): SEQ ID NO: 4300; WAN024CHY_at; Start 7; Stop 31
caagaatttctcacgttcaggaatg

SEQ ID NO: 119365 - DNA, 25 bp, Artificial
  probe
  misc_feature (1)..(25): SEQ ID NO: 4300; WAN024CHY_at; Start 96; Stop 120
tagcgatggtcgcaatttcattgtc

SEQ ID NO: 119366 - DNA, 25 bp, Artificial
  probe
  misc_feature (1)..(25): SEQ ID NO: 4300; WAN024CHY_at; Start 148; Stop 172
caaacggatgtcaaaagcaggcgcc

SEQ ID NO: 119367 - DNA, 25 bp, Artificial
  probe
  misc_feature (1)..(25): SEQ ID NO: 4300; WAN024CHY_at; Start 17; Stop 41
tcacgttcaggaatggcctttttaa

SEQ ID NO: 119368 - DNA, 25 bp, Artificial
  probe
  misc_feature (1)..(25): SEQ ID NO: 4300; WAN024CHY_at; Start 44; Stop 68
cccttaccgtagaaagtttcatcat

SEQ ID NO: 119369 - DNA, 25 bp, Artificial
  probe
  misc_feature (1)..(25): SEQ ID NO: 4300; WAN024CHY_at; Start 69; Stop 93
caaccaagtaagtctgaccataaag

SEQ ID NO: 119370 - DNA, 25 bp, Artificial
  probe
  misc_feature (1)..(25): SEQ ID NO: 4300; WAN024CHY_at; Start 117; Stop 141
tgtcctccacagtcgaaaggaggta

SEQ ID NO: 119371 - DNA, 25 bp, Artificial
  probe
  misc_feature (1)..(25): SEQ ID NO: 4300; WAN024CHY_at; Start 225; Stop 249
aaactctcagagatgttttttctaa

SEQ ID NO: 119372 - DNA, 25 bp, Artificial
  probe
  misc_feature (1)..(25): SEQ ID NO: 4300; WAN024CHY_at; Start 136; Stop 160
gaggtatttagccaaacggatgtca

SEQ ID NO: 119373 - DNA, 25 bp, Artificial
  probe
  misc_feature (1)..(25): SEQ ID NO: 4300; WAN024CHY_at; Start 55; Stop 79
gaaagtttcatcatcaaccaagtaa

SEQ ID NO: 119374 - DNA, 25 bp, Artificial
  probe
  misc_feature (1)..(25): SEQ ID NO: 4300; WAN024CHY_at; Start 2; Stop 26
tgttccaagaatttctcacgttcag

SEQ ID NO: 119375 - DNA, 25 bp, Artificial
  probe
  misc_feature (1)..(25): SEQ ID NO: 4300; WAN024CHY_at; Start 138; Stop 162
ggtatttagccaaacggatgtcaaa

SEQ ID NO: 119376 - DNA, 25 bp, Artificial
  probe
  misc_feature (1)..(25): SEQ ID NO: 4300; WAN024CHY_at; Start 10; Stop 34
gaatttctcacgttcaggaatggcc

SEQ ID NO: 119377 - DNA, 25 bp, Artificial
  probe
  misc_feature (1)..(25): SEQ ID NO: 4300; WAN024CHY_at; Start 77; Stop 101
taagtctgaccataaagactagcga

SEQ ID NO: 119378 - DNA, 25 bp, Artificial
  probe
  misc_feature (1)..(25): SEQ ID NO: 4300; WAN024CHY_at; Start 154; Stop 178
gatgtcaaaagcaggcgcctgcaaa

SEQ ID NO: 119379 - DNA, 25 bp, Artificial
  probe
  misc_feature (1)..(25): SEQ ID NO: 4300; WAN024CHY_at; Start 80; Stop 104
gtctgaccataaagactagcgatgg

SEQ ID NO: 119380 - DNA, 25 bp, Artificial
  probe
  misc_feature (1)..(25): SEQ ID NO: 4300; WAN024CHY_at; Start 60; Stop 84
tttcatcatcaaccaagtaagtctg

SEQ ID NO: 119381 - DNA, 25 bp, Artificial
  probe
  misc_feature (1)..(25): SEQ ID NO: 4300; WAN024CHY_at; Start 100; Stop 124
gatggtcgcaatttcattgtcctcc

SEQ ID NO: 119382 - DNA, 25 bp, Artificial
  probe
  misc_feature (1)..(25): SEQ ID NO: 4300; WAN024CHY_at; Start 114; Stop 138
cattgtcctccacagtcgaaaggag

SEQ ID NO: 119383 - DNA, 25 bp, Artificial
  probe
  misc_feature (1)..(25): SEQ ID NO: 4300; WAN024CHY_at; Start 86; Stop 110
ccataaagactagcgatggtcgcaa

SEQ ID NO: 119384 - DNA, 25 bp, Artificial
  probe
  misc_feature (1)..(25): SEQ ID NO: 4300; WAN024CHY_at; Start 122; Stop 146
tccacagtcgaaaggaggtatttag

SEQ ID NO: 119385 - DNA, 25 bp, Artificial
  probe
  misc_feature (1)..(25): SEQ ID NO: 4300; WAN024CHY_at; Start 126; Stop 150
cagtcgaaaggaggtatttagccaa

SEQ ID NO: 119386 - DNA, 25 bp, Artificial
  probe
  misc_feature (1)..(25): SEQ ID NO: 4300; WAN024CHY_at; Start 107; Stop 131
gcaatttcattgtcctccacagtcg

SEQ ID NO: 119387 - DNA, 25 bp, Artificial
  probe
  misc_feature (1)..(25): SEQ ID NO: 4300; WAN024CHY_at; Start 63; Stop 87
catcatcaaccaagtaagtctgacc

SEQ ID NO: 119388 - DNA, 25 bp, Artificial
  probe
  misc_feature (1)..(25): SEQ ID NO: 4300; WAN024CHY_at; Start 210; Stop 234
ccttcttaaagtcataaactctcag

SEQ ID NO: 119389 - DNA, 25 bp, Artificial
  probe
  misc_feature (1)..(25): SEQ ID NO: 4300; WAN024CHY_at; Start 144; Stop 168
tagccaaacggatgtcaaaagcagg

SEQ ID NO: 119390 - DNA, 25 bp, Artificial
  probe
  misc_feature (1)..(25): SEQ ID NO: 4300; WAN024CHY_at; Start 112; Stop 136
ttcattgtcctccacagtcgaaagg

SEQ ID NO: 119391 - DNA, 25 bp, Artificial
  probe
  misc_feature (1)..(25): SEQ ID NO: 4300; WAN024CHY_at; Start 152; Stop 176
cggatgtcaaaagcaggcgcctgca

SEQ ID NO: 119392 - DNA, 25 bp, Artificial
  probe
  misc_feature (1)..(25): SEQ ID NO: 4300; WAN024CHY_at; Start 52; Stop 76
gtagaaagtttcatcatcaaccaag

SEQ ID NO: 119393 - DNA, 25 bp, Artificial
  probe
  misc_feature (1)..(25): SEQ ID NO: 4300; WAN024CHY_at; Start 133; Stop 157
aaggaggtatttagccaaacggatg

SEQ ID NO: 119394 - DNA, 25 bp, Artificial
  probe
  misc_feature (1)..(25): SEQ ID NO: 4300; WAN024CHY_at; Start 13; Stop 37
tttctcacgttcaggaatggccttt

SEQ ID NO: 119395 - DNA, 25 bp, Artificial
  probe
  misc_feature (1)..(25): SEQ ID NO: 2650; WAN024CHZ_at; Start 738; Stop 762
tctcatcaatgacaaggaacaggcc

SEQ ID NO: 119396 - DNA, 25 bp, Artificial
  probe
  misc_feature (1)..(25): SEQ ID NO: 2650; WAN024CHZ_at; Start 1903; Stop 1927
ttgcaaaatattcctgcccgattgg

SEQ ID NO: 119397 - DNA, 25 bp, Artificial
  probe
  misc_feature (1)..(25): SEQ ID NO: 2650; WAN024CHZ_at; Start 240; Stop 264
gaccttccggacagagatgtatgcg

SEQ ID NO: 119398 - DNA, 25 bp, Artificial
  probe
  misc_feature (1)..(25): SEQ ID NO: 2650; WAN024CHZ_at; Start 1090; Stop 1114
gagctgttgcaagacccgattttca

SEQ ID NO: 119399 - DNA, 25 bp, Artificial
  probe
  misc_feature (1)..(25): SEQ ID NO: 2650; WAN024CHZ_at; Start 2327; Stop 2351
tagagaccctctttaagcgtcgccg

SEQ ID NO: 119400 - DNA, 25 bp, Artificial
  probe
  misc_feature (1)..(25): SEQ ID NO: 2650; WAN024CHZ_at; Start 2609; Stop 2633
aactcagtgttcctcttatcgcaga

SEQ ID NO: 119401 - DNA, 25 bp, Artificial
  probe
  misc_feature (1)..(25): SEQ ID NO: 2650; WAN024CHZ_at; Start 593; Stop 617
cgctcatgggtgataagtcggataa

SEQ ID NO: 119402 - DNA, 25 bp, Artificial
  probe
  misc_feature (1)..(25): SEQ ID NO: 2650; WAN024CHZ_at; Start 103; Stop 127
tatcagcagttggaccgttttaaga

SEQ ID NO: 119403 - DNA, 25 bp, Artificial
  probe
  misc_feature (1)..(25): SEQ ID NO: 2650; WAN024CHZ_at; Start 1227; Stop 1251
taaatacctcctttcgactgtggag

SEQ ID NO: 119404 - DNA, 25 bp, Artificial
  probe
  misc_feature (1)..(25): SEQ ID NO: 2650; WAN024CHZ_at; Start 541; Stop 565
tacctcatggaagaaatgggcctca

SEQ ID NO: 119405 - DNA, 25 bp, Artificial
  probe
  misc_feature (1)..(25): SEQ ID NO: 2650; WAN024CHZ_at; Start 1527; Stop 1551
gaccttgcttgagatgcaggctgaa

SEQ ID NO: 119406 - DNA, 25 bp, Artificial
  probe
  misc_feature (1)..(25): SEQ ID NO: 2650; WAN024CHZ_at; Start 1858; Stop 1882
caggatttgacccagaccgggcgtt

SEQ ID NO: 119407 - DNA, 25 bp, Artificial
  probe
  misc_feature (1)..(25): SEQ ID NO: 2650; WAN024CHZ_at; Start 1068; Stop 1092
gctctatgccacagacaagcttgag

SEQ ID NO: 119408 - DNA, 25 bp, Artificial
  probe
  misc_feature (1)..(25): SEQ ID NO: 2650; WAN024CHZ_at; Start 1456; Stop 1480
tatgatatggagcaacctctggctt

SEQ ID NO: 119409 - DNA, 25 bp, Artificial
  probe
  misc_feature (1)..(25): SEQ ID NO: 2650; WAN024CHZ_at; Start 1688; Stop 1712
ccaagacaggttattcgacagcagt

SEQ ID NO: 119410 - DNA, 25 bp, Artificial
  probe
  misc_feature (1)..(25): SEQ ID NO: 2650; WAN024CHZ_at; Start 453; Stop 477
caaggatttgattcagctgacggat

SEQ ID NO: 119411 - DNA, 25 bp, Artificial
  probe
  misc_feature (1)..(25): SEQ ID NO: 2650; WAN024CHZ_at; Start 557; Stop 581
tgggcctcacaccagctcagtttat

SEQ ID NO: 119412 - DNA, 25 bp, Artificial
  probe
  misc_feature (1)..(25): SEQ ID NO: 2650; WAN024CHZ_at; Start 1197; Stop 1221
gcaggcgcctgcttttgacatccgt

SEQ ID NO: 119413 - DNA, 25 bp, Artificial
  probe
  misc_feature (1)..(25): SEQ ID NO: 2650; WAN024CHZ_at; Start 267; Stop 291
ctataagggtggtcgggccaagact

SEQ ID NO: 119414 - DNA, 25 bp, Artificial
  probe
  misc_feature (1)..(25): SEQ ID NO: 2650; WAN024CHZ_at; Start 2100; Stop 2124
ggtctttggcattgagcgtcctgat

SEQ ID NO: 119415 - DNA, 25 bp, Artificial
  probe
  misc_feature (1)..(25): SEQ ID NO: 2650; WAN024CHZ_at; Start 525; Stop 549
ggcctttacgccagattacctcatg

SEQ ID NO: 119416 - DNA, 25 bp, Artificial
  probe
  misc_feature (1)..(25): SEQ ID NO: 2650; WAN024CHZ_at; Start 2428; Stop 2452
cagggttcggcagcagatattctca

SEQ ID NO: 119417 - DNA, 25 bp, Artificial
  probe
  misc_feature (1)..(25): SEQ ID NO: 2650; WAN024CHZ_at; Start 223; Stop 247
tttgatgcgggaaagacgaccttcc

SEQ ID NO: 119418 - DNA, 25 bp, Artificial
  probe
  misc_feature (1)..(25): SEQ ID NO: 2650; WAN024CHZ_at; Start 1332; Stop 1356
taaaaaggccattcctgaacgtgag

SEQ ID NO: 119419 - DNA, 25 bp, Artificial
  probe
  misc_feature (1)..(25): SEQ ID NO: 2650; WAN024CHZ_at; Start 2034; Stop 2058
taaggatgagcacttgattaaggcc

SEQ ID NO: 119420 - DNA, 25 bp, Artificial
  probe
  misc_feature (1)..(25): SEQ ID NO: 2650; WAN024CHZ_at; Start 578; Stop 602
ttatcgatctcaaggcgctcatggg

SEQ ID NO: 119421 - DNA, 25 bp, Artificial
  probe
  misc_feature (1)..(25): SEQ ID NO: 2650; WAN024CHZ_at; Start 1418; Stop 1442
ttgaaaaactcagcgaaaatgggca

SEQ ID NO: 119422 - DNA, 25 bp, Artificial
  probe
  misc_feature (1)..(25): SEQ ID NO: 2650; WAN024CHZ_at; Start 1608; Stop 1632
gtttaatgtcaactcgcctaagcag

SEQ ID NO: 119423 - DNA, 25 bp, Artificial
  probe
  misc_feature (1)..(25): SEQ ID NO: 2650; WAN024CHZ_at; Start 1578; Stop 1602
tcaagagatttacgagctggctggt

SEQ ID NO: 119424 - DNA, 25 bp, Artificial
  probe
  misc_feature (1)..(25): SEQ ID NO: 2650; WAN024CHZ_at; Start 786; Stop 810
cattgataccaaggcaccgattgcg

SEQ ID NO: 119425 - DNA, 25 bp, Artificial
  probe
  misc_feature (1)..(25): SEQ ID NO: 2650; WAN024CHZ_at; Start 390; Stop 414
cattgggacgctggataagctagca

SEQ ID NO: 119426 - DNA, 25 bp, Artificial
  probe
  misc_feature (1)..(25): SEQ ID NO: 2650; WAN024CHZ_at; Start 2352; Stop 2376
tgagttgccagatatcaattcgcgc

SEQ ID NO: 119427 - DNA, 25 bp, Artificial
  probe
  misc_feature (1)..(25): SEQ ID NO: 2650; WAN024CHZ_at; Start 2535; Stop 2559
cgtccttgaagtgcctaaatctgaa

SEQ ID NO: 119428 - DNA, 25 bp, Artificial
  probe
  misc_feature (1)..(25): SEQ ID NO: 2650; WAN024CHZ_at; Start 1875; Stop 1899
cgggcgtttgtctagtgtggatcca

SEQ ID NO: 119429 - DNA, 25 bp, Artificial
  probe
  misc_feature (1)..(25): SEQ ID NO: 5207; WAN024CI2_at; Start 46; Stop 70
agcaaacaaaaaggctggactaata

SEQ ID NO: 119430 - DNA, 25 bp, Artificial
  probe
  misc_feature (1)..(25): SEQ ID NO: 5207; WAN024CI2_at; Start 60; Stop 84
ctggactaatacgaaaaaagctagt

SEQ ID NO: 119431 - DNA, 25 bp, Artificial
  probe
  misc_feature (1)..(25): SEQ ID NO: 5207; WAN024CI2_at; Start 20; Stop 44
tctacagctccatgcctactactaa

SEQ ID NO: 119432 - DNA, 25 bp, Artificial
  probe
  misc_feature (1)..(25): SEQ ID NO: 5207; WAN024CI2_at; Start 48; Stop 72
caaacaaaaaggctggactaatacg

SEQ ID NO: 119433 - DNA, 25 bp, Artificial
  probe
  misc_feature (1)..(25): SEQ ID NO: 5207; WAN024CI2_at; Start 58; Stop 82
ggctggactaatacgaaaaaagcta

SEQ ID NO: 119434 - DNA, 25 bp, Artificial
  probe
  misc_feature (1)..(25): SEQ ID NO: 5207; WAN024CI2_at; Start 45; Stop 69
aagcaaacaaaaaggctggactaat

SEQ ID NO: 119435 - DNA, 25 bp, Artificial
  probe
  misc_feature (1)..(25): SEQ ID NO: 5207; WAN024CI2_at; Start 59; Stop 83
gctggactaatacgaaaaaagctag

SEQ ID NO: 119436 - DNA, 25 bp, Artificial
  probe
  misc_feature (1)..(25): SEQ ID NO: 5207; WAN024CI2_at; Start 25; Stop 49
agctccatgcctactactaaaagca

SEQ ID NO: 119437 - DNA, 25 bp, Artificial
  probe
  misc_feature (1)..(25): SEQ ID NO: 5207; WAN024CI2_at; Start 26; Stop 50
gctccatgcctactactaaaagcaa

SEQ ID NO: 119438 - DNA, 25 bp, Artificial
  probe
  misc_feature (1)..(25): SEQ ID NO: 5207; WAN024CI2_at; Start 30; Stop 54
catgcctactactaaaagcaaacaa

SEQ ID NO: 119439 - DNA, 25 bp, Artificial
  probe
  misc_feature (1)..(25): SEQ ID NO: 5207; WAN024CI2_at; Start 27; Stop 51
ctccatgcctactactaaaagcaaa

SEQ ID NO: 119440 - DNA, 25 bp, Artificial
  probe
  misc_feature (1)..(25): SEQ ID NO: 5207; WAN024CI2_at; Start 11; Stop 35
tgagttctatctacagctccatgcc

SEQ ID NO: 119441 - DNA, 25 bp, Artificial
  probe
  misc_feature (1)..(25): SEQ ID NO: 5207; WAN024CI2_at; Start 57; Stop 81
aggctggactaatacgaaaaaagct

SEQ ID NO: 119442 - DNA, 25 bp, Artificial
  probe
  misc_feature (1)..(25): SEQ ID NO: 5207; WAN024CI2_at; Start 13; Stop 37
agttctatctacagctccatgccta

SEQ ID NO: 119443 - DNA, 25 bp, Artificial
  probe
  misc_feature (1)..(25): SEQ ID NO: 5207; WAN024CI2_at; Start 18; Stop 42
tatctacagctccatgcctactact

SEQ ID NO: 119444 - DNA, 25 bp, Artificial
  probe
  misc_feature (1)..(25): SEQ ID NO: 5207; WAN024CI2_at; Start 38; Stop 62
ctactaaaagcaaacaaaaaggctg

SEQ ID NO: 119445 - DNA, 25 bp, Artificial
  probe
  misc_feature (1)..(25): SEQ ID NO: 5207; WAN024CI2_at; Start 61; Stop 85
tggactaatacgaaaaaagctagta

SEQ ID NO: 119446 - DNA, 25 bp, Artificial
  probe
  misc_feature (1)..(25): SEQ ID NO: 5207; WAN024CI2_at; Start 23; Stop 47
acagctccatgcctactactaaaag

SEQ ID NO: 119447 - DNA, 25 bp, Artificial
  probe
  misc_feature (1)..(25): SEQ ID NO: 5207; WAN024CI2_at; Start 7; Stop 31
aacttgagttctatctacagctcca

SEQ ID NO: 119448 - DNA, 25 bp, Artificial
  probe
  misc_feature (1)..(25): SEQ ID NO: 5207; WAN024CI2_at; Start 3; Stop 27
gatgaacttgagttctatctacagc

SEQ ID NO: 119449 - DNA, 25 bp, Artificial
  probe
  misc_feature (1)..(25): SEQ ID NO: 5207; WAN024CI2_at; Start 5; Stop 29
tgaacttgagttctatctacagctc

SEQ ID NO: 119450 - DNA, 25 bp, Artificial
  probe
  misc_feature (1)..(25): SEQ ID NO: 5207; WAN024CI2_at; Start 24; Stop 48
cagctccatgcctactactaaaagc

SEQ ID NO: 119451 - DNA, 25 bp, Artificial
  probe
  misc_feature (1)..(25): SEQ ID NO: 5207; WAN024CI2_at; Start 6; Stop 30
gaacttgagttctatctacagctcc

SEQ ID NO: 119452 - DNA, 25 bp, Artificial
  probe
  misc_feature (1)..(25): SEQ ID NO: 5207; WAN024CI2_at; Start 16; Stop 40
tctatctacagctccatgcctacta

SEQ ID NO: 119453 - DNA, 25 bp, Artificial
  probe
  misc_feature (1)..(25): SEQ ID NO: 5207; WAN024CI2_at; Start 69; Stop 93
tacgaaaaaagctagtaatactcaa

SEQ ID NO: 119454 - DNA, 25 bp, Artificial
  probe
  misc_feature (1)..(25): SEQ ID NO: 5207; WAN024CI2_at; Start 15; Stop 39
ttctatctacagctccatgcctact

SEQ ID NO: 119455 - DNA, 25 bp, Artificial
  probe
  misc_feature (1)..(25): SEQ ID NO: 5207; WAN024CI2_at; Start 29; Stop 53
ccatgcctactactaaaagcaaaca

SEQ ID NO: 119456 - DNA, 25 bp, Artificial
  probe
  misc_feature (1)..(25): SEQ ID NO: 5207; WAN024CI2_at; Start 19; Stop 43
atctacagctccatgcctactacta

SEQ ID NO: 119457 - DNA, 25 bp, Artificial
  probe
  misc_feature (1)..(25): SEQ ID NO: 5207; WAN024CI2_at; Start 8; Stop 32
acttgagttctatctacagctccat

SEQ ID NO: 119458 - DNA, 25 bp, Artificial
  probe
  misc_feature (1)..(25): SEQ ID NO: 5207; WAN024CI2_at; Start 32; Stop 56
tgcctactactaaaagcaaacaaaa

SEQ ID NO: 119459 - DNA, 25 bp, Artificial
  probe
  misc_feature (1)..(25): SEQ ID NO: 5207; WAN024CI2_at; Start 28; Stop 52
tccatgcctactactaaaagcaaac

SEQ ID NO: 119460 - DNA, 25 bp, Artificial
  probe
  misc_feature (1)..(25): SEQ ID NO: 5207; WAN024CI2_at; Start 12; Stop 36
gagttctatctacagctccatgcct

SEQ ID NO: 119461 - DNA, 25 bp, Artificial
  probe
  misc_feature (1)..(25): SEQ ID NO: 5207; WAN024CI2_at; Start 10; Stop 34
ttgagttctatctacagctccatgc

SEQ ID NO: 119462 - DNA, 25 bp, Artificial
  probe
  misc_feature (1)..(25): SEQ ID NO: 5207; WAN024CI2_at; Start 9; Stop 33
cttgagttctatctacagctccatg

SEQ ID NO: 119463 - DNA, 25 bp, Artificial
  probe
  misc_feature (1)..(25): SEQ ID NO: 2671; WAN024CI3_at; Start 180; Stop 204
gattagctttaatccagccgattgg

SEQ ID NO: 119464 - DNA, 25 bp, Artificial
  probe
  misc_feature (1)..(25): SEQ ID NO: 2671; WAN024CI3_at; Start 532; Stop 556
gaagaattagttgaagctgctgtca

SEQ ID NO: 119465 - DNA, 25 bp, Artificial
  probe
  misc_feature (1)..(25): SEQ ID NO: 2671; WAN024CI3_at; Start 491; Stop 515
ggaatattattcttgctagggccta

SEQ ID NO: 119466 - DNA, 25 bp, Artificial
  probe
  misc_feature (1)..(25): SEQ ID NO: 2671; WAN024CI3_at; Start 269; Stop 293
tactatactcttttggatttgcagc

SEQ ID NO: 119467 - DNA, 25 bp, Artificial
  probe
  misc_feature (1)..(25): SEQ ID NO: 2671; WAN024CI3_at; Start 407; Stop 431
tagtcccaacttacttgctcgtaaa

SEQ ID NO: 119468 - DNA, 25 bp, Artificial
  probe
  misc_feature (1)..(25): SEQ ID NO: 2671; WAN024CI3_at; Start 896; Stop 920
tggctggttcacttaaaggactaac

SEQ ID NO: 119469 - DNA, 25 bp, Artificial
  probe
  misc_feature (1)..(25): SEQ ID NO: 2671; WAN024CI3_at; Start 682; Stop 706
tatatcaaggatccaaacttggaac

SEQ ID NO: 119470 - DNA, 25 bp, Artificial
  probe
  misc_feature (1)..(25): SEQ ID NO: 2671; WAN024CI3_at; Start 437; Stop 461
tgggaatgctcaatactccatgggc

SEQ ID NO: 119471 - DNA, 25 bp, Artificial
  probe
  misc_feature (1)..(25): SEQ ID NO: 2671; WAN024CI3_at; Start 701; Stop 725
tggaaccattgcaacttgtacttcg

SEQ ID NO: 119472 - DNA, 25 bp, Artificial
  probe
  misc_feature (1)..(25): SEQ ID NO: 2671; WAN024CI3_at; Start 194; Stop 218
cagccgattggactgtagaaggtta

SEQ ID NO: 119473 - DNA, 25 bp, Artificial
  probe
  misc_feature (1)..(25): SEQ ID NO: 2671; WAN024CI3_at; Start 334; Stop 358
tctaagaaagacttggttggacgtc

SEQ ID NO: 119474 - DNA, 25 bp, Artificial
  probe
  misc_feature (1)..(25): SEQ ID NO: 2671; WAN024CI3_at; Start 787; Stop 811
gaaatgaaacgtttagctgaattga

SEQ ID NO: 119475 - DNA, 25 bp, Artificial
  probe
  misc_feature (1)..(25): SEQ ID NO: 2671; WAN024CI3_at; Start 639; Stop 663
tgcttttgtaggacagtggaactca

SEQ ID NO: 119476 - DNA, 25 bp, Artificial
  probe
  misc_feature (1)..(25): SEQ ID NO: 2671; WAN024CI3_at; Start 802; Stop 826
gctgaattgattaaatacgcaacta

SEQ ID NO: 119477 - DNA, 25 bp, Artificial
  probe
  misc_feature (1)..(25): SEQ ID NO: 2671; WAN024CI3_at; Start 347; Stop 371
tggttggacgtcgttggattaacta

SEQ ID NO: 119478 - DNA, 25 bp, Artificial
  probe
  misc_feature (1)..(25): SEQ ID NO: 2671; WAN024CI3_at; Start 597; Stop 621
gcttcctcttgcaaaaccaattatg

SEQ ID NO: 119479 - DNA, 25 bp, Artificial
  probe
  misc_feature (1)..(25): SEQ ID NO: 2671; WAN024CI3_at; Start 741; Stop 765
gagccaaccaggtcaagacatgatt

SEQ ID NO: 119480 - DNA, 25 bp, Artificial
  probe
  misc_feature (1)..(25): SEQ ID NO: 2671; WAN024CI3_at; Start 230; Stop 254
tcagtgaccaatctattctaagagg

SEQ ID NO: 119481 - DNA, 25 bp, Artificial
  probe
  misc_feature (1)..(25): SEQ ID NO: 2671; WAN024CI3_at; Start 165; Stop 189
tctggttagtagagggattagcttt

SEQ ID NO: 119482 - DNA, 25 bp, Artificial
  probe
  misc_feature (1)..(25): SEQ ID NO: 2671; WAN024CI3_at; Start 220; Stop 244
cagcgtgtattcagtgaccaatcta

SEQ ID NO: 119483 - DNA, 25 bp, Artificial
  probe
  misc_feature (1)..(25): SEQ ID NO: 2671; WAN024CI3_at; Start 505; Stop 529
gctagggcctatttccaaggattgc

SEQ ID NO: 119484 - DNA, 25 bp, Artificial
  probe
  misc_feature (1)..(25): SEQ ID NO: 2671; WAN024CI3_at; Start 519; Stop 543
ccaaggattgcctgaagaattagtt

SEQ ID NO: 119485 - DNA, 25 bp, Artificial
  probe
  misc_feature (1)..(25): SEQ ID NO: 2671; WAN024CI3_at; Start 883; Stop 907
gataaaggaattatggctggttcac

SEQ ID NO: 119486 - DNA, 25 bp, Artificial
  probe
  misc_feature (1)..(25): SEQ ID NO: 2671; WAN024CI3_at; Start 822; Stop 846
aactattgtcatttccagcttgcca

SEQ ID NO: 119487 - DNA, 25 bp, Artificial
  probe
  misc_feature (1)..(25): SEQ ID NO: 2671; WAN024CI3_at; Start 99; Stop 123
tatcgttttgatgactttgcttcct

SEQ ID NO: 119488 - DNA, 25 bp, Artificial
  probe
  misc_feature (1)..(25): SEQ ID NO: 2671; WAN024CI3_at; Start 130; Stop 154
tatatcgtcgtagcatcctttatgg

SEQ ID NO: 119489 - DNA, 25 bp, Artificial
  probe
  misc_feature (1)..(25): SEQ ID NO: 2671; WAN024CI3_at; Start 757; Stop 781
gacatgattggagcacaagcggcta

SEQ ID NO: 119490 - DNA, 25 bp, Artificial
  probe
  misc_feature (1)..(25): SEQ ID NO: 2671; WAN024CI3_at; Start 772; Stop 796
caagcggctatgaatgaaatgaaac

SEQ ID NO: 119491 - DNA, 25 bp, Artificial
  probe
  misc_feature (1)..(25): SEQ ID NO: 2671; WAN024CI3_at; Start 728; Stop 752
aaattctcattcagagccaaccagg

SEQ ID NO: 119492 - DNA, 25 bp, Artificial
  probe
  misc_feature (1)..(25): SEQ ID NO: 2671; WAN024CI3_at; Start 836; Stop 860
ccagcttgccattgattgttatgta

SEQ ID NO: 119493 - DNA, 25 bp, Artificial
  probe
  misc_feature (1)..(25): SEQ ID NO: 2671; WAN024CI3_at; Start 145; Stop 169
tcctttatggatcctaaggttctgg

SEQ ID NO: 119494 - DNA, 25 bp, Artificial
  probe
  misc_feature (1)..(25): SEQ ID NO: 2671; WAN024CI3_at; Start 652; Stop 676
cagtggaactcatactttgatgcaa

SEQ ID NO: 119495 - DNA, 25 bp, Artificial
  probe
  misc_feature (1)..(25): SEQ ID NO: 2671; WAN024CI3_at; Start 387; Stop 411
tatgttctttggtggtggtttagtc

SEQ ID NO: 119496 - DNA, 25 bp, Artificial
  probe
  misc_feature (1)..(25): SEQ ID NO: 2671; WAN024CI3_at; Start 423; Stop 447
gctcgtaaaagaattgggaatgctc

SEQ ID NO: 119497 - DNA, 25 bp, Artificial
  probe
  misc_feature (1)..(25): SEQ ID NO: 2759; WAN024CI4_at; Start 309; Stop 333
cgtgttcaagagcaatctcagcctc

SEQ ID NO: 119498 - DNA, 25 bp, Artificial
  probe
  misc_feature (1)..(25): SEQ ID NO: 2759; WAN024CI4_at; Start 248; Stop 272
ttatgcccacgaccaatgatttccc

SEQ ID NO: 119499 - DNA, 25 bp, Artificial
  probe
  misc_feature (1)..(25): SEQ ID NO: 2759; WAN024CI4_at; Start 230; Stop 254
tgtaattcctcacgcgcattatgcc

SEQ ID NO: 119500 - DNA, 25 bp, Artificial
  probe
  misc_feature (1)..(25): SEQ ID NO: 2759; WAN024CI4_at; Start 317; Stop 341
agagcaatctcagcctctctcaaag

SEQ ID NO: 119501 - DNA, 25 bp, Artificial
  probe
  misc_feature (1)..(25): SEQ ID NO: 2759; WAN024CI4_at; Start 350; Stop 374
ataaagacttctttttcttcaagcg

SEQ ID NO: 119502 - DNA, 25 bp, Artificial
  probe
  misc_feature (1)..(25): SEQ ID NO: 2759; WAN024CI4_at; Start 123; Stop 147
cacaaggttcaatggtcacaaaaag

SEQ ID NO: 119503 - DNA, 25 bp, Artificial
  probe
  misc_feature (1)..(25): SEQ ID NO: 2759; WAN024CI4_at; Start 265; Stop 289
gatttccccatctttgacaatcaca

SEQ ID NO: 119504 - DNA, 25 bp, Artificial
  probe
  misc_feature (1)..(25): SEQ ID NO: 2759; WAN024CI4_at; Start 224; Stop 248
gctcgctgtaattcctcacgcgcat

SEQ ID NO: 119505 - DNA, 25 bp, Artificial
  probe
  misc_feature (1)..(25): SEQ ID NO: 2759; WAN024CI4_at; Start 305; Stop 329
tcatcgtgttcaagagcaatctcag

SEQ ID NO: 119506 - DNA, 25 bp, Artificial
  probe
  misc_feature (1)..(25): SEQ ID NO: 2759; WAN024CI4_at; Start 45; Stop 69
cagcgccaaatttctggtttttagc

SEQ ID NO: 119507 - DNA, 25 bp, Artificial
  probe
  misc_feature (1)..(25): SEQ ID NO: 2759; WAN024CI4_at; Start 177; Stop 201
cactcaagttcgcatcctctatagc

SEQ ID NO: 119508 - DNA, 25 bp, Artificial
  probe
  misc_feature (1)..(25): SEQ ID NO: 2759; WAN024CI4_at; Start 181; Stop 205
caagttcgcatcctctatagccata

SEQ ID NO: 119509 - DNA, 25 bp, Artificial
  probe
  misc_feature (1)..(25): SEQ ID NO: 2759; WAN024CI4_at; Start 258; Stop 282
gaccaatgatttccccatctttgac

SEQ ID NO: 119510 - DNA, 25 bp, Artificial
  probe
  misc_feature (1)..(25): SEQ ID NO: 2759; WAN024CI4_at; Start 162; Stop 186
agcgccagctctcctcactcaagtt

SEQ ID NO: 119511 - DNA, 25 bp, Artificial
  probe
  misc_feature (1)..(25): SEQ ID NO: 2759; WAN024CI4_at; Start 141; Stop 165
caaaaagtgtgcaatccagcaagcg

SEQ ID NO: 119512 - DNA, 25 bp, Artificial
  probe
  misc_feature (1)..(25): SEQ ID NO: 2759; WAN024CI4_at; Start 243; Stop 267
gcgcattatgcccacgaccaatgat

SEQ ID NO: 119513 - DNA, 25 bp, Artificial
  probe
  misc_feature (1)..(25): SEQ ID NO: 2759; WAN024CI4_at; Start 188; Stop 212
gcatcctctatagccataatttccg

SEQ ID NO: 119514 - DNA, 25 bp, Artificial
  probe
  misc_feature (1)..(25): SEQ ID NO: 2759; WAN024CI4_at; Start 217; Stop 241
cataaccgctcgctgtaattcctca

SEQ ID NO: 119515 - DNA, 25 bp, Artificial
  probe
  misc_feature (1)..(25): SEQ ID NO: 2759; WAN024CI4_at; Start 204; Stop 228
taatttccgcatgcataaccgctcg

SEQ ID NO: 119516 - DNA, 25 bp, Artificial
  probe
  misc_feature (1)..(25): SEQ ID NO: 2759; WAN024CI4_at; Start 110; Stop 134
ccactacacatgacacaaggttcaa

SEQ ID NO: 119517 - DNA, 25 bp, Artificial
  probe
  misc_feature (1)..(25): SEQ ID NO: 2759; WAN024CI4_at; Start 298; Stop 322
tggaatttcatcgtgttcaagagca

SEQ ID NO: 119518 - DNA, 25 bp, Artificial
  probe
  misc_feature (1)..(25): SEQ ID NO: 2759; WAN024CI4_at; Start 63; Stop 87
ttttagccccatagaccacatttgg

SEQ ID NO: 119519 - DNA, 25 bp, Artificial
  probe
  misc_feature (1)..(25): SEQ ID NO: 2759; WAN024CI4_at; Start 336; Stop 360
tcaaagcctccctcataaagacttc

SEQ ID NO: 119520 - DNA, 25 bp, Artificial
  probe
  misc_feature (1)..(25): SEQ ID NO: 2759; WAN024CI4_at; Start 210; Stop 234
ccgcatgcataaccgctcgctgtaa

SEQ ID NO: 119521 - DNA, 25 bp, Artificial
  probe
  misc_feature (1)..(25): SEQ ID NO: 2759; WAN024CI4_at; Start 118; Stop 142
catgacacaaggttcaatggtcaca

SEQ ID NO: 119522 - DNA, 25 bp, Artificial
  probe
  misc_feature (1)..(25): SEQ ID NO: 2759; WAN024CI4_at; Start 277; Stop 301
tttgacaatcacacaaccaattgga

SEQ ID NO: 119523 - DNA, 25 bp, Artificial
  probe
  misc_feature (1)..(25): SEQ ID NO: 2759; WAN024CI4_at; Start 145; Stop 169
aagtgtgcaatccagcaagcgccag

SEQ ID NO: 119524 - DNA, 25 bp, Artificial
  probe
  misc_feature (1)..(25): SEQ ID NO: 2759; WAN024CI4_at; Start 66; Stop 90
tagccccatagaccacatttggaat

SEQ ID NO: 119525 - DNA, 25 bp, Artificial
  probe
  misc_feature (1)..(25): SEQ ID NO: 2759; WAN024CI4_at; Start 355; Stop 379
gacttctttttcttcaagcgtataa

SEQ ID NO: 119526 - DNA, 25 bp, Artificial
  probe
  misc_feature (1)..(25): SEQ ID NO: 2759; WAN024CI4_at; Start 288; Stop 312
cacaaccaattggaatttcatcgtg

SEQ ID NO: 119527 - DNA, 25 bp, Artificial
  probe
  misc_feature (1)..(25): SEQ ID NO: 2759; WAN024CI4_at; Start 149; Stop 173
gtgcaatccagcaagcgccagctct

SEQ ID NO: 119528 - DNA, 25 bp, Artificial
  probe
  misc_feature (1)..(25): SEQ ID NO: 2759; WAN024CI4_at; Start 128; Stop 152
ggttcaatggtcacaaaaagtgtgc

SEQ ID NO: 119529 - DNA, 25 bp, Artificial
  probe
  misc_feature (1)..(25): SEQ ID NO: 2759; WAN024CI4_at; Start 194; Stop 218
tctatagccataatttccgcatgca

SEQ ID NO: 119530 - DNA, 25 bp, Artificial
  probe
  misc_feature (1)..(25): SEQ ID NO: 2759; WAN024CI4_at; Start 41; Stop 65
ccagcagcgccaaatttctggtttt

SEQ ID NO: 119531 - DNA, 25 bp, Artificial
  probe
  misc_feature (1)..(25): SEQ ID NO: 2806; WAN024CI5_at; Start 29; Stop 53
tctttatgagggaggctttgagaga

SEQ ID NO: 119532 - DNA, 25 bp, Artificial
  probe
  misc_feature (1)..(25): SEQ ID NO: 2806; WAN024CI5_at; Start 21; Stop 45
aaaagaagtctttatgagggaggct

SEQ ID NO: 119533 - DNA, 25 bp, Artificial
  probe
  misc_feature (1)..(25): SEQ ID NO: 2806; WAN024CI5_at; Start 186; Stop 210
tatagaggatgcgaacttgagtgag

SEQ ID NO: 119534 - DNA, 25 bp, Artificial
  probe
  misc_feature (1)..(25): SEQ ID NO: 2806; WAN024CI5_at; Start 316; Stop 340
gctaaaaaccagaaatttggcgctg

SEQ ID NO: 119535 - DNA, 25 bp, Artificial
  probe
  misc_feature (1)..(25): SEQ ID NO: 2806; WAN024CI5_at; Start 57; Stop 81
tgagattgctcttgaacacgatgaa

SEQ ID NO: 119536 - DNA, 25 bp, Artificial
  probe
  misc_feature (1)..(25): SEQ ID NO: 2806; WAN024CI5_at; Start 68; Stop 92
ttgaacacgatgaaattccaattgg

SEQ ID NO: 119537 - DNA, 25 bp, Artificial
  probe
  misc_feature (1)..(25): SEQ ID NO: 2806; WAN024CI5_at; Start 148; Stop 172
gaattacagcgagcggttatgcatg

SEQ ID NO: 119538 - DNA, 25 bp, Artificial
  probe
  misc_feature (1)..(25): SEQ ID NO: 2806; WAN024CI5_at; Start 218; Stop 242
ggcgcttgctggattgcacactttt

SEQ ID NO: 119539 - DNA, 25 bp, Artificial
  probe
  misc_feature (1)..(25): SEQ ID NO: 2806; WAN024CI5_at; Start 64; Stop 88
gctcttgaacacgatgaaattccaa

SEQ ID NO: 119540 - DNA, 25 bp, Artificial
  probe
  misc_feature (1)..(25): SEQ ID NO: 2806; WAN024CI5_at; Start 152; Stop 176
tacagcgagcggttatgcatgcgga

SEQ ID NO: 119541 - DNA, 25 bp, Artificial
  probe
  misc_feature (1)..(25): SEQ ID NO: 2806; WAN024CI5_at; Start 113; Stop 137
gggaaatcattggtcgtgggcataa

SEQ ID NO: 119542 - DNA, 25 bp, Artificial
  probe
  misc_feature (1)..(25): SEQ ID NO: 2806; WAN024CI5_at; Start 225; Stop 249
gctggattgcacactttttgtgacc

SEQ ID NO: 119543 - DNA, 25 bp, Artificial
  probe
  misc_feature (1)..(25): SEQ ID NO: 2806; WAN024CI5_at; Start 25; Stop 49
gaagtctttatgagggaggctttga

SEQ ID NO: 119544 - DNA, 25 bp, Artificial
  probe
  misc_feature (1)..(25): SEQ ID NO: 2806; WAN024CI5_at; Start 7; Stop 31
tatacgcttgaagaaaaagaagtct

SEQ ID NO: 119545 - DNA, 25 bp, Artificial
  probe
  misc_feature (1)..(25): SEQ ID NO: 2806; WAN024CI5_at; Start 251; Stop 275
ttgaaccttgtgtcatgtgtagtgg

SEQ ID NO: 119546 - DNA, 25 bp, Artificial
  probe
  misc_feature (1)..(25): SEQ ID NO: 2806; WAN024CI5_at; Start 135; Stop 159
taatgcgcgtgaggaattacagcga

SEQ ID NO: 119547 - DNA, 25 bp, Artificial
  probe
  misc_feature (1)..(25): SEQ ID NO: 2806; WAN024CI5_at; Start 118; Stop 142
atcattggtcgtgggcataatgcgc

SEQ ID NO: 119548 - DNA, 25 bp, Artificial
  probe
  misc_feature (1)..(25): SEQ ID NO: 2806; WAN024CI5_at; Start 182; Stop 206
tggctatagaggatgcgaacttgag

SEQ ID NO: 119549 - DNA, 25 bp, Artificial
  probe
  misc_feature (1)..(25): SEQ ID NO: 2806; WAN024CI5_at; Start 44; Stop 68
ctttgagagaggctgagattgctct

SEQ ID NO: 119550 - DNA, 25 bp, Artificial
  probe
  misc_feature (1)..(25): SEQ ID NO: 2806; WAN024CI5_at; Start 133; Stop 157
cataatgcgcgtgaggaattacagc

SEQ ID NO: 119551 - DNA, 25 bp, Artificial
  probe
  misc_feature (1)..(25): SEQ ID NO: 2806; WAN024CI5_at; Start 52; Stop 76
gaggctgagattgctcttgaacacg

SEQ ID NO: 119552 - DNA, 25 bp, Artificial
  probe
  misc_feature (1)..(25): SEQ ID NO: 2806; WAN024CI5_at; Start 248; Stop 272
ccattgaaccttgtgtcatgtgtag

SEQ ID NO: 119553 - DNA, 25 bp, Artificial
  probe
  misc_feature (1)..(25): SEQ ID NO: 2806; WAN024CI5_at; Start 155; Stop 179
agcgagcggttatgcatgcggaaat

SEQ ID NO: 119554 - DNA, 25 bp, Artificial
  probe
  misc_feature (1)..(25): SEQ ID NO: 2806; WAN024CI5_at; Start 54; Stop 78
ggctgagattgctcttgaacacgat

SEQ ID NO: 119555 - DNA, 25 bp, Artificial
  probe
  misc_feature (1)..(25): SEQ ID NO: 2806; WAN024CI5_at; Start 89; Stop 113
ttggttgtgtgattgtcaaagatgg

SEQ ID NO: 119556 - DNA, 25 bp, Artificial
  probe
  misc_feature (1)..(25): SEQ ID NO: 2806; WAN024CI5_at; Start 144; Stop 168
tgaggaattacagcgagcggttatg

SEQ ID NO: 119557 - DNA, 25 bp, Artificial
  probe
  misc_feature (1)..(25): SEQ ID NO: 2806; WAN024CI5_at; Start 298; Stop 322
ccaaatgtggtctatggggctaaaa

SEQ ID NO: 119558 - DNA, 25 bp, Artificial
  probe
  misc_feature (1)..(25): SEQ ID NO: 2806; WAN024CI5_at; Start 229; Stop 253
gattgcacactttttgtgaccattg

SEQ ID NO: 119559 - DNA, 25 bp, Artificial
  probe
  misc_feature (1)..(25): SEQ ID NO: 2806; WAN024CI5_at; Start 73; Stop 97
cacgatgaaattccaattggttgtg

SEQ ID NO: 119560 - DNA, 25 bp, Artificial
  probe
  misc_feature (1)..(25): SEQ ID NO: 2806; WAN024CI5_at; Start 243; Stop 267
tgtgaccattgaaccttgtgtcatg

SEQ ID NO: 119561 - DNA, 25 bp, Artificial
  probe
  misc_feature (1)..(25): SEQ ID NO: 2806; WAN024CI5_at; Start 84; Stop 108
tccaattggttgtgtgattgtcaaa

SEQ ID NO: 119562 - DNA, 25 bp, Artificial
  probe
  misc_feature (1)..(25): SEQ ID NO: 2806; WAN024CI5_at; Start 320; Stop 344
aaaaccagaaatttggcgctgctgg

SEQ ID NO: 119563 - DNA, 25 bp, Artificial
  probe
  misc_feature (1)..(25): SEQ ID NO: 2806; WAN024CI5_at; Start 236; Stop 260
cactttttgtgaccattgaaccttg

SEQ ID NO: 119564 - DNA, 25 bp, Artificial
  probe
  misc_feature (1)..(25): SEQ ID NO: 2806; WAN024CI5_at; Start 216; Stop 240
ctggcgcttgctggattgcacactt

SEQ ID NO: 119565 - DNA, 25 bp, Artificial
  probe
  misc_feature (1)..(25): SEQ ID NO: 995; WAN024CI6_at; Start 424; Stop 448
ggattgacgactaagaagattcttg

SEQ ID NO: 119566 - DNA, 25 bp, Artificial
  probe
  misc_feature (1)..(25): SEQ ID NO: 995; WAN024CI6_at; Start 670; Stop 694
tcaaagggtggatttggccttgtct

SEQ ID NO: 119567 - DNA, 25 bp, Artificial
  probe
  misc_feature (1)..(25): SEQ ID NO: 995; WAN024CI6_at; Start 474; Stop 498
tgatttatccttatacacccctgct

SEQ ID NO: 119568 - DNA, 25 bp, Artificial
  probe
  misc_feature (1)..(25): SEQ ID NO: 995; WAN024CI6_at; Start 637; Stop 661
tggaaaaaagatgaggaattgttgc

SEQ ID NO: 119569 - DNA, 25 bp, Artificial
  probe
  misc_feature (1)..(25): SEQ ID NO: 995; WAN024CI6_at; Start 702; Stop 726
ccatcaaaatgagggagaaagtaac

SEQ ID NO: 119570 - DNA, 25 bp, Artificial
  probe
  misc_feature (1)..(25): SEQ ID NO: 995; WAN024CI6_at; Start 565; Stop 589
gatacgcctttgagagtattttcaa

SEQ ID NO: 119571 - DNA, 25 bp, Artificial
  probe
  misc_feature (1)..(25): SEQ ID NO: 995; WAN024CI6_at; Start 458; Stop 482
tgtgggatcatcctcatgatttatc

SEQ ID NO: 119572 - DNA, 25 bp, Artificial
  probe
  misc_feature (1)..(25): SEQ ID NO: 995; WAN024CI6_at; Start 993; Stop 1017
tcacttgggaattgatctaactaat

SEQ ID NO: 119573 - DNA, 25 bp, Artificial
  probe
  misc_feature (1)..(25): SEQ ID NO: 995; WAN024CI6_at; Start 71; Stop 95
ttcaaaagatagctagtcaactggg

SEQ ID NO: 119574 - DNA, 25 bp, Artificial
  probe
  misc_feature (1)..(25): SEQ ID NO: 995; WAN024CI6_at; Start 394; Stop 418
gagagaatgaaaacacgcctgatgg

SEQ ID NO: 119575 - DNA, 25 bp, Artificial
  probe
  misc_feature (1)..(25): SEQ ID NO: 995; WAN024CI6_at; Start 527; Stop 551
gtttagagcgttttccagacttaca

SEQ ID NO: 119576 - DNA, 25 bp, Artificial
  probe
  misc_feature (1)..(25): SEQ ID NO: 995; WAN024CI6_at; Start 741; Stop 765
gaatatatctcataaggtgagtacc

SEQ ID NO: 119577 - DNA, 25 bp, Artificial
  probe
  misc_feature (1)..(25): SEQ ID NO: 995; WAN024CI6_at; Start 84; Stop 108
tagtcaactgggatttagagaggtt

SEQ ID NO: 119578 - DNA, 25 bp, Artificial
  probe
  misc_feature (1)..(25): SEQ ID NO: 995; WAN024CI6_at; Start 718; Stop 742
gaaagtaaccaatactataccttga

SEQ ID NO: 119579 - DNA, 25 bp, Artificial
  probe
  misc_feature (1)..(25): SEQ ID NO: 995; WAN024CI6_at; Start 656; Stop 680
tgttgctagaattatcaaagggtgg

SEQ ID NO: 119580 - DNA, 25 bp, Artificial
  probe
  misc_feature (1)..(25): SEQ ID NO: 995; WAN024CI6_at; Start 30; Stop 54
catggctggtgatagtacggttatc

SEQ ID NO: 119581 - DNA, 25 bp, Artificial
  probe
  misc_feature (1)..(25): SEQ ID NO: 995; WAN024CI6_at; Start 978; Stop 1002
ggtagatgcaatctatcacttggga

SEQ ID NO: 119582 - DNA, 25 bp, Artificial
  probe
  misc_feature (1)..(25): SEQ ID NO: 995; WAN024CI6_at; Start 44; Stop 68
gtacggttatcttagctcaaaatgc

SEQ ID NO: 119583 - DNA, 25 bp, Artificial
  probe
  misc_feature (1)..(25): SEQ ID NO: 995; WAN024CI6_at; Start 119; Stop 143
tttacaacattgcttcagatagtcc

SEQ ID NO: 119584 - DNA, 25 bp, Artificial
  probe
  misc_feature (1)..(25): SEQ ID NO: 995; WAN024CI6_at; Start 142; Stop 166
ccttctgaaatgaataagcgtctgg

SEQ ID NO: 119585 - DNA, 25 bp, Artificial
  probe
  misc_feature (1)..(25): SEQ ID NO: 995; WAN024CI6_at; Start 203; Stop 227
tagtctttcagtctccaacctggaa

SEQ ID NO: 119586 - DNA, 25 bp, Artificial
  probe
  misc_feature (1)..(25): SEQ ID NO: 995; WAN024CI6_at; Start 894; Stop 918
tctacaagaatatcaagaaatgacg

SEQ ID NO: 119587 - DNA, 25 bp, Artificial
  probe
  misc_feature (1)..(25): SEQ ID NO: 995; WAN024CI6_at; Start 156; Stop 180
taagcgtctggatggtattatggcc

SEQ ID NO: 119588 - DNA, 25 bp, Artificial
  probe
  misc_feature (1)..(25): SEQ ID NO: 995; WAN024CI6_at; Start 548; Stop 572
tacaaaattggtctcaagatacgcc

SEQ ID NO: 119589 - DNA, 25 bp, Artificial
  probe
  misc_feature (1)..(25): SEQ ID NO: 995; WAN024CI6_at; Start 306; Stop 330
tgttcccctcatgtttgatagtaac

SEQ ID NO: 119590 - DNA, 25 bp, Artificial
  probe
  misc_feature (1)..(25): SEQ ID NO: 995; WAN024CI6_at; Start 58; Stop 82
gctcaaaatgctgttcaaaagatag

SEQ ID NO: 119591 - DNA, 25 bp, Artificial
  probe
  misc_feature (1)..(25): SEQ ID NO: 995; WAN024CI6_at; Start 785; Stop 809
cagtcattgtaccaagtagcttgtc

SEQ ID NO: 119592 - DNA, 25 bp, Artificial
  probe
  misc_feature (1)..(25): SEQ ID NO: 995; WAN024CI6_at; Start 171; Stop 195
tattatggccagtatctctattggg

SEQ ID NO: 119593 - DNA, 25 bp, Artificial
  probe
  misc_feature (1)..(25): SEQ ID NO: 995; WAN024CI6_at; Start 289; Stop 313
tgctttatccatgatgttgttcccc

SEQ ID NO: 119594 - DNA, 25 bp, Artificial
  probe
  misc_feature (1)..(25): SEQ ID NO: 995; WAN024CI6_at; Start 621; Stop 645
tctcagcatcgaaggatggaaaaaa

SEQ ID NO: 119595 - DNA, 25 bp, Artificial
  probe
  misc_feature (1)..(25): SEQ ID NO: 995; WAN024CI6_at; Start 444; Stop 468
tcttgttcaagggatgtgggatcat

SEQ ID NO: 119596 - DNA, 25 bp, Artificial
  probe
  misc_feature (1)..(25): SEQ ID NO: 995; WAN024CI6_at; Start 261; Stop 285
gctaaaggatatgcaggtgaaaatt

SEQ ID NO: 119597 - DNA, 25 bp, Artificial
  probe
  misc_feature (1)..(25): SEQ ID NO: 995; WAN024CI6_at; Start 411; Stop 435
cctgatggaagaaggattgacgact

SEQ ID NO: 119598 - DNA, 25 bp, Artificial
  probe
  misc_feature (1)..(25): SEQ ID NO: 995; WAN024CI6_at; Start 14; Stop 38
taacaaatttatacggcatggctgg

SEQ ID NO: 119599 - DNA, 25 bp, Artificial
  probe
  misc_feature (1)..(25): SEQ ID NO: 1894; WAN024CI7_at; Start 2062; Stop 2086
gaaggtgcgacttctcgttcaggtg

SEQ ID NO: 119600 - DNA, 25 bp, Artificial
  probe
  misc_feature (1)..(25): SEQ ID NO: 1894; WAN024CI7_at; Start 707; Stop 731
ccttgacagccaatcgttatcgtga

SEQ ID NO: 119601 - DNA, 25 bp, Artificial
  probe
  misc_feature (1)..(25): SEQ ID NO: 1894; WAN024CI7_at; Start 135; Stop 159
tcgcaaaccacgaaaaatagctcgc

SEQ ID NO: 119602 - DNA, 25 bp, Artificial
  probe
  misc_feature (1)..(25): SEQ ID NO: 1894; WAN024CI7_at; Start 1644; Stop 1668
ccaggtgaaagggatagatgaaacc

SEQ ID NO: 119603 - DNA, 25 bp, Artificial
  probe
  misc_feature (1)..(25): SEQ ID NO: 1894; WAN024CI7_at; Start 669; Stop 693
ggtgattcattttacgacctacaga

SEQ ID NO: 119604 - DNA, 25 bp, Artificial
  probe
  misc_feature (1)..(25): SEQ ID NO: 1894; WAN024CI7_at; Start 2031; Stop 2055
catttgggaaaaccgtgacttactg

SEQ ID NO: 119605 - DNA, 25 bp, Artificial
  probe
  misc_feature (1)..(25): SEQ ID NO: 1894; WAN024CI7_at; Start 875; Stop 899
tagttacagctctacctgaggtggt

SEQ ID NO: 119606 - DNA, 25 bp, Artificial
  probe
  misc_feature (1)..(25): SEQ ID NO: 1894; WAN024CI7_at; Start 506; Stop 530
aaggccgtttcgagcattttaatgg

SEQ ID NO: 119607 - DNA, 25 bp, Artificial
  probe
  misc_feature (1)..(25): SEQ ID NO: 1894; WAN024CI7_at; Start 1471; Stop 1495
tccgatatcgttgcagaaatggctc

SEQ ID NO: 119608 - DNA, 25 bp, Artificial
  probe
  misc_feature (1)..(25): SEQ ID NO: 1894; WAN024CI7_at; Start 1749; Stop 1773
tccctaccaggattatgatgaagag

SEQ ID NO: 119609 - DNA, 25 bp, Artificial
  probe
  misc_feature (1)..(25): SEQ ID NO: 1894; WAN024CI7_at; Start 896; Stop 920
tggtatttcatatcgcagcttggac

SEQ ID NO: 119610 - DNA, 25 bp, Artificial
  probe
  misc_feature (1)..(25): SEQ ID NO: 1894; WAN024CI7_at; Start 1561; Stop 1585
tcaagtgaacatcctgaacgaatgt

SEQ ID NO: 119611 - DNA, 25 bp, Artificial
  probe
  misc_feature (1)..(25): SEQ ID NO: 1894; WAN024CI7_at; Start 1038; Stop 1062
caatcatggtagtgcagatgagaac

SEQ ID NO: 119612 - DNA, 25 bp, Artificial
  probe
  misc_feature (1)..(25): SEQ ID NO: 1894; WAN024CI7_at; Start 1100; Stop 1124
tagcttttcaatcgactcagcacgg

SEQ ID NO: 119613 - DNA, 25 bp, Artificial
  probe
  misc_feature (1)..(25): SEQ ID NO: 1894; WAN024CI7_at; Start 1718; Stop 1742
gggaaatcaatatgcttgcagggca

SEQ ID NO: 119614 - DNA, 25 bp, Artificial
  probe
  misc_feature (1)..(25): SEQ ID NO: 1894; WAN024CI7_at; Start 1273; Stop 1297
caattggattacttggctggacagt

SEQ ID NO: 119615 - DNA, 25 bp, Artificial
  probe
  misc_feature (1)..(25): SEQ ID NO: 1894; WAN024CI7_at; Start 1116; Stop 1140
tcagcacggagagttaggacaaatc

SEQ ID NO: 119616 - DNA, 25 bp, Artificial
  probe
  misc_feature (1)..(25): SEQ ID NO: 1894; WAN024CI7_at; Start 1780; Stop 1804
tcaatcatgagggacattatcggcc

SEQ ID NO: 119617 - DNA, 25 bp, Artificial
  probe
  misc_feature (1)..(25): SEQ ID NO: 1894; WAN024CI7_at; Start 2250; Stop 2274
taatctatgccagatgggctatcaa

SEQ ID NO: 119618 - DNA, 25 bp, Artificial
  probe
  misc_feature (1)..(25): SEQ ID NO: 1894; WAN024CI7_at; Start 2281; Stop 2305
gatgtaggccatattgactcagagt

SEQ ID NO: 119619 - DNA, 25 bp, Artificial
  probe
  misc_feature (1)..(25): SEQ ID NO: 1894; WAN024CI7_at; Start 1935; Stop 1959
cagtgattcatggtatggctcaacc

SEQ ID NO: 119620 - DNA, 25 bp, Artificial
  probe
  misc_feature (1)..(25): SEQ ID NO: 1894; WAN024CI7_at; Start 1372; Stop 1396
cctaatattcagctctatccggcaa

SEQ ID NO: 119621 - DNA, 25 bp, Artificial
  probe
  misc_feature (1)..(25): SEQ ID NO: 1894; WAN024CI7_at; Start 2047; Stop 2071
gacttactgatagtcgaaggtgcga

SEQ ID NO: 119622 - DNA, 25 bp, Artificial
  probe
  misc_feature (1)..(25): SEQ ID NO: 1894; WAN024CI7_at; Start 1610; Stop 1634
ctaaggatatgctagaaaaaccgct

SEQ ID NO: 119623 - DNA, 25 bp, Artificial
  probe
  misc_feature (1)..(25): SEQ ID NO: 1894; WAN024CI7_at; Start 2220; Stop 2244
gcttggacctacagcaaaagttctg

SEQ ID NO: 119624 - DNA, 25 bp, Artificial
  probe
  misc_feature (1)..(25): SEQ ID NO: 1894; WAN024CI7_at; Start 356; Stop 380
tagaagaaaaatcactcgcagcagt

SEQ ID NO: 119625 - DNA, 25 bp, Artificial
  probe
  misc_feature (1)..(25): SEQ ID NO: 1894; WAN024CI7_at; Start 1624; Stop 1648
gaaaaaccgcttgatataatccagg

SEQ ID NO: 119626 - DNA, 25 bp, Artificial
  probe
  misc_feature (1)..(25): SEQ ID NO: 1894; WAN024CI7_at; Start 1794; Stop 1818
cattatcggccaagaaagtcgagaa

SEQ ID NO: 119627 - DNA, 25 bp, Artificial
  probe
  misc_feature (1)..(25): SEQ ID NO: 1894; WAN024CI7_at; Start 911; Stop 935
cagcttggacggatatgggagataa

SEQ ID NO: 119628 - DNA, 25 bp, Artificial
  probe
  misc_feature (1)..(25): SEQ ID NO: 1894; WAN024CI7_at; Start 627; Stop 651
taacaattggcaggaacatctggct

SEQ ID NO: 119629 - DNA, 25 bp, Artificial
  probe
  misc_feature (1)..(25): SEQ ID NO: 1894; WAN024CI7_at; Start 488; Stop 512
caatgaaggaagttgaagaaggccg

SEQ ID NO: 119630 - DNA, 25 bp, Artificial
  probe
  misc_feature (1)..(25): SEQ ID NO: 1894; WAN024CI7_at; Start 460; Stop 484
gaacgactaattgaacagagcattg

SEQ ID NO: 119631 - DNA, 25 bp, Artificial
  probe
  misc_feature (1)..(25): SEQ ID NO: 1894; WAN024CI7_at; Start 565; Stop 589
gattggttagaactaggtcgagctt

SEQ ID NO: 119632 - DNA, 25 bp, Artificial
  probe
  misc_feature (1)..(25): SEQ ID NO: 1894; WAN024CI7_at; Start 1868; Stop 1892
catcgtgggcgattccattttggaa

SEQ ID NO: 119633 - DNA, 25 bp, Artificial
  probe
  misc_feature (1)..(25): SEQ ID NO: 1499; WAN024CI8_at; Start 985; Stop 1009
gattggctattggacgattctatag

SEQ ID NO: 119634 - DNA, 25 bp, Artificial
  probe
  misc_feature (1)..(25): SEQ ID NO: 1499; WAN024CI8_at; Start 1079; Stop 1103
aaatcttcgcttttgatatcacacg

SEQ ID NO: 119635 - DNA, 25 bp, Artificial
  probe
  misc_feature (1)..(25): SEQ ID NO: 1499; WAN024CI8_at; Start 5; Stop 29
gaaaatcaatagtattagcggcaga

SEQ ID NO: 119636 - DNA, 25 bp, Artificial
  probe
  misc_feature (1)..(25): SEQ ID NO: 1499; WAN024CI8_at; Start 781; Stop 805
tattttgaaagaagcaatcagtcta

SEQ ID NO: 119637 - DNA, 25 bp, Artificial
  probe
  misc_feature (1)..(25): SEQ ID NO: 1499; WAN024CI8_at; Start 165; Stop 189
gaattctacaattcgcagtgtacac

SEQ ID NO: 119638 - DNA, 25 bp, Artificial
  probe
  misc_feature (1)..(25): SEQ ID NO: 1499; WAN024CI8_at; Start 819; Stop 843
gcttgtgacatggagtgcagatata

SEQ ID NO: 119639 - DNA, 25 bp, Artificial
  probe
  misc_feature (1)..(25): SEQ ID NO: 1499; WAN024CI8_at; Start 391; Stop 415
gcctatgaaggacgaaaatctggat

SEQ ID NO: 119640 - DNA, 25 bp, Artificial
  probe
  misc_feature (1)..(25): SEQ ID NO: 1499; WAN024CI8_at; Start 1131; Stop 1155
cggtattttttctgtggagagacca

SEQ ID NO: 119641 - DNA, 25 bp, Artificial
  probe
  misc_feature (1)..(25): SEQ ID NO: 1499; WAN024CI8_at; Start 610; Stop 634
caccttgctcaagaatgtgaacgtc

SEQ ID NO: 119642 - DNA, 25 bp, Artificial
  probe
  misc_feature (1)..(25): SEQ ID NO: 1499; WAN024CI8_at; Start 285; Stop 309
tagggtattgtatctggattccgat

SEQ ID NO: 119643 - DNA, 25 bp, Artificial
  probe
  misc_feature (1)..(25): SEQ ID NO: 1499; WAN024CI8_at; Start 331; Stop 355
gctactttgtttgagatagatctca

SEQ ID NO: 119644 - DNA, 25 bp, Artificial
  probe
  misc_feature (1)..(25): SEQ ID NO: 1499; WAN024CI8_at; Start 627; Stop 651
tgaacgtctagatgacaatccacct

SEQ ID NO: 119645 - DNA, 25 bp, Artificial
  probe
  misc_feature (1)..(25): SEQ ID NO: 1499; WAN024CI8_at; Start 108; Stop 132
caacagtgatatagctcctgaatgg

SEQ ID NO: 119646 - DNA, 25 bp, Artificial
  probe
  misc_feature (1)..(25): SEQ ID NO: 1499; WAN024CI8_at; Start 899; Stop 923
caccgtgtgattgttctgaggagct

SEQ ID NO: 119647 - DNA, 25 bp, Artificial
  probe
  misc_feature (1)..(25): SEQ ID NO: 1499; WAN024CI8_at; Start 378; Stop 402
tgatgatgtctatgcctatgaagga

SEQ ID NO: 119648 - DNA, 25 bp, Artificial
  probe
  misc_feature (1)..(25): SEQ ID NO: 1499; WAN024CI8_at; Start 1053; Stop 1077
tacaagggcacaagaaagtggcaag

SEQ ID NO: 119649 - DNA, 25 bp, Artificial
  probe
  misc_feature (1)..(25): SEQ ID NO: 1499; WAN024CI8_at; Start 205; Stop 229
tttgaaagctataaaacaggacctc

SEQ ID NO: 119650 - DNA, 25 bp, Artificial
  probe
  misc_feature (1)..(25): SEQ ID NO: 1499; WAN024CI8_at; Start 664; Stop 688
tatgctagtcatgataaaccttgga

SEQ ID NO: 119651 - DNA, 25 bp, Artificial
  probe
  misc_feature (1)..(25): SEQ ID NO: 1499; WAN024CI8_at; Start 365; Stop 389
caattggtgctgttgatgatgtcta

SEQ ID NO: 119652 - DNA, 25 bp, Artificial
  probe
  misc_feature (1)..(25): SEQ ID NO: 1499; WAN024CI8_at; Start 560; Stop 584
ggctagccttagataaaacatataa

SEQ ID NO: 119653 - DNA, 25 bp, Artificial
  probe
  misc_feature (1)..(25): SEQ ID NO: 1499; WAN024CI8_at; Start 799; Stop 823
cagtctaaaaaacaagtgatgcttg

SEQ ID NO: 119654 - DNA, 25 bp, Artificial
  probe
  misc_feature (1)..(25): SEQ ID NO: 1499; WAN024CI8_at; Start 918; Stop 942
ggagctgacctctctatcacagtat

SEQ ID NO: 119655 - DNA, 25 bp, Artificial
  probe
  misc_feature (1)..(25): SEQ ID NO: 1499; WAN024CI8_at; Start 1110; Stop 1134
tatggatgatggactctatgacggt

SEQ ID NO: 119656 - DNA, 25 bp, Artificial
  probe
  misc_feature (1)..(25): SEQ ID NO: 1499; WAN024CI8_at; Start 860; Stop 884
tagtacaacggttacctgattggca

SEQ ID NO: 119657 - DNA, 25 bp, Artificial
  probe
  misc_feature (1)..(25): SEQ ID NO: 1499; WAN024CI8_at; Start 476; Stop 500
gtttattggaattagcggccgagca

SEQ ID NO: 119658 - DNA, 25 bp, Artificial
  probe
  misc_feature (1)..(25): SEQ ID NO: 1499; WAN024CI8_at; Start 300; Stop 324
ggattccgatatcattgtaactggg

SEQ ID NO: 119659 - DNA, 25 bp, Artificial
  probe
  misc_feature (1)..(25): SEQ ID NO: 1499; WAN024CI8_at; Start 254; Stop 278
gattttttgcgacagaagtggttga

SEQ ID NO: 119660 - DNA, 25 bp, Artificial
  probe
  misc_feature (1)..(25): SEQ ID NO: 1499; WAN024CI8_at; Start 749; Stop 773
cagagattgcttttcaacgttccga

SEQ ID NO: 119661 - DNA, 25 bp, Artificial
  probe
  misc_feature (1)..(25): SEQ ID NO: 1499; WAN024CI8_at; Start 881; Stop 905
ggcattttcatttggctgcaccgtg

SEQ ID NO: 119662 - DNA, 25 bp, Artificial
  probe
  misc_feature (1)..(25): SEQ ID NO: 1499; WAN024CI8_at; Start 351; Stop 375
tctcaaaggatattcaattggtgct

SEQ ID NO: 119663 - DNA, 25 bp, Artificial
  probe
  misc_feature (1)..(25): SEQ ID NO: 1499; WAN024CI8_at; Start 178; Stop 202
cgcagtgtacacattgataaagaac

SEQ ID NO: 119664 - DNA, 25 bp, Artificial
  probe
  misc_feature (1)..(25): SEQ ID NO: 1499; WAN024CI8_at; Start 1093; Stop 1117
gatatcacacgtaaaagtatggatg

SEQ ID NO: 119665 - DNA, 25 bp, Artificial
  probe
  misc_feature (1)..(25): SEQ ID NO: 1499; WAN024CI8_at; Start 703; Stop 727
tctagactacgtgaattatggtggg

SEQ ID NO: 119666 - DNA, 25 bp, Artificial
  probe
  misc_feature (1)..(25): SEQ ID NO: 1499; WAN024CI8_at; Start 544; Stop 568
tattttgaggataattggctagcct

SEQ ID NO: 119667 - DNA, 25 bp, Artificial
  probe
  misc_feature (1)..(25): SEQ ID NO: 7503; WAN024CI9_at; Start 49; Stop 73
tttaccatatcacaaacaatgaagg

SEQ ID NO: 119668 - DNA, 25 bp, Artificial
  probe
  misc_feature (1)..(25): SEQ ID NO: 7503; WAN024CI9_at; Start 59; Stop 83
cacaaacaatgaaggtgaggggcgt

SEQ ID NO: 119669 - DNA, 25 bp, Artificial
  probe
  misc_feature (1)..(25): SEQ ID NO: 7503; WAN024CI9_at; Start 43; Stop 67
ttgttatttaccatatcacaaacaa

SEQ ID NO: 119670 - DNA, 25 bp, Artificial
  probe
  misc_feature (1)..(25): SEQ ID NO: 7503; WAN024CI9_at; Start 56; Stop 80
tatcacaaacaatgaaggtgagggg

SEQ ID NO: 119671 - DNA, 25 bp, Artificial
  probe
  misc_feature (1)..(25): SEQ ID NO: 7503; WAN024CI9_at; Start 45; Stop 69
gttatttaccatatcacaaacaatg

SEQ ID NO: 119672 - DNA, 25 bp, Artificial
  probe
  misc_feature (1)..(25): SEQ ID NO: 7503; WAN024CI9_at; Start 55; Stop 79
atatcacaaacaatgaaggtgaggg

SEQ ID NO: 119673 - DNA, 25 bp, Artificial
  probe
  misc_feature (1)..(25): SEQ ID NO: 7503; WAN024CI9_at; Start 47; Stop 71
tatttaccatatcacaaacaatgaa

SEQ ID NO: 119674 - DNA, 25 bp, Artificial
  probe
  misc_feature (1)..(25): SEQ ID NO: 7503; WAN024CI9_at; Start 50; Stop 74
ttaccatatcacaaacaatgaaggt

SEQ ID NO: 119675 - DNA, 25 bp, Artificial
  probe
  misc_feature (1)..(25): SEQ ID NO: 7503; WAN024CI9_at; Start 36; Stop 60
aaaagaattgttatttaccatatca

SEQ ID NO: 119676 - DNA, 25 bp, Artificial
  probe
  misc_feature (1)..(25): SEQ ID NO: 7503; WAN024CI9_at; Start 38; Stop 62
aagaattgttatttaccatatcaca

SEQ ID NO: 119677 - DNA, 25 bp, Artificial
  probe
  misc_feature (1)..(25): SEQ ID NO: 7503; WAN024CI9_at; Start 51; Stop 75
taccatatcacaaacaatgaaggtg

SEQ ID NO: 119678 - DNA, 25 bp, Artificial
  probe
  misc_feature (1)..(25): SEQ ID NO: 7503; WAN024CI9_at; Start 64; Stop 88
acaatgaaggtgaggggcgtgtttt

SEQ ID NO: 119679 - DNA, 25 bp, Artificial
  probe
  misc_feature (1)..(25): SEQ ID NO: 7503; WAN024CI9_at; Start 35; Stop 59
taaaagaattgttatttaccatatc

SEQ ID NO: 119680 - DNA, 25 bp, Artificial
  probe
  misc_feature (1)..(25): SEQ ID NO: 7503; WAN024CI9_at; Start 48; Stop 72
atttaccatatcacaaacaatgaag

SEQ ID NO: 119681 - DNA, 25 bp, Artificial
  probe
  misc_feature (1)..(25): SEQ ID NO: 7503; WAN024CI9_at; Start 63; Stop 87
aacaatgaaggtgaggggcgtgttt

SEQ ID NO: 119682 - DNA, 25 bp, Artificial
  probe
  misc_feature (1)..(25): SEQ ID NO: 7503; WAN024CI9_at; Start 42; Stop 66
attgttatttaccatatcacaaaca

SEQ ID NO: 119683 - DNA, 25 bp, Artificial
  probe
  misc_feature (1)..(25): SEQ ID NO: 7503; WAN024CI9_at; Start 60; Stop 84
acaaacaatgaaggtgaggggcgtg

SEQ ID NO: 119684 - DNA, 25 bp, Artificial
  probe
  misc_feature (1)..(25): SEQ ID NO: 7503; WAN024CI9_at; Start 62; Stop 86
aaacaatgaaggtgaggggcgtgtt

SEQ ID NO: 119685 - DNA, 25 bp, Artificial
  probe
  misc_feature (1)..(25): SEQ ID NO: 7503; WAN024CI9_at; Start 65; Stop 89
caatgaaggtgaggggcgtgtttta

SEQ ID NO: 119686 - DNA, 25 bp, Artificial
  probe
  misc_feature (1)..(25): SEQ ID NO: 7503; WAN024CI9_at; Start 53; Stop 77
ccatatcacaaacaatgaaggtgag

SEQ ID NO: 119687 - DNA, 25 bp, Artificial
  probe
  misc_feature (1)..(25): SEQ ID NO: 7503; WAN024CI9_at; Start 44; Stop 68
tgttatttaccatatcacaaacaat

SEQ ID NO: 119688 - DNA, 25 bp, Artificial
  probe
  misc_feature (1)..(25): SEQ ID NO: 7503; WAN024CI9_at; Start 37; Stop 61
aaagaattgttatttaccatatcac

SEQ ID NO: 119689 - DNA, 25 bp, Artificial
  probe
  misc_feature (1)..(25): SEQ ID NO: 7503; WAN024CI9_at; Start 68; Stop 92
tgaaggtgaggggcgtgttttatga

SEQ ID NO: 119690 - DNA, 25 bp, Artificial
  probe
  misc_feature (1)..(25): SEQ ID NO: 7503; WAN024CI9_at; Start 61; Stop 85
caaacaatgaaggtgaggggcgtgt

SEQ ID NO: 119691 - DNA, 25 bp, Artificial
  probe
  misc_feature (1)..(25): SEQ ID NO: 7503; WAN024CI9_at; Start 66; Stop 90
aatgaaggtgaggggcgtgttttat

SEQ ID NO: 119692 - DNA, 25 bp, Artificial
  probe
  misc_feature (1)..(25): SEQ ID NO: 7503; WAN024CI9_at; Start 39; Stop 63
agaattgttatttaccatatcacaa

SEQ ID NO: 119693 - DNA, 25 bp, Artificial
  probe
  misc_feature (1)..(25): SEQ ID NO: 7503; WAN024CI9_at; Start 58; Stop 82
tcacaaacaatgaaggtgaggggcg

SEQ ID NO: 119694 - DNA, 25 bp, Artificial
  probe
  misc_feature (1)..(25): SEQ ID NO: 7503; WAN024CI9_at; Start 41; Stop 65
aattgttatttaccatatcacaaac

SEQ ID NO: 119695 - DNA, 25 bp, Artificial
  probe
  misc_feature (1)..(25): SEQ ID NO: 7503; WAN024CI9_at; Start 54; Stop 78
catatcacaaacaatgaaggtgagg

SEQ ID NO: 119696 - DNA, 25 bp, Artificial
  probe
  misc_feature (1)..(25): SEQ ID NO: 7503; WAN024CI9_at; Start 57; Stop 81
atcacaaacaatgaaggtgaggggc

SEQ ID NO: 119697 - DNA, 25 bp, Artificial
  probe
  misc_feature (1)..(25): SEQ ID NO: 7503; WAN024CI9_at; Start 40; Stop 64
gaattgttatttaccatatcacaaa

SEQ ID NO: 119698 - DNA, 25 bp, Artificial
  probe
  misc_feature (1)..(25): SEQ ID NO: 7503; WAN024CI9_at; Start 46; Stop 70
ttatttaccatatcacaaacaatga

SEQ ID NO: 119699 - DNA, 25 bp, Artificial
  probe
  misc_feature (1)..(25): SEQ ID NO: 7503; WAN024CI9_at; Start 52; Stop 76
accatatcacaaacaatgaaggtga

SEQ ID NO: 119700 - DNA, 25 bp, Artificial
  probe
  misc_feature (1)..(25): SEQ ID NO: 7503; WAN024CI9_at; Start 69; Stop 93
gaaggtgaggggcgtgttttatgac

SEQ ID NO: 119701 - DNA, 25 bp, Artificial
  probe
  misc_feature (1)..(25): SEQ ID NO: 1634; WAN024CIA_at; Start 549; Stop 573
aaatggtcgccgctttgatgatgaa

SEQ ID NO: 119702 - DNA, 25 bp, Artificial
  probe
  misc_feature (1)..(25): SEQ ID NO: 1634; WAN024CIA_at; Start 304; Stop 328
gaaactctttatcagcaagtccaag

SEQ ID NO: 119703 - DNA, 25 bp, Artificial
  probe
  misc_feature (1)..(25): SEQ ID NO: 1634; WAN024CIA_at; Start 418; Stop 442
tgcgtcgaagaattagctatacaag

SEQ ID NO: 119704 - DNA, 25 bp, Artificial
  probe
  misc_feature (1)..(25): SEQ ID NO: 1634; WAN024CIA_at; Start 319; Stop 343
caagtccaagaaaaggatgcagatg

SEQ ID NO: 119705 - DNA, 25 bp, Artificial
  probe
  misc_feature (1)..(25): SEQ ID NO: 1634; WAN024CIA_at; Start 486; Stop 510
ggcctttatattgccgacatttaag

SEQ ID NO: 119706 - DNA, 25 bp, Artificial
  probe
  misc_feature (1)..(25): SEQ ID NO: 1634; WAN024CIA_at; Start 242; Stop 266
tagctaagggagagtacatcacgat

SEQ ID NO: 119707 - DNA, 25 bp, Artificial
  probe
  misc_feature (1)..(25): SEQ ID NO: 1634; WAN024CIA_at; Start 535; Stop 559
gaagttcacttttcaaatggtcgcc

SEQ ID NO: 119708 - DNA, 25 bp, Artificial
  probe
  misc_feature (1)..(25): SEQ ID NO: 1634; WAN024CIA_at; Start 363; Stop 387
taattatgacgaaagtgacgggaat

SEQ ID NO: 119709 - DNA, 25 bp, Artificial
  probe
  misc_feature (1)..(25): SEQ ID NO: 1634; WAN024CIA_at; Start 671; Stop 695
cggaatttgatctttcctgggcaag

SEQ ID NO: 119710 - DNA, 25 bp, Artificial
  probe
  misc_feature (1)..(25): SEQ ID NO: 1634; WAN024CIA_at; Start 437; Stop 461
tacaagaaattatgaaccgtcaagc

SEQ ID NO: 119711 - DNA, 25 bp, Artificial
  probe
  misc_feature (1)..(25): SEQ ID NO: 1634; WAN024CIA_at; Start 644; Stop 668
gaagacgttcaggaagcatcatgag

SEQ ID NO: 119712 - DNA, 25 bp, Artificial
  probe
  misc_feature (1)..(25): SEQ ID NO: 1634; WAN024CIA_at; Start 115; Stop 139
gatgacggttctacggataattctg

SEQ ID NO: 119713 - DNA, 25 bp, Artificial
  probe
  misc_feature (1)..(25): SEQ ID NO: 1634; WAN024CIA_at; Start 175; Stop 199
cgtgtgcgagtattgcatcaagaaa

SEQ ID NO: 119714 - DNA, 25 bp, Artificial
  probe
  misc_feature (1)..(25): SEQ ID NO: 1634; WAN024CIA_at; Start 7; Stop 31
gaattaattagtgttgtggtaccga

SEQ ID NO: 119715 - DNA, 25 bp, Artificial
  probe
  misc_feature (1)..(25): SEQ ID NO: 1634; WAN024CIA_at; Start 261; Stop 285
cacgattgttgattcagatgatatc

SEQ ID NO: 119716 - DNA, 25 bp, Artificial
  probe
  misc_feature (1)..(25): SEQ ID NO: 1634; WAN024CIA_at; Start 798; Stop 822
taagcaaactttagaataccatcaa

SEQ ID NO: 119717 - DNA, 25 bp, Artificial
  probe
  misc_feature (1)..(25): SEQ ID NO: 1634; WAN024CIA_at; Start 336; Stop 360
tgcagatgttgttatagggaattac

SEQ ID NO: 119718 - DNA, 25 bp, Artificial
  probe
  misc_feature (1)..(25): SEQ ID NO: 1634; WAN024CIA_at; Start 564; Stop 588
tgatgatgaagcaactatgcatcgc

SEQ ID NO: 119719 - DNA, 25 bp, Artificial
  probe
  misc_feature (1)..(25): SEQ ID NO: 1634; WAN024CIA_at; Start 685; Stop 709
tcctgggcaagagatattgttgaag

SEQ ID NO: 119720 - DNA, 25 bp, Artificial
  probe
  misc_feature (1)..(25): SEQ ID NO: 1634; WAN024CIA_at; Start 159; Stop 183
tatgatgcaagataatcgtgtgcga

SEQ ID NO: 119721 - DNA, 25 bp, Artificial
  probe
  misc_feature (1)..(25): SEQ ID NO: 1634; WAN024CIA_at; Start 722; Stop 746
aaatatcggattgtgtcttggctgg

SEQ ID NO: 119722 - DNA, 25 bp, Artificial
  probe
  misc_feature (1)..(25): SEQ ID NO: 1634; WAN024CIA_at; Start 469; Stop 493
tggaaattcaatagctcggccttta

SEQ ID NO: 119723 - DNA, 25 bp, Artificial
  probe
  misc_feature (1)..(25): SEQ ID NO: 1634; WAN024CIA_at; Start 656; Stop 680
gaagcatcatgagaacggaatttga

SEQ ID NO: 119724 - DNA, 25 bp, Artificial
  probe
  misc_feature (1)..(25): SEQ ID NO: 1634; WAN024CIA_at; Start 632; Stop 656
tctatctgtatagaagacgttcagg

SEQ ID NO: 119725 - DNA, 25 bp, Artificial
  probe
  misc_feature (1)..(25): SEQ ID NO: 1634; WAN024CIA_at; Start 209; Stop 233
gggcagcacaagctaaaaatatggg

SEQ ID NO: 119726 - DNA, 25 bp, Artificial
  probe
  misc_feature (1)..(25): SEQ ID NO: 1634; WAN024CIA_at; Start 750; Stop 774
ggatgtctccgttctgcgtattcga

SEQ ID NO: 119727 - DNA, 25 bp, Artificial
  probe
  misc_feature (1)..(25): SEQ ID NO: 1634; WAN024CIA_at; Start 453; Stop 477
ccgtcaagcaggagattggaaattc

SEQ ID NO: 119728 - DNA, 25 bp, Artificial
  probe
  misc_feature (1)..(25): SEQ ID NO: 1634; WAN024CIA_at; Start 63; Stop 87
tgtcgagcatattctgaagcaaacc

SEQ ID NO: 119729 - DNA, 25 bp, Artificial
  probe
  misc_feature (1)..(25): SEQ ID NO: 1634; WAN024CIA_at; Start 737; Stop 761
tcttggctggtttggatgtctccgt

SEQ ID NO: 119730 - DNA, 25 bp, Artificial
  probe
  misc_feature (1)..(25): SEQ ID NO: 1634; WAN024CIA_at; Start 814; Stop 838
taccatcaattaacagatactgagg

SEQ ID NO: 119731 - DNA, 25 bp, Artificial
  probe
  misc_feature (1)..(25): SEQ ID NO: 1634; WAN024CIA_at; Start 863; Stop 887
taaagttgttttttgatgcagaaca

SEQ ID NO: 119732 - DNA, 25 bp, Artificial
  probe
  misc_feature (1)..(25): SEQ ID NO: 1634; WAN024CIA_at; Start 21; Stop 45
tgtggtaccgatatacaatacggga

SEQ ID NO: 119733 - DNA, 25 bp, Artificial
  probe
  misc_feature (1)..(25): SEQ ID NO: 1634; WAN024CIA_at; Start 579; Stop 603
tatgcatcgcttttatcttttagcc

SEQ ID NO: 119734 - DNA, 25 bp, Artificial
  probe
  misc_feature (1)..(25): SEQ ID NO: 1634; WAN024CIA_at; Start 47; Stop 71
aatatttagtggagtgtgtcgagca

SEQ ID NO: 119735 - DNA, 25 bp, Artificial
  probe
  misc_feature (1)..(25): SEQ ID NO: 1444; WAN024CIB_at; Start 652; Stop 676
tcctgttaataaaattggcttacac

SEQ ID NO: 119736 - DNA, 25 bp, Artificial
  probe
  misc_feature (1)..(25): SEQ ID NO: 1444; WAN024CIB_at; Start 636; Stop 660
gagctcgctatttggttcctgttaa

SEQ ID NO: 119737 - DNA, 25 bp, Artificial
  probe
  misc_feature (1)..(25): SEQ ID NO: 1444; WAN024CIB_at; Start 621; Stop 645
ttgcccttatgtatcgagctcgcta

SEQ ID NO: 119738 - DNA, 25 bp, Artificial
  probe
  misc_feature (1)..(25): SEQ ID NO: 1444; WAN024CIB_at; Start 1147; Stop 1171
gggcatgatttttacgattagagac

SEQ ID NO: 119739 - DNA, 25 bp, Artificial
  probe
  misc_feature (1)..(25): SEQ ID NO: 1444; WAN024CIB_at; Start 921; Stop 945
tgaatggagaagagattgcagaccg

SEQ ID NO: 119740 - DNA, 25 bp, Artificial
  probe
  misc_feature (1)..(25): SEQ ID NO: 1444; WAN024CIB_at; Start 851; Stop 875
aagcctttgtgggtctatgtttata

SEQ ID NO: 119741 - DNA, 25 bp, Artificial
  probe
  misc_feature (1)..(25): SEQ ID NO: 1444; WAN024CIB_at; Start 318; Stop 342
gaccttgctaattgctgtgattcaa

SEQ ID NO: 119742 - DNA, 25 bp, Artificial
  probe
  misc_feature (1)..(25): SEQ ID NO: 1444; WAN024CIB_at; Start 792; Stop 816
gatttattttccctaatcattcagg

SEQ ID NO: 119743 - DNA, 25 bp, Artificial
  probe
  misc_feature (1)..(25): SEQ ID NO: 1444; WAN024CIB_at; Start 1025; Stop 1049
cgtttctcagtcataggtggtctct

SEQ ID NO: 119744 - DNA, 25 bp, Artificial
  probe
  misc_feature (1)..(25): SEQ ID NO: 1444; WAN024CIB_at; Start 1002; Stop 1026
gatttattaatcgattggtccttcg

SEQ ID NO: 119745 - DNA, 25 bp, Artificial
  probe
  misc_feature (1)..(25): SEQ ID NO: 1444; WAN024CIB_at; Start 929; Stop 953
gaagagattgcagaccgtatgaaaa

SEQ ID NO: 119746 - DNA, 25 bp, Artificial
  probe
  misc_feature (1)..(25): SEQ ID NO: 1444; WAN024CIB_at; Start 59; Stop 83
tgtttatctatgtattgggaagtcg

SEQ ID NO: 119747 - DNA, 25 bp, Artificial
  probe
  misc_feature (1)..(25): SEQ ID NO: 1444; WAN024CIB_at; Start 1107; Stop 1131
tacgattggcaatgattccaggctt

SEQ ID NO: 119748 - DNA, 25 bp, Artificial
  probe
  misc_feature (1)..(25): SEQ ID NO: 1444; WAN024CIB_at; Start 685; Stop 709
taaacgctattcttatctcgaaatc

SEQ ID NO: 119749 - DNA, 25 bp, Artificial
  probe
  misc_feature (1)..(25): SEQ ID NO: 1444; WAN024CIB_at; Start 982; Stop 1006
tccaggtgcggatactagtcgattt

SEQ ID NO: 119750 - DNA, 25 bp, Artificial
  probe
  misc_feature (1)..(25): SEQ ID NO: 1444; WAN024CIB_at; Start 730; Stop 754
gatgccttatatgtatgtgatgagt

SEQ ID NO: 119751 - DNA, 25 bp, Artificial
  probe
  misc_feature (1)..(25): SEQ ID NO: 1444; WAN024CIB_at; Start 1123; Stop 1147
tccaggcttatttatgatgttcggg

SEQ ID NO: 119752 - DNA, 25 bp, Artificial
  probe
  misc_feature (1)..(25): SEQ ID NO: 1444; WAN024CIB_at; Start 668; Stop 692
ggcttacacaatcgatttaaacgct

SEQ ID NO: 119753 - DNA, 25 bp, Artificial
  probe
  misc_feature (1)..(25): SEQ ID NO: 1444; WAN024CIB_at; Start 907; Stop 931
tgcttttgttacgatgaatggagaa

SEQ ID NO: 119754 - DNA, 25 bp, Artificial
  probe
  misc_feature (1)..(25): SEQ ID NO: 1444; WAN024CIB_at; Start 715; Stop 739
gaatcctgcaggtgggatgccttat

SEQ ID NO: 119755 - DNA, 25 bp, Artificial
  probe
  misc_feature (1)..(25): SEQ ID NO: 1444; WAN024CIB_at; Start 1094; Stop 1118
gatgaaaagttattacgattggcaa

SEQ ID NO: 119756 - DNA, 25 bp, Artificial
  probe
  misc_feature (1)..(25): SEQ ID NO: 1444; WAN024CIB_at; Start 199; Stop 223
tctgttggattatccccttggatgt

SEQ ID NO: 119757 - DNA, 25 bp, Artificial
  probe
  misc_feature (1)..(25): SEQ ID NO: 1444; WAN024CIB_at; Start 1171; Stop 1195
cgaggtcaaggctttaaggctaaat

SEQ ID NO: 119758 - DNA, 25 bp, Artificial
  probe
  misc_feature (1)..(25): SEQ ID NO: 1444; WAN024CIB_at; Start 484; Stop 508
ggttctattgtaatcctcctatcca

SEQ ID NO: 119759 - DNA, 25 bp, Artificial
  probe
  misc_feature (1)..(25): SEQ ID NO: 1444; WAN024CIB_at; Start 1060; Stop 1084
tatggcaggtggtcccatgcttttt

SEQ ID NO: 119760 - DNA, 25 bp, Artificial
  probe
  misc_feature (1)..(25): SEQ ID NO: 1444; WAN024CIB_at; Start 758; Stop 782
cttagtgtaccagcttatttgttca

SEQ ID NO: 119761 - DNA, 25 bp, Artificial
  probe
  misc_feature (1)..(25): SEQ ID NO: 1444; WAN024CIB_at; Start 702; Stop 726
tcgaaatcatgttgaatcctgcagg

SEQ ID NO: 119762 - DNA, 25 bp, Artificial
  probe
  misc_feature (1)..(25): SEQ ID NO: 1444; WAN024CIB_at; Start 967; Stop 991
catttatggtatttatccaggtgcg

SEQ ID NO: 119763 - DNA, 25 bp, Artificial
  probe
  misc_feature (1)..(25): SEQ ID NO: 1444; WAN024CIB_at; Start 821; Stop 845
gcggctttatcaaaggaatttatgg

SEQ ID NO: 119764 - DNA, 25 bp, Artificial
  probe
  misc_feature (1)..(25): SEQ ID NO: 1444; WAN024CIB_at; Start 1159; Stop 1183
tacgattagagacgaggtcaaggct

SEQ ID NO: 119765 - DNA, 25 bp, Artificial
  probe
  misc_feature (1)..(25): SEQ ID NO: 1444; WAN024CIB_at; Start 336; Stop 360
gattcaatccttggcagttagcttg

SEQ ID NO: 119766 - DNA, 25 bp, Artificial
  probe
  misc_feature (1)..(25): SEQ ID NO: 1444; WAN024CIB_at; Start 941; Stop 965
gaccgtatgaaaaaatctggagaat

SEQ ID NO: 119767 - DNA, 25 bp, Artificial
  probe
  misc_feature (1)..(25): SEQ ID NO: 1444; WAN024CIB_at; Start 1014; Stop 1038
gattggtccttcgtttctcagtcat

SEQ ID NO: 119768 - DNA, 25 bp, Artificial
  probe
  misc_feature (1)..(25): SEQ ID NO: 1444; WAN024CIB_at; Start 747; Stop 771
tgatgagttttcttagtgtaccagc

SEQ ID NO: 119769 - DNA, 25 bp, Artificial
  probe
  misc_feature (1)..(25): SEQ ID NO: 2469; WAN024CIC_at; Start 7; Stop 31
gacatccaaggggataatccaacag

SEQ ID NO: 119770 - DNA, 25 bp, Artificial
  probe
  misc_feature (1)..(25): SEQ ID NO: 2469; WAN024CIC_at; Start 4; Stop 28
gcggacatccaaggggataatccaa

SEQ ID NO: 119771 - DNA, 25 bp, Artificial
  probe
  misc_feature (1)..(25): SEQ ID NO: 2469; WAN024CIC_at; Start 40; Stop 64
gataaacttcttagattcccacctg

SEQ ID NO: 119772 - DNA, 25 bp, Artificial
  probe
  misc_feature (1)..(25): SEQ ID NO: 2469; WAN024CIC_at; Start 1; Stop 25
atggcggacatccaaggggataatc

SEQ ID NO: 119773 - DNA, 25 bp, Artificial
  probe
  misc_feature (1)..(25): SEQ ID NO: 2469; WAN024CIC_at; Start 50; Stop 74
ttagattcccacctgttagggcggc

SEQ ID NO: 119774 - DNA, 25 bp, Artificial
  probe
  misc_feature (1)..(25): SEQ ID NO: 2469; WAN024CIC_at; Start 52; Stop 76
agattcccacctgttagggcggctg

SEQ ID NO: 119775 - DNA, 25 bp, Artificial
  probe
  misc_feature (1)..(25): SEQ ID NO: 2469; WAN024CIC_at; Start 63; Stop 87
tgttagggcggctgagaaggctaga

SEQ ID NO: 119776 - DNA, 25 bp, Artificial
  probe
  misc_feature (1)..(25): SEQ ID NO: 2469; WAN024CIC_at; Start 55; Stop 79
ttcccacctgttagggcggctgaga

SEQ ID NO: 119777 - DNA, 25 bp, Artificial
  probe
  misc_feature (1)..(25): SEQ ID NO: 2469; WAN024CIC_at; Start 17; Stop 41
gggataatccaacagaaaaaattga

SEQ ID NO: 119778 - DNA, 25 bp, Artificial
  probe
  misc_feature (1)..(25): SEQ ID NO: 2469; WAN024CIC_at; Start 44; Stop 68
aacttcttagattcccacctgttag

SEQ ID NO: 119779 - DNA, 25 bp, Artificial
  probe
  misc_feature (1)..(25): SEQ ID NO: 2469; WAN024CIC_at; Start 47; Stop 71
ttcttagattcccacctgttagggc

SEQ ID NO: 119780 - DNA, 25 bp, Artificial
  probe
  misc_feature (1)..(25): SEQ ID NO: 2469; WAN024CIC_at; Start 38; Stop 62
ttgataaacttcttagattcccacc

SEQ ID NO: 119781 - DNA, 25 bp, Artificial
  probe
  misc_feature (1)..(25): SEQ ID NO: 2469; WAN024CIC_at; Start 53; Stop 77
gattcccacctgttagggcggctga

SEQ ID NO: 119782 - DNA, 25 bp, Artificial
  probe
  misc_feature (1)..(25): SEQ ID NO: 2469; WAN024CIC_at; Start 51; Stop 75
tagattcccacctgttagggcggct

SEQ ID NO: 119783 - DNA, 25 bp, Artificial
  probe
  misc_feature (1)..(25): SEQ ID NO: 2469; WAN024CIC_at; Start 57; Stop 81
cccacctgttagggcggctgagaag

SEQ ID NO: 119784 - DNA, 25 bp, Artificial
  probe
  misc_feature (1)..(25): SEQ ID NO: 2469; WAN024CIC_at; Start 41; Stop 65
ataaacttcttagattcccacctgt

SEQ ID NO: 119785 - DNA, 25 bp, Artificial
  probe
  misc_feature (1)..(25): SEQ ID NO: 2469; WAN024CIC_at; Start 9; Stop 33
catccaaggggataatccaacagaa

SEQ ID NO: 119786 - DNA, 25 bp, Artificial
  probe
  misc_feature (1)..(25): SEQ ID NO: 2469; WAN024CIC_at; Start 48; Stop 72
tcttagattcccacctgttagggcg

SEQ ID NO: 119787 - DNA, 25 bp, Artificial
  probe
  misc_feature (1)..(25): SEQ ID NO: 2469; WAN024CIC_at; Start 36; Stop 60
aattgataaacttcttagattccca

SEQ ID NO: 119788 - DNA, 25 bp, Artificial
  probe
  misc_feature (1)..(25): SEQ ID NO: 2469; WAN024CIC_at; Start 21; Stop 45
taatccaacagaaaaaattgataaa

SEQ ID NO: 119789 - DNA, 25 bp, Artificial
  probe
  misc_feature (1)..(25): SEQ ID NO: 2469; WAN024CIC_at; Start 23; Stop 47
atccaacagaaaaaattgataaact

SEQ ID NO: 119790 - DNA, 25 bp, Artificial
  probe
  misc_feature (1)..(25): SEQ ID NO: 2469; WAN024CIC_at; Start 56; Stop 80
tcccacctgttagggcggctgagaa

SEQ ID NO: 119791 - DNA, 25 bp, Artificial
  probe
  misc_feature (1)..(25): SEQ ID NO: 2469; WAN024CIC_at; Start 54; Stop 78
attcccacctgttagggcggctgag

SEQ ID NO: 119792 - DNA, 25 bp, Artificial
  probe
  misc_feature (1)..(25): SEQ ID NO: 2469; WAN024CIC_at; Start 19; Stop 43
gataatccaacagaaaaaattgata

SEQ ID NO: 119793 - DNA, 25 bp, Artificial
  probe
  misc_feature (1)..(25): SEQ ID NO: 2469; WAN024CIC_at; Start 37; Stop 61
attgataaacttcttagattcccac

SEQ ID NO: 119794 - DNA, 25 bp, Artificial
  probe
  misc_feature (1)..(25): SEQ ID NO: 2469; WAN024CIC_at; Start 62; Stop 86
ctgttagggcggctgagaaggctag

SEQ ID NO: 119795 - DNA, 25 bp, Artificial
  probe
  misc_feature (1)..(25): SEQ ID NO: 2469; WAN024CIC_at; Start 11; Stop 35
tccaaggggataatccaacagaaaa

SEQ ID NO: 119796 - DNA, 25 bp, Artificial
  probe
  misc_feature (1)..(25): SEQ ID NO: 2469; WAN024CIC_at; Start 18; Stop 42
ggataatccaacagaaaaaattgat

SEQ ID NO: 119797 - DNA, 25 bp, Artificial
  probe
  misc_feature (1)..(25): SEQ ID NO: 2469; WAN024CIC_at; Start 2; Stop 26
tggcggacatccaaggggataatcc

SEQ ID NO: 119798 - DNA, 25 bp, Artificial
  probe
  misc_feature (1)..(25): SEQ ID NO: 2469; WAN024CIC_at; Start 49; Stop 73
cttagattcccacctgttagggcgg

SEQ ID NO: 119799 - DNA, 25 bp, Artificial
  probe
  misc_feature (1)..(25): SEQ ID NO: 2469; WAN024CIC_at; Start 29; Stop 53
cagaaaaaattgataaacttcttag

SEQ ID NO: 119800 - DNA, 25 bp, Artificial
  probe
  misc_feature (1)..(25): SEQ ID NO: 2469; WAN024CIC_at; Start 45; Stop 69
acttcttagattcccacctgttagg

SEQ ID NO: 119801 - DNA, 25 bp, Artificial
  probe
  misc_feature (1)..(25): SEQ ID NO: 2469; WAN024CIC_at; Start 39; Stop 63
tgataaacttcttagattcccacct

SEQ ID NO: 119802 - DNA, 25 bp, Artificial
  probe
  misc_feature (1)..(25): SEQ ID NO: 2469; WAN024CIC_at; Start 3; Stop 27
ggcggacatccaaggggataatcca

SEQ ID NO: 119803 - DNA, 25 bp, Artificial
  probe
  misc_feature (1)..(25): SEQ ID NO: 1680; WAN024CID_at; Start 15; Stop 39
taacatgcgcacgatcagaaatacg

SEQ ID NO: 119804 - DNA, 25 bp, Artificial
  probe
  misc_feature (1)..(25): SEQ ID NO: 1680; WAN024CID_at; Start 126; Stop 150
tgacagatattttttcagggaagaa

SEQ ID NO: 119805 - DNA, 25 bp, Artificial
  probe
  misc_feature (1)..(25): SEQ ID NO: 1680; WAN024CID_at; Start 148; Stop 172
gaaaatcccagatggaatcaagtgc

SEQ ID NO: 119806 - DNA, 25 bp, Artificial
  probe
  misc_feature (1)..(25): SEQ ID NO: 1680; WAN024CID_at; Start 48; Stop 72
cagttgttacaccttcctcatgaag

SEQ ID NO: 119807 - DNA, 25 bp, Artificial
  probe
  misc_feature (1)..(25): SEQ ID NO: 1680; WAN024CID_at; Start 121; Stop 145
cccaatgacagatattttttcaggg

SEQ ID NO: 119808 - DNA, 25 bp, Artificial
  probe
  misc_feature (1)..(25): SEQ ID NO: 1680; WAN024CID_at; Start 61; Stop 85
ttcctcatgaagatagctcaactct

SEQ ID NO: 119809 - DNA, 25 bp, Artificial
  probe
  misc_feature (1)..(25): SEQ ID NO: 1680; WAN024CID_at; Start 191; Stop 215
tcaatcacaatcgtgtgaccagcat

SEQ ID NO: 119810 - DNA, 25 bp, Artificial
  probe
  misc_feature (1)..(25): SEQ ID NO: 1680; WAN024CID_at; Start 23; Stop 47
gcacgatcagaaatacgcaagttat

SEQ ID NO: 119811 - DNA, 25 bp, Artificial
  probe
  misc_feature (1)..(25): SEQ ID NO: 1680; WAN024CID_at; Start 93; Stop 117
gagatttaggatttacaaccatacc

SEQ ID NO: 119812 - DNA, 25 bp, Artificial
  probe
  misc_feature (1)..(25): SEQ ID NO: 1680; WAN024CID_at; Start 137; Stop 161
ttttcagggaagaaaatcccagatg

SEQ ID NO: 119813 - DNA, 25 bp, Artificial
  probe
  misc_feature (1)..(25): SEQ ID NO: 1680; WAN024CID_at; Start 199; Stop 223
aatcgtgtgaccagcattatcacca

SEQ ID NO: 119814 - DNA, 25 bp, Artificial
  probe
  misc_feature (1)..(25): SEQ ID NO: 1680; WAN024CID_at; Start 9; Stop 33
gcaaaataacatgcgcacgatcaga

SEQ ID NO: 119815 - DNA, 25 bp, Artificial
  probe
  misc_feature (1)..(25): SEQ ID NO: 1680; WAN024CID_at; Start 36; Stop 60
tacgcaagttatcagttgttacacc

SEQ ID NO: 119816 - DNA, 25 bp, Artificial
  probe
  misc_feature (1)..(25): SEQ ID NO: 1680; WAN024CID_at; Start 71; Stop 95
agatagctcaactcttttacaagag

SEQ ID NO: 119817 - DNA, 25 bp, Artificial
  probe
  misc_feature (1)..(25): SEQ ID NO: 1680; WAN024CID_at; Start 222; Stop 246
caccttggtaacgtgcaatcacttc

SEQ ID NO: 119818 - DNA, 25 bp, Artificial
  probe
  misc_feature (1)..(25): SEQ ID NO: 1680; WAN024CID_at; Start 101; Stop 125
ggatttacaaccataccattcccaa

SEQ ID NO: 119819 - DNA, 25 bp, Artificial
  probe
  misc_feature (1)..(25): SEQ ID NO: 1680; WAN024CID_at; Start 205; Stop 229
gtgaccagcattatcaccaccttgg

SEQ ID NO: 119820 - DNA, 25 bp, Artificial
  probe
  misc_feature (1)..(25): SEQ ID NO: 1680; WAN024CID_at; Start 155; Stop 179
ccagatggaatcaagtgcaacttaa

SEQ ID NO: 119821 - DNA, 25 bp, Artificial
  probe
  misc_feature (1)..(25): SEQ ID NO: 1680; WAN024CID_at; Start 153; Stop 177
tcccagatggaatcaagtgcaactt

SEQ ID NO: 119822 - DNA, 25 bp, Artificial
  probe
  misc_feature (1)..(25): SEQ ID NO: 1680; WAN024CID_at; Start 29; Stop 53
tcagaaatacgcaagttatcagttg

SEQ ID NO: 119823 - DNA, 25 bp, Artificial
  probe
  misc_feature (1)..(25): SEQ ID NO: 1680; WAN024CID_at; Start 166; Stop 190
caagtgcaacttaaatttcttaccg

SEQ ID NO: 119824 - DNA, 25 bp, Artificial
  probe
  misc_feature (1)..(25): SEQ ID NO: 1680; WAN024CID_at; Start 20; Stop 44
tgcgcacgatcagaaatacgcaagt

SEQ ID NO: 119825 - DNA, 25 bp, Artificial
  probe
  misc_feature (1)..(25): SEQ ID NO: 1680; WAN024CID_at; Start 196; Stop 220
cacaatcgtgtgaccagcattatca

SEQ ID NO: 119826 - DNA, 25 bp, Artificial
  probe
  misc_feature (1)..(25): SEQ ID NO: 1680; WAN024CID_at; Start 218; Stop 242
tcaccaccttggtaacgtgcaatca

SEQ ID NO: 119827 - DNA, 25 bp, Artificial
  probe
  misc_feature (1)..(25): SEQ ID NO: 1680; WAN024CID_at; Start 52; Stop 76
tgttacaccttcctcatgaagatag

SEQ ID NO: 119828 - DNA, 25 bp, Artificial
  probe
  misc_feature (1)..(25): SEQ ID NO: 1680; WAN024CID_at; Start 88; Stop 112
tacaagagatttaggatttacaacc

SEQ ID NO: 119829 - DNA, 25 bp, Artificial
  probe
  misc_feature (1)..(25): SEQ ID NO: 1680; WAN024CID_at; Start 108; Stop 132
caaccataccattcccaatgacaga

SEQ ID NO: 119830 - DNA, 25 bp, Artificial
  probe
  misc_feature (1)..(25): SEQ ID NO: 1680; WAN024CID_at; Start 2; Stop 26
tgataaggcaaaataacatgcgcac

SEQ ID NO: 119831 - DNA, 25 bp, Artificial
  probe
  misc_feature (1)..(25): SEQ ID NO: 1680; WAN024CID_at; Start 5; Stop 29
taaggcaaaataacatgcgcacgat

SEQ ID NO: 119832 - DNA, 25 bp, Artificial
  probe
  misc_feature (1)..(25): SEQ ID NO: 1680; WAN024CID_at; Start 169; Stop 193
gtgcaacttaaatttcttaccgtca

SEQ ID NO: 119833 - DNA, 25 bp, Artificial
  probe
  misc_feature (1)..(25): SEQ ID NO: 1680; WAN024CID_at; Start 212; Stop 236
gcattatcaccaccttggtaacgtg

SEQ ID NO: 119834 - DNA, 25 bp, Artificial
  probe
  misc_feature (1)..(25): SEQ ID NO: 1680; WAN024CID_at; Start 230; Stop 254
taacgtgcaatcacttctgcattcg

SEQ ID NO: 119835 - DNA, 25 bp, Artificial
  probe
  misc_feature (1)..(25): SEQ ID NO: 1680; WAN024CID_at; Start 183; Stop 207
tcttaccgtcaatcacaatcgtgtg

SEQ ID NO: 119836 - DNA, 25 bp, Artificial
  probe
  misc_feature (1)..(25): SEQ ID NO: 1680; WAN024CID_at; Start 234; Stop 258
gtgcaatcacttctgcattcgctga

SEQ ID NO: 119837 - DNA, 25 bp, Artificial
  probe
  misc_feature (1)..(25): SEQ ID NO: 2804; WAN024CIE_at; Start 985; Stop 1009
cgtcatagccgtcgtgtttctggta

SEQ ID NO: 119838 - DNA, 25 bp, Artificial
  probe
  misc_feature (1)..(25): SEQ ID NO: 2804; WAN024CIE_at; Start 684; Stop 708
caaacgtgtgctttttgaaggtgca

SEQ ID NO: 119839 - DNA, 25 bp, Artificial
  probe
  misc_feature (1)..(25): SEQ ID NO: 2804; WAN024CIE_at; Start 717; Stop 741
tatgctagatatcgaccaaggtact

SEQ ID NO: 119840 - DNA, 25 bp, Artificial
  probe
  misc_feature (1)..(25): SEQ ID NO: 2804; WAN024CIE_at; Start 101; Stop 125
cagacttcctttcagcgaatgcaga

SEQ ID NO: 119841 - DNA, 25 bp, Artificial
  probe
  misc_feature (1)..(25): SEQ ID NO: 2804; WAN024CIE_at; Start 1177; Stop 1201
gatattaccggagttcgcaatttgg

SEQ ID NO: 119842 - DNA, 25 bp, Artificial
  probe
  misc_feature (1)..(25): SEQ ID NO: 2804; WAN024CIE_at; Start 1214; Stop 1238
agaatgcgcgtaactatgttcgtcg

SEQ ID NO: 119843 - DNA, 25 bp, Artificial
  probe
  misc_feature (1)..(25): SEQ ID NO: 2804; WAN024CIE_at; Start 141; Stop 165
ccaaggtggtgataatgctggtcac

SEQ ID NO: 119844 - DNA, 25 bp, Artificial
  probe
  misc_feature (1)..(25): SEQ ID NO: 2804; WAN024CIE_at; Start 1131; Stop 1155
gaaacgttgcaagcctatctatgaa

SEQ ID NO: 119845 - DNA, 25 bp, Artificial
  probe
  misc_feature (1)..(25): SEQ ID NO: 2804; WAN024CIE_at; Start 1280; Stop 1304
taggtcctggtcgtgaacaaacaaa

SEQ ID NO: 119846 - DNA, 25 bp, Artificial
  probe
  misc_feature (1)..(25): SEQ ID NO: 2804; WAN024CIE_at; Start 970; Stop 994
gactcagttgtgatgcgtcatagcc

SEQ ID NO: 119847 - DNA, 25 bp, Artificial
  probe
  misc_feature (1)..(25): SEQ ID NO: 2804; WAN024CIE_at; Start 844; Stop 868
tatacgagtcgtgtaggagatggtc

SEQ ID NO: 119848 - DNA, 25 bp, Artificial
  probe
  misc_feature (1)..(25): SEQ ID NO: 2804; WAN024CIE_at; Start 1054; Stop 1078
gatactgtgaaaatctgtgtggcct

SEQ ID NO: 119849 - DNA, 25 bp, Artificial
  probe
  misc_feature (1)..(25): SEQ ID NO: 2804; WAN024CIE_at; Start 800; Stop 824
tcggtccaagcaagattgacaaggt

SEQ ID NO: 119850 - DNA, 25 bp, Artificial
  probe
  misc_feature (1)..(25): SEQ ID NO: 2804; WAN024CIE_at; Start 950; Stop 974
cacgtcgtgtaggttggtttgactc

SEQ ID NO: 119851 - DNA, 25 bp, Artificial
  probe
  misc_feature (1)..(25): SEQ ID NO: 2804; WAN024CIE_at; Start 1199; Stop 1223
tggaagatcttcctgagaatgcgcg

SEQ ID NO: 119852 - DNA, 25 bp, Artificial
  probe
  misc_feature (1)..(25): SEQ ID NO: 2804; WAN024CIE_at; Start 192; Stop 216
taagttgcacttgattccatctggg

SEQ ID NO: 119853 - DNA, 25 bp, Artificial
  probe
  misc_feature (1)..(25): SEQ ID NO: 2804; WAN024CIE_at; Start 367; Stop 391
catatcgagttggatcgcttgcaag

SEQ ID NO: 119854 - DNA, 25 bp, Artificial
  probe
  misc_feature (1)..(25): SEQ ID NO: 2804; WAN024CIE_at; Start 1146; Stop 1170
tatctatgaagagttgccaggttgg

SEQ ID NO: 119855 - DNA, 25 bp, Artificial
  probe
  misc_feature (1)..(25): SEQ ID NO: 2804; WAN024CIE_at; Start 456; Stop 480
caaggctgctcgtgttggaattcgt

SEQ ID NO: 119856 - DNA, 25 bp, Artificial
  probe
  misc_feature (1)..(25): SEQ ID NO: 2804; WAN024CIE_at; Start 669; Stop 693
tgcgcttgataatggcaaacgtgtg

SEQ ID NO: 119857 - DNA, 25 bp, Artificial
  probe
  misc_feature (1)..(25): SEQ ID NO: 2804; WAN024CIE_at; Start 298; Stop 322
cttcatgaggaaggtgtaacaactg

SEQ ID NO: 119858 - DNA, 25 bp, Artificial
  probe
  misc_feature (1)..(25): SEQ ID NO: 2804; WAN024CIE_at; Start 1073; Stop 1097
tggcctatgatcttgacggtcaacg

SEQ ID NO: 119859 - DNA, 25 bp, Artificial
  probe
  misc_feature (1)..(25): SEQ ID NO: 2804; WAN024CIE_at; Start 163; Stop 187
cacacgattgtgattgacggtaaga

SEQ ID NO: 119860 - DNA, 25 bp, Artificial
  probe
  misc_feature (1)..(25): SEQ ID NO: 2804; WAN024CIE_at; Start 762; Stop 786
aaaccctgtagctggtggtgtgaca

SEQ ID NO: 119861 - DNA, 25 bp, Artificial
  probe
  misc_feature (1)..(25): SEQ ID NO: 2804; WAN024CIE_at; Start 526; Stop 550
cgtaaccttgctgaaaagaatcgtc

SEQ ID NO: 119862 - DNA, 25 bp, Artificial
  probe
  misc_feature (1)..(25): SEQ ID NO: 2804; WAN024CIE_at; Start 859; Stop 883
ggagatggtcctttcccaactgagt

SEQ ID NO: 119863 - DNA, 25 bp, Artificial
  probe
  misc_feature (1)..(25): SEQ ID NO: 2804; WAN024CIE_at; Start 783; Stop 807
gacaattggttctggtgtcggtcca

SEQ ID NO: 119864 - DNA, 25 bp, Artificial
  probe
  misc_feature (1)..(25): SEQ ID NO: 2804; WAN024CIE_at; Start 384; Stop 408
cttgcaagaagaagctaagggcgac

SEQ ID NO: 119865 - DNA, 25 bp, Artificial
  probe
  misc_feature (1)..(25): SEQ ID NO: 2804; WAN024CIE_at; Start 324; Stop 348
taacttgcgtatttctgatcgtgcg

SEQ ID NO: 119866 - DNA, 25 bp, Artificial
  probe
  misc_feature (1)..(25): SEQ ID NO: 2804; WAN024CIE_at; Start 902; Stop 926
aacgtatccgtgaagtgggtcatga

SEQ ID NO: 119867 - DNA, 25 bp, Artificial
  probe
  misc_feature (1)..(25): SEQ ID NO: 2804; WAN024CIE_at; Start 887; Stop 911
ttgatgaagtgggagaacgtatccg

SEQ ID NO: 119868 - DNA, 25 bp, Artificial
  probe
  misc_feature (1)..(25): SEQ ID NO: 2804; WAN024CIE_at; Start 933; Stop 957
tacaacaactggtcgtccacgtcgt

SEQ ID NO: 119869 - DNA, 25 bp, Artificial
  probe
  misc_feature (1)..(25): SEQ ID NO: 2804; WAN024CIE_at; Start 47; Stop 71
cttcagttgttgttgtaggtaccca

SEQ ID NO: 119870 - DNA, 25 bp, Artificial
  probe
  misc_feature (1)..(25): SEQ ID NO: 2804; WAN024CIE_at; Start 1161; Stop 1185
gccaggttggtcagaagatattacc

SEQ ID NO: 119871 - DNA, 25 bp, Artificial
  probe
  misc_feature (1)..(25): SEQ ID NO: 1807; WAN024CIF_at; Start 372; Stop 396
tcttttaagtgctggatttgagtcc

SEQ ID NO: 119872 - DNA, 25 bp, Artificial
  probe
  misc_feature (1)..(25): SEQ ID NO: 1807; WAN024CIF_at; Start 417; Stop 441
tatcaaggagatcagaagtgttcta

SEQ ID NO: 119873 - DNA, 25 bp, Artificial
  probe
  misc_feature (1)..(25): SEQ ID NO: 1807; WAN024CIF_at; Start 101; Stop 125
tgtataatcctctattgccatctgg

SEQ ID NO: 119874 - DNA, 25 bp, Artificial
  probe
  misc_feature (1)..(25): SEQ ID NO: 1807; WAN024CIF_at; Start 266; Stop 290
agataactttttttgaccgctatgg

SEQ ID NO: 119875 - DNA, 25 bp, Artificial
  probe
  misc_feature (1)..(25): SEQ ID NO: 1807; WAN024CIF_at; Start 325; Stop 349
gatttcatatttacttatccagaag

SEQ ID NO: 119876 - DNA, 25 bp, Artificial
  probe
  misc_feature (1)..(25): SEQ ID NO: 1807; WAN024CIF_at; Start 408; Stop 432
tcatttttctatcaaggagatcaga

SEQ ID NO: 119877 - DNA, 25 bp, Artificial
  probe
  misc_feature (1)..(25): SEQ ID NO: 1807; WAN024CIF_at; Start 2; Stop 26
tgattattacacagagacagtctat

SEQ ID NO: 119878 - DNA, 25 bp, Artificial
  probe
  misc_feature (1)..(25): SEQ ID NO: 1807; WAN024CIF_at; Start 150; Stop 174
tagtgtcaattaccaggctgcacga

SEQ ID NO: 119879 - DNA, 25 bp, Artificial
  probe
  misc_feature (1)..(25): SEQ ID NO: 1807; WAN024CIF_at; Start 153; Stop 177
tgtcaattaccaggctgcacgaacc

SEQ ID NO: 119880 - DNA, 25 bp, Artificial
  probe
  misc_feature (1)..(25): SEQ ID NO: 1807; WAN024CIF_at; Start 340; Stop 364
tatccagaagatagttatacttatc

SEQ ID NO: 119881 - DNA, 25 bp, Artificial
  probe
  misc_feature (1)..(25): SEQ ID NO: 1807; WAN024CIF_at; Start 386; Stop 410
gatttgagtccttaactttttatca

SEQ ID NO: 119882 - DNA, 25 bp, Artificial
  probe
  misc_feature (1)..(25): SEQ ID NO: 1807; WAN024CIF_at; Start 76; Stop 100
tattaccctgacaaaagtgttcgtc

SEQ ID NO: 119883 - DNA, 25 bp, Artificial
  probe
  misc_feature (1)..(25): SEQ ID NO: 1807; WAN024CIF_at; Start 172; Stop 196
cgaacccaacctcagcttcccttat

SEQ ID NO: 119884 - DNA, 25 bp, Artificial
  probe
  misc_feature (1)..(25): SEQ ID NO: 1807; WAN024CIF_at; Start 61; Stop 85
ggaacaactgtatcttattaccctg

SEQ ID NO: 119885 - DNA, 25 bp, Artificial
  probe
  misc_feature (1)..(25): SEQ ID NO: 1807; WAN024CIF_at; Start 156; Stop 180
caattaccaggctgcacgaacccaa

SEQ ID NO: 119886 - DNA, 25 bp, Artificial
  probe
  misc_feature (1)..(25): SEQ ID NO: 1807; WAN024CIF_at; Start 10; Stop 34
acacagagacagtctattcattggg

SEQ ID NO: 119887 - DNA, 25 bp, Artificial
  probe
  misc_feature (1)..(25): SEQ ID NO: 1807; WAN024CIF_at; Start 415; Stop 439
tctatcaaggagatcagaagtgttc

SEQ ID NO: 119888 - DNA, 25 bp, Artificial
  probe
  misc_feature (1)..(25): SEQ ID NO: 1807; WAN024CIF_at; Start 81; Stop 105
ccctgacaaaagtgttcgtctgtat

SEQ ID NO: 119889 - DNA, 25 bp, Artificial
  probe
  misc_feature (1)..(25): SEQ ID NO: 1807; WAN024CIF_at; Start 377; Stop 401
taagtgctggatttgagtccttaac

SEQ ID NO: 119890 - DNA, 25 bp, Artificial
  probe
  misc_feature (1)..(25): SEQ ID NO: 1807; WAN024CIF_at; Start 105; Stop 129
taatcctctattgccatctggtgag

SEQ ID NO: 119891 - DNA, 25 bp, Artificial
  probe
  misc_feature (1)..(25): SEQ ID NO: 1807; WAN024CIF_at; Start 121; Stop 145
tctggtgagattctaaagacttggt

SEQ ID NO: 119892 - DNA, 25 bp, Artificial
  probe
  misc_feature (1)..(25): SEQ ID NO: 1807; WAN024CIF_at; Start 211; Stop 235
gagtatcaactatcactggtttttg

SEQ ID NO: 119893 - DNA, 25 bp, Artificial
  probe
  misc_feature (1)..(25): SEQ ID NO: 1807; WAN024CIF_at; Start 280; Stop 304
gaccgctatggtgatattttagaaa

SEQ ID NO: 119894 - DNA, 25 bp, Artificial
  probe
  misc_feature (1)..(25): SEQ ID NO: 1807; WAN024CIF_at; Start 143; Stop 167
ggttttctagtgtcaattaccaggc

SEQ ID NO: 119895 - DNA, 25 bp, Artificial
  probe
  misc_feature (1)..(25): SEQ ID NO: 1807; WAN024CIF_at; Start 207; Stop 231
gcaggagtatcaactatcactggtt

SEQ ID NO: 119896 - DNA, 25 bp, Artificial
  probe
  misc_feature (1)..(25): SEQ ID NO: 1807; WAN024CIF_at; Start 194; Stop 218
tattaaaaagaaagcaggagtatca

SEQ ID NO: 119897 - DNA, 25 bp, Artificial
  probe
  misc_feature (1)..(25): SEQ ID NO: 1807; WAN024CIF_at; Start 88; Stop 112
aaaagtgttcgtctgtataatcctc

SEQ ID NO: 119898 - DNA, 25 bp, Artificial
  probe
  misc_feature (1)..(25): SEQ ID NO: 1807; WAN024CIF_at; Start 127; Stop 151
gagattctaaagacttggttttcta

SEQ ID NO: 119899 - DNA, 25 bp, Artificial
  probe
  misc_feature (1)..(25): SEQ ID NO: 1807; WAN024CIF_at; Start 249; Stop 273
aaatggagtttataccaagataact

SEQ ID NO: 119900 - DNA, 25 bp, Artificial
  probe
  misc_feature (1)..(25): SEQ ID NO: 1807; WAN024CIF_at; Start 203; Stop 227
gaaagcaggagtatcaactatcact

SEQ ID NO: 119901 - DNA, 25 bp, Artificial
  probe
  misc_feature (1)..(25): SEQ ID NO: 1807; WAN024CIF_at; Start 240; Stop 264
tcagcctgaaaatggagtttatacc

SEQ ID NO: 119902 - DNA, 25 bp, Artificial
  probe
  misc_feature (1)..(25): SEQ ID NO: 1807; WAN024CIF_at; Start 46; Stop 70
gggacttatatgtatggaacaactg

SEQ ID NO: 119903 - DNA, 25 bp, Artificial
  probe
  misc_feature (1)..(25): SEQ ID NO: 1807; WAN024CIF_at; Start 41; Stop 65
ttggtgggacttatatgtatggaac

SEQ ID NO: 119904 - DNA, 25 bp, Artificial
  probe
  misc_feature (1)..(25): SEQ ID NO: 1807; WAN024CIF_at; Start 116; Stop 140
tgccatctggtgagattctaaagac

SEQ ID NO: 119905 - DNA, 25 bp, Artificial
  probe
  misc_feature (1)..(25): SEQ ID NO: 1834; WAN024CIG_at; Start 625; Stop 649
gataaatctggctcggatgtcttgg

SEQ ID NO: 119906 - DNA, 25 bp, Artificial
  probe
  misc_feature (1)..(25): SEQ ID NO: 1834; WAN024CIG_at; Start 61; Stop 85
gctactggtctttctcaacttggag

SEQ ID NO: 119907 - DNA, 25 bp, Artificial
  probe
  misc_feature (1)..(25): SEQ ID NO: 1834; WAN024CIG_at; Start 230; Stop 254
cttgtattgaagatgtgacgcagga

SEQ ID NO: 119908 - DNA, 25 bp, Artificial
  probe
  misc_feature (1)..(25): SEQ ID NO: 1834; WAN024CIG_at; Start 338; Stop 362
gtcaggttgaccactacaatcgctt

SEQ ID NO: 119909 - DNA, 25 bp, Artificial
  probe
  misc_feature (1)..(25): SEQ ID NO: 1834; WAN024CIG_at; Start 1232; Stop 1256
cagatgttgatcaaatgcgtcaggc

SEQ ID NO: 119910 - DNA, 25 bp, Artificial
  probe
  misc_feature (1)..(25): SEQ ID NO: 1834; WAN024CIG_at; Start 449; Stop 473
tactggaaaaccatgtgacgggtga

SEQ ID NO: 119911 - DNA, 25 bp, Artificial
  probe
  misc_feature (1)..(25): SEQ ID NO: 1834; WAN024CIG_at; Start 323; Stop 347
tagaaggtcgagtacgtcaggttga

SEQ ID NO: 119912 - DNA, 25 bp, Artificial
  probe
  misc_feature (1)..(25): SEQ ID NO: 1834; WAN024CIG_at; Start 740; Stop 764
caaataaggcgacttatgagcgcgc

SEQ ID NO: 119913 - DNA, 25 bp, Artificial
  probe
  misc_feature (1)..(25): SEQ ID NO: 1834; WAN024CIG_at; Start 403; Stop 427
gagccgattatgacagtttaccaag

SEQ ID NO: 119914 - DNA, 25 bp, Artificial
  probe
  misc_feature (1)..(25): SEQ ID NO: 1834; WAN024CIG_at; Start 918; Stop 942
tgatgtcactttccgtattgcagcg

SEQ ID NO: 119915 - DNA, 25 bp, Artificial
  probe
  misc_feature (1)..(25): SEQ ID NO: 1834; WAN024CIG_at; Start 640; Stop 664
gatgtcttggtatggcaggaacctc

SEQ ID NO: 119916 - DNA, 25 bp, Artificial
  probe
  misc_feature (1)..(25): SEQ ID NO: 1834; WAN024CIG_at; Start 308; Stop 332
tagactggaaagacctagaaggtcg

SEQ ID NO: 119917 - DNA, 25 bp, Artificial
  probe
  misc_feature (1)..(25): SEQ ID NO: 1834; WAN024CIG_at; Start 658; Stop 682
gaacctctctatgatgccattccag

SEQ ID NO: 119918 - DNA, 25 bp, Artificial
  probe
  misc_feature (1)..(25): SEQ ID NO: 1834; WAN024CIG_at; Start 933; Stop 957
tattgcagcggtgacagagatgtct

SEQ ID NO: 119919 - DNA, 25 bp, Artificial
  probe
  misc_feature (1)..(25): SEQ ID NO: 1834; WAN024CIG_at; Start 1290; Stop 1314
tgacttggtgagatatcaggaaacc

SEQ ID NO: 119920 - DNA, 25 bp, Artificial
  probe
  misc_feature (1)..(25): SEQ ID NO: 1834; WAN024CIG_at; Start 772; Stop 796
ttaactgacgagaaataccatgatc

SEQ ID NO: 119921 - DNA, 25 bp, Artificial
  probe
  misc_feature (1)..(25): SEQ ID NO: 1834; WAN024CIG_at; Start 76; Stop 100
caacttggagtggtcatcgatgcag

SEQ ID NO: 119922 - DNA, 25 bp, Artificial
  probe
  misc_feature (1)..(25): SEQ ID NO: 1834; WAN024CIG_at; Start 1011; Stop 1035
tagtccacagaagattcaggagctg

SEQ ID NO: 119923 - DNA, 25 bp, Artificial
  probe
  misc_feature (1)..(25): SEQ ID NO: 1834; WAN024CIG_at; Start 835; Stop 859
gataatttcctaagacgagatgcct

SEQ ID NO: 119924 - DNA, 25 bp, Artificial
  probe
  misc_feature (1)..(25): SEQ ID NO: 1834; WAN024CIG_at; Start 1126; Stop 1150
cttggctttaatcagacggtgcaca

SEQ ID NO: 119925 - DNA, 25 bp, Artificial
  probe
  misc_feature (1)..(25): SEQ ID NO: 1834; WAN024CIG_at; Start 1152; Stop 1176
tagactttatatcgctccagaccat

SEQ ID NO: 119926 - DNA, 25 bp, Artificial
  probe
  misc_feature (1)..(25): SEQ ID NO: 1834; WAN024CIG_at; Start 1096; Stop 1120
cgtcaggcctttgagcacaatctct

SEQ ID NO: 119927 - DNA, 25 bp, Artificial
  probe
  misc_feature (1)..(25): SEQ ID NO: 1834; WAN024CIG_at; Start 756; Stop 780
tgagcgcgctttagagttaactgac

SEQ ID NO: 119928 - DNA, 25 bp, Artificial
  probe
  misc_feature (1)..(25): SEQ ID NO: 1834; WAN024CIG_at; Start 1316; Stop 1340
tgcaaactgttttaggaggcctaac

SEQ ID NO: 119929 - DNA, 25 bp, Artificial
  probe
  misc_feature (1)..(25): SEQ ID NO: 1834; WAN024CIG_at; Start 1192; Stop 1216
gaagttgctgctttggttgagacca

SEQ ID NO: 119930 - DNA, 25 bp, Artificial
  probe
  misc_feature (1)..(25): SEQ ID NO: 1834; WAN024CIG_at; Start 550; Stop 574
gatttggaaatagataccagtcagc

SEQ ID NO: 119931 - DNA, 25 bp, Artificial
  probe
  misc_feature (1)..(25): SEQ ID NO: 1834; WAN024CIG_at; Start 1027; Stop 1051
caggagctgtatcaactgtcggata

SEQ ID NO: 119932 - DNA, 25 bp, Artificial
  probe
  misc_feature (1)..(25): SEQ ID NO: 1834; WAN024CIG_at; Start 245; Stop 269
tgacgcaggagagggctgtcattca

SEQ ID NO: 119933 - DNA, 25 bp, Artificial
  probe
  misc_feature (1)..(25): SEQ ID NO: 1834; WAN024CIG_at; Start 1247; Stop 1271
tgcgtcaggcacttggcaaacaagg

SEQ ID NO: 119934 - DNA, 25 bp, Artificial
  probe
  misc_feature (1)..(25): SEQ ID NO: 1834; WAN024CIG_at; Start 673; Stop 697
gccattccaggtaatatgcagttga

SEQ ID NO: 119935 - DNA, 25 bp, Artificial
  probe
  misc_feature (1)..(25): SEQ ID NO: 1834; WAN024CIG_at; Start 385; Stop 409
acttatagcgcagatagcgagccga

SEQ ID NO: 119936 - DNA, 25 bp, Artificial
  probe
  misc_feature (1)..(25): SEQ ID NO: 1834; WAN024CIG_at; Start 284; Stop 308
tgcaggctcgcttggttaaacaggt

SEQ ID NO: 119937 - DNA, 25 bp, Artificial
  probe
  misc_feature (1)..(25): SEQ ID NO: 1834; WAN024CIG_at; Start 889; Stop 913
caagtagaagcaatcgcaggagcct

SEQ ID NO: 119938 - DNA, 25 bp, Artificial
  probe
  misc_feature (1)..(25): SEQ ID NO: 1834; WAN024CIG_at; Start 726; Stop 750
gaagatcatcattccaaataaggcg

SEQ ID NO: 119939 - DNA, 25 bp, Artificial
  probe
  misc_feature (1)..(25): SEQ ID NO: 1831; WAN024CIH_at; Start 11; Stop 35
tactaattgttttagctattatcct

SEQ ID NO: 119940 - DNA, 25 bp, Artificial
  probe
  misc_feature (1)..(25): SEQ ID NO: 1831; WAN024CIH_at; Start 130; Stop 154
tggcagagcaacaccttggtcaagg

SEQ ID NO: 119941 - DNA, 25 bp, Artificial
  probe
  misc_feature (1)..(25): SEQ ID NO: 1831; WAN024CIH_at; Start 53; Stop 77
tattggtaactatacaaccccgtca

SEQ ID NO: 119942 - DNA, 25 bp, Artificial
  probe
  misc_feature (1)..(25): SEQ ID NO: 1831; WAN024CIH_at; Start 97; Stop 121
gatgccactagtaatattggtaaac

SEQ ID NO: 119943 - DNA, 25 bp, Artificial
  probe
  misc_feature (1)..(25): SEQ ID NO: 1831; WAN024CIH_at; Start 83; Stop 107
aactattttccatggatgccactag

SEQ ID NO: 119944 - DNA, 25 bp, Artificial
  probe
  misc_feature (1)..(25): SEQ ID NO: 1831; WAN024CIH_at; Start 197; Stop 221
taacctttatggtgattacttataa

SEQ ID NO: 119945 - DNA, 25 bp, Artificial
  probe
  misc_feature (1)..(25): SEQ ID NO: 1831; WAN024CIH_at; Start 191; Stop 215
tactattaacctttatggtgattac

SEQ ID NO: 119946 - DNA, 25 bp, Artificial
  probe
  misc_feature (1)..(25): SEQ ID NO: 1831; WAN024CIH_at; Start 137; Stop 161
gcaacaccttggtcaaggtgctcac

SEQ ID NO: 119947 - DNA, 25 bp, Artificial
  probe
  misc_feature (1)..(25): SEQ ID NO: 1831; WAN024CIH_at; Start 81; Stop 105
tcaactattttccatggatgccact

SEQ ID NO: 119948 - DNA, 25 bp, Artificial
  probe
  misc_feature (1)..(25): SEQ ID NO: 1831; WAN024CIH_at; Start 128; Stop 152
actggcagagcaacaccttggtcaa

SEQ ID NO: 119949 - DNA, 25 bp, Artificial
  probe
  misc_feature (1)..(25): SEQ ID NO: 1831; WAN024CIH_at; Start 127; Stop 151
tactggcagagcaacaccttggtca

SEQ ID NO: 119950 - DNA, 25 bp, Artificial
  probe
  misc_feature (1)..(25): SEQ ID NO: 1831; WAN024CIH_at; Start 150; Stop 174
caaggtgctcactttattggtgagt

SEQ ID NO: 119951 - DNA, 25 bp, Artificial
  probe
  misc_feature (1)..(25): SEQ ID NO: 1831; WAN024CIH_at; Start 2; Stop 26
tgattgaaatactaattgttttagc

SEQ ID NO: 119952 - DNA, 25 bp, Artificial
  probe
  misc_feature (1)..(25): SEQ ID NO: 1831; WAN024CIH_at; Start 38; Stop 62
ctcttgctttgattgtattggtaac

SEQ ID NO: 119953 - DNA, 25 bp, Artificial
  probe
  misc_feature (1)..(25): SEQ ID NO: 1831; WAN024CIH_at; Start 91; Stop 115
tccatggatgccactagtaatattg

SEQ ID NO: 119954 - DNA, 25 bp, Artificial
  probe
  misc_feature (1)..(25): SEQ ID NO: 1831; WAN024CIH_at; Start 117; Stop 141
taaaccaagctactggcagagcaac

SEQ ID NO: 119955 - DNA, 25 bp, Artificial
  probe
  misc_feature (1)..(25): SEQ ID NO: 1831; WAN024CIH_at; Start 141; Stop 165
caccttggtcaaggtgctcacttta

SEQ ID NO: 119956 - DNA, 25 bp, Artificial
  probe
  misc_feature (1)..(25): SEQ ID NO: 1831; WAN024CIH_at; Start 125; Stop 149
gctactggcagagcaacaccttggt

SEQ ID NO: 119957 - DNA, 25 bp, Artificial
  probe
  misc_feature (1)..(25): SEQ ID NO: 1831; WAN024CIH_at; Start 102; Stop 126
cactagtaatattggtaaaccaagc

SEQ ID NO: 119958 - DNA, 25 bp, Artificial
  probe
  misc_feature (1)..(25): SEQ ID NO: 1831; WAN024CIH_at; Start 115; Stop 139
ggtaaaccaagctactggcagagca

SEQ ID NO: 119959 - DNA, 25 bp, Artificial
  probe
  misc_feature (1)..(25): SEQ ID NO: 1831; WAN024CIH_at; Start 63; Stop 87
tatacaaccccgtcaaaatcaacta

SEQ ID NO: 119960 - DNA, 25 bp, Artificial
  probe
  misc_feature (1)..(25): SEQ ID NO: 1831; WAN024CIH_at; Start 25; Stop 49
gctattatcctatctcttgctttga

SEQ ID NO: 119961 - DNA, 25 bp, Artificial
  probe
  misc_feature (1)..(25): SEQ ID NO: 1831; WAN024CIH_at; Start 132; Stop 156
gcagagcaacaccttggtcaaggtg

SEQ ID NO: 119962 - DNA, 25 bp, Artificial
  probe
  misc_feature (1)..(25): SEQ ID NO: 1831; WAN024CIH_at; Start 122; Stop 146
caagctactggcagagcaacacctt

SEQ ID NO: 119963 - DNA, 25 bp, Artificial
  probe
  misc_feature (1)..(25): SEQ ID NO: 1831; WAN024CIH_at; Start 159; Stop 183
cactttattggtgagtttggcttta

SEQ ID NO: 119964 - DNA, 25 bp, Artificial
  probe
  misc_feature (1)..(25): SEQ ID NO: 1831; WAN024CIH_at; Start 93; Stop 117
catggatgccactagtaatattggt

SEQ ID NO: 119965 - DNA, 25 bp, Artificial
  probe
  misc_feature (1)..(25): SEQ ID NO: 1831; WAN024CIH_at; Start 147; Stop 171
ggtcaaggtgctcactttattggtg

SEQ ID NO: 119966 - DNA, 25 bp, Artificial
  probe
  misc_feature (1)..(25): SEQ ID NO: 1831; WAN024CIH_at; Start 114; Stop 138
tggtaaaccaagctactggcagagc

SEQ ID NO: 119967 - DNA, 25 bp, Artificial
  probe
  misc_feature (1)..(25): SEQ ID NO: 1831; WAN024CIH_at; Start 124; Stop 148
agctactggcagagcaacaccttgg

SEQ ID NO: 119968 - DNA, 25 bp, Artificial
  probe
  misc_feature (1)..(25): SEQ ID NO: 1831; WAN024CIH_at; Start 119; Stop 143
aaccaagctactggcagagcaacac

SEQ ID NO: 119969 - DNA, 25 bp, Artificial
  probe
  misc_feature (1)..(25): SEQ ID NO: 1831; WAN024CIH_at; Start 111; Stop 135
tattggtaaaccaagctactggcag

SEQ ID NO: 119970 - DNA, 25 bp, Artificial
  probe
  misc_feature (1)..(25): SEQ ID NO: 1831; WAN024CIH_at; Start 78; Stop 102
aaatcaactattttccatggatgcc

SEQ ID NO: 119971 - DNA, 25 bp, Artificial
  probe
  misc_feature (1)..(25): SEQ ID NO: 1831; WAN024CIH_at; Start 143; Stop 167
ccttggtcaaggtgctcactttatt

SEQ ID NO: 119972 - DNA, 25 bp, Artificial
  probe
  misc_feature (1)..(25): SEQ ID NO: 1831; WAN024CIH_at; Start 86; Stop 110
tattttccatggatgccactagtaa

SEQ ID NO: 119973 - DNA, 25 bp, Artificial
  probe
  misc_feature (1)..(25): SEQ ID NO: 3060; WAN024CII_at; Start 6; Stop 30
gcgtcaggaccacttgatgaaaaaa

SEQ ID NO: 119974 - DNA, 25 bp, Artificial
  probe
  misc_feature (1)..(25): SEQ ID NO: 3060; WAN024CII_at; Start 2; Stop 26
tgttgcgtcaggaccacttgatgaa

SEQ ID NO: 119975 - DNA, 25 bp, Artificial
  probe
  misc_feature (1)..(25): SEQ ID NO: 3060; WAN024CII_at; Start 4; Stop 28
ttgcgtcaggaccacttgatgaaaa

SEQ ID NO: 119976 - DNA, 25 bp, Artificial
  probe
  misc_feature (1)..(25): SEQ ID NO: 3060; WAN024CII_at; Start 60; Stop 84
aagtgttgacaagcgaaagcagttg

SEQ ID NO: 119977 - DNA, 25 bp, Artificial
  probe
  misc_feature (1)..(25): SEQ ID NO: 3060; WAN024CII_at; Start 9; Stop 33
tcaggaccacttgatgaaaaaaagt

SEQ ID NO: 119978 - DNA, 25 bp, Artificial
  probe
  misc_feature (1)..(25): SEQ ID NO: 3060; WAN024CII_at; Start 3; Stop 27
gttgcgtcaggaccacttgatgaaa

SEQ ID NO: 119979 - DNA, 25 bp, Artificial
  probe
  misc_feature (1)..(25): SEQ ID NO: 3060; WAN024CII_at; Start 10; Stop 34
caggaccacttgatgaaaaaaagtt

SEQ ID NO: 119980 - DNA, 25 bp, Artificial
  probe
  misc_feature (1)..(25): SEQ ID NO: 3060; WAN024CII_at; Start 59; Stop 83
aaagtgttgacaagcgaaagcagtt

SEQ ID NO: 119981 - DNA, 25 bp, Artificial
  probe
  misc_feature (1)..(25): SEQ ID NO: 3060; WAN024CII_at; Start 7; Stop 31
cgtcaggaccacttgatgaaaaaaa

SEQ ID NO: 119982 - DNA, 25 bp, Artificial
  probe
  misc_feature (1)..(25): SEQ ID NO: 3060; WAN024CII_at; Start 1; Stop 25
atgttgcgtcaggaccacttgatga

SEQ ID NO: 119983 - DNA, 25 bp, Artificial
  probe
  misc_feature (1)..(25): SEQ ID NO: 3060; WAN024CII_at; Start 8; Stop 32
gtcaggaccacttgatgaaaaaaag

SEQ ID NO: 119984 - DNA, 25 bp, Artificial
  probe
  misc_feature (1)..(25): SEQ ID NO: 3060; WAN024CII_at; Start 5; Stop 29
tgcgtcaggaccacttgatgaaaaa

SEQ ID NO: 119985 - DNA, 25 bp, Artificial
  probe
  misc_feature (1)..(25): SEQ ID NO: 5320; WAN024CIJ_at; Start 189; Stop 213
cttgcttctctcaagcgacaactat

SEQ ID NO: 119986 - DNA, 25 bp, Artificial
  probe
  misc_feature (1)..(25): SEQ ID NO: 5320; WAN024CIJ_at; Start 144; Stop 168
cctgcacattggttcgtcttgttca

SEQ ID NO: 119987 - DNA, 25 bp, Artificial
  probe
  misc_feature (1)..(25): SEQ ID NO: 5320; WAN024CIJ_at; Start 138; Stop 162
tagcgccctgcacattggttcgtct

SEQ ID NO: 119988 - DNA, 25 bp, Artificial
  probe
  misc_feature (1)..(25): SEQ ID NO: 5320; WAN024CIJ_at; Start 197; Stop 221
tctcaagcgacaactatattagtat

SEQ ID NO: 119989 - DNA, 25 bp, Artificial
  probe
  misc_feature (1)..(25): SEQ ID NO: 5320; WAN024CIJ_at; Start 136; Stop 160
tgtagcgccctgcacattggttcgt

SEQ ID NO: 119990 - DNA, 25 bp, Artificial
  probe
  misc_feature (1)..(25): SEQ ID NO: 5320; WAN024CIJ_at; Start 185; Stop 209
gtcacttgcttctctcaagcgacaa

SEQ ID NO: 119991 - DNA, 25 bp, Artificial
  probe
  misc_feature (1)..(25): SEQ ID NO: 5320; WAN024CIJ_at; Start 36; Stop 60
gagccaggatcaaactctcattaaa

SEQ ID NO: 119992 - DNA, 25 bp, Artificial
  probe
  misc_feature (1)..(25): SEQ ID NO: 5320; WAN024CIJ_at; Start 174; Stop 198
caaaggtctttgtcacttgcttctc

SEQ ID NO: 119993 - DNA, 25 bp, Artificial
  probe
  misc_feature (1)..(25): SEQ ID NO: 5320; WAN024CIJ_at; Start 31; Stop 55
gtcctgagccaggatcaaactctca

SEQ ID NO: 119994 - DNA, 25 bp, Artificial
  probe
  misc_feature (1)..(25): SEQ ID NO: 5320; WAN024CIJ_at; Start 108; Stop 132
tttcattgttcagtactacaactta

SEQ ID NO: 119995 - DNA, 25 bp, Artificial
  probe
  misc_feature (1)..(25): SEQ ID NO: 5320; WAN024CIJ_at; Start 203; Stop 227
gcgacaactatattagtatatcaca

SEQ ID NO: 119996 - DNA, 25 bp, Artificial
  probe
  misc_feature (1)..(25): SEQ ID NO: 5320; WAN024CIJ_at; Start 40; Stop 64
caggatcaaactctcattaaaaagt

SEQ ID NO: 119997 - DNA, 25 bp, Artificial
  probe
  misc_feature (1)..(25): SEQ ID NO: 5320; WAN024CIJ_at; Start 150; Stop 174
cattggttcgtcttgttcagttttc

SEQ ID NO: 119998 - DNA, 25 bp, Artificial
  probe
  misc_feature (1)..(25): SEQ ID NO: 5320; WAN024CIJ_at; Start 134; Stop 158
gttgtagcgccctgcacattggttc

SEQ ID NO: 119999 - DNA, 25 bp, Artificial
  probe
  misc_feature (1)..(25): SEQ ID NO: 5320; WAN024CIJ_at; Start 38; Stop 62
gccaggatcaaactctcattaaaaa

SEQ ID NO: 120000 - DNA, 25 bp, Artificial
  probe
  misc_feature (1)..(25): SEQ ID NO: 5320; WAN024CIJ_at; Start 5; Stop 29
atgtattaggcacgccgccagcgtt

SEQ ID NO: 120001 - DNA, 25 bp, Artificial
  probe
  misc_feature (1)..(25): SEQ ID NO: 5320; WAN024CIJ_at; Start 157; Stop 181
tcgtcttgttcagttttcaaaggtc

SEQ ID NO: 120002 - DNA, 25 bp, Artificial
  probe
  misc_feature (1)..(25): SEQ ID NO: 5320; WAN024CIJ_at; Start 33; Stop 57
cctgagccaggatcaaactctcatt

SEQ ID NO: 120003 - DNA, 25 bp, Artificial
  probe
  misc_feature (1)..(25): SEQ ID NO: 5320; WAN024CIJ_at; Start 83; Stop 107
ctgtcactgacagatttattgtttt

SEQ ID NO: 120004 - DNA, 25 bp, Artificial
  probe
  misc_feature (1)..(25): SEQ ID NO: 5320; WAN024CIJ_at; Start 29; Stop 53
tcgtcctgagccaggatcaaactct

SEQ ID NO: 120005 - DNA, 25 bp, Artificial
  probe
  misc_feature (1)..(25): SEQ ID NO: 5320; WAN024CIJ_at; Start 161; Stop 185
cttgttcagttttcaaaggtctttg

SEQ ID NO: 120006 - DNA, 25 bp, Artificial
  probe
  misc_feature (1)..(25): SEQ ID NO: 5320; WAN024CIJ_at; Start 178; Stop 202
ggtctttgtcacttgcttctctcaa

SEQ ID NO: 120007 - DNA, 25 bp, Artificial
  probe
  misc_feature (1)..(25): SEQ ID NO: 5320; WAN024CIJ_at; Start 49; Stop 73
actctcattaaaaagtttgagttct

SEQ ID NO: 120008 - DNA, 25 bp, Artificial
  probe
  misc_feature (1)..(25): SEQ ID NO: 5320; WAN024CIJ_at; Start 194; Stop 218
ttctctcaagcgacaactatattag

SEQ ID NO: 120009 - DNA, 25 bp, Artificial
  probe
  misc_feature (1)..(25): SEQ ID NO: 5320; WAN024CIJ_at; Start 23; Stop 47
cagcgttcgtcctgagccaggatca

SEQ ID NO: 120010 - DNA, 25 bp, Artificial
  probe
  misc_feature (1)..(25): SEQ ID NO: 5320; WAN024CIJ_at; Start 140; Stop 164
gcgccctgcacattggttcgtcttg

SEQ ID NO: 120011 - DNA, 25 bp, Artificial
  probe
  misc_feature (1)..(25): SEQ ID NO: 5320; WAN024CIJ_at; Start 25; Stop 49
gcgttcgtcctgagccaggatcaaa

SEQ ID NO: 120012 - DNA, 25 bp, Artificial
  probe
  misc_feature (1)..(25): SEQ ID NO: 5320; WAN024CIJ_at; Start 105; Stop 129
ttttttcattgttcagtactacaac

SEQ ID NO: 120013 - DNA, 25 bp, Artificial
  probe
  misc_feature (1)..(25): SEQ ID NO: 5320; WAN024CIJ_at; Start 147; Stop 171
gcacattggttcgtcttgttcagtt

SEQ ID NO: 120014 - DNA, 25 bp, Artificial
  probe
  misc_feature (1)..(25): SEQ ID NO: 5320; WAN024CIJ_at; Start 1; Stop 25
ttgcatgtattaggcacgccgccag

SEQ ID NO: 120015 - DNA, 25 bp, Artificial
  probe
  misc_feature (1)..(25): SEQ ID NO: 5320; WAN024CIJ_at; Start 142; Stop 166
gccctgcacattggttcgtcttgtt

SEQ ID NO: 120016 - DNA, 25 bp, Artificial
  probe
  misc_feature (1)..(25): SEQ ID NO: 5320; WAN024CIJ_at; Start 182; Stop 206
tttgtcacttgcttctctcaagcga

SEQ ID NO: 120017 - DNA, 25 bp, Artificial
  probe
  misc_feature (1)..(25): SEQ ID NO: 5320; WAN024CIJ_at; Start 21; Stop 45
gccagcgttcgtcctgagccaggat

SEQ ID NO: 120018 - DNA, 25 bp, Artificial
  probe
  misc_feature (1)..(25): SEQ ID NO: 5320; WAN024CIJ_at; Start 75; Stop 99
actcatttctgtcactgacagattt

SEQ ID NO: 120019 - DNA, 25 bp, Artificial
  probe
  misc_feature (1)..(25): SEQ ID NO: 4359; WAN024CIK_at; Start 4; Stop 28
tgatcctggctcaggacgaacgctg

SEQ ID NO: 120020 - DNA, 25 bp, Artificial
  probe
  misc_feature (1)..(25): SEQ ID NO: 4359; WAN024CIK_at; Start 1339; Stop 1363
tagtaatcgcggatcagcacgccgc

SEQ ID NO: 120021 - DNA, 25 bp, Artificial
  probe
  misc_feature (1)..(25): SEQ ID NO: 4359; WAN024CIK_at; Start 958; Stop 982
gaagcaacgcgaagaaccttaccag

SEQ ID NO: 120022 - DNA, 25 bp, Artificial
  probe
  misc_feature (1)..(25): SEQ ID NO: 4359; WAN024CIK_at; Start 1395; Stop 1419
gcccgtcacaccacgagagtttgta

SEQ ID NO: 120023 - DNA, 25 bp, Artificial
  probe
  misc_feature (1)..(25): SEQ ID NO: 4359; WAN024CIK_at; Start 553; Stop 577
gatttattgggcgtaaagcgagcgc

SEQ ID NO: 120024 - DNA, 25 bp, Artificial
  probe
  misc_feature (1)..(25): SEQ ID NO: 4359; WAN024CIK_at; Start 1049; Stop 1073
catggttgtcgtcagctcgtgtcgt

SEQ ID NO: 120025 - DNA, 25 bp, Artificial
  probe
  misc_feature (1)..(25): SEQ ID NO: 4359; WAN024CIK_at; Start 696; Stop 720
agatatatggaggaacaccggtggc

SEQ ID NO: 120026 - DNA, 25 bp, Artificial
  probe
  misc_feature (1)..(25): SEQ ID NO: 4359; WAN024CIK_at; Start 366; Stop 390
caatggacggaagtctgaccgagca

SEQ ID NO: 120027 - DNA, 25 bp, Artificial
  probe
  misc_feature (1)..(25): SEQ ID NO: 4359; WAN024CIK_at; Start 792; Stop 816
tggtagtccacgctgtaaacgatga

SEQ ID NO: 120028 - DNA, 25 bp, Artificial
  probe
  misc_feature (1)..(25): SEQ ID NO: 4359; WAN024CIK_at; Start 349; Stop 373
cagtagggaatcttcggcaatggac

SEQ ID NO: 120029 - DNA, 25 bp, Artificial
  probe
  misc_feature (1)..(25): SEQ ID NO: 4359; WAN024CIK_at; Start 513; Stop 537
ccagcagccgcggtaatacgtaggt

SEQ ID NO: 120030 - DNA, 25 bp, Artificial
  probe
  misc_feature (1)..(25): SEQ ID NO: 4359; WAN024CIK_at; Start 1256; Stop 1280
gccggtgacggcaagctaatctctt

SEQ ID NO: 120031 - DNA, 25 bp, Artificial
  probe
  misc_feature (1)..(25): SEQ ID NO: 4359; WAN024CIK_at; Start 1206; Stop 1230
tatgacctgggctacacacgtgcta

SEQ ID NO: 120032 - DNA, 25 bp, Artificial
  probe
  misc_feature (1)..(25): SEQ ID NO: 4359; WAN024CIK_at; Start 44; Stop 68
catgcaagtagaacgctgaaggagg

SEQ ID NO: 120033 - DNA, 25 bp, Artificial
  probe
  misc_feature (1)..(25): SEQ ID NO: 4359; WAN024CIK_at; Start 481; Stop 505
tatcttaccagaaagggacggctaa

SEQ ID NO: 120034 - DNA, 25 bp, Artificial
  probe
  misc_feature (1)..(25): SEQ ID NO: 4359; WAN024CIK_at; Start 1074; Stop 1098
gagatgttgggttaagtcccgcaac

SEQ ID NO: 120035 - DNA, 25 bp, Artificial
  probe
  misc_feature (1)..(25): SEQ ID NO: 4359; WAN024CIK_at; Start 141; Stop 165
tattggaaacgatagctaataccgc

SEQ ID NO: 120036 - DNA, 25 bp, Artificial
  probe
  misc_feature (1)..(25): SEQ ID NO: 4359; WAN024CIK_at; Start 1142; Stop 1166
tctagcgagactgccggtaataaac

SEQ ID NO: 120037 - DNA, 25 bp, Artificial
  probe
  misc_feature (1)..(25): SEQ ID NO: 4359; WAN024CIK_at; Start 1094; Stop 1118
gcaacgagcgcaacccctattgtta

SEQ ID NO: 120038 - DNA, 25 bp, Artificial
  probe
  misc_feature (1)..(25): SEQ ID NO: 4359; WAN024CIK_at; Start 1490; Stop 1514
cgtaacaaggtagccgtatcggaag

SEQ ID NO: 120039 - DNA, 25 bp, Artificial
  probe
  misc_feature (1)..(25): SEQ ID NO: 4359; WAN024CIK_at; Start 1324; Stop 1348
tgaagtcggaatcgctagtaatcgc

SEQ ID NO: 120040 - DNA, 25 bp, Artificial
  probe
  misc_feature (1)..(25): SEQ ID NO: 4359; WAN024CIK_at; Start 389; Stop 413
caacgccgcgtgagtgaagaaggtt

SEQ ID NO: 120041 - DNA, 25 bp, Artificial
  probe
  misc_feature (1)..(25): SEQ ID NO: 4359; WAN024CIK_at; Start 571; Stop 595
cgagcgcaggcggttagataagtct

SEQ ID NO: 120042 - DNA, 25 bp, Artificial
  probe
  misc_feature (1)..(25): SEQ ID NO: 4359; WAN024CIK_at; Start 1229; Stop 1253
tacaatggctggtacaacgagtcgc

SEQ ID NO: 120043 - DNA, 25 bp, Artificial
  probe
  misc_feature (1)..(25): SEQ ID NO: 4359; WAN024CIK_at; Start 1277; Stop 1301
tcttaaagccagtctcagttcggat

SEQ ID NO: 120044 - DNA, 25 bp, Artificial
  probe
  misc_feature (1)..(25): SEQ ID NO: 4359; WAN024CIK_at; Start 1309; Stop 1333
tgcaactcgcctacatgaagtcgga

SEQ ID NO: 120045 - DNA, 25 bp, Artificial
  probe
  misc_feature (1)..(25): SEQ ID NO: 4359; WAN024CIK_at; Start 262; Stop 286
tcaccaaggcgacgatacatagccg

SEQ ID NO: 120046 - DNA, 25 bp, Artificial
  probe
  misc_feature (1)..(25): SEQ ID NO: 4359; WAN024CIK_at; Start 298; Stop 322
tgatcggccacactgggactgagac

SEQ ID NO: 120047 - DNA, 25 bp, Artificial
  probe
  misc_feature (1)..(25): SEQ ID NO: 4359; WAN024CIK_at; Start 736; Stop 760
gcttgtaactgacgctgaggctcga

SEQ ID NO: 120048 - DNA, 25 bp, Artificial
  probe
  misc_feature (1)..(25): SEQ ID NO: 4359; WAN024CIK_at; Start 943; Stop 967
catgtggtttaattcgaagcaacgc

SEQ ID NO: 120049 - DNA, 25 bp, Artificial
  probe
  misc_feature (1)..(25): SEQ ID NO: 4359; WAN024CIK_at; Start 27; Stop 51
tggcggcgtgcctaatacatgcaag

SEQ ID NO: 120050 - DNA, 25 bp, Artificial
  probe
  misc_feature (1)..(25): SEQ ID NO: 4359; WAN024CIK_at; Start 277; Stop 301
tacatagccgacctgagagggtgat

SEQ ID NO: 120051 - DNA, 25 bp, Artificial
  probe
  misc_feature (1)..(25): SEQ ID NO: 4359; WAN024CIK_at; Start 100; Stop 124
tgagtaacgcgtaggtaacctgcct

SEQ ID NO: 120052 - DNA, 25 bp, Artificial
  probe
  misc_feature (1)..(25): SEQ ID NO: 4359; WAN024CIK_at; Start 1433; Stop 1457
gtgaggtaaccgtaaggagccagcc

SEQ ID NO: 120053 - DNA, 25 bp, Artificial
  probe
  misc_feature (1)..(25): SEQ ID NO: 7615; WAN024CIL_at; Start 505; Stop 529
ggtgctgatttagttcgggtggcta

SEQ ID NO: 120054 - DNA, 25 bp, Artificial
  probe
  misc_feature (1)..(25): SEQ ID NO: 7615; WAN024CIL_at; Start 503; Stop 527
ttggtgctgatttagttcgggtggc

SEQ ID NO: 120055 - DNA, 25 bp, Artificial
  probe
  misc_feature (1)..(25): SEQ ID NO: 7615; WAN024CIL_at; Start 504; Stop 528
tggtgctgatttagttcgggtggct

SEQ ID NO: 120056 - DNA, 25 bp, Artificial
  probe
  misc_feature (1)..(25): SEQ ID NO: 7615; WAN024CIL_at; Start 506; Stop 530
gtgctgatttagttcgggtggctat

SEQ ID NO: 120057 - DNA, 25 bp, Artificial
  probe
  misc_feature (1)..(25): SEQ ID NO: 1706; WAN024CIM_at; Start 50; Stop 74
gactagctccaactccgacaaacat

SEQ ID NO: 120058 - DNA, 25 bp, Artificial
  probe
  misc_feature (1)..(25): SEQ ID NO: 1706; WAN024CIM_at; Start 166; Stop 190
ggtccctccaaaagaacacctgctg

SEQ ID NO: 120059 - DNA, 25 bp, Artificial
  probe
  misc_feature (1)..(25): SEQ ID NO: 1706; WAN024CIM_at; Start 32; Stop 56
caaaaagagagcgaacacgactagc

SEQ ID NO: 120060 - DNA, 25 bp, Artificial
  probe
  misc_feature (1)..(25): SEQ ID NO: 1706; WAN024CIM_at; Start 259; Stop 283
tgtttttcttcctcagctccagcaa

SEQ ID NO: 120061 - DNA, 25 bp, Artificial
  probe
  misc_feature (1)..(25): SEQ ID NO: 1706; WAN024CIM_at; Start 369; Stop 393
tcctcccatatttcccatcatagag

SEQ ID NO: 120062 - DNA, 25 bp, Artificial
  probe
  misc_feature (1)..(25): SEQ ID NO: 1706; WAN024CIM_at; Start 86; Stop 110
cagaacctgagatactaaagaatgg

SEQ ID NO: 120063 - DNA, 25 bp, Artificial
  probe
  misc_feature (1)..(25): SEQ ID NO: 1706; WAN024CIM_at; Start 274; Stop 298
gctccagcaacatctgaaaatctta

SEQ ID NO: 120064 - DNA, 25 bp, Artificial
  probe
  misc_feature (1)..(25): SEQ ID NO: 1706; WAN024CIM_at; Start 489; Stop 513
tttatggtcagtagcaagtttttgc

SEQ ID NO: 120065 - DNA, 25 bp, Artificial
  probe
  misc_feature (1)..(25): SEQ ID NO: 1706; WAN024CIM_at; Start 179; Stop 203
gaacacctgctggaatacgggctcc

SEQ ID NO: 120066 - DNA, 25 bp, Artificial
  probe
  misc_feature (1)..(25): SEQ ID NO: 1706; WAN024CIM_at; Start 416; Stop 440
caaatggcacaatggatacgagtag

SEQ ID NO: 120067 - DNA, 25 bp, Artificial
  probe
  misc_feature (1)..(25): SEQ ID NO: 1706; WAN024CIM_at; Start 96; Stop 120
gatactaaagaatggaacacctgct

SEQ ID NO: 120068 - DNA, 25 bp, Artificial
  probe
  misc_feature (1)..(25): SEQ ID NO: 1706; WAN024CIM_at; Start 567; Stop 591
cttagtaacagatggcgtgaaaaac

SEQ ID NO: 120069 - DNA, 25 bp, Artificial
  probe
  misc_feature (1)..(25): SEQ ID NO: 1706; WAN024CIM_at; Start 423; Stop 447
cacaatggatacgagtagattaatc

SEQ ID NO: 120070 - DNA, 25 bp, Artificial
  probe
  misc_feature (1)..(25): SEQ ID NO: 1706; WAN024CIM_at; Start 194; Stop 218
tacgggctccaagttttgtgaatcg

SEQ ID NO: 120071 - DNA, 25 bp, Artificial
  probe
  misc_feature (1)..(25): SEQ ID NO: 1706; WAN024CIM_at; Start 517; Stop 541
tctgatacggtagtatctgcaggaa

SEQ ID NO: 120072 - DNA, 25 bp, Artificial
  probe
  misc_feature (1)..(25): SEQ ID NO: 1706; WAN024CIM_at; Start 382; Stop 406
cccatcatagagaataggaagaaga

SEQ ID NO: 120073 - DNA, 25 bp, Artificial
  probe
  misc_feature (1)..(25): SEQ ID NO: 1706; WAN024CIM_at; Start 344; Stop 368
aactcattggattacggccattgcc

SEQ ID NO: 120074 - DNA, 25 bp, Artificial
  probe
  misc_feature (1)..(25): SEQ ID NO: 1706; WAN024CIM_at; Start 454; Stop 478
ccacttgaactttcatgcttaacag

SEQ ID NO: 120075 - DNA, 25 bp, Artificial
  probe
  misc_feature (1)..(25): SEQ ID NO: 1706; WAN024CIM_at; Start 474; Stop 498
aacagttacttctgctttatggtca

SEQ ID NO: 120076 - DNA, 25 bp, Artificial
  probe
  misc_feature (1)..(25): SEQ ID NO: 1706; WAN024CIM_at; Start 72; Stop 96
catttctacaaagtcagaacctgag

SEQ ID NO: 120077 - DNA, 25 bp, Artificial
  probe
  misc_feature (1)..(25): SEQ ID NO: 1706; WAN024CIM_at; Start 542; Stop 566
gaatagtgctggtaaatttctctac

SEQ ID NO: 120078 - DNA, 25 bp, Artificial
  probe
  misc_feature (1)..(25): SEQ ID NO: 1706; WAN024CIM_at; Start 231; Stop 255
taagaactcaacaacttcaactagt

SEQ ID NO: 120079 - DNA, 25 bp, Artificial
  probe
  misc_feature (1)..(25): SEQ ID NO: 1706; WAN024CIM_at; Start 216; Stop 240
tcgttttggatcttttaagaactca

SEQ ID NO: 120080 - DNA, 25 bp, Artificial
  probe
  misc_feature (1)..(25): SEQ ID NO: 1706; WAN024CIM_at; Start 20; Stop 44
ttttggcatcctcaaaaagagagcg

SEQ ID NO: 120081 - DNA, 25 bp, Artificial
  probe
  misc_feature (1)..(25): SEQ ID NO: 1706; WAN024CIM_at; Start 108; Stop 132
tggaacacctgcttctccagcgact

SEQ ID NO: 120082 - DNA, 25 bp, Artificial
  probe
  misc_feature (1)..(25): SEQ ID NO: 1706; WAN024CIM_at; Start 402; Stop 426
gaagaatagaattccaaatggcaca

SEQ ID NO: 120083 - DNA, 25 bp, Artificial
  probe
  misc_feature (1)..(25): SEQ ID NO: 1706; WAN024CIM_at; Start 3; Stop 27
gatagctggtgctgcttttttggca

SEQ ID NO: 120084 - DNA, 25 bp, Artificial
  probe
  misc_feature (1)..(25): SEQ ID NO: 1706; WAN024CIM_at; Start 328; Stop 352
gccttactacgtccaaaactcattg

SEQ ID NO: 120085 - DNA, 25 bp, Artificial
  probe
  misc_feature (1)..(25): SEQ ID NO: 1706; WAN024CIM_at; Start 502; Stop 526
gcaagtttttgcaattctgatacgg

SEQ ID NO: 120086 - DNA, 25 bp, Artificial
  probe
  misc_feature (1)..(25): SEQ ID NO: 1706; WAN024CIM_at; Start 530; Stop 554
tatctgcaggaagaatagtgctggt

SEQ ID NO: 120087 - DNA, 25 bp, Artificial
  probe
  misc_feature (1)..(25): SEQ ID NO: 1706; WAN024CIM_at; Start 123; Stop 147
tccagcgactgccttagcaagcaaa

SEQ ID NO: 120088 - DNA, 25 bp, Artificial
  probe
  misc_feature (1)..(25): SEQ ID NO: 1706; WAN024CIM_at; Start 559; Stop 583
ttctctaccttagtaacagatggcg

SEQ ID NO: 120089 - DNA, 25 bp, Artificial
  probe
  misc_feature (1)..(25): SEQ ID NO: 1706; WAN024CIM_at; Start 314; Stop 338
tatttgctgctttagccttactacg

SEQ ID NO: 120090 - DNA, 25 bp, Artificial
  probe
  misc_feature (1)..(25): SEQ ID NO: 1706; WAN024CIM_at; Start 440; Stop 464
gattaatccatataccacttgaact

SEQ ID NO: 120091 - DNA, 25 bp, Artificial
  probe
  misc_feature (1)..(25): SEQ ID NO: 2557; WAN024CIN_at; Start 1597; Stop 1621
tatttcccacaagtctgggctagtg

SEQ ID NO: 120092 - DNA, 25 bp, Artificial
  probe
  misc_feature (1)..(25): SEQ ID NO: 2557; WAN024CIN_at; Start 1456; Stop 1480
tatctagagacacagatgcaatctc

SEQ ID NO: 120093 - DNA, 25 bp, Artificial
  probe
  misc_feature (1)..(25): SEQ ID NO: 2557; WAN024CIN_at; Start 1527; Stop 1551
gaagcacagccatattctctttgag

SEQ ID NO: 120094 - DNA, 25 bp, Artificial
  probe
  misc_feature (1)..(25): SEQ ID NO: 2557; WAN024CIN_at; Start 638; Stop 662
caaaccgaggtgcttctggtcatgc

SEQ ID NO: 120095 - DNA, 25 bp, Artificial
  probe
  misc_feature (1)..(25): SEQ ID NO: 2557; WAN024CIN_at; Start 1402; Stop 1426
tacattaaatgggatatgaaccgca

SEQ ID NO: 120096 - DNA, 25 bp, Artificial
  probe
  misc_feature (1)..(25): SEQ ID NO: 2557; WAN024CIN_at; Start 142; Stop 166
gaacgagaccatgccttttcaggaa

SEQ ID NO: 120097 - DNA, 25 bp, Artificial
  probe
  misc_feature (1)..(25): SEQ ID NO: 2557; WAN024CIN_at; Start 448; Stop 472
gatgcgactattgctagctacagta

SEQ ID NO: 120098 - DNA, 25 bp, Artificial
  probe
  misc_feature (1)..(25): SEQ ID NO: 2557; WAN024CIN_at; Start 673; Stop 697
gctcttctactatgcgaacaaggag

SEQ ID NO: 120099 - DNA, 25 bp, Artificial
  probe
  misc_feature (1)..(25): SEQ ID NO: 2557; WAN024CIN_at; Start 2062; Stop 2086
ggcgaagtttactcaggtgcagaac

SEQ ID NO: 120100 - DNA, 25 bp, Artificial
  probe
  misc_feature (1)..(25): SEQ ID NO: 2557; WAN024CIN_at; Start 1701; Stop 1725
tgtgtcagcagtaccgaatcatcag

SEQ ID NO: 120101 - DNA, 25 bp, Artificial
  probe
  misc_feature (1)..(25): SEQ ID NO: 2557; WAN024CIN_at; Start 215; Stop 239
tttttggacaacatggcttaggaga

SEQ ID NO: 120102 - DNA, 25 bp, Artificial
  probe
  misc_feature (1)..(25): SEQ ID NO: 2557; WAN024CIN_at; Start 164; Stop 188
gaaatccaacggctactaatcgaac

SEQ ID NO: 120103 - DNA, 25 bp, Artificial
  probe
  misc_feature (1)..(25): SEQ ID NO: 2557; WAN024CIN_at; Start 1431; Stop 1455
cactaagctagggaatggattaact

SEQ ID NO: 120104 - DNA, 25 bp, Artificial
  probe
  misc_feature (1)..(25): SEQ ID NO: 2557; WAN024CIN_at; Start 1862; Stop 1886
tacgaccagtagttcagttaggaca

SEQ ID NO: 120105 - DNA, 25 bp, Artificial
  probe
  misc_feature (1)..(25): SEQ ID NO: 2557; WAN024CIN_at; Start 597; Stop 621
tagacgtcaacaggtagaacaagga

SEQ ID NO: 120106 - DNA, 25 bp, Artificial
  probe
  misc_feature (1)..(25): SEQ ID NO: 2557; WAN024CIN_at; Start 577; Stop 601
tatgctcgtgaaaagactgttagac

SEQ ID NO: 120107 - DNA, 25 bp, Artificial
  probe
  misc_feature (1)..(25): SEQ ID NO: 2557; WAN024CIN_at; Start 775; Stop 799
caattgaatgaagttcgggtggcta

SEQ ID NO: 120108 - DNA, 25 bp, Artificial
  probe
  misc_feature (1)..(25): SEQ ID NO: 2557; WAN024CIN_at; Start 1954; Stop 1978
caaacgattgtaacctacgttcgcg

SEQ ID NO: 120109 - DNA, 25 bp, Artificial
  probe
  misc_feature (1)..(25): SEQ ID NO: 2557; WAN024CIN_at; Start 1359; Stop 1383
gaaaagtgtcttagatcaactccta

SEQ ID NO: 120110 - DNA, 25 bp, Artificial
  probe
  misc_feature (1)..(25): SEQ ID NO: 2557; WAN024CIN_at; Start 561; Stop 585
aactctgcagggtgcttatgctcgt

SEQ ID NO: 120111 - DNA, 25 bp, Artificial
  probe
  misc_feature (1)..(25): SEQ ID NO: 2557; WAN024CIN_at; Start 687; Stop 711
cgaacaaggagtcacagaggatgct

SEQ ID NO: 120112 - DNA, 25 bp, Artificial
  probe
  misc_feature (1)..(25): SEQ ID NO: 2557; WAN024CIN_at; Start 1515; Stop 1539
ttatctgacagagaagcacagccat

SEQ ID NO: 120113 - DNA, 25 bp, Artificial
  probe
  misc_feature (1)..(25): SEQ ID NO: 2557; WAN024CIN_at; Start 1326; Stop 1350
taatcttgccaatcctcaggtagta

SEQ ID NO: 120114 - DNA, 25 bp, Artificial
  probe
  misc_feature (1)..(25): SEQ ID NO: 2557; WAN024CIN_at; Start 1419; Stop 1443
gaaccgcaatatcactaagctaggg

SEQ ID NO: 120115 - DNA, 25 bp, Artificial
  probe
  misc_feature (1)..(25): SEQ ID NO: 2557; WAN024CIN_at; Start 317; Stop 341
taaaaggtcagaatggtccacaggg

SEQ ID NO: 120116 - DNA, 25 bp, Artificial
  probe
  misc_feature (1)..(25): SEQ ID NO: 2557; WAN024CIN_at; Start 1544; Stop 1568
tctttgagtcctgctctggtggtgg

SEQ ID NO: 120117 - DNA, 25 bp, Artificial
  probe
  misc_feature (1)..(25): SEQ ID NO: 2557; WAN024CIN_at; Start 654; Stop 678
tggtcatgctcaaacaccagctctt

SEQ ID NO: 120118 - DNA, 25 bp, Artificial
  probe
  misc_feature (1)..(25): SEQ ID NO: 2557; WAN024CIN_at; Start 340; Stop 364
ggcttaccttctccacatagcatgg

SEQ ID NO: 120119 - DNA, 25 bp, Artificial
  probe
  misc_feature (1)..(25): SEQ ID NO: 2557; WAN024CIN_at; Start 284; Stop 308
taacagactttcgatttgtagaagc

SEQ ID NO: 120120 - DNA, 25 bp, Artificial
  probe
  misc_feature (1)..(25): SEQ ID NO: 2557; WAN024CIN_at; Start 355; Stop 379
catagcatggacgatacagagactc

SEQ ID NO: 120121 - DNA, 25 bp, Artificial
  probe
  misc_feature (1)..(25): SEQ ID NO: 2557; WAN024CIN_at; Start 127; Stop 151
tccaatagtgtttatgaacgagacc

SEQ ID NO: 120122 - DNA, 25 bp, Artificial
  probe
  misc_feature (1)..(25): SEQ ID NO: 2557; WAN024CIN_at; Start 1472; Stop 1496
tgcaatctcatcagtacatgctggg

SEQ ID NO: 120123 - DNA, 25 bp, Artificial
  probe
  misc_feature (1)..(25): SEQ ID NO: 2557; WAN024CIN_at; Start 1250; Stop 1274
tgtatcgtcaacatcctgactgggc

SEQ ID NO: 120124 - DNA, 25 bp, Artificial
  probe
  misc_feature (1)..(25): SEQ ID NO: 2557; WAN024CIN_at; Start 1989; Stop 2013
tgtagagaccatggaaacaacttta

SEQ ID NO: 120125 - DNA, 25 bp, Artificial
  probe
  misc_feature (1)..(25): SEQ ID NO: 629; WAN024CIO_at; Start 1593; Stop 1617
aatggcacgtgcaatggttacagag

SEQ ID NO: 120126 - DNA, 25 bp, Artificial
  probe
  misc_feature (1)..(25): SEQ ID NO: 629; WAN024CIO_at; Start 1218; Stop 1242
tgctgctcgtcgcaataaatcgata

SEQ ID NO: 120127 - DNA, 25 bp, Artificial
  probe
  misc_feature (1)..(25): SEQ ID NO: 629; WAN024CIO_at; Start 1316; Stop 1340
cacaaaaagaacgagaattggttgc

SEQ ID NO: 120128 - DNA, 25 bp, Artificial
  probe
  misc_feature (1)..(25): SEQ ID NO: 629; WAN024CIO_at; Start 1618; Stop 1642
tacggtatgagtgaaaaacttggcc

SEQ ID NO: 120129 - DNA, 25 bp, Artificial
  probe
  misc_feature (1)..(25): SEQ ID NO: 629; WAN024CIO_at; Start 1381; Stop 1405
tcgaatgctcgcgttgtccataagg

SEQ ID NO: 120130 - DNA, 25 bp, Artificial
  probe
  misc_feature (1)..(25): SEQ ID NO: 629; WAN024CIO_at; Start 405; Stop 429
taatctactcgtatccattgtgcca

SEQ ID NO: 120131 - DNA, 25 bp, Artificial
  probe
  misc_feature (1)..(25): SEQ ID NO: 629; WAN024CIO_at; Start 1344; Stop 1368
ccatgaggcaggacataccattgtt

SEQ ID NO: 120132 - DNA, 25 bp, Artificial
  probe
  misc_feature (1)..(25): SEQ ID NO: 629; WAN024CIO_at; Start 1651; Stop 1675
tatgaaggaaaccatgctatgcttg

SEQ ID NO: 120133 - DNA, 25 bp, Artificial
  probe
  misc_feature (1)..(25): SEQ ID NO: 629; WAN024CIO_at; Start 659; Stop 683
cagcaggtgttcttttggagggacc

SEQ ID NO: 120134 - DNA, 25 bp, Artificial
  probe
  misc_feature (1)..(25): SEQ ID NO: 629; WAN024CIO_at; Start 336; Stop 360
gcaaaaacttgctactgaccataaa

SEQ ID NO: 120135 - DNA, 25 bp, Artificial
  probe
  misc_feature (1)..(25): SEQ ID NO: 629; WAN024CIO_at; Start 1885; Stop 1909
cctgaagcagtagaagaggaatctc

SEQ ID NO: 120136 - DNA, 25 bp, Artificial
  probe
  misc_feature (1)..(25): SEQ ID NO: 629; WAN024CIO_at; Start 1440; Stop 1464
catgattgcacttcctaaagaggat

SEQ ID NO: 120137 - DNA, 25 bp, Artificial
  probe
  misc_feature (1)..(25): SEQ ID NO: 629; WAN024CIO_at; Start 479; Stop 503
gaggcaatggccgtaatccaatgag

SEQ ID NO: 120138 - DNA, 25 bp, Artificial
  probe
  misc_feature (1)..(25): SEQ ID NO: 629; WAN024CIO_at; Start 1864; Stop 1888
ctttacgaaacaggaaagatgcctg

SEQ ID NO: 120139 - DNA, 25 bp, Artificial
  probe
  misc_feature (1)..(25): SEQ ID NO: 629; WAN024CIO_at; Start 99; Stop 123
taactcaggaggaagtcagcaaatc

SEQ ID NO: 120140 - DNA, 25 bp, Artificial
  probe
  misc_feature (1)..(25): SEQ ID NO: 629; WAN024CIO_at; Start 497; Stop 521
caatgagttttggacgtagtaaggc

SEQ ID NO: 120141 - DNA, 25 bp, Artificial
  probe
  misc_feature (1)..(25): SEQ ID NO: 629; WAN024CIO_at; Start 629; Stop 653
aacgattcacaaaacttggagcccg

SEQ ID NO: 120142 - DNA, 25 bp, Artificial
  probe
  misc_feature (1)..(25): SEQ ID NO: 629; WAN024CIO_at; Start 1498; Stop 1522
caattggctggcttaatgggtggac

SEQ ID NO: 120143 - DNA, 25 bp, Artificial
  probe
  misc_feature (1)..(25): SEQ ID NO: 629; WAN024CIO_at; Start 1361; Stop 1385
ccattgttggtctagtcttgtcgaa

SEQ ID NO: 120144 - DNA, 25 bp, Artificial
  probe
  misc_feature (1)..(25): SEQ ID NO: 629; WAN024CIO_at; Start 264; Stop 288
cacgccatctgttactaaggtagag

SEQ ID NO: 120145 - DNA, 25 bp, Artificial
  probe
  misc_feature (1)..(25): SEQ ID NO: 629; WAN024CIO_at; Start 1424; Stop 1448
gccgtgcaggcggatacatgattgc

SEQ ID NO: 120146 - DNA, 25 bp, Artificial
  probe
  misc_feature (1)..(25): SEQ ID NO: 629; WAN024CIO_at; Start 303; Stop 327
tattcttcctgcagatactaccgta

SEQ ID NO: 120147 - DNA, 25 bp, Artificial
  probe
  misc_feature (1)..(25): SEQ ID NO: 629; WAN024CIO_at; Start 1518; Stop 1542
tggacgtgtagctgaagaaattatc

SEQ ID NO: 120148 - DNA, 25 bp, Artificial
  probe
  misc_feature (1)..(25): SEQ ID NO: 629; WAN024CIO_at; Start 1748; Stop 1772
taaatgaggcacgaaataaagctgc

SEQ ID NO: 120149 - DNA, 25 bp, Artificial
  probe
  misc_feature (1)..(25): SEQ ID NO: 629; WAN024CIO_at; Start 1668; Stop 1692
tatgcttggtgcacagagtcctcaa

SEQ ID NO: 120150 - DNA, 25 bp, Artificial
  probe
  misc_feature (1)..(25): SEQ ID NO: 629; WAN024CIO_at; Start 1187; Stop 1211
tagagaatgtcttgaatgaagcagc

SEQ ID NO: 120151 - DNA, 25 bp, Artificial
  probe
  misc_feature (1)..(25): SEQ ID NO: 629; WAN024CIO_at; Start 644; Stop 668
ttggagcccgtattccagcaggtgt

SEQ ID NO: 120152 - DNA, 25 bp, Artificial
  probe
  misc_feature (1)..(25): SEQ ID NO: 629; WAN024CIO_at; Start 181; Stop 205
caaccaaatggtagtgttatcgaag

SEQ ID NO: 120153 - DNA, 25 bp, Artificial
  probe
  misc_feature (1)..(25): SEQ ID NO: 629; WAN024CIO_at; Start 1578; Stop 1602
tgaacaagcgacacaaatggcacgt

SEQ ID NO: 120154 - DNA, 25 bp, Artificial
  probe
  misc_feature (1)..(25): SEQ ID NO: 629; WAN024CIO_at; Start 1277; Stop 1301
gagttattgctggaccttctaagaa

SEQ ID NO: 120155 - DNA, 25 bp, Artificial
  probe
  misc_feature (1)..(25): SEQ ID NO: 629; WAN024CIO_at; Start 566; Stop 590
ttgctggagctgaggaagaaaaaca

SEQ ID NO: 120156 - DNA, 25 bp, Artificial
  probe
  misc_feature (1)..(25): SEQ ID NO: 629; WAN024CIO_at; Start 246; Stop 270
aacaggtattcagtttttcacgcca

SEQ ID NO: 120157 - DNA, 25 bp, Artificial
  probe
  misc_feature (1)..(25): SEQ ID NO: 629; WAN024CIO_at; Start 1405; Stop 1429
gttacaattgtaccacgcggccgtg

SEQ ID NO: 120158 - DNA, 25 bp, Artificial
  probe
  misc_feature (1)..(25): SEQ ID NO: 629; WAN024CIO_at; Start 1634; Stop 1658
aacttggcccagtacaatatgaagg

SEQ ID NO: 120159 - DNA, 25 bp, Artificial
  probe
  misc_feature (1)..(25): SEQ ID NO: 6751; WAN024CIP_at; Start 164; Stop 188
atatcataaaagaggcgagccaggc

SEQ ID NO: 120160 - DNA, 25 bp, Artificial
  probe
  misc_feature (1)..(25): SEQ ID NO: 6751; WAN024CIP_at; Start 92; Stop 116
caagcgtgtggttttttcatctcaa

SEQ ID NO: 120161 - DNA, 25 bp, Artificial
  probe
  misc_feature (1)..(25): SEQ ID NO: 6751; WAN024CIP_at; Start 180; Stop 204
gagccaggctcaacctctttcactt

SEQ ID NO: 120162 - DNA, 25 bp, Artificial
  probe
  misc_feature (1)..(25): SEQ ID NO: 6751; WAN024CIP_at; Start 24; Stop 48
ttttgatatctgctcctacacgtgt

SEQ ID NO: 120163 - DNA, 25 bp, Artificial
  probe
  misc_feature (1)..(25): SEQ ID NO: 6751; WAN024CIP_at; Start 56; Stop 80
caacgattagcctttttaccagtcg

SEQ ID NO: 120164 - DNA, 25 bp, Artificial
  probe
  misc_feature (1)..(25): SEQ ID NO: 6751; WAN024CIP_at; Start 200; Stop 224
cacttaatttgtacgaactggtgta

SEQ ID NO: 120165 - DNA, 25 bp, Artificial
  probe
  misc_feature (1)..(25): SEQ ID NO: 6751; WAN024CIP_at; Start 78; Stop 102
tcgacttgattgtacaagcgtgtgg

SEQ ID NO: 120166 - DNA, 25 bp, Artificial
  probe
  misc_feature (1)..(25): SEQ ID NO: 6751; WAN024CIP_at; Start 72; Stop 96
taccagtcgacttgattgtacaagc

SEQ ID NO: 120167 - DNA, 25 bp, Artificial
  probe
  misc_feature (1)..(25): SEQ ID NO: 6751; WAN024CIP_at; Start 80; Stop 104
gacttgattgtacaagcgtgtggtt

SEQ ID NO: 120168 - DNA, 25 bp, Artificial
  probe
  misc_feature (1)..(25): SEQ ID NO: 6751; WAN024CIP_at; Start 90; Stop 114
tacaagcgtgtggttttttcatctc

SEQ ID NO: 120169 - DNA, 25 bp, Artificial
  probe
  misc_feature (1)..(25): SEQ ID NO: 6751; WAN024CIP_at; Start 114; Stop 138
caacaaaatttccaacttgatacat

SEQ ID NO: 120170 - DNA, 25 bp, Artificial
  probe
  misc_feature (1)..(25): SEQ ID NO: 6751; WAN024CIP_at; Start 177; Stop 201
ggcgagccaggctcaacctctttca

SEQ ID NO: 120171 - DNA, 25 bp, Artificial
  probe
  misc_feature (1)..(25): SEQ ID NO: 6751; WAN024CIP_at; Start 34; Stop 58
tgctcctacacgtgtaatttcccaa

SEQ ID NO: 120172 - DNA, 25 bp, Artificial
  probe
  misc_feature (1)..(25): SEQ ID NO: 6751; WAN024CIP_at; Start 21; Stop 45
ttattttgatatctgctcctacacg

SEQ ID NO: 120173 - DNA, 25 bp, Artificial
  probe
  misc_feature (1)..(25): SEQ ID NO: 6751; WAN024CIP_at; Start 96; Stop 120
cgtgtggttttttcatctcaacaaa

SEQ ID NO: 120174 - DNA, 25 bp, Artificial
  probe
  misc_feature (1)..(25): SEQ ID NO: 6751; WAN024CIP_at; Start 75; Stop 99
cagtcgacttgattgtacaagcgtg

SEQ ID NO: 120175 - DNA, 25 bp, Artificial
  probe
  misc_feature (1)..(25): SEQ ID NO: 6751; WAN024CIP_at; Start 136; Stop 160
catactactctccttttcttttccg

SEQ ID NO: 120176 - DNA, 25 bp, Artificial
  probe
  misc_feature (1)..(25): SEQ ID NO: 6751; WAN024CIP_at; Start 65; Stop 89
gcctttttaccagtcgacttgattg

SEQ ID NO: 120177 - DNA, 25 bp, Artificial
  probe
  misc_feature (1)..(25): SEQ ID NO: 6751; WAN024CIP_at; Start 145; Stop 169
ctccttttcttttccgattatatca

SEQ ID NO: 120178 - DNA, 25 bp, Artificial
  probe
  misc_feature (1)..(25): SEQ ID NO: 6751; WAN024CIP_at; Start 59; Stop 83
cgattagcctttttaccagtcgact

SEQ ID NO: 120179 - DNA, 25 bp, Artificial
  probe
  misc_feature (1)..(25): SEQ ID NO: 6751; WAN024CIP_at; Start 165; Stop 189
tatcataaaagaggcgagccaggct

SEQ ID NO: 120180 - DNA, 25 bp, Artificial
  probe
  misc_feature (1)..(25): SEQ ID NO: 6751; WAN024CIP_at; Start 124; Stop 148
tccaacttgatacatactactctcc

SEQ ID NO: 120181 - DNA, 25 bp, Artificial
  probe
  misc_feature (1)..(25): SEQ ID NO: 6751; WAN024CIP_at; Start 3; Stop 27
gctcacaattactgcattttatttt

SEQ ID NO: 120182 - DNA, 25 bp, Artificial
  probe
  misc_feature (1)..(25): SEQ ID NO: 6751; WAN024CIP_at; Start 168; Stop 192
cataaaagaggcgagccaggctcaa

SEQ ID NO: 120183 - DNA, 25 bp, Artificial
  probe
  misc_feature (1)..(25): SEQ ID NO: 6751; WAN024CIP_at; Start 190; Stop 214
caacctctttcacttaatttgtacg

SEQ ID NO: 120184 - DNA, 25 bp, Artificial
  probe
  misc_feature (1)..(25): SEQ ID NO: 6751; WAN024CIP_at; Start 170; Stop 194
taaaagaggcgagccaggctcaacc

SEQ ID NO: 120185 - DNA, 25 bp, Artificial
  probe
  misc_feature (1)..(25): SEQ ID NO: 6751; WAN024CIP_at; Start 30; Stop 54
tatctgctcctacacgtgtaatttc

SEQ ID NO: 120186 - DNA, 25 bp, Artificial
  probe
  misc_feature (1)..(25): SEQ ID NO: 6751; WAN024CIP_at; Start 184; Stop 208
caggctcaacctctttcacttaatt

SEQ ID NO: 120187 - DNA, 25 bp, Artificial
  probe
  misc_feature (1)..(25): SEQ ID NO: 6751; WAN024CIP_at; Start 37; Stop 61
tcctacacgtgtaatttcccaacga

SEQ ID NO: 120188 - DNA, 25 bp, Artificial
  probe
  misc_feature (1)..(25): SEQ ID NO: 6751; WAN024CIP_at; Start 42; Stop 66
cacgtgtaatttcccaacgattagc

SEQ ID NO: 120189 - DNA, 25 bp, Artificial
  probe
  misc_feature (1)..(25): SEQ ID NO: 6751; WAN024CIP_at; Start 62; Stop 86
ttagcctttttaccagtcgacttga

SEQ ID NO: 120190 - DNA, 25 bp, Artificial
  probe
  misc_feature (1)..(25): SEQ ID NO: 6751; WAN024CIP_at; Start 108; Stop 132
tcatctcaacaaaatttccaacttg

SEQ ID NO: 120191 - DNA, 25 bp, Artificial
  probe
  misc_feature (1)..(25): SEQ ID NO: 6751; WAN024CIP_at; Start 44; Stop 68
cgtgtaatttcccaacgattagcct

SEQ ID NO: 120192 - DNA, 25 bp, Artificial
  probe
  misc_feature (1)..(25): SEQ ID NO: 6751; WAN024CIP_at; Start 27; Stop 51
tgatatctgctcctacacgtgtaat

SEQ ID NO: 120193 - DNA, 25 bp, Artificial
  probe
  misc_feature (1)..(25): SEQ ID NO: 2795; WAN024CIQ_at; Start 91; Stop 115
acacgtgtaggagcagatatcaaaa

SEQ ID NO: 120194 - DNA, 25 bp, Artificial
  probe
  misc_feature (1)..(25): SEQ ID NO: 2795; WAN024CIQ_at; Start 92; Stop 116
cacgtgtaggagcagatatcaaaat

SEQ ID NO: 120195 - DNA, 25 bp, Artificial
  probe
  misc_feature (1)..(25): SEQ ID NO: 2795; WAN024CIQ_at; Start 73; Stop 97
gctaatcgttgggaaattacacgtg

SEQ ID NO: 120196 - DNA, 25 bp, Artificial
  probe
  misc_feature (1)..(25): SEQ ID NO: 2795; WAN024CIQ_at; Start 94; Stop 118
cgtgtaggagcagatatcaaaataa

SEQ ID NO: 120197 - DNA, 25 bp, Artificial
  probe
  misc_feature (1)..(25): SEQ ID NO: 2795; WAN024CIQ_at; Start 154; Stop 178
cgatatgattttgagcgaaaaatga

SEQ ID NO: 120198 - DNA, 25 bp, Artificial
  probe
  misc_feature (1)..(25): SEQ ID NO: 2795; WAN024CIQ_at; Start 89; Stop 113
ttacacgtgtaggagcagatatcaa

SEQ ID NO: 120199 - DNA, 25 bp, Artificial
  probe
  misc_feature (1)..(25): SEQ ID NO: 2795; WAN024CIQ_at; Start 152; Stop 176
ggcgatatgattttgagcgaaaaat

SEQ ID NO: 120200 - DNA, 25 bp, Artificial
  probe
  misc_feature (1)..(25): SEQ ID NO: 2795; WAN024CIQ_at; Start 98; Stop 122
taggagcagatatcaaaataaaatg

SEQ ID NO: 120201 - DNA, 25 bp, Artificial
  probe
  misc_feature (1)..(25): SEQ ID NO: 2795; WAN024CIQ_at; Start 166; Stop 190
gagcgaaaaatgaataaaattattg

SEQ ID NO: 120202 - DNA, 25 bp, Artificial
  probe
  misc_feature (1)..(25): SEQ ID NO: 2795; WAN024CIQ_at; Start 136; Stop 160
catgttgtcatgatggggcgatatg

SEQ ID NO: 120203 - DNA, 25 bp, Artificial
  probe
  misc_feature (1)..(25): SEQ ID NO: 2795; WAN024CIQ_at; Start 81; Stop 105
ttgggaaattacacgtgtaggagca

SEQ ID NO: 120204 - DNA, 25 bp, Artificial
  probe
  misc_feature (1)..(25): SEQ ID NO: 2795; WAN024CIQ_at; Start 71; Stop 95
aggctaatcgttgggaaattacacg

SEQ ID NO: 120205 - DNA, 25 bp, Artificial
  probe
  misc_feature (1)..(25): SEQ ID NO: 2795; WAN024CIQ_at; Start 90; Stop 114
tacacgtgtaggagcagatatcaaa

SEQ ID NO: 120206 - DNA, 25 bp, Artificial
  probe
  misc_feature (1)..(25): SEQ ID NO: 2795; WAN024CIQ_at; Start 126; Stop 150
taattgtgagcatgttgtcatgatg

SEQ ID NO: 120207 - DNA, 25 bp, Artificial
  probe
  misc_feature (1)..(25): SEQ ID NO: 2795; WAN024CIQ_at; Start 88; Stop 112
attacacgtgtaggagcagatatca

SEQ ID NO: 120208 - DNA, 25 bp, Artificial
  probe
  misc_feature (1)..(25): SEQ ID NO: 2795; WAN024CIQ_at; Start 79; Stop 103
cgttgggaaattacacgtgtaggag

SEQ ID NO: 120209 - DNA, 25 bp, Artificial
  probe
  misc_feature (1)..(25): SEQ ID NO: 2795; WAN024CIQ_at; Start 83; Stop 107
gggaaattacacgtgtaggagcaga

SEQ ID NO: 120210 - DNA, 25 bp, Artificial
  probe
  misc_feature (1)..(25): SEQ ID NO: 2795; WAN024CIQ_at; Start 2; Stop 26
tgtatcaagttggaaattttgttga

SEQ ID NO: 120211 - DNA, 25 bp, Artificial
  probe
  misc_feature (1)..(25): SEQ ID NO: 2795; WAN024CIQ_at; Start 159; Stop 183
tgattttgagcgaaaaatgaataaa

SEQ ID NO: 120212 - DNA, 25 bp, Artificial
  probe
  misc_feature (1)..(25): SEQ ID NO: 2795; WAN024CIQ_at; Start 151; Stop 175
gggcgatatgattttgagcgaaaaa

SEQ ID NO: 120213 - DNA, 25 bp, Artificial
  probe
  misc_feature (1)..(25): SEQ ID NO: 2795; WAN024CIQ_at; Start 12; Stop 36
tggaaattttgttgagatgaaaaaa

SEQ ID NO: 120214 - DNA, 25 bp, Artificial
  probe
  misc_feature (1)..(25): SEQ ID NO: 2795; WAN024CIQ_at; Start 78; Stop 102
tcgttgggaaattacacgtgtagga

SEQ ID NO: 120215 - DNA, 25 bp, Artificial
  probe
  misc_feature (1)..(25): SEQ ID NO: 2795; WAN024CIQ_at; Start 74; Stop 98
ctaatcgttgggaaattacacgtgt

SEQ ID NO: 120216 - DNA, 25 bp, Artificial
  probe
  misc_feature (1)..(25): SEQ ID NO: 2795; WAN024CIQ_at; Start 87; Stop 111
aattacacgtgtaggagcagatatc

SEQ ID NO: 120217 - DNA, 25 bp, Artificial
  probe
  misc_feature (1)..(25): SEQ ID NO: 2795; WAN024CIQ_at; Start 75; Stop 99
taatcgttgggaaattacacgtgta

SEQ ID NO: 120218 - DNA, 25 bp, Artificial
  probe
  misc_feature (1)..(25): SEQ ID NO: 2795; WAN024CIQ_at; Start 124; Stop 148
agtaattgtgagcatgttgtcatga

SEQ ID NO: 120219 - DNA, 25 bp, Artificial
  probe
  misc_feature (1)..(25): SEQ ID NO: 2795; WAN024CIQ_at; Start 96; Stop 120
tgtaggagcagatatcaaaataaaa

SEQ ID NO: 120220 - DNA, 25 bp, Artificial
  probe
  misc_feature (1)..(25): SEQ ID NO: 2795; WAN024CIQ_at; Start 77; Stop 101
atcgttgggaaattacacgtgtagg

SEQ ID NO: 120221 - DNA, 25 bp, Artificial
  probe
  misc_feature (1)..(25): SEQ ID NO: 2795; WAN024CIQ_at; Start 128; Stop 152
attgtgagcatgttgtcatgatggg

SEQ ID NO: 120222 - DNA, 25 bp, Artificial
  probe
  misc_feature (1)..(25): SEQ ID NO: 2795; WAN024CIQ_at; Start 84; Stop 108
ggaaattacacgtgtaggagcagat

SEQ ID NO: 120223 - DNA, 25 bp, Artificial
  probe
  misc_feature (1)..(25): SEQ ID NO: 2795; WAN024CIQ_at; Start 85; Stop 109
gaaattacacgtgtaggagcagata

SEQ ID NO: 120224 - DNA, 25 bp, Artificial
  probe
  misc_feature (1)..(25): SEQ ID NO: 2795; WAN024CIQ_at; Start 7; Stop 31
caagttggaaattttgttgagatga

SEQ ID NO: 120225 - DNA, 25 bp, Artificial
  probe
  misc_feature (1)..(25): SEQ ID NO: 2795; WAN024CIQ_at; Start 76; Stop 100
aatcgttgggaaattacacgtgtag

SEQ ID NO: 120226 - DNA, 25 bp, Artificial
  probe
  misc_feature (1)..(25): SEQ ID NO: 2795; WAN024CIQ_at; Start 93; Stop 117
acgtgtaggagcagatatcaaaata

SEQ ID NO: 120227 - DNA, 25 bp, Artificial
  probe
  misc_feature (1)..(25): SEQ ID NO: 4138; WAN024CIR_at; Start 112; Stop 136
ccaaaagctagaaaggtatctcaaa

SEQ ID NO: 120228 - DNA, 25 bp, Artificial
  probe
  misc_feature (1)..(25): SEQ ID NO: 4138; WAN024CIR_at; Start 82; Stop 106
caagggaaattactctccttagatg

SEQ ID NO: 120229 - DNA, 25 bp, Artificial
  probe
  misc_feature (1)..(25): SEQ ID NO: 4138; WAN024CIR_at; Start 118; Stop 142
gctagaaaggtatctcaaacctctc

SEQ ID NO: 120230 - DNA, 25 bp, Artificial
  probe
  misc_feature (1)..(25): SEQ ID NO: 4138; WAN024CIR_at; Start 92; Stop 116
tactctccttagatgataatccaaa

SEQ ID NO: 120231 - DNA, 25 bp, Artificial
  probe
  misc_feature (1)..(25): SEQ ID NO: 4138; WAN024CIR_at; Start 30; Stop 54
cccattgtcacccattatagtcatt

SEQ ID NO: 120232 - DNA, 25 bp, Artificial
  probe
  misc_feature (1)..(25): SEQ ID NO: 4138; WAN024CIR_at; Start 111; Stop 135
tccaaaagctagaaaggtatctcaa

SEQ ID NO: 120233 - DNA, 25 bp, Artificial
  probe
  misc_feature (1)..(25): SEQ ID NO: 4138; WAN024CIR_at; Start 113; Stop 137
caaaagctagaaaggtatctcaaac

SEQ ID NO: 120234 - DNA, 25 bp, Artificial
  probe
  misc_feature (1)..(25): SEQ ID NO: 4138; WAN024CIR_at; Start 78; Stop 102
aatgcaagggaaattactctcctta

SEQ ID NO: 120235 - DNA, 25 bp, Artificial
  probe
  misc_feature (1)..(25): SEQ ID NO: 4138; WAN024CIR_at; Start 32; Stop 56
cattgtcacccattatagtcatttc

SEQ ID NO: 120236 - DNA, 25 bp, Artificial
  probe
  misc_feature (1)..(25): SEQ ID NO: 4138; WAN024CIR_at; Start 122; Stop 146
gaaaggtatctcaaacctctctact

SEQ ID NO: 120237 - DNA, 25 bp, Artificial
  probe
  misc_feature (1)..(25): SEQ ID NO: 4138; WAN024CIR_at; Start 109; Stop 133
aatccaaaagctagaaaggtatctc

SEQ ID NO: 120238 - DNA, 25 bp, Artificial
  probe
  misc_feature (1)..(25): SEQ ID NO: 4138; WAN024CIR_at; Start 47; Stop 71
tagtcatttcgtgtctctttttccc

SEQ ID NO: 120239 - DNA, 25 bp, Artificial
  probe
  misc_feature (1)..(25): SEQ ID NO: 4138; WAN024CIR_at; Start 86; Stop 110
ggaaattactctccttagatgataa

SEQ ID NO: 120240 - DNA, 25 bp, Artificial
  probe
  misc_feature (1)..(25): SEQ ID NO: 4138; WAN024CIR_at; Start 108; Stop 132
taatccaaaagctagaaaggtatct

SEQ ID NO: 120241 - DNA, 25 bp, Artificial
  probe
  misc_feature (1)..(25): SEQ ID NO: 4138; WAN024CIR_at; Start 75; Stop 99
tttaatgcaagggaaattactctcc

SEQ ID NO: 120242 - DNA, 25 bp, Artificial
  probe
  misc_feature (1)..(25): SEQ ID NO: 4138; WAN024CIR_at; Start 15; Stop 39
ttgtctatcccttcccccattgtca

SEQ ID NO: 120243 - DNA, 25 bp, Artificial
  probe
  misc_feature (1)..(25): SEQ ID NO: 4138; WAN024CIR_at; Start 37; Stop 61
tcacccattatagtcatttcgtgtc

SEQ ID NO: 120244 - DNA, 25 bp, Artificial
  probe
  misc_feature (1)..(25): SEQ ID NO: 4138; WAN024CIR_at; Start 106; Stop 130
gataatccaaaagctagaaaggtat

SEQ ID NO: 120245 - DNA, 25 bp, Artificial
  probe
  misc_feature (1)..(25): SEQ ID NO: 4138; WAN024CIR_at; Start 105; Stop 129
tgataatccaaaagctagaaaggta

SEQ ID NO: 120246 - DNA, 25 bp, Artificial
  probe
  misc_feature (1)..(25): SEQ ID NO: 4138; WAN024CIR_at; Start 98; Stop 122
ccttagatgataatccaaaagctag

SEQ ID NO: 120247 - DNA, 25 bp, Artificial
  probe
  misc_feature (1)..(25): SEQ ID NO: 4138; WAN024CIR_at; Start 103; Stop 127
gatgataatccaaaagctagaaagg

SEQ ID NO: 120248 - DNA, 25 bp, Artificial
  probe
  misc_feature (1)..(25): SEQ ID NO: 4138; WAN024CIR_at; Start 116; Stop 140
aagctagaaaggtatctcaaacctc

SEQ ID NO: 120249 - DNA, 25 bp, Artificial
  probe
  misc_feature (1)..(25): SEQ ID NO: 4138; WAN024CIR_at; Start 1; Stop 25
gtggataaaatctcttgtctatccc

SEQ ID NO: 120250 - DNA, 25 bp, Artificial
  probe
  misc_feature (1)..(25): SEQ ID NO: 4138; WAN024CIR_at; Start 85; Stop 109
gggaaattactctccttagatgata

SEQ ID NO: 120251 - DNA, 25 bp, Artificial
  probe
  misc_feature (1)..(25): SEQ ID NO: 4138; WAN024CIR_at; Start 76; Stop 100
ttaatgcaagggaaattactctcct

SEQ ID NO: 120252 - DNA, 25 bp, Artificial
  probe
  misc_feature (1)..(25): SEQ ID NO: 4138; WAN024CIR_at; Start 35; Stop 59
tgtcacccattatagtcatttcgtg

SEQ ID NO: 120253 - DNA, 25 bp, Artificial
  probe
  misc_feature (1)..(25): SEQ ID NO: 4138; WAN024CIR_at; Start 40; Stop 64
cccattatagtcatttcgtgtctct

SEQ ID NO: 120254 - DNA, 25 bp, Artificial
  probe
  misc_feature (1)..(25): SEQ ID NO: 4138; WAN024CIR_at; Start 99; Stop 123
cttagatgataatccaaaagctaga

SEQ ID NO: 120255 - DNA, 25 bp, Artificial
  probe
  misc_feature (1)..(25): SEQ ID NO: 4138; WAN024CIR_at; Start 6; Stop 30
taaaatctcttgtctatcccttccc

SEQ ID NO: 120256 - DNA, 25 bp, Artificial
  probe
  misc_feature (1)..(25): SEQ ID NO: 4138; WAN024CIR_at; Start 125; Stop 149
aggtatctcaaacctctctactctc

SEQ ID NO: 120257 - DNA, 25 bp, Artificial
  probe
  misc_feature (1)..(25): SEQ ID NO: 4138; WAN024CIR_at; Start 80; Stop 104
tgcaagggaaattactctccttaga

SEQ ID NO: 120258 - DNA, 25 bp, Artificial
  probe
  misc_feature (1)..(25): SEQ ID NO: 4138; WAN024CIR_at; Start 120; Stop 144
tagaaaggtatctcaaacctctcta

SEQ ID NO: 120259 - DNA, 25 bp, Artificial
  probe
  misc_feature (1)..(25): SEQ ID NO: 4138; WAN024CIR_at; Start 42; Stop 66
cattatagtcatttcgtgtctcttt

SEQ ID NO: 120260 - DNA, 25 bp, Artificial
  probe
  misc_feature (1)..(25): SEQ ID NO: 4138; WAN024CIR_at; Start 95; Stop 119
tctccttagatgataatccaaaagc

SEQ ID NO: 120261 - DNA, 25 bp, Artificial
  probe
  misc_feature (1)..(25): SEQ ID NO: 3001; WAN024CIS_at; Start 450; Stop 474
gattggtgaagtattatcagacgag

SEQ ID NO: 120262 - DNA, 25 bp, Artificial
  probe
  misc_feature (1)..(25): SEQ ID NO: 3001; WAN024CIS_at; Start 125; Stop 149
cattgtgcgaataccttaatgtatc

SEQ ID NO: 120263 - DNA, 25 bp, Artificial
  probe
  misc_feature (1)..(25): SEQ ID NO: 3001; WAN024CIS_at; Start 162; Stop 186
gactcgatttgcgaaaaaatgtggt

SEQ ID NO: 120264 - DNA, 25 bp, Artificial
  probe
  misc_feature (1)..(25): SEQ ID NO: 3001; WAN024CIS_at; Start 544; Stop 568
caaactgatattgtactagaaggtc

SEQ ID NO: 120265 - DNA, 25 bp, Artificial
  probe
  misc_feature (1)..(25): SEQ ID NO: 3001; WAN024CIS_at; Start 379; Stop 403
tatctctacggtaaaggaagttctg

SEQ ID NO: 120266 - DNA, 25 bp, Artificial
  probe
  misc_feature (1)..(25): SEQ ID NO: 3001; WAN024CIS_at; Start 471; Stop 495
cgaggatatgattttgtggagtagc

SEQ ID NO: 120267 - DNA, 25 bp, Artificial
  probe
  misc_feature (1)..(25): SEQ ID NO: 3001; WAN024CIS_at; Start 577; Stop 601
gctgcagataaaggcgctaaaacag

SEQ ID NO: 120268 - DNA, 25 bp, Artificial
  probe
  misc_feature (1)..(25): SEQ ID NO: 3001; WAN024CIS_at; Start 313; Stop 337
tacacggttcttgatgaagttcaac

SEQ ID NO: 120269 - DNA, 25 bp, Artificial
  probe
  misc_feature (1)..(25): SEQ ID NO: 3001; WAN024CIS_at; Start 228; Stop 252
gattcatgagaaagaaaagttggca

SEQ ID NO: 120270 - DNA, 25 bp, Artificial
  probe
  misc_feature (1)..(25): SEQ ID NO: 3001; WAN024CIS_at; Start 32; Stop 56
tagaagctaacttaccaaatatggc

SEQ ID NO: 120271 - DNA, 25 bp, Artificial
  probe
  misc_feature (1)..(25): SEQ ID NO: 3001; WAN024CIS_at; Start 213; Stop 237
caaataccaagagatgattcatgag

SEQ ID NO: 120272 - DNA, 25 bp, Artificial
  probe
  misc_feature (1)..(25): SEQ ID NO: 3001; WAN024CIS_at; Start 784; Stop 808
caaactattatccataaggaggaac

SEQ ID NO: 120273 - DNA, 25 bp, Artificial
  probe
  misc_feature (1)..(25): SEQ ID NO: 3001; WAN024CIS_at; Start 284; Stop 308
ccgactatgaggaaatgttgagaaa

SEQ ID NO: 120274 - DNA, 25 bp, Artificial
  probe
  misc_feature (1)..(25): SEQ ID NO: 3001; WAN024CIS_at; Start 673; Stop 697
gatcatctctcgtatggcaatcgca

SEQ ID NO: 120275 - DNA, 25 bp, Artificial
  probe
  misc_feature (1)..(25): SEQ ID NO: 3001; WAN024CIS_at; Start 511; Stop 535
aattgccttgtcattggagcatcca

SEQ ID NO: 120276 - DNA, 25 bp, Artificial
  probe
  misc_feature (1)..(25): SEQ ID NO: 3001; WAN024CIS_at; Start 351; Stop 375
tgagatgatagaaactgctgagcgt

SEQ ID NO: 120277 - DNA, 25 bp, Artificial
  probe
  misc_feature (1)..(25): SEQ ID NO: 3001; WAN024CIS_at; Start 83; Stop 107
tcttcttaaaacagcaacctctgaa

SEQ ID NO: 120278 - DNA, 25 bp, Artificial
  probe
  misc_feature (1)..(25): SEQ ID NO: 3001; WAN024CIS_at; Start 687; Stop 711
tggcaatcgcatatcacctcagttt

SEQ ID NO: 120279 - DNA, 25 bp, Artificial
  probe
  misc_feature (1)..(25): SEQ ID NO: 3001; WAN024CIS_at; Start 730; Stop 754
gactgcttattctctaattatctgg

SEQ ID NO: 120280 - DNA, 25 bp, Artificial
  probe
  misc_feature (1)..(25): SEQ ID NO: 3001; WAN024CIS_at; Start 53; Stop 77
tggcatatgctgaaaaagacattgc

SEQ ID NO: 120281 - DNA, 25 bp, Artificial
  probe
  misc_feature (1)..(25): SEQ ID NO: 3001; WAN024CIS_at; Start 366; Stop 390
tgctgagcgtgtatatctctacggt

SEQ ID NO: 120282 - DNA, 25 bp, Artificial
  probe
  misc_feature (1)..(25): SEQ ID NO: 3001; WAN024CIS_at; Start 328; Stop 352
gaagttcaacttgagcgtattgctg

SEQ ID NO: 120283 - DNA, 25 bp, Artificial
  probe
  misc_feature (1)..(25): SEQ ID NO: 3001; WAN024CIS_at; Start 269; Stop 293
cagaaaaagttttatccgactatga

SEQ ID NO: 120284 - DNA, 25 bp, Artificial
  probe
  misc_feature (1)..(25): SEQ ID NO: 3001; WAN024CIS_at; Start 750; Stop 774
tctggaaagtccagagagacaatat

SEQ ID NO: 120285 - DNA, 25 bp, Artificial
  probe
  misc_feature (1)..(25): SEQ ID NO: 3001; WAN024CIS_at; Start 249; Stop 273
ggcattatatacagaggcaacagaa

SEQ ID NO: 120286 - DNA, 25 bp, Artificial
  probe
  misc_feature (1)..(25): SEQ ID NO: 3001; WAN024CIS_at; Start 394; Stop 418
ggaagttctgttcttgctttacaag

SEQ ID NO: 120287 - DNA, 25 bp, Artificial
  probe
  misc_feature (1)..(25): SEQ ID NO: 3001; WAN024CIS_at; Start 144; Stop 168
tgtatccaaagcaacattgactcga

SEQ ID NO: 120288 - DNA, 25 bp, Artificial
  probe
  misc_feature (1)..(25): SEQ ID NO: 3001; WAN024CIS_at; Start 2; Stop 26
tgttactgcaaaaagaactaattcc

SEQ ID NO: 120289 - DNA, 25 bp, Artificial
  probe
  misc_feature (1)..(25): SEQ ID NO: 3001; WAN024CIS_at; Start 526; Stop 550
ggagcatccatttcaggtcaaactg

SEQ ID NO: 120290 - DNA, 25 bp, Artificial
  probe
  misc_feature (1)..(25): SEQ ID NO: 3001; WAN024CIS_at; Start 494; Stop 518
gcttactacttaatgaaaattgcct

SEQ ID NO: 120291 - DNA, 25 bp, Artificial
  probe
  misc_feature (1)..(25): SEQ ID NO: 3001; WAN024CIS_at; Start 653; Stop 677
tattgttattagcttcgaccgatca

SEQ ID NO: 120292 - DNA, 25 bp, Artificial
  probe
  misc_feature (1)..(25): SEQ ID NO: 3001; WAN024CIS_at; Start 16; Stop 40
gaactaattccaatgatagaagcta

SEQ ID NO: 120293 - DNA, 25 bp, Artificial
  probe
  misc_feature (1)..(25): SEQ ID NO: 3001; WAN024CIS_at; Start 559; Stop 583
ctagaaggtctacaaaaagctgcag

SEQ ID NO: 120294 - DNA, 25 bp, Artificial
  probe
  misc_feature (1)..(25): SEQ ID NO: 3001; WAN024CIS_at; Start 435; Stop 459
tatgcgtctcggagtgattggtgaa

SEQ ID NO: 120295 - DNA, 25 bp, Artificial
  probe
  misc_feature (1)..(25): SEQ ID NO: 6785; WAN024CIT_at; Start 154; Stop 178
tctgtccgcgatatttcagaaataa

SEQ ID NO: 120296 - DNA, 25 bp, Artificial
  probe
  misc_feature (1)..(25): SEQ ID NO: 6785; WAN024CIT_at; Start 323; Stop 347
caagaccaggttatgataatattac

SEQ ID NO: 120297 - DNA, 25 bp, Artificial
  probe
  misc_feature (1)..(25): SEQ ID NO: 6785; WAN024CIT_at; Start 124; Stop 148
caagcaggcgctaaaggtattcgtg

SEQ ID NO: 120298 - DNA, 25 bp, Artificial
  probe
  misc_feature (1)..(25): SEQ ID NO: 6785; WAN024CIT_at; Start 376; Stop 400
tatccaaaccaattattaatggctg

SEQ ID NO: 120299 - DNA, 25 bp, Artificial
  probe
  misc_feature (1)..(25): SEQ ID NO: 6785; WAN024CIT_at; Start 235; Stop 259
gaaccttttatttcagcaactatga

SEQ ID NO: 120300 - DNA, 25 bp, Artificial
  probe
  misc_feature (1)..(25): SEQ ID NO: 6785; WAN024CIT_at; Start 635; Stop 659
gagctatcactcgtccaaaagaaat

SEQ ID NO: 120301 - DNA, 25 bp, Artificial
  probe
  misc_feature (1)..(25): SEQ ID NO: 6785; WAN024CIT_at; Start 601; Stop 625
ttagatttaggtgcttacgcagtgg

SEQ ID NO: 120302 - DNA, 25 bp, Artificial
  probe
  misc_feature (1)..(25): SEQ ID NO: 6785; WAN024CIT_at; Start 425; Stop 449
aagtagctgctgaatcgggagtaga

SEQ ID NO: 120303 - DNA, 25 bp, Artificial
  probe
  misc_feature (1)..(25): SEQ ID NO: 6785; WAN024CIT_at; Start 576; Stop 600
tactccggaacaagctagaaaaatg

SEQ ID NO: 120304 - DNA, 25 bp, Artificial
  probe
  misc_feature (1)..(25): SEQ ID NO: 6785; WAN024CIT_at; Start 182; Stop 206
aagaagttgacttaccaattatagg

SEQ ID NO: 120305 - DNA, 25 bp, Artificial
  probe
  misc_feature (1)..(25): SEQ ID NO: 6785; WAN024CIT_at; Start 504; Stop 528
tcctgattttgagttagttgaaaga

SEQ ID NO: 120306 - DNA, 25 bp, Artificial
  probe
  misc_feature (1)..(25): SEQ ID NO: 6785; WAN024CIT_at; Start 486; Stop 510
tagccctaaaaaagataatcctgat

SEQ ID NO: 120307 - DNA, 25 bp, Artificial
  probe
  misc_feature (1)..(25): SEQ ID NO: 6785; WAN024CIT_at; Start 271; Stop 295
gaattagttagtgaaggagtagaca

SEQ ID NO: 120308 - DNA, 25 bp, Artificial
  probe
  misc_feature (1)..(25): SEQ ID NO: 6785; WAN024CIT_at; Start 363; Stop 387
tattaaagtcaagtatccaaaccaa

SEQ ID NO: 120309 - DNA, 25 bp, Artificial
  probe
  misc_feature (1)..(25): SEQ ID NO: 6785; WAN024CIT_at; Start 472; Stop 496
ggttatacaccatatagccctaaaa

SEQ ID NO: 120310 - DNA, 25 bp, Artificial
  probe
  misc_feature (1)..(25): SEQ ID NO: 6785; WAN024CIT_at; Start 34; Stop 58
caaataattgtttcctgccaagcgt

SEQ ID NO: 120311 - DNA, 25 bp, Artificial
  probe
  misc_feature (1)..(25): SEQ ID NO: 6785; WAN024CIT_at; Start 65; Stop 89
gagagccactttatactccaaatgg

SEQ ID NO: 120312 - DNA, 25 bp, Artificial
  probe
  misc_feature (1)..(25): SEQ ID NO: 6785; WAN024CIT_at; Start 81; Stop 105
tccaaatggaggagtgatgccgtta

SEQ ID NO: 120313 - DNA, 25 bp, Artificial
  probe
  misc_feature (1)..(25): SEQ ID NO: 6785; WAN024CIT_at; Start 50; Stop 74
gccaagcgttagaaggagagccact

SEQ ID NO: 120314 - DNA, 25 bp, Artificial
  probe
  misc_feature (1)..(25): SEQ ID NO: 6785; WAN024CIT_at; Start 559; Stop 583
gctgaaggaagaataagtactccgg

SEQ ID NO: 120315 - DNA, 25 bp, Artificial
  probe
  misc_feature (1)..(25): SEQ ID NO: 6785; WAN024CIT_at; Start 220; Stop 244
gattacgatggctttgaacctttta

SEQ ID NO: 120316 - DNA, 25 bp, Artificial
  probe
  misc_feature (1)..(25): SEQ ID NO: 6785; WAN024CIT_at; Start 109; Stop 133
gcaaaagccgcctttcaagcaggcg

SEQ ID NO: 120317 - DNA, 25 bp, Artificial
  probe
  misc_feature (1)..(25): SEQ ID NO: 6785; WAN024CIT_at; Start 457; Stop 481
ggtacgacattatctggttatacac

SEQ ID NO: 120318 - DNA, 25 bp, Artificial
  probe
  misc_feature (1)..(25): SEQ ID NO: 6785; WAN024CIT_at; Start 247; Stop 271
tcagcaactatgaaagagattgatg

SEQ ID NO: 120319 - DNA, 25 bp, Artificial
  probe
  misc_feature (1)..(25): SEQ ID NO: 6785; WAN024CIT_at; Start 620; Stop 644
cagtggttgttggaggagctatcac

SEQ ID NO: 120320 - DNA, 25 bp, Artificial
  probe
  misc_feature (1)..(25): SEQ ID NO: 6785; WAN024CIT_at; Start 139; Stop 163
ggtattcgtgctaattctgtccgcg

SEQ ID NO: 120321 - DNA, 25 bp, Artificial
  probe
  misc_feature (1)..(25): SEQ ID NO: 6785; WAN024CIT_at; Start 411; Stop 435
ttttgaagaagggaaagtagctgct

SEQ ID NO: 120322 - DNA, 25 bp, Artificial
  probe
  misc_feature (1)..(25): SEQ ID NO: 6785; WAN024CIT_at; Start 544; Stop 568
gacgtaccagttattgctgaaggaa

SEQ ID NO: 120323 - DNA, 25 bp, Artificial
  probe
  misc_feature (1)..(25): SEQ ID NO: 6785; WAN024CIT_at; Start 287; Stop 311
gagtagacattttagctttggattg

SEQ ID NO: 120324 - DNA, 25 bp, Artificial
  probe
  misc_feature (1)..(25): SEQ ID NO: 6785; WAN024CIT_at; Start 527; Stop 551
gattggtaaaagagcttgacgtacc

SEQ ID NO: 120325 - DNA, 25 bp, Artificial
  probe
  misc_feature (1)..(25): SEQ ID NO: 6785; WAN024CIT_at; Start 307; Stop 331
gattgtactaatcgttcaagaccag

SEQ ID NO: 120326 - DNA, 25 bp, Artificial
  probe
  misc_feature (1)..(25): SEQ ID NO: 6785; WAN024CIT_at; Start 96; Stop 120
gatgccgttattagcaaaagccgcc

SEQ ID NO: 120327 - DNA, 25 bp, Artificial
  probe
  misc_feature (1)..(25): SEQ ID NO: 6785; WAN024CIT_at; Start 442; Stop 466
ggagtagattttgtgggtacgacat

SEQ ID NO: 120328 - DNA, 25 bp, Artificial
  probe
  misc_feature (1)..(25): SEQ ID NO: 6785; WAN024CIT_at; Start 207; Stop 231
tatcataaaaagagattacgatggc

SEQ ID NO: 120329 - DNA, 25 bp, Artificial
  probe
  misc_feature (1)..(25): SEQ ID NO: 1566; WAN024CIU_at; Start 423; Stop 447
taatttagatgaaggtctctatgca

SEQ ID NO: 120330 - DNA, 25 bp, Artificial
  probe
  misc_feature (1)..(25): SEQ ID NO: 1566; WAN024CIU_at; Start 188; Stop 212
caattcagaaagtagtagatttacc

SEQ ID NO: 120331 - DNA, 25 bp, Artificial
  probe
  misc_feature (1)..(25): SEQ ID NO: 1566; WAN024CIU_at; Start 61; Stop 85
tcttgtcaagctttacctggtgaag

SEQ ID NO: 120332 - DNA, 25 bp, Artificial
  probe
  misc_feature (1)..(25): SEQ ID NO: 1566; WAN024CIU_at; Start 316; Stop 340
gcatttgatgcaactttaagaccaa

SEQ ID NO: 120333 - DNA, 25 bp, Artificial
  probe
  misc_feature (1)..(25): SEQ ID NO: 1566; WAN024CIU_at; Start 647; Stop 671
gagcgattacacgtccaaaagaaat

SEQ ID NO: 120334 - DNA, 25 bp, Artificial
  probe
  misc_feature (1)..(25): SEQ ID NO: 1566; WAN024CIU_at; Start 482; Stop 506
tatcaggttacacaagtacaagtgt

SEQ ID NO: 120335 - DNA, 25 bp, Artificial
  probe
  misc_feature (1)..(25): SEQ ID NO: 1566; WAN024CIU_at; Start 555; Stop 579
taatattccggtaattgccgaagga

SEQ ID NO: 120336 - DNA, 25 bp, Artificial
  probe
  misc_feature (1)..(25): SEQ ID NO: 1566; WAN024CIU_at; Start 233; Stop 257
gggattatccacctcaagaaccata

SEQ ID NO: 120337 - DNA, 25 bp, Artificial
  probe
  misc_feature (1)..(25): SEQ ID NO: 1566; WAN024CIU_at; Start 26; Stop 50
aatttataagccaagttcaaggtgg

SEQ ID NO: 120338 - DNA, 25 bp, Artificial
  probe
  misc_feature (1)..(25): SEQ ID NO: 1566; WAN024CIU_at; Start 571; Stop 595
gccgaaggaaaaattcattatccag

SEQ ID NO: 120339 - DNA, 25 bp, Artificial
  probe
  misc_feature (1)..(25): SEQ ID NO: 1566; WAN024CIU_at; Start 221; Stop 245
gaattatcaaaagggattatccacc

SEQ ID NO: 120340 - DNA, 25 bp, Artificial
  probe
  misc_feature (1)..(25): SEQ ID NO: 1566; WAN024CIU_at; Start 126; Stop 150
taaagcagctttagaggcaggagca

SEQ ID NO: 120341 - DNA, 25 bp, Artificial
  probe
  misc_feature (1)..(25): SEQ ID NO: 1566; WAN024CIU_at; Start 516; Stop 540
tgagcctgattttgaactaatgaaa

SEQ ID NO: 120342 - DNA, 25 bp, Artificial
  probe
  misc_feature (1)..(25): SEQ ID NO: 1566; WAN024CIU_at; Start 265; Stop 289
gctacgatgaaagaagtagatgaac

SEQ ID NO: 120343 - DNA, 25 bp, Artificial
  probe
  misc_feature (1)..(25): SEQ ID NO: 1566; WAN024CIU_at; Start 454; Stop 478
tcaggcgttgattttgttggtacaa

SEQ ID NO: 120344 - DNA, 25 bp, Artificial
  probe
  misc_feature (1)..(25): SEQ ID NO: 1566; WAN024CIU_at; Start 250; Stop 274
gaaccatatattactgctacgatga

SEQ ID NO: 120345 - DNA, 25 bp, Artificial
  probe
  misc_feature (1)..(25): SEQ ID NO: 1566; WAN024CIU_at; Start 439; Stop 463
ctctatgcatttaaatcaggcgttg

SEQ ID NO: 120346 - DNA, 25 bp, Artificial
  probe
  misc_feature (1)..(25): SEQ ID NO: 1566; WAN024CIU_at; Start 620; Stop 644
taggtgttaccagtgtagtcattgg

SEQ ID NO: 120347 - DNA, 25 bp, Artificial
  probe
  misc_feature (1)..(25): SEQ ID NO: 1566; WAN024CIU_at; Start 391; Stop 415
tatccgaatcaattgctgatggcgg

SEQ ID NO: 120348 - DNA, 25 bp, Artificial
  probe
  misc_feature (1)..(25): SEQ ID NO: 1566; WAN024CIU_at; Start 405; Stop 429
gctgatggcggatgtaagtaattta

SEQ ID NO: 120349 - DNA, 25 bp, Artificial
  probe
  misc_feature (1)..(25): SEQ ID NO: 1566; WAN024CIU_at; Start 97; Stop 121
gaagaatttagcttgatgcctttta

SEQ ID NO: 120350 - DNA, 25 bp, Artificial
  probe
  misc_feature (1)..(25): SEQ ID NO: 1566; WAN024CIU_at; Start 497; Stop 521
gtacaagtgtacaatcagatgagcc

SEQ ID NO: 120351 - DNA, 25 bp, Artificial
  probe
  misc_feature (1)..(25): SEQ ID NO: 1566; WAN024CIU_at; Start 145; Stop 169
ggagcagtgggcattcgcgcaaatt

SEQ ID NO: 120352 - DNA, 25 bp, Artificial
  probe
  misc_feature (1)..(25): SEQ ID NO: 1566; WAN024CIU_at; Start 164; Stop 188
caaattctgtgcgtgatattaaagc

SEQ ID NO: 120353 - DNA, 25 bp, Artificial
  probe
  misc_feature (1)..(25): SEQ ID NO: 1566; WAN024CIU_at; Start 76; Stop 100
cctggtgaagccctttataatgaag

SEQ ID NO: 120354 - DNA, 25 bp, Artificial
  probe
  misc_feature (1)..(25): SEQ ID NO: 1566; WAN024CIU_at; Start 635; Stop 659
tagtcattggtggagcgattacacg

SEQ ID NO: 120355 - DNA, 25 bp, Artificial
  probe
  misc_feature (1)..(25): SEQ ID NO: 1566; WAN024CIU_at; Start 541; Stop 565
aaattggctgattttaatattccgg

SEQ ID NO: 120356 - DNA, 25 bp, Artificial
  probe
  misc_feature (1)..(25): SEQ ID NO: 1566; WAN024CIU_at; Start 608; Stop 632
aagcttatagtttaggtgttaccag

SEQ ID NO: 120357 - DNA, 25 bp, Artificial
  probe
  misc_feature (1)..(25): SEQ ID NO: 1566; WAN024CIU_at; Start 46; Stop 70
ggtggagtcattgtttcttgtcaag

SEQ ID NO: 120358 - DNA, 25 bp, Artificial
  probe
  misc_feature (1)..(25): SEQ ID NO: 1566; WAN024CIU_at; Start 299; Stop 323
gcggaacaacagtcattgcatttga

SEQ ID NO: 120359 - DNA, 25 bp, Artificial
  probe
  misc_feature (1)..(25): SEQ ID NO: 1566; WAN024CIU_at; Start 111; Stop 135
gatgccttttatggctaaagcagct

SEQ ID NO: 120360 - DNA, 25 bp, Artificial
  probe
  misc_feature (1)..(25): SEQ ID NO: 1566; WAN024CIU_at; Start 337; Stop 361
ccaagatatgatggcttagttgtca

SEQ ID NO: 120361 - DNA, 25 bp, Artificial
  probe
  misc_feature (1)..(25): SEQ ID NO: 1566; WAN024CIU_at; Start 468; Stop 492
tgttggtacaacattatcaggttac

SEQ ID NO: 120362 - DNA, 25 bp, Artificial
  probe
  misc_feature (1)..(25): SEQ ID NO: 1566; WAN024CIU_at; Start 281; Stop 305
tagatgaacttgtagaatgcggaac

SEQ ID NO: 120363 - DNA, 25 bp, Artificial
  probe
  misc_feature (1)..(25): SEQ ID NO: 5934; WAN024CIV_at; Start 69; Stop 93
tttgcacggatagacatcgatacgg

SEQ ID NO: 120364 - DNA, 25 bp, Artificial
  probe
  misc_feature (1)..(25): SEQ ID NO: 5934; WAN024CIV_at; Start 165; Stop 189
tatcaattgggacgtatgtctatca

SEQ ID NO: 120365 - DNA, 25 bp, Artificial
  probe
  misc_feature (1)..(25): SEQ ID NO: 5934; WAN024CIV_at; Start 499; Stop 523
tgggttcaggctttacaatcttgtc

SEQ ID NO: 120366 - DNA, 25 bp, Artificial
  probe
  misc_feature (1)..(25): SEQ ID NO: 5934; WAN024CIV_at; Start 737; Stop 761
tattgcataccagttaccagtaggt

SEQ ID NO: 120367 - DNA, 25 bp, Artificial
  probe
  misc_feature (1)..(25): SEQ ID NO: 5934; WAN024CIV_at; Start 1287; Stop 1311
gattcaagttgggaagttcgtcacc

SEQ ID NO: 120368 - DNA, 25 bp, Artificial
  probe
  misc_feature (1)..(25): SEQ ID NO: 5934; WAN024CIV_at; Start 890; Stop 914
tcgtcgtacgaaaattgcacaattc

SEQ ID NO: 120369 - DNA, 25 bp, Artificial
  probe
  misc_feature (1)..(25): SEQ ID NO: 5934; WAN024CIV_at; Start 85; Stop 109
tcgatacggcatatgattacttgga

SEQ ID NO: 120370 - DNA, 25 bp, Artificial
  probe
  misc_feature (1)..(25): SEQ ID NO: 5934; WAN024CIV_at; Start 534; Stop 558
tcatctcaagatttggttcaacgtt

SEQ ID NO: 120371 - DNA, 25 bp, Artificial
  probe
  misc_feature (1)..(25): SEQ ID NO: 5934; WAN024CIV_at; Start 1242; Stop 1266
gcacctaaatatacaacgattcatg

SEQ ID NO: 120372 - DNA, 25 bp, Artificial
  probe
  misc_feature (1)..(25): SEQ ID NO: 5934; WAN024CIV_at; Start 1006; Stop 1030
tcatgggacttgtacttggtctact

SEQ ID NO: 120373 - DNA, 25 bp, Artificial
  probe
  misc_feature (1)..(25): SEQ ID NO: 5934; WAN024CIV_at; Start 386; Stop 410
taaaggtggctttggtgcagtagca

SEQ ID NO: 120374 - DNA, 25 bp, Artificial
  probe
  misc_feature (1)..(25): SEQ ID NO: 5934; WAN024CIV_at; Start 824; Stop 848
gaactctgttgcaacttcatggaca

SEQ ID NO: 120375 - DNA, 25 bp, Artificial
  probe
  misc_feature (1)..(25): SEQ ID NO: 5934; WAN024CIV_at; Start 763; Stop 787
tcacaggtttgatcttggcagcgat

SEQ ID NO: 120376 - DNA, 25 bp, Artificial
  probe
  misc_feature (1)..(25): SEQ ID NO: 5934; WAN024CIV_at; Start 54; Stop 78
tttatcttacctatctttgcacgga

SEQ ID NO: 120377 - DNA, 25 bp, Artificial
  probe
  misc_feature (1)..(25): SEQ ID NO: 5934; WAN024CIV_at; Start 423; Stop 447
aacgggaaattccttgctgcaaatg

SEQ ID NO: 120378 - DNA, 25 bp, Artificial
  probe
  misc_feature (1)..(25): SEQ ID NO: 5934; WAN024CIV_at; Start 773; Stop 797
gatcttggcagcgatttatgcagca

SEQ ID NO: 120379 - DNA, 25 bp, Artificial
  probe
  misc_feature (1)..(25): SEQ ID NO: 5934; WAN024CIV_at; Start 990; Stop 1014
gaatggttcaatagtttcatgggac

SEQ ID NO: 120380 - DNA, 25 bp, Artificial
  probe
  misc_feature (1)..(25): SEQ ID NO: 5934; WAN024CIV_at; Start 694; Stop 718
gtgcagctagcaatatccctcaaga

SEQ ID NO: 120381 - DNA, 25 bp, Artificial
  probe
  misc_feature (1)..(25): SEQ ID NO: 5934; WAN024CIV_at; Start 1071; Stop 1095
aataaacaaggtgcttatgcagcgc

SEQ ID NO: 120382 - DNA, 25 bp, Artificial
  probe
  misc_feature (1)..(25): SEQ ID NO: 5934; WAN024CIV_at; Start 1144; Stop 1168
caacagctgttagctactgggcata

SEQ ID NO: 120383 - DNA, 25 bp, Artificial
  probe
  misc_feature (1)..(25): SEQ ID NO: 5934; WAN024CIV_at; Start 974; Stop 998
tattaaatctgcatacgaatggttc

SEQ ID NO: 120384 - DNA, 25 bp, Artificial
  probe
  misc_feature (1)..(25): SEQ ID NO: 5934; WAN024CIV_at; Start 406; Stop 430
tagcagaaacattagcaaacgggaa

SEQ ID NO: 120385 - DNA, 25 bp, Artificial
  probe
  misc_feature (1)..(25): SEQ ID NO: 5934; WAN024CIV_at; Start 1128; Stop 1152
aaatacttccttcctccaacagctg

SEQ ID NO: 120386 - DNA, 25 bp, Artificial
  probe
  misc_feature (1)..(25): SEQ ID NO: 5934; WAN024CIV_at; Start 1086; Stop 1110
tatgcagcgctgattgtatcaacca

SEQ ID NO: 120387 - DNA, 25 bp, Artificial
  probe
  misc_feature (1)..(25): SEQ ID NO: 5934; WAN024CIV_at; Start 216; Stop 240
tcagtattgacaggaattgacatca

SEQ ID NO: 120388 - DNA, 25 bp, Artificial
  probe
  misc_feature (1)..(25): SEQ ID NO: 5934; WAN024CIV_at; Start 907; Stop 931
cacaattcgtatctctagcagtagg

SEQ ID NO: 120389 - DNA, 25 bp, Artificial
  probe
  misc_feature (1)..(25): SEQ ID NO: 5934; WAN024CIV_at; Start 126; Stop 150
aaagcacttcgtattatttcagcac

SEQ ID NO: 120390 - DNA, 25 bp, Artificial
  probe
  misc_feature (1)..(25): SEQ ID NO: 5934; WAN024CIV_at; Start 310; Stop 334
tatggacagactttattcaaggtgt

SEQ ID NO: 120391 - DNA, 25 bp, Artificial
  probe
  misc_feature (1)..(25): SEQ ID NO: 5934; WAN024CIV_at; Start 30; Stop 54
gtagctattccactgacaattcgtt

SEQ ID NO: 120392 - DNA, 25 bp, Artificial
  probe
  misc_feature (1)..(25): SEQ ID NO: 5934; WAN024CIV_at; Start 202; Stop 226
catcagctggtttatcagtattgac

SEQ ID NO: 120393 - DNA, 25 bp, Artificial
  probe
  misc_feature (1)..(25): SEQ ID NO: 5934; WAN024CIV_at; Start 187; Stop 211
tcattatgtacctcccatcagctgg

SEQ ID NO: 120394 - DNA, 25 bp, Artificial
  probe
  misc_feature (1)..(25): SEQ ID NO: 5934; WAN024CIV_at; Start 282; Stop 306
tcttatactggtggtctaaaatccg

SEQ ID NO: 120395 - DNA, 25 bp, Artificial
  probe
  misc_feature (1)..(25): SEQ ID NO: 5934; WAN024CIV_at; Start 4; Stop 28
tatggtttgctcaattagggatggt

SEQ ID NO: 120396 - DNA, 25 bp, Artificial
  probe
  misc_feature (1)..(25): SEQ ID NO: 5934; WAN024CIV_at; Start 653; Stop 677
tacaggcttgtacgtattctatcaa

SEQ ID NO: 120397 - DNA, 25 bp, Artificial
  probe
  misc_feature (1)..(25): SEQ ID NO: 1095; WAN024CIW_at; Start 772; Stop 796
gctaaaaatgcaatggataataggt

SEQ ID NO: 120398 - DNA, 25 bp, Artificial
  probe
  misc_feature (1)..(25): SEQ ID NO: 1095; WAN024CIW_at; Start 452; Stop 476
ttaacggatttaactatactgctgg

SEQ ID NO: 120399 - DNA, 25 bp, Artificial
  probe
  misc_feature (1)..(25): SEQ ID NO: 1095; WAN024CIW_at; Start 101; Stop 125
ttattgactatgatttgggaacgaa

SEQ ID NO: 120400 - DNA, 25 bp, Artificial
  probe
  misc_feature (1)..(25): SEQ ID NO: 1095; WAN024CIW_at; Start 685; Stop 709
tatctacttaatccagaaattctca

SEQ ID NO: 120401 - DNA, 25 bp, Artificial
  probe
  misc_feature (1)..(25): SEQ ID NO: 1095; WAN024CIW_at; Start 844; Stop 868
cgtataggagctgtaaaaaatttct

SEQ ID NO: 120402 - DNA, 25 bp, Artificial
  probe
  misc_feature (1)..(25): SEQ ID NO: 1095; WAN024CIW_at; Start 415; Stop 439
ggtataggaggcagtattattgtca

SEQ ID NO: 120403 - DNA, 25 bp, Artificial
  probe
  misc_feature (1)..(25): SEQ ID NO: 1095; WAN024CIW_at; Start 19; Stop 43
gatattggcggaacaacaattaagg

SEQ ID NO: 120404 - DNA, 25 bp, Artificial
  probe
  misc_feature (1)..(25): SEQ ID NO: 1095; WAN024CIW_at; Start 241; Stop 265
tatgcaggctatacaataccagggt

SEQ ID NO: 120405 - DNA, 25 bp, Artificial
  probe
  misc_feature (1)..(25): SEQ ID NO: 1095; WAN024CIW_at; Start 254; Stop 278
caataccagggtatatcggagtaaa

SEQ ID NO: 120406 - DNA, 25 bp, Artificial
  probe
  misc_feature (1)..(25): SEQ ID NO: 1095; WAN024CIW_at; Start 830; Stop 854
gaaatgaagctggtcgtataggagc

SEQ ID NO: 120407 - DNA, 25 bp, Artificial
  probe
  misc_feature (1)..(25): SEQ ID NO: 1095; WAN024CIW_at; Start 392; Stop 416
tagtaatggttactattggaacagg

SEQ ID NO: 120408 - DNA, 25 bp, Artificial
  probe
  misc_feature (1)..(25): SEQ ID NO: 1095; WAN024CIW_at; Start 35; Stop 59
caattaaggcagatttatacgatga

SEQ ID NO: 120409 - DNA, 25 bp, Artificial
  probe
  misc_feature (1)..(25): SEQ ID NO: 1095; WAN024CIW_at; Start 339; Stop 363
ttgtgctgcattaggtgaattgtgg

SEQ ID NO: 120410 - DNA, 25 bp, Artificial
  probe
  misc_feature (1)..(25): SEQ ID NO: 1095; WAN024CIW_at; Start 520; Stop 544
aaagcctcaacaaccgcattgattc

SEQ ID NO: 120411 - DNA, 25 bp, Artificial
  probe
  misc_feature (1)..(25): SEQ ID NO: 1095; WAN024CIW_at; Start 179; Stop 203
caattgatggtgttgggatttccac

SEQ ID NO: 120412 - DNA, 25 bp, Artificial
  probe
  misc_feature (1)..(25): SEQ ID NO: 1095; WAN024CIW_at; Start 200; Stop 224
ccactgctggagttgttaatgctaa

SEQ ID NO: 120413 - DNA, 25 bp, Artificial
  probe
  misc_feature (1)..(25): SEQ ID NO: 1095; WAN024CIW_at; Start 749; Stop 773
tacctgaaattcaaagttctttagc

SEQ ID NO: 120414 - DNA, 25 bp, Artificial
  probe
  misc_feature (1)..(25): SEQ ID NO: 1095; WAN024CIW_at; Start 139; Stop 163
caggtctgtgatttaattggtgagt

SEQ ID NO: 120415 - DNA, 25 bp, Artificial
  probe
  misc_feature (1)..(25): SEQ ID NO: 1095; WAN024CIW_at; Start 461; Stop 485
ttaactatactgctggtgaagtagg

SEQ ID NO: 120416 - DNA, 25 bp, Artificial
  probe
  misc_feature (1)..(25): SEQ ID NO: 1095; WAN024CIW_at; Start 697; Stop 721
ccagaaattctcatattaggaggtg

SEQ ID NO: 120417 - DNA, 25 bp, Artificial
  probe
  misc_feature (1)..(25): SEQ ID NO: 1095; WAN024CIW_at; Start 738; Stop 762
ggatattttgttacctgaaattcaa

SEQ ID NO: 120418 - DNA, 25 bp, Artificial
  probe
  misc_feature (1)..(25): SEQ ID NO: 1095; WAN024CIW_at; Start 84; Stop 108
caaagagatagaaacaattattgac

SEQ ID NO: 120419 - DNA, 25 bp, Artificial
  probe
  misc_feature (1)..(25): SEQ ID NO: 1095; WAN024CIW_at; Start 493; Stop 517
cctgtaggtaattcggattggcaaa

SEQ ID NO: 120420 - DNA, 25 bp, Artificial
  probe
  misc_feature (1)..(25): SEQ ID NO: 1095; WAN024CIW_at; Start 764; Stop 788
gttctttagctaaaaatgcaatgga

SEQ ID NO: 120421 - DNA, 25 bp, Artificial
  probe
  misc_feature (1)..(25): SEQ ID NO: 1095; WAN024CIW_at; Start 186; Stop 210
tggtgttgggatttccactgctgga

SEQ ID NO: 120422 - DNA, 25 bp, Artificial
  probe
  misc_feature (1)..(25): SEQ ID NO: 1095; WAN024CIW_at; Start 571; Stop 595
actaatcaaactggacgtactttct

SEQ ID NO: 120423 - DNA, 25 bp, Artificial
  probe
  misc_feature (1)..(25): SEQ ID NO: 1095; WAN024CIW_at; Start 324; Stop 348
tgaaaatgatgttaattgtgctgca

SEQ ID NO: 120424 - DNA, 25 bp, Artificial
  probe
  misc_feature (1)..(25): SEQ ID NO: 1095; WAN024CIW_at; Start 815; Stop 839
tggcagctacattaggaaatgaagc

SEQ ID NO: 120425 - DNA, 25 bp, Artificial
  probe
  misc_feature (1)..(25): SEQ ID NO: 1095; WAN024CIW_at; Start 229; Stop 253
ggagaaatcatctatgcaggctata

SEQ ID NO: 120426 - DNA, 25 bp, Artificial
  probe
  misc_feature (1)..(25): SEQ ID NO: 1095; WAN024CIW_at; Start 530; Stop 554
caaccgcattgattcatttatatca

SEQ ID NO: 120427 - DNA, 25 bp, Artificial
  probe
  misc_feature (1)..(25): SEQ ID NO: 1095; WAN024CIW_at; Start 563; Stop 587
gcttgaaaactaatcaaactggacg

SEQ ID NO: 120428 - DNA, 25 bp, Artificial
  probe
  misc_feature (1)..(25): SEQ ID NO: 1095; WAN024CIW_at; Start 705; Stop 729
tctcatattaggaggtgggattctg

SEQ ID NO: 120429 - DNA, 25 bp, Artificial
  probe
  misc_feature (1)..(25): SEQ ID NO: 1095; WAN024CIW_at; Start 127; Stop 151
cagatattaaatcaggtctgtgatt

SEQ ID NO: 120430 - DNA, 25 bp, Artificial
  probe
  misc_feature (1)..(25): SEQ ID NO: 1095; WAN024CIW_at; Start 405; Stop 429
tattggaacaggtataggaggcagt

SEQ ID NO: 120431 - DNA, 25 bp, Artificial
  probe
  misc_feature (1)..(25): SEQ ID NO: 1438; WAN024CIX_at; Start 174; Stop 198
caatttagaaatgaaacaacagaac

SEQ ID NO: 120432 - DNA, 25 bp, Artificial
  probe
  misc_feature (1)..(25): SEQ ID NO: 1438; WAN024CIX_at; Start 23; Stop 47
caatgcaagatattgagaatgttgc

SEQ ID NO: 120433 - DNA, 25 bp, Artificial
  probe
  misc_feature (1)..(25): SEQ ID NO: 1438; WAN024CIX_at; Start 250; Stop 274
tatatttcatcaagtaggagaggag

SEQ ID NO: 120434 - DNA, 25 bp, Artificial
  probe
  misc_feature (1)..(25): SEQ ID NO: 1438; WAN024CIX_at; Start 33; Stop 57
tattgagaatgttgcaaccgatatt

SEQ ID NO: 120435 - DNA, 25 bp, Artificial
  probe
  misc_feature (1)..(25): SEQ ID NO: 1438; WAN024CIX_at; Start 6; Stop 30
taactctgtattttcgacaatgcaa

SEQ ID NO: 120436 - DNA, 25 bp, Artificial
  probe
  misc_feature (1)..(25): SEQ ID NO: 1438; WAN024CIX_at; Start 247; Stop 271
cagtatatttcatcaagtaggagag

SEQ ID NO: 120437 - DNA, 25 bp, Artificial
  probe
  misc_feature (1)..(25): SEQ ID NO: 1438; WAN024CIX_at; Start 28; Stop 52
caagatattgagaatgttgcaaccg

SEQ ID NO: 120438 - DNA, 25 bp, Artificial
  probe
  misc_feature (1)..(25): SEQ ID NO: 1438; WAN024CIX_at; Start 130; Stop 154
agttatgatgaaaaaagtcacgaag

SEQ ID NO: 120439 - DNA, 25 bp, Artificial
  probe
  misc_feature (1)..(25): SEQ ID NO: 1438; WAN024CIX_at; Start 292; Stop 316
attggtagggtggtagaaaaatatg

SEQ ID NO: 120440 - DNA, 25 bp, Artificial
  probe
  misc_feature (1)..(25): SEQ ID NO: 1438; WAN024CIX_at; Start 216; Stop 240
taaaacaatcaaggaaaatgatgca

SEQ ID NO: 120441 - DNA, 25 bp, Artificial
  probe
  misc_feature (1)..(25): SEQ ID NO: 1438; WAN024CIX_at; Start 260; Stop 284
caagtaggagaggagaatttgtaga

SEQ ID NO: 120442 - DNA, 25 bp, Artificial
  probe
  misc_feature (1)..(25): SEQ ID NO: 1438; WAN024CIX_at; Start 245; Stop 269
ttcagtatatttcatcaagtaggag

SEQ ID NO: 120443 - DNA, 25 bp, Artificial
  probe
  misc_feature (1)..(25): SEQ ID NO: 1438; WAN024CIX_at; Start 19; Stop 43
tcgacaatgcaagatattgagaatg

SEQ ID NO: 120444 - DNA, 25 bp, Artificial
  probe
  misc_feature (1)..(25): SEQ ID NO: 1438; WAN024CIX_at; Start 176; Stop 200
atttagaaatgaaacaacagaacct

SEQ ID NO: 120445 - DNA, 25 bp, Artificial
  probe
  misc_feature (1)..(25): SEQ ID NO: 1438; WAN024CIX_at; Start 264; Stop 288
taggagaggagaatttgtagaaaaa

SEQ ID NO: 120446 - DNA, 25 bp, Artificial
  probe
  misc_feature (1)..(25): SEQ ID NO: 1438; WAN024CIX_at; Start 135; Stop 159
tgatgaaaaaagtcacgaagaatta

SEQ ID NO: 120447 - DNA, 25 bp, Artificial
  probe
  misc_feature (1)..(25): SEQ ID NO: 1438; WAN024CIX_at; Start 127; Stop 151
aaaagttatgatgaaaaaagtcacg

SEQ ID NO: 120448 - DNA, 25 bp, Artificial
  probe
  misc_feature (1)..(25): SEQ ID NO: 1438; WAN024CIX_at; Start 10; Stop 34
tctgtattttcgacaatgcaagata

SEQ ID NO: 120449 - DNA, 25 bp, Artificial
  probe
  misc_feature (1)..(25): SEQ ID NO: 1438; WAN024CIX_at; Start 3; Stop 27
gactaactctgtattttcgacaatg

SEQ ID NO: 120450 - DNA, 25 bp, Artificial
  probe
  misc_feature (1)..(25): SEQ ID NO: 1438; WAN024CIX_at; Start 29; Stop 53
aagatattgagaatgttgcaaccga

SEQ ID NO: 120451 - DNA, 25 bp, Artificial
  probe
  misc_feature (1)..(25): SEQ ID NO: 1438; WAN024CIX_at; Start 252; Stop 276
tatttcatcaagtaggagaggagaa

SEQ ID NO: 120452 - DNA, 25 bp, Artificial
  probe
  misc_feature (1)..(25): SEQ ID NO: 1438; WAN024CIX_at; Start 42; Stop 66
tgttgcaaccgatattataaaatca

SEQ ID NO: 120453 - DNA, 25 bp, Artificial
  probe
  misc_feature (1)..(25): SEQ ID NO: 1438; WAN024CIX_at; Start 257; Stop 281
catcaagtaggagaggagaatttgt

SEQ ID NO: 120454 - DNA, 25 bp, Artificial
  probe
  misc_feature (1)..(25): SEQ ID NO: 1438; WAN024CIX_at; Start 162; Stop 186
ttcaatagaaagcaatttagaaatg

SEQ ID NO: 120455 - DNA, 25 bp, Artificial
  probe
  misc_feature (1)..(25): SEQ ID NO: 1438; WAN024CIX_at; Start 16; Stop 40
ttttcgacaatgcaagatattgaga

SEQ ID NO: 120456 - DNA, 25 bp, Artificial
  probe
  misc_feature (1)..(25): SEQ ID NO: 1438; WAN024CIX_at; Start 218; Stop 242
aaacaatcaaggaaaatgatgcaaa

SEQ ID NO: 120457 - DNA, 25 bp, Artificial
  probe
  misc_feature (1)..(25): SEQ ID NO: 1438; WAN024CIX_at; Start 8; Stop 32
actctgtattttcgacaatgcaaga

SEQ ID NO: 120458 - DNA, 25 bp, Artificial
  probe
  misc_feature (1)..(25): SEQ ID NO: 1438; WAN024CIX_at; Start 37; Stop 61
gagaatgttgcaaccgatattataa

SEQ ID NO: 120459 - DNA, 25 bp, Artificial
  probe
  misc_feature (1)..(25): SEQ ID NO: 1438; WAN024CIX_at; Start 62; Stop 86
aatcatatgataatgagatttatac

SEQ ID NO: 120460 - DNA, 25 bp, Artificial
  probe
  misc_feature (1)..(25): SEQ ID NO: 1438; WAN024CIX_at; Start 207; Stop 231
tgaggttaataaaacaatcaaggaa

SEQ ID NO: 120461 - DNA, 25 bp, Artificial
  probe
  misc_feature (1)..(25): SEQ ID NO: 1438; WAN024CIX_at; Start 46; Stop 70
gcaaccgatattataaaatcatatg

SEQ ID NO: 120462 - DNA, 25 bp, Artificial
  probe
  misc_feature (1)..(25): SEQ ID NO: 1438; WAN024CIX_at; Start 205; Stop 229
gatgaggttaataaaacaatcaagg

SEQ ID NO: 120463 - DNA, 25 bp, Artificial
  probe
  misc_feature (1)..(25): SEQ ID NO: 1438; WAN024CIX_at; Start 256; Stop 280
tcatcaagtaggagaggagaatttg

SEQ ID NO: 120464 - DNA, 25 bp, Artificial
  probe
  misc_feature (1)..(25): SEQ ID NO: 1438; WAN024CIX_at; Start 31; Stop 55
gatattgagaatgttgcaaccgata

SEQ ID NO: 120465 - DNA, 25 bp, Artificial
  probe
  misc_feature (1)..(25): SEQ ID NO: 2521; WAN024CIY_at; Start 1941; Stop 1965
tcaacctttgaaggcttctgagaaa

SEQ ID NO: 120466 - DNA, 25 bp, Artificial
  probe
  misc_feature (1)..(25): SEQ ID NO: 2521; WAN024CIY_at; Start 1427; Stop 1451
tgttagcttcaggactacaaaaagt

SEQ ID NO: 120467 - DNA, 25 bp, Artificial
  probe
  misc_feature (1)..(25): SEQ ID NO: 2521; WAN024CIY_at; Start 1701; Stop 1725
agttagtttcactcgattgatggca

SEQ ID NO: 120468 - DNA, 25 bp, Artificial
  probe
  misc_feature (1)..(25): SEQ ID NO: 2521; WAN024CIY_at; Start 72; Stop 96
tattcaagaactagagtcagtgcag

SEQ ID NO: 120469 - DNA, 25 bp, Artificial
  probe
  misc_feature (1)..(25): SEQ ID NO: 2521; WAN024CIY_at; Start 375; Stop 399
tgctgagggtgttcttaaaaaagtg

SEQ ID NO: 120470 - DNA, 25 bp, Artificial
  probe
  misc_feature (1)..(25): SEQ ID NO: 2521; WAN024CIY_at; Start 1718; Stop 1742
tgatggcattaggattatctggagc

SEQ ID NO: 120471 - DNA, 25 bp, Artificial
  probe
  misc_feature (1)..(25): SEQ ID NO: 2521; WAN024CIY_at; Start 1859; Stop 1883
tactatcaggatatgttcatggagc

SEQ ID NO: 120472 - DNA, 25 bp, Artificial
  probe
  misc_feature (1)..(25): SEQ ID NO: 2521; WAN024CIY_at; Start 1016; Stop 1040
cggataatcaagatgaaatacctat

SEQ ID NO: 120473 - DNA, 25 bp, Artificial
  probe
  misc_feature (1)..(25): SEQ ID NO: 2521; WAN024CIY_at; Start 1093; Stop 1117
tatgctctgcccaaatattatgaga

SEQ ID NO: 120474 - DNA, 25 bp, Artificial
  probe
  misc_feature (1)..(25): SEQ ID NO: 2521; WAN024CIY_at; Start 620; Stop 644
ctaatgatagagagtacggtgttgt

SEQ ID NO: 120475 - DNA, 25 bp, Artificial
  probe
  misc_feature (1)..(25): SEQ ID NO: 2521; WAN024CIY_at; Start 858; Stop 882
tatctatgctcgtcaaatctctaag

SEQ ID NO: 120476 - DNA, 25 bp, Artificial
  probe
  misc_feature (1)..(25): SEQ ID NO: 2521; WAN024CIY_at; Start 789; Stop 813
tatcgcatcgttgcaagattcaaag

SEQ ID NO: 120477 - DNA, 25 bp, Artificial
  probe
  misc_feature (1)..(25): SEQ ID NO: 2521; WAN024CIY_at; Start 722; Stop 746
taccgaagcagcgagtagtagattt

SEQ ID NO: 120478 - DNA, 25 bp, Artificial
  probe
  misc_feature (1)..(25): SEQ ID NO: 2521; WAN024CIY_at; Start 1079; Stop 1103
tattgacagaaatgtatgctctgcc

SEQ ID NO: 120479 - DNA, 25 bp, Artificial
  probe
  misc_feature (1)..(25): SEQ ID NO: 2521; WAN024CIY_at; Start 774; Stop 798
tgaaaaagagaatattatcgcatcg

SEQ ID NO: 120480 - DNA, 25 bp, Artificial
  probe
  misc_feature (1)..(25): SEQ ID NO: 2521; WAN024CIY_at; Start 268; Stop 292
gagaaattacaagaatacctaccga

SEQ ID NO: 120481 - DNA, 25 bp, Artificial
  probe
  misc_feature (1)..(25): SEQ ID NO: 2521; WAN024CIY_at; Start 896; Stop 920
gcactccgcatctagttgcattaga

SEQ ID NO: 120482 - DNA, 25 bp, Artificial
  probe
  misc_feature (1)..(25): SEQ ID NO: 2521; WAN024CIY_at; Start 1163; Stop 1187
gaatgatggttgctgatttaggcta

SEQ ID NO: 120483 - DNA, 25 bp, Artificial
  probe
  misc_feature (1)..(25): SEQ ID NO: 2521; WAN024CIY_at; Start 107; Stop 131
taaaggttcaggataactggtcaga

SEQ ID NO: 120484 - DNA, 25 bp, Artificial
  probe
  misc_feature (1)..(25): SEQ ID NO: 2521; WAN024CIY_at; Start 1108; Stop 1132
tattatgagaaagatcctacacctg

SEQ ID NO: 120485 - DNA, 25 bp, Artificial
  probe
  misc_feature (1)..(25): SEQ ID NO: 2521; WAN024CIY_at; Start 919; Stop 943
gaaggatggatagaagaaactcgta

SEQ ID NO: 120486 - DNA, 25 bp, Artificial
  probe
  misc_feature (1)..(25): SEQ ID NO: 2521; WAN024CIY_at; Start 1120; Stop 1144
gatcctacacctgtattagcaccat

SEQ ID NO: 120487 - DNA, 25 bp, Artificial
  probe
  misc_feature (1)..(25): SEQ ID NO: 2521; WAN024CIY_at; Start 360; Stop 384
tggtaaagctaatgttgctgagggt

SEQ ID NO: 120488 - DNA, 25 bp, Artificial
  probe
  misc_feature (1)..(25): SEQ ID NO: 2521; WAN024CIY_at; Start 1326; Stop 1350
tggatatgagttgccatttcatctg

SEQ ID NO: 120489 - DNA, 25 bp, Artificial
  probe
  misc_feature (1)..(25): SEQ ID NO: 2521; WAN024CIY_at; Start 1918; Stop 1942
tatgagggtggaggaaaaccatttc

SEQ ID NO: 120490 - DNA, 25 bp, Artificial
  probe
  misc_feature (1)..(25): SEQ ID NO: 2521; WAN024CIY_at; Start 709; Stop 733
tctagaaaggaattaccgaagcagc

SEQ ID NO: 120491 - DNA, 25 bp, Artificial
  probe
  misc_feature (1)..(25): SEQ ID NO: 2521; WAN024CIY_at; Start 89; Stop 113
cagtgcagttccgtgatttaaaggt

SEQ ID NO: 120492 - DNA, 25 bp, Artificial
  probe
  misc_feature (1)..(25): SEQ ID NO: 2521; WAN024CIY_at; Start 1303; Stop 1327
ggtggaatctatggctcattttttg

SEQ ID NO: 120493 - DNA, 25 bp, Artificial
  probe
  misc_feature (1)..(25): SEQ ID NO: 2521; WAN024CIY_at; Start 1792; Stop 1816
ttggctaaactgacaattggattag

SEQ ID NO: 120494 - DNA, 25 bp, Artificial
  probe
  misc_feature (1)..(25): SEQ ID NO: 2521; WAN024CIY_at; Start 535; Stop 559
aaagtcggaacaattccaaggactg

SEQ ID NO: 120495 - DNA, 25 bp, Artificial
  probe
  misc_feature (1)..(25): SEQ ID NO: 2521; WAN024CIY_at; Start 694; Stop 718
gaaccatttgattattctagaaagg

SEQ ID NO: 120496 - DNA, 25 bp, Artificial
  probe
  misc_feature (1)..(25): SEQ ID NO: 2521; WAN024CIY_at; Start 1475; Stop 1499
catataattcaggatttgcgtggtg

SEQ ID NO: 120497 - DNA, 25 bp, Artificial
  probe
  misc_feature (1)..(25): SEQ ID NO: 2521; WAN024CIY_at; Start 1733; Stop 1757
tatctggagcaagtatagcatcagc

SEQ ID NO: 120498 - DNA, 25 bp, Artificial
  probe
  misc_feature (1)..(25): SEQ ID NO: 2521; WAN024CIY_at; Start 1493; Stop 1517
cgtggtgtgttattctgcttggctt

SEQ ID NO: 120499 - DNA, 25 bp, Artificial
  probe
  misc_feature (1)..(25): SEQ ID NO: 1561; WAN024CIZ_at; Start 300; Stop 324
taaagaaatggagttcatctatcga

SEQ ID NO: 120500 - DNA, 25 bp, Artificial
  probe
  misc_feature (1)..(25): SEQ ID NO: 1561; WAN024CIZ_at; Start 453; Stop 477
tatctcaaatgaatcaggcttactt

SEQ ID NO: 120501 - DNA, 25 bp, Artificial
  probe
  misc_feature (1)..(25): SEQ ID NO: 1561; WAN024CIZ_at; Start 217; Stop 241
caatcaacgttagtatcaaaacaga

SEQ ID NO: 120502 - DNA, 25 bp, Artificial
  probe
  misc_feature (1)..(25): SEQ ID NO: 1561; WAN024CIZ_at; Start 93; Stop 117
tgatgaatttgaaatgcaaaagtcg

SEQ ID NO: 120503 - DNA, 25 bp, Artificial
  probe
  misc_feature (1)..(25): SEQ ID NO: 1561; WAN024CIZ_at; Start 68; Stop 92
tattggattccaaaaagaagattga

SEQ ID NO: 120504 - DNA, 25 bp, Artificial
  probe
  misc_feature (1)..(25): SEQ ID NO: 1561; WAN024CIZ_at; Start 463; Stop 487
gaatcaggcttacttatttcaatag

SEQ ID NO: 120505 - DNA, 25 bp, Artificial
  probe
  misc_feature (1)..(25): SEQ ID NO: 1561; WAN024CIZ_at; Start 467; Stop 491
caggcttacttatttcaataggtaa

SEQ ID NO: 120506 - DNA, 25 bp, Artificial
  probe
  misc_feature (1)..(25): SEQ ID NO: 1561; WAN024CIZ_at; Start 536; Stop 560
ctaaggaagaaagttcaagtatcgc

SEQ ID NO: 120507 - DNA, 25 bp, Artificial
  probe
  misc_feature (1)..(25): SEQ ID NO: 1561; WAN024CIZ_at; Start 406; Stop 430
gagaaattgaaattctcttttccaa

SEQ ID NO: 120508 - DNA, 25 bp, Artificial
  probe
  misc_feature (1)..(25): SEQ ID NO: 1561; WAN024CIZ_at; Start 210; Stop 234
ggaacgccaatcaacgttagtatca

SEQ ID NO: 120509 - DNA, 25 bp, Artificial
  probe
  misc_feature (1)..(25): SEQ ID NO: 1561; WAN024CIZ_at; Start 281; Stop 305
tggaatcttggagtgcagataaaga

SEQ ID NO: 120510 - DNA, 25 bp, Artificial
  probe
  misc_feature (1)..(25): SEQ ID NO: 1561; WAN024CIZ_at; Start 129; Stop 153
gaaaaaagaagctgaacatgaacga

SEQ ID NO: 120511 - DNA, 25 bp, Artificial
  probe
  misc_feature (1)..(25): SEQ ID NO: 1561; WAN024CIZ_at; Start 76; Stop 100
tccaaaaagaagattgatgatgaat

SEQ ID NO: 120512 - DNA, 25 bp, Artificial
  probe
  misc_feature (1)..(25): SEQ ID NO: 1561; WAN024CIZ_at; Start 172; Stop 196
cagaaatatcaaataatttttcaac

SEQ ID NO: 120513 - DNA, 25 bp, Artificial
  probe
  misc_feature (1)..(25): SEQ ID NO: 1561; WAN024CIZ_at; Start 541; Stop 565
gaagaaagttcaagtatcgcaaatc

SEQ ID NO: 120514 - DNA, 25 bp, Artificial
  probe
  misc_feature (1)..(25): SEQ ID NO: 1561; WAN024CIZ_at; Start 221; Stop 245
caacgttagtatcaaaacagaaaat

SEQ ID NO: 120515 - DNA, 25 bp, Artificial
  probe
  misc_feature (1)..(25): SEQ ID NO: 1561; WAN024CIZ_at; Start 559; Stop 583
gcaaatcaaatttttatcaatctaa

SEQ ID NO: 120516 - DNA, 25 bp, Artificial
  probe
  misc_feature (1)..(25): SEQ ID NO: 1561; WAN024CIZ_at; Start 330; Stop 354
ggaacgatattcacaacaagaggtc

SEQ ID NO: 120517 - DNA, 25 bp, Artificial
  probe
  misc_feature (1)..(25): SEQ ID NO: 1561; WAN024CIZ_at; Start 384; Stop 408
taaattcaatttggaacaattagag

SEQ ID NO: 120518 - DNA, 25 bp, Artificial
  probe
  misc_feature (1)..(25): SEQ ID NO: 1561; WAN024CIZ_at; Start 291; Stop 315
gagtgcagataaagaaatggagttc

SEQ ID NO: 120519 - DNA, 25 bp, Artificial
  probe
  misc_feature (1)..(25): SEQ ID NO: 1561; WAN024CIZ_at; Start 521; Stop 545
taattggatcgatttctaaggaaga

SEQ ID NO: 120520 - DNA, 25 bp, Artificial
  probe
  misc_feature (1)..(25): SEQ ID NO: 1561; WAN024CIZ_at; Start 141; Stop 165
tgaacatgaacgaaagttaaaagaa

SEQ ID NO: 120521 - DNA, 25 bp, Artificial
  probe
  misc_feature (1)..(25): SEQ ID NO: 1561; WAN024CIZ_at; Start 275; Stop 299
tagaaatggaatcttggagtgcaga

SEQ ID NO: 120522 - DNA, 25 bp, Artificial
  probe
  misc_feature (1)..(25): SEQ ID NO: 1561; WAN024CIZ_at; Start 544; Stop 568
gaaagttcaagtatcgcaaatcaaa

SEQ ID NO: 120523 - DNA, 25 bp, Artificial
  probe
  misc_feature (1)..(25): SEQ ID NO: 1561; WAN024CIZ_at; Start 373; Stop 397
cggactttagctaaattcaatttgg

SEQ ID NO: 120524 - DNA, 25 bp, Artificial
  probe
  misc_feature (1)..(25): SEQ ID NO: 1561; WAN024CIZ_at; Start 309; Stop 333
ggagttcatctatcgaattctggaa

SEQ ID NO: 120525 - DNA, 25 bp, Artificial
  probe
  misc_feature (1)..(25): SEQ ID NO: 1561; WAN024CIZ_at; Start 338; Stop 362
attcacaacaagaggtcatagtaac

SEQ ID NO: 120526 - DNA, 25 bp, Artificial
  probe
  misc_feature (1)..(25): SEQ ID NO: 1561; WAN024CIZ_at; Start 136; Stop 160
gaagctgaacatgaacgaaagttaa

SEQ ID NO: 120527 - DNA, 25 bp, Artificial
  probe
  misc_feature (1)..(25): SEQ ID NO: 1561; WAN024CIZ_at; Start 205; Stop 229
aataaggaacgccaatcaacgttag

SEQ ID NO: 120528 - DNA, 25 bp, Artificial
  probe
  misc_feature (1)..(25): SEQ ID NO: 1561; WAN024CIZ_at; Start 548; Stop 572
gttcaagtatcgcaaatcaaatttt

SEQ ID NO: 120529 - DNA, 25 bp, Artificial
  probe
  misc_feature (1)..(25): SEQ ID NO: 1561; WAN024CIZ_at; Start 327; Stop 351
tctggaacgatattcacaacaagag

SEQ ID NO: 120530 - DNA, 25 bp, Artificial
  probe
  misc_feature (1)..(25): SEQ ID NO: 1561; WAN024CIZ_at; Start 2; Stop 26
tgagcaatttagaaaacttacgaga

SEQ ID NO: 120531 - DNA, 25 bp, Artificial
  probe
  misc_feature (1)..(25): SEQ ID NO: 1561; WAN024CIZ_at; Start 334; Stop 358
cgatattcacaacaagaggtcatag

SEQ ID NO: 120532 - DNA, 25 bp, Artificial
  probe
  misc_feature (1)..(25): SEQ ID NO: 1561; WAN024CIZ_at; Start 322; Stop 346
cgaattctggaacgatattcacaac

SEQ ID NO: 120533 - DNA, 25 bp, Artificial
  probe
  misc_feature (1)..(25): SEQ ID NO: 2328; WAN024CJ2_at; Start 253; Stop 277
gtgactttatttgctttacgatatg

SEQ ID NO: 120534 - DNA, 25 bp, Artificial
  probe
  misc_feature (1)..(25): SEQ ID NO: 2328; WAN024CJ2_at; Start 783; Stop 807
ggacgcaacaatttcatcttctgag

SEQ ID NO: 120535 - DNA, 25 bp, Artificial
  probe
  misc_feature (1)..(25): SEQ ID NO: 2328; WAN024CJ2_at; Start 298; Stop 322
ttattaaaatctaaggcggcaatta

SEQ ID NO: 120536 - DNA, 25 bp, Artificial
  probe
  misc_feature (1)..(25): SEQ ID NO: 2328; WAN024CJ2_at; Start 871; Stop 895
gggccgttagttcttgctagatatt

SEQ ID NO: 120537 - DNA, 25 bp, Artificial
  probe
  misc_feature (1)..(25): SEQ ID NO: 2328; WAN024CJ2_at; Start 132; Stop 156
aactccctatcatttatcgattgac

SEQ ID NO: 120538 - DNA, 25 bp, Artificial
  probe
  misc_feature (1)..(25): SEQ ID NO: 2328; WAN024CJ2_at; Start 382; Stop 406
catttagtttcttccttacattcag

SEQ ID NO: 120539 - DNA, 25 bp, Artificial
  probe
  misc_feature (1)..(25): SEQ ID NO: 2328; WAN024CJ2_at; Start 610; Stop 634
ggtttatctcaaaataagagtcatg

SEQ ID NO: 120540 - DNA, 25 bp, Artificial
  probe
  misc_feature (1)..(25): SEQ ID NO: 2328; WAN024CJ2_at; Start 105; Stop 129
ggagacattggcatttatcttagaa

SEQ ID NO: 120541 - DNA, 25 bp, Artificial
  probe
  misc_feature (1)..(25): SEQ ID NO: 2328; WAN024CJ2_at; Start 187; Stop 211
tcgctaatgacaaaattagtcaatg

SEQ ID NO: 120542 - DNA, 25 bp, Artificial
  probe
  misc_feature (1)..(25): SEQ ID NO: 2328; WAN024CJ2_at; Start 660; Stop 684
tgaaggaagtatttctgctaaagaa

SEQ ID NO: 120543 - DNA, 25 bp, Artificial
  probe
  misc_feature (1)..(25): SEQ ID NO: 2328; WAN024CJ2_at; Start 938; Stop 962
tatcagctcttcaaaatacaattcc

SEQ ID NO: 120544 - DNA, 25 bp, Artificial
  probe
  misc_feature (1)..(25): SEQ ID NO: 2328; WAN024CJ2_at; Start 404; Stop 428
cagatacacttcctgattttatggt

SEQ ID NO: 120545 - DNA, 25 bp, Artificial
  probe
  misc_feature (1)..(25): SEQ ID NO: 2328; WAN024CJ2_at; Start 349; Stop 373
ccaatagggatttttgatatagaaa

SEQ ID NO: 120546 - DNA, 25 bp, Artificial
  probe
  misc_feature (1)..(25): SEQ ID NO: 2328; WAN024CJ2_at; Start 929; Stop 953
gaatgatcatatcagctcttcaaaa

SEQ ID NO: 120547 - DNA, 25 bp, Artificial
  probe
  misc_feature (1)..(25): SEQ ID NO: 2328; WAN024CJ2_at; Start 517; Stop 541
catctgaaacttttatctaatgagt

SEQ ID NO: 120548 - DNA, 25 bp, Artificial
  probe
  misc_feature (1)..(25): SEQ ID NO: 2328; WAN024CJ2_at; Start 706; Stop 730
caagaaatatttgtgtggttcaata

SEQ ID NO: 120549 - DNA, 25 bp, Artificial
  probe
  misc_feature (1)..(25): SEQ ID NO: 2328; WAN024CJ2_at; Start 202; Stop 226
ttagtcaatgattatagatgggcct

SEQ ID NO: 120550 - DNA, 25 bp, Artificial
  probe
  misc_feature (1)..(25): SEQ ID NO: 2328; WAN024CJ2_at; Start 223; Stop 247
gcctatgctgaaagtccgtctgata

SEQ ID NO: 120551 - DNA, 25 bp, Artificial
  probe
  misc_feature (1)..(25): SEQ ID NO: 2328; WAN024CJ2_at; Start 892; Stop 916
tatttattgggatgtgagtttgaag

SEQ ID NO: 120552 - DNA, 25 bp, Artificial
  probe
  misc_feature (1)..(25): SEQ ID NO: 2328; WAN024CJ2_at; Start 308; Stop 332
ctaaggcggcaattaagaaagattt

SEQ ID NO: 120553 - DNA, 25 bp, Artificial
  probe
  misc_feature (1)..(25): SEQ ID NO: 2328; WAN024CJ2_at; Start 216; Stop 240
tagatgggcctatgctgaaagtccg

SEQ ID NO: 120554 - DNA, 25 bp, Artificial
  probe
  misc_feature (1)..(25): SEQ ID NO: 2328; WAN024CJ2_at; Start 769; Stop 793
gaattgaagatgcaggacgcaacaa

SEQ ID NO: 120555 - DNA, 25 bp, Artificial
  probe
  misc_feature (1)..(25): SEQ ID NO: 2328; WAN024CJ2_at; Start 471; Stop 495
taatattcgtgtacttgatgtcgga

SEQ ID NO: 120556 - DNA, 25 bp, Artificial
  probe
  misc_feature (1)..(25): SEQ ID NO: 2328; WAN024CJ2_at; Start 739; Stop 763
ccaagcttagattcaatcttttcaa

SEQ ID NO: 120557 - DNA, 25 bp, Artificial
  probe
  misc_feature (1)..(25): SEQ ID NO: 2328; WAN024CJ2_at; Start 168; Stop 192
tcctagtcagacagagatttcgcta

SEQ ID NO: 120558 - DNA, 25 bp, Artificial
  probe
  misc_feature (1)..(25): SEQ ID NO: 2328; WAN024CJ2_at; Start 644; Stop 668
tacaattactttcagatgaaggaag

SEQ ID NO: 120559 - DNA, 25 bp, Artificial
  probe
  misc_feature (1)..(25): SEQ ID NO: 2328; WAN024CJ2_at; Start 721; Stop 745
tggttcaataaaataaatccaagct

SEQ ID NO: 120560 - DNA, 25 bp, Artificial
  probe
  misc_feature (1)..(25): SEQ ID NO: 2328; WAN024CJ2_at; Start 493; Stop 517
ggagctgatctagcatattttaaac

SEQ ID NO: 120561 - DNA, 25 bp, Artificial
  probe
  misc_feature (1)..(25): SEQ ID NO: 2328; WAN024CJ2_at; Start 86; Stop 110
ttatacaatccaaagatacggagac

SEQ ID NO: 120562 - DNA, 25 bp, Artificial
  probe
  misc_feature (1)..(25): SEQ ID NO: 2328; WAN024CJ2_at; Start 833; Stop 857
tgtataaaactttagatcaaggaag

SEQ ID NO: 120563 - DNA, 25 bp, Artificial
  probe
  misc_feature (1)..(25): SEQ ID NO: 2328; WAN024CJ2_at; Start 175; Stop 199
cagacagagatttcgctaatgacaa

SEQ ID NO: 120564 - DNA, 25 bp, Artificial
  probe
  misc_feature (1)..(25): SEQ ID NO: 2328; WAN024CJ2_at; Start 482; Stop 506
tacttgatgtcggagctgatctagc

SEQ ID NO: 120565 - DNA, 25 bp, Artificial
  probe
  misc_feature (1)..(25): SEQ ID NO: 2328; WAN024CJ2_at; Start 96; Stop 120
caaagatacggagacattggcattt

SEQ ID NO: 120566 - DNA, 25 bp, Artificial
  probe
  misc_feature (1)..(25): SEQ ID NO: 2328; WAN024CJ2_at; Start 440; Stop 464
aatcaatttggaatgagtatgaaac

SEQ ID NO: 120567 - DNA, 25 bp, Artificial
  probe
  misc_feature (1)..(25): SEQ ID NO: 2216; WAN024CJ3_at; Start 144; Stop 168
tggtgtcatttatatcactgaagac

SEQ ID NO: 120568 - DNA, 25 bp, Artificial
  probe
  misc_feature (1)..(25): SEQ ID NO: 2216; WAN024CJ3_at; Start 149; Stop 173
tcatttatatcactgaagacattgc

SEQ ID NO: 120569 - DNA, 25 bp, Artificial
  probe
  misc_feature (1)..(25): SEQ ID NO: 2216; WAN024CJ3_at; Start 179; Stop 203
tgatattagatacaattcgccatta

SEQ ID NO: 120570 - DNA, 25 bp, Artificial
  probe
  misc_feature (1)..(25): SEQ ID NO: 2216; WAN024CJ3_at; Start 156; Stop 180
tatcactgaagacattgcttcaatg

SEQ ID NO: 120571 - DNA, 25 bp, Artificial
  probe
  misc_feature (1)..(25): SEQ ID NO: 2216; WAN024CJ3_at; Start 175; Stop 199
tcaatgatattagatacaattcgcc

SEQ ID NO: 120572 - DNA, 25 bp, Artificial
  probe
  misc_feature (1)..(25): SEQ ID NO: 2216; WAN024CJ3_at; Start 3; Stop 27
ggaagctaataagtataaaattggc

SEQ ID NO: 120573 - DNA, 25 bp, Artificial
  probe
  misc_feature (1)..(25): SEQ ID NO: 2216; WAN024CJ3_at; Start 276; Stop 300
tatagaggataatgtagagaaagca

SEQ ID NO: 120574 - DNA, 25 bp, Artificial
  probe
  misc_feature (1)..(25): SEQ ID NO: 2216; WAN024CJ3_at; Start 133; Stop 157
caatctgattatggtgtcatttata

SEQ ID NO: 120575 - DNA, 25 bp, Artificial
  probe
  misc_feature (1)..(25): SEQ ID NO: 2216; WAN024CJ3_at; Start 285; Stop 309
taatgtagagaaagcagtaggacac

SEQ ID NO: 120576 - DNA, 25 bp, Artificial
  probe
  misc_feature (1)..(25): SEQ ID NO: 2216; WAN024CJ3_at; Start 292; Stop 316
gagaaagcagtaggacacaatattt

SEQ ID NO: 120577 - DNA, 25 bp, Artificial
  probe
  misc_feature (1)..(25): SEQ ID NO: 2216; WAN024CJ3_at; Start 16; Stop 40
tataaaattggcataattggtagcc

SEQ ID NO: 120578 - DNA, 25 bp, Artificial
  probe
  misc_feature (1)..(25): SEQ ID NO: 2216; WAN024CJ3_at; Start 159; Stop 183
cactgaagacattgcttcaatgata

SEQ ID NO: 120579 - DNA, 25 bp, Artificial
  probe
  misc_feature (1)..(25): SEQ ID NO: 2216; WAN024CJ3_at; Start 118; Stop 142
ctaagaaaattagctcaatctgatt

SEQ ID NO: 120580 - DNA, 25 bp, Artificial
  probe
  misc_feature (1)..(25): SEQ ID NO: 2216; WAN024CJ3_at; Start 278; Stop 302
tagaggataatgtagagaaagcagt

SEQ ID NO: 120581 - DNA, 25 bp, Artificial
  probe
  misc_feature (1)..(25): SEQ ID NO: 2216; WAN024CJ3_at; Start 216; Stop 240
tgtgcctgctattattttattaccg

SEQ ID NO: 120582 - DNA, 25 bp, Artificial
  probe
  misc_feature (1)..(25): SEQ ID NO: 2216; WAN024CJ3_at; Start 163; Stop 187
gaagacattgcttcaatgatattag

SEQ ID NO: 120583 - DNA, 25 bp, Artificial
  probe
  misc_feature (1)..(25): SEQ ID NO: 2216; WAN024CJ3_at; Start 152; Stop 176
tttatatcactgaagacattgcttc

SEQ ID NO: 120584 - DNA, 25 bp, Artificial
  probe
  misc_feature (1)..(25): SEQ ID NO: 2216; WAN024CJ3_at; Start 211; Stop 235
caagttgtgcctgctattattttat

SEQ ID NO: 120585 - DNA, 25 bp, Artificial
  probe
  misc_feature (1)..(25): SEQ ID NO: 2216; WAN024CJ3_at; Start 283; Stop 307
gataatgtagagaaagcagtaggac

SEQ ID NO: 120586 - DNA, 25 bp, Artificial
  probe
  misc_feature (1)..(25): SEQ ID NO: 2216; WAN024CJ3_at; Start 184; Stop 208
ttagatacaattcgccattatgatt

SEQ ID NO: 120587 - DNA, 25 bp, Artificial
  probe
  misc_feature (1)..(25): SEQ ID NO: 2216; WAN024CJ3_at; Start 168; Stop 192
cattgcttcaatgatattagataca

SEQ ID NO: 120588 - DNA, 25 bp, Artificial
  probe
  misc_feature (1)..(25): SEQ ID NO: 2216; WAN024CJ3_at; Start 262; Stop 286
ttaggattaaaacgtatagaggata

SEQ ID NO: 120589 - DNA, 25 bp, Artificial
  probe
  misc_feature (1)..(25): SEQ ID NO: 2216; WAN024CJ3_at; Start 290; Stop 314
tagagaaagcagtaggacacaatat

SEQ ID NO: 120590 - DNA, 25 bp, Artificial
  probe
  misc_feature (1)..(25): SEQ ID NO: 2216; WAN024CJ3_at; Start 182; Stop 206
tattagatacaattcgccattatga

SEQ ID NO: 120591 - DNA, 25 bp, Artificial
  probe
  misc_feature (1)..(25): SEQ ID NO: 2216; WAN024CJ3_at; Start 223; Stop 247
gctattattttattaccgactcata

SEQ ID NO: 120592 - DNA, 25 bp, Artificial
  probe
  misc_feature (1)..(25): SEQ ID NO: 2216; WAN024CJ3_at; Start 219; Stop 243
gcctgctattattttattaccgact

SEQ ID NO: 120593 - DNA, 25 bp, Artificial
  probe
  misc_feature (1)..(25): SEQ ID NO: 2216; WAN024CJ3_at; Start 121; Stop 145
agaaaattagctcaatctgattatg

SEQ ID NO: 120594 - DNA, 25 bp, Artificial
  probe
  misc_feature (1)..(25): SEQ ID NO: 2216; WAN024CJ3_at; Start 298; Stop 322
gcagtaggacacaatattttactaa

SEQ ID NO: 120595 - DNA, 25 bp, Artificial
  probe
  misc_feature (1)..(25): SEQ ID NO: 2216; WAN024CJ3_at; Start 229; Stop 253
attttattaccgactcataaacaag

SEQ ID NO: 120596 - DNA, 25 bp, Artificial
  probe
  misc_feature (1)..(25): SEQ ID NO: 2216; WAN024CJ3_at; Start 288; Stop 312
tgtagagaaagcagtaggacacaat

SEQ ID NO: 120597 - DNA, 25 bp, Artificial
  probe
  misc_feature (1)..(25): SEQ ID NO: 2216; WAN024CJ3_at; Start 269; Stop 293
taaaacgtatagaggataatgtaga

SEQ ID NO: 120598 - DNA, 25 bp, Artificial
  probe
  misc_feature (1)..(25): SEQ ID NO: 2216; WAN024CJ3_at; Start 303; Stop 327
aggacacaatattttactaactaat

SEQ ID NO: 120599 - DNA, 25 bp, Artificial
  probe
  misc_feature (1)..(25): SEQ ID NO: 2216; WAN024CJ3_at; Start 58; Stop 82
tttagcatgattgggtttgatatat

SEQ ID NO: 120600 - DNA, 25 bp, Artificial
  probe
  misc_feature (1)..(25): SEQ ID NO: 2216; WAN024CJ3_at; Start 294; Stop 318
gaaagcagtaggacacaatatttta

SEQ ID NO: 120601 - DNA, 25 bp, Artificial
  probe
  misc_feature (1)..(25): SEQ ID NO: 2634; WAN024CJ4_at; Start 337; Stop 361
caaaatgagaacagtgaatacagct

SEQ ID NO: 120602 - DNA, 25 bp, Artificial
  probe
  misc_feature (1)..(25): SEQ ID NO: 2634; WAN024CJ4_at; Start 139; Stop 163
gagaataatcaacttcggaaagaag

SEQ ID NO: 120603 - DNA, 25 bp, Artificial
  probe
  misc_feature (1)..(25): SEQ ID NO: 2634; WAN024CJ4_at; Start 215; Stop 239
taaagaattctcaaatggtggagga

SEQ ID NO: 120604 - DNA, 25 bp, Artificial
  probe
  misc_feature (1)..(25): SEQ ID NO: 2634; WAN024CJ4_at; Start 448; Stop 472
aaaacgtgtcagttaatggctgatg

SEQ ID NO: 120605 - DNA, 25 bp, Artificial
  probe
  misc_feature (1)..(25): SEQ ID NO: 2634; WAN024CJ4_at; Start 511; Stop 535
tactcgattattccaaacttgtcgg

SEQ ID NO: 120606 - DNA, 25 bp, Artificial
  probe
  misc_feature (1)..(25): SEQ ID NO: 2634; WAN024CJ4_at; Start 11; Stop 35
tgaatgtaaaaccaactcgtatgga

SEQ ID NO: 120607 - DNA, 25 bp, Artificial
  probe
  misc_feature (1)..(25): SEQ ID NO: 2634; WAN024CJ4_at; Start 275; Stop 299
ttgttgagaaagaaaatatcatgag

SEQ ID NO: 120608 - DNA, 25 bp, Artificial
  probe
  misc_feature (1)..(25): SEQ ID NO: 2634; WAN024CJ4_at; Start 45; Stop 69
cttaaaggaacgtttgacaacagct

SEQ ID NO: 120609 - DNA, 25 bp, Artificial
  probe
  misc_feature (1)..(25): SEQ ID NO: 2634; WAN024CJ4_at; Start 117; Stop 141
gcgatttatttctttgattcgtgag

SEQ ID NO: 120610 - DNA, 25 bp, Artificial
  probe
  misc_feature (1)..(25): SEQ ID NO: 2634; WAN024CJ4_at; Start 557; Stop 581
tgaaactagaggaggcagaaagagc

SEQ ID NO: 120611 - DNA, 25 bp, Artificial
  probe
  misc_feature (1)..(25): SEQ ID NO: 2634; WAN024CJ4_at; Start 418; Stop 442
tataaattactaagactggcagaag

SEQ ID NO: 120612 - DNA, 25 bp, Artificial
  probe
  misc_feature (1)..(25): SEQ ID NO: 2634; WAN024CJ4_at; Start 238; Stop 262
gaattattttcaattccatcgaaag

SEQ ID NO: 120613 - DNA, 25 bp, Artificial
  probe
  misc_feature (1)..(25): SEQ ID NO: 2634; WAN024CJ4_at; Start 464; Stop 488
tggctgatgaaatagaaaaaacacg

SEQ ID NO: 120614 - DNA, 25 bp, Artificial
  probe
  misc_feature (1)..(25): SEQ ID NO: 2634; WAN024CJ4_at; Start 287; Stop 311
aaaatatcatgagtgtaacagttcc

SEQ ID NO: 120615 - DNA, 25 bp, Artificial
  probe
  misc_feature (1)..(25): SEQ ID NO: 2634; WAN024CJ4_at; Start 153; Stop 177
tcggaaagaagtggaaagttatcta

SEQ ID NO: 120616 - DNA, 25 bp, Artificial
  probe
  misc_feature (1)..(25): SEQ ID NO: 2634; WAN024CJ4_at; Start 60; Stop 84
gacaacagctgaacgtggacataag

SEQ ID NO: 120617 - DNA, 25 bp, Artificial
  probe
  misc_feature (1)..(25): SEQ ID NO: 2634; WAN024CJ4_at; Start 524; Stop 548
caaacttgtcggaaactattcatta

SEQ ID NO: 120618 - DNA, 25 bp, Artificial
  probe
  misc_feature (1)..(25): SEQ ID NO: 2634; WAN024CJ4_at; Start 132; Stop 156
gattcgtgagaataatcaacttcgg

SEQ ID NO: 120619 - DNA, 25 bp, Artificial
  probe
  misc_feature (1)..(25): SEQ ID NO: 2634; WAN024CJ4_at; Start 73; Stop 97
cgtggacataagttattaaaggata

SEQ ID NO: 120620 - DNA, 25 bp, Artificial
  probe
  misc_feature (1)..(25): SEQ ID NO: 2634; WAN024CJ4_at; Start 96; Stop 120
taaaagagatgaattgatgaggcga

SEQ ID NO: 120621 - DNA, 25 bp, Artificial
  probe
  misc_feature (1)..(25): SEQ ID NO: 2634; WAN024CJ4_at; Start 181; Stop 205
gataatctaaaatcctttgcagttg

SEQ ID NO: 120622 - DNA, 25 bp, Artificial
  probe
  misc_feature (1)..(25): SEQ ID NO: 2634; WAN024CJ4_at; Start 224; Stop 248
ctcaaatggtggaggaattattttc

SEQ ID NO: 120623 - DNA, 25 bp, Artificial
  probe
  misc_feature (1)..(25): SEQ ID NO: 2634; WAN024CJ4_at; Start 493; Stop 517
cgtgtaaatggtttagaatactcga

SEQ ID NO: 120624 - DNA, 25 bp, Artificial
  probe
  misc_feature (1)..(25): SEQ ID NO: 2634; WAN024CJ4_at; Start 367; Stop 391
tcttctaatagtgaaatggatgatg

SEQ ID NO: 120625 - DNA, 25 bp, Artificial
  probe
  misc_feature (1)..(25): SEQ ID NO: 2634; WAN024CJ4_at; Start 549; Stop 573
tatagaattgaaactagaggaggca

SEQ ID NO: 120626 - DNA, 25 bp, Artificial
  probe
  misc_feature (1)..(25): SEQ ID NO: 2634; WAN024CJ4_at; Start 571; Stop 595
gcagaaagagccaatttagttcgta

SEQ ID NO: 120627 - DNA, 25 bp, Artificial
  probe
  misc_feature (1)..(25): SEQ ID NO: 2634; WAN024CJ4_at; Start 433; Stop 457
ctggcagaagttgaaaaaacgtgtc

SEQ ID NO: 120628 - DNA, 25 bp, Artificial
  probe
  misc_feature (1)..(25): SEQ ID NO: 2634; WAN024CJ4_at; Start 314; Stop 338
gaatgcatatgaatattacttctca

SEQ ID NO: 120629 - DNA, 25 bp, Artificial
  probe
  misc_feature (1)..(25): SEQ ID NO: 2634; WAN024CJ4_at; Start 485; Stop 509
cacgtagacgtgtaaatggtttaga

SEQ ID NO: 120630 - DNA, 25 bp, Artificial
  probe
  misc_feature (1)..(25): SEQ ID NO: 2634; WAN024CJ4_at; Start 383; Stop 407
tggatgatgtatttgctacaatgaa

SEQ ID NO: 120631 - DNA, 25 bp, Artificial
  probe
  misc_feature (1)..(25): SEQ ID NO: 2634; WAN024CJ4_at; Start 22; Stop 46
ccaactcgtatggaattgaataact

SEQ ID NO: 120632 - DNA, 25 bp, Artificial
  probe
  misc_feature (1)..(25): SEQ ID NO: 2634; WAN024CJ4_at; Start 300; Stop 324
tgtaacagttcctagaatgcatatg

SEQ ID NO: 120633 - DNA, 25 bp, Artificial
  probe
  misc_feature (1)..(25): SEQ ID NO: 2634; WAN024CJ4_at; Start 196; Stop 220
tttgcagttgctaaatcattaaaga

SEQ ID NO: 120634 - DNA, 25 bp, Artificial
  probe
  misc_feature (1)..(25): SEQ ID NO: 2634; WAN024CJ4_at; Start 586; Stop 610
ttagttcgtattatgaaagtgaagc

SEQ ID NO: 120635 - DNA, 25 bp, Artificial
  probe
  misc_feature (1)..(25): SEQ ID NO: 1287; WAN024CJ5_at; Start 567; Stop 591
tactgtatcaggagattttggatgc

SEQ ID NO: 120636 - DNA, 25 bp, Artificial
  probe
  misc_feature (1)..(25): SEQ ID NO: 1287; WAN024CJ5_at; Start 724; Stop 748
tatccagtatattatcccgattcga

SEQ ID NO: 120637 - DNA, 25 bp, Artificial
  probe
  misc_feature (1)..(25): SEQ ID NO: 1287; WAN024CJ5_at; Start 754; Stop 778
gactactcactaaaacatattcaaa

SEQ ID NO: 120638 - DNA, 25 bp, Artificial
  probe
  misc_feature (1)..(25): SEQ ID NO: 1287; WAN024CJ5_at; Start 979; Stop 1003
gaacttgacgattttgaactaacta

SEQ ID NO: 120639 - DNA, 25 bp, Artificial
  probe
  misc_feature (1)..(25): SEQ ID NO: 1287; WAN024CJ5_at; Start 593; Stop 617
tatctaacacacgaaaggctcaggg

SEQ ID NO: 120640 - DNA, 25 bp, Artificial
  probe
  misc_feature (1)..(25): SEQ ID NO: 1287; WAN024CJ5_at; Start 126; Stop 150
catagattggactcaaaaaacaggg

SEQ ID NO: 120641 - DNA, 25 bp, Artificial
  probe
  misc_feature (1)..(25): SEQ ID NO: 1287; WAN024CJ5_at; Start 298; Stop 322
aaacataatttagctacttctggaa

SEQ ID NO: 120642 - DNA, 25 bp, Artificial
  probe
  misc_feature (1)..(25): SEQ ID NO: 1287; WAN024CJ5_at; Start 50; Stop 74
gagacacaaattctgattgtaacaa

SEQ ID NO: 120643 - DNA, 25 bp, Artificial
  probe
  misc_feature (1)..(25): SEQ ID NO: 1287; WAN024CJ5_at; Start 782; Stop 806
taatggaatcattatctgatgacga

SEQ ID NO: 120644 - DNA, 25 bp, Artificial
  probe
  misc_feature (1)..(25): SEQ ID NO: 1287; WAN024CJ5_at; Start 406; Stop 430
gaagcacaaaatcttattatcgaac

SEQ ID NO: 120645 - DNA, 25 bp, Artificial
  probe
  misc_feature (1)..(25): SEQ ID NO: 1287; WAN024CJ5_at; Start 425; Stop 449
tcgaacatagtgactatatcaaagc

SEQ ID NO: 120646 - DNA, 25 bp, Artificial
  probe
  misc_feature (1)..(25): SEQ ID NO: 1287; WAN024CJ5_at; Start 582; Stop 606
ttttggatgcttatctaacacacga

SEQ ID NO: 120647 - DNA, 25 bp, Artificial
  probe
  misc_feature (1)..(25): SEQ ID NO: 1287; WAN024CJ5_at; Start 190; Stop 214
caaattgaccctgaatctacacaca

SEQ ID NO: 120648 - DNA, 25 bp, Artificial
  probe
  misc_feature (1)..(25): SEQ ID NO: 1287; WAN024CJ5_at; Start 503; Stop 527
tctcttttaaagcaacttttggtga

SEQ ID NO: 120649 - DNA, 25 bp, Artificial
  probe
  misc_feature (1)..(25): SEQ ID NO: 1287; WAN024CJ5_at; Start 738; Stop 762
tcccgattcgatacctgactactca

SEQ ID NO: 120650 - DNA, 25 bp, Artificial
  probe
  misc_feature (1)..(25): SEQ ID NO: 1287; WAN024CJ5_at; Start 79; Stop 103
tacctaaacgaattagaatgtggcc

SEQ ID NO: 120651 - DNA, 25 bp, Artificial
  probe
  misc_feature (1)..(25): SEQ ID NO: 1287; WAN024CJ5_at; Start 607; Stop 631
aaggctcagggaagacatttggaac

SEQ ID NO: 120652 - DNA, 25 bp, Artificial
  probe
  misc_feature (1)..(25): SEQ ID NO: 1287; WAN024CJ5_at; Start 856; Stop 880
gcaaatcattttttatctaaggaag

SEQ ID NO: 120653 - DNA, 25 bp, Artificial
  probe
  misc_feature (1)..(25): SEQ ID NO: 1287; WAN024CJ5_at; Start 622; Stop 646
catttggaacaagaaggtaatatta

SEQ ID NO: 120654 - DNA, 25 bp, Artificial
  probe
  misc_feature (1)..(25): SEQ ID NO: 1287; WAN024CJ5_at; Start 520; Stop 544
tttggtgatataaaatggagtctct

SEQ ID NO: 120655 - DNA, 25 bp, Artificial
  probe
  misc_feature (1)..(25): SEQ ID NO: 1287; WAN024CJ5_at; Start 839; Stop 863
gcttctcaattttgaatgcaaatca

SEQ ID NO: 120656 - DNA, 25 bp, Artificial
  probe
  misc_feature (1)..(25): SEQ ID NO: 1287; WAN024CJ5_at; Start 367; Stop 391
gacaatttagatattccgttcgaat

SEQ ID NO: 120657 - DNA, 25 bp, Artificial
  probe
  misc_feature (1)..(25): SEQ ID NO: 1287; WAN024CJ5_at; Start 913; Stop 937
tccactgctgaagaaataaacaatt

SEQ ID NO: 120658 - DNA, 25 bp, Artificial
  probe
  misc_feature (1)..(25): SEQ ID NO: 1287; WAN024CJ5_at; Start 898; Stop 922
gttaatttacctcgttccactgctg

SEQ ID NO: 120659 - DNA, 25 bp, Artificial
  probe
  misc_feature (1)..(25): SEQ ID NO: 1287; WAN024CJ5_at; Start 451; Stop 475
tactatgataaagacataactatgg

SEQ ID NO: 120660 - DNA, 25 bp, Artificial
  probe
  misc_feature (1)..(25): SEQ ID NO: 1287; WAN024CJ5_at; Start 230; Stop 254
taggatacttcactaaaaataagac

SEQ ID NO: 120661 - DNA, 25 bp, Artificial
  probe
  misc_feature (1)..(25): SEQ ID NO: 1287; WAN024CJ5_at; Start 252; Stop 276
gactttatcatatcttacagtagta

SEQ ID NO: 120662 - DNA, 25 bp, Artificial
  probe
  misc_feature (1)..(25): SEQ ID NO: 1287; WAN024CJ5_at; Start 817; Stop 841
gcttttgatgaagcattatttcgct

SEQ ID NO: 120663 - DNA, 25 bp, Artificial
  probe
  misc_feature (1)..(25): SEQ ID NO: 1287; WAN024CJ5_at; Start 700; Stop 724
gaaaacaatttttcagccactgatt

SEQ ID NO: 120664 - DNA, 25 bp, Artificial
  probe
  misc_feature (1)..(25): SEQ ID NO: 1287; WAN024CJ5_at; Start 796; Stop 820
tctgatgacgattatgattttgctt

SEQ ID NO: 120665 - DNA, 25 bp, Artificial
  probe
  misc_feature (1)..(25): SEQ ID NO: 1287; WAN024CJ5_at; Start 535; Stop 559
tggagtctcttaaataaacaagctc

SEQ ID NO: 120666 - DNA, 25 bp, Artificial
  probe
  misc_feature (1)..(25): SEQ ID NO: 1287; WAN024CJ5_at; Start 553; Stop 577
caagctcataggaatactgtatcag

SEQ ID NO: 120667 - DNA, 25 bp, Artificial
  probe
  misc_feature (1)..(25): SEQ ID NO: 1287; WAN024CJ5_at; Start 108; Stop 132
tcctgggcaactcatactcatagat

SEQ ID NO: 120668 - DNA, 25 bp, Artificial
  probe
  misc_feature (1)..(25): SEQ ID NO: 1287; WAN024CJ5_at; Start 94; Stop 118
gaatgtggccttactcctgggcaac

SEQ ID NO: 120669 - DNA, 25 bp, Artificial
  probe
  misc_feature (1)..(25): SEQ ID NO: 2698; WAN024CJ6_at; Start 335; Stop 359
gctgggctgctggagctttcgctac

SEQ ID NO: 120670 - DNA, 25 bp, Artificial
  probe
  misc_feature (1)..(25): SEQ ID NO: 2698; WAN024CJ6_at; Start 497; Stop 521
tagaagtgccgtttgtgaaccttgt

SEQ ID NO: 120671 - DNA, 25 bp, Artificial
  probe
  misc_feature (1)..(25): SEQ ID NO: 2698; WAN024CJ6_at; Start 106; Stop 130
tcagaagatattgtaaatgctggtc

SEQ ID NO: 120672 - DNA, 25 bp, Artificial
  probe
  misc_feature (1)..(25): SEQ ID NO: 2698; WAN024CJ6_at; Start 510; Stop 534
tgtgaaccttgtttacaccatagat

SEQ ID NO: 120673 - DNA, 25 bp, Artificial
  probe
  misc_feature (1)..(25): SEQ ID NO: 2698; WAN024CJ6_at; Start 438; Stop 462
gattggctgggctgtaaaaactgct

SEQ ID NO: 120674 - DNA, 25 bp, Artificial
  probe
  misc_feature (1)..(25): SEQ ID NO: 2698; WAN024CJ6_at; Start 472; Stop 496
tattggacagttgctgtagctacag

SEQ ID NO: 120675 - DNA, 25 bp, Artificial
  probe
  misc_feature (1)..(25): SEQ ID NO: 2698; WAN024CJ6_at; Start 371; Stop 395
gatggcatttgaaacaatttgcggt

SEQ ID NO: 120676 - DNA, 25 bp, Artificial
  probe
  misc_feature (1)..(25): SEQ ID NO: 2698; WAN024CJ6_at; Start 179; Stop 203
taaaaggcactcctgaagagttagc

SEQ ID NO: 120677 - DNA, 25 bp, Artificial
  probe
  misc_feature (1)..(25): SEQ ID NO: 2698; WAN024CJ6_at; Start 35; Stop 59
taactacagtagataaagcaaatga

SEQ ID NO: 120678 - DNA, 25 bp, Artificial
  probe
  misc_feature (1)..(25): SEQ ID NO: 2698; WAN024CJ6_at; Start 455; Stop 479
aaactgctgtagaaaattattggac

SEQ ID NO: 120679 - DNA, 25 bp, Artificial
  probe
  misc_feature (1)..(25): SEQ ID NO: 2698; WAN024CJ6_at; Start 210; Stop 234
tattggtatttctgtacaagaagca

SEQ ID NO: 120680 - DNA, 25 bp, Artificial
  probe
  misc_feature (1)..(25): SEQ ID NO: 2698; WAN024CJ6_at; Start 415; Stop 439
tttgttgctgtaataagtggtgcga

SEQ ID NO: 120681 - DNA, 25 bp, Artificial
  probe
  misc_feature (1)..(25): SEQ ID NO: 2698; WAN024CJ6_at; Start 169; Stop 193
aatataaatttaaaaggcactcctg

SEQ ID NO: 120682 - DNA, 25 bp, Artificial
  probe
  misc_feature (1)..(25): SEQ ID NO: 2698; WAN024CJ6_at; Start 119; Stop 143
taaatgctggtcaaattttggaaga

SEQ ID NO: 120683 - DNA, 25 bp, Artificial
  probe
  misc_feature (1)..(25): SEQ ID NO: 2698; WAN024CJ6_at; Start 246; Stop 270
tggagctgtaaaagagttacccaac

SEQ ID NO: 120684 - DNA, 25 bp, Artificial
  probe
  misc_feature (1)..(25): SEQ ID NO: 2698; WAN024CJ6_at; Start 362; Stop 386
gatatgctggatggcatttgaaaca

SEQ ID NO: 120685 - DNA, 25 bp, Artificial
  probe
  misc_feature (1)..(25): SEQ ID NO: 2698; WAN024CJ6_at; Start 14; Stop 38
ctgtatttgcagatagtgccctaac

SEQ ID NO: 120686 - DNA, 25 bp, Artificial
  probe
  misc_feature (1)..(25): SEQ ID NO: 2698; WAN024CJ6_at; Start 492; Stop 516
tacagtagaagtgccgtttgtgaac

SEQ ID NO: 120687 - DNA, 25 bp, Artificial
  probe
  misc_feature (1)..(25): SEQ ID NO: 2698; WAN024CJ6_at; Start 22; Stop 46
gcagatagtgccctaactacagtag

SEQ ID NO: 120688 - DNA, 25 bp, Artificial
  probe
  misc_feature (1)..(25): SEQ ID NO: 2698; WAN024CJ6_at; Start 353; Stop 377
tcgctactggatatgctggatggca

SEQ ID NO: 120689 - DNA, 25 bp, Artificial
  probe
  misc_feature (1)..(25): SEQ ID NO: 2698; WAN024CJ6_at; Start 190; Stop 214
cctgaagagttagcaaaaaatattg

SEQ ID NO: 120690 - DNA, 25 bp, Artificial
  probe
  misc_feature (1)..(25): SEQ ID NO: 2698; WAN024CJ6_at; Start 483; Stop 507
tgctgtagctacagtagaagtgccg

SEQ ID NO: 120691 - DNA, 25 bp, Artificial
  probe
  misc_feature (1)..(25): SEQ ID NO: 2698; WAN024CJ6_at; Start 340; Stop 364
gctgctggagctttcgctactggat

SEQ ID NO: 120692 - DNA, 25 bp, Artificial
  probe
  misc_feature (1)..(25): SEQ ID NO: 2698; WAN024CJ6_at; Start 301; Stop 325
ttcaatcttggtcctcaagtgaggg

SEQ ID NO: 120693 - DNA, 25 bp, Artificial
  probe
  misc_feature (1)..(25): SEQ ID NO: 2698; WAN024CJ6_at; Start 91; Stop 115
tataatgtttcggtttcagaagata

SEQ ID NO: 120694 - DNA, 25 bp, Artificial
  probe
  misc_feature (1)..(25): SEQ ID NO: 2698; WAN024CJ6_at; Start 443; Stop 467
gctgggctgtaaaaactgctgtaga

SEQ ID NO: 120695 - DNA, 25 bp, Artificial
  probe
  misc_feature (1)..(25): SEQ ID NO: 2698; WAN024CJ6_at; Start 385; Stop 409
caatttgcggttaatcctgttacat

SEQ ID NO: 120696 - DNA, 25 bp, Artificial
  probe
  misc_feature (1)..(25): SEQ ID NO: 2698; WAN024CJ6_at; Start 286; Stop 310
cctgtaggttttcgtttcaatcttg

SEQ ID NO: 120697 - DNA, 25 bp, Artificial
  probe
  misc_feature (1)..(25): SEQ ID NO: 2698; WAN024CJ6_at; Start 220; Stop 244
tctgtacaagaagcaagtttgatgt

SEQ ID NO: 120698 - DNA, 25 bp, Artificial
  probe
  misc_feature (1)..(25): SEQ ID NO: 2698; WAN024CJ6_at; Start 517; Stop 541
cttgtttacaccatagatttacctc

SEQ ID NO: 120699 - DNA, 25 bp, Artificial
  probe
  misc_feature (1)..(25): SEQ ID NO: 2698; WAN024CJ6_at; Start 400; Stop 424
cctgttacatctggatttgttgctg

SEQ ID NO: 120700 - DNA, 25 bp, Artificial
  probe
  misc_feature (1)..(25): SEQ ID NO: 2698; WAN024CJ6_at; Start 1; Stop 25
atggttagtggttctgtatttgcag

SEQ ID NO: 120701 - DNA, 25 bp, Artificial
  probe
  misc_feature (1)..(25): SEQ ID NO: 2698; WAN024CJ6_at; Start 232; Stop 256
gcaagtttgatgtatggagctgtaa

SEQ ID NO: 120702 - DNA, 25 bp, Artificial
  probe
  misc_feature (1)..(25): SEQ ID NO: 2698; WAN024CJ6_at; Start 422; Stop 446
ctgtaataagtggtgcgattggctg

SEQ ID NO: 120703 - DNA, 25 bp, Artificial
  probe
  misc_feature (1)..(25): SEQ ID NO: 4064; WAN024CJ7_at; Start 3; Stop 27
gcataatatctatttttacaaggat

SEQ ID NO: 120704 - DNA, 25 bp, Artificial
  probe
  misc_feature (1)..(25): SEQ ID NO: 4064; WAN024CJ7_at; Start 218; Stop 242
gaattttatttgttgcttggatgga

SEQ ID NO: 120705 - DNA, 25 bp, Artificial
  probe
  misc_feature (1)..(25): SEQ ID NO: 4064; WAN024CJ7_at; Start 19; Stop 43
tacaaggataaaaacggcaatgagc

SEQ ID NO: 120706 - DNA, 25 bp, Artificial
  probe
  misc_feature (1)..(25): SEQ ID NO: 4064; WAN024CJ7_at; Start 224; Stop 248
tatttgttgcttggatggatggtag

SEQ ID NO: 120707 - DNA, 25 bp, Artificial
  probe
  misc_feature (1)..(25): SEQ ID NO: 4064; WAN024CJ7_at; Start 303; Stop 327
gattgagcaagctaaacgtgaactt

SEQ ID NO: 120708 - DNA, 25 bp, Artificial
  probe
  misc_feature (1)..(25): SEQ ID NO: 4064; WAN024CJ7_at; Start 52; Stop 76
gattatatgcgagagcttaccagta

SEQ ID NO: 120709 - DNA, 25 bp, Artificial
  probe
  misc_feature (1)..(25): SEQ ID NO: 4064; WAN024CJ7_at; Start 139; Stop 163
caacatggaacacgcgcaggcgaac

SEQ ID NO: 120710 - DNA, 25 bp, Artificial
  probe
  misc_feature (1)..(25): SEQ ID NO: 4064; WAN024CJ7_at; Start 293; Stop 317
ccaaaagagagattgagcaagctaa

SEQ ID NO: 120711 - DNA, 25 bp, Artificial
  probe
  misc_feature (1)..(25): SEQ ID NO: 4064; WAN024CJ7_at; Start 270; Stop 294
tatgaaaaggacacagaaaacaccc

SEQ ID NO: 120712 - DNA, 25 bp, Artificial
  probe
  misc_feature (1)..(25): SEQ ID NO: 4064; WAN024CJ7_at; Start 149; Stop 173
cacgcgcaggcgaaccatatattaa

SEQ ID NO: 120713 - DNA, 25 bp, Artificial
  probe
  misc_feature (1)..(25): SEQ ID NO: 4064; WAN024CJ7_at; Start 239; Stop 263
tggatggtagttttgttttactgca

SEQ ID NO: 120714 - DNA, 25 bp, Artificial
  probe
  misc_feature (1)..(25): SEQ ID NO: 4064; WAN024CJ7_at; Start 201; Stop 225
gagaccacttagagatagaatttta

SEQ ID NO: 120715 - DNA, 25 bp, Artificial
  probe
  misc_feature (1)..(25): SEQ ID NO: 4064; WAN024CJ7_at; Start 279; Stop 303
gacacagaaaacacccaaaagagag

SEQ ID NO: 120716 - DNA, 25 bp, Artificial
  probe
  misc_feature (1)..(25): SEQ ID NO: 4064; WAN024CJ7_at; Start 33; Stop 57
cggcaatgagcctgtttttgattat

SEQ ID NO: 120717 - DNA, 25 bp, Artificial
  probe
  misc_feature (1)..(25): SEQ ID NO: 4064; WAN024CJ7_at; Start 72; Stop 96
cagtaaaaaagggaaagatagcaga

SEQ ID NO: 120718 - DNA, 25 bp, Artificial
  probe
  misc_feature (1)..(25): SEQ ID NO: 4064; WAN024CJ7_at; Start 154; Stop 178
gcaggcgaaccatatattaagcatt

SEQ ID NO: 120719 - DNA, 25 bp, Artificial
  probe
  misc_feature (1)..(25): SEQ ID NO: 4064; WAN024CJ7_at; Start 43; Stop 67
cctgtttttgattatatgcgagagc

SEQ ID NO: 120720 - DNA, 25 bp, Artificial
  probe
  misc_feature (1)..(25): SEQ ID NO: 4064; WAN024CJ7_at; Start 115; Stop 139
aatgattatattgagttgttaagcc

SEQ ID NO: 120721 - DNA, 25 bp, Artificial
  probe
  misc_feature (1)..(25): SEQ ID NO: 4064; WAN024CJ7_at; Start 175; Stop 199
catttagatgctgaaatttgggagc

SEQ ID NO: 120722 - DNA, 25 bp, Artificial
  probe
  misc_feature (1)..(25): SEQ ID NO: 4064; WAN024CJ7_at; Start 195; Stop 219
ggagctgagaccacttagagataga

SEQ ID NO: 120723 - DNA, 25 bp, Artificial
  probe
  misc_feature (1)..(25): SEQ ID NO: 4064; WAN024CJ7_at; Start 310; Stop 334
caagctaaacgtgaacttgcagatt

SEQ ID NO: 120724 - DNA, 25 bp, Artificial
  probe
  misc_feature (1)..(25): SEQ ID NO: 4064; WAN024CJ7_at; Start 290; Stop 314
cacccaaaagagagattgagcaagc

SEQ ID NO: 120725 - DNA, 25 bp, Artificial
  probe
  misc_feature (1)..(25): SEQ ID NO: 4064; WAN024CJ7_at; Start 319; Stop 343
cgtgaacttgcagatttaaaagaaa

SEQ ID NO: 120726 - DNA, 25 bp, Artificial
  probe
  misc_feature (1)..(25): SEQ ID NO: 4064; WAN024CJ7_at; Start 189; Stop 213
aatttgggagctgagaccacttaga

SEQ ID NO: 120727 - DNA, 25 bp, Artificial
  probe
  misc_feature (1)..(25): SEQ ID NO: 4064; WAN024CJ7_at; Start 83; Stop 107
ggaaagatagcagaattaagcttaa

SEQ ID NO: 120728 - DNA, 25 bp, Artificial
  probe
  misc_feature (1)..(25): SEQ ID NO: 4064; WAN024CJ7_at; Start 24; Stop 48
ggataaaaacggcaatgagcctgtt

SEQ ID NO: 120729 - DNA, 25 bp, Artificial
  probe
  misc_feature (1)..(25): SEQ ID NO: 4064; WAN024CJ7_at; Start 335; Stop 359
taaaagaaagaggtttagacaatga

SEQ ID NO: 120730 - DNA, 25 bp, Artificial
  probe
  misc_feature (1)..(25): SEQ ID NO: 4064; WAN024CJ7_at; Start 325; Stop 349
cttgcagatttaaaagaaagaggtt

SEQ ID NO: 120731 - DNA, 25 bp, Artificial
  probe
  misc_feature (1)..(25): SEQ ID NO: 4064; WAN024CJ7_at; Start 257; Stop 281
tactgcatcattttatgaaaaggac

SEQ ID NO: 120732 - DNA, 25 bp, Artificial
  probe
  misc_feature (1)..(25): SEQ ID NO: 4064; WAN024CJ7_at; Start 158; Stop 182
gcgaaccatatattaagcatttaga

SEQ ID NO: 120733 - DNA, 25 bp, Artificial
  probe
  misc_feature (1)..(25): SEQ ID NO: 4064; WAN024CJ7_at; Start 184; Stop 208
gctgaaatttgggagctgagaccac

SEQ ID NO: 120734 - DNA, 25 bp, Artificial
  probe
  misc_feature (1)..(25): SEQ ID NO: 4064; WAN024CJ7_at; Start 59; Stop 83
tgcgagagcttaccagtaaaaaagg

SEQ ID NO: 120735 - DNA, 25 bp, Artificial
  probe
  misc_feature (1)..(25): SEQ ID NO: 4064; WAN024CJ7_at; Start 130; Stop 154
ttgttaagccaacatggaacacgcg

SEQ ID NO: 120736 - DNA, 25 bp, Artificial
  probe
  misc_feature (1)..(25): SEQ ID NO: 4064; WAN024CJ7_at; Start 133; Stop 157
ttaagccaacatggaacacgcgcag

SEQ ID NO: 120737 - DNA, 25 bp, Artificial
  probe
  misc_feature (1)..(25): SEQ ID NO: 1317; WAN024CJ8_at; Start 266; Stop 290
tcggagcttgtcagcggatattatt

SEQ ID NO: 120738 - DNA, 25 bp, Artificial
  probe
  misc_feature (1)..(25): SEQ ID NO: 1317; WAN024CJ8_at; Start 208; Stop 232
gaggctgacattttagaggctgtaa

SEQ ID NO: 120739 - DNA, 25 bp, Artificial
  probe
  misc_feature (1)..(25): SEQ ID NO: 1317; WAN024CJ8_at; Start 43; Stop 67
gaaaagattttatggctcaagtggt

SEQ ID NO: 120740 - DNA, 25 bp, Artificial
  probe
  misc_feature (1)..(25): SEQ ID NO: 1317; WAN024CJ8_at; Start 245; Stop 269
tgtacaatcacatgaatgttatcgg

SEQ ID NO: 120741 - DNA, 25 bp, Artificial
  probe
  misc_feature (1)..(25): SEQ ID NO: 1317; WAN024CJ8_at; Start 19; Stop 43
gagcgtatttctgtaatacaccgag

SEQ ID NO: 120742 - DNA, 25 bp, Artificial
  probe
  misc_feature (1)..(25): SEQ ID NO: 1317; WAN024CJ8_at; Start 2; Stop 26
tgacaaagaagaaaattgagcgtat

SEQ ID NO: 120743 - DNA, 25 bp, Artificial
  probe
  misc_feature (1)..(25): SEQ ID NO: 1317; WAN024CJ8_at; Start 124; Stop 148
gatgctgctaaaaatcaagatatgc

SEQ ID NO: 120744 - DNA, 25 bp, Artificial
  probe
  misc_feature (1)..(25): SEQ ID NO: 1317; WAN024CJ8_at; Start 203; Stop 227
caagtgaggctgacattttagaggc

SEQ ID NO: 120745 - DNA, 25 bp, Artificial
  probe
  misc_feature (1)..(25): SEQ ID NO: 1317; WAN024CJ8_at; Start 258; Stop 282
gaatgttatcggagcttgtcagcgg

SEQ ID NO: 120746 - DNA, 25 bp, Artificial
  probe
  misc_feature (1)..(25): SEQ ID NO: 1317; WAN024CJ8_at; Start 174; Stop 198
caagcagataacagatattagggta

SEQ ID NO: 120747 - DNA, 25 bp, Artificial
  probe
  misc_feature (1)..(25): SEQ ID NO: 1317; WAN024CJ8_at; Start 29; Stop 53
ctgtaatacaccgagaaaagatttt

SEQ ID NO: 120748 - DNA, 25 bp, Artificial
  probe
  misc_feature (1)..(25): SEQ ID NO: 1317; WAN024CJ8_at; Start 386; Stop 410
tatatcatgagatggtaggtatcct

SEQ ID NO: 120749 - DNA, 25 bp, Artificial
  probe
  misc_feature (1)..(25): SEQ ID NO: 1317; WAN024CJ8_at; Start 352; Stop 376
tattttagcgttgtacccttgccca

SEQ ID NO: 120750 - DNA, 25 bp, Artificial
  probe
  misc_feature (1)..(25): SEQ ID NO: 1317; WAN024CJ8_at; Start 163; Stop 187
tacgcaactatcaagcagataacag

SEQ ID NO: 120751 - DNA, 25 bp, Artificial
  probe
  misc_feature (1)..(25): SEQ ID NO: 1317; WAN024CJ8_at; Start 144; Stop 168
tatgctagcttatcaaaaatacgca

SEQ ID NO: 120752 - DNA, 25 bp, Artificial
  probe
  misc_feature (1)..(25): SEQ ID NO: 1317; WAN024CJ8_at; Start 358; Stop 382
agcgttgtacccttgcccaaaatgg

SEQ ID NO: 120753 - DNA, 25 bp, Artificial
  probe
  misc_feature (1)..(25): SEQ ID NO: 1317; WAN024CJ8_at; Start 59; Stop 83
tcaagtggtatttcatgcgagataa

SEQ ID NO: 120754 - DNA, 25 bp, Artificial
  probe
  misc_feature (1)..(25): SEQ ID NO: 1317; WAN024CJ8_at; Start 189; Stop 213
tattagggtacaaacaagtgaggct

SEQ ID NO: 120755 - DNA, 25 bp, Artificial
  probe
  misc_feature (1)..(25): SEQ ID NO: 1317; WAN024CJ8_at; Start 53; Stop 77
tatggctcaagtggtatttcatgcg

SEQ ID NO: 120756 - DNA, 25 bp, Artificial
  probe
  misc_feature (1)..(25): SEQ ID NO: 1317; WAN024CJ8_at; Start 345; Stop 369
tgatttgtattttagcgttgtaccc

SEQ ID NO: 120757 - DNA, 25 bp, Artificial
  probe
  misc_feature (1)..(25): SEQ ID NO: 1317; WAN024CJ8_at; Start 231; Stop 255
aaaagaggtttatgtgtacaatcac

SEQ ID NO: 120758 - DNA, 25 bp, Artificial
  probe
  misc_feature (1)..(25): SEQ ID NO: 1317; WAN024CJ8_at; Start 289; Stop 313
tttatcagtcaatcaccagcttatg

SEQ ID NO: 120759 - DNA, 25 bp, Artificial
  probe
  misc_feature (1)..(25): SEQ ID NO: 1317; WAN024CJ8_at; Start 324; Stop 348
taagtggtttaatatctattctgat

SEQ ID NO: 120760 - DNA, 25 bp, Artificial
  probe
  misc_feature (1)..(25): SEQ ID NO: 1317; WAN024CJ8_at; Start 195; Stop 219
ggtacaaacaagtgaggctgacatt

SEQ ID NO: 120761 - DNA, 25 bp, Artificial
  probe
  misc_feature (1)..(25): SEQ ID NO: 1317; WAN024CJ8_at; Start 216; Stop 240
cattttagaggctgtaaaagaggtt

SEQ ID NO: 120762 - DNA, 25 bp, Artificial
  probe
  misc_feature (1)..(25): SEQ ID NO: 1317; WAN024CJ8_at; Start 296; Stop 320
gtcaatcaccagcttatgataagtt

SEQ ID NO: 120763 - DNA, 25 bp, Artificial
  probe
  misc_feature (1)..(25): SEQ ID NO: 1317; WAN024CJ8_at; Start 129; Stop 153
tgctaaaaatcaagatatgctagct

SEQ ID NO: 120764 - DNA, 25 bp, Artificial
  probe
  misc_feature (1)..(25): SEQ ID NO: 1317; WAN024CJ8_at; Start 88; Stop 112
caacctaagtatagtgtccttgagc

SEQ ID NO: 120765 - DNA, 25 bp, Artificial
  probe
  misc_feature (1)..(25): SEQ ID NO: 1317; WAN024CJ8_at; Start 274; Stop 298
tgtcagcggatattatttatcagtc

SEQ ID NO: 120766 - DNA, 25 bp, Artificial
  probe
  misc_feature (1)..(25): SEQ ID NO: 1317; WAN024CJ8_at; Start 97; Stop 121
tatagtgtccttgagcgtaaaatgt

SEQ ID NO: 120767 - DNA, 25 bp, Artificial
  probe
  misc_feature (1)..(25): SEQ ID NO: 1317; WAN024CJ8_at; Start 156; Stop 180
tcaaaaatacgcaactatcaagcag

SEQ ID NO: 120768 - DNA, 25 bp, Artificial
  probe
  misc_feature (1)..(25): SEQ ID NO: 1317; WAN024CJ8_at; Start 72; Stop 96
catgcgagataaagaacaacctaag

SEQ ID NO: 120769 - DNA, 25 bp, Artificial
  probe
  misc_feature (1)..(25): SEQ ID NO: 1317; WAN024CJ8_at; Start 112; Stop 136
cgtaaaatgtttgatgctgctaaaa

SEQ ID NO: 120770 - DNA, 25 bp, Artificial
  probe
  misc_feature (1)..(25): SEQ ID NO: 1317; WAN024CJ8_at; Start 104; Stop 128
tccttgagcgtaaaatgtttgatgc

SEQ ID NO: 120771 - DNA, 25 bp, Artificial
  probe
  misc_feature (1)..(25): SEQ ID NO: 956; WAN024CJ9_at; Start 273; Stop 297
caataagagctatgtagcagatgag

SEQ ID NO: 120772 - DNA, 25 bp, Artificial
  probe
  misc_feature (1)..(25): SEQ ID NO: 956; WAN024CJ9_at; Start 56; Stop 80
tgtgtcctaagcatgaaatacagct

SEQ ID NO: 120773 - DNA, 25 bp, Artificial
  probe
  misc_feature (1)..(25): SEQ ID NO: 956; WAN024CJ9_at; Start 736; Stop 760
aataccaacctagatagtgatgagc

SEQ ID NO: 120774 - DNA, 25 bp, Artificial
  probe
  misc_feature (1)..(25): SEQ ID NO: 956; WAN024CJ9_at; Start 491; Stop 515
caaaaggagaacctaagagtgtgct

SEQ ID NO: 120775 - DNA, 25 bp, Artificial
  probe
  misc_feature (1)..(25): SEQ ID NO: 956; WAN024CJ9_at; Start 835; Stop 859
ggcatcaaatataagcggtactcac

SEQ ID NO: 120776 - DNA, 25 bp, Artificial
  probe
  misc_feature (1)..(25): SEQ ID NO: 956; WAN024CJ9_at; Start 356; Stop 380
tagaatttgcaaaaggtcaggtaca

SEQ ID NO: 120777 - DNA, 25 bp, Artificial
  probe
  misc_feature (1)..(25): SEQ ID NO: 956; WAN024CJ9_at; Start 89; Stop 113
tcaaaggagaaagacatgtagtagt

SEQ ID NO: 120778 - DNA, 25 bp, Artificial
  probe
  misc_feature (1)..(25): SEQ ID NO: 956; WAN024CJ9_at; Start 199; Stop 223
caagatgaagaagatgcgattgctg

SEQ ID NO: 120779 - DNA, 25 bp, Artificial
  probe
  misc_feature (1)..(25): SEQ ID NO: 956; WAN024CJ9_at; Start 705; Stop 729
cgtgctaaacaatcgtgaaaatacc

SEQ ID NO: 120780 - DNA, 25 bp, Artificial
  probe
  misc_feature (1)..(25): SEQ ID NO: 956; WAN024CJ9_at; Start 379; Stop 403
caaaaatatcttgatggcatgaggg

SEQ ID NO: 120781 - DNA, 25 bp, Artificial
  probe
  misc_feature (1)..(25): SEQ ID NO: 956; WAN024CJ9_at; Start 559; Stop 583
tggaattatggtaaaggtgcaacac

SEQ ID NO: 120782 - DNA, 25 bp, Artificial
  probe
  misc_feature (1)..(25): SEQ ID NO: 956; WAN024CJ9_at; Start 790; Stop 814
agccgtattctaaaaggacttgagg

SEQ ID NO: 120783 - DNA, 25 bp, Artificial
  probe
  misc_feature (1)..(25): SEQ ID NO: 956; WAN024CJ9_at; Start 129; Stop 153
cggagaggcaataaaagaagttcgc

SEQ ID NO: 120784 - DNA, 25 bp, Artificial
  probe
  misc_feature (1)..(25): SEQ ID NO: 956; WAN024CJ9_at; Start 578; Stop 602
caacacttacagagtttgaagctac

SEQ ID NO: 120785 - DNA, 25 bp, Artificial
  probe
  misc_feature (1)..(25): SEQ ID NO: 956; WAN024CJ9_at; Start 760; Stop 784
cttaagatagtttacaatgagcgga

SEQ ID NO: 120786 - DNA, 25 bp, Artificial
  probe
  misc_feature (1)..(25): SEQ ID NO: 956; WAN024CJ9_at; Start 417; Stop 441
cacaggaggtacagggattggaaaa

SEQ ID NO: 120787 - DNA, 25 bp, Artificial
  probe
  misc_feature (1)..(25): SEQ ID NO: 956; WAN024CJ9_at; Start 657; Stop 681
tgctgttattaagcctaagagtgac

SEQ ID NO: 120788 - DNA, 25 bp, Artificial
  probe
  misc_feature (1)..(25): SEQ ID NO: 956; WAN024CJ9_at; Start 258; Stop 282
taatgtgttgatgagcaataagagc

SEQ ID NO: 120789 - DNA, 25 bp, Artificial
  probe
  misc_feature (1)..(25): SEQ ID NO: 956; WAN024CJ9_at; Start 169; Stop 193
tgtgaacaatgccaagaagaacaga

SEQ ID NO: 120790 - DNA, 25 bp, Artificial
  probe
  misc_feature (1)..(25): SEQ ID NO: 956; WAN024CJ9_at; Start 38; Stop 62
catttaaactagacgaattgtgtcc

SEQ ID NO: 120791 - DNA, 25 bp, Artificial
  probe
  misc_feature (1)..(25): SEQ ID NO: 956; WAN024CJ9_at; Start 819; Stop 843
cacttttaaggcgtttggcatcaaa

SEQ ID NO: 120792 - DNA, 25 bp, Artificial
  probe
  misc_feature (1)..(25): SEQ ID NO: 956; WAN024CJ9_at; Start 595; Stop 619
gaagctactgaactcatgaagtctg

SEQ ID NO: 120793 - DNA, 25 bp, Artificial
  probe
  misc_feature (1)..(25): SEQ ID NO: 956; WAN024CJ9_at; Start 156; Stop 180
tatcccaccctattgtgaacaatgc

SEQ ID NO: 120794 - DNA, 25 bp, Artificial
  probe
  misc_feature (1)..(25): SEQ ID NO: 956; WAN024CJ9_at; Start 670; Stop 694
cctaagagtgactgggagcaggatt

SEQ ID NO: 120795 - DNA, 25 bp, Artificial
  probe
  misc_feature (1)..(25): SEQ ID NO: 956; WAN024CJ9_at; Start 688; Stop 712
caggatttactctttgacgtgctaa

SEQ ID NO: 120796 - DNA, 25 bp, Artificial
  probe
  misc_feature (1)..(25): SEQ ID NO: 956; WAN024CJ9_at; Start 517; Stop 541
tttgtaagcctaaccgaaatgatca

SEQ ID NO: 120797 - DNA, 25 bp, Artificial
  probe
  misc_feature (1)..(25): SEQ ID NO: 956; WAN024CJ9_at; Start 502; Stop 526
cctaagagtgtgctttttgtaagcc

SEQ ID NO: 120798 - DNA, 25 bp, Artificial
  probe
  misc_feature (1)..(25): SEQ ID NO: 956; WAN024CJ9_at; Start 449; Stop 473
tatcagttgctattgccaaaggtat

SEQ ID NO: 120799 - DNA, 25 bp, Artificial
  probe
  misc_feature (1)..(25): SEQ ID NO: 956; WAN024CJ9_at; Start 74; Stop 98
tacagctaacacaaatcaaaggaga

SEQ ID NO: 120800 - DNA, 25 bp, Artificial
  probe
  misc_feature (1)..(25): SEQ ID NO: 956; WAN024CJ9_at; Start 772; Stop 796
tacaatgagcggaattatagccgta

SEQ ID NO: 120801 - DNA, 25 bp, Artificial
  probe
  misc_feature (1)..(25): SEQ ID NO: 956; WAN024CJ9_at; Start 328; Stop 352
gctgtaacatcagaagaaaagcgat

SEQ ID NO: 120802 - DNA, 25 bp, Artificial
  probe
  misc_feature (1)..(25): SEQ ID NO: 956; WAN024CJ9_at; Start 143; Stop 167
aagaagttcgctgtatcccacccta

SEQ ID NO: 120803 - DNA, 25 bp, Artificial
  probe
  misc_feature (1)..(25): SEQ ID NO: 956; WAN024CJ9_at; Start 402; Stop 426
gggaaatacgcttatcacaggaggt

SEQ ID NO: 120804 - DNA, 25 bp, Artificial
  probe
  misc_feature (1)..(25): SEQ ID NO: 956; WAN024CJ9_at; Start 849; Stop 873
gcggtactcactcaatcagttaaag

SEQ ID NO: 120805 - DNA, 25 bp, Artificial
  probe
  misc_feature (1)..(25): SEQ ID NO: 6794; WAN024CJA_at; Start 351; Stop 375
cttgcatgacagtattgagaactgg

SEQ ID NO: 120806 - DNA, 25 bp, Artificial
  probe
  misc_feature (1)..(25): SEQ ID NO: 6794; WAN024CJA_at; Start 126; Stop 150
gagcttcggaaaggtgcaatttaaa

SEQ ID NO: 120807 - DNA, 25 bp, Artificial
  probe
  misc_feature (1)..(25): SEQ ID NO: 6794; WAN024CJA_at; Start 222; Stop 246
cacttacttacgaaatacagaacca

SEQ ID NO: 120808 - DNA, 25 bp, Artificial
  probe
  misc_feature (1)..(25): SEQ ID NO: 6794; WAN024CJA_at; Start 165; Stop 189
gagtgggcaaaatgtacgagattat

SEQ ID NO: 120809 - DNA, 25 bp, Artificial
  probe
  misc_feature (1)..(25): SEQ ID NO: 6794; WAN024CJA_at; Start 534; Stop 558
catggtaatagccatgatgggcttg

SEQ ID NO: 120810 - DNA, 25 bp, Artificial
  probe
  misc_feature (1)..(25): SEQ ID NO: 6794; WAN024CJA_at; Start 566; Stop 590
gttatcaggaaatcaaggctatggc

SEQ ID NO: 120811 - DNA, 25 bp, Artificial
  probe
  misc_feature (1)..(25): SEQ ID NO: 6794; WAN024CJA_at; Start 495; Stop 519
gaccagtgacgagctggagcaatat

SEQ ID NO: 120812 - DNA, 25 bp, Artificial
  probe
  misc_feature (1)..(25): SEQ ID NO: 6794; WAN024CJA_at; Start 181; Stop 205
cgagattatattttgaacgagcaac

SEQ ID NO: 120813 - DNA, 25 bp, Artificial
  probe
  misc_feature (1)..(25): SEQ ID NO: 6794; WAN024CJA_at; Start 4; Stop 28
gaactagtctatatggacggcaaga

SEQ ID NO: 120814 - DNA, 25 bp, Artificial
  probe
  misc_feature (1)..(25): SEQ ID NO: 6794; WAN024CJA_at; Start 523; Stop 547
gcctttgaagacatggtaatagcca

SEQ ID NO: 120815 - DNA, 25 bp, Artificial
  probe
  misc_feature (1)..(25): SEQ ID NO: 6794; WAN024CJA_at; Start 579; Stop 603
caaggctatggcattcagaaataaa

SEQ ID NO: 120816 - DNA, 25 bp, Artificial
  probe
  misc_feature (1)..(25): SEQ ID NO: 6794; WAN024CJA_at; Start 118; Stop 142
gactttgagagcttcggaaaggtgc

SEQ ID NO: 120817 - DNA, 25 bp, Artificial
  probe
  misc_feature (1)..(25): SEQ ID NO: 6794; WAN024CJA_at; Start 147; Stop 171
taaaatttcaccttcagagagtggg

SEQ ID NO: 120818 - DNA, 25 bp, Artificial
  probe
  misc_feature (1)..(25): SEQ ID NO: 6794; WAN024CJA_at; Start 377; Stop 401
aacaagcacccaagcacgcgcatag

SEQ ID NO: 120819 - DNA, 25 bp, Artificial
  probe
  misc_feature (1)..(25): SEQ ID NO: 6794; WAN024CJA_at; Start 286; Stop 310
gaaatgcgtgatgaactttctaagt

SEQ ID NO: 120820 - DNA, 25 bp, Artificial
  probe
  misc_feature (1)..(25): SEQ ID NO: 6794; WAN024CJA_at; Start 405; Stop 429
tatgaacaacctgctactaaaagca

SEQ ID NO: 120821 - DNA, 25 bp, Artificial
  probe
  misc_feature (1)..(25): SEQ ID NO: 6794; WAN024CJA_at; Start 250; Stop 274
cgtaaattcaaaatgaacctggtca

SEQ ID NO: 120822 - DNA, 25 bp, Artificial
  probe
  misc_feature (1)..(25): SEQ ID NO: 6794; WAN024CJA_at; Start 422; Stop 446
taaaagcagtaaccgacaggaacgc

SEQ ID NO: 120823 - DNA, 25 bp, Artificial
  probe
  misc_feature (1)..(25): SEQ ID NO: 6794; WAN024CJA_at; Start 98; Stop 122
tactgaataagcacagagaggactt

SEQ ID NO: 120824 - DNA, 25 bp, Artificial
  probe
  misc_feature (1)..(25): SEQ ID NO: 6794; WAN024CJA_at; Start 237; Stop 261
tacagaaccagttcgtaaattcaaa

SEQ ID NO: 120825 - DNA, 25 bp, Artificial
  probe
  misc_feature (1)..(25): SEQ ID NO: 6794; WAN024CJA_at; Start 27; Stop 51
gaaagagccgtacacattaagcagc

SEQ ID NO: 120826 - DNA, 25 bp, Artificial
  probe
  misc_feature (1)..(25): SEQ ID NO: 6794; WAN024CJA_at; Start 75; Stop 99
caagcacagacatttaaagatttta

SEQ ID NO: 120827 - DNA, 25 bp, Artificial
  probe
  misc_feature (1)..(25): SEQ ID NO: 6794; WAN024CJA_at; Start 507; Stop 531
gctggagcaatatcaagcctttgaa

SEQ ID NO: 120828 - DNA, 25 bp, Artificial
  probe
  misc_feature (1)..(25): SEQ ID NO: 6794; WAN024CJA_at; Start 44; Stop 68
taagcagcattgttgcagaatgtgc

SEQ ID NO: 120829 - DNA, 25 bp, Artificial
  probe
  misc_feature (1)..(25): SEQ ID NO: 6794; WAN024CJA_at; Start 264; Stop 288
gaacctggtcaaagctttctttgaa

SEQ ID NO: 120830 - DNA, 25 bp, Artificial
  probe
  misc_feature (1)..(25): SEQ ID NO: 6794; WAN024CJA_at; Start 549; Stop 573
gatgggcttgaatatgagttatcag

SEQ ID NO: 120831 - DNA, 25 bp, Artificial
  probe
  misc_feature (1)..(25): SEQ ID NO: 6794; WAN024CJA_at; Start 157; Stop 181
ccttcagagagtgggcaaaatgtac

SEQ ID NO: 120832 - DNA, 25 bp, Artificial
  probe
  misc_feature (1)..(25): SEQ ID NO: 6794; WAN024CJA_at; Start 481; Stop 505
ggcatagatagcttgaccagtgacg

SEQ ID NO: 120833 - DNA, 25 bp, Artificial
  probe
  misc_feature (1)..(25): SEQ ID NO: 6794; WAN024CJA_at; Start 455; Stop 479
taagggaagaacgtggaggctataa

SEQ ID NO: 120834 - DNA, 25 bp, Artificial
  probe
  misc_feature (1)..(25): SEQ ID NO: 6794; WAN024CJA_at; Start 57; Stop 81
tgcagaatgtgcagaaatcaagcac

SEQ ID NO: 120835 - DNA, 25 bp, Artificial
  probe
  misc_feature (1)..(25): SEQ ID NO: 6794; WAN024CJA_at; Start 466; Stop 490
cgtggaggctataatggcatagata

SEQ ID NO: 120836 - DNA, 25 bp, Artificial
  probe
  misc_feature (1)..(25): SEQ ID NO: 6794; WAN024CJA_at; Start 304; Stop 328
tctaagtttcgtatgcagagggcgc

SEQ ID NO: 120837 - DNA, 25 bp, Artificial
  probe
  misc_feature (1)..(25): SEQ ID NO: 6794; WAN024CJA_at; Start 196; Stop 220
aacgagcaacaagctactttgttaa

SEQ ID NO: 120838 - DNA, 25 bp, Artificial
  probe
  misc_feature (1)..(25): SEQ ID NO: 6794; WAN024CJA_at; Start 366; Stop 390
tgagaactgggaacaagcacccaag

SEQ ID NO: 120839 - DNA, 25 bp, Artificial
  probe
  misc_feature (1)..(25): SEQ ID NO: 2193; WAN024CJB_at; Start 124; Stop 148
gaagagttgggaatacttggattta

SEQ ID NO: 120840 - DNA, 25 bp, Artificial
  probe
  misc_feature (1)..(25): SEQ ID NO: 2193; WAN024CJB_at; Start 567; Stop 591
gagttatcaggaaattaagacaatg

SEQ ID NO: 120841 - DNA, 25 bp, Artificial
  probe
  misc_feature (1)..(25): SEQ ID NO: 2193; WAN024CJB_at; Start 293; Stop 317
tgcgtgaggaactttctgaaattcg

SEQ ID NO: 120842 - DNA, 25 bp, Artificial
  probe
  misc_feature (1)..(25): SEQ ID NO: 2193; WAN024CJB_at; Start 37; Stop 61
tacaccacaagcgagatcatcgctg

SEQ ID NO: 120843 - DNA, 25 bp, Artificial
  probe
  misc_feature (1)..(25): SEQ ID NO: 2193; WAN024CJB_at; Start 181; Stop 205
aaaaaatcctatattctgaacgagc

SEQ ID NO: 120844 - DNA, 25 bp, Artificial
  probe
  misc_feature (1)..(25): SEQ ID NO: 2193; WAN024CJB_at; Start 370; Stop 394
gaaacatggcctaatgcaccaaagc

SEQ ID NO: 120845 - DNA, 25 bp, Artificial
  probe
  misc_feature (1)..(25): SEQ ID NO: 2193; WAN024CJB_at; Start 49; Stop 73
gagatcatcgctgaatgtgctgaag

SEQ ID NO: 120846 - DNA, 25 bp, Artificial
  probe
  misc_feature (1)..(25): SEQ ID NO: 2193; WAN024CJB_at; Start 526; Stop 550
gcatttgaggatatggcaatagcta

SEQ ID NO: 120847 - DNA, 25 bp, Artificial
  probe
  misc_feature (1)..(25): SEQ ID NO: 2193; WAN024CJB_at; Start 420; Stop 444
gctactaaaggcagtaacagacatg

SEQ ID NO: 120848 - DNA, 25 bp, Artificial
  probe
  misc_feature (1)..(25): SEQ ID NO: 2193; WAN024CJB_at; Start 540; Stop 564
ggcaatagctatgattgaattgaaa

SEQ ID NO: 120849 - DNA, 25 bp, Artificial
  probe
  misc_feature (1)..(25): SEQ ID NO: 2193; WAN024CJB_at; Start 60; Stop 84
tgaatgtgctgaagtacaacaccac

SEQ ID NO: 120850 - DNA, 25 bp, Artificial
  probe
  misc_feature (1)..(25): SEQ ID NO: 2193; WAN024CJB_at; Start 408; Stop 432
catgaacaacttgctactaaaggca

SEQ ID NO: 120851 - DNA, 25 bp, Artificial
  probe
  misc_feature (1)..(25): SEQ ID NO: 2193; WAN024CJB_at; Start 476; Stop 500
gctataacggtatcgatagcttgac

SEQ ID NO: 120852 - DNA, 25 bp, Artificial
  probe
  misc_feature (1)..(25): SEQ ID NO: 2193; WAN024CJB_at; Start 11; Stop 35
tttacatggacggtaagaaagagcc

SEQ ID NO: 120853 - DNA, 25 bp, Artificial
  probe
  misc_feature (1)..(25): SEQ ID NO: 2193; WAN024CJB_at; Start 29; Stop 53
aagagccgtacaccacaagcgagat

SEQ ID NO: 120854 - DNA, 25 bp, Artificial
  probe
  misc_feature (1)..(25): SEQ ID NO: 2193; WAN024CJB_at; Start 233; Stop 257
taaagaataccgaaacagtacggca

SEQ ID NO: 120855 - DNA, 25 bp, Artificial
  probe
  misc_feature (1)..(25): SEQ ID NO: 2193; WAN024CJB_at; Start 500; Stop 524
ctagtgaggagttggagcagtacca

SEQ ID NO: 120856 - DNA, 25 bp, Artificial
  probe
  misc_feature (1)..(25): SEQ ID NO: 2193; WAN024CJB_at; Start 71; Stop 95
aagtacaacaccacactatcacgcg

SEQ ID NO: 120857 - DNA, 25 bp, Artificial
  probe
  misc_feature (1)..(25): SEQ ID NO: 2193; WAN024CJB_at; Start 248; Stop 272
cagtacggcaattcaaactaaacct

SEQ ID NO: 120858 - DNA, 25 bp, Artificial
  probe
  misc_feature (1)..(25): SEQ ID NO: 2193; WAN024CJB_at; Start 84; Stop 108
cactatcacgcgcttaataagagaa

SEQ ID NO: 120859 - DNA, 25 bp, Artificial
  probe
  misc_feature (1)..(25): SEQ ID NO: 2193; WAN024CJB_at; Start 309; Stop 333
tgaaattcgtctgcagagggcgcta

SEQ ID NO: 120860 - DNA, 25 bp, Artificial
  probe
  misc_feature (1)..(25): SEQ ID NO: 2193; WAN024CJB_at; Start 513; Stop 537
ggagcagtaccaggcatttgaggat

SEQ ID NO: 120861 - DNA, 25 bp, Artificial
  probe
  misc_feature (1)..(25): SEQ ID NO: 2193; WAN024CJB_at; Start 485; Stop 509
gtatcgatagcttgactagtgagga

SEQ ID NO: 120862 - DNA, 25 bp, Artificial
  probe
  misc_feature (1)..(25): SEQ ID NO: 2193; WAN024CJB_at; Start 356; Stop 380
tgcatgacagtatagaaacatggcc

SEQ ID NO: 120863 - DNA, 25 bp, Artificial
  probe
  misc_feature (1)..(25): SEQ ID NO: 2193; WAN024CJB_at; Start 96; Stop 120
cttaataagagaaaataaggctgac

SEQ ID NO: 120864 - DNA, 25 bp, Artificial
  probe
  misc_feature (1)..(25): SEQ ID NO: 2193; WAN024CJB_at; Start 429; Stop 453
ggcagtaacagacatgaacgctaag

SEQ ID NO: 120865 - DNA, 25 bp, Artificial
  probe
  misc_feature (1)..(25): SEQ ID NO: 2193; WAN024CJB_at; Start 204; Stop 228
gcaacaggctacttttctgatcact

SEQ ID NO: 120866 - DNA, 25 bp, Artificial
  probe
  misc_feature (1)..(25): SEQ ID NO: 2193; WAN024CJB_at; Start 189; Stop 213
ctatattctgaacgagcaacaggct

SEQ ID NO: 120867 - DNA, 25 bp, Artificial
  probe
  misc_feature (1)..(25): SEQ ID NO: 2193; WAN024CJB_at; Start 111; Stop 135
taaggctgactttgaagagttggga

SEQ ID NO: 120868 - DNA, 25 bp, Artificial
  probe
  misc_feature (1)..(25): SEQ ID NO: 2193; WAN024CJB_at; Start 381; Stop 405
taatgcaccaaagcacgcgcatagc

SEQ ID NO: 120869 - DNA, 25 bp, Artificial
  probe
  misc_feature (1)..(25): SEQ ID NO: 2193; WAN024CJB_at; Start 219; Stop 243
tctgatcacttatttaaagaatacc

SEQ ID NO: 120870 - DNA, 25 bp, Artificial
  probe
  misc_feature (1)..(25): SEQ ID NO: 2193; WAN024CJB_at; Start 2; Stop 26
tggaactagtttacatggacggtaa

SEQ ID NO: 120871 - DNA, 25 bp, Artificial
  probe
  misc_feature (1)..(25): SEQ ID NO: 2193; WAN024CJB_at; Start 265; Stop 289
ctaaacctagtcaaagcattctttg

SEQ ID NO: 120872 - DNA, 25 bp, Artificial
  probe
  misc_feature (1)..(25): SEQ ID NO: 2193; WAN024CJB_at; Start 156; Stop 180
taaattagatactagaggacaacct

SEQ ID NO: 120873 - DNA, 25 bp, Artificial
  probe
  misc_feature (1)..(25): SEQ ID NO: 2169; WAN024CJC_at; Start 215; Stop 239
agaaagtattctatcgtccgtcaga

SEQ ID NO: 120874 - DNA, 25 bp, Artificial
  probe
  misc_feature (1)..(25): SEQ ID NO: 2169; WAN024CJC_at; Start 129; Stop 153
ggatctgctaggtataagtgctaca

SEQ ID NO: 120875 - DNA, 25 bp, Artificial
  probe
  misc_feature (1)..(25): SEQ ID NO: 2169; WAN024CJC_at; Start 31; Stop 55
cagggcttacaacttcttaaacaga

SEQ ID NO: 120876 - DNA, 25 bp, Artificial
  probe
  misc_feature (1)..(25): SEQ ID NO: 2169; WAN024CJC_at; Start 137; Stop 161
taggtataagtgctacaacccttga

SEQ ID NO: 120877 - DNA, 25 bp, Artificial
  probe
  misc_feature (1)..(25): SEQ ID NO: 2169; WAN024CJC_at; Start 52; Stop 76
cagactcttgaaactttagttgagc

SEQ ID NO: 120878 - DNA, 25 bp, Artificial
  probe
  misc_feature (1)..(25): SEQ ID NO: 2169; WAN024CJC_at; Start 183; Stop 207
taaacgatatcagactccgatggat

SEQ ID NO: 120879 - DNA, 25 bp, Artificial
  probe
  misc_feature (1)..(25): SEQ ID NO: 2169; WAN024CJC_at; Start 187; Stop 211
cgatatcagactccgatggatggag

SEQ ID NO: 120880 - DNA, 25 bp, Artificial
  probe
  misc_feature (1)..(25): SEQ ID NO: 2169; WAN024CJC_at; Start 57; Stop 81
tcttgaaactttagttgagctagaa

SEQ ID NO: 120881 - DNA, 25 bp, Artificial
  probe
  misc_feature (1)..(25): SEQ ID NO: 2169; WAN024CJC_at; Start 198; Stop 222
tccgatggatggagctaagaaagta

SEQ ID NO: 120882 - DNA, 25 bp, Artificial
  probe
  misc_feature (1)..(25): SEQ ID NO: 2169; WAN024CJC_at; Start 233; Stop 257
cgtcagatgtgtatttatttttagc

SEQ ID NO: 120883 - DNA, 25 bp, Artificial
  probe
  misc_feature (1)..(25): SEQ ID NO: 2169; WAN024CJC_at; Start 18; Stop 42
agaaatacagttacagggcttacaa

SEQ ID NO: 120884 - DNA, 25 bp, Artificial
  probe
  misc_feature (1)..(25): SEQ ID NO: 2169; WAN024CJC_at; Start 192; Stop 216
tcagactccgatggatggagctaag

SEQ ID NO: 120885 - DNA, 25 bp, Artificial
  probe
  misc_feature (1)..(25): SEQ ID NO: 2169; WAN024CJC_at; Start 25; Stop 49
cagttacagggcttacaacttctta

SEQ ID NO: 120886 - DNA, 25 bp, Artificial
  probe
  misc_feature (1)..(25): SEQ ID NO: 2169; WAN024CJC_at; Start 165; Stop 189
ctgggaggatcttggtcttaaacga

SEQ ID NO: 120887 - DNA, 25 bp, Artificial
  probe
  misc_feature (1)..(25): SEQ ID NO: 2169; WAN024CJC_at; Start 225; Stop 249
ctatcgtccgtcagatgtgtattta

SEQ ID NO: 120888 - DNA, 25 bp, Artificial
  probe
  misc_feature (1)..(25): SEQ ID NO: 2169; WAN024CJC_at; Start 134; Stop 158
tgctaggtataagtgctacaaccct

SEQ ID NO: 120889 - DNA, 25 bp, Artificial
  probe
  misc_feature (1)..(25): SEQ ID NO: 2169; WAN024CJC_at; Start 38; Stop 62
tacaacttcttaaacagactcttga

SEQ ID NO: 120890 - DNA, 25 bp, Artificial
  probe
  misc_feature (1)..(25): SEQ ID NO: 2169; WAN024CJC_at; Start 152; Stop 176
caacccttgataactgggaggatct

SEQ ID NO: 120891 - DNA, 25 bp, Artificial
  probe
  misc_feature (1)..(25): SEQ ID NO: 2169; WAN024CJC_at; Start 3; Stop 27
ggaaattctgtctaaagaaatacag

SEQ ID NO: 120892 - DNA, 25 bp, Artificial
  probe
  misc_feature (1)..(25): SEQ ID NO: 2169; WAN024CJC_at; Start 75; Stop 99
gctagaaaaacaacgatctagtaag

SEQ ID NO: 120893 - DNA, 25 bp, Artificial
  probe
  misc_feature (1)..(25): SEQ ID NO: 2169; WAN024CJC_at; Start 92; Stop 116
ctagtaagttagatttaatttctcg

SEQ ID NO: 120894 - DNA, 25 bp, Artificial
  probe
  misc_feature (1)..(25): SEQ ID NO: 2169; WAN024CJC_at; Start 201; Stop 225
gatggatggagctaagaaagtattc

SEQ ID NO: 120895 - DNA, 25 bp, Artificial
  probe
  misc_feature (1)..(25): SEQ ID NO: 2169; WAN024CJC_at; Start 177; Stop 201
tggtcttaaacgatatcagactccg

SEQ ID NO: 120896 - DNA, 25 bp, Artificial
  probe
  misc_feature (1)..(25): SEQ ID NO: 2169; WAN024CJC_at; Start 171; Stop 195
ggatcttggtcttaaacgatatcag

SEQ ID NO: 120897 - DNA, 25 bp, Artificial
  probe
  misc_feature (1)..(25): SEQ ID NO: 2169; WAN024CJC_at; Start 160; Stop 184
gataactgggaggatcttggtctta

SEQ ID NO: 120898 - DNA, 25 bp, Artificial
  probe
  misc_feature (1)..(25): SEQ ID NO: 2169; WAN024CJC_at; Start 68; Stop 92
tagttgagctagaaaaacaacgatc

SEQ ID NO: 120899 - DNA, 25 bp, Artificial
  probe
  misc_feature (1)..(25): SEQ ID NO: 2169; WAN024CJC_at; Start 85; Stop 109
caacgatctagtaagttagatttaa

SEQ ID NO: 120900 - DNA, 25 bp, Artificial
  probe
  misc_feature (1)..(25): SEQ ID NO: 2169; WAN024CJC_at; Start 125; Stop 149
taatggatctgctaggtataagtgc

SEQ ID NO: 120901 - DNA, 25 bp, Artificial
  probe
  misc_feature (1)..(25): SEQ ID NO: 2169; WAN024CJC_at; Start 143; Stop 167
taagtgctacaacccttgataactg

SEQ ID NO: 120902 - DNA, 25 bp, Artificial
  probe
  misc_feature (1)..(25): SEQ ID NO: 2169; WAN024CJC_at; Start 155; Stop 179
cccttgataactgggaggatcttgg

SEQ ID NO: 120903 - DNA, 25 bp, Artificial
  probe
  misc_feature (1)..(25): SEQ ID NO: 2169; WAN024CJC_at; Start 220; Stop 244
gtattctatcgtccgtcagatgtgt

SEQ ID NO: 120904 - DNA, 25 bp, Artificial
  probe
  misc_feature (1)..(25): SEQ ID NO: 2169; WAN024CJC_at; Start 112; Stop 136
tctcgtaaagaattaatggatctgc

SEQ ID NO: 120905 - DNA, 25 bp, Artificial
  probe
  misc_feature (1)..(25): SEQ ID NO: 2169; WAN024CJC_at; Start 13; Stop 37
tctaaagaaatacagttacagggct

SEQ ID NO: 120906 - DNA, 25 bp, Artificial
  probe
  misc_feature (1)..(25): SEQ ID NO: 2169; WAN024CJC_at; Start 148; Stop 172
gctacaacccttgataactgggagg

SEQ ID NO: 120907 - DNA, 25 bp, Artificial
  probe
  misc_feature (1)..(25): SEQ ID NO: 734; WAN024CJD_at; Start 302; Stop 326
caaataaagcgttacagatcgctca

SEQ ID NO: 120908 - DNA, 25 bp, Artificial
  probe
  misc_feature (1)..(25): SEQ ID NO: 734; WAN024CJD_at; Start 359; Stop 383
cagacgaaacgatcaaaaaatttat

SEQ ID NO: 120909 - DNA, 25 bp, Artificial
  probe
  misc_feature (1)..(25): SEQ ID NO: 734; WAN024CJD_at; Start 465; Stop 489
tggaggtactagaaaccgagaatat

SEQ ID NO: 120910 - DNA, 25 bp, Artificial
  probe
  misc_feature (1)..(25): SEQ ID NO: 734; WAN024CJD_at; Start 85; Stop 109
aaatttaatactagcaaaggtacag

SEQ ID NO: 120911 - DNA, 25 bp, Artificial
  probe
  misc_feature (1)..(25): SEQ ID NO: 734; WAN024CJD_at; Start 602; Stop 626
gattttttaacttctttggcaatga

SEQ ID NO: 120912 - DNA, 25 bp, Artificial
  probe
  misc_feature (1)..(25): SEQ ID NO: 734; WAN024CJD_at; Start 247; Stop 271
gctcctgaatgtataaaaaattatg

SEQ ID NO: 120913 - DNA, 25 bp, Artificial
  probe
  misc_feature (1)..(25): SEQ ID NO: 734; WAN024CJD_at; Start 660; Stop 684
tatcgcaccttcagaaattgtttca

SEQ ID NO: 120914 - DNA, 25 bp, Artificial
  probe
  misc_feature (1)..(25): SEQ ID NO: 734; WAN024CJD_at; Start 491; Stop 515
tctattttgggtatagacttaccta

SEQ ID NO: 120915 - DNA, 25 bp, Artificial
  probe
  misc_feature (1)..(25): SEQ ID NO: 734; WAN024CJD_at; Start 148; Stop 172
gaaaacctactaaaaattgcatcta

SEQ ID NO: 120916 - DNA, 25 bp, Artificial
  probe
  misc_feature (1)..(25): SEQ ID NO: 734; WAN024CJD_at; Start 273; Stop 297
tgagtataactctttacacgatgat

SEQ ID NO: 120917 - DNA, 25 bp, Artificial
  probe
  misc_feature (1)..(25): SEQ ID NO: 734; WAN024CJD_at; Start 770; Stop 794
tagatgtttctggttacactgtaaa

SEQ ID NO: 120918 - DNA, 25 bp, Artificial
  probe
  misc_feature (1)..(25): SEQ ID NO: 734; WAN024CJD_at; Start 520; Stop 544
gaaaaatatctatacactgccttac

SEQ ID NO: 120919 - DNA, 25 bp, Artificial
  probe
  misc_feature (1)..(25): SEQ ID NO: 734; WAN024CJD_at; Start 345; Stop 369
tgattatcaaatttcagacgaaacg

SEQ ID NO: 120920 - DNA, 25 bp, Artificial
  probe
  misc_feature (1)..(25): SEQ ID NO: 734; WAN024CJD_at; Start 167; Stop 191
catctattggaaaaatgagtgttga

SEQ ID NO: 120921 - DNA, 25 bp, Artificial
  probe
  misc_feature (1)..(25): SEQ ID NO: 734; WAN024CJD_at; Start 800; Stop 824
tagaagatcaattaacaaaacatag

SEQ ID NO: 120922 - DNA, 25 bp, Artificial
  probe
  misc_feature (1)..(25): SEQ ID NO: 734; WAN024CJD_at; Start 230; Stop 254
taaagattatggatttagctcctga

SEQ ID NO: 120923 - DNA, 25 bp, Artificial
  probe
  misc_feature (1)..(25): SEQ ID NO: 734; WAN024CJD_at; Start 618; Stop 642
tggcaatgatattcctaattcgtct

SEQ ID NO: 120924 - DNA, 25 bp, Artificial
  probe
  misc_feature (1)..(25): SEQ ID NO: 734; WAN024CJD_at; Start 287; Stop 311
tacacgatgatataacaaataaagc

SEQ ID NO: 120925 - DNA, 25 bp, Artificial
  probe
  misc_feature (1)..(25): SEQ ID NO: 734; WAN024CJD_at; Start 385; Stop 409
gatttagctatcgaacaatcgagag

SEQ ID NO: 120926 - DNA, 25 bp, Artificial
  probe
  misc_feature (1)..(25): SEQ ID NO: 734; WAN024CJD_at; Start 190; Stop 214
gaagagttactctacggcgattaca

SEQ ID NO: 120927 - DNA, 25 bp, Artificial
  probe
  misc_feature (1)..(25): SEQ ID NO: 734; WAN024CJD_at; Start 15; Stop 39
taaactcgttggagaacgtattcaa

SEQ ID NO: 120928 - DNA, 25 bp, Artificial
  probe
  misc_feature (1)..(25): SEQ ID NO: 734; WAN024CJD_at; Start 59; Stop 83
gcgactctatggaaaaatttggaga

SEQ ID NO: 120929 - DNA, 25 bp, Artificial
  probe
  misc_feature (1)..(25): SEQ ID NO: 734; WAN024CJD_at; Start 400; Stop 424
caatcgagagatttgcaaggaaatt

SEQ ID NO: 120930 - DNA, 25 bp, Artificial
  probe
  misc_feature (1)..(25): SEQ ID NO: 734; WAN024CJD_at; Start 37; Stop 61
caaaatatccgtttaagccatggcg

SEQ ID NO: 120931 - DNA, 25 bp, Artificial
  probe
  misc_feature (1)..(25): SEQ ID NO: 734; WAN024CJD_at; Start 50; Stop 74
taagccatggcgactctatggaaaa

SEQ ID NO: 120932 - DNA, 25 bp, Artificial
  probe
  misc_feature (1)..(25): SEQ ID NO: 734; WAN024CJD_at; Start 537; Stop 561
tgccttactagctatactgaacgag

SEQ ID NO: 120933 - DNA, 25 bp, Artificial
  probe
  misc_feature (1)..(25): SEQ ID NO: 734; WAN024CJD_at; Start 683; Stop 707
catttagtacgtacgttcgacaacg

SEQ ID NO: 120934 - DNA, 25 bp, Artificial
  probe
  misc_feature (1)..(25): SEQ ID NO: 734; WAN024CJD_at; Start 649; Stop 673
aaaattgactatatcgcaccttcag

SEQ ID NO: 120935 - DNA, 25 bp, Artificial
  probe
  misc_feature (1)..(25): SEQ ID NO: 734; WAN024CJD_at; Start 551; Stop 575
tactgaacgagtcaacaaaaacgat

SEQ ID NO: 120936 - DNA, 25 bp, Artificial
  probe
  misc_feature (1)..(25): SEQ ID NO: 734; WAN024CJD_at; Start 451; Stop 475
gactattcactttttggaggtacta

SEQ ID NO: 120937 - DNA, 25 bp, Artificial
  probe
  misc_feature (1)..(25): SEQ ID NO: 734; WAN024CJD_at; Start 318; Stop 342
gatcgctcaaaataccatttctaag

SEQ ID NO: 120938 - DNA, 25 bp, Artificial
  probe
  misc_feature (1)..(25): SEQ ID NO: 734; WAN024CJD_at; Start 24; Stop 48
tggagaacgtattcaaaatatccgt

SEQ ID NO: 120939 - DNA, 25 bp, Artificial
  probe
  misc_feature (1)..(25): SEQ ID NO: 734; WAN024CJD_at; Start 205; Stop 229
ggcgattacaatacttatctacact

SEQ ID NO: 120940 - DNA, 25 bp, Artificial
  probe
  misc_feature (1)..(25): SEQ ID NO: 734; WAN024CJD_at; Start 98; Stop 122
gcaaaggtacagttaacaactggga

SEQ ID NO: 120941 - DNA, 25 bp, Artificial
  probe
  misc_feature (1)..(25): SEQ ID NO: 1127; WAN024CJE_at; Start 605; Stop 629
tagattctgctcctagtattgtgag

SEQ ID NO: 120942 - DNA, 25 bp, Artificial
  probe
  misc_feature (1)..(25): SEQ ID NO: 1127; WAN024CJE_at; Start 101; Stop 125
taattatttctcagtttctacaacc

SEQ ID NO: 120943 - DNA, 25 bp, Artificial
  probe
  misc_feature (1)..(25): SEQ ID NO: 1127; WAN024CJE_at; Start 216; Stop 240
tacaatcattggtgttatagcttta

SEQ ID NO: 120944 - DNA, 25 bp, Artificial
  probe
  misc_feature (1)..(25): SEQ ID NO: 1127; WAN024CJE_at; Start 299; Stop 323
ggctacttgctcttaagttatgcag

SEQ ID NO: 120945 - DNA, 25 bp, Artificial
  probe
  misc_feature (1)..(25): SEQ ID NO: 1127; WAN024CJE_at; Start 163; Stop 187
tcttcgataaagaacattcagttta

SEQ ID NO: 120946 - DNA, 25 bp, Artificial
  probe
  misc_feature (1)..(25): SEQ ID NO: 1127; WAN024CJE_at; Start 112; Stop 136
cagtttctacaaccaatcttatatg

SEQ ID NO: 120947 - DNA, 25 bp, Artificial
  probe
  misc_feature (1)..(25): SEQ ID NO: 1127; WAN024CJE_at; Start 616; Stop 640
cctagtattgtgagatggattggtc

SEQ ID NO: 120948 - DNA, 25 bp, Artificial
  probe
  misc_feature (1)..(25): SEQ ID NO: 1127; WAN024CJE_at; Start 2; Stop 26
tgaaggctgatcaattaaggcacaa

SEQ ID NO: 120949 - DNA, 25 bp, Artificial
  probe
  misc_feature (1)..(25): SEQ ID NO: 1127; WAN024CJE_at; Start 205; Stop 229
tatgcagaatatacaatcattggtg

SEQ ID NO: 120950 - DNA, 25 bp, Artificial
  probe
  misc_feature (1)..(25): SEQ ID NO: 1127; WAN024CJE_at; Start 782; Stop 806
tgatactgatagaaagactaactaa

SEQ ID NO: 120951 - DNA, 25 bp, Artificial
  probe
  misc_feature (1)..(25): SEQ ID NO: 1127; WAN024CJE_at; Start 520; Stop 544
tttatcaatgattacagaagacgtg

SEQ ID NO: 120952 - DNA, 25 bp, Artificial
  probe
  misc_feature (1)..(25): SEQ ID NO: 1127; WAN024CJE_at; Start 286; Stop 310
gataaaaaatatgggctacttgctc

SEQ ID NO: 120953 - DNA, 25 bp, Artificial
  probe
  misc_feature (1)..(25): SEQ ID NO: 1127; WAN024CJE_at; Start 490; Stop 514
tgggactcccttgcaattttactta

SEQ ID NO: 120954 - DNA, 25 bp, Artificial
  probe
  misc_feature (1)..(25): SEQ ID NO: 1127; WAN024CJE_at; Start 533; Stop 557
acagaagacgtgatattgtaatacg

SEQ ID NO: 120955 - DNA, 25 bp, Artificial
  probe
  misc_feature (1)..(25): SEQ ID NO: 1127; WAN024CJE_at; Start 189; Stop 213
tgatataaaaacctcttatgcagaa

SEQ ID NO: 120956 - DNA, 25 bp, Artificial
  probe
  misc_feature (1)..(25): SEQ ID NO: 1127; WAN024CJE_at; Start 21; Stop 45
gcacaaatcggacttaggtttaaga

SEQ ID NO: 120957 - DNA, 25 bp, Artificial
  probe
  misc_feature (1)..(25): SEQ ID NO: 1127; WAN024CJE_at; Start 368; Stop 392
ctatattagggttgatagttcaaga

SEQ ID NO: 120958 - DNA, 25 bp, Artificial
  probe
  misc_feature (1)..(25): SEQ ID NO: 1127; WAN024CJE_at; Start 765; Stop 789
tataccaaagataaaattgatactg

SEQ ID NO: 120959 - DNA, 25 bp, Artificial
  probe
  misc_feature (1)..(25): SEQ ID NO: 1127; WAN024CJE_at; Start 10; Stop 34
gatcaattaaggcacaaatcggact

SEQ ID NO: 120960 - DNA, 25 bp, Artificial
  probe
  misc_feature (1)..(25): SEQ ID NO: 1127; WAN024CJE_at; Start 243; Stop 267
gataatcgggcagatgactcaagtt

SEQ ID NO: 120961 - DNA, 25 bp, Artificial
  probe
  misc_feature (1)..(25): SEQ ID NO: 1127; WAN024CJE_at; Start 320; Stop 344
gcagtggagttcgtcctttatatta

SEQ ID NO: 120962 - DNA, 25 bp, Artificial
  probe
  misc_feature (1)..(25): SEQ ID NO: 1127; WAN024CJE_at; Start 231; Stop 255
tatagctttattgataatcgggcag

SEQ ID NO: 120963 - DNA, 25 bp, Artificial
  probe
  misc_feature (1)..(25): SEQ ID NO: 1127; WAN024CJE_at; Start 553; Stop 577
atacgttttgtactaacaccgcttg

SEQ ID NO: 120964 - DNA, 25 bp, Artificial
  probe
  misc_feature (1)..(25): SEQ ID NO: 1127; WAN024CJE_at; Start 423; Stop 447
tgagataaatatcgcaatggataga

SEQ ID NO: 120965 - DNA, 25 bp, Artificial
  probe
  misc_feature (1)..(25): SEQ ID NO: 1127; WAN024CJE_at; Start 629; Stop 653
gatggattggtcagttaaatccctt

SEQ ID NO: 120966 - DNA, 25 bp, Artificial
  probe
  misc_feature (1)..(25): SEQ ID NO: 1127; WAN024CJE_at; Start 411; Stop 435
tacgttagcgtttgagataaatatc

SEQ ID NO: 120967 - DNA, 25 bp, Artificial
  probe
  misc_feature (1)..(25): SEQ ID NO: 1127; WAN024CJE_at; Start 731; Stop 755
catcattacttgtccttatatctgt

SEQ ID NO: 120968 - DNA, 25 bp, Artificial
  probe
  misc_feature (1)..(25): SEQ ID NO: 1127; WAN024CJE_at; Start 44; Stop 68
gaggtctagcgattattgctaaaaa

SEQ ID NO: 120969 - DNA, 25 bp, Artificial
  probe
  misc_feature (1)..(25): SEQ ID NO: 1127; WAN024CJE_at; Start 311; Stop 335
ttaagttatgcagtggagttcgtcc

SEQ ID NO: 120970 - DNA, 25 bp, Artificial
  probe
  misc_feature (1)..(25): SEQ ID NO: 1127; WAN024CJE_at; Start 583; Stop 607
acagctcctgttttctacttaatag

SEQ ID NO: 120971 - DNA, 25 bp, Artificial
  probe
  misc_feature (1)..(25): SEQ ID NO: 1127; WAN024CJE_at; Start 354; Stop 378
gatgagtatctattctatattaggg

SEQ ID NO: 120972 - DNA, 25 bp, Artificial
  probe
  misc_feature (1)..(25): SEQ ID NO: 1127; WAN024CJE_at; Start 258; Stop 282
gactcaagttatttatagggtgaca

SEQ ID NO: 120973 - DNA, 25 bp, Artificial
  probe
  misc_feature (1)..(25): SEQ ID NO: 1127; WAN024CJE_at; Start 596; Stop 620
tctacttaatagattctgctcctag

SEQ ID NO: 120974 - DNA, 25 bp, Artificial
  probe
  misc_feature (1)..(25): SEQ ID NO: 1127; WAN024CJE_at; Start 31; Stop 55
gacttaggtttaagaggtctagcga

SEQ ID NO: 120975 - DNA, 25 bp, Artificial
  probe
  misc_feature (1)..(25): SEQ ID NO: 1274; WAN024CJF_at; Start 141; Stop 165
taattctattgtaggttttcaagag

SEQ ID NO: 120976 - DNA, 25 bp, Artificial
  probe
  misc_feature (1)..(25): SEQ ID NO: 1274; WAN024CJF_at; Start 300; Stop 324
gctgaaccttgctggaaagtttggg

SEQ ID NO: 120977 - DNA, 25 bp, Artificial
  probe
  misc_feature (1)..(25): SEQ ID NO: 1274; WAN024CJF_at; Start 101; Stop 125
gcttattaggttcaaatggtgcagg

SEQ ID NO: 120978 - DNA, 25 bp, Artificial
  probe
  misc_feature (1)..(25): SEQ ID NO: 1274; WAN024CJF_at; Start 112; Stop 136
tcaaatggtgcaggtaaatctacgt

SEQ ID NO: 120979 - DNA, 25 bp, Artificial
  probe
  misc_feature (1)..(25): SEQ ID NO: 1274; WAN024CJF_at; Start 262; Stop 286
gatttttatactactgtgaaggaca

SEQ ID NO: 120980 - DNA, 25 bp, Artificial
  probe
  misc_feature (1)..(25): SEQ ID NO: 1274; WAN024CJF_at; Start 653; Stop 677
tgcgtgactttgtagataattcaac

SEQ ID NO: 120981 - DNA, 25 bp, Artificial
  probe
  misc_feature (1)..(25): SEQ ID NO: 1274; WAN024CJF_at; Start 314; Stop 338
gaaagtttgggaaaaatgctgagaa

SEQ ID NO: 120982 - DNA, 25 bp, Artificial
  probe
  misc_feature (1)..(25): SEQ ID NO: 1274; WAN024CJF_at; Start 545; Stop 569
tggaaggaaaaactattatcatatc

SEQ ID NO: 120983 - DNA, 25 bp, Artificial
  probe
  misc_feature (1)..(25): SEQ ID NO: 1274; WAN024CJF_at; Start 345; Stop 369
tcaaatagccttagaaattgttggg

SEQ ID NO: 120984 - DNA, 25 bp, Artificial
  probe
  misc_feature (1)..(25): SEQ ID NO: 1274; WAN024CJF_at; Start 421; Stop 445
caacgcgtccagattgctagagcaa

SEQ ID NO: 120985 - DNA, 25 bp, Artificial
  probe
  misc_feature (1)..(25): SEQ ID NO: 1274; WAN024CJF_at; Start 391; Stop 415
ttggtagaaacattgtcaggtggac

SEQ ID NO: 120986 - DNA, 25 bp, Artificial
  probe
  misc_feature (1)..(25): SEQ ID NO: 1274; WAN024CJF_at; Start 638; Stop 662
cattttttggtgatatgcgtgactt

SEQ ID NO: 120987 - DNA, 25 bp, Artificial
  probe
  misc_feature (1)..(25): SEQ ID NO: 1274; WAN024CJF_at; Start 496; Stop 520
gatactgaatctgccgaaaaatttt

SEQ ID NO: 120988 - DNA, 25 bp, Artificial
  probe
  misc_feature (1)..(25): SEQ ID NO: 1274; WAN024CJF_at; Start 872; Stop 896
taaccttacaagaaagttatttgca

SEQ ID NO: 120989 - DNA, 25 bp, Artificial
  probe
  misc_feature (1)..(25): SEQ ID NO: 1274; WAN024CJF_at; Start 750; Stop 774
taaagttcacatcgaagataatgat

SEQ ID NO: 120990 - DNA, 25 bp, Artificial
  probe
  misc_feature (1)..(25): SEQ ID NO: 1274; WAN024CJF_at; Start 481; Stop 505
cctaccgttggtttagatactgaat

SEQ ID NO: 120991 - DNA, 25 bp, Artificial
  probe
  misc_feature (1)..(25): SEQ ID NO: 1274; WAN024CJF_at; Start 197; Stop 221
aagatttgatagttagttctcaacc

SEQ ID NO: 120992 - DNA, 25 bp, Artificial
  probe
  misc_feature (1)..(25): SEQ ID NO: 1274; WAN024CJF_at; Start 625; Stop 649
aatggctccatatcattttttggtg

SEQ ID NO: 120993 - DNA, 25 bp, Artificial
  probe
  misc_feature (1)..(25): SEQ ID NO: 1274; WAN024CJF_at; Start 233; Stop 257
taggctttactcctcaaaccacagt

SEQ ID NO: 120994 - DNA, 25 bp, Artificial
  probe
  misc_feature (1)..(25): SEQ ID NO: 1274; WAN024CJF_at; Start 825; Stop 849
tgaggtaggaaaagcatgtgaaatt

SEQ ID NO: 120995 - DNA, 25 bp, Artificial
  probe
  misc_feature (1)..(25): SEQ ID NO: 1274; WAN024CJF_at; Start 568; Stop 592
tcttcacatgacataaatctactcg

SEQ ID NO: 120996 - DNA, 25 bp, Artificial
  probe
  misc_feature (1)..(25): SEQ ID NO: 1274; WAN024CJF_at; Start 214; Stop 238
tctcaaccttttgctcatttaggct

SEQ ID NO: 120997 - DNA, 25 bp, Artificial
  probe
  misc_feature (1)..(25): SEQ ID NO: 1274; WAN024CJF_at; Start 275; Stop 299
ctgtgaaggacaatgtaatattggg

SEQ ID NO: 120998 - DNA, 25 bp, Artificial
  probe
  misc_feature (1)..(25): SEQ ID NO: 1274; WAN024CJF_at; Start 86; Stop 110
agggagatttcattggcttattagg

SEQ ID NO: 120999 - DNA, 25 bp, Artificial
  probe
  misc_feature (1)..(25): SEQ ID NO: 1274; WAN024CJF_at; Start 436; Stop 460
gctagagcaatagctcataatccag

SEQ ID NO: 121000 - DNA, 25 bp, Artificial
  probe
  misc_feature (1)..(25): SEQ ID NO: 1274; WAN024CJF_at; Start 353; Stop 377
ccttagaaattgttgggttagctga

SEQ ID NO: 121001 - DNA, 25 bp, Artificial
  probe
  misc_feature (1)..(25): SEQ ID NO: 1274; WAN024CJF_at; Start 889; Stop 913
tatttgcaaagaataggaggagaaa

SEQ ID NO: 121002 - DNA, 25 bp, Artificial
  probe
  misc_feature (1)..(25): SEQ ID NO: 1274; WAN024CJF_at; Start 33; Stop 57
tgttcgttatgatgacgtaatagct

SEQ ID NO: 121003 - DNA, 25 bp, Artificial
  probe
  misc_feature (1)..(25): SEQ ID NO: 1274; WAN024CJF_at; Start 809; Stop 833
tcttagatgttatcaatgaggtagg

SEQ ID NO: 121004 - DNA, 25 bp, Artificial
  probe
  misc_feature (1)..(25): SEQ ID NO: 1274; WAN024CJF_at; Start 404; Stop 428
tgtcaggtggacaactgcaacgcgt

SEQ ID NO: 121005 - DNA, 25 bp, Artificial
  probe
  misc_feature (1)..(25): SEQ ID NO: 1274; WAN024CJF_at; Start 466; Stop 490
tatattttagatgaacctaccgttg

SEQ ID NO: 121006 - DNA, 25 bp, Artificial
  probe
  misc_feature (1)..(25): SEQ ID NO: 1274; WAN024CJF_at; Start 330; Stop 354
tgctgagaagttgtgtcaaatagcc

SEQ ID NO: 121007 - DNA, 25 bp, Artificial
  probe
  misc_feature (1)..(25): SEQ ID NO: 1274; WAN024CJF_at; Start 787; Stop 811
gaagtccctatagaagaaaagatct

SEQ ID NO: 121008 - DNA, 25 bp, Artificial
  probe
  misc_feature (1)..(25): SEQ ID NO: 1274; WAN024CJF_at; Start 771; Stop 795
tgatagttttacaatagaagtccct

SEQ ID NO: 121009 - DNA, 25 bp, Artificial
  probe
  misc_feature (1)..(25): SEQ ID NO: 4160; WAN024CJG_at; Start 214; Stop 238
ctgaaagttacattgattatcaaca

SEQ ID NO: 121010 - DNA, 25 bp, Artificial
  probe
  misc_feature (1)..(25): SEQ ID NO: 4160; WAN024CJG_at; Start 97; Stop 121
ggattgtcagattataatacttatc

SEQ ID NO: 121011 - DNA, 25 bp, Artificial
  probe
  misc_feature (1)..(25): SEQ ID NO: 4160; WAN024CJG_at; Start 207; Stop 231
tagaggactgaaagttacattgatt

SEQ ID NO: 121012 - DNA, 25 bp, Artificial
  probe
  misc_feature (1)..(25): SEQ ID NO: 4160; WAN024CJG_at; Start 1; Stop 25
gtggccgatatgaaaaataaatacg

SEQ ID NO: 121013 - DNA, 25 bp, Artificial
  probe
  misc_feature (1)..(25): SEQ ID NO: 4160; WAN024CJG_at; Start 125; Stop 149
tttatggttttatcttgaagtccta

SEQ ID NO: 121014 - DNA, 25 bp, Artificial
  probe
  misc_feature (1)..(25): SEQ ID NO: 4160; WAN024CJG_at; Start 49; Stop 73
gaattatcagaatcactagatattt

SEQ ID NO: 121015 - DNA, 25 bp, Artificial
  probe
  misc_feature (1)..(25): SEQ ID NO: 4160; WAN024CJG_at; Start 35; Stop 59
gaattattccggatgaattatcaga

SEQ ID NO: 121016 - DNA, 25 bp, Artificial
  probe
  misc_feature (1)..(25): SEQ ID NO: 4160; WAN024CJG_at; Start 279; Stop 303
tctaaaaatttatggagaagatttc

SEQ ID NO: 121017 - DNA, 25 bp, Artificial
  probe
  misc_feature (1)..(25): SEQ ID NO: 4160; WAN024CJG_at; Start 156; Stop 180
gcctcgagaaaatagatatagcata

SEQ ID NO: 121018 - DNA, 25 bp, Artificial
  probe
  misc_feature (1)..(25): SEQ ID NO: 4160; WAN024CJG_at; Start 75; Stop 99
tctaaaaaattattctgaaactgga

SEQ ID NO: 121019 - DNA, 25 bp, Artificial
  probe
  misc_feature (1)..(25): SEQ ID NO: 4160; WAN024CJG_at; Start 288; Stop 312
ttatggagaagatttcttaatatga

SEQ ID NO: 121020 - DNA, 25 bp, Artificial
  probe
  misc_feature (1)..(25): SEQ ID NO: 4160; WAN024CJG_at; Start 56; Stop 80
cagaatcactagatatttttctaaa

SEQ ID NO: 121021 - DNA, 25 bp, Artificial
  probe
  misc_feature (1)..(25): SEQ ID NO: 4160; WAN024CJG_at; Start 256; Stop 280
aattgtttggctttaaatgatggtc

SEQ ID NO: 121022 - DNA, 25 bp, Artificial
  probe
  misc_feature (1)..(25): SEQ ID NO: 4160; WAN024CJG_at; Start 188; Stop 212
tggtgaaggaattacaaaatagagg

SEQ ID NO: 121023 - DNA, 25 bp, Artificial
  probe
  misc_feature (1)..(25): SEQ ID NO: 4160; WAN024CJG_at; Start 137; Stop 161
tcttgaagtcctataaattgcctcg

SEQ ID NO: 121024 - DNA, 25 bp, Artificial
  probe
  misc_feature (1)..(25): SEQ ID NO: 4160; WAN024CJG_at; Start 228; Stop 252
gattatcaacatttattatcacgct

SEQ ID NO: 121025 - DNA, 25 bp, Artificial
  probe
  misc_feature (1)..(25): SEQ ID NO: 4160; WAN024CJG_at; Start 200; Stop 224
tacaaaatagaggactgaaagttac

SEQ ID NO: 121026 - DNA, 25 bp, Artificial
  probe
  misc_feature (1)..(25): SEQ ID NO: 4160; WAN024CJG_at; Start 243; Stop 267
ttatcacgctttaaattgtttggct

SEQ ID NO: 121027 - DNA, 25 bp, Artificial
  probe
  misc_feature (1)..(25): SEQ ID NO: 4160; WAN024CJG_at; Start 93; Stop 117
aactggattgtcagattataatact

SEQ ID NO: 121028 - DNA, 25 bp, Artificial
  probe
  misc_feature (1)..(25): SEQ ID NO: 4160; WAN024CJG_at; Start 153; Stop 177
attgcctcgagaaaatagatatagc

SEQ ID NO: 121029 - DNA, 25 bp, Artificial
  probe
  misc_feature (1)..(25): SEQ ID NO: 4160; WAN024CJG_at; Start 271; Stop 295
aatgatggtctaaaaatttatggag

SEQ ID NO: 121030 - DNA, 25 bp, Artificial
  probe
  misc_feature (1)..(25): SEQ ID NO: 4160; WAN024CJG_at; Start 82; Stop 106
aattattctgaaactggattgtcag

SEQ ID NO: 121031 - DNA, 25 bp, Artificial
  probe
  misc_feature (1)..(25): SEQ ID NO: 4160; WAN024CJG_at; Start 5; Stop 29
ccgatatgaaaaataaatacgatgt

SEQ ID NO: 121032 - DNA, 25 bp, Artificial
  probe
  misc_feature (1)..(25): SEQ ID NO: 4160; WAN024CJG_at; Start 148; Stop 172
tataaattgcctcgagaaaatagat

SEQ ID NO: 121033 - DNA, 25 bp, Artificial
  probe
  misc_feature (1)..(25): SEQ ID NO: 4160; WAN024CJG_at; Start 192; Stop 216
gaaggaattacaaaatagaggactg

SEQ ID NO: 121034 - DNA, 25 bp, Artificial
  probe
  misc_feature (1)..(25): SEQ ID NO: 4160; WAN024CJG_at; Start 196; Stop 220
gaattacaaaatagaggactgaaag

SEQ ID NO: 121035 - DNA, 25 bp, Artificial
  probe
  misc_feature (1)..(25): SEQ ID NO: 4160; WAN024CJG_at; Start 21; Stop 45
atacgatgttaaaagaattattccg

SEQ ID NO: 121036 - DNA, 25 bp, Artificial
  probe
  misc_feature (1)..(25): SEQ ID NO: 4160; WAN024CJG_at; Start 144; Stop 168
gtcctataaattgcctcgagaaaat

SEQ ID NO: 121037 - DNA, 25 bp, Artificial
  probe
  misc_feature (1)..(25): SEQ ID NO: 4160; WAN024CJG_at; Start 259; Stop 283
tgtttggctttaaatgatggtctaa

SEQ ID NO: 121038 - DNA, 25 bp, Artificial
  probe
  misc_feature (1)..(25): SEQ ID NO: 4160; WAN024CJG_at; Start 114; Stop 138
tacttatctcttttatggttttatc

SEQ ID NO: 121039 - DNA, 25 bp, Artificial
  probe
  misc_feature (1)..(25): SEQ ID NO: 4160; WAN024CJG_at; Start 25; Stop 49
gatgttaaaagaattattccggatg

SEQ ID NO: 121040 - DNA, 25 bp, Artificial
  probe
  misc_feature (1)..(25): SEQ ID NO: 4160; WAN024CJG_at; Start 160; Stop 184
cgagaaaatagatatagcataaaat

SEQ ID NO: 121041 - DNA, 25 bp, Artificial
  probe
  misc_feature (1)..(25): SEQ ID NO: 4160; WAN024CJG_at; Start 141; Stop 165
gaagtcctataaattgcctcgagaa

SEQ ID NO: 121042 - DNA, 25 bp, Artificial
  probe
  misc_feature (1)..(25): SEQ ID NO: 4160; WAN024CJG_at; Start 174; Stop 198
tagcataaaattattggtgaaggaa

SEQ ID NO: 121043 - DNA, 25 bp, Artificial
  probe
  misc_feature (1)..(25): SEQ ID NO: 1614; WAN024CJH_at; Start 94; Stop 118
aaatttggaattgtcggaagagaga

SEQ ID NO: 121044 - DNA, 25 bp, Artificial
  probe
  misc_feature (1)..(25): SEQ ID NO: 1614; WAN024CJH_at; Start 104; Stop 128
ttgtcggaagagagaaggaagcatt

SEQ ID NO: 121045 - DNA, 25 bp, Artificial
  probe
  misc_feature (1)..(25): SEQ ID NO: 1614; WAN024CJH_at; Start 40; Stop 64
ggaaatatggaagttgttggagaat

SEQ ID NO: 121046 - DNA, 25 bp, Artificial
  probe
  misc_feature (1)..(25): SEQ ID NO: 1614; WAN024CJH_at; Start 107; Stop 131
tcggaagagagaaggaagcattgct

SEQ ID NO: 121047 - DNA, 25 bp, Artificial
  probe
  misc_feature (1)..(25): SEQ ID NO: 1614; WAN024CJH_at; Start 218; Stop 242
gccattttgttagacaagatttaca

SEQ ID NO: 121048 - DNA, 25 bp, Artificial
  probe
  misc_feature (1)..(25): SEQ ID NO: 1614; WAN024CJH_at; Start 209; Stop 233
gtagcacttgccattttgttagaca

SEQ ID NO: 121049 - DNA, 25 bp, Artificial
  probe
  misc_feature (1)..(25): SEQ ID NO: 1614; WAN024CJH_at; Start 90; Stop 114
tagaaaatttggaattgtcggaaga

SEQ ID NO: 121050 - DNA, 25 bp, Artificial
  probe
  misc_feature (1)..(25): SEQ ID NO: 1614; WAN024CJH_at; Start 212; Stop 236
gcacttgccattttgttagacaaga

SEQ ID NO: 121051 - DNA, 25 bp, Artificial
  probe
  misc_feature (1)..(25): SEQ ID NO: 1614; WAN024CJH_at; Start 135; Stop 159
ccgtgacttaaatgatatggatgat

SEQ ID NO: 121052 - DNA, 25 bp, Artificial
  probe
  misc_feature (1)..(25): SEQ ID NO: 1614; WAN024CJH_at; Start 70; Stop 94
gataatcctgaaaaggtaattagaa

SEQ ID NO: 121053 - DNA, 25 bp, Artificial
  probe
  misc_feature (1)..(25): SEQ ID NO: 1614; WAN024CJH_at; Start 173; Stop 197
ttcaaaatagcgttgcatcgccttc

SEQ ID NO: 121054 - DNA, 25 bp, Artificial
  probe
  misc_feature (1)..(25): SEQ ID NO: 1614; WAN024CJH_at; Start 27; Stop 51
gaatgaacttcaaggaaatatggaa

SEQ ID NO: 121055 - DNA, 25 bp, Artificial
  probe
  misc_feature (1)..(25): SEQ ID NO: 1614; WAN024CJH_at; Start 160; Stop 184
tatgctctttcaattcaaaatagcg

SEQ ID NO: 121056 - DNA, 25 bp, Artificial
  probe
  misc_feature (1)..(25): SEQ ID NO: 1614; WAN024CJH_at; Start 230; Stop 254
gacaagatttacaatccgcactaac

SEQ ID NO: 121057 - DNA, 25 bp, Artificial
  probe
  misc_feature (1)..(25): SEQ ID NO: 1614; WAN024CJH_at; Start 200; Stop 224
gggcacatagtagcacttgccattt

SEQ ID NO: 121058 - DNA, 25 bp, Artificial
  probe
  misc_feature (1)..(25): SEQ ID NO: 1614; WAN024CJH_at; Start 186; Stop 210
tgcatcgccttctggggcacatagt

SEQ ID NO: 121059 - DNA, 25 bp, Artificial
  probe
  misc_feature (1)..(25): SEQ ID NO: 1614; WAN024CJH_at; Start 169; Stop 193
tcaattcaaaatagcgttgcatcgc

SEQ ID NO: 121060 - DNA, 25 bp, Artificial
  probe
  misc_feature (1)..(25): SEQ ID NO: 1614; WAN024CJH_at; Start 233; Stop 257
aagatttacaatccgcactaactaa

SEQ ID NO: 121061 - DNA, 25 bp, Artificial
  probe
  misc_feature (1)..(25): SEQ ID NO: 1614; WAN024CJH_at; Start 102; Stop 126
aattgtcggaagagagaaggaagca

SEQ ID NO: 121062 - DNA, 25 bp, Artificial
  probe
  misc_feature (1)..(25): SEQ ID NO: 1614; WAN024CJH_at; Start 143; Stop 167
taaatgatatggatgattatgctct

SEQ ID NO: 121063 - DNA, 25 bp, Artificial
  probe
  misc_feature (1)..(25): SEQ ID NO: 1614; WAN024CJH_at; Start 129; Stop 153
gctaatccgtgacttaaatgatatg

SEQ ID NO: 121064 - DNA, 25 bp, Artificial
  probe
  misc_feature (1)..(25): SEQ ID NO: 1614; WAN024CJH_at; Start 202; Stop 226
gcacatagtagcacttgccattttg

SEQ ID NO: 121065 - DNA, 25 bp, Artificial
  probe
  misc_feature (1)..(25): SEQ ID NO: 1614; WAN024CJH_at; Start 177; Stop 201
aaatagcgttgcatcgccttctggg

SEQ ID NO: 121066 - DNA, 25 bp, Artificial
  probe
  misc_feature (1)..(25): SEQ ID NO: 1614; WAN024CJH_at; Start 58; Stop 82
ggagaattttttgataatcctgaaa

SEQ ID NO: 121067 - DNA, 25 bp, Artificial
  probe
  misc_feature (1)..(25): SEQ ID NO: 1614; WAN024CJH_at; Start 117; Stop 141
gaaggaagcattgctaatccgtgac

SEQ ID NO: 121068 - DNA, 25 bp, Artificial
  probe
  misc_feature (1)..(25): SEQ ID NO: 1614; WAN024CJH_at; Start 10; Stop 34
caaatgaaagctttcttgaatgaac

SEQ ID NO: 121069 - DNA, 25 bp, Artificial
  probe
  misc_feature (1)..(25): SEQ ID NO: 1614; WAN024CJH_at; Start 163; Stop 187
gctctttcaattcaaaatagcgttg

SEQ ID NO: 121070 - DNA, 25 bp, Artificial
  probe
  misc_feature (1)..(25): SEQ ID NO: 1614; WAN024CJH_at; Start 121; Stop 145
gaagcattgctaatccgtgacttaa

SEQ ID NO: 121071 - DNA, 25 bp, Artificial
  probe
  misc_feature (1)..(25): SEQ ID NO: 1614; WAN024CJH_at; Start 15; Stop 39
gaaagctttcttgaatgaacttcaa

SEQ ID NO: 121072 - DNA, 25 bp, Artificial
  probe
  misc_feature (1)..(25): SEQ ID NO: 1614; WAN024CJH_at; Start 225; Stop 249
tgttagacaagatttacaatccgca

SEQ ID NO: 121073 - DNA, 25 bp, Artificial
  probe
  misc_feature (1)..(25): SEQ ID NO: 1614; WAN024CJH_at; Start 113; Stop 137
gagagaaggaagcattgctaatccg

SEQ ID NO: 121074 - DNA, 25 bp, Artificial
  probe
  misc_feature (1)..(25): SEQ ID NO: 1614; WAN024CJH_at; Start 153; Stop 177
ggatgattatgctctttcaattcaa

SEQ ID NO: 121075 - DNA, 25 bp, Artificial
  probe
  misc_feature (1)..(25): SEQ ID NO: 1614; WAN024CJH_at; Start 3; Stop 27
gagtagtcaaatgaaagctttcttg

SEQ ID NO: 121076 - DNA, 25 bp, Artificial
  probe
  misc_feature (1)..(25): SEQ ID NO: 1614; WAN024CJH_at; Start 37; Stop 61
caaggaaatatggaagttgttggag

SEQ ID NO: 121077 - DNA, 25 bp, Artificial
  probe
  misc_feature (1)..(25): SEQ ID NO: 7676; WAN024CJI_at; Start 5; Stop 29
cagtacaggtattttggaaaggaag

SEQ ID NO: 121078 - DNA, 25 bp, Artificial
  probe
  misc_feature (1)..(25): SEQ ID NO: 7676; WAN024CJI_at; Start 188; Stop 212
tagagatatggttcaccctttggca

SEQ ID NO: 121079 - DNA, 25 bp, Artificial
  probe
  misc_feature (1)..(25): SEQ ID NO: 7676; WAN024CJI_at; Start 194; Stop 218
tatggttcaccctttggcaatctca

SEQ ID NO: 121080 - DNA, 25 bp, Artificial
  probe
  misc_feature (1)..(25): SEQ ID NO: 7676; WAN024CJI_at; Start 61; Stop 85
cgaaaacaatttcgcctaacagatg

SEQ ID NO: 121081 - DNA, 25 bp, Artificial
  probe
  misc_feature (1)..(25): SEQ ID NO: 7676; WAN024CJI_at; Start 73; Stop 97
cgcctaacagatgaagaggaaaagc

SEQ ID NO: 121082 - DNA, 25 bp, Artificial
  probe
  misc_feature (1)..(25): SEQ ID NO: 7676; WAN024CJI_at; Start 342; Stop 366
tggcaactccattcctctcagtcaa

SEQ ID NO: 121083 - DNA, 25 bp, Artificial
  probe
  misc_feature (1)..(25): SEQ ID NO: 7676; WAN024CJI_at; Start 67; Stop 91
caatttcgcctaacagatgaagagg

SEQ ID NO: 121084 - DNA, 25 bp, Artificial
  probe
  misc_feature (1)..(25): SEQ ID NO: 7676; WAN024CJI_at; Start 254; Stop 278
ttttaatttcgatccagtcagaacg

SEQ ID NO: 121085 - DNA, 25 bp, Artificial
  probe
  misc_feature (1)..(25): SEQ ID NO: 7676; WAN024CJI_at; Start 75; Stop 99
cctaacagatgaagaggaaaagcaa

SEQ ID NO: 121086 - DNA, 25 bp, Artificial
  probe
  misc_feature (1)..(25): SEQ ID NO: 7676; WAN024CJI_at; Start 127; Stop 151
gatactaatttttcagattttctcc

SEQ ID NO: 121087 - DNA, 25 bp, Artificial
  probe
  misc_feature (1)..(25): SEQ ID NO: 7676; WAN024CJI_at; Start 52; Stop 76
cgtgatattcgaaaacaatttcgcc

SEQ ID NO: 121088 - DNA, 25 bp, Artificial
  probe
  misc_feature (1)..(25): SEQ ID NO: 7676; WAN024CJI_at; Start 250; Stop 274
gagattttaatttcgatccagtcag

SEQ ID NO: 121089 - DNA, 25 bp, Artificial
  probe
  misc_feature (1)..(25): SEQ ID NO: 7676; WAN024CJI_at; Start 202; Stop 226
accctttggcaatctcaaaaactag

SEQ ID NO: 121090 - DNA, 25 bp, Artificial
  probe
  misc_feature (1)..(25): SEQ ID NO: 7676; WAN024CJI_at; Start 2; Stop 26
tgtcagtacaggtattttggaaagg

SEQ ID NO: 121091 - DNA, 25 bp, Artificial
  probe
  misc_feature (1)..(25): SEQ ID NO: 7676; WAN024CJI_at; Start 181; Stop 205
aaacagatagagatatggttcaccc

SEQ ID NO: 121092 - DNA, 25 bp, Artificial
  probe
  misc_feature (1)..(25): SEQ ID NO: 7676; WAN024CJI_at; Start 311; Stop 335
taacctgcgtacaggaattgattaa

SEQ ID NO: 121093 - DNA, 25 bp, Artificial
  probe
  misc_feature (1)..(25): SEQ ID NO: 7676; WAN024CJI_at; Start 29; Stop 53
gtagtagtatgaaacgagacgtgcg

SEQ ID NO: 121094 - DNA, 25 bp, Artificial
  probe
  misc_feature (1)..(25): SEQ ID NO: 7676; WAN024CJI_at; Start 35; Stop 59
gtatgaaacgagacgtgcgtgatat

SEQ ID NO: 121095 - DNA, 25 bp, Artificial
  probe
  misc_feature (1)..(25): SEQ ID NO: 7676; WAN024CJI_at; Start 258; Stop 282
aatttcgatccagtcagaacgtcaa

SEQ ID NO: 121096 - DNA, 25 bp, Artificial
  probe
  misc_feature (1)..(25): SEQ ID NO: 7676; WAN024CJI_at; Start 114; Stop 138
gagagagcagggagatactaatttt

SEQ ID NO: 121097 - DNA, 25 bp, Artificial
  probe
  misc_feature (1)..(25): SEQ ID NO: 7676; WAN024CJI_at; Start 314; Stop 338
cctgcgtacaggaattgattaaaga

SEQ ID NO: 121098 - DNA, 25 bp, Artificial
  probe
  misc_feature (1)..(25): SEQ ID NO: 7676; WAN024CJI_at; Start 190; Stop 214
gagatatggttcaccctttggcaat

SEQ ID NO: 121099 - DNA, 25 bp, Artificial
  probe
  misc_feature (1)..(25): SEQ ID NO: 7676; WAN024CJI_at; Start 353; Stop 377
ttcctctcagtcaagacttccaaga

SEQ ID NO: 121100 - DNA, 25 bp, Artificial
  probe
  misc_feature (1)..(25): SEQ ID NO: 7676; WAN024CJI_at; Start 33; Stop 57
tagtatgaaacgagacgtgcgtgat

SEQ ID NO: 121101 - DNA, 25 bp, Artificial
  probe
  misc_feature (1)..(25): SEQ ID NO: 7676; WAN024CJI_at; Start 184; Stop 208
cagatagagatatggttcacccttt

SEQ ID NO: 121102 - DNA, 25 bp, Artificial
  probe
  misc_feature (1)..(25): SEQ ID NO: 7676; WAN024CJI_at; Start 337; Stop 361
gaagttggcaactccattcctctca

SEQ ID NO: 121103 - DNA, 25 bp, Artificial
  probe
  misc_feature (1)..(25): SEQ ID NO: 7676; WAN024CJI_at; Start 25; Stop 49
ggaagtagtagtatgaaacgagacg

SEQ ID NO: 121104 - DNA, 25 bp, Artificial
  probe
  misc_feature (1)..(25): SEQ ID NO: 7676; WAN024CJI_at; Start 19; Stop 43
tggaaaggaagtagtagtatgaaac

SEQ ID NO: 121105 - DNA, 25 bp, Artificial
  probe
  misc_feature (1)..(25): SEQ ID NO: 7676; WAN024CJI_at; Start 329; Stop 353
tgattaaagaagttggcaactccat

SEQ ID NO: 121106 - DNA, 25 bp, Artificial
  probe
  misc_feature (1)..(25): SEQ ID NO: 7676; WAN024CJI_at; Start 358; Stop 382
ctcagtcaagacttccaagacaaat

SEQ ID NO: 121107 - DNA, 25 bp, Artificial
  probe
  misc_feature (1)..(25): SEQ ID NO: 7676; WAN024CJI_at; Start 366; Stop 390
agacttccaagacaaatatatgagg

SEQ ID NO: 121108 - DNA, 25 bp, Artificial
  probe
  misc_feature (1)..(25): SEQ ID NO: 7676; WAN024CJI_at; Start 241; Stop 265
gatgttcatgagattttaatttcga

SEQ ID NO: 121109 - DNA, 25 bp, Artificial
  probe
  misc_feature (1)..(25): SEQ ID NO: 7676; WAN024CJI_at; Start 120; Stop 144
gcagggagatactaatttttcagat

SEQ ID NO: 121110 - DNA, 25 bp, Artificial
  probe
  misc_feature (1)..(25): SEQ ID NO: 7676; WAN024CJI_at; Start 178; Stop 202
caaaaacagatagagatatggttca

SEQ ID NO: 121111 - DNA, 25 bp, Artificial
  probe
  misc_feature (1)..(25): SEQ ID NO: 842; WAN024CJJ_at; Start 158; Stop 182
catggtttgccctctggcaatccca

SEQ ID NO: 121112 - DNA, 25 bp, Artificial
  probe
  misc_feature (1)..(25): SEQ ID NO: 842; WAN024CJJ_at; Start 150; Stop 174
gatggagacatggtttgccctctgg

SEQ ID NO: 121113 - DNA, 25 bp, Artificial
  probe
  misc_feature (1)..(25): SEQ ID NO: 842; WAN024CJJ_at; Start 37; Stop 61
cgtttaacagaagcagaagaaaagc

SEQ ID NO: 121114 - DNA, 25 bp, Artificial
  probe
  misc_feature (1)..(25): SEQ ID NO: 842; WAN024CJJ_at; Start 161; Stop 185
ggtttgccctctggcaatcccaaaa

SEQ ID NO: 121115 - DNA, 25 bp, Artificial
  probe
  misc_feature (1)..(25): SEQ ID NO: 842; WAN024CJJ_at; Start 324; Stop 348
cagtaaagaatttcgtgagaagtac

SEQ ID NO: 121116 - DNA, 25 bp, Artificial
  probe
  misc_feature (1)..(25): SEQ ID NO: 842; WAN024CJJ_at; Start 31; Stop 55
caatttcgtttaacagaagcagaag

SEQ ID NO: 121117 - DNA, 25 bp, Artificial
  probe
  misc_feature (1)..(25): SEQ ID NO: 842; WAN024CJJ_at; Start 317; Stop 341
tacccctcagtaaagaatttcgtga

SEQ ID NO: 121118 - DNA, 25 bp, Artificial
  probe
  misc_feature (1)..(25): SEQ ID NO: 842; WAN024CJJ_at; Start 166; Stop 190
gccctctggcaatcccaaaaactag

SEQ ID NO: 121119 - DNA, 25 bp, Artificial
  probe
  misc_feature (1)..(25): SEQ ID NO: 842; WAN024CJJ_at; Start 296; Stop 320
ttcaagaggttgcaaacaccatacc

SEQ ID NO: 121120 - DNA, 25 bp, Artificial
  probe
  misc_feature (1)..(25): SEQ ID NO: 842; WAN024CJJ_at; Start 146; Stop 170
aacagatggagacatggtttgccct

SEQ ID NO: 121121 - DNA, 25 bp, Artificial
  probe
  misc_feature (1)..(25): SEQ ID NO: 842; WAN024CJJ_at; Start 293; Stop 317
tgattcaagaggttgcaaacaccat

SEQ ID NO: 121122 - DNA, 25 bp, Artificial
  probe
  misc_feature (1)..(25): SEQ ID NO: 842; WAN024CJJ_at; Start 307; Stop 331
gcaaacaccatacccctcagtaaag

SEQ ID NO: 121123 - DNA, 25 bp, Artificial
  probe
  misc_feature (1)..(25): SEQ ID NO: 842; WAN024CJJ_at; Start 303; Stop 327
ggttgcaaacaccatacccctcagt

SEQ ID NO: 121124 - DNA, 25 bp, Artificial
  probe
  misc_feature (1)..(25): SEQ ID NO: 842; WAN024CJJ_at; Start 288; Stop 312
ggaattgattcaagaggttgcaaac

SEQ ID NO: 121125 - DNA, 25 bp, Artificial
  probe
  misc_feature (1)..(25): SEQ ID NO: 842; WAN024CJJ_at; Start 193; Stop 217
caaatcagtcgtgacgttcatgaag

SEQ ID NO: 121126 - DNA, 25 bp, Artificial
  probe
  misc_feature (1)..(25): SEQ ID NO: 842; WAN024CJJ_at; Start 222; Stop 246
aatcttggcacagtcagaacgtcaa

SEQ ID NO: 121127 - DNA, 25 bp, Artificial
  probe
  misc_feature (1)..(25): SEQ ID NO: 842; WAN024CJJ_at; Start 339; Stop 363
tgagaagtacatgaggctaactaat

SEQ ID NO: 121128 - DNA, 25 bp, Artificial
  probe
  misc_feature (1)..(25): SEQ ID NO: 842; WAN024CJJ_at; Start 220; Stop 244
ttaatcttggcacagtcagaacgtc

SEQ ID NO: 121129 - DNA, 25 bp, Artificial
  probe
  misc_feature (1)..(25): SEQ ID NO: 842; WAN024CJJ_at; Start 95; Stop 119
ctaatttctctgattttcttcgtaa

SEQ ID NO: 121130 - DNA, 25 bp, Artificial
  probe
  misc_feature (1)..(25): SEQ ID NO: 842; WAN024CJJ_at; Start 331; Stop 355
gaatttcgtgagaagtacatgaggc

SEQ ID NO: 121131 - DNA, 25 bp, Artificial
  probe
  misc_feature (1)..(25): SEQ ID NO: 842; WAN024CJJ_at; Start 314; Stop 338
ccatacccctcagtaaagaatttcg

SEQ ID NO: 121132 - DNA, 25 bp, Artificial
  probe
  misc_feature (1)..(25): SEQ ID NO: 842; WAN024CJJ_at; Start 336; Stop 360
tcgtgagaagtacatgaggctaact

SEQ ID NO: 121133 - DNA, 25 bp, Artificial
  probe
  misc_feature (1)..(25): SEQ ID NO: 842; WAN024CJJ_at; Start 49; Stop 73
gcagaagaaaagcaaattctagctt

SEQ ID NO: 121134 - DNA, 25 bp, Artificial
  probe
  misc_feature (1)..(25): SEQ ID NO: 842; WAN024CJJ_at; Start 214; Stop 238
gaagttttaatcttggcacagtcag

SEQ ID NO: 121135 - DNA, 25 bp, Artificial
  probe
  misc_feature (1)..(25): SEQ ID NO: 842; WAN024CJJ_at; Start 207; Stop 231
cgttcatgaagttttaatcttggca

SEQ ID NO: 121136 - DNA, 25 bp, Artificial
  probe
  misc_feature (1)..(25): SEQ ID NO: 842; WAN024CJJ_at; Start 299; Stop 323
aagaggttgcaaacaccatacccct

SEQ ID NO: 121137 - DNA, 25 bp, Artificial
  probe
  misc_feature (1)..(25): SEQ ID NO: 842; WAN024CJJ_at; Start 87; Stop 111
gggagagactaatttctctgatttt

SEQ ID NO: 121138 - DNA, 25 bp, Artificial
  probe
  misc_feature (1)..(25): SEQ ID NO: 842; WAN024CJJ_at; Start 142; Stop 166
caaaaacagatggagacatggtttg

SEQ ID NO: 121139 - DNA, 25 bp, Artificial
  probe
  misc_feature (1)..(25): SEQ ID NO: 842; WAN024CJJ_at; Start 274; Stop 298
ttaacgtgcgtgcaggaattgattc

SEQ ID NO: 121140 - DNA, 25 bp, Artificial
  probe
  misc_feature (1)..(25): SEQ ID NO: 842; WAN024CJJ_at; Start 201; Stop 225
tcgtgacgttcatgaagttttaatc

SEQ ID NO: 121141 - DNA, 25 bp, Artificial
  probe
  misc_feature (1)..(25): SEQ ID NO: 842; WAN024CJJ_at; Start 276; Stop 300
aacgtgcgtgcaggaattgattcaa

SEQ ID NO: 121142 - DNA, 25 bp, Artificial
  probe
  misc_feature (1)..(25): SEQ ID NO: 842; WAN024CJJ_at; Start 153; Stop 177
ggagacatggtttgccctctggcaa

SEQ ID NO: 121143 - DNA, 25 bp, Artificial
  probe
  misc_feature (1)..(25): SEQ ID NO: 842; WAN024CJJ_at; Start 198; Stop 222
cagtcgtgacgttcatgaagtttta

SEQ ID NO: 121144 - DNA, 25 bp, Artificial
  probe
  misc_feature (1)..(25): SEQ ID NO: 842; WAN024CJJ_at; Start 41; Stop 65
taacagaagcagaagaaaagcaaat

SEQ ID NO: 121145 - DNA, 25 bp, Artificial
  probe
  misc_feature (1)..(25): SEQ ID NO: 2510; WAN024CJK_at; Start 23; Stop 47
gagacgacttggacaagatgtttga

SEQ ID NO: 121146 - DNA, 25 bp, Artificial
  probe
  misc_feature (1)..(25): SEQ ID NO: 2510; WAN024CJK_at; Start 17; Stop 41
caaaacgagacgacttggacaagat

SEQ ID NO: 121147 - DNA, 25 bp, Artificial
  probe
  misc_feature (1)..(25): SEQ ID NO: 2510; WAN024CJK_at; Start 27; Stop 51
cgacttggacaagatgtttgaagag

SEQ ID NO: 121148 - DNA, 25 bp, Artificial
  probe
  misc_feature (1)..(25): SEQ ID NO: 2510; WAN024CJK_at; Start 18; Stop 42
aaaacgagacgacttggacaagatg

SEQ ID NO: 121149 - DNA, 25 bp, Artificial
  probe
  misc_feature (1)..(25): SEQ ID NO: 2510; WAN024CJK_at; Start 31; Stop 55
ttggacaagatgtttgaagagtttg

SEQ ID NO: 121150 - DNA, 25 bp, Artificial
  probe
  misc_feature (1)..(25): SEQ ID NO: 2510; WAN024CJK_at; Start 14; Stop 38
ttacaaaacgagacgacttggacaa

SEQ ID NO: 121151 - DNA, 25 bp, Artificial
  probe
  misc_feature (1)..(25): SEQ ID NO: 2510; WAN024CJK_at; Start 33; Stop 57
ggacaagatgtttgaagagtttgct

SEQ ID NO: 121152 - DNA, 25 bp, Artificial
  probe
  misc_feature (1)..(25): SEQ ID NO: 2510; WAN024CJK_at; Start 15; Stop 39
tacaaaacgagacgacttggacaag

SEQ ID NO: 121153 - DNA, 25 bp, Artificial
  probe
  misc_feature (1)..(25): SEQ ID NO: 2510; WAN024CJK_at; Start 30; Stop 54
cttggacaagatgtttgaagagttt

SEQ ID NO: 121154 - DNA, 25 bp, Artificial
  probe
  misc_feature (1)..(25): SEQ ID NO: 2510; WAN024CJK_at; Start 24; Stop 48
agacgacttggacaagatgtttgaa

SEQ ID NO: 121155 - DNA, 25 bp, Artificial
  probe
  misc_feature (1)..(25): SEQ ID NO: 2510; WAN024CJK_at; Start 19; Stop 43
aaacgagacgacttggacaagatgt

SEQ ID NO: 121156 - DNA, 25 bp, Artificial
  probe
  misc_feature (1)..(25): SEQ ID NO: 2510; WAN024CJK_at; Start 25; Stop 49
gacgacttggacaagatgtttgaag

SEQ ID NO: 121157 - DNA, 25 bp, Artificial
  probe
  misc_feature (1)..(25): SEQ ID NO: 2510; WAN024CJK_at; Start 21; Stop 45
acgagacgacttggacaagatgttt

SEQ ID NO: 121158 - DNA, 25 bp, Artificial
  probe
  misc_feature (1)..(25): SEQ ID NO: 2510; WAN024CJK_at; Start 29; Stop 53
acttggacaagatgtttgaagagtt

SEQ ID NO: 121159 - DNA, 25 bp, Artificial
  probe
  misc_feature (1)..(25): SEQ ID NO: 2510; WAN024CJK_at; Start 20; Stop 44
aacgagacgacttggacaagatgtt

SEQ ID NO: 121160 - DNA, 25 bp, Artificial
  probe
  misc_feature (1)..(25): SEQ ID NO: 2510; WAN024CJK_at; Start 13; Stop 37
tttacaaaacgagacgacttggaca

SEQ ID NO: 121161 - DNA, 25 bp, Artificial
  probe
  misc_feature (1)..(25): SEQ ID NO: 2510; WAN024CJK_at; Start 85; Stop 109
ttccctgatgacaaagagaaaaaag

SEQ ID NO: 121162 - DNA, 25 bp, Artificial
  probe
  misc_feature (1)..(25): SEQ ID NO: 2510; WAN024CJK_at; Start 28; Stop 52
gacttggacaagatgtttgaagagt

SEQ ID NO: 121163 - DNA, 25 bp, Artificial
  probe
  misc_feature (1)..(25): SEQ ID NO: 2510; WAN024CJK_at; Start 22; Stop 46
cgagacgacttggacaagatgtttg

SEQ ID NO: 121164 - DNA, 25 bp, Artificial
  probe
  misc_feature (1)..(25): SEQ ID NO: 2510; WAN024CJK_at; Start 16; Stop 40
acaaaacgagacgacttggacaaga

SEQ ID NO: 121165 - DNA, 25 bp, Artificial
  probe
  misc_feature (1)..(25): SEQ ID NO: 2510; WAN024CJK_at; Start 26; Stop 50
acgacttggacaagatgtttgaaga

SEQ ID NO: 121166 - DNA, 25 bp, Artificial
  probe
  misc_feature (1)..(25): SEQ ID NO: 2510; WAN024CJK_at; Start 32; Stop 56
tggacaagatgtttgaagagtttgc

SEQ ID NO: 121167 - DNA, 25 bp, Artificial
  probe
  misc_feature (1)..(25): SEQ ID NO: 2226; WAN024CJL_at; Start 291; Stop 315
ccagtctgaaaaggattgtagtaag

SEQ ID NO: 121168 - DNA, 25 bp, Artificial
  probe
  misc_feature (1)..(25): SEQ ID NO: 2226; WAN024CJL_at; Start 141; Stop 165
gcaactatttattaccgccaagcag

SEQ ID NO: 121169 - DNA, 25 bp, Artificial
  probe
  misc_feature (1)..(25): SEQ ID NO: 2226; WAN024CJL_at; Start 672; Stop 696
taacgacagaaaagatagtcaccct

SEQ ID NO: 121170 - DNA, 25 bp, Artificial
  probe
  misc_feature (1)..(25): SEQ ID NO: 2226; WAN024CJL_at; Start 93; Stop 117
tctagtagacggaaaaaagcagcag

SEQ ID NO: 121171 - DNA, 25 bp, Artificial
  probe
  misc_feature (1)..(25): SEQ ID NO: 2226; WAN024CJL_at; Start 858; Stop 882
cgaacaagtccaaaaactgctaggt

SEQ ID NO: 121172 - DNA, 25 bp, Artificial
  probe
  misc_feature (1)..(25): SEQ ID NO: 2226; WAN024CJL_at; Start 153; Stop 177
taccgccaagcaggtagagggctgt

SEQ ID NO: 121173 - DNA, 25 bp, Artificial
  probe
  misc_feature (1)..(25): SEQ ID NO: 2226; WAN024CJL_at; Start 543; Stop 567
ggagcttgtacagttgaatcgttca

SEQ ID NO: 121174 - DNA, 25 bp, Artificial
  probe
  misc_feature (1)..(25): SEQ ID NO: 2226; WAN024CJL_at; Start 843; Stop 867
taaaggtatgcctatcgaacaagtc

SEQ ID NO: 121175 - DNA, 25 bp, Artificial
  probe
  misc_feature (1)..(25): SEQ ID NO: 2226; WAN024CJL_at; Start 54; Stop 78
tgaacaattactagcgttgagagag

SEQ ID NO: 121176 - DNA, 25 bp, Artificial
  probe
  misc_feature (1)..(25): SEQ ID NO: 2226; WAN024CJL_at; Start 876; Stop 900
gctaggtcatagcaagattgacaca

SEQ ID NO: 121177 - DNA, 25 bp, Artificial
  probe
  misc_feature (1)..(25): SEQ ID NO: 2226; WAN024CJL_at; Start 812; Stop 836
tcagaagaactttagcgactaaggc

SEQ ID NO: 121178 - DNA, 25 bp, Artificial
  probe
  misc_feature (1)..(25): SEQ ID NO: 2226; WAN024CJL_at; Start 202; Stop 226
cagaggacgattgaaaacttgttta

SEQ ID NO: 121179 - DNA, 25 bp, Artificial
  probe
  misc_feature (1)..(25): SEQ ID NO: 2226; WAN024CJL_at; Start 20; Stop 44
ttatcatgcaagaaatgttacctct

SEQ ID NO: 121180 - DNA, 25 bp, Artificial
  probe
  misc_feature (1)..(25): SEQ ID NO: 2226; WAN024CJL_at; Start 792; Stop 816
aaaggttcacccacataagttcaga

SEQ ID NO: 121181 - DNA, 25 bp, Artificial
  probe
  misc_feature (1)..(25): SEQ ID NO: 2226; WAN024CJL_at; Start 687; Stop 711
tagtcaccctgctctttttgtaacg

SEQ ID NO: 121182 - DNA, 25 bp, Artificial
  probe
  misc_feature (1)..(25): SEQ ID NO: 2226; WAN024CJL_at; Start 226; Stop 250
aatgctattaaagagtctgtgacac

SEQ ID NO: 121183 - DNA, 25 bp, Artificial
  probe
  misc_feature (1)..(25): SEQ ID NO: 2226; WAN024CJL_at; Start 243; Stop 267
tgtgacacaactcacaacagatgat

SEQ ID NO: 121184 - DNA, 25 bp, Artificial
  probe
  misc_feature (1)..(25): SEQ ID NO: 2226; WAN024CJL_at; Start 272; Stop 296
ggagttatttagcaaattaccagtc

SEQ ID NO: 121185 - DNA, 25 bp, Artificial
  probe
  misc_feature (1)..(25): SEQ ID NO: 2226; WAN024CJL_at; Start 777; Stop 801
caaactcggcatacaaaaggttcac

SEQ ID NO: 121186 - DNA, 25 bp, Artificial
  probe
  misc_feature (1)..(25): SEQ ID NO: 2226; WAN024CJL_at; Start 764; Stop 788
gaaagttaggagacaaactcggcat

SEQ ID NO: 121187 - DNA, 25 bp, Artificial
  probe
  misc_feature (1)..(25): SEQ ID NO: 2226; WAN024CJL_at; Start 506; Stop 530
taatagacctactagcatcgacagg

SEQ ID NO: 121188 - DNA, 25 bp, Artificial
  probe
  misc_feature (1)..(25): SEQ ID NO: 2226; WAN024CJL_at; Start 362; Stop 386
ggcttgagcaagaggaatatatcat

SEQ ID NO: 121189 - DNA, 25 bp, Artificial
  probe
  misc_feature (1)..(25): SEQ ID NO: 2226; WAN024CJL_at; Start 491; Stop 515
tgagagatttggcaataatagacct

SEQ ID NO: 121190 - DNA, 25 bp, Artificial
  probe
  misc_feature (1)..(25): SEQ ID NO: 2226; WAN024CJL_at; Start 121; Stop 145
tattcgaataataacctgttgcaac

SEQ ID NO: 121191 - DNA, 25 bp, Artificial
  probe
  misc_feature (1)..(25): SEQ ID NO: 2226; WAN024CJL_at; Start 606; Stop 630
taaaggaaagaaggagagaccagta

SEQ ID NO: 121192 - DNA, 25 bp, Artificial
  probe
  misc_feature (1)..(25): SEQ ID NO: 2226; WAN024CJL_at; Start 435; Stop 459
gaaggaaacttatactgatgaacat

SEQ ID NO: 121193 - DNA, 25 bp, Artificial
  probe
  misc_feature (1)..(25): SEQ ID NO: 2226; WAN024CJL_at; Start 171; Stop 195
gggctgtagctcaaaaacaattcgt

SEQ ID NO: 121194 - DNA, 25 bp, Artificial
  probe
  misc_feature (1)..(25): SEQ ID NO: 2226; WAN024CJL_at; Start 468; Stop 492
tatgcgtgataactgtgaaaatttg

SEQ ID NO: 121195 - DNA, 25 bp, Artificial
  probe
  misc_feature (1)..(25): SEQ ID NO: 2226; WAN024CJL_at; Start 585; Stop 609
cagagagtgtgttgtctttggtaaa

SEQ ID NO: 121196 - DNA, 25 bp, Artificial
  probe
  misc_feature (1)..(25): SEQ ID NO: 2226; WAN024CJL_at; Start 742; Stop 766
gctggtgtagagattcgcttaagaa

SEQ ID NO: 121197 - DNA, 25 bp, Artificial
  probe
  misc_feature (1)..(25): SEQ ID NO: 2226; WAN024CJL_at; Start 518; Stop 542
tagcatcgacaggtatgcgtgtagg

SEQ ID NO: 121198 - DNA, 25 bp, Artificial
  probe
  misc_feature (1)..(25): SEQ ID NO: 2226; WAN024CJL_at; Start 826; Stop 850
gcgactaaggcaattgataaaggta

SEQ ID NO: 121199 - DNA, 25 bp, Artificial
  probe
  misc_feature (1)..(25): SEQ ID NO: 2226; WAN024CJL_at; Start 420; Stop 444
gactgagcaaaatgtgaaggaaact

SEQ ID NO: 121200 - DNA, 25 bp, Artificial
  probe
  misc_feature (1)..(25): SEQ ID NO: 2226; WAN024CJL_at; Start 68; Stop 92
cgttgagagagagtttagaacatca

SEQ ID NO: 121201 - DNA, 25 bp, Artificial
  probe
  misc_feature (1)..(25): SEQ ID NO: 7445; WAN024CJM_at; Start 57; Stop 81
tatcaattggacaaatagtatcgtt

SEQ ID NO: 121202 - DNA, 25 bp, Artificial
  probe
  misc_feature (1)..(25): SEQ ID NO: 7445; WAN024CJM_at; Start 27; Stop 51
tttattagcattagcaaaaacatgc

SEQ ID NO: 121203 - DNA, 25 bp, Artificial
  probe
  misc_feature (1)..(25): SEQ ID NO: 7445; WAN024CJM_at; Start 66; Stop 90
gacaaatagtatcgttgctttatca

SEQ ID NO: 121204 - DNA, 25 bp, Artificial
  probe
  misc_feature (1)..(25): SEQ ID NO: 7445; WAN024CJM_at; Start 11; Stop 35
cgaagaaagcagttcttttattagc

SEQ ID NO: 121205 - DNA, 25 bp, Artificial
  probe
  misc_feature (1)..(25): SEQ ID NO: 7445; WAN024CJM_at; Start 78; Stop 102
cgttgctttatcaaaaattgttgga

SEQ ID NO: 121206 - DNA, 25 bp, Artificial
  probe
  misc_feature (1)..(25): SEQ ID NO: 7445; WAN024CJM_at; Start 50; Stop 74
gcttctttatcaattggacaaatag

SEQ ID NO: 121207 - DNA, 25 bp, Artificial
  probe
  misc_feature (1)..(25): SEQ ID NO: 7445; WAN024CJM_at; Start 20; Stop 44
cagttcttttattagcattagcaaa

SEQ ID NO: 121208 - DNA, 25 bp, Artificial
  probe
  misc_feature (1)..(25): SEQ ID NO: 7445; WAN024CJM_at; Start 24; Stop 48
tcttttattagcattagcaaaaaca

SEQ ID NO: 121209 - DNA, 25 bp, Artificial
  probe
  misc_feature (1)..(25): SEQ ID NO: 7445; WAN024CJM_at; Start 70; Stop 94
aatagtatcgttgctttatcaaaaa

SEQ ID NO: 121210 - DNA, 25 bp, Artificial
  probe
  misc_feature (1)..(25): SEQ ID NO: 7445; WAN024CJM_at; Start 63; Stop 87
ttggacaaatagtatcgttgcttta

SEQ ID NO: 121211 - DNA, 25 bp, Artificial
  probe
  misc_feature (1)..(25): SEQ ID NO: 7445; WAN024CJM_at; Start 73; Stop 97
agtatcgttgctttatcaaaaattg

SEQ ID NO: 121212 - DNA, 25 bp, Artificial
  probe
  misc_feature (1)..(25): SEQ ID NO: 7445; WAN024CJM_at; Start 68; Stop 92
caaatagtatcgttgctttatcaaa

SEQ ID NO: 121213 - DNA, 25 bp, Artificial
  probe
  misc_feature (1)..(25): SEQ ID NO: 7445; WAN024CJM_at; Start 19; Stop 43
gcagttcttttattagcattagcaa

SEQ ID NO: 121214 - DNA, 25 bp, Artificial
  probe
  misc_feature (1)..(25): SEQ ID NO: 7445; WAN024CJM_at; Start 32; Stop 56
tagcattagcaaaaacatgcttctt

SEQ ID NO: 121215 - DNA, 25 bp, Artificial
  probe
  misc_feature (1)..(25): SEQ ID NO: 7445; WAN024CJM_at; Start 31; Stop 55
ttagcattagcaaaaacatgcttct

SEQ ID NO: 121216 - DNA, 25 bp, Artificial
  probe
  misc_feature (1)..(25): SEQ ID NO: 7445; WAN024CJM_at; Start 40; Stop 64
gcaaaaacatgcttctttatcaatt

SEQ ID NO: 121217 - DNA, 25 bp, Artificial
  probe
  misc_feature (1)..(25): SEQ ID NO: 7445; WAN024CJM_at; Start 34; Stop 58
gcattagcaaaaacatgcttcttta

SEQ ID NO: 121218 - DNA, 25 bp, Artificial
  probe
  misc_feature (1)..(25): SEQ ID NO: 7445; WAN024CJM_at; Start 77; Stop 101
tcgttgctttatcaaaaattgttgg

SEQ ID NO: 121219 - DNA, 25 bp, Artificial
  probe
  misc_feature (1)..(25): SEQ ID NO: 7445; WAN024CJM_at; Start 44; Stop 68
aaacatgcttctttatcaattggac

SEQ ID NO: 121220 - DNA, 25 bp, Artificial
  probe
  misc_feature (1)..(25): SEQ ID NO: 7445; WAN024CJM_at; Start 45; Stop 69
aacatgcttctttatcaattggaca

SEQ ID NO: 121221 - DNA, 25 bp, Artificial
  probe
  misc_feature (1)..(25): SEQ ID NO: 7445; WAN024CJM_at; Start 59; Stop 83
tcaattggacaaatagtatcgttgc

SEQ ID NO: 121222 - DNA, 25 bp, Artificial
  probe
  misc_feature (1)..(25): SEQ ID NO: 7445; WAN024CJM_at; Start 16; Stop 40
aaagcagttcttttattagcattag

SEQ ID NO: 121223 - DNA, 25 bp, Artificial
  probe
  misc_feature (1)..(25): SEQ ID NO: 7445; WAN024CJM_at; Start 17; Stop 41
aagcagttcttttattagcattagc

SEQ ID NO: 121224 - DNA, 25 bp, Artificial
  probe
  misc_feature (1)..(25): SEQ ID NO: 7445; WAN024CJM_at; Start 65; Stop 89
ggacaaatagtatcgttgctttatc

SEQ ID NO: 121225 - DNA, 25 bp, Artificial
  probe
  misc_feature (1)..(25): SEQ ID NO: 7445; WAN024CJM_at; Start 49; Stop 73
tgcttctttatcaattggacaaata

SEQ ID NO: 121226 - DNA, 25 bp, Artificial
  probe
  misc_feature (1)..(25): SEQ ID NO: 7445; WAN024CJM_at; Start 29; Stop 53
tattagcattagcaaaaacatgctt

SEQ ID NO: 121227 - DNA, 25 bp, Artificial
  probe
  misc_feature (1)..(25): SEQ ID NO: 7445; WAN024CJM_at; Start 15; Stop 39
gaaagcagttcttttattagcatta

SEQ ID NO: 121228 - DNA, 25 bp, Artificial
  probe
  misc_feature (1)..(25): SEQ ID NO: 7445; WAN024CJM_at; Start 46; Stop 70
acatgcttctttatcaattggacaa

SEQ ID NO: 121229 - DNA, 25 bp, Artificial
  probe
  misc_feature (1)..(25): SEQ ID NO: 7445; WAN024CJM_at; Start 12; Stop 36
gaagaaagcagttcttttattagca

SEQ ID NO: 121230 - DNA, 25 bp, Artificial
  probe
  misc_feature (1)..(25): SEQ ID NO: 7445; WAN024CJM_at; Start 60; Stop 84
caattggacaaatagtatcgttgct

SEQ ID NO: 121231 - DNA, 25 bp, Artificial
  probe
  misc_feature (1)..(25): SEQ ID NO: 7445; WAN024CJM_at; Start 61; Stop 85
aattggacaaatagtatcgttgctt

SEQ ID NO: 121232 - DNA, 25 bp, Artificial
  probe
  misc_feature (1)..(25): SEQ ID NO: 7445; WAN024CJM_at; Start 55; Stop 79
tttatcaattggacaaatagtatcg

SEQ ID NO: 121233 - DNA, 25 bp, Artificial
  probe
  misc_feature (1)..(25): SEQ ID NO: 7445; WAN024CJM_at; Start 43; Stop 67
aaaacatgcttctttatcaattgga

SEQ ID NO: 121234 - DNA, 25 bp, Artificial
  probe
  misc_feature (1)..(25): SEQ ID NO: 7445; WAN024CJM_at; Start 47; Stop 71
catgcttctttatcaattggacaaa

SEQ ID NO: 121235 - DNA, 25 bp, Artificial
  probe
  misc_feature (1)..(25): SEQ ID NO: 1332; WAN024CJN_at; Start 233; Stop 257
gaactgctttcttcgttttggtcaa

SEQ ID NO: 121236 - DNA, 25 bp, Artificial
  probe
  misc_feature (1)..(25): SEQ ID NO: 1332; WAN024CJN_at; Start 345; Stop 369
tgatgaaaaaatgacaagctactcc

SEQ ID NO: 121237 - DNA, 25 bp, Artificial
  probe
  misc_feature (1)..(25): SEQ ID NO: 1332; WAN024CJN_at; Start 189; Stop 213
tgtccaattgataaagaagcatgtt

SEQ ID NO: 121238 - DNA, 25 bp, Artificial
  probe
  misc_feature (1)..(25): SEQ ID NO: 1332; WAN024CJN_at; Start 379; Stop 403
tctgaacattctgttagagaaaagg

SEQ ID NO: 121239 - DNA, 25 bp, Artificial
  probe
  misc_feature (1)..(25): SEQ ID NO: 1332; WAN024CJN_at; Start 54; Stop 78
tcaacggtattctccaaatgagaaa

SEQ ID NO: 121240 - DNA, 25 bp, Artificial
  probe
  misc_feature (1)..(25): SEQ ID NO: 1332; WAN024CJN_at; Start 175; Stop 199
gcaacgatactatttgtccaattga

SEQ ID NO: 121241 - DNA, 25 bp, Artificial
  probe
  misc_feature (1)..(25): SEQ ID NO: 1332; WAN024CJN_at; Start 317; Stop 341
gtgtaaccatcgcagtagaagcttt

SEQ ID NO: 121242 - DNA, 25 bp, Artificial
  probe
  misc_feature (1)..(25): SEQ ID NO: 1332; WAN024CJN_at; Start 185; Stop 209
tatttgtccaattgataaagaagca

SEQ ID NO: 121243 - DNA, 25 bp, Artificial
  probe
  misc_feature (1)..(25): SEQ ID NO: 1332; WAN024CJN_at; Start 275; Stop 299
gctatcgtttttctgtaacggtaga

SEQ ID NO: 121244 - DNA, 25 bp, Artificial
  probe
  misc_feature (1)..(25): SEQ ID NO: 1332; WAN024CJN_at; Start 42; Stop 66
tgctttagcaattcaacggtattct

SEQ ID NO: 121245 - DNA, 25 bp, Artificial
  probe
  misc_feature (1)..(25): SEQ ID NO: 1332; WAN024CJN_at; Start 286; Stop 310
tctgtaacggtagaagaagcagtaa

SEQ ID NO: 121246 - DNA, 25 bp, Artificial
  probe
  misc_feature (1)..(25): SEQ ID NO: 1332; WAN024CJN_at; Start 36; Stop 60
aataaatgctttagcaattcaacgg

SEQ ID NO: 121247 - DNA, 25 bp, Artificial
  probe
  misc_feature (1)..(25): SEQ ID NO: 1332; WAN024CJN_at; Start 320; Stop 344
taaccatcgcagtagaagctttaac

SEQ ID NO: 121248 - DNA, 25 bp, Artificial
  probe
  misc_feature (1)..(25): SEQ ID NO: 1332; WAN024CJN_at; Start 114; Stop 138
tgtgaacttaccagaacaatttgtc

SEQ ID NO: 121249 - DNA, 25 bp, Artificial
  probe
  misc_feature (1)..(25): SEQ ID NO: 1332; WAN024CJN_at; Start 301; Stop 325
gaagcagtaaaaatgtgtgtaacca

SEQ ID NO: 121250 - DNA, 25 bp, Artificial
  probe
  misc_feature (1)..(25): SEQ ID NO: 1332; WAN024CJN_at; Start 351; Stop 375
aaaaatgacaagctactccaaatgg

SEQ ID NO: 121251 - DNA, 25 bp, Artificial
  probe
  misc_feature (1)..(25): SEQ ID NO: 1332; WAN024CJN_at; Start 49; Stop 73
gcaattcaacggtattctccaaatg

SEQ ID NO: 121252 - DNA, 25 bp, Artificial
  probe
  misc_feature (1)..(25): SEQ ID NO: 1332; WAN024CJN_at; Start 307; Stop 331
gtaaaaatgtgtgtaaccatcgcag

SEQ ID NO: 121253 - DNA, 25 bp, Artificial
  probe
  misc_feature (1)..(25): SEQ ID NO: 1332; WAN024CJN_at; Start 14; Stop 38
tgacagaaaagcaaattgaaaaaat

SEQ ID NO: 121254 - DNA, 25 bp, Artificial
  probe
  misc_feature (1)..(25): SEQ ID NO: 1332; WAN024CJN_at; Start 123; Stop 147
accagaacaatttgtctttgggaag

SEQ ID NO: 121255 - DNA, 25 bp, Artificial
  probe
  misc_feature (1)..(25): SEQ ID NO: 1332; WAN024CJN_at; Start 200; Stop 224
taaagaagcatgtttttgctaatgc

SEQ ID NO: 121256 - DNA, 25 bp, Artificial
  probe
  misc_feature (1)..(25): SEQ ID NO: 1332; WAN024CJN_at; Start 104; Stop 128
taaatatgattgtgaacttaccaga

SEQ ID NO: 121257 - DNA, 25 bp, Artificial
  probe
  misc_feature (1)..(25): SEQ ID NO: 1332; WAN024CJN_at; Start 293; Stop 317
cggtagaagaagcagtaaaaatgtg

SEQ ID NO: 121258 - DNA, 25 bp, Artificial
  probe
  misc_feature (1)..(25): SEQ ID NO: 1332; WAN024CJN_at; Start 169; Stop 193
gataaagcaacgatactatttgtcc

SEQ ID NO: 121259 - DNA, 25 bp, Artificial
  probe
  misc_feature (1)..(25): SEQ ID NO: 1332; WAN024CJN_at; Start 334; Stop 358
gaagctttaactgatgaaaaaatga

SEQ ID NO: 121260 - DNA, 25 bp, Artificial
  probe
  misc_feature (1)..(25): SEQ ID NO: 1332; WAN024CJN_at; Start 68; Stop 92
caaatgagaaaattcaaacagttag

SEQ ID NO: 121261 - DNA, 25 bp, Artificial
  probe
  misc_feature (1)..(25): SEQ ID NO: 1332; WAN024CJN_at; Start 219; Stop 243
taatgctaataaaagaactgctttc

SEQ ID NO: 121262 - DNA, 25 bp, Artificial
  probe
  misc_feature (1)..(25): SEQ ID NO: 1332; WAN024CJN_at; Start 24; Stop 48
gcaaattgaaaaaataaatgcttta

SEQ ID NO: 121263 - DNA, 25 bp, Artificial
  probe
  misc_feature (1)..(25): SEQ ID NO: 1332; WAN024CJN_at; Start 327; Stop 351
cgcagtagaagctttaactgatgaa

SEQ ID NO: 121264 - DNA, 25 bp, Artificial
  probe
  misc_feature (1)..(25): SEQ ID NO: 1332; WAN024CJN_at; Start 215; Stop 239
ttgctaatgctaataaaagaactgc

SEQ ID NO: 121265 - DNA, 25 bp, Artificial
  probe
  misc_feature (1)..(25): SEQ ID NO: 1332; WAN024CJN_at; Start 388; Stop 412
tctgttagagaaaaggtcaaaaagc

SEQ ID NO: 121266 - DNA, 25 bp, Artificial
  probe
  misc_feature (1)..(25): SEQ ID NO: 1332; WAN024CJN_at; Start 314; Stop 338
tgtgtgtaaccatcgcagtagaagc

SEQ ID NO: 121267 - DNA, 25 bp, Artificial
  probe
  misc_feature (1)..(25): SEQ ID NO: 1332; WAN024CJN_at; Start 156; Stop 180
tccaacaatttttgataaagcaacg

SEQ ID NO: 121268 - DNA, 25 bp, Artificial
  probe
  misc_feature (1)..(25): SEQ ID NO: 1332; WAN024CJN_at; Start 95; Stop 119
cttctgccttaaatatgattgtgaa

SEQ ID NO: 121269 - DNA, 25 bp, Artificial
  probe
  misc_feature (1)..(25): SEQ ID NO: 2641; WAN024CJO_at; Start 113; Stop 137
ttatctttactcctgaagaattggg

SEQ ID NO: 121270 - DNA, 25 bp, Artificial
  probe
  misc_feature (1)..(25): SEQ ID NO: 2641; WAN024CJO_at; Start 78; Stop 102
taaatacgaagcgaaattgttacca

SEQ ID NO: 121271 - DNA, 25 bp, Artificial
  probe
  misc_feature (1)..(25): SEQ ID NO: 2641; WAN024CJO_at; Start 84; Stop 108
cgaagcgaaattgttaccaagtggt

SEQ ID NO: 121272 - DNA, 25 bp, Artificial
  probe
  misc_feature (1)..(25): SEQ ID NO: 2641; WAN024CJO_at; Start 198; Stop 222
cgaatacgacgatgttttcaaagct

SEQ ID NO: 121273 - DNA, 25 bp, Artificial
  probe
  misc_feature (1)..(25): SEQ ID NO: 2641; WAN024CJO_at; Start 191; Stop 215
tatttgacgaatacgacgatgtttt

SEQ ID NO: 121274 - DNA, 25 bp, Artificial
  probe
  misc_feature (1)..(25): SEQ ID NO: 2641; WAN024CJO_at; Start 72; Stop 96
tggtgttaaatacgaagcgaaattg

SEQ ID NO: 121275 - DNA, 25 bp, Artificial
  probe
  misc_feature (1)..(25): SEQ ID NO: 2641; WAN024CJO_at; Start 138; Stop 162
gcagcaggtttcttatgtatctgat

SEQ ID NO: 121276 - DNA, 25 bp, Artificial
  probe
  misc_feature (1)..(25): SEQ ID NO: 2641; WAN024CJO_at; Start 157; Stop 181
tctgatgatgcctttgacttaaatt

SEQ ID NO: 121277 - DNA, 25 bp, Artificial
  probe
  misc_feature (1)..(25): SEQ ID NO: 2641; WAN024CJO_at; Start 86; Stop 110
aagcgaaattgttaccaagtggtga

SEQ ID NO: 121278 - DNA, 25 bp, Artificial
  probe
  misc_feature (1)..(25): SEQ ID NO: 2641; WAN024CJO_at; Start 50; Stop 74
caagtgaatttaatattccaagtgg

SEQ ID NO: 121279 - DNA, 25 bp, Artificial
  probe
  misc_feature (1)..(25): SEQ ID NO: 2641; WAN024CJO_at; Start 136; Stop 160
gggcagcaggtttcttatgtatctg

SEQ ID NO: 121280 - DNA, 25 bp, Artificial
  probe
  misc_feature (1)..(25): SEQ ID NO: 2641; WAN024CJO_at; Start 154; Stop 178
gtatctgatgatgcctttgacttaa

SEQ ID NO: 121281 - DNA, 25 bp, Artificial
  probe
  misc_feature (1)..(25): SEQ ID NO: 2641; WAN024CJO_at; Start 184; Stop 208
gataaaatatttgacgaatacgacg

SEQ ID NO: 121282 - DNA, 25 bp, Artificial
  probe
  misc_feature (1)..(25): SEQ ID NO: 2641; WAN024CJO_at; Start 187; Stop 211
aaaatatttgacgaatacgacgatg

SEQ ID NO: 121283 - DNA, 25 bp, Artificial
  probe
  misc_feature (1)..(25): SEQ ID NO: 2641; WAN024CJO_at; Start 53; Stop 77
gtgaatttaatattccaagtggtgt

SEQ ID NO: 121284 - DNA, 25 bp, Artificial
  probe
  misc_feature (1)..(25): SEQ ID NO: 2641; WAN024CJO_at; Start 101; Stop 125
caagtggtgagattatctttactcc

SEQ ID NO: 121285 - DNA, 25 bp, Artificial
  probe
  misc_feature (1)..(25): SEQ ID NO: 2641; WAN024CJO_at; Start 80; Stop 104
aatacgaagcgaaattgttaccaag

SEQ ID NO: 121286 - DNA, 25 bp, Artificial
  probe
  misc_feature (1)..(25): SEQ ID NO: 2641; WAN024CJO_at; Start 202; Stop 226
tacgacgatgttttcaaagctttgg

SEQ ID NO: 121287 - DNA, 25 bp, Artificial
  probe
  misc_feature (1)..(25): SEQ ID NO: 2641; WAN024CJO_at; Start 108; Stop 132
tgagattatctttactcctgaagaa

SEQ ID NO: 121288 - DNA, 25 bp, Artificial
  probe
  misc_feature (1)..(25): SEQ ID NO: 2641; WAN024CJO_at; Start 89; Stop 113
cgaaattgttaccaagtggtgagat

SEQ ID NO: 121289 - DNA, 25 bp, Artificial
  probe
  misc_feature (1)..(25): SEQ ID NO: 2641; WAN024CJO_at; Start 204; Stop 228
cgacgatgttttcaaagctttggtg

SEQ ID NO: 121290 - DNA, 25 bp, Artificial
  probe
  misc_feature (1)..(25): SEQ ID NO: 2641; WAN024CJO_at; Start 98; Stop 122
taccaagtggtgagattatctttac

SEQ ID NO: 121291 - DNA, 25 bp, Artificial
  probe
  misc_feature (1)..(25): SEQ ID NO: 2641; WAN024CJO_at; Start 144; Stop 168
ggtttcttatgtatctgatgatgcc

SEQ ID NO: 121292 - DNA, 25 bp, Artificial
  probe
  misc_feature (1)..(25): SEQ ID NO: 2641; WAN024CJO_at; Start 82; Stop 106
tacgaagcgaaattgttaccaagtg

SEQ ID NO: 121293 - DNA, 25 bp, Artificial
  probe
  misc_feature (1)..(25): SEQ ID NO: 2641; WAN024CJO_at; Start 44; Stop 68
cgattccaagtgaatttaatattcc

SEQ ID NO: 121294 - DNA, 25 bp, Artificial
  probe
  misc_feature (1)..(25): SEQ ID NO: 2641; WAN024CJO_at; Start 208; Stop 232
gatgttttcaaagctttggtggaaa

SEQ ID NO: 121295 - DNA, 25 bp, Artificial
  probe
  misc_feature (1)..(25): SEQ ID NO: 2641; WAN024CJO_at; Start 159; Stop 183
tgatgatgcctttgacttaaattta

SEQ ID NO: 121296 - DNA, 25 bp, Artificial
  probe
  misc_feature (1)..(25): SEQ ID NO: 2641; WAN024CJO_at; Start 207; Stop 231
cgatgttttcaaagctttggtggaa

SEQ ID NO: 121297 - DNA, 25 bp, Artificial
  probe
  misc_feature (1)..(25): SEQ ID NO: 2641; WAN024CJO_at; Start 66; Stop 90
tccaagtggtgttaaatacgaagcg

SEQ ID NO: 121298 - DNA, 25 bp, Artificial
  probe
  misc_feature (1)..(25): SEQ ID NO: 2641; WAN024CJO_at; Start 196; Stop 220
gacgaatacgacgatgttttcaaag

SEQ ID NO: 121299 - DNA, 25 bp, Artificial
  probe
  misc_feature (1)..(25): SEQ ID NO: 2641; WAN024CJO_at; Start 120; Stop 144
tactcctgaagaattggggcagcag

SEQ ID NO: 121300 - DNA, 25 bp, Artificial
  probe
  misc_feature (1)..(25): SEQ ID NO: 2641; WAN024CJO_at; Start 68; Stop 92
caagtggtgttaaatacgaagcgaa

SEQ ID NO: 121301 - DNA, 25 bp, Artificial
  probe
  misc_feature (1)..(25): SEQ ID NO: 2641; WAN024CJO_at; Start 106; Stop 130
ggtgagattatctttactcctgaag

SEQ ID NO: 121302 - DNA, 25 bp, Artificial
  probe
  misc_feature (1)..(25): SEQ ID NO: 2641; WAN024CJO_at; Start 151; Stop 175
tatgtatctgatgatgcctttgact

SEQ ID NO: 121303 - DNA, 25 bp, Artificial
  probe
  misc_feature (1)..(25): SEQ ID NO: 1897; WAN024CJP_at; Start 119; Stop 143
tgtacgtcactaaaacaggttgtca

SEQ ID NO: 121304 - DNA, 25 bp, Artificial
  probe
  misc_feature (1)..(25): SEQ ID NO: 1897; WAN024CJP_at; Start 220; Stop 244
tggttccaggtcaatggcagatggt

SEQ ID NO: 121305 - DNA, 25 bp, Artificial
  probe
  misc_feature (1)..(25): SEQ ID NO: 1897; WAN024CJP_at; Start 129; Stop 153
taaaacaggttgtcaatggcgcatg

SEQ ID NO: 121306 - DNA, 25 bp, Artificial
  probe
  misc_feature (1)..(25): SEQ ID NO: 1897; WAN024CJP_at; Start 298; Stop 322
tctgtcaactataatggcgaatggg

SEQ ID NO: 121307 - DNA, 25 bp, Artificial
  probe
  misc_feature (1)..(25): SEQ ID NO: 1897; WAN024CJP_at; Start 88; Stop 112
tggccgaaacgagtacttgttaatg

SEQ ID NO: 121308 - DNA, 25 bp, Artificial
  probe
  misc_feature (1)..(25): SEQ ID NO: 1897; WAN024CJP_at; Start 144; Stop 168
atggcgcatgctccctcacgacttt

SEQ ID NO: 121309 - DNA, 25 bp, Artificial
  probe
  misc_feature (1)..(25): SEQ ID NO: 1897; WAN024CJP_at; Start 112; Stop 136
gagactttgtacgtcactaaaacag

SEQ ID NO: 121310 - DNA, 25 bp, Artificial
  probe
  misc_feature (1)..(25): SEQ ID NO: 1897; WAN024CJP_at; Start 126; Stop 150
cactaaaacaggttgtcaatggcgc

SEQ ID NO: 121311 - DNA, 25 bp, Artificial
  probe
  misc_feature (1)..(25): SEQ ID NO: 1897; WAN024CJP_at; Start 184; Stop 208
gtatggagtttctttcgtcgttcta

SEQ ID NO: 121312 - DNA, 25 bp, Artificial
  probe
  misc_feature (1)..(25): SEQ ID NO: 1897; WAN024CJP_at; Start 51; Stop 75
gattgaaccctatttctccaaacac

SEQ ID NO: 121313 - DNA, 25 bp, Artificial
  probe
  misc_feature (1)..(25): SEQ ID NO: 1897; WAN024CJP_at; Start 92; Stop 116
cgaaacgagtacttgttaatgagac

SEQ ID NO: 121314 - DNA, 25 bp, Artificial
  probe
  misc_feature (1)..(25): SEQ ID NO: 1897; WAN024CJP_at; Start 239; Stop 263
gatggtactacgcttatagctcagg

SEQ ID NO: 121315 - DNA, 25 bp, Artificial
  probe
  misc_feature (1)..(25): SEQ ID NO: 1897; WAN024CJP_at; Start 292; Stop 316
ggctattctgtcaactataatggcg

SEQ ID NO: 121316 - DNA, 25 bp, Artificial
  probe
  misc_feature (1)..(25): SEQ ID NO: 1897; WAN024CJP_at; Start 247; Stop 271
tacgcttatagctcaggtgccttgg

SEQ ID NO: 121317 - DNA, 25 bp, Artificial
  probe
  misc_feature (1)..(25): SEQ ID NO: 1897; WAN024CJP_at; Start 194; Stop 218
tctttcgtcgttctatgacgacagg

SEQ ID NO: 121318 - DNA, 25 bp, Artificial
  probe
  misc_feature (1)..(25): SEQ ID NO: 1897; WAN024CJP_at; Start 105; Stop 129
tgttaatgagactttgtacgtcact

SEQ ID NO: 121319 - DNA, 25 bp, Artificial
  probe
  misc_feature (1)..(25): SEQ ID NO: 1897; WAN024CJP_at; Start 252; Stop 276
ttatagctcaggtgccttggcagtg

SEQ ID NO: 121320 - DNA, 25 bp, Artificial
  probe
  misc_feature (1)..(25): SEQ ID NO: 1897; WAN024CJP_at; Start 134; Stop 158
caggttgtcaatggcgcatgctccc

SEQ ID NO: 121321 - DNA, 25 bp, Artificial
  probe
  misc_feature (1)..(25): SEQ ID NO: 1897; WAN024CJP_at; Start 244; Stop 268
tactacgcttatagctcaggtgcct

SEQ ID NO: 121322 - DNA, 25 bp, Artificial
  probe
  misc_feature (1)..(25): SEQ ID NO: 1897; WAN024CJP_at; Start 210; Stop 234
gacgacaggttggttccaggtcaat

SEQ ID NO: 121323 - DNA, 25 bp, Artificial
  probe
  misc_feature (1)..(25): SEQ ID NO: 1897; WAN024CJP_at; Start 230; Stop 254
tcaatggcagatggtactacgctta

SEQ ID NO: 121324 - DNA, 25 bp, Artificial
  probe
  misc_feature (1)..(25): SEQ ID NO: 1897; WAN024CJP_at; Start 215; Stop 239
caggttggttccaggtcaatggcag

SEQ ID NO: 121325 - DNA, 25 bp, Artificial
  probe
  misc_feature (1)..(25): SEQ ID NO: 1897; WAN024CJP_at; Start 260; Stop 284
caggtgccttggcagtgaatacgac

SEQ ID NO: 121326 - DNA, 25 bp, Artificial
  probe
  misc_feature (1)..(25): SEQ ID NO: 1897; WAN024CJP_at; Start 234; Stop 258
tggcagatggtactacgcttatagc

SEQ ID NO: 121327 - DNA, 25 bp, Artificial
  probe
  misc_feature (1)..(25): SEQ ID NO: 1897; WAN024CJP_at; Start 61; Stop 85
tatttctccaaacaccgcacctata

SEQ ID NO: 121328 - DNA, 25 bp, Artificial
  probe
  misc_feature (1)..(25): SEQ ID NO: 1897; WAN024CJP_at; Start 82; Stop 106
tataaatggccgaaacgagtacttg

SEQ ID NO: 121329 - DNA, 25 bp, Artificial
  probe
  misc_feature (1)..(25): SEQ ID NO: 1897; WAN024CJP_at; Start 69; Stop 93
caaacaccgcacctataaatggccg

SEQ ID NO: 121330 - DNA, 25 bp, Artificial
  probe
  misc_feature (1)..(25): SEQ ID NO: 1897; WAN024CJP_at; Start 286; Stop 310
gtagatggctattctgtcaactata

SEQ ID NO: 121331 - DNA, 25 bp, Artificial
  probe
  misc_feature (1)..(25): SEQ ID NO: 1897; WAN024CJP_at; Start 7; Stop 31
cgcaaagcatatgatactgatttaa

SEQ ID NO: 121332 - DNA, 25 bp, Artificial
  probe
  misc_feature (1)..(25): SEQ ID NO: 1897; WAN024CJP_at; Start 77; Stop 101
gcacctataaatggccgaaacgagt

SEQ ID NO: 121333 - DNA, 25 bp, Artificial
  probe
  misc_feature (1)..(25): SEQ ID NO: 1897; WAN024CJP_at; Start 205; Stop 229
tctatgacgacaggttggttccagg

SEQ ID NO: 121334 - DNA, 25 bp, Artificial
  probe
  misc_feature (1)..(25): SEQ ID NO: 1897; WAN024CJP_at; Start 138; Stop 162
ttgtcaatggcgcatgctccctcac

SEQ ID NO: 121335 - DNA, 25 bp, Artificial
  probe
  misc_feature (1)..(25): SEQ ID NO: 1897; WAN024CJP_at; Start 226; Stop 250
caggtcaatggcagatggtactacg

SEQ ID NO: 121336 - DNA, 25 bp, Artificial
  probe
  misc_feature (1)..(25): SEQ ID NO: 1897; WAN024CJP_at; Start 202; Stop 226
cgttctatgacgacaggttggttcc

SEQ ID NO: 121337 - DNA, 25 bp, Artificial
  probe
  misc_feature (1)..(25): SEQ ID NO: 7490; WAN024CJQ_at; Start 10; Stop 34
cactttcatcgttcttcctcaacta

SEQ ID NO: 121338 - DNA, 25 bp, Artificial
  probe
  misc_feature (1)..(25): SEQ ID NO: 7490; WAN024CJQ_at; Start 11; Stop 35
actttcatcgttcttcctcaactat

SEQ ID NO: 121339 - DNA, 25 bp, Artificial
  probe
  misc_feature (1)..(25): SEQ ID NO: 7490; WAN024CJQ_at; Start 17; Stop 41
atcgttcttcctcaactatccttta

SEQ ID NO: 121340 - DNA, 25 bp, Artificial
  probe
  misc_feature (1)..(25): SEQ ID NO: 7490; WAN024CJQ_at; Start 30; Stop 54
aactatcctttatctgattgtttta

SEQ ID NO: 121341 - DNA, 25 bp, Artificial
  probe
  misc_feature (1)..(25): SEQ ID NO: 7490; WAN024CJQ_at; Start 1; Stop 25
ttgatcaatcactttcatcgttctt

SEQ ID NO: 121342 - DNA, 25 bp, Artificial
  probe
  misc_feature (1)..(25): SEQ ID NO: 7490; WAN024CJQ_at; Start 22; Stop 46
tcttcctcaactatcctttatctga

SEQ ID NO: 121343 - DNA, 25 bp, Artificial
  probe
  misc_feature (1)..(25): SEQ ID NO: 7490; WAN024CJQ_at; Start 15; Stop 39
tcatcgttcttcctcaactatcctt

SEQ ID NO: 121344 - DNA, 25 bp, Artificial
  probe
  misc_feature (1)..(25): SEQ ID NO: 7490; WAN024CJQ_at; Start 5; Stop 29
tcaatcactttcatcgttcttcctc

SEQ ID NO: 121345 - DNA, 25 bp, Artificial
  probe
  misc_feature (1)..(25): SEQ ID NO: 7490; WAN024CJQ_at; Start 18; Stop 42
tcgttcttcctcaactatcctttat

SEQ ID NO: 121346 - DNA, 25 bp, Artificial
  probe
  misc_feature (1)..(25): SEQ ID NO: 7490; WAN024CJQ_at; Start 45; Stop 69
gattgttttaaaacaacttgataga

SEQ ID NO: 121347 - DNA, 25 bp, Artificial
  probe
  misc_feature (1)..(25): SEQ ID NO: 7490; WAN024CJQ_at; Start 35; Stop 59
tcctttatctgattgttttaaaaca

SEQ ID NO: 121348 - DNA, 25 bp, Artificial
  probe
  misc_feature (1)..(25): SEQ ID NO: 7490; WAN024CJQ_at; Start 32; Stop 56
ctatcctttatctgattgttttaaa

SEQ ID NO: 121349 - DNA, 25 bp, Artificial
  probe
  misc_feature (1)..(25): SEQ ID NO: 7490; WAN024CJQ_at; Start 20; Stop 44
gttcttcctcaactatcctttatct

SEQ ID NO: 121350 - DNA, 25 bp, Artificial
  probe
  misc_feature (1)..(25): SEQ ID NO: 7490; WAN024CJQ_at; Start 3; Stop 27
gatcaatcactttcatcgttcttcc

SEQ ID NO: 121351 - DNA, 25 bp, Artificial
  probe
  misc_feature (1)..(25): SEQ ID NO: 7490; WAN024CJQ_at; Start 7; Stop 31
aatcactttcatcgttcttcctcaa

SEQ ID NO: 121352 - DNA, 25 bp, Artificial
  probe
  misc_feature (1)..(25): SEQ ID NO: 7490; WAN024CJQ_at; Start 6; Stop 30
caatcactttcatcgttcttcctca

SEQ ID NO: 121353 - DNA, 25 bp, Artificial
  probe
  misc_feature (1)..(25): SEQ ID NO: 7490; WAN024CJQ_at; Start 21; Stop 45
ttcttcctcaactatcctttatctg

SEQ ID NO: 121354 - DNA, 25 bp, Artificial
  probe
  misc_feature (1)..(25): SEQ ID NO: 7490; WAN024CJQ_at; Start 26; Stop 50
cctcaactatcctttatctgattgt

SEQ ID NO: 121355 - DNA, 25 bp, Artificial
  probe
  misc_feature (1)..(25): SEQ ID NO: 7490; WAN024CJQ_at; Start 23; Stop 47
cttcctcaactatcctttatctgat

SEQ ID NO: 121356 - DNA, 25 bp, Artificial
  probe
  misc_feature (1)..(25): SEQ ID NO: 7490; WAN024CJQ_at; Start 4; Stop 28
atcaatcactttcatcgttcttcct

SEQ ID NO: 121357 - DNA, 25 bp, Artificial
  probe
  misc_feature (1)..(25): SEQ ID NO: 7490; WAN024CJQ_at; Start 42; Stop 66
tctgattgttttaaaacaacttgat

SEQ ID NO: 121358 - DNA, 25 bp, Artificial
  probe
  misc_feature (1)..(25): SEQ ID NO: 7490; WAN024CJQ_at; Start 27; Stop 51
ctcaactatcctttatctgattgtt

SEQ ID NO: 121359 - DNA, 25 bp, Artificial
  probe
  misc_feature (1)..(25): SEQ ID NO: 7490; WAN024CJQ_at; Start 19; Stop 43
cgttcttcctcaactatcctttatc

SEQ ID NO: 121360 - DNA, 25 bp, Artificial
  probe
  misc_feature (1)..(25): SEQ ID NO: 7490; WAN024CJQ_at; Start 40; Stop 64
tatctgattgttttaaaacaacttg

SEQ ID NO: 121361 - DNA, 25 bp, Artificial
  probe
  misc_feature (1)..(25): SEQ ID NO: 7490; WAN024CJQ_at; Start 29; Stop 53
caactatcctttatctgattgtttt

SEQ ID NO: 121362 - DNA, 25 bp, Artificial
  probe
  misc_feature (1)..(25): SEQ ID NO: 7490; WAN024CJQ_at; Start 9; Stop 33
tcactttcatcgttcttcctcaact

SEQ ID NO: 121363 - DNA, 25 bp, Artificial
  probe
  misc_feature (1)..(25): SEQ ID NO: 7490; WAN024CJQ_at; Start 28; Stop 52
tcaactatcctttatctgattgttt

SEQ ID NO: 121364 - DNA, 25 bp, Artificial
  probe
  misc_feature (1)..(25): SEQ ID NO: 7490; WAN024CJQ_at; Start 12; Stop 36
ctttcatcgttcttcctcaactatc

SEQ ID NO: 121365 - DNA, 25 bp, Artificial
  probe
  misc_feature (1)..(25): SEQ ID NO: 7490; WAN024CJQ_at; Start 25; Stop 49
tcctcaactatcctttatctgattg

SEQ ID NO: 121366 - DNA, 25 bp, Artificial
  probe
  misc_feature (1)..(25): SEQ ID NO: 7490; WAN024CJQ_at; Start 2; Stop 26
tgatcaatcactttcatcgttcttc

SEQ ID NO: 121367 - DNA, 25 bp, Artificial
  probe
  misc_feature (1)..(25): SEQ ID NO: 7490; WAN024CJQ_at; Start 16; Stop 40
catcgttcttcctcaactatccttt

SEQ ID NO: 121368 - DNA, 25 bp, Artificial
  probe
  misc_feature (1)..(25): SEQ ID NO: 7490; WAN024CJQ_at; Start 13; Stop 37
tttcatcgttcttcctcaactatcc

SEQ ID NO: 121369 - DNA, 25 bp, Artificial
  probe
  misc_feature (1)..(25): SEQ ID NO: 7490; WAN024CJQ_at; Start 14; Stop 38
ttcatcgttcttcctcaactatcct

SEQ ID NO: 121370 - DNA, 25 bp, Artificial
  probe
  misc_feature (1)..(25): SEQ ID NO: 7490; WAN024CJQ_at; Start 31; Stop 55
actatcctttatctgattgttttaa

SEQ ID NO: 121371 - DNA, 25 bp, Artificial
  probe
  misc_feature (1)..(25): SEQ ID NO: 1868; WAN024CJR_at; Start 766; Stop 790
gaagagtggactaagaaagtctatc

SEQ ID NO: 121372 - DNA, 25 bp, Artificial
  probe
  misc_feature (1)..(25): SEQ ID NO: 1868; WAN024CJR_at; Start 798; Stop 822
tttaaaacaatcagataaaggacta

SEQ ID NO: 121373 - DNA, 25 bp, Artificial
  probe
  misc_feature (1)..(25): SEQ ID NO: 1868; WAN024CJR_at; Start 268; Stop 292
cataagaggttagtgacttcagact

SEQ ID NO: 121374 - DNA, 25 bp, Artificial
  probe
  misc_feature (1)..(25): SEQ ID NO: 1868; WAN024CJR_at; Start 690; Stop 714
gagccaatttgaaaatattattcca

SEQ ID NO: 121375 - DNA, 25 bp, Artificial
  probe
  misc_feature (1)..(25): SEQ ID NO: 1868; WAN024CJR_at; Start 24; Stop 48
ggaatatagtttacaatgggatgga

SEQ ID NO: 121376 - DNA, 25 bp, Artificial
  probe
  misc_feature (1)..(25): SEQ ID NO: 1868; WAN024CJR_at; Start 76; Stop 100
ccaaatattcaagagtgggaattag

SEQ ID NO: 121377 - DNA, 25 bp, Artificial
  probe
  misc_feature (1)..(25): SEQ ID NO: 1868; WAN024CJR_at; Start 117; Stop 141
tatagcttacgaaaaacttcataaa

SEQ ID NO: 121378 - DNA, 25 bp, Artificial
  probe
  misc_feature (1)..(25): SEQ ID NO: 1868; WAN024CJR_at; Start 511; Stop 535
gctccttcagagaaagaattacaag

SEQ ID NO: 121379 - DNA, 25 bp, Artificial
  probe
  misc_feature (1)..(25): SEQ ID NO: 1868; WAN024CJR_at; Start 752; Stop 776
ctggagaagacttagaagagtggac

SEQ ID NO: 121380 - DNA, 25 bp, Artificial
  probe
  misc_feature (1)..(25): SEQ ID NO: 1868; WAN024CJR_at; Start 442; Stop 466
tatgtcatgttagggtggtcaaata

SEQ ID NO: 121381 - DNA, 25 bp, Artificial
  probe
  misc_feature (1)..(25): SEQ ID NO: 1868; WAN024CJR_at; Start 461; Stop 485
caaatacaagttctggttatcgatt

SEQ ID NO: 121382 - DNA, 25 bp, Artificial
  probe
  misc_feature (1)..(25): SEQ ID NO: 1868; WAN024CJR_at; Start 142; Stop 166
cgtcaaacaagtattgagtgtgctg

SEQ ID NO: 121383 - DNA, 25 bp, Artificial
  probe
  misc_feature (1)..(25): SEQ ID NO: 1868; WAN024CJR_at; Start 133; Stop 157
cttcataaacgtcaaacaagtattg

SEQ ID NO: 121384 - DNA, 25 bp, Artificial
  probe
  misc_feature (1)..(25): SEQ ID NO: 1868; WAN024CJR_at; Start 103; Stop 127
aaaattgctaaatttatagcttacg

SEQ ID NO: 121385 - DNA, 25 bp, Artificial
  probe
  misc_feature (1)..(25): SEQ ID NO: 1868; WAN024CJR_at; Start 488; Stop 512
cgatggagcgtttattaggtcgagc

SEQ ID NO: 121386 - DNA, 25 bp, Artificial
  probe
  misc_feature (1)..(25): SEQ ID NO: 1868; WAN024CJR_at; Start 517; Stop 541
tcagagaaagaattacaagacaagt

SEQ ID NO: 121387 - DNA, 25 bp, Artificial
  probe
  misc_feature (1)..(25): SEQ ID NO: 1868; WAN024CJR_at; Start 238; Stop 262
gataaaagagtagcctcgacttatg

SEQ ID NO: 121388 - DNA, 25 bp, Artificial
  probe
  misc_feature (1)..(25): SEQ ID NO: 1868; WAN024CJR_at; Start 232; Stop 256
cctacagataaaagagtagcctcga

SEQ ID NO: 121389 - DNA, 25 bp, Artificial
  probe
  misc_feature (1)..(25): SEQ ID NO: 1868; WAN024CJR_at; Start 70; Stop 94
gattatccaaatattcaagagtggg

SEQ ID NO: 121390 - DNA, 25 bp, Artificial
  probe
  misc_feature (1)..(25): SEQ ID NO: 1868; WAN024CJR_at; Start 774; Stop 798
gactaagaaagtctatcaagttgtt

SEQ ID NO: 121391 - DNA, 25 bp, Artificial
  probe
  misc_feature (1)..(25): SEQ ID NO: 1868; WAN024CJR_at; Start 275; Stop 299
ggttagtgacttcagactactgtag

SEQ ID NO: 121392 - DNA, 25 bp, Artificial
  probe
  misc_feature (1)..(25): SEQ ID NO: 1868; WAN024CJR_at; Start 33; Stop 57
tttacaatgggatggaatatactac

SEQ ID NO: 121393 - DNA, 25 bp, Artificial
  probe
  misc_feature (1)..(25): SEQ ID NO: 1868; WAN024CJR_at; Start 287; Stop 311
cagactactgtagtcatactacgac

SEQ ID NO: 121394 - DNA, 25 bp, Artificial
  probe
  misc_feature (1)..(25): SEQ ID NO: 1868; WAN024CJR_at; Start 306; Stop 330
tacgactatagatgcagcgatttct

SEQ ID NO: 121395 - DNA, 25 bp, Artificial
  probe
  misc_feature (1)..(25): SEQ ID NO: 1868; WAN024CJR_at; Start 452; Stop 476
tagggtggtcaaatacaagttctgg

SEQ ID NO: 121396 - DNA, 25 bp, Artificial
  probe
  misc_feature (1)..(25): SEQ ID NO: 1868; WAN024CJR_at; Start 196; Stop 220
tacatctgtcagcatccctttctgc

SEQ ID NO: 121397 - DNA, 25 bp, Artificial
  probe
  misc_feature (1)..(25): SEQ ID NO: 1868; WAN024CJR_at; Start 738; Stop 762
ttatcttgactatgctggagaagac

SEQ ID NO: 121398 - DNA, 25 bp, Artificial
  probe
  misc_feature (1)..(25): SEQ ID NO: 1868; WAN024CJR_at; Start 530; Stop 554
tacaagacaagtttattcctggagt

SEQ ID NO: 121399 - DNA, 25 bp, Artificial
  probe
  misc_feature (1)..(25): SEQ ID NO: 1868; WAN024CJR_at; Start 157; Stop 181
gagtgtgctgattcttgtttaaaaa

SEQ ID NO: 121400 - DNA, 25 bp, Artificial
  probe
  misc_feature (1)..(25): SEQ ID NO: 1868; WAN024CJR_at; Start 672; Stop 696
tattccaactcataataagagccaa

SEQ ID NO: 121401 - DNA, 25 bp, Artificial
  probe
  misc_feature (1)..(25): SEQ ID NO: 1868; WAN024CJR_at; Start 495; Stop 519
gcgtttattaggtcgagctccttca

SEQ ID NO: 121402 - DNA, 25 bp, Artificial
  probe
  misc_feature (1)..(25): SEQ ID NO: 1868; WAN024CJR_at; Start 184; Stop 208
gaaattttagattacatctgtcagc

SEQ ID NO: 121403 - DNA, 25 bp, Artificial
  probe
  misc_feature (1)..(25): SEQ ID NO: 1868; WAN024CJR_at; Start 503; Stop 527
taggtcgagctccttcagagaaaga

SEQ ID NO: 121404 - DNA, 25 bp, Artificial
  probe
  misc_feature (1)..(25): SEQ ID NO: 1868; WAN024CJR_at; Start 301; Stop 325
catactacgactatagatgcagcga

SEQ ID NO: 121405 - DNA, 25 bp, Artificial
  probe
  misc_feature (1)..(25): SEQ ID NO: 1401; WAN024CJS_at; Start 276; Stop 300
catagacactatcaccagctgctag

SEQ ID NO: 121406 - DNA, 25 bp, Artificial
  probe
  misc_feature (1)..(25): SEQ ID NO: 1401; WAN024CJS_at; Start 108; Stop 132
cataagctgccggaatttcaaaacc

SEQ ID NO: 121407 - DNA, 25 bp, Artificial
  probe
  misc_feature (1)..(25): SEQ ID NO: 1401; WAN024CJS_at; Start 203; Stop 227
tcctggctcccatttttataataag

SEQ ID NO: 121408 - DNA, 25 bp, Artificial
  probe
  misc_feature (1)..(25): SEQ ID NO: 1401; WAN024CJS_at; Start 80; Stop 104
gcacgatgtccccattcattcgcat

SEQ ID NO: 121409 - DNA, 25 bp, Artificial
  probe
  misc_feature (1)..(25): SEQ ID NO: 1401; WAN024CJS_at; Start 8; Stop 32
taagttcctgcagtagaccaagtaa

SEQ ID NO: 121410 - DNA, 25 bp, Artificial
  probe
  misc_feature (1)..(25): SEQ ID NO: 1401; WAN024CJS_at; Start 155; Stop 179
gctacaaaagaagtacactgacgag

SEQ ID NO: 121411 - DNA, 25 bp, Artificial
  probe
  misc_feature (1)..(25): SEQ ID NO: 1401; WAN024CJS_at; Start 246; Stop 270
gcgcaatcgatccatttcctctgga

SEQ ID NO: 121412 - DNA, 25 bp, Artificial
  probe
  misc_feature (1)..(25): SEQ ID NO: 1401; WAN024CJS_at; Start 14; Stop 38
cctgcagtagaccaagtaatggaac

SEQ ID NO: 121413 - DNA, 25 bp, Artificial
  probe
  misc_feature (1)..(25): SEQ ID NO: 1401; WAN024CJS_at; Start 179; Stop 203
gaatacatgcgccactgatcaatct

SEQ ID NO: 121414 - DNA, 25 bp, Artificial
  probe
  misc_feature (1)..(25): SEQ ID NO: 1401; WAN024CJS_at; Start 2; Stop 26
tgaccataagttcctgcagtagacc

SEQ ID NO: 121415 - DNA, 25 bp, Artificial
  probe
  misc_feature (1)..(25): SEQ ID NO: 1401; WAN024CJS_at; Start 168; Stop 192
tacactgacgagaatacatgcgcca

SEQ ID NO: 121416 - DNA, 25 bp, Artificial
  probe
  misc_feature (1)..(25): SEQ ID NO: 1401; WAN024CJS_at; Start 100; Stop 124
cgcatttccataagctgccggaatt

SEQ ID NO: 121417 - DNA, 25 bp, Artificial
  probe
  misc_feature (1)..(25): SEQ ID NO: 1401; WAN024CJS_at; Start 34; Stop 58
ggaaccaatcgtcggtgtattatct

SEQ ID NO: 121418 - DNA, 25 bp, Artificial
  probe
  misc_feature (1)..(25): SEQ ID NO: 1401; WAN024CJS_at; Start 113; Stop 137
gctgccggaatttcaaaaccattga

SEQ ID NO: 121419 - DNA, 25 bp, Artificial
  probe
  misc_feature (1)..(25): SEQ ID NO: 1401; WAN024CJS_at; Start 126; Stop 150
caaaaccattgacattactcaaacg

SEQ ID NO: 121420 - DNA, 25 bp, Artificial
  probe
  misc_feature (1)..(25): SEQ ID NO: 1401; WAN024CJS_at; Start 64; Stop 88
ataaccttcccgacgagcacgatgt

SEQ ID NO: 121421 - DNA, 25 bp, Artificial
  probe
  misc_feature (1)..(25): SEQ ID NO: 1401; WAN024CJS_at; Start 232; Stop 256
ataatcatccccacgcgcaatcgat

SEQ ID NO: 121422 - DNA, 25 bp, Artificial
  probe
  misc_feature (1)..(25): SEQ ID NO: 1401; WAN024CJS_at; Start 192; Stop 216
actgatcaatctcctggctcccatt

SEQ ID NO: 121423 - DNA, 25 bp, Artificial
  probe
  misc_feature (1)..(25): SEQ ID NO: 1401; WAN024CJS_at; Start 135; Stop 159
tgacattactcaaacgaaaggctac

SEQ ID NO: 121424 - DNA, 25 bp, Artificial
  probe
  misc_feature (1)..(25): SEQ ID NO: 1401; WAN024CJS_at; Start 150; Stop 174
gaaaggctacaaaagaagtacactg

SEQ ID NO: 121425 - DNA, 25 bp, Artificial
  probe
  misc_feature (1)..(25): SEQ ID NO: 1401; WAN024CJS_at; Start 224; Stop 248
taagcaggataatcatccccacgcg

SEQ ID NO: 121426 - DNA, 25 bp, Artificial
  probe
  misc_feature (1)..(25): SEQ ID NO: 1401; WAN024CJS_at; Start 262; Stop 286
tcctctggaataggcatagacacta

SEQ ID NO: 121427 - DNA, 25 bp, Artificial
  probe
  misc_feature (1)..(25): SEQ ID NO: 1401; WAN024CJS_at; Start 272; Stop 296
taggcatagacactatcaccagctg

SEQ ID NO: 121428 - DNA, 25 bp, Artificial
  probe
  misc_feature (1)..(25): SEQ ID NO: 1401; WAN024CJS_at; Start 184; Stop 208
catgcgccactgatcaatctcctgg

SEQ ID NO: 121429 - DNA, 25 bp, Artificial
  probe
  misc_feature (1)..(25): SEQ ID NO: 1401; WAN024CJS_at; Start 253; Stop 277
cgatccatttcctctggaataggca

SEQ ID NO: 121430 - DNA, 25 bp, Artificial
  probe
  misc_feature (1)..(25): SEQ ID NO: 1401; WAN024CJS_at; Start 219; Stop 243
tataataagcaggataatcatcccc

SEQ ID NO: 121431 - DNA, 25 bp, Artificial
  probe
  misc_feature (1)..(25): SEQ ID NO: 1401; WAN024CJS_at; Start 173; Stop 197
tgacgagaatacatgcgccactgat

SEQ ID NO: 121432 - DNA, 25 bp, Artificial
  probe
  misc_feature (1)..(25): SEQ ID NO: 1401; WAN024CJS_at; Start 26; Stop 50
caagtaatggaaccaatcgtcggtg

SEQ ID NO: 121433 - DNA, 25 bp, Artificial
  probe
  misc_feature (1)..(25): SEQ ID NO: 1401; WAN024CJS_at; Start 39; Stop 63
caatcgtcggtgtattatctacacg

SEQ ID NO: 121434 - DNA, 25 bp, Artificial
  probe
  misc_feature (1)..(25): SEQ ID NO: 1401; WAN024CJS_at; Start 95; Stop 119
tcattcgcatttccataagctgccg

SEQ ID NO: 121435 - DNA, 25 bp, Artificial
  probe
  misc_feature (1)..(25): SEQ ID NO: 1401; WAN024CJS_at; Start 141; Stop 165
tactcaaacgaaaggctacaaaaga

SEQ ID NO: 121436 - DNA, 25 bp, Artificial
  probe
  misc_feature (1)..(25): SEQ ID NO: 1401; WAN024CJS_at; Start 75; Stop 99
gacgagcacgatgtccccattcatt

SEQ ID NO: 121437 - DNA, 25 bp, Artificial
  probe
  misc_feature (1)..(25): SEQ ID NO: 1401; WAN024CJS_at; Start 54; Stop 78
tatctacacgataaccttcccgacg

SEQ ID NO: 121438 - DNA, 25 bp, Artificial
  probe
  misc_feature (1)..(25): SEQ ID NO: 1401; WAN024CJS_at; Start 21; Stop 45
tagaccaagtaatggaaccaatcgt

SEQ ID NO: 121439 - DNA, 25 bp, Artificial
  probe
  misc_feature (1)..(25): SEQ ID NO: 795; WAN024CJT_at; Start 316; Stop 340
cgtcgggaaggttatcgtgtagata

SEQ ID NO: 121440 - DNA, 25 bp, Artificial
  probe
  misc_feature (1)..(25): SEQ ID NO: 795; WAN024CJT_at; Start 188; Stop 212
aggagattgatcagtggcgcatgta

SEQ ID NO: 121441 - DNA, 25 bp, Artificial
  probe
  misc_feature (1)..(25): SEQ ID NO: 795; WAN024CJT_at; Start 479; Stop 503
ttataaaagcaaacacgatgacagg

SEQ ID NO: 121442 - DNA, 25 bp, Artificial
  probe
  misc_feature (1)..(25): SEQ ID NO: 795; WAN024CJT_at; Start 534; Stop 558
cagtgttgggaatagtcaatcctca

SEQ ID NO: 121443 - DNA, 25 bp, Artificial
  probe
  misc_feature (1)..(25): SEQ ID NO: 795; WAN024CJT_at; Start 385; Stop 409
tatggtcatgttgcctgggtgtcaa

SEQ ID NO: 121444 - DNA, 25 bp, Artificial
  probe
  misc_feature (1)..(25): SEQ ID NO: 795; WAN024CJT_at; Start 273; Stop 297
tccggcagcttatggaaatgcgaat

SEQ ID NO: 121445 - DNA, 25 bp, Artificial
  probe
  misc_feature (1)..(25): SEQ ID NO: 795; WAN024CJT_at; Start 48; Stop 72
gatgtcagttaaaaagcttgttcct

SEQ ID NO: 121446 - DNA, 25 bp, Artificial
  probe
  misc_feature (1)..(25): SEQ ID NO: 795; WAN024CJT_at; Start 649; Stop 673
cctggagagaaggttcattatgatc

SEQ ID NO: 121447 - DNA, 25 bp, Artificial
  probe
  misc_feature (1)..(25): SEQ ID NO: 795; WAN024CJT_at; Start 202; Stop 226
tggcgcatgtattctcgtcagtgta

SEQ ID NO: 121448 - DNA, 25 bp, Artificial
  probe
  misc_feature (1)..(25): SEQ ID NO: 795; WAN024CJT_at; Start 666; Stop 690
ttatgatcaaattctcgaaaaagac

SEQ ID NO: 121449 - DNA, 25 bp, Artificial
  probe
  misc_feature (1)..(25): SEQ ID NO: 795; WAN024CJT_at; Start 370; Stop 394
tctactgcaggaacttatggtcatg

SEQ ID NO: 121450 - DNA, 25 bp, Artificial
  probe
  misc_feature (1)..(25): SEQ ID NO: 795; WAN024CJT_at; Start 575; Stop 599
ctcattattttaagaccaagtctgc

SEQ ID NO: 121451 - DNA, 25 bp, Artificial
  probe
  misc_feature (1)..(25): SEQ ID NO: 795; WAN024CJT_at; Start 257; Stop 281
tcaatggttttgaaattccggcagc

SEQ ID NO: 121452 - DNA, 25 bp, Artificial
  probe
  misc_feature (1)..(25): SEQ ID NO: 795; WAN024CJT_at; Start 488; Stop 512
caaacacgatgacaggatttattca

SEQ ID NO: 121453 - DNA, 25 bp, Artificial
  probe
  misc_feature (1)..(25): SEQ ID NO: 795; WAN024CJT_at; Start 560; Stop 584
cttcaacaggcggaactcattattt

SEQ ID NO: 121454 - DNA, 25 bp, Artificial
  probe
  misc_feature (1)..(25): SEQ ID NO: 795; WAN024CJT_at; Start 177; Stop 201
aaatgggagccaggagattgatcag

SEQ ID NO: 121455 - DNA, 25 bp, Artificial
  probe
  misc_feature (1)..(25): SEQ ID NO: 795; WAN024CJT_at; Start 163; Stop 187
cctgcttattataaaaatgggagcc

SEQ ID NO: 121456 - DNA, 25 bp, Artificial
  probe
  misc_feature (1)..(25): SEQ ID NO: 795; WAN024CJT_at; Start 333; Stop 357
tgtagataatacaccgacgattggt

SEQ ID NO: 121457 - DNA, 25 bp, Artificial
  probe
  misc_feature (1)..(25): SEQ ID NO: 795; WAN024CJT_at; Start 359; Stop 383
ccattacttggtctactgcaggaac

SEQ ID NO: 121458 - DNA, 25 bp, Artificial
  probe
  misc_feature (1)..(25): SEQ ID NO: 795; WAN024CJT_at; Start 77; Stop 101
tagtagtaggattgatgctagcagc

SEQ ID NO: 121459 - DNA, 25 bp, Artificial
  probe
  misc_feature (1)..(25): SEQ ID NO: 795; WAN024CJT_at; Start 610; Stop 634
gaacccctagttagtgcaactgtga

SEQ ID NO: 121460 - DNA, 25 bp, Artificial
  probe
  misc_feature (1)..(25): SEQ ID NO: 795; WAN024CJT_at; Start 633; Stop 657
gattgattactattatcctggagag

SEQ ID NO: 121461 - DNA, 25 bp, Artificial
  probe
  misc_feature (1)..(25): SEQ ID NO: 795; WAN024CJT_at; Start 32; Stop 56
caagttattacttgaagatgtcagt

SEQ ID NO: 121462 - DNA, 25 bp, Artificial
  probe
  misc_feature (1)..(25): SEQ ID NO: 795; WAN024CJT_at; Start 305; Stop 329
gacatcgtgctcgtcgggaaggtta

SEQ ID NO: 121463 - DNA, 25 bp, Artificial
  probe
  misc_feature (1)..(25): SEQ ID NO: 795; WAN024CJT_at; Start 444; Stop 468
taactatggttatacagaatcctat

SEQ ID NO: 121464 - DNA, 25 bp, Artificial
  probe
  misc_feature (1)..(25): SEQ ID NO: 795; WAN024CJT_at; Start 92; Stop 116
tgctagcagctggtgatagtgtcta

SEQ ID NO: 121465 - DNA, 25 bp, Artificial
  probe
  misc_feature (1)..(25): SEQ ID NO: 795; WAN024CJT_at; Start 108; Stop 132
tagtgtctatgcctattccagagga

SEQ ID NO: 121466 - DNA, 25 bp, Artificial
  probe
  misc_feature (1)..(25): SEQ ID NO: 795; WAN024CJT_at; Start 423; Stop 447
tcagattgagattgaggaatataac

SEQ ID NO: 121467 - DNA, 25 bp, Artificial
  probe
  misc_feature (1)..(25): SEQ ID NO: 795; WAN024CJT_at; Start 126; Stop 150
cagaggaaatggatcgattgcgcgt

SEQ ID NO: 121468 - DNA, 25 bp, Artificial
  probe
  misc_feature (1)..(25): SEQ ID NO: 795; WAN024CJT_at; Start 235; Stop 259
gtagcctttcgtttgagtaatgtca

SEQ ID NO: 121469 - DNA, 25 bp, Artificial
  probe
  misc_feature (1)..(25): SEQ ID NO: 795; WAN024CJT_at; Start 216; Stop 240
tcgtcagtgtacttcttttgtagcc

SEQ ID NO: 121470 - DNA, 25 bp, Artificial
  probe
  misc_feature (1)..(25): SEQ ID NO: 795; WAN024CJT_at; Start 398; Stop 422
cctgggtgtcaaatgtaatgggaga

SEQ ID NO: 121471 - DNA, 25 bp, Artificial
  probe
  misc_feature (1)..(25): SEQ ID NO: 795; WAN024CJT_at; Start 11; Stop 35
taccgtttatagcaagaggaacaag

SEQ ID NO: 121472 - DNA, 25 bp, Artificial
  probe
  misc_feature (1)..(25): SEQ ID NO: 795; WAN024CJT_at; Start 344; Stop 368
caccgacgattggttccattacttg

SEQ ID NO: 121473 - DNA, 25 bp, Artificial
  probe
  misc_feature (1)..(25): SEQ ID NO: 7530; WAN024CJU_at; Start 227; Stop 251
aaggcgtaggagacactgaccctca

SEQ ID NO: 121474 - DNA, 25 bp, Artificial
  probe
  misc_feature (1)..(25): SEQ ID NO: 7530; WAN024CJU_at; Start 90; Stop 114
tacccaaaagactgataatcgacac

SEQ ID NO: 121475 - DNA, 25 bp, Artificial
  probe
  misc_feature (1)..(25): SEQ ID NO: 7530; WAN024CJU_at; Start 129; Stop 153
caaacatggtatcatactgaaacag

SEQ ID NO: 121476 - DNA, 25 bp, Artificial
  probe
  misc_feature (1)..(25): SEQ ID NO: 7530; WAN024CJU_at; Start 123; Stop 147
taatggcaaacatggtatcatactg

SEQ ID NO: 121477 - DNA, 25 bp, Artificial
  probe
  misc_feature (1)..(25): SEQ ID NO: 7530; WAN024CJU_at; Start 319; Stop 343
tcgcatcagactaaacaaagtcagc

SEQ ID NO: 121478 - DNA, 25 bp, Artificial
  probe
  misc_feature (1)..(25): SEQ ID NO: 7530; WAN024CJU_at; Start 159; Stop 183
tagactgaatcatataaacaccaag

SEQ ID NO: 121479 - DNA, 25 bp, Artificial
  probe
  misc_feature (1)..(25): SEQ ID NO: 7530; WAN024CJU_at; Start 200; Stop 224
aaccactcagataccacagttgtga

SEQ ID NO: 121480 - DNA, 25 bp, Artificial
  probe
  misc_feature (1)..(25): SEQ ID NO: 7530; WAN024CJU_at; Start 60; Stop 84
catatttttcactgatatcgaccag

SEQ ID NO: 121481 - DNA, 25 bp, Artificial
  probe
  misc_feature (1)..(25): SEQ ID NO: 7530; WAN024CJU_at; Start 279; Stop 303
ccgggattttaaaatgccacaggat

SEQ ID NO: 121482 - DNA, 25 bp, Artificial
  probe
  misc_feature (1)..(25): SEQ ID NO: 7530; WAN024CJU_at; Start 73; Stop 97
gatatcgaccagcttcatacccaaa

SEQ ID NO: 121483 - DNA, 25 bp, Artificial
  probe
  misc_feature (1)..(25): SEQ ID NO: 7530; WAN024CJU_at; Start 168; Stop 192
tcatataaacaccaagaccttcaaa

SEQ ID NO: 121484 - DNA, 25 bp, Artificial
  probe
  misc_feature (1)..(25): SEQ ID NO: 7530; WAN024CJU_at; Start 223; Stop 247
gataaaggcgtaggagacactgacc

SEQ ID NO: 121485 - DNA, 25 bp, Artificial
  probe
  misc_feature (1)..(25): SEQ ID NO: 7530; WAN024CJU_at; Start 293; Stop 317
tgccacaggatttgccaagggtttg

SEQ ID NO: 121486 - DNA, 25 bp, Artificial
  probe
  misc_feature (1)..(25): SEQ ID NO: 7530; WAN024CJU_at; Start 257; Stop 281
gcataaaagtaaggcaggctaaccg

SEQ ID NO: 121487 - DNA, 25 bp, Artificial
  probe
  misc_feature (1)..(25): SEQ ID NO: 7530; WAN024CJU_at; Start 305; Stop 329
tgccaagggtttgctcgcatcagac

SEQ ID NO: 121488 - DNA, 25 bp, Artificial
  probe
  misc_feature (1)..(25): SEQ ID NO: 7530; WAN024CJU_at; Start 311; Stop 335
gggtttgctcgcatcagactaaaca

SEQ ID NO: 121489 - DNA, 25 bp, Artificial
  probe
  misc_feature (1)..(25): SEQ ID NO: 7530; WAN024CJU_at; Start 28; Stop 52
cgctctattttaagtacgtttccat

SEQ ID NO: 121490 - DNA, 25 bp, Artificial
  probe
  misc_feature (1)..(25): SEQ ID NO: 7530; WAN024CJU_at; Start 79; Stop 103
gaccagcttcatacccaaaagactg

SEQ ID NO: 121491 - DNA, 25 bp, Artificial
  probe
  misc_feature (1)..(25): SEQ ID NO: 7530; WAN024CJU_at; Start 378; Stop 402
tactaacgatgatgggaaaggttgt

SEQ ID NO: 121492 - DNA, 25 bp, Artificial
  probe
  misc_feature (1)..(25): SEQ ID NO: 7530; WAN024CJU_at; Start 369; Stop 393
cgtccaaaatactaacgatgatggg

SEQ ID NO: 121493 - DNA, 25 bp, Artificial
  probe
  misc_feature (1)..(25): SEQ ID NO: 7530; WAN024CJU_at; Start 350; Stop 374
ttgtcacaatgcctaaaaccgtcca

SEQ ID NO: 121494 - DNA, 25 bp, Artificial
  probe
  misc_feature (1)..(25): SEQ ID NO: 7530; WAN024CJU_at; Start 110; Stop 134
gacaccagaataataatggcaaaca

SEQ ID NO: 121495 - DNA, 25 bp, Artificial
  probe
  misc_feature (1)..(25): SEQ ID NO: 7530; WAN024CJU_at; Start 288; Stop 312
taaaatgccacaggatttgccaagg

SEQ ID NO: 121496 - DNA, 25 bp, Artificial
  probe
  misc_feature (1)..(25): SEQ ID NO: 7530; WAN024CJU_at; Start 354; Stop 378
cacaatgcctaaaaccgtccaaaat

SEQ ID NO: 121497 - DNA, 25 bp, Artificial
  probe
  misc_feature (1)..(25): SEQ ID NO: 7530; WAN024CJU_at; Start 145; Stop 169
ctgaaacagttttttagactgaatc

SEQ ID NO: 121498 - DNA, 25 bp, Artificial
  probe
  misc_feature (1)..(25): SEQ ID NO: 7530; WAN024CJU_at; Start 233; Stop 257
taggagacactgaccctcagacctg

SEQ ID NO: 121499 - DNA, 25 bp, Artificial
  probe
  misc_feature (1)..(25): SEQ ID NO: 7530; WAN024CJU_at; Start 38; Stop 62
taagtacgtttccatttaatcacat

SEQ ID NO: 121500 - DNA, 25 bp, Artificial
  probe
  misc_feature (1)..(25): SEQ ID NO: 7530; WAN024CJU_at; Start 247; Stop 271
cctcagacctgcataaaagtaaggc

SEQ ID NO: 121501 - DNA, 25 bp, Artificial
  probe
  misc_feature (1)..(25): SEQ ID NO: 7530; WAN024CJU_at; Start 105; Stop 129
taatcgacaccagaataataatggc

SEQ ID NO: 121502 - DNA, 25 bp, Artificial
  probe
  misc_feature (1)..(25): SEQ ID NO: 7530; WAN024CJU_at; Start 384; Stop 408
cgatgatgggaaaggttgttgttaa

SEQ ID NO: 121503 - DNA, 25 bp, Artificial
  probe
  misc_feature (1)..(25): SEQ ID NO: 7530; WAN024CJU_at; Start 94; Stop 118
caaaagactgataatcgacaccaga

SEQ ID NO: 121504 - DNA, 25 bp, Artificial
  probe
  misc_feature (1)..(25): SEQ ID NO: 7530; WAN024CJU_at; Start 334; Stop 358
caaagtcagcatatccttgtcacaa

SEQ ID NO: 121505 - DNA, 25 bp, Artificial
  probe
  misc_feature (1)..(25): SEQ ID NO: 7530; WAN024CJU_at; Start 298; Stop 322
caggatttgccaagggtttgctcgc

SEQ ID NO: 121506 - DNA, 25 bp, Artificial
  probe
  misc_feature (1)..(25): SEQ ID NO: 7530; WAN024CJU_at; Start 213; Stop 237
ccacagttgtgataaaggcgtagga

SEQ ID NO: 121507 - DNA, 25 bp, Artificial
  probe
  misc_feature (1)..(25): SEQ ID NO: 5107; WAN024CJV_at; Start 140; Stop 164
gaatttcaagaggtgtcggcaggat

SEQ ID NO: 121508 - DNA, 25 bp, Artificial
  probe
  misc_feature (1)..(25): SEQ ID NO: 5107; WAN024CJV_at; Start 23; Stop 47
tgagcacagccataagacaggcaat

SEQ ID NO: 121509 - DNA, 25 bp, Artificial
  probe
  misc_feature (1)..(25): SEQ ID NO: 5107; WAN024CJV_at; Start 149; Stop 173
gaggtgtcggcaggataaacttggg

SEQ ID NO: 121510 - DNA, 25 bp, Artificial
  probe
  misc_feature (1)..(25): SEQ ID NO: 5107; WAN024CJV_at; Start 193; Stop 217
gctaactgccagattgacaatactc

SEQ ID NO: 121511 - DNA, 25 bp, Artificial
  probe
  misc_feature (1)..(25): SEQ ID NO: 5107; WAN024CJV_at; Start 233; Stop 257
gactaatgtgtcgtctcagtatact

SEQ ID NO: 121512 - DNA, 25 bp, Artificial
  probe
  misc_feature (1)..(25): SEQ ID NO: 5107; WAN024CJV_at; Start 202; Stop 226
cagattgacaatactccgagaaagc

SEQ ID NO: 121513 - DNA, 25 bp, Artificial
  probe
  misc_feature (1)..(25): SEQ ID NO: 5107; WAN024CJV_at; Start 96; Stop 120
gctatggtgccagagaaattctctg

SEQ ID NO: 121514 - DNA, 25 bp, Artificial
  probe
  misc_feature (1)..(25): SEQ ID NO: 5107; WAN024CJV_at; Start 2; Stop 26
tgagccaagtcaaactatccatgag

SEQ ID NO: 121515 - DNA, 25 bp, Artificial
  probe
  misc_feature (1)..(25): SEQ ID NO: 5107; WAN024CJV_at; Start 144; Stop 168
ttcaagaggtgtcggcaggataaac

SEQ ID NO: 121516 - DNA, 25 bp, Artificial
  probe
  misc_feature (1)..(25): SEQ ID NO: 5107; WAN024CJV_at; Start 216; Stop 240
tccgagaaagcccaatagactaatg

SEQ ID NO: 121517 - DNA, 25 bp, Artificial
  probe
  misc_feature (1)..(25): SEQ ID NO: 5107; WAN024CJV_at; Start 117; Stop 141
tctgtcacgaacaaagggctggaga

SEQ ID NO: 121518 - DNA, 25 bp, Artificial
  probe
  misc_feature (1)..(25): SEQ ID NO: 5107; WAN024CJV_at; Start 124; Stop 148
cgaacaaagggctggagaatttcaa

SEQ ID NO: 121519 - DNA, 25 bp, Artificial
  probe
  misc_feature (1)..(25): SEQ ID NO: 5107; WAN024CJV_at; Start 70; Stop 94
agtaaagccactctcaaggtcgccc

SEQ ID NO: 121520 - DNA, 25 bp, Artificial
  probe
  misc_feature (1)..(25): SEQ ID NO: 5107; WAN024CJV_at; Start 128; Stop 152
caaagggctggagaatttcaagagg

SEQ ID NO: 121521 - DNA, 25 bp, Artificial
  probe
  misc_feature (1)..(25): SEQ ID NO: 5107; WAN024CJV_at; Start 12; Stop 36
caaactatccatgagcacagccata

SEQ ID NO: 121522 - DNA, 25 bp, Artificial
  probe
  misc_feature (1)..(25): SEQ ID NO: 5107; WAN024CJV_at; Start 33; Stop 57
cataagacaggcaatcaaaactccc

SEQ ID NO: 121523 - DNA, 25 bp, Artificial
  probe
  misc_feature (1)..(25): SEQ ID NO: 5107; WAN024CJV_at; Start 221; Stop 245
gaaagcccaatagactaatgtgtcg

SEQ ID NO: 121524 - DNA, 25 bp, Artificial
  probe
  misc_feature (1)..(25): SEQ ID NO: 5107; WAN024CJV_at; Start 110; Stop 134
gaaattctctgtcacgaacaaaggg

SEQ ID NO: 121525 - DNA, 25 bp, Artificial
  probe
  misc_feature (1)..(25): SEQ ID NO: 5107; WAN024CJV_at; Start 42; Stop 66
ggcaatcaaaactcccaaaatcagc

SEQ ID NO: 121526 - DNA, 25 bp, Artificial
  probe
  misc_feature (1)..(25): SEQ ID NO: 5107; WAN024CJV_at; Start 82; Stop 106
ctcaaggtcgcccagctatggtgcc

SEQ ID NO: 121527 - DNA, 25 bp, Artificial
  probe
  misc_feature (1)..(25): SEQ ID NO: 5107; WAN024CJV_at; Start 92; Stop 116
cccagctatggtgccagagaaattc

SEQ ID NO: 121528 - DNA, 25 bp, Artificial
  probe
  misc_feature (1)..(25): SEQ ID NO: 5107; WAN024CJV_at; Start 227; Stop 251
ccaatagactaatgtgtcgtctcag

SEQ ID NO: 121529 - DNA, 25 bp, Artificial
  probe
  misc_feature (1)..(25): SEQ ID NO: 5107; WAN024CJV_at; Start 57; Stop 81
caaaatcagccccagtaaagccact

SEQ ID NO: 121530 - DNA, 25 bp, Artificial
  probe
  misc_feature (1)..(25): SEQ ID NO: 5107; WAN024CJV_at; Start 210; Stop 234
caatactccgagaaagcccaataga

SEQ ID NO: 121531 - DNA, 25 bp, Artificial
  probe
  misc_feature (1)..(25): SEQ ID NO: 5107; WAN024CJV_at; Start 179; Stop 203
gtttaagaaaacctgctaactgcca

SEQ ID NO: 121532 - DNA, 25 bp, Artificial
  probe
  misc_feature (1)..(25): SEQ ID NO: 5107; WAN024CJV_at; Start 68; Stop 92
ccagtaaagccactctcaaggtcgc

SEQ ID NO: 121533 - DNA, 25 bp, Artificial
  probe
  misc_feature (1)..(25): SEQ ID NO: 5107; WAN024CJV_at; Start 185; Stop 209
gaaaacctgctaactgccagattga

SEQ ID NO: 121534 - DNA, 25 bp, Artificial
  probe
  misc_feature (1)..(25): SEQ ID NO: 5107; WAN024CJV_at; Start 89; Stop 113
tcgcccagctatggtgccagagaaa

SEQ ID NO: 121535 - DNA, 25 bp, Artificial
  probe
  misc_feature (1)..(25): SEQ ID NO: 5107; WAN024CJV_at; Start 135; Stop 159
ctggagaatttcaagaggtgtcggc

SEQ ID NO: 121536 - DNA, 25 bp, Artificial
  probe
  misc_feature (1)..(25): SEQ ID NO: 5107; WAN024CJV_at; Start 19; Stop 43
tccatgagcacagccataagacagg

SEQ ID NO: 121537 - DNA, 25 bp, Artificial
  probe
  misc_feature (1)..(25): SEQ ID NO: 5107; WAN024CJV_at; Start 8; Stop 32
aagtcaaactatccatgagcacagc

SEQ ID NO: 121538 - DNA, 25 bp, Artificial
  probe
  misc_feature (1)..(25): SEQ ID NO: 5107; WAN024CJV_at; Start 85; Stop 109
aaggtcgcccagctatggtgccaga

SEQ ID NO: 121539 - DNA, 25 bp, Artificial
  probe
  misc_feature (1)..(25): SEQ ID NO: 5107; WAN024CJV_at; Start 114; Stop 138
ttctctgtcacgaacaaagggctgg

SEQ ID NO: 121540 - DNA, 25 bp, Artificial
  probe
  misc_feature (1)..(25): SEQ ID NO: 5107; WAN024CJV_at; Start 204; Stop 228
gattgacaatactccgagaaagccc

SEQ ID NO: 121541 - DNA, 25 bp, Artificial
  probe
  misc_feature (1)..(25): SEQ ID NO: 5300; WAN024CJW_at; Start 217; Stop 241
taagaaaaatgtcaaggaaactgct

SEQ ID NO: 121542 - DNA, 25 bp, Artificial
  probe
  misc_feature (1)..(25): SEQ ID NO: 5300; WAN024CJW_at; Start 22; Stop 46
cataagaacctcctcttctcgtttt

SEQ ID NO: 121543 - DNA, 25 bp, Artificial
  probe
  misc_feature (1)..(25): SEQ ID NO: 5300; WAN024CJW_at; Start 229; Stop 253
caaggaaactgcttacagaaaagag

SEQ ID NO: 121544 - DNA, 25 bp, Artificial
  probe
  misc_feature (1)..(25): SEQ ID NO: 5300; WAN024CJW_at; Start 78; Stop 102
catggaaaaggtgcaaaattagact

SEQ ID NO: 121545 - DNA, 25 bp, Artificial
  probe
  misc_feature (1)..(25): SEQ ID NO: 5300; WAN024CJW_at; Start 253; Stop 277
gcaggaaatttctcctactccaatt

SEQ ID NO: 121546 - DNA, 25 bp, Artificial
  probe
  misc_feature (1)..(25): SEQ ID NO: 5300; WAN024CJW_at; Start 73; Stop 97
ccatacatggaaaaggtgcaaaatt

SEQ ID NO: 121547 - DNA, 25 bp, Artificial
  probe
  misc_feature (1)..(25): SEQ ID NO: 5300; WAN024CJW_at; Start 233; Stop 257
gaaactgcttacagaaaagagcagg

SEQ ID NO: 121548 - DNA, 25 bp, Artificial
  probe
  misc_feature (1)..(25): SEQ ID NO: 5300; WAN024CJW_at; Start 288; Stop 312
gttctccatcactgtttactctgta

SEQ ID NO: 121549 - DNA, 25 bp, Artificial
  probe
  misc_feature (1)..(25): SEQ ID NO: 5300; WAN024CJW_at; Start 104; Stop 128
agtatcgttccctccgctggcatta

SEQ ID NO: 121550 - DNA, 25 bp, Artificial
  probe
  misc_feature (1)..(25): SEQ ID NO: 5300; WAN024CJW_at; Start 204; Stop 228
tgatagcgcaaaataagaaaaatgt

SEQ ID NO: 121551 - DNA, 25 bp, Artificial
  probe
  misc_feature (1)..(25): SEQ ID NO: 5300; WAN024CJW_at; Start 268; Stop 292
tactccaattttctatactcgttct

SEQ ID NO: 121552 - DNA, 25 bp, Artificial
  probe
  misc_feature (1)..(25): SEQ ID NO: 5300; WAN024CJW_at; Start 246; Stop 270
gaaaagagcaggaaatttctcctac

SEQ ID NO: 121553 - DNA, 25 bp, Artificial
  probe
  misc_feature (1)..(25): SEQ ID NO: 5300; WAN024CJW_at; Start 99; Stop 123
gactaagtatcgttccctccgctgg

SEQ ID NO: 121554 - DNA, 25 bp, Artificial
  probe
  misc_feature (1)..(25): SEQ ID NO: 5300; WAN024CJW_at; Start 223; Stop 247
aaatgtcaaggaaactgcttacaga

SEQ ID NO: 121555 - DNA, 25 bp, Artificial
  probe
  misc_feature (1)..(25): SEQ ID NO: 5300; WAN024CJW_at; Start 239; Stop 263
gcttacagaaaagagcaggaaattt

SEQ ID NO: 121556 - DNA, 25 bp, Artificial
  probe
  misc_feature (1)..(25): SEQ ID NO: 5300; WAN024CJW_at; Start 133; Stop 157
gatcaggtgcggtcgaagtttaaca

SEQ ID NO: 121557 - DNA, 25 bp, Artificial
  probe
  misc_feature (1)..(25): SEQ ID NO: 5300; WAN024CJW_at; Start 136; Stop 160
caggtgcggtcgaagtttaacactt

SEQ ID NO: 121558 - DNA, 25 bp, Artificial
  probe
  misc_feature (1)..(25): SEQ ID NO: 5300; WAN024CJW_at; Start 129; Stop 153
cccagatcaggtgcggtcgaagttt

SEQ ID NO: 121559 - DNA, 25 bp, Artificial
  probe
  misc_feature (1)..(25): SEQ ID NO: 5300; WAN024CJW_at; Start 3; Stop 27
gcaaggcaatgcttgctttcataag

SEQ ID NO: 121560 - DNA, 25 bp, Artificial
  probe
  misc_feature (1)..(25): SEQ ID NO: 5300; WAN024CJW_at; Start 140; Stop 164
tgcggtcgaagtttaacacttcctc

SEQ ID NO: 121561 - DNA, 25 bp, Artificial
  probe
  misc_feature (1)..(25): SEQ ID NO: 5300; WAN024CJW_at; Start 168; Stop 192
gactgtacacagactcccatatatt

SEQ ID NO: 121562 - DNA, 25 bp, Artificial
  probe
  misc_feature (1)..(25): SEQ ID NO: 5300; WAN024CJW_at; Start 121; Stop 145
tggcattacccagatcaggtgcggt

SEQ ID NO: 121563 - DNA, 25 bp, Artificial
  probe
  misc_feature (1)..(25): SEQ ID NO: 5300; WAN024CJW_at; Start 7; Stop 31
ggcaatgcttgctttcataagaacc

SEQ ID NO: 121564 - DNA, 25 bp, Artificial
  probe
  misc_feature (1)..(25): SEQ ID NO: 5300; WAN024CJW_at; Start 163; Stop 187
tctcagactgtacacagactcccat

SEQ ID NO: 121565 - DNA, 25 bp, Artificial
  probe
  misc_feature (1)..(25): SEQ ID NO: 5300; WAN024CJW_at; Start 148; Stop 172
aagtttaacacttcctctcagactg

SEQ ID NO: 121566 - DNA, 25 bp, Artificial
  probe
  misc_feature (1)..(25): SEQ ID NO: 5300; WAN024CJW_at; Start 173; Stop 197
tacacagactcccatatattatatg

SEQ ID NO: 121567 - DNA, 25 bp, Artificial
  probe
  misc_feature (1)..(25): SEQ ID NO: 5300; WAN024CJW_at; Start 68; Stop 92
ctttaccatacatggaaaaggtgca

SEQ ID NO: 121568 - DNA, 25 bp, Artificial
  probe
  misc_feature (1)..(25): SEQ ID NO: 5300; WAN024CJW_at; Start 192; Stop 216
tatatgtatatatgatagcgcaaaa

SEQ ID NO: 121569 - DNA, 25 bp, Artificial
  probe
  misc_feature (1)..(25): SEQ ID NO: 5300; WAN024CJW_at; Start 153; Stop 177
taacacttcctctcagactgtacac

SEQ ID NO: 121570 - DNA, 25 bp, Artificial
  probe
  misc_feature (1)..(25): SEQ ID NO: 5300; WAN024CJW_at; Start 116; Stop 140
tccgctggcattacccagatcaggt

SEQ ID NO: 121571 - DNA, 25 bp, Artificial
  probe
  misc_feature (1)..(25): SEQ ID NO: 5300; WAN024CJW_at; Start 87; Stop 111
ggtgcaaaattagactaagtatcgt

SEQ ID NO: 121572 - DNA, 25 bp, Artificial
  probe
  misc_feature (1)..(25): SEQ ID NO: 5300; WAN024CJW_at; Start 13; Stop 37
gcttgctttcataagaacctcctct

SEQ ID NO: 121573 - DNA, 25 bp, Artificial
  probe
  misc_feature (1)..(25): SEQ ID NO: 5300; WAN024CJW_at; Start 124; Stop 148
cattacccagatcaggtgcggtcga

SEQ ID NO: 121574 - DNA, 25 bp, Artificial
  probe
  misc_feature (1)..(25): SEQ ID NO: 5300; WAN024CJW_at; Start 279; Stop 303
tctatactcgttctccatcactgtt

SEQ ID NO: 121575 - DNA, 25 bp, Artificial
  probe
  misc_feature (1)..(25): SEQ ID NO: 891; WAN024CJX_at; Start 114; Stop 138
gacaccatttgaaacggtcttggaa

SEQ ID NO: 121576 - DNA, 25 bp, Artificial
  probe
  misc_feature (1)..(25): SEQ ID NO: 891; WAN024CJX_at; Start 44; Stop 68
ggattgatcggatagctgttattga

SEQ ID NO: 121577 - DNA, 25 bp, Artificial
  probe
  misc_feature (1)..(25): SEQ ID NO: 891; WAN024CJX_at; Start 151; Stop 175
gagcttatgcgcattctaaaagaag

SEQ ID NO: 121578 - DNA, 25 bp, Artificial
  probe
  misc_feature (1)..(25): SEQ ID NO: 891; WAN024CJX_at; Start 104; Stop 128
cgatggtagtgacaccatttgaaac

SEQ ID NO: 121579 - DNA, 25 bp, Artificial
  probe
  misc_feature (1)..(25): SEQ ID NO: 891; WAN024CJX_at; Start 2; Stop 26
tgaaagcaagcattgccttgcaagt

SEQ ID NO: 121580 - DNA, 25 bp, Artificial
  probe
  misc_feature (1)..(25): SEQ ID NO: 891; WAN024CJX_at; Start 198; Stop 222
ggcagacaatgtctttgccaatgtc

SEQ ID NO: 121581 - DNA, 25 bp, Artificial
  probe
  misc_feature (1)..(25): SEQ ID NO: 891; WAN024CJX_at; Start 65; Stop 89
ttgatcaggtcattgcttatctgca

SEQ ID NO: 121582 - DNA, 25 bp, Artificial
  probe
  misc_feature (1)..(25): SEQ ID NO: 891; WAN024CJX_at; Start 163; Stop 187
attctaaaagaagcgctggaagtgg

SEQ ID NO: 121583 - DNA, 25 bp, Artificial
  probe
  misc_feature (1)..(25): SEQ ID NO: 891; WAN024CJX_at; Start 167; Stop 191
taaaagaagcgctggaagtggcagg

SEQ ID NO: 121584 - DNA, 25 bp, Artificial
  probe
  misc_feature (1)..(25): SEQ ID NO: 891; WAN024CJX_at; Start 214; Stop 238
gccaatgtcaaaataaatgtaggag

SEQ ID NO: 121585 - DNA, 25 bp, Artificial
  probe
  misc_feature (1)..(25): SEQ ID NO: 891; WAN024CJX_at; Start 162; Stop 186
cattctaaaagaagcgctggaagtg

SEQ ID NO: 121586 - DNA, 25 bp, Artificial
  probe
  misc_feature (1)..(25): SEQ ID NO: 891; WAN024CJX_at; Start 153; Stop 177
gcttatgcgcattctaaaagaagcg

SEQ ID NO: 121587 - DNA, 25 bp, Artificial
  probe
  misc_feature (1)..(25): SEQ ID NO: 891; WAN024CJX_at; Start 116; Stop 140
caccatttgaaacggtcttggaagg

SEQ ID NO: 121588 - DNA, 25 bp, Artificial
  probe
  misc_feature (1)..(25): SEQ ID NO: 891; WAN024CJX_at; Start 189; Stop 213
agggcaggaggcagacaatgtcttt

SEQ ID NO: 121589 - DNA, 25 bp, Artificial
  probe
  misc_feature (1)..(25): SEQ ID NO: 891; WAN024CJX_at; Start 56; Stop 80
tagctgttattgatcaggtcattgc

SEQ ID NO: 121590 - DNA, 25 bp, Artificial
  probe
  misc_feature (1)..(25): SEQ ID NO: 891; WAN024CJX_at; Start 147; Stop 171
tgatgagcttatgcgcattctaaaa

SEQ ID NO: 121591 - DNA, 25 bp, Artificial
  probe
  misc_feature (1)..(25): SEQ ID NO: 891; WAN024CJX_at; Start 156; Stop 180
tatgcgcattctaaaagaagcgctg

SEQ ID NO: 121592 - DNA, 25 bp, Artificial
  probe
  misc_feature (1)..(25): SEQ ID NO: 891; WAN024CJX_at; Start 208; Stop 232
gtctttgccaatgtcaaaataaatg

SEQ ID NO: 121593 - DNA, 25 bp, Artificial
  probe
  misc_feature (1)..(25): SEQ ID NO: 891; WAN024CJX_at; Start 142; Stop 166
gagtttgatgagcttatgcgcattc

SEQ ID NO: 121594 - DNA, 25 bp, Artificial
  probe
  misc_feature (1)..(25): SEQ ID NO: 891; WAN024CJX_at; Start 202; Stop 226
gacaatgtctttgccaatgtcaaaa

SEQ ID NO: 121595 - DNA, 25 bp, Artificial
  probe
  misc_feature (1)..(25): SEQ ID NO: 891; WAN024CJX_at; Start 193; Stop 217
caggaggcagacaatgtctttgcca

SEQ ID NO: 121596 - DNA, 25 bp, Artificial
  probe
  misc_feature (1)..(25): SEQ ID NO: 891; WAN024CJX_at; Start 13; Stop 37
attgccttgcaagttttacccctag

SEQ ID NO: 121597 - DNA, 25 bp, Artificial
  probe
  misc_feature (1)..(25): SEQ ID NO: 891; WAN024CJX_at; Start 238; Stop 262
gagattttaagtattgatgagaaac

SEQ ID NO: 121598 - DNA, 25 bp, Artificial
  probe
  misc_feature (1)..(25): SEQ ID NO: 891; WAN024CJX_at; Start 231; Stop 255
tgtaggagagattttaagtattgat

SEQ ID NO: 121599 - DNA, 25 bp, Artificial
  probe
  misc_feature (1)..(25): SEQ ID NO: 891; WAN024CJX_at; Start 8; Stop 32
caagcattgccttgcaagttttacc

SEQ ID NO: 121600 - DNA, 25 bp, Artificial
  probe
  misc_feature (1)..(25): SEQ ID NO: 891; WAN024CJX_at; Start 219; Stop 243
tgtcaaaataaatgtaggagagatt

SEQ ID NO: 121601 - DNA, 25 bp, Artificial
  probe
  misc_feature (1)..(25): SEQ ID NO: 891; WAN024CJX_at; Start 108; Stop 132
ggtagtgacaccatttgaaacggtc

SEQ ID NO: 121602 - DNA, 25 bp, Artificial
  probe
  misc_feature (1)..(25): SEQ ID NO: 891; WAN024CJX_at; Start 140; Stop 164
gggagtttgatgagcttatgcgcat

SEQ ID NO: 121603 - DNA, 25 bp, Artificial
  probe
  misc_feature (1)..(25): SEQ ID NO: 891; WAN024CJX_at; Start 52; Stop 76
cggatagctgttattgatcaggtca

SEQ ID NO: 121604 - DNA, 25 bp, Artificial
  probe
  misc_feature (1)..(25): SEQ ID NO: 891; WAN024CJX_at; Start 200; Stop 224
cagacaatgtctttgccaatgtcaa

SEQ ID NO: 121605 - DNA, 25 bp, Artificial
  probe
  misc_feature (1)..(25): SEQ ID NO: 891; WAN024CJX_at; Start 174; Stop 198
agcgctggaagtggcagggcaggag

SEQ ID NO: 121606 - DNA, 25 bp, Artificial
  probe
  misc_feature (1)..(25): SEQ ID NO: 891; WAN024CJX_at; Start 160; Stop 184
cgcattctaaaagaagcgctggaag

SEQ ID NO: 121607 - DNA, 25 bp, Artificial
  probe
  misc_feature (1)..(25): SEQ ID NO: 891; WAN024CJX_at; Start 61; Stop 85
gttattgatcaggtcattgcttatc

SEQ ID NO: 121608 - DNA, 25 bp, Artificial
  probe
  misc_feature (1)..(25): SEQ ID NO: 891; WAN024CJX_at; Start 112; Stop 136
gtgacaccatttgaaacggtcttgg

SEQ ID NO: 121609 - DNA, 25 bp, Artificial
  probe
  misc_feature (1)..(25): SEQ ID NO: 5216; WAN024CJY_at; Start 220; Stop 244
ggagttttgattgcctgtcttatgg

SEQ ID NO: 121610 - DNA, 25 bp, Artificial
  probe
  misc_feature (1)..(25): SEQ ID NO: 5216; WAN024CJY_at; Start 327; Stop 351
catagctcctatcctggtcttgtgg

SEQ ID NO: 121611 - DNA, 25 bp, Artificial
  probe
  misc_feature (1)..(25): SEQ ID NO: 5216; WAN024CJY_at; Start 487; Stop 511
ccttggcaaatcctgtggcatttta

SEQ ID NO: 121612 - DNA, 25 bp, Artificial
  probe
  misc_feature (1)..(25): SEQ ID NO: 5216; WAN024CJY_at; Start 26; Stop 50
tgagacgacacattagtctattggg

SEQ ID NO: 121613 - DNA, 25 bp, Artificial
  probe
  misc_feature (1)..(25): SEQ ID NO: 5216; WAN024CJY_at; Start 355; Stop 379
ggttatgggattttgcccaagattg

SEQ ID NO: 121614 - DNA, 25 bp, Artificial
  probe
  misc_feature (1)..(25): SEQ ID NO: 5216; WAN024CJY_at; Start 210; Stop 234
gctgattttgggagttttgattgcc

SEQ ID NO: 121615 - DNA, 25 bp, Artificial
  probe
  misc_feature (1)..(25): SEQ ID NO: 5216; WAN024CJY_at; Start 224; Stop 248
ttttgattgcctgtcttatggctgt

SEQ ID NO: 121616 - DNA, 25 bp, Artificial
  probe
  misc_feature (1)..(25): SEQ ID NO: 5216; WAN024CJY_at; Start 302; Stop 326
tcattcagaccattccgaccattgc

SEQ ID NO: 121617 - DNA, 25 bp, Artificial
  probe
  misc_feature (1)..(25): SEQ ID NO: 5216; WAN024CJY_at; Start 329; Stop 353
tagctcctatcctggtcttgtggct

SEQ ID NO: 121618 - DNA, 25 bp, Artificial
  probe
  misc_feature (1)..(25): SEQ ID NO: 5216; WAN024CJY_at; Start 138; Stop 162
ccagccctttgttcgtgacagagaa

SEQ ID NO: 121619 - DNA, 25 bp, Artificial
  probe
  misc_feature (1)..(25): SEQ ID NO: 5216; WAN024CJY_at; Start 64; Stop 88
ttgtcaatctggcagttagcaggtt

SEQ ID NO: 121620 - DNA, 25 bp, Artificial
  probe
  misc_feature (1)..(25): SEQ ID NO: 5216; WAN024CJY_at; Start 273; Stop 297
caatgacctgatttaccctatgatg

SEQ ID NO: 121621 - DNA, 25 bp, Artificial
  probe
  misc_feature (1)..(25): SEQ ID NO: 5216; WAN024CJY_at; Start 174; Stop 198
ccatagctgggcgaccttgagagtg

SEQ ID NO: 121622 - DNA, 25 bp, Artificial
  probe
  misc_feature (1)..(25): SEQ ID NO: 5216; WAN024CJY_at; Start 294; Stop 318
gatggtggtcattcagaccattccg

SEQ ID NO: 121623 - DNA, 25 bp, Artificial
  probe
  misc_feature (1)..(25): SEQ ID NO: 5216; WAN024CJY_at; Start 318; Stop 342
gaccattgccatagctcctatcctg

SEQ ID NO: 121624 - DNA, 25 bp, Artificial
  probe
  misc_feature (1)..(25): SEQ ID NO: 5216; WAN024CJY_at; Start 160; Stop 184
gaatttctctggcaccatagctggg

SEQ ID NO: 121625 - DNA, 25 bp, Artificial
  probe
  misc_feature (1)..(25): SEQ ID NO: 5216; WAN024CJY_at; Start 117; Stop 141
gccgacacctcttgaaattctccag

SEQ ID NO: 121626 - DNA, 25 bp, Artificial
  probe
  misc_feature (1)..(25): SEQ ID NO: 5216; WAN024CJY_at; Start 361; Stop 385
gggattttgcccaagattgtcttga

SEQ ID NO: 121627 - DNA, 25 bp, Artificial
  probe
  misc_feature (1)..(25): SEQ ID NO: 5216; WAN024CJY_at; Start 288; Stop 312
ccctatgatggtggtcattcagacc

SEQ ID NO: 121628 - DNA, 25 bp, Artificial
  probe
  misc_feature (1)..(25): SEQ ID NO: 5216; WAN024CJY_at; Start 169; Stop 193
tggcaccatagctgggcgaccttga

SEQ ID NO: 121629 - DNA, 25 bp, Artificial
  probe
  misc_feature (1)..(25): SEQ ID NO: 5216; WAN024CJY_at; Start 36; Stop 60
cattagtctattgggctttctcgga

SEQ ID NO: 121630 - DNA, 25 bp, Artificial
  probe
  misc_feature (1)..(25): SEQ ID NO: 5216; WAN024CJY_at; Start 73; Stop 97
tggcagttagcaggttttcttaaac

SEQ ID NO: 121631 - DNA, 25 bp, Artificial
  probe
  misc_feature (1)..(25): SEQ ID NO: 5216; WAN024CJY_at; Start 144; Stop 168
ctttgttcgtgacagagaatttctc

SEQ ID NO: 121632 - DNA, 25 bp, Artificial
  probe
  misc_feature (1)..(25): SEQ ID NO: 5216; WAN024CJY_at; Start 129; Stop 153
tgaaattctccagccctttgttcgt

SEQ ID NO: 121633 - DNA, 25 bp, Artificial
  probe
  misc_feature (1)..(25): SEQ ID NO: 5216; WAN024CJY_at; Start 181; Stop 205
tgggcgaccttgagagtggctttac

SEQ ID NO: 121634 - DNA, 25 bp, Artificial
  probe
  misc_feature (1)..(25): SEQ ID NO: 5216; WAN024CJY_at; Start 279; Stop 303
cctgatttaccctatgatggtggtc

SEQ ID NO: 121635 - DNA, 25 bp, Artificial
  probe
  misc_feature (1)..(25): SEQ ID NO: 5216; WAN024CJY_at; Start 68; Stop 92
caatctggcagttagcaggttttct

SEQ ID NO: 121636 - DNA, 25 bp, Artificial
  probe
  misc_feature (1)..(25): SEQ ID NO: 5216; WAN024CJY_at; Start 544; Stop 568
ggtctgagggtcagtgtctcctacg

SEQ ID NO: 121637 - DNA, 25 bp, Artificial
  probe
  misc_feature (1)..(25): SEQ ID NO: 5216; WAN024CJY_at; Start 185; Stop 209
cgaccttgagagtggctttactggg

SEQ ID NO: 121638 - DNA, 25 bp, Artificial
  probe
  misc_feature (1)..(25): SEQ ID NO: 5216; WAN024CJY_at; Start 371; Stop 395
ccaagattgtcttgattatcttaac

SEQ ID NO: 121639 - DNA, 25 bp, Artificial
  probe
  misc_feature (1)..(25): SEQ ID NO: 5216; WAN024CJY_at; Start 164; Stop 188
ttctctggcaccatagctgggcgac

SEQ ID NO: 121640 - DNA, 25 bp, Artificial
  probe
  misc_feature (1)..(25): SEQ ID NO: 5216; WAN024CJY_at; Start 108; Stop 132
gtttatcctgccgacacctcttgaa

SEQ ID NO: 121641 - DNA, 25 bp, Artificial
  probe
  misc_feature (1)..(25): SEQ ID NO: 5216; WAN024CJY_at; Start 491; Stop 515
ggcaaatcctgtggcattttaaaat

SEQ ID NO: 121642 - DNA, 25 bp, Artificial
  probe
  misc_feature (1)..(25): SEQ ID NO: 5216; WAN024CJY_at; Start 309; Stop 333
gaccattccgaccattgccatagct

SEQ ID NO: 121643 - DNA, 25 bp, Artificial
  probe
  misc_feature (1)..(25): SEQ ID NO: 7291; WAN024CJZ_at; Start 3; Stop 27
gctttctgggattccaaaccattct

SEQ ID NO: 121644 - DNA, 25 bp, Artificial
  probe
  misc_feature (1)..(25): SEQ ID NO: 7291; WAN024CJZ_at; Start 10; Stop 34
gggattccaaaccattctggcaaat

SEQ ID NO: 121645 - DNA, 25 bp, Artificial
  probe
  misc_feature (1)..(25): SEQ ID NO: 7291; WAN024CJZ_at; Start 53; Stop 77
caactgccttttttgattttcatcc

SEQ ID NO: 121646 - DNA, 25 bp, Artificial
  probe
  misc_feature (1)..(25): SEQ ID NO: 7291; WAN024CJZ_at; Start 37; Stop 61
ttcaaaacctcaacgacaactgcct

SEQ ID NO: 121647 - DNA, 25 bp, Artificial
  probe
  misc_feature (1)..(25): SEQ ID NO: 7291; WAN024CJZ_at; Start 7; Stop 31
tctgggattccaaaccattctggca

SEQ ID NO: 121648 - DNA, 25 bp, Artificial
  probe
  misc_feature (1)..(25): SEQ ID NO: 7291; WAN024CJZ_at; Start 22; Stop 46
cattctggcaaatccttcaaaacct

SEQ ID NO: 121649 - DNA, 25 bp, Artificial
  probe
  misc_feature (1)..(25): SEQ ID NO: 7291; WAN024CJZ_at; Start 30; Stop 54
caaatccttcaaaacctcaacgaca

SEQ ID NO: 121650 - DNA, 25 bp, Artificial
  probe
  misc_feature (1)..(25): SEQ ID NO: 7291; WAN024CJZ_at; Start 38; Stop 62
tcaaaacctcaacgacaactgcctt

SEQ ID NO: 121651 - DNA, 25 bp, Artificial
  probe
  misc_feature (1)..(25): SEQ ID NO: 7291; WAN024CJZ_at; Start 14; Stop 38
ttccaaaccattctggcaaatcctt

SEQ ID NO: 121652 - DNA, 25 bp, Artificial
  probe
  misc_feature (1)..(25): SEQ ID NO: 7291; WAN024CJZ_at; Start 29; Stop 53
gcaaatccttcaaaacctcaacgac

SEQ ID NO: 121653 - DNA, 25 bp, Artificial
  probe
  misc_feature (1)..(25): SEQ ID NO: 7291; WAN024CJZ_at; Start 25; Stop 49
tctggcaaatccttcaaaacctcaa

SEQ ID NO: 121654 - DNA, 25 bp, Artificial
  probe
  misc_feature (1)..(25): SEQ ID NO: 7291; WAN024CJZ_at; Start 44; Stop 68
cctcaacgacaactgccttttttga

SEQ ID NO: 121655 - DNA, 25 bp, Artificial
  probe
  misc_feature (1)..(25): SEQ ID NO: 7291; WAN024CJZ_at; Start 15; Stop 39
tccaaaccattctggcaaatccttc

SEQ ID NO: 121656 - DNA, 25 bp, Artificial
  probe
  misc_feature (1)..(25): SEQ ID NO: 7291; WAN024CJZ_at; Start 5; Stop 29
tttctgggattccaaaccattctgg

SEQ ID NO: 121657 - DNA, 25 bp, Artificial
  probe
  misc_feature (1)..(25): SEQ ID NO: 7291; WAN024CJZ_at; Start 4; Stop 28
ctttctgggattccaaaccattctg

SEQ ID NO: 121658 - DNA, 25 bp, Artificial
  probe
  misc_feature (1)..(25): SEQ ID NO: 7291; WAN024CJZ_at; Start 1; Stop 25
gtgctttctgggattccaaaccatt

SEQ ID NO: 121659 - DNA, 25 bp, Artificial
  probe
  misc_feature (1)..(25): SEQ ID NO: 7291; WAN024CJZ_at; Start 11; Stop 35
ggattccaaaccattctggcaaatc

SEQ ID NO: 121660 - DNA, 25 bp, Artificial
  probe
  misc_feature (1)..(25): SEQ ID NO: 7291; WAN024CJZ_at; Start 20; Stop 44
accattctggcaaatccttcaaaac

SEQ ID NO: 121661 - DNA, 25 bp, Artificial
  probe
  misc_feature (1)..(25): SEQ ID NO: 7291; WAN024CJZ_at; Start 18; Stop 42
aaaccattctggcaaatccttcaaa

SEQ ID NO: 121662 - DNA, 25 bp, Artificial
  probe
  misc_feature (1)..(25): SEQ ID NO: 7291; WAN024CJZ_at; Start 50; Stop 74
cgacaactgccttttttgattttca

SEQ ID NO: 121663 - DNA, 25 bp, Artificial
  probe
  misc_feature (1)..(25): SEQ ID NO: 7291; WAN024CJZ_at; Start 8; Stop 32
ctgggattccaaaccattctggcaa

SEQ ID NO: 121664 - DNA, 25 bp, Artificial
  probe
  misc_feature (1)..(25): SEQ ID NO: 7291; WAN024CJZ_at; Start 28; Stop 52
ggcaaatccttcaaaacctcaacga

SEQ ID NO: 121665 - DNA, 25 bp, Artificial
  probe
  misc_feature (1)..(25): SEQ ID NO: 7291; WAN024CJZ_at; Start 12; Stop 36
gattccaaaccattctggcaaatcc

SEQ ID NO: 121666 - DNA, 25 bp, Artificial
  probe
  misc_feature (1)..(25): SEQ ID NO: 7291; WAN024CJZ_at; Start 9; Stop 33
tgggattccaaaccattctggcaaa

SEQ ID NO: 121667 - DNA, 25 bp, Artificial
  probe
  misc_feature (1)..(25): SEQ ID NO: 7291; WAN024CJZ_at; Start 21; Stop 45
ccattctggcaaatccttcaaaacc

SEQ ID NO: 121668 - DNA, 25 bp, Artificial
  probe
  misc_feature (1)..(25): SEQ ID NO: 7291; WAN024CJZ_at; Start 46; Stop 70
tcaacgacaactgccttttttgatt

SEQ ID NO: 121669 - DNA, 25 bp, Artificial
  probe
  misc_feature (1)..(25): SEQ ID NO: 7291; WAN024CJZ_at; Start 43; Stop 67
acctcaacgacaactgccttttttg

SEQ ID NO: 121670 - DNA, 25 bp, Artificial
  probe
  misc_feature (1)..(25): SEQ ID NO: 7291; WAN024CJZ_at; Start 27; Stop 51
tggcaaatccttcaaaacctcaacg

SEQ ID NO: 121671 - DNA, 25 bp, Artificial
  probe
  misc_feature (1)..(25): SEQ ID NO: 7291; WAN024CJZ_at; Start 34; Stop 58
tccttcaaaacctcaacgacaactg

SEQ ID NO: 121672 - DNA, 25 bp, Artificial
  probe
  misc_feature (1)..(25): SEQ ID NO: 7291; WAN024CJZ_at; Start 2; Stop 26
tgctttctgggattccaaaccattc

SEQ ID NO: 121673 - DNA, 25 bp, Artificial
  probe
  misc_feature (1)..(25): SEQ ID NO: 7291; WAN024CJZ_at; Start 6; Stop 30
ttctgggattccaaaccattctggc

SEQ ID NO: 121674 - DNA, 25 bp, Artificial
  probe
  misc_feature (1)..(25): SEQ ID NO: 7291; WAN024CJZ_at; Start 19; Stop 43
aaccattctggcaaatccttcaaaa

SEQ ID NO: 121675 - DNA, 25 bp, Artificial
  probe
  misc_feature (1)..(25): SEQ ID NO: 7291; WAN024CJZ_at; Start 54; Stop 78
aactgccttttttgattttcatcct

SEQ ID NO: 121676 - DNA, 25 bp, Artificial
  probe
  misc_feature (1)..(25): SEQ ID NO: 7291; WAN024CJZ_at; Start 24; Stop 48
ttctggcaaatccttcaaaacctca

SEQ ID NO: 121677 - DNA, 25 bp, Artificial
  probe
  misc_feature (1)..(25): SEQ ID NO: 1768; WAN024CK2_at; Start 75; Stop 99
gccagaatggtttggaatcccagaa

SEQ ID NO: 121678 - DNA, 25 bp, Artificial
  probe
  misc_feature (1)..(25): SEQ ID NO: 1768; WAN024CK2_at; Start 185; Stop 209
tatcctattcgagtgaagattgtgc

SEQ ID NO: 121679 - DNA, 25 bp, Artificial
  probe
  misc_feature (1)..(25): SEQ ID NO: 1768; WAN024CK2_at; Start 109; Stop 133
gcctatatagaaggaaccacgacac

SEQ ID NO: 121680 - DNA, 25 bp, Artificial
  probe
  misc_feature (1)..(25): SEQ ID NO: 1768; WAN024CK2_at; Start 118; Stop 142
gaaggaaccacgacactgcaagttt

SEQ ID NO: 121681 - DNA, 25 bp, Artificial
  probe
  misc_feature (1)..(25): SEQ ID NO: 1768; WAN024CK2_at; Start 146; Stop 170
ccgcctatcaggagagtgatttgac

SEQ ID NO: 121682 - DNA, 25 bp, Artificial
  probe
  misc_feature (1)..(25): SEQ ID NO: 1768; WAN024CK2_at; Start 3; Stop 27
gatgtttgtaattgaagaagtcaag

SEQ ID NO: 121683 - DNA, 25 bp, Artificial
  probe
  misc_feature (1)..(25): SEQ ID NO: 1768; WAN024CK2_at; Start 116; Stop 140
tagaaggaaccacgacactgcaagt

SEQ ID NO: 121684 - DNA, 25 bp, Artificial
  probe
  misc_feature (1)..(25): SEQ ID NO: 1768; WAN024CK2_at; Start 73; Stop 97
ttgccagaatggtttggaatcccag

SEQ ID NO: 121685 - DNA, 25 bp, Artificial
  probe
  misc_feature (1)..(25): SEQ ID NO: 1768; WAN024CK2_at; Start 89; Stop 113
gaatcccagaaagcacacaagccta

SEQ ID NO: 121686 - DNA, 25 bp, Artificial
  probe
  misc_feature (1)..(25): SEQ ID NO: 1768; WAN024CK2_at; Start 104; Stop 128
cacaagcctatatagaaggaaccac

SEQ ID NO: 121687 - DNA, 25 bp, Artificial
  probe
  misc_feature (1)..(25): SEQ ID NO: 1768; WAN024CK2_at; Start 102; Stop 126
cacacaagcctatatagaaggaacc

SEQ ID NO: 121688 - DNA, 25 bp, Artificial
  probe
  misc_feature (1)..(25): SEQ ID NO: 1768; WAN024CK2_at; Start 85; Stop 109
tttggaatcccagaaagcacacaag

SEQ ID NO: 121689 - DNA, 25 bp, Artificial
  probe
  misc_feature (1)..(25): SEQ ID NO: 1768; WAN024CK2_at; Start 114; Stop 138
tatagaaggaaccacgacactgcaa

SEQ ID NO: 121690 - DNA, 25 bp, Artificial
  probe
  misc_feature (1)..(25): SEQ ID NO: 1768; WAN024CK2_at; Start 190; Stop 214
tattcgagtgaagattgtgcagaga

SEQ ID NO: 121691 - DNA, 25 bp, Artificial
  probe
  misc_feature (1)..(25): SEQ ID NO: 1768; WAN024CK2_at; Start 173; Stop 197
gatttgtaagcttatcctattcgag

SEQ ID NO: 121692 - DNA, 25 bp, Artificial
  probe
  misc_feature (1)..(25): SEQ ID NO: 1768; WAN024CK2_at; Start 106; Stop 130
caagcctatatagaaggaaccacga

SEQ ID NO: 121693 - DNA, 25 bp, Artificial
  probe
  misc_feature (1)..(25): SEQ ID NO: 1768; WAN024CK2_at; Start 177; Stop 201
tgtaagcttatcctattcgagtgaa

SEQ ID NO: 121694 - DNA, 25 bp, Artificial
  probe
  misc_feature (1)..(25): SEQ ID NO: 1768; WAN024CK2_at; Start 192; Stop 216
ttcgagtgaagattgtgcagagatt

SEQ ID NO: 121695 - DNA, 25 bp, Artificial
  probe
  misc_feature (1)..(25): SEQ ID NO: 1768; WAN024CK2_at; Start 188; Stop 212
cctattcgagtgaagattgtgcaga

SEQ ID NO: 121696 - DNA, 25 bp, Artificial
  probe
  misc_feature (1)..(25): SEQ ID NO: 1768; WAN024CK2_at; Start 120; Stop 144
aggaaccacgacactgcaagtttgg

SEQ ID NO: 121697 - DNA, 25 bp, Artificial
  probe
  misc_feature (1)..(25): SEQ ID NO: 1768; WAN024CK2_at; Start 79; Stop 103
gaatggtttggaatcccagaaagca

SEQ ID NO: 121698 - DNA, 25 bp, Artificial
  probe
  misc_feature (1)..(25): SEQ ID NO: 1768; WAN024CK2_at; Start 55; Stop 79
gctgaggttttgaaggatttgccag

SEQ ID NO: 121699 - DNA, 25 bp, Artificial
  probe
  misc_feature (1)..(25): SEQ ID NO: 1768; WAN024CK2_at; Start 147; Stop 171
cgcctatcaggagagtgatttgact

SEQ ID NO: 121700 - DNA, 25 bp, Artificial
  probe
  misc_feature (1)..(25): SEQ ID NO: 1768; WAN024CK2_at; Start 83; Stop 107
ggtttggaatcccagaaagcacaca

SEQ ID NO: 121701 - DNA, 25 bp, Artificial
  probe
  misc_feature (1)..(25): SEQ ID NO: 1768; WAN024CK2_at; Start 87; Stop 111
tggaatcccagaaagcacacaagcc

SEQ ID NO: 121702 - DNA, 25 bp, Artificial
  probe
  misc_feature (1)..(25): SEQ ID NO: 1768; WAN024CK2_at; Start 94; Stop 118
ccagaaagcacacaagcctatatag

SEQ ID NO: 121703 - DNA, 25 bp, Artificial
  probe
  misc_feature (1)..(25): SEQ ID NO: 1768; WAN024CK2_at; Start 112; Stop 136
tatatagaaggaaccacgacactgc

SEQ ID NO: 121704 - DNA, 25 bp, Artificial
  probe
  misc_feature (1)..(25): SEQ ID NO: 1768; WAN024CK2_at; Start 15; Stop 39
tgaagaagtcaaggatgaaaatcaa

SEQ ID NO: 121705 - DNA, 25 bp, Artificial
  probe
  misc_feature (1)..(25): SEQ ID NO: 1768; WAN024CK2_at; Start 60; Stop 84
ggttttgaaggatttgccagaatgg

SEQ ID NO: 121706 - DNA, 25 bp, Artificial
  probe
  misc_feature (1)..(25): SEQ ID NO: 1768; WAN024CK2_at; Start 97; Stop 121
gaaagcacacaagcctatatagaag

SEQ ID NO: 121707 - DNA, 25 bp, Artificial
  probe
  misc_feature (1)..(25): SEQ ID NO: 1768; WAN024CK2_at; Start 57; Stop 81
tgaggttttgaaggatttgccagaa

SEQ ID NO: 121708 - DNA, 25 bp, Artificial
  probe
  misc_feature (1)..(25): SEQ ID NO: 1768; WAN024CK2_at; Start 66; Stop 90
gaaggatttgccagaatggtttgga

SEQ ID NO: 121709 - DNA, 25 bp, Artificial
  probe
  misc_feature (1)..(25): SEQ ID NO: 1768; WAN024CK2_at; Start 92; Stop 116
tcccagaaagcacacaagcctatat

SEQ ID NO: 121710 - DNA, 25 bp, Artificial
  probe
  misc_feature (1)..(25): SEQ ID NO: 1768; WAN024CK2_at; Start 179; Stop 203
taagcttatcctattcgagtgaaga

SEQ ID NO: 121711 - DNA, 25 bp, Artificial
  probe
  misc_feature (1)..(25): SEQ ID NO: 4267; WAN024CK3_at; Start 686; Stop 710
taatagatgaacctgaaatctcact

SEQ ID NO: 121712 - DNA, 25 bp, Artificial
  probe
  misc_feature (1)..(25): SEQ ID NO: 4267; WAN024CK3_at; Start 1473; Stop 1497
tcaagtagcgttaggaatagagaat

SEQ ID NO: 121713 - DNA, 25 bp, Artificial
  probe
  misc_feature (1)..(25): SEQ ID NO: 4267; WAN024CK3_at; Start 1303; Stop 1327
gaattaattgcgaaacaaagaagct

SEQ ID NO: 121714 - DNA, 25 bp, Artificial
  probe
  misc_feature (1)..(25): SEQ ID NO: 4267; WAN024CK3_at; Start 221; Stop 245
cttcgacagacagatgggatggcat

SEQ ID NO: 121715 - DNA, 25 bp, Artificial
  probe
  misc_feature (1)..(25): SEQ ID NO: 4267; WAN024CK3_at; Start 34; Stop 58
caaatagatgaagtggatgggaaac

SEQ ID NO: 121716 - DNA, 25 bp, Artificial
  probe
  misc_feature (1)..(25): SEQ ID NO: 4267; WAN024CK3_at; Start 1116; Stop 1140
tgatggagatcaaaacactaatgtt

SEQ ID NO: 121717 - DNA, 25 bp, Artificial
  probe
  misc_feature (1)..(25): SEQ ID NO: 4267; WAN024CK3_at; Start 145; Stop 169
gattattgggaaccatatgctcctc

SEQ ID NO: 121718 - DNA, 25 bp, Artificial
  probe
  misc_feature (1)..(25): SEQ ID NO: 4267; WAN024CK3_at; Start 1388; Stop 1412
tagctaatttgtgtaacagcgtaga

SEQ ID NO: 121719 - DNA, 25 bp, Artificial
  probe
  misc_feature (1)..(25): SEQ ID NO: 4267; WAN024CK3_at; Start 912; Stop 936
tgatgtgtatcattctaggaagatg

SEQ ID NO: 121720 - DNA, 25 bp, Artificial
  probe
  misc_feature (1)..(25): SEQ ID NO: 4267; WAN024CK3_at; Start 541; Stop 565
aaaggtgatgatataaaagcttcca

SEQ ID NO: 121721 - DNA, 25 bp, Artificial
  probe
  misc_feature (1)..(25): SEQ ID NO: 4267; WAN024CK3_at; Start 988; Stop 1012
cattcaggtagtgagaatcttaaac

SEQ ID NO: 121722 - DNA, 25 bp, Artificial
  probe
  misc_feature (1)..(25): SEQ ID NO: 4267; WAN024CK3_at; Start 1426; Stop 1450
gatttttctaaagatggcaacggaa

SEQ ID NO: 121723 - DNA, 25 bp, Artificial
  probe
  misc_feature (1)..(25): SEQ ID NO: 4267; WAN024CK3_at; Start 175; Stop 199
caatatgagatggaaagattaccca

SEQ ID NO: 121724 - DNA, 25 bp, Artificial
  probe
  misc_feature (1)..(25): SEQ ID NO: 4267; WAN024CK3_at; Start 396; Stop 420
gaataatacaagtagctatacgcgt

SEQ ID NO: 121725 - DNA, 25 bp, Artificial
  probe
  misc_feature (1)..(25): SEQ ID NO: 4267; WAN024CK3_at; Start 208; Stop 232
tatattggaagttcttcgacagaca

SEQ ID NO: 121726 - DNA, 25 bp, Artificial
  probe
  misc_feature (1)..(25): SEQ ID NO: 4267; WAN024CK3_at; Start 1536; Stop 1560
tgtttcaaaaatacagccagaatca

SEQ ID NO: 121727 - DNA, 25 bp, Artificial
  probe
  misc_feature (1)..(25): SEQ ID NO: 4267; WAN024CK3_at; Start 1266; Stop 1290
taatgtttcaggtaataaagggcaa

SEQ ID NO: 121728 - DNA, 25 bp, Artificial
  probe
  misc_feature (1)..(25): SEQ ID NO: 4267; WAN024CK3_at; Start 1502; Stop 1526
cttctgaagatattttccaggagca

SEQ ID NO: 121729 - DNA, 25 bp, Artificial
  probe
  misc_feature (1)..(25): SEQ ID NO: 4267; WAN024CK3_at; Start 1322; Stop 1346
gaagctttatagattattgggctaa

SEQ ID NO: 121730 - DNA, 25 bp, Artificial
  probe
  misc_feature (1)..(25): SEQ ID NO: 4267; WAN024CK3_at; Start 1022; Stop 1046
tagtgagatatattcctggtggagc

SEQ ID NO: 121731 - DNA, 25 bp, Artificial
  probe
  misc_feature (1)..(25): SEQ ID NO: 4267; WAN024CK3_at; Start 1403; Stop 1427
acagcgtagatagggaaggttatga

SEQ ID NO: 121732 - DNA, 25 bp, Artificial
  probe
  misc_feature (1)..(25): SEQ ID NO: 4267; WAN024CK3_at; Start 1073; Stop 1097
taaactcatcgtatttagattccga

SEQ ID NO: 121733 - DNA, 25 bp, Artificial
  probe
  misc_feature (1)..(25): SEQ ID NO: 4267; WAN024CK3_at; Start 1035; Stop 1059
tcctggtggagcaaatcaaataatt

SEQ ID NO: 121734 - DNA, 25 bp, Artificial
  probe
  misc_feature (1)..(25): SEQ ID NO: 4267; WAN024CK3_at; Start 824; Stop 848
gagaagccgtgaaacttttagtgaa

SEQ ID NO: 121735 - DNA, 25 bp, Artificial
  probe
  misc_feature (1)..(25): SEQ ID NO: 4267; WAN024CK3_at; Start 973; Stop 997
gagtttgttatcactcattcaggta

SEQ ID NO: 121736 - DNA, 25 bp, Artificial
  probe
  misc_feature (1)..(25): SEQ ID NO: 4267; WAN024CK3_at; Start 593; Stop 617
aagaatattccgaggcttttgcagg

SEQ ID NO: 121737 - DNA, 25 bp, Artificial
  probe
  misc_feature (1)..(25): SEQ ID NO: 4267; WAN024CK3_at; Start 700; Stop 724
gaaatctcacttcatccgagtgcaa

SEQ ID NO: 121738 - DNA, 25 bp, Artificial
  probe
  misc_feature (1)..(25): SEQ ID NO: 4267; WAN024CK3_at; Start 160; Stop 184
tatgctcctcaaaaacaatatgaga

SEQ ID NO: 121739 - DNA, 25 bp, Artificial
  probe
  misc_feature (1)..(25): SEQ ID NO: 4267; WAN024CK3_at; Start 810; Stop 834
aaaagattttcctagagaagccgtg

SEQ ID NO: 121740 - DNA, 25 bp, Artificial
  probe
  misc_feature (1)..(25): SEQ ID NO: 4267; WAN024CK3_at; Start 1551; Stop 1575
gccagaatcatcaatgtttcagtgt

SEQ ID NO: 121741 - DNA, 25 bp, Artificial
  probe
  misc_feature (1)..(25): SEQ ID NO: 4267; WAN024CK3_at; Start 1517; Stop 1541
tccaggagcaaagaagagctgtttc

SEQ ID NO: 121742 - DNA, 25 bp, Artificial
  probe
  misc_feature (1)..(25): SEQ ID NO: 4267; WAN024CK3_at; Start 1233; Stop 1257
tataaaattgataacgggatgtcca

SEQ ID NO: 121743 - DNA, 25 bp, Artificial
  probe
  misc_feature (1)..(25): SEQ ID NO: 4267; WAN024CK3_at; Start 362; Stop 386
gattacgatctaagccagttgctga

SEQ ID NO: 121744 - DNA, 25 bp, Artificial
  probe
  misc_feature (1)..(25): SEQ ID NO: 4267; WAN024CK3_at; Start 609; Stop 633
ttttgcaggaacaggtgaggctaga

SEQ ID NO: 121745 - DNA, 25 bp, Artificial
  probe
  misc_feature (1)..(25): SEQ ID NO: 2292; WAN024CK4_at; Start 350; Stop 374
tattatctagtagtcaggttagcct

SEQ ID NO: 121746 - DNA, 25 bp, Artificial
  probe
  misc_feature (1)..(25): SEQ ID NO: 2292; WAN024CK4_at; Start 100; Stop 124
tctattgggtggcttgttctttaca

SEQ ID NO: 121747 - DNA, 25 bp, Artificial
  probe
  misc_feature (1)..(25): SEQ ID NO: 2292; WAN024CK4_at; Start 121; Stop 145
tacagtggtttgtttgaagcaggag

SEQ ID NO: 121748 - DNA, 25 bp, Artificial
  probe
  misc_feature (1)..(25): SEQ ID NO: 2292; WAN024CK4_at; Start 183; Stop 207
caaggaagtagatattcgaaatcgc

SEQ ID NO: 121749 - DNA, 25 bp, Artificial
  probe
  misc_feature (1)..(25): SEQ ID NO: 2292; WAN024CK4_at; Start 170; Stop 194
tggcggtaaaaatcaaggaagtaga

SEQ ID NO: 121750 - DNA, 25 bp, Artificial
  probe
  misc_feature (1)..(25): SEQ ID NO: 2292; WAN024CK4_at; Start 153; Stop 177
tcttgctaataaaggggtggcggta

SEQ ID NO: 121751 - DNA, 25 bp, Artificial
  probe
  misc_feature (1)..(25): SEQ ID NO: 2292; WAN024CK4_at; Start 123; Stop 147
cagtggtttgtttgaagcaggagtt

SEQ ID NO: 121752 - DNA, 25 bp, Artificial
  probe
  misc_feature (1)..(25): SEQ ID NO: 2292; WAN024CK4_at; Start 324; Stop 348
cattgtctttaatgccttaatgtat

SEQ ID NO: 121753 - DNA, 25 bp, Artificial
  probe
  misc_feature (1)..(25): SEQ ID NO: 2292; WAN024CK4_at; Start 293; Stop 317
cgaggttgattttattctatggaca

SEQ ID NO: 121754 - DNA, 25 bp, Artificial
  probe
  misc_feature (1)..(25): SEQ ID NO: 2292; WAN024CK4_at; Start 108; Stop 132
gtggcttgttctttacagtggtttg

SEQ ID NO: 121755 - DNA, 25 bp, Artificial
  probe
  misc_feature (1)..(25): SEQ ID NO: 2292; WAN024CK4_at; Start 308; Stop 332
tctatggacatattttcattgtctt

SEQ ID NO: 121756 - DNA, 25 bp, Artificial
  probe
  misc_feature (1)..(25): SEQ ID NO: 2292; WAN024CK4_at; Start 355; Stop 379
tctagtagtcaggttagccttaaaa

SEQ ID NO: 121757 - DNA, 25 bp, Artificial
  probe
  misc_feature (1)..(25): SEQ ID NO: 2292; WAN024CK4_at; Start 279; Stop 303
tcttggtttggatgcgaggttgatt

SEQ ID NO: 121758 - DNA, 25 bp, Artificial
  probe
  misc_feature (1)..(25): SEQ ID NO: 2292; WAN024CK4_at; Start 230; Stop 254
ccttatggtttcaaattcttttgct

SEQ ID NO: 121759 - DNA, 25 bp, Artificial
  probe
  misc_feature (1)..(25): SEQ ID NO: 2292; WAN024CK4_at; Start 85; Stop 109
caaatctctatcgtatctattgggt

SEQ ID NO: 121760 - DNA, 25 bp, Artificial
  probe
  misc_feature (1)..(25): SEQ ID NO: 2292; WAN024CK4_at; Start 381; Stop 405
aaacaaactgtcttctctaactaat

SEQ ID NO: 121761 - DNA, 25 bp, Artificial
  probe
  misc_feature (1)..(25): SEQ ID NO: 2292; WAN024CK4_at; Start 96; Stop 120
cgtatctattgggtggcttgttctt

SEQ ID NO: 121762 - DNA, 25 bp, Artificial
  probe
  misc_feature (1)..(25): SEQ ID NO: 2292; WAN024CK4_at; Start 273; Stop 297
actttatcttggtttggatgcgagg

SEQ ID NO: 121763 - DNA, 25 bp, Artificial
  probe
  misc_feature (1)..(25): SEQ ID NO: 2292; WAN024CK4_at; Start 186; Stop 210
ggaagtagatattcgaaatcgcttt

SEQ ID NO: 121764 - DNA, 25 bp, Artificial
  probe
  misc_feature (1)..(25): SEQ ID NO: 2292; WAN024CK4_at; Start 3; Stop 27
ggaggtatttaatatgaaatacaga

SEQ ID NO: 121765 - DNA, 25 bp, Artificial
  probe
  misc_feature (1)..(25): SEQ ID NO: 2292; WAN024CK4_at; Start 73; Stop 97
gggacatttttacaaatctctatcg

SEQ ID NO: 121766 - DNA, 25 bp, Artificial
  probe
  misc_feature (1)..(25): SEQ ID NO: 2292; WAN024CK4_at; Start 91; Stop 115
tctatcgtatctattgggtggcttg

SEQ ID NO: 121767 - DNA, 25 bp, Artificial
  probe
  misc_feature (1)..(25): SEQ ID NO: 2292; WAN024CK4_at; Start 270; Stop 294
caaactttatcttggtttggatgcg

SEQ ID NO: 121768 - DNA, 25 bp, Artificial
  probe
  misc_feature (1)..(25): SEQ ID NO: 2292; WAN024CK4_at; Start 136; Stop 160
gaagcaggagttttccttcttgcta

SEQ ID NO: 121769 - DNA, 25 bp, Artificial
  probe
  misc_feature (1)..(25): SEQ ID NO: 2292; WAN024CK4_at; Start 37; Stop 61
gttattttcttgagtagtgtgttgg

SEQ ID NO: 121770 - DNA, 25 bp, Artificial
  probe
  misc_feature (1)..(25): SEQ ID NO: 2292; WAN024CK4_at; Start 54; Stop 78
tgtgttggatattcttttagggaca

SEQ ID NO: 121771 - DNA, 25 bp, Artificial
  probe
  misc_feature (1)..(25): SEQ ID NO: 2292; WAN024CK4_at; Start 251; Stop 275
tgctcatctttttgataatcaaact

SEQ ID NO: 121772 - DNA, 25 bp, Artificial
  probe
  misc_feature (1)..(25): SEQ ID NO: 2292; WAN024CK4_at; Start 131; Stop 155
tgtttgaagcaggagttttccttct

SEQ ID NO: 121773 - DNA, 25 bp, Artificial
  probe
  misc_feature (1)..(25): SEQ ID NO: 2292; WAN024CK4_at; Start 190; Stop 214
gtagatattcgaaatcgctttaaat

SEQ ID NO: 121774 - DNA, 25 bp, Artificial
  probe
  misc_feature (1)..(25): SEQ ID NO: 2292; WAN024CK4_at; Start 241; Stop 265
caaattcttttgctcatctttttga

SEQ ID NO: 121775 - DNA, 25 bp, Artificial
  probe
  misc_feature (1)..(25): SEQ ID NO: 2292; WAN024CK4_at; Start 140; Stop 164
caggagttttccttcttgctaataa

SEQ ID NO: 121776 - DNA, 25 bp, Artificial
  probe
  misc_feature (1)..(25): SEQ ID NO: 2292; WAN024CK4_at; Start 44; Stop 68
tcttgagtagtgtgttggatattct

SEQ ID NO: 121777 - DNA, 25 bp, Artificial
  probe
  misc_feature (1)..(25): SEQ ID NO: 2292; WAN024CK4_at; Start 89; Stop 113
tctctatcgtatctattgggtggct

SEQ ID NO: 121778 - DNA, 25 bp, Artificial
  probe
  misc_feature (1)..(25): SEQ ID NO: 2292; WAN024CK4_at; Start 337; Stop 361
gccttaatgtatctattatctagta

SEQ ID NO: 121779 - DNA, 25 bp, Artificial
  probe
  misc_feature (1)..(25): SEQ ID NO: 2322; WAN024CK5_at; Start 169; Stop 193
ccatttatgggagcatgtggataca

SEQ ID NO: 121780 - DNA, 25 bp, Artificial
  probe
  misc_feature (1)..(25): SEQ ID NO: 2322; WAN024CK5_at; Start 135; Stop 159
gacagctatttgtgctgcgagtggt

SEQ ID NO: 121781 - DNA, 25 bp, Artificial
  probe
  misc_feature (1)..(25): SEQ ID NO: 2322; WAN024CK5_at; Start 132; Stop 156
agggacagctatttgtgctgcgagt

SEQ ID NO: 121782 - DNA, 25 bp, Artificial
  probe
  misc_feature (1)..(25): SEQ ID NO: 2322; WAN024CK5_at; Start 170; Stop 194
catttatgggagcatgtggatacat

SEQ ID NO: 121783 - DNA, 25 bp, Artificial
  probe
  misc_feature (1)..(25): SEQ ID NO: 2322; WAN024CK5_at; Start 184; Stop 208
tgtggatacataggagctaaatttg

SEQ ID NO: 121784 - DNA, 25 bp, Artificial
  probe
  misc_feature (1)..(25): SEQ ID NO: 2322; WAN024CK5_at; Start 136; Stop 160
acagctatttgtgctgcgagtggtg

SEQ ID NO: 121785 - DNA, 25 bp, Artificial
  probe
  misc_feature (1)..(25): SEQ ID NO: 2322; WAN024CK5_at; Start 187; Stop 211
ggatacataggagctaaatttggtg

SEQ ID NO: 121786 - DNA, 25 bp, Artificial
  probe
  misc_feature (1)..(25): SEQ ID NO: 2322; WAN024CK5_at; Start 50; Stop 74
tatctagtattgaaggaggcaagaa

SEQ ID NO: 121787 - DNA, 25 bp, Artificial
  probe
  misc_feature (1)..(25): SEQ ID NO: 2322; WAN024CK5_at; Start 174; Stop 198
tatgggagcatgtggatacatagga

SEQ ID NO: 121788 - DNA, 25 bp, Artificial
  probe
  misc_feature (1)..(25): SEQ ID NO: 2322; WAN024CK5_at; Start 190; Stop 214
tacataggagctaaatttggtgtgg

SEQ ID NO: 121789 - DNA, 25 bp, Artificial
  probe
  misc_feature (1)..(25): SEQ ID NO: 2322; WAN024CK5_at; Start 57; Stop 81
tattgaaggaggcaagaataattgg

SEQ ID NO: 121790 - DNA, 25 bp, Artificial
  probe
  misc_feature (1)..(25): SEQ ID NO: 2322; WAN024CK5_at; Start 27; Stop 51
tcatgaaatggatataactatgtta

SEQ ID NO: 121791 - DNA, 25 bp, Artificial
  probe
  misc_feature (1)..(25): SEQ ID NO: 2322; WAN024CK5_at; Start 61; Stop 85
gaaggaggcaagaataattggcaaa

SEQ ID NO: 121792 - DNA, 25 bp, Artificial
  probe
  misc_feature (1)..(25): SEQ ID NO: 2322; WAN024CK5_at; Start 73; Stop 97
aataattggcaaactaatgtcttag

SEQ ID NO: 121793 - DNA, 25 bp, Artificial
  probe
  misc_feature (1)..(25): SEQ ID NO: 2322; WAN024CK5_at; Start 32; Stop 56
aaatggatataactatgttatctag

SEQ ID NO: 121794 - DNA, 25 bp, Artificial
  probe
  misc_feature (1)..(25): SEQ ID NO: 2322; WAN024CK5_at; Start 63; Stop 87
aggaggcaagaataattggcaaact

SEQ ID NO: 121795 - DNA, 25 bp, Artificial
  probe
  misc_feature (1)..(25): SEQ ID NO: 2322; WAN024CK5_at; Start 75; Stop 99
taattggcaaactaatgtcttagaa

SEQ ID NO: 121796 - DNA, 25 bp, Artificial
  probe
  misc_feature (1)..(25): SEQ ID NO: 2322; WAN024CK5_at; Start 143; Stop 167
tttgtgctgcgagtggtgttggagc

SEQ ID NO: 121797 - DNA, 25 bp, Artificial
  probe
  misc_feature (1)..(25): SEQ ID NO: 2322; WAN024CK5_at; Start 179; Stop 203
gagcatgtggatacataggagctaa

SEQ ID NO: 121798 - DNA, 25 bp, Artificial
  probe
  misc_feature (1)..(25): SEQ ID NO: 2322; WAN024CK5_at; Start 216; Stop 240
tctttgggcaggagtaacaggggca

SEQ ID NO: 121799 - DNA, 25 bp, Artificial
  probe
  misc_feature (1)..(25): SEQ ID NO: 2322; WAN024CK5_at; Start 178; Stop 202
ggagcatgtggatacataggagcta

SEQ ID NO: 121800 - DNA, 25 bp, Artificial
  probe
  misc_feature (1)..(25): SEQ ID NO: 2322; WAN024CK5_at; Start 65; Stop 89
gaggcaagaataattggcaaactaa

SEQ ID NO: 121801 - DNA, 25 bp, Artificial
  probe
  misc_feature (1)..(25): SEQ ID NO: 2322; WAN024CK5_at; Start 138; Stop 162
agctatttgtgctgcgagtggtgtt

SEQ ID NO: 121802 - DNA, 25 bp, Artificial
  probe
  misc_feature (1)..(25): SEQ ID NO: 2322; WAN024CK5_at; Start 59; Stop 83
ttgaaggaggcaagaataattggca

SEQ ID NO: 121803 - DNA, 25 bp, Artificial
  probe
  misc_feature (1)..(25): SEQ ID NO: 2322; WAN024CK5_at; Start 48; Stop 72
gttatctagtattgaaggaggcaag

SEQ ID NO: 121804 - DNA, 25 bp, Artificial
  probe
  misc_feature (1)..(25): SEQ ID NO: 2322; WAN024CK5_at; Start 45; Stop 69
tatgttatctagtattgaaggaggc

SEQ ID NO: 121805 - DNA, 25 bp, Artificial
  probe
  misc_feature (1)..(25): SEQ ID NO: 2322; WAN024CK5_at; Start 78; Stop 102
ttggcaaactaatgtcttagaaggt

SEQ ID NO: 121806 - DNA, 25 bp, Artificial
  probe
  misc_feature (1)..(25): SEQ ID NO: 2322; WAN024CK5_at; Start 181; Stop 205
gcatgtggatacataggagctaaat

SEQ ID NO: 121807 - DNA, 25 bp, Artificial
  probe
  misc_feature (1)..(25): SEQ ID NO: 2322; WAN024CK5_at; Start 15; Stop 39
tatggaacaatttcatgaaatggat

SEQ ID NO: 121808 - DNA, 25 bp, Artificial
  probe
  misc_feature (1)..(25): SEQ ID NO: 2322; WAN024CK5_at; Start 182; Stop 206
catgtggatacataggagctaaatt

SEQ ID NO: 121809 - DNA, 25 bp, Artificial
  probe
  misc_feature (1)..(25): SEQ ID NO: 2322; WAN024CK5_at; Start 52; Stop 76
tctagtattgaaggaggcaagaata

SEQ ID NO: 121810 - DNA, 25 bp, Artificial
  probe
  misc_feature (1)..(25): SEQ ID NO: 2322; WAN024CK5_at; Start 68; Stop 92
gcaagaataattggcaaactaatgt

SEQ ID NO: 121811 - DNA, 25 bp, Artificial
  probe
  misc_feature (1)..(25): SEQ ID NO: 2322; WAN024CK5_at; Start 131; Stop 155
tagggacagctatttgtgctgcgag

SEQ ID NO: 121812 - DNA, 25 bp, Artificial
  probe
  misc_feature (1)..(25): SEQ ID NO: 2322; WAN024CK5_at; Start 22; Stop 46
caatttcatgaaatggatataacta

SEQ ID NO: 121813 - DNA, 25 bp, Artificial
  probe
  misc_feature (1)..(25): SEQ ID NO: 2059; WAN024CK6_at; Start 708; Stop 732
ggaacattgccaaacttacttagag

SEQ ID NO: 121814 - DNA, 25 bp, Artificial
  probe
  misc_feature (1)..(25): SEQ ID NO: 2059; WAN024CK6_at; Start 1454; Stop 1478
caattgtagatatccgaaaagaggc

SEQ ID NO: 121815 - DNA, 25 bp, Artificial
  probe
  misc_feature (1)..(25): SEQ ID NO: 2059; WAN024CK6_at; Start 418; Stop 442
caagtagttggtcctgaatatcgca

SEQ ID NO: 121816 - DNA, 25 bp, Artificial
  probe
  misc_feature (1)..(25): SEQ ID NO: 2059; WAN024CK6_at; Start 646; Stop 670
gagttccctgagtccaaagagtttg

SEQ ID NO: 121817 - DNA, 25 bp, Artificial
  probe
  misc_feature (1)..(25): SEQ ID NO: 2059; WAN024CK6_at; Start 1474; Stop 1498
gaggcttttgacaaacgggtcgcaa

SEQ ID NO: 121818 - DNA, 25 bp, Artificial
  probe
  misc_feature (1)..(25): SEQ ID NO: 2059; WAN024CK6_at; Start 796; Stop 820
gctaattcttcgttttccaaggaca

SEQ ID NO: 121819 - DNA, 25 bp, Artificial
  probe
  misc_feature (1)..(25): SEQ ID NO: 2059; WAN024CK6_at; Start 1389; Stop 1413
gaaacatcactttttgacgattgcc

SEQ ID NO: 121820 - DNA, 25 bp, Artificial
  probe
  misc_feature (1)..(25): SEQ ID NO: 2059; WAN024CK6_at; Start 1428; Stop 1452
tagccaacagcgtctcatctatcag

SEQ ID NO: 121821 - DNA, 25 bp, Artificial
  probe
  misc_feature (1)..(25): SEQ ID NO: 2059; WAN024CK6_at; Start 595; Stop 619
cattttagcatactagtggcactca

SEQ ID NO: 121822 - DNA, 25 bp, Artificial
  probe
  misc_feature (1)..(25): SEQ ID NO: 2059; WAN024CK6_at; Start 1024; Stop 1048
tatgggattgaaagcgacaagccac

SEQ ID NO: 121823 - DNA, 25 bp, Artificial
  probe
  misc_feature (1)..(25): SEQ ID NO: 2059; WAN024CK6_at; Start 502; Stop 526
gatggaagtatggattgggtcacac

SEQ ID NO: 121824 - DNA, 25 bp, Artificial
  probe
  misc_feature (1)..(25): SEQ ID NO: 2059; WAN024CK6_at; Start 723; Stop 747
ttacttagagccacatgccaacatg

SEQ ID NO: 121825 - DNA, 25 bp, Artificial
  probe
  misc_feature (1)..(25): SEQ ID NO: 2059; WAN024CK6_at; Start 1493; Stop 1517
tcgcaatgattgctaaaaaggctca

SEQ ID NO: 121826 - DNA, 25 bp, Artificial
  probe
  misc_feature (1)..(25): SEQ ID NO: 2059; WAN024CK6_at; Start 1415; Stop 1439
tagatttgcatgttagccaacagcg

SEQ ID NO: 121827 - DNA, 25 bp, Artificial
  probe
  misc_feature (1)..(25): SEQ ID NO: 2059; WAN024CK6_at; Start 566; Stop 590
tgttagaaatcacacctgacgagta

SEQ ID NO: 121828 - DNA, 25 bp, Artificial
  probe
  misc_feature (1)..(25): SEQ ID NO: 2059; WAN024CK6_at; Start 1289; Stop 1313
taattagtcctcctccttcagagga

SEQ ID NO: 121829 - DNA, 25 bp, Artificial
  probe
  misc_feature (1)..(25): SEQ ID NO: 2059; WAN024CK6_at; Start 694; Stop 718
tatccgattttgatggaacattgcc

SEQ ID NO: 121830 - DNA, 25 bp, Artificial
  probe
  misc_feature (1)..(25): SEQ ID NO: 2059; WAN024CK6_at; Start 1117; Stop 1141
cagcatcggctgtaccttttctcac

SEQ ID NO: 121831 - DNA, 25 bp, Artificial
  probe
  misc_feature (1)..(25): SEQ ID NO: 2059; WAN024CK6_at; Start 151; Stop 175
gaaacattcgaggaagagttgacat

SEQ ID NO: 121832 - DNA, 25 bp, Artificial
  probe
  misc_feature (1)..(25): SEQ ID NO: 2059; WAN024CK6_at; Start 1102; Stop 1126
gaaggagttatcgaccagcatcggc

SEQ ID NO: 121833 - DNA, 25 bp, Artificial
  probe
  misc_feature (1)..(25): SEQ ID NO: 2059; WAN024CK6_at; Start 1074; Stop 1098
tcaagagtggatgactgagcagaag

SEQ ID NO: 121834 - DNA, 25 bp, Artificial
  probe
  misc_feature (1)..(25): SEQ ID NO: 2059; WAN024CK6_at; Start 944; Stop 968
taacagcactgactttcttaacaag

SEQ ID NO: 121835 - DNA, 25 bp, Artificial
  probe
  misc_feature (1)..(25): SEQ ID NO: 2059; WAN024CK6_at; Start 331; Stop 355
gagtatatttccatcgcaacaggct

SEQ ID NO: 121836 - DNA, 25 bp, Artificial
  probe
  misc_feature (1)..(25): SEQ ID NO: 2059; WAN024CK6_at; Start 634; Stop 658
gaatttccacttgagttccctgagt

SEQ ID NO: 121837 - DNA, 25 bp, Artificial
  probe
  misc_feature (1)..(25): SEQ ID NO: 2059; WAN024CK6_at; Start 1306; Stop 1330
tcagaggagcatttgacagagccat

SEQ ID NO: 121838 - DNA, 25 bp, Artificial
  probe
  misc_feature (1)..(25): SEQ ID NO: 2059; WAN024CK6_at; Start 612; Stop 636
ggcactcacttggaaacgtcgggaa

SEQ ID NO: 121839 - DNA, 25 bp, Artificial
  probe
  misc_feature (1)..(25): SEQ ID NO: 2059; WAN024CK6_at; Start 1338; Stop 1362
tattacaacgaaagaatacctgcct

SEQ ID NO: 121840 - DNA, 25 bp, Artificial
  probe
  misc_feature (1)..(25): SEQ ID NO: 2059; WAN024CK6_at; Start 370; Stop 394
aagtgtggcttgttactacgttcag

SEQ ID NO: 121841 - DNA, 25 bp, Artificial
  probe
  misc_feature (1)..(25): SEQ ID NO: 2059; WAN024CK6_at; Start 118; Stop 142
aaaagtctcctaagcattttgcagg

SEQ ID NO: 121842 - DNA, 25 bp, Artificial
  probe
  misc_feature (1)..(25): SEQ ID NO: 2059; WAN024CK6_at; Start 739; Stop 763
gccaacatgacttttactcaggaag

SEQ ID NO: 121843 - DNA, 25 bp, Artificial
  probe
  misc_feature (1)..(25): SEQ ID NO: 2059; WAN024CK6_at; Start 1358; Stop 1382
tgccttacgttaaaaagcagtatcc

SEQ ID NO: 121844 - DNA, 25 bp, Artificial
  probe
  misc_feature (1)..(25): SEQ ID NO: 2059; WAN024CK6_at; Start 355; Stop 379
taccgcgtacgacaaaagtgtggct

SEQ ID NO: 121845 - DNA, 25 bp, Artificial
  probe
  misc_feature (1)..(25): SEQ ID NO: 2059; WAN024CK6_at; Start 1254; Stop 1278
tgacaaagttgcctctgttacagga

SEQ ID NO: 121846 - DNA, 25 bp, Artificial
  probe
  misc_feature (1)..(25): SEQ ID NO: 2059; WAN024CK6_at; Start 864; Stop 888
tcagcatacaagaggaaagcatcta

SEQ ID NO: 121847 - DNA, 25 bp, Artificial
  probe
  misc_feature (1)..(25): SEQ ID NO: 775; WAN024CK7_at; Start 816; Stop 840
tcagcatgagccactaggattccat

SEQ ID NO: 121848 - DNA, 25 bp, Artificial
  probe
  misc_feature (1)..(25): SEQ ID NO: 775; WAN024CK7_at; Start 655; Stop 679
caccgtgaggaaaatattgatacag

SEQ ID NO: 121849 - DNA, 25 bp, Artificial
  probe
  misc_feature (1)..(25): SEQ ID NO: 775; WAN024CK7_at; Start 766; Stop 790
tcaaagaaaaggctacaagagagcg

SEQ ID NO: 121850 - DNA, 25 bp, Artificial
  probe
  misc_feature (1)..(25): SEQ ID NO: 775; WAN024CK7_at; Start 223; Stop 247
tacatggatgctgttggagatgatc

SEQ ID NO: 121851 - DNA, 25 bp, Artificial
  probe
  misc_feature (1)..(25): SEQ ID NO: 775; WAN024CK7_at; Start 1066; Stop 1090
gatgaggattttggattaccggttc

SEQ ID NO: 121852 - DNA, 25 bp, Artificial
  probe
  misc_feature (1)..(25): SEQ ID NO: 775; WAN024CK7_at; Start 360; Stop 384
tgccaagcgtttacatattccaatt

SEQ ID NO: 121853 - DNA, 25 bp, Artificial
  probe
  misc_feature (1)..(25): SEQ ID NO: 775; WAN024CK7_at; Start 388; Stop 412
catatggaggctggcaatcgctgta

SEQ ID NO: 121854 - DNA, 25 bp, Artificial
  probe
  misc_feature (1)..(25): SEQ ID NO: 775; WAN024CK7_at; Start 804; Stop 828
taaacgtgtgattcagcatgagcca

SEQ ID NO: 121855 - DNA, 25 bp, Artificial
  probe
  misc_feature (1)..(25): SEQ ID NO: 775; WAN024CK7_at; Start 291; Stop 315
gatgaatcaaattaaaccagatgct

SEQ ID NO: 121856 - DNA, 25 bp, Artificial
  probe
  misc_feature (1)..(25): SEQ ID NO: 775; WAN024CK7_at; Start 987; Stop 1011
taaggcaggatttattttggcaggc

SEQ ID NO: 121857 - DNA, 25 bp, Artificial
  probe
  misc_feature (1)..(25): SEQ ID NO: 775; WAN024CK7_at; Start 781; Stop 805
caagagagcggttttaaactagata

SEQ ID NO: 121858 - DNA, 25 bp, Artificial
  probe
  misc_feature (1)..(25): SEQ ID NO: 775; WAN024CK7_at; Start 427; Stop 451
ccggaagagactaatcgtcggattg

SEQ ID NO: 121859 - DNA, 25 bp, Artificial
  probe
  misc_feature (1)..(25): SEQ ID NO: 775; WAN024CK7_at; Start 380; Stop 404
caatttttcatatggaggctggcaa

SEQ ID NO: 121860 - DNA, 25 bp, Artificial
  probe
  misc_feature (1)..(25): SEQ ID NO: 775; WAN024CK7_at; Start 484; Stop 508
tctgaacatgcacgtaagtatttac

SEQ ID NO: 121861 - DNA, 25 bp, Artificial
  probe
  misc_feature (1)..(25): SEQ ID NO: 775; WAN024CK7_at; Start 142; Stop 166
ttggcacatactggacaaaactatg

SEQ ID NO: 121862 - DNA, 25 bp, Artificial
  probe
  misc_feature (1)..(25): SEQ ID NO: 775; WAN024CK7_at; Start 967; Stop 991
gaacgtcctgagtccttagataagg

SEQ ID NO: 121863 - DNA, 25 bp, Artificial
  probe
  misc_feature (1)..(25): SEQ ID NO: 775; WAN024CK7_at; Start 466; Stop 490
gatgttaacttagcatactctgaac

SEQ ID NO: 121864 - DNA, 25 bp, Artificial
  probe
  misc_feature (1)..(25): SEQ ID NO: 775; WAN024CK7_at; Start 954; Stop 978
tcgtacaagtacagaacgtcctgag

SEQ ID NO: 121865 - DNA, 25 bp, Artificial
  probe
  misc_feature (1)..(25): SEQ ID NO: 775; WAN024CK7_at; Start 866; Stop 890
catttgttgtagtatctgattcggg

SEQ ID NO: 121866 - DNA, 25 bp, Artificial
  probe
  misc_feature (1)..(25): SEQ ID NO: 775; WAN024CK7_at; Start 1131; Stop 1155
gataatacagagctatacagggata

SEQ ID NO: 121867 - DNA, 25 bp, Artificial
  probe
  misc_feature (1)..(25): SEQ ID NO: 775; WAN024CK7_at; Start 1037; Stop 1061
cagttgaaactgctgttagcttggc

SEQ ID NO: 121868 - DNA, 25 bp, Artificial
  probe
  misc_feature (1)..(25): SEQ ID NO: 775; WAN024CK7_at; Start 1018; Stop 1042
gaaaattctcttcttcaagcagttg

SEQ ID NO: 121869 - DNA, 25 bp, Artificial
  probe
  misc_feature (1)..(25): SEQ ID NO: 775; WAN024CK7_at; Start 82; Stop 106
ccagagattatacgtctaagtagtg

SEQ ID NO: 121870 - DNA, 25 bp, Artificial
  probe
  misc_feature (1)..(25): SEQ ID NO: 775; WAN024CK7_at; Start 102; Stop 126
tagtgttatcactaaatgtcgaaag

SEQ ID NO: 121871 - DNA, 25 bp, Artificial
  probe
  misc_feature (1)..(25): SEQ ID NO: 775; WAN024CK7_at; Start 753; Stop 777
ttgccatcctagatcaaagaaaagg

SEQ ID NO: 121872 - DNA, 25 bp, Artificial
  probe
  misc_feature (1)..(25): SEQ ID NO: 775; WAN024CK7_at; Start 63; Stop 87
gattattgtgggaacacgtccagag

SEQ ID NO: 121873 - DNA, 25 bp, Artificial
  probe
  misc_feature (1)..(25): SEQ ID NO: 775; WAN024CK7_at; Start 1003; Stop 1027
ttggcaggcattgatgaaaattctc

SEQ ID NO: 121874 - DNA, 25 bp, Artificial
  probe
  misc_feature (1)..(25): SEQ ID NO: 775; WAN024CK7_at; Start 517; Stop 541
ggtttacctaaagagcgcacatatg

SEQ ID NO: 121875 - DNA, 25 bp, Artificial
  probe
  misc_feature (1)..(25): SEQ ID NO: 775; WAN024CK7_at; Start 605; Stop 629
tccatgaacgtttgggattgaaaaa

SEQ ID NO: 121876 - DNA, 25 bp, Artificial
  probe
  misc_feature (1)..(25): SEQ ID NO: 775; WAN024CK7_at; Start 241; Stop 265
gatgatcttggtgctactgtaggga

SEQ ID NO: 121877 - DNA, 25 bp, Artificial
  probe
  misc_feature (1)..(25): SEQ ID NO: 775; WAN024CK7_at; Start 639; Stop 663
tatcttactttcagctcaccgtgag

SEQ ID NO: 121878 - DNA, 25 bp, Artificial
  probe
  misc_feature (1)..(25): SEQ ID NO: 775; WAN024CK7_at; Start 878; Stop 902
tatctgattcgggaactttaccgga

SEQ ID NO: 121879 - DNA, 25 bp, Artificial
  probe
  misc_feature (1)..(25): SEQ ID NO: 775; WAN024CK7_at; Start 1102; Stop 1126
gaggaaaatgtctctactaaagttg

SEQ ID NO: 121880 - DNA, 25 bp, Artificial
  probe
  misc_feature (1)..(25): SEQ ID NO: 775; WAN024CK7_at; Start 590; Stop 614
ttgagtcttcagatatccatgaacg

SEQ ID NO: 121881 - DNA, 25 bp, Artificial
  probe
  misc_feature (1)..(25): SEQ ID NO: 1771; WAN024CK8_at; Start 930; Stop 954
taaacctggcattaccaaagggcaa

SEQ ID NO: 121882 - DNA, 25 bp, Artificial
  probe
  misc_feature (1)..(25): SEQ ID NO: 1771; WAN024CK8_at; Start 545; Stop 569
caagtgtagaattggagttgctgta

SEQ ID NO: 121883 - DNA, 25 bp, Artificial
  probe
  misc_feature (1)..(25): SEQ ID NO: 1771; WAN024CK8_at; Start 1061; Stop 1085
tgaactttgaagtgtcgggcgataa

SEQ ID NO: 121884 - DNA, 25 bp, Artificial
  probe
  misc_feature (1)..(25): SEQ ID NO: 1771; WAN024CK8_at; Start 337; Stop 361
gaaggccgattttcaaactctatat

SEQ ID NO: 121885 - DNA, 25 bp, Artificial
  probe
  misc_feature (1)..(25): SEQ ID NO: 1771; WAN024CK8_at; Start 58; Stop 82
tgtactctggaagctttgaaagatg

SEQ ID NO: 121886 - DNA, 25 bp, Artificial
  probe
  misc_feature (1)..(25): SEQ ID NO: 1771; WAN024CK8_at; Start 463; Stop 487
tggtgccgtcctaactacaattctg

SEQ ID NO: 121887 - DNA, 25 bp, Artificial
  probe
  misc_feature (1)..(25): SEQ ID NO: 1771; WAN024CK8_at; Start 634; Stop 658
gatggattacaaatcttacctagcc

SEQ ID NO: 121888 - DNA, 25 bp, Artificial
  probe
  misc_feature (1)..(25): SEQ ID NO: 1771; WAN024CK8_at; Start 1007; Stop 1031
taatacaagagcgtaggatagggct

SEQ ID NO: 121889 - DNA, 25 bp, Artificial
  probe
  misc_feature (1)..(25): SEQ ID NO: 1771; WAN024CK8_at; Start 191; Stop 215
tccatttagctggtgtcaatcgtcc

SEQ ID NO: 121890 - DNA, 25 bp, Artificial
  probe
  misc_feature (1)..(25): SEQ ID NO: 1771; WAN024CK8_at; Start 217; Stop 241
cagaatcctgatgaattcatggagg

SEQ ID NO: 121891 - DNA, 25 bp, Artificial
  probe
  misc_feature (1)..(25): SEQ ID NO: 1771; WAN024CK8_at; Start 696; Stop 720
tgcaaccttaggagagattgtctct

SEQ ID NO: 121892 - DNA, 25 bp, Artificial
  probe
  misc_feature (1)..(25): SEQ ID NO: 1771; WAN024CK8_at; Start 1104; Stop 1128
gataccgggctatgcacataatatt

SEQ ID NO: 121893 - DNA, 25 bp, Artificial
  probe
  misc_feature (1)..(25): SEQ ID NO: 1771; WAN024CK8_at; Start 594; Stop 618
tctaactgcattggaaggaaatcct

SEQ ID NO: 121894 - DNA, 25 bp, Artificial
  probe
  misc_feature (1)..(25): SEQ ID NO: 1771; WAN024CK8_at; Start 579; Stop 603
tttgatacaagagtgtctaactgca

SEQ ID NO: 121895 - DNA, 25 bp, Artificial
  probe
  misc_feature (1)..(25): SEQ ID NO: 1771; WAN024CK8_at; Start 610; Stop 634
ggaaatcctcatcgttgtaatctag

SEQ ID NO: 121896 - DNA, 25 bp, Artificial
  probe
  misc_feature (1)..(25): SEQ ID NO: 1771; WAN024CK8_at; Start 445; Stop 469
ccgaatctttatgggaagtggtgcc

SEQ ID NO: 121897 - DNA, 25 bp, Artificial
  probe
  misc_feature (1)..(25): SEQ ID NO: 1771; WAN024CK8_at; Start 1177; Stop 1201
gagtcatttgatcctagacatccag

SEQ ID NO: 121898 - DNA, 25 bp, Artificial
  probe
  misc_feature (1)..(25): SEQ ID NO: 1771; WAN024CK8_at; Start 416; Stop 440
cgggagcacctgtcttagtttaccg

SEQ ID NO: 121899 - DNA, 25 bp, Artificial
  probe
  misc_feature (1)..(25): SEQ ID NO: 1771; WAN024CK8_at; Start 1157; Stop 1181
ttactgtcatgtgggctaatgagtc

SEQ ID NO: 121900 - DNA, 25 bp, Artificial
  probe
  misc_feature (1)..(25): SEQ ID NO: 1771; WAN024CK8_at; Start 321; Stop 345
tactcaagctagtttagaaggccga

SEQ ID NO: 121901 - DNA, 25 bp, Artificial
  probe
  misc_feature (1)..(25): SEQ ID NO: 1771; WAN024CK8_at; Start 1075; Stop 1099
tcgggcgataagattgaagcaatac

SEQ ID NO: 121902 - DNA, 25 bp, Artificial
  probe
  misc_feature (1)..(25): SEQ ID NO: 1771; WAN024CK8_at; Start 684; Stop 708
aacgactcatcgtgcaaccttagga

SEQ ID NO: 121903 - DNA, 25 bp, Artificial
  probe
  misc_feature (1)..(25): SEQ ID NO: 1771; WAN024CK8_at; Start 1089; Stop 1113
tgaagcaatacatatgataccgggc

SEQ ID NO: 121904 - DNA, 25 bp, Artificial
  probe
  misc_feature (1)..(25): SEQ ID NO: 1771; WAN024CK8_at; Start 93; Stop 117
gactcgtcctaatttagagattgga

SEQ ID NO: 121905 - DNA, 25 bp, Artificial
  probe
  misc_feature (1)..(25): SEQ ID NO: 1771; WAN024CK8_at; Start 524; Stop 548
tacctattcaagtaaatgatccaag

SEQ ID NO: 121906 - DNA, 25 bp, Artificial
  probe
  misc_feature (1)..(25): SEQ ID NO: 1771; WAN024CK8_at; Start 126; Stop 150
tcagtatgatcgtgatacagatccg

SEQ ID NO: 121907 - DNA, 25 bp, Artificial
  probe
  misc_feature (1)..(25): SEQ ID NO: 1771; WAN024CK8_at; Start 44; Stop 68
gaaaaaatcttatctgtactctgga

SEQ ID NO: 121908 - DNA, 25 bp, Artificial
  probe
  misc_feature (1)..(25): SEQ ID NO: 1771; WAN024CK8_at; Start 403; Stop 427
tatggaaagaaaacgggagcacctg

SEQ ID NO: 121909 - DNA, 25 bp, Artificial
  probe
  misc_feature (1)..(25): SEQ ID NO: 1771; WAN024CK8_at; Start 984; Stop 1008
catggttgtttctggtcgtgcttta

SEQ ID NO: 121910 - DNA, 25 bp, Artificial
  probe
  misc_feature (1)..(25): SEQ ID NO: 1771; WAN024CK8_at; Start 860; Stop 884
tagatgaacgaggtagttttacgga

SEQ ID NO: 121911 - DNA, 25 bp, Artificial
  probe
  misc_feature (1)..(25): SEQ ID NO: 1771; WAN024CK8_at; Start 664; Stop 688
ggaaactactgctacgtaccaacga

SEQ ID NO: 121912 - DNA, 25 bp, Artificial
  probe
  misc_feature (1)..(25): SEQ ID NO: 1771; WAN024CK8_at; Start 202; Stop 226
ggtgtcaatcgtccacagaatcctg

SEQ ID NO: 121913 - DNA, 25 bp, Artificial
  probe
  misc_feature (1)..(25): SEQ ID NO: 1771; WAN024CK8_at; Start 952; Stop 976
caacattggcatcattctaagtggg

SEQ ID NO: 121914 - DNA, 25 bp, Artificial
  probe
  misc_feature (1)..(25): SEQ ID NO: 1771; WAN024CK8_at; Start 1042; Stop 1066
ggtcaagagtatcctattctgaact

SEQ ID NO: 121915 - DNA, 25 bp, Artificial
  probe
  misc_feature (1)..(25): SEQ ID NO: 6309; WAN024CK9_at; Start 233; Stop 257
aaattcaagcggttttagagcagga

SEQ ID NO: 121916 - DNA, 25 bp, Artificial
  probe
  misc_feature (1)..(25): SEQ ID NO: 6309; WAN024CK9_at; Start 631; Stop 655
cctatggaaaatatgtttaacgcag

SEQ ID NO: 121917 - DNA, 25 bp, Artificial
  probe
  misc_feature (1)..(25): SEQ ID NO: 6309; WAN024CK9_at; Start 336; Stop 360
taaagttggacatgtagaagcagga

SEQ ID NO: 121918 - DNA, 25 bp, Artificial
  probe
  misc_feature (1)..(25): SEQ ID NO: 6309; WAN024CK9_at; Start 687; Stop 711
taaagtcgtgtatcctattcataag

SEQ ID NO: 121919 - DNA, 25 bp, Artificial
  probe
  misc_feature (1)..(25): SEQ ID NO: 6309; WAN024CK9_at; Start 363; Stop 387
gagaacttataatcttcaaagccca

SEQ ID NO: 121920 - DNA, 25 bp, Artificial
  probe
  misc_feature (1)..(25): SEQ ID NO: 6309; WAN024CK9_at; Start 843; Stop 867
tggtgtacaagaagaagcaccttct

SEQ ID NO: 121921 - DNA, 25 bp, Artificial
  probe
  misc_feature (1)..(25): SEQ ID NO: 6309; WAN024CK9_at; Start 651; Stop 675
cgcagttaatcgtatcctgaatgag

SEQ ID NO: 121922 - DNA, 25 bp, Artificial
  probe
  misc_feature (1)..(25): SEQ ID NO: 6309; WAN024CK9_at; Start 21; Stop 45
ttttgggacgcgtccagaagcaata

SEQ ID NO: 121923 - DNA, 25 bp, Artificial
  probe
  misc_feature (1)..(25): SEQ ID NO: 6309; WAN024CK9_at; Start 884; Stop 908
tagtaatgcgtgatacaactgaacg

SEQ ID NO: 121924 - DNA, 25 bp, Artificial
  probe
  misc_feature (1)..(25): SEQ ID NO: 6309; WAN024CK9_at; Start 1011; Stop 1035
caagatgagtaaggcaagcaatcct

SEQ ID NO: 121925 - DNA, 25 bp, Artificial
  probe
  misc_feature (1)..(25): SEQ ID NO: 6309; WAN024CK9_at; Start 379; Stop 403
caaagcccatttcctgaggaattca

SEQ ID NO: 121926 - DNA, 25 bp, Artificial
  probe
  misc_feature (1)..(25): SEQ ID NO: 6309; WAN024CK9_at; Start 869; Stop 893
taggtaaaccagtattagtaatgcg

SEQ ID NO: 121927 - DNA, 25 bp, Artificial
  probe
  misc_feature (1)..(25): SEQ ID NO: 6309; WAN024CK9_at; Start 82; Stop 106
aactcgataaaaatacttgtgtgtg

SEQ ID NO: 121928 - DNA, 25 bp, Artificial
  probe
  misc_feature (1)..(25): SEQ ID NO: 6309; WAN024CK9_at; Start 295; Stop 319
accacttttgcaacagctttagctg

SEQ ID NO: 121929 - DNA, 25 bp, Artificial
  probe
  misc_feature (1)..(25): SEQ ID NO: 6309; WAN024CK9_at; Start 1042; Stop 1066
gatggaacagcttgtcaacagattg

SEQ ID NO: 121930 - DNA, 25 bp, Artificial
  probe
  misc_feature (1)..(25): SEQ ID NO: 6309; WAN024CK9_at; Start 765; Stop 789
gcaaatcattgaaccactagaagtc

SEQ ID NO: 121931 - DNA, 25 bp, Artificial
  probe
  misc_feature (1)..(25): SEQ ID NO: 6309; WAN024CK9_at; Start 407; Stop 431
gtcagactacttcaattattgcgga

SEQ ID NO: 121932 - DNA, 25 bp, Artificial
  probe
  misc_feature (1)..(25): SEQ ID NO: 6309; WAN024CK9_at; Start 430; Stop 454
gatttcaattttgctccgacagagg

SEQ ID NO: 121933 - DNA, 25 bp, Artificial
  probe
  misc_feature (1)..(25): SEQ ID NO: 6309; WAN024CK9_at; Start 597; Stop 621
gctgacagcccatcggcgtgaaaat

SEQ ID NO: 121934 - DNA, 25 bp, Artificial
  probe
  misc_feature (1)..(25): SEQ ID NO: 6309; WAN024CK9_at; Start 570; Stop 594
gtgggctaaggacagtaaactaatc

SEQ ID NO: 121935 - DNA, 25 bp, Artificial
  probe
  misc_feature (1)..(25): SEQ ID NO: 6309; WAN024CK9_at; Start 444; Stop 468
tccgacagaggtggctaaagagaat

SEQ ID NO: 121936 - DNA, 25 bp, Artificial
  probe
  misc_feature (1)..(25): SEQ ID NO: 6309; WAN024CK9_at; Start 394; Stop 418
gaggaattcaatcgtcagactactt

SEQ ID NO: 121937 - DNA, 25 bp, Artificial
  probe
  misc_feature (1)..(25): SEQ ID NO: 6309; WAN024CK9_at; Start 747; Stop 771
tggtgacaatgaacgtatgcaaatc

SEQ ID NO: 121938 - DNA, 25 bp, Artificial
  probe
  misc_feature (1)..(25): SEQ ID NO: 6309; WAN024CK9_at; Start 711; Stop 735
gaatcctaaagttcgtgagctagca

SEQ ID NO: 121939 - DNA, 25 bp, Artificial
  probe
  misc_feature (1)..(25): SEQ ID NO: 6309; WAN024CK9_at; Start 724; Stop 748
cgtgagctagcaagtaaagtgtttg

SEQ ID NO: 121940 - DNA, 25 bp, Artificial
  probe
  misc_feature (1)..(25): SEQ ID NO: 6309; WAN024CK9_at; Start 516; Stop 540
tattgatgccttgaagacaaccgtt

SEQ ID NO: 121941 - DNA, 25 bp, Artificial
  probe
  misc_feature (1)..(25): SEQ ID NO: 6309; WAN024CK9_at; Start 248; Stop 272
tagagcaggagaaaccagatattgt

SEQ ID NO: 121942 - DNA, 25 bp, Artificial
  probe
  misc_feature (1)..(25): SEQ ID NO: 6309; WAN024CK9_at; Start 276; Stop 300
tgttcatggagatactacaaccact

SEQ ID NO: 121943 - DNA, 25 bp, Artificial
  probe
  misc_feature (1)..(25): SEQ ID NO: 6309; WAN024CK9_at; Start 584; Stop 608
gtaaactaatcatgctgacagccca

SEQ ID NO: 121944 - DNA, 25 bp, Artificial
  probe
  misc_feature (1)..(25): SEQ ID NO: 6309; WAN024CK9_at; Start 830; Stop 854
taacagattcaggtggtgtacaaga

SEQ ID NO: 121945 - DNA, 25 bp, Artificial
  probe
  misc_feature (1)..(25): SEQ ID NO: 6309; WAN024CK9_at; Start 613; Stop 637
cgtgaaaatcttggccaacctatgg

SEQ ID NO: 121946 - DNA, 25 bp, Artificial
  probe
  misc_feature (1)..(25): SEQ ID NO: 6309; WAN024CK9_at; Start 556; Stop 580
catcctattttagagtgggctaagg

SEQ ID NO: 121947 - DNA, 25 bp, Artificial
  probe
  misc_feature (1)..(25): SEQ ID NO: 6309; WAN024CK9_at; Start 310; Stop 334
gctttagctgcattttacatgggaa

SEQ ID NO: 121948 - DNA, 25 bp, Artificial
  probe
  misc_feature (1)..(25): SEQ ID NO: 6309; WAN024CK9_at; Start 996; Stop 1020
tgaagaggaatacaacaagatgagt

SEQ ID NO: 121949 - DNA, 25 bp, Artificial
  probe
  misc_feature (1)..(25): SEQ ID NO: 1727; WAN024CKA_at; Start 313; Stop 337
gccttggcagcattctatttgggaa

SEQ ID NO: 121950 - DNA, 25 bp, Artificial
  probe
  misc_feature (1)..(25): SEQ ID NO: 1727; WAN024CKA_at; Start 547; Stop 571
gaggattatacacacactcatttag

SEQ ID NO: 121951 - DNA, 25 bp, Artificial
  probe
  misc_feature (1)..(25): SEQ ID NO: 1727; WAN024CKA_at; Start 523; Stop 547
gatgctcttacaactactgttcaag

SEQ ID NO: 121952 - DNA, 25 bp, Artificial
  probe
  misc_feature (1)..(25): SEQ ID NO: 1727; WAN024CKA_at; Start 354; Stop 378
tgaagctggtttgcgaacgtacaat

SEQ ID NO: 121953 - DNA, 25 bp, Artificial
  probe
  misc_feature (1)..(25): SEQ ID NO: 1727; WAN024CKA_at; Start 110; Stop 134
ttactggacaacacaaagagatggt

SEQ ID NO: 121954 - DNA, 25 bp, Artificial
  probe
  misc_feature (1)..(25): SEQ ID NO: 1727; WAN024CKA_at; Start 913; Stop 937
cctgaaggagtagcggcaggaacct

SEQ ID NO: 121955 - DNA, 25 bp, Artificial
  probe
  misc_feature (1)..(25): SEQ ID NO: 1727; WAN024CKA_at; Start 157; Stop 181
ggtgttgtaccagattatgatttag

SEQ ID NO: 121956 - DNA, 25 bp, Artificial
  probe
  misc_feature (1)..(25): SEQ ID NO: 1727; WAN024CKA_at; Start 571; Stop 595
gatttaaacgctaacaatcgtctca

SEQ ID NO: 121957 - DNA, 25 bp, Artificial
  probe
  misc_feature (1)..(25): SEQ ID NO: 1727; WAN024CKA_at; Start 94; Stop 118
gaaacaattgtgtgtgttactggac

SEQ ID NO: 121958 - DNA, 25 bp, Artificial
  probe
  misc_feature (1)..(25): SEQ ID NO: 1727; WAN024CKA_at; Start 828; Stop 852
gattttaacagattctggcggagtt

SEQ ID NO: 121959 - DNA, 25 bp, Artificial
  probe
  misc_feature (1)..(25): SEQ ID NO: 1727; WAN024CKA_at; Start 397; Stop 421
gaagaatttaacaggcaatcgacat

SEQ ID NO: 121960 - DNA, 25 bp, Artificial
  probe
  misc_feature (1)..(25): SEQ ID NO: 1727; WAN024CKA_at; Start 15; Stop 39
tatgttagtattcggtacacgtccg

SEQ ID NO: 121961 - DNA, 25 bp, Artificial
  probe
  misc_feature (1)..(25): SEQ ID NO: 1727; WAN024CKA_at; Start 30; Stop 54
tacacgtccggaagccatcaaaatg

SEQ ID NO: 121962 - DNA, 25 bp, Artificial
  probe
  misc_feature (1)..(25): SEQ ID NO: 1727; WAN024CKA_at; Start 297; Stop 321
gacaacttatgcagcagccttggca

SEQ ID NO: 121963 - DNA, 25 bp, Artificial
  probe
  misc_feature (1)..(25): SEQ ID NO: 1727; WAN024CKA_at; Start 339; Stop 363
taaagtaggacatgttgaagctggt

SEQ ID NO: 121964 - DNA, 25 bp, Artificial
  probe
  misc_feature (1)..(25): SEQ ID NO: 1727; WAN024CKA_at; Start 380; Stop 404
tacaaagtccatttcctgaagaatt

SEQ ID NO: 121965 - DNA, 25 bp, Artificial
  probe
  misc_feature (1)..(25): SEQ ID NO: 1727; WAN024CKA_at; Start 209; Stop 233
tctctatcacaactagtatcttgga

SEQ ID NO: 121966 - DNA, 25 bp, Artificial
  probe
  misc_feature (1)..(25): SEQ ID NO: 1727; WAN024CKA_at; Start 672; Stop 696
gaatgaatacgaagatgttaaagtc

SEQ ID NO: 121967 - DNA, 25 bp, Artificial
  probe
  misc_feature (1)..(25): SEQ ID NO: 1727; WAN024CKA_at; Start 244; Stop 268
ccagttttagagaaggaacaaccag

SEQ ID NO: 121968 - DNA, 25 bp, Artificial
  probe
  misc_feature (1)..(25): SEQ ID NO: 1727; WAN024CKA_at; Start 1039; Stop 1063
tacggtaatggtgatgctagtcaac

SEQ ID NO: 121969 - DNA, 25 bp, Artificial
  probe
  misc_feature (1)..(25): SEQ ID NO: 1727; WAN024CKA_at; Start 734; Stop 758
cagctgcagagatctttggagatac

SEQ ID NO: 121970 - DNA, 25 bp, Artificial
  probe
  misc_feature (1)..(25): SEQ ID NO: 1727; WAN024CKA_at; Start 365; Stop 389
tgcgaacgtacaatttacaaagtcc

SEQ ID NO: 121971 - DNA, 25 bp, Artificial
  probe
  misc_feature (1)..(25): SEQ ID NO: 1727; WAN024CKA_at; Start 981; Stop 1005
caaactacttctagatgattctgga

SEQ ID NO: 121972 - DNA, 25 bp, Artificial
  probe
  misc_feature (1)..(25): SEQ ID NO: 1727; WAN024CKA_at; Start 944; Stop 968
tagtaggaactgacgaagaaacaat

SEQ ID NO: 121973 - DNA, 25 bp, Artificial
  probe
  misc_feature (1)..(25): SEQ ID NO: 1727; WAN024CKA_at; Start 796; Stop 820
gatttccacaacttcatgaaccaaa

SEQ ID NO: 121974 - DNA, 25 bp, Artificial
  probe
  misc_feature (1)..(25): SEQ ID NO: 1727; WAN024CKA_at; Start 495; Stop 519
tgtttatgtgactggaaatactgtc

SEQ ID NO: 121975 - DNA, 25 bp, Artificial
  probe
  misc_feature (1)..(25): SEQ ID NO: 1727; WAN024CKA_at; Start 509; Stop 533
gaaatactgtcattgatgctcttac

SEQ ID NO: 121976 - DNA, 25 bp, Artificial
  probe
  misc_feature (1)..(25): SEQ ID NO: 1727; WAN024CKA_at; Start 1063; Stop 1087
cagattgttcagattttgcgtggga

SEQ ID NO: 121977 - DNA, 25 bp, Artificial
  probe
  misc_feature (1)..(25): SEQ ID NO: 1727; WAN024CKA_at; Start 880; Stop 904
cctgtattggttatgcgcgatacta

SEQ ID NO: 121978 - DNA, 25 bp, Artificial
  probe
  misc_feature (1)..(25): SEQ ID NO: 1727; WAN024CKA_at; Start 843; Stop 867
tggcggagttcaggaagaagcacct

SEQ ID NO: 121979 - DNA, 25 bp, Artificial
  probe
  misc_feature (1)..(25): SEQ ID NO: 1727; WAN024CKA_at; Start 1019; Stop 1043
tgagtcaggctagcaatccatacgg

SEQ ID NO: 121980 - DNA, 25 bp, Artificial
  probe
  misc_feature (1)..(25): SEQ ID NO: 1727; WAN024CKA_at; Start 718; Stop 742
cctttggtacgtgaaacagctgcag

SEQ ID NO: 121981 - DNA, 25 bp, Artificial
  probe
  misc_feature (1)..(25): SEQ ID NO: 1727; WAN024CKA_at; Start 896; Stop 920
gcgatactactgaaagacctgaagg

SEQ ID NO: 121982 - DNA, 25 bp, Artificial
  probe
  misc_feature (1)..(25): SEQ ID NO: 1727; WAN024CKA_at; Start 283; Stop 307
cacggtgacactacgacaacttatg

SEQ ID NO: 121983 - DNA, 25 bp, Artificial
  probe
  misc_feature (1)..(25): SEQ ID NO: 648; WAN024CKB_at; Start 56; Stop 80
ctttggtcaaagagttaagaacacg

SEQ ID NO: 121984 - DNA, 25 bp, Artificial
  probe
  misc_feature (1)..(25): SEQ ID NO: 648; WAN024CKB_at; Start 124; Stop 148
caaatgttggatcaggtcttggaca

SEQ ID NO: 121985 - DNA, 25 bp, Artificial
  probe
  misc_feature (1)..(25): SEQ ID NO: 648; WAN024CKB_at; Start 41; Stop 65
ccatcaagatgtgtcctttggtcaa

SEQ ID NO: 121986 - DNA, 25 bp, Artificial
  probe
  misc_feature (1)..(25): SEQ ID NO: 648; WAN024CKB_at; Start 11; Stop 35
tagttgtagtatttggaactcgtcc

SEQ ID NO: 121987 - DNA, 25 bp, Artificial
  probe
  misc_feature (1)..(25): SEQ ID NO: 648; WAN024CKB_at; Start 750; Stop 774
actaagtggctgtgaacgtatcaag

SEQ ID NO: 121988 - DNA, 25 bp, Artificial
  probe
  misc_feature (1)..(25): SEQ ID NO: 648; WAN024CKB_at; Start 703; Stop 727
tatcctatccatatgaatcctcgtg

SEQ ID NO: 121989 - DNA, 25 bp, Artificial
  probe
  misc_feature (1)..(25): SEQ ID NO: 648; WAN024CKB_at; Start 646; Stop 670
catatgtttagagcaattagaagga

SEQ ID NO: 121990 - DNA, 25 bp, Artificial
  probe
  misc_feature (1)..(25): SEQ ID NO: 648; WAN024CKB_at; Start 571; Stop 595
ttagaatggataggagaaagcaggt

SEQ ID NO: 121991 - DNA, 25 bp, Artificial
  probe
  misc_feature (1)..(25): SEQ ID NO: 648; WAN024CKB_at; Start 95; Stop 119
cattagtttgcgttacgggccaaca

SEQ ID NO: 121992 - DNA, 25 bp, Artificial
  probe
  misc_feature (1)..(25): SEQ ID NO: 648; WAN024CKB_at; Start 932; Stop 956
cagggactttgaaacttgtaggtgc

SEQ ID NO: 121993 - DNA, 25 bp, Artificial
  probe
  misc_feature (1)..(25): SEQ ID NO: 648; WAN024CKB_at; Start 248; Stop 272
tagagtcagaaaaacctgatttggt

SEQ ID NO: 121994 - DNA, 25 bp, Artificial
  probe
  misc_feature (1)..(25): SEQ ID NO: 648; WAN024CKB_at; Start 718; Stop 742
aatcctcgtgttcgccaaattgctg

SEQ ID NO: 121995 - DNA, 25 bp, Artificial
  probe
  misc_feature (1)..(25): SEQ ID NO: 648; WAN024CKB_at; Start 771; Stop 795
caagatgatcgaacctttagaagta

SEQ ID NO: 121996 - DNA, 25 bp, Artificial
  probe
  misc_feature (1)..(25): SEQ ID NO: 648; WAN024CKB_at; Start 233; Stop 257
gaatgaaggctattttagagtcaga

SEQ ID NO: 121997 - DNA, 25 bp, Artificial
  probe
  misc_feature (1)..(25): SEQ ID NO: 648; WAN024CKB_at; Start 489; Stop 513
tccagagagcatatttgtgacaggt

SEQ ID NO: 121998 - DNA, 25 bp, Artificial
  probe
  misc_feature (1)..(25): SEQ ID NO: 648; WAN024CKB_at; Start 136; Stop 160
caggtcttggacacatttgggatta

SEQ ID NO: 121999 - DNA, 25 bp, Artificial
  probe
  misc_feature (1)..(25): SEQ ID NO: 648; WAN024CKB_at; Start 331; Stop 355
cagattccaattggtcatgttgaag

SEQ ID NO: 122000 - DNA, 25 bp, Artificial
  probe
  misc_feature (1)..(25): SEQ ID NO: 648; WAN024CKB_at; Start 284; Stop 308
gggatacaagtacgaccttcgctag

SEQ ID NO: 122001 - DNA, 25 bp, Artificial
  probe
  misc_feature (1)..(25): SEQ ID NO: 648; WAN024CKB_at; Start 676; Stop 700
gaagaatattcagatgtcaaggcta

SEQ ID NO: 122002 - DNA, 25 bp, Artificial
  probe
  misc_feature (1)..(25): SEQ ID NO: 648; WAN024CKB_at; Start 108; Stop 132
tacgggccaacaccgtcaaatgttg

SEQ ID NO: 122003 - DNA, 25 bp, Artificial
  probe
  misc_feature (1)..(25): SEQ ID NO: 648; WAN024CKB_at; Start 474; Stop 498
aagagaaggaaaaactccagagagc

SEQ ID NO: 122004 - DNA, 25 bp, Artificial
  probe
  misc_feature (1)..(25): SEQ ID NO: 648; WAN024CKB_at; Start 916; Stop 940
ccagagggaattgaagcagggactt

SEQ ID NO: 122005 - DNA, 25 bp, Artificial
  probe
  misc_feature (1)..(25): SEQ ID NO: 648; WAN024CKB_at; Start 375; Stop 399
tatctattcaccatatcctgaagag

SEQ ID NO: 122006 - DNA, 25 bp, Artificial
  probe
  misc_feature (1)..(25): SEQ ID NO: 648; WAN024CKB_at; Start 297; Stop 321
gaccttcgctagttcactggcggcc

SEQ ID NO: 122007 - DNA, 25 bp, Artificial
  probe
  misc_feature (1)..(25): SEQ ID NO: 648; WAN024CKB_at; Start 1040; Stop 1064
catatggagatggaacggcttgtaa

SEQ ID NO: 122008 - DNA, 25 bp, Artificial
  probe
  misc_feature (1)..(25): SEQ ID NO: 648; WAN024CKB_at; Start 199; Stop 223
actttatttgatgtgaccattggca

SEQ ID NO: 122009 - DNA, 25 bp, Artificial
  probe
  misc_feature (1)..(25): SEQ ID NO: 648; WAN024CKB_at; Start 355; Stop 379
gctggtttgcgcacttacgatatct

SEQ ID NO: 122010 - DNA, 25 bp, Artificial
  probe
  misc_feature (1)..(25): SEQ ID NO: 648; WAN024CKB_at; Start 1007; Stop 1031
cagtttatcaagcaatgagtcaagc

SEQ ID NO: 122011 - DNA, 25 bp, Artificial
  probe
  misc_feature (1)..(25): SEQ ID NO: 648; WAN024CKB_at; Start 504; Stop 528
tgtgacaggtaatacggcgattgat

SEQ ID NO: 122012 - DNA, 25 bp, Artificial
  probe
  misc_feature (1)..(25): SEQ ID NO: 648; WAN024CKB_at; Start 24; Stop 48
tggaactcgtccagaagccatcaag

SEQ ID NO: 122013 - DNA, 25 bp, Artificial
  probe
  misc_feature (1)..(25): SEQ ID NO: 648; WAN024CKB_at; Start 1018; Stop 1042
gcaatgagtcaagcttcaaatccat

SEQ ID NO: 122014 - DNA, 25 bp, Artificial
  probe
  misc_feature (1)..(25): SEQ ID NO: 648; WAN024CKB_at; Start 552; Stop 576
ggactatacgcatcctgagttagaa

SEQ ID NO: 122015 - DNA, 25 bp, Artificial
  probe
  misc_feature (1)..(25): SEQ ID NO: 648; WAN024CKB_at; Start 600; Stop 624
tctaattacagctcatcgtcgtgaa

SEQ ID NO: 122016 - DNA, 25 bp, Artificial
  probe
  misc_feature (1)..(25): SEQ ID NO: 648; WAN024CKB_at; Start 855; Stop 879
tcaggaagaggctccaagtttagga

SEQ ID NO: 122017 - DNA, 25 bp, Artificial
  probe
  misc_feature (1)..(25): SEQ ID NO: 616; WAN024CKC_at; Start 656; Stop 680
gagcaatccgacgtatcattgaaga

SEQ ID NO: 122018 - DNA, 25 bp, Artificial
  probe
  misc_feature (1)..(25): SEQ ID NO: 616; WAN024CKC_at; Start 561; Stop 585
tcatcctgagttaaattgggttggg

SEQ ID NO: 122019 - DNA, 25 bp, Artificial
  probe
  misc_feature (1)..(25): SEQ ID NO: 616; WAN024CKC_at; Start 641; Stop 665
tgaggcacatgtttagagcaatccg

SEQ ID NO: 122020 - DNA, 25 bp, Artificial
  probe
  misc_feature (1)..(25): SEQ ID NO: 616; WAN024CKC_at; Start 198; Stop 222
aactctctttgatgtcacaattggc

SEQ ID NO: 122021 - DNA, 25 bp, Artificial
  probe
  misc_feature (1)..(25): SEQ ID NO: 616; WAN024CKC_at; Start 750; Stop 774
actaagcggatgtgaacgtatcaaa

SEQ ID NO: 122022 - DNA, 25 bp, Artificial
  probe
  misc_feature (1)..(25): SEQ ID NO: 616; WAN024CKC_at; Start 599; Stop 623
tattaattactgctcatcgtcgtga

SEQ ID NO: 122023 - DNA, 25 bp, Artificial
  probe
  misc_feature (1)..(25): SEQ ID NO: 616; WAN024CKC_at; Start 693; Stop 717
aaaggctctttaccccattcatatg

SEQ ID NO: 122024 - DNA, 25 bp, Artificial
  probe
  misc_feature (1)..(25): SEQ ID NO: 616; WAN024CKC_at; Start 33; Stop 57
tcccgaagctatcaagatgtgtccc

SEQ ID NO: 122025 - DNA, 25 bp, Artificial
  probe
  misc_feature (1)..(25): SEQ ID NO: 616; WAN024CKC_at; Start 56; Stop 80
ccttggttaaagagctaagaacacg

SEQ ID NO: 122026 - DNA, 25 bp, Artificial
  probe
  misc_feature (1)..(25): SEQ ID NO: 616; WAN024CKC_at; Start 222; Stop 246
cattttggaaggcatgaagactgtc

SEQ ID NO: 122027 - DNA, 25 bp, Artificial
  probe
  misc_feature (1)..(25): SEQ ID NO: 616; WAN024CKC_at; Start 143; Stop 167
tggatacttttaggattacgcctga

SEQ ID NO: 122028 - DNA, 25 bp, Artificial
  probe
  misc_feature (1)..(25): SEQ ID NO: 616; WAN024CKC_at; Start 413; Stop 437
cagtaggtgctttggctcagtatca

SEQ ID NO: 122029 - DNA, 25 bp, Artificial
  probe
  misc_feature (1)..(25): SEQ ID NO: 616; WAN024CKC_at; Start 493; Stop 517
gaagctatatttatcacaggtaaca

SEQ ID NO: 122030 - DNA, 25 bp, Artificial
  probe
  misc_feature (1)..(25): SEQ ID NO: 616; WAN024CKC_at; Start 242; Stop 266
ctgtcttagagtcagttaatcctga

SEQ ID NO: 122031 - DNA, 25 bp, Artificial
  probe
  misc_feature (1)..(25): SEQ ID NO: 616; WAN024CKC_at; Start 720; Stop 744
tcctctagttcgtcagattgctgag

SEQ ID NO: 122032 - DNA, 25 bp, Artificial
  probe
  misc_feature (1)..(25): SEQ ID NO: 616; WAN024CKC_at; Start 180; Stop 204
tattatgaaggacaaacaaactctc

SEQ ID NO: 122033 - DNA, 25 bp, Artificial
  probe
  misc_feature (1)..(25): SEQ ID NO: 616; WAN024CKC_at; Start 1003; Stop 1027
gatttagtttatcaagcgatgagcc

SEQ ID NO: 122034 - DNA, 25 bp, Artificial
  probe
  misc_feature (1)..(25): SEQ ID NO: 616; WAN024CKC_at; Start 284; Stop 308
gggatacgagtacaacatttgccag

SEQ ID NO: 122035 - DNA, 25 bp, Artificial
  probe
  misc_feature (1)..(25): SEQ ID NO: 616; WAN024CKC_at; Start 124; Stop 148
caaatgctggatcaagttttggata

SEQ ID NO: 122036 - DNA, 25 bp, Artificial
  probe
  misc_feature (1)..(25): SEQ ID NO: 616; WAN024CKC_at; Start 676; Stop 700
gaagaacattcggatataaaggctc

SEQ ID NO: 122037 - DNA, 25 bp, Artificial
  probe
  misc_feature (1)..(25): SEQ ID NO: 616; WAN024CKC_at; Start 79; Stop 103
cgtgagaatcttgaaacattggtct

SEQ ID NO: 122038 - DNA, 25 bp, Artificial
  probe
  misc_feature (1)..(25): SEQ ID NO: 616; WAN024CKC_at; Start 108; Stop 132
tacgggtcaacatcgtcaaatgctg

SEQ ID NO: 122039 - DNA, 25 bp, Artificial
  probe
  misc_feature (1)..(25): SEQ ID NO: 616; WAN024CKC_at; Start 818; Stop 842
cacggagttatctcattttaacaga

SEQ ID NO: 122040 - DNA, 25 bp, Artificial
  probe
  misc_feature (1)..(25): SEQ ID NO: 616; WAN024CKC_at; Start 1039; Stop 1063
ccgtatggagatggaacagcttgca

SEQ ID NO: 122041 - DNA, 25 bp, Artificial
  probe
  misc_feature (1)..(25): SEQ ID NO: 616; WAN024CKC_at; Start 333; Stop 357
gattccaattggacatgtagaggct

SEQ ID NO: 122042 - DNA, 25 bp, Artificial
  probe
  misc_feature (1)..(25): SEQ ID NO: 616; WAN024CKC_at; Start 350; Stop 374
tagaggctggtttgcgtacttatga

SEQ ID NO: 122043 - DNA, 25 bp, Artificial
  probe
  misc_feature (1)..(25): SEQ ID NO: 616; WAN024CKC_at; Start 1020; Stop 1044
gatgagccaagcttcaaatccgtat

SEQ ID NO: 122044 - DNA, 25 bp, Artificial
  probe
  misc_feature (1)..(25): SEQ ID NO: 616; WAN024CKC_at; Start 935; Stop 959
gaactttgaagcttgtaggtactga

SEQ ID NO: 122045 - DNA, 25 bp, Artificial
  probe
  misc_feature (1)..(25): SEQ ID NO: 616; WAN024CKC_at; Start 771; Stop 795
caaaatgatcgatccgttggaagta

SEQ ID NO: 122046 - DNA, 25 bp, Artificial
  probe
  misc_feature (1)..(25): SEQ ID NO: 616; WAN024CKC_at; Start 849; Stop 873
tggtatccaagaagaggcacctagt

SEQ ID NO: 122047 - DNA, 25 bp, Artificial
  probe
  misc_feature (1)..(25): SEQ ID NO: 616; WAN024CKC_at; Start 624; Stop 648
aaatattggtgacccgatgaggcac

SEQ ID NO: 122048 - DNA, 25 bp, Artificial
  probe
  misc_feature (1)..(25): SEQ ID NO: 616; WAN024CKC_at; Start 94; Stop 118
acattggtctgtgttacgggtcaac

SEQ ID NO: 122049 - DNA, 25 bp, Artificial
  probe
  misc_feature (1)..(25): SEQ ID NO: 616; WAN024CKC_at; Start 468; Stop 492
tctcttgagagaaggaaaaaattct

SEQ ID NO: 122050 - DNA, 25 bp, Artificial
  probe
  misc_feature (1)..(25): SEQ ID NO: 616; WAN024CKC_at; Start 507; Stop 531
cacaggtaacacagcaattgatgct

SEQ ID NO: 122051 - DNA, 25 bp, Artificial
  probe
  misc_feature (1)..(25): SEQ ID NO: 650; WAN024CKD_at; Start 332; Stop 356
gaatcaaagtgggacacgtcgaagc

SEQ ID NO: 122052 - DNA, 25 bp, Artificial
  probe
  misc_feature (1)..(25): SEQ ID NO: 650; WAN024CKD_at; Start 415; Stop 439
acttctatcattgccgactatcatt

SEQ ID NO: 122053 - DNA, 25 bp, Artificial
  probe
  misc_feature (1)..(25): SEQ ID NO: 650; WAN024CKD_at; Start 704; Stop 728
tccataaaaatcctaaggttcgaga

SEQ ID NO: 122054 - DNA, 25 bp, Artificial
  probe
  misc_feature (1)..(25): SEQ ID NO: 650; WAN024CKD_at; Start 596; Stop 620
tgctaacggctcatcgacgagaaaa

SEQ ID NO: 122055 - DNA, 25 bp, Artificial
  probe
  misc_feature (1)..(25): SEQ ID NO: 650; WAN024CKD_at; Start 1065; Stop 1089
tgttgatattattctggaagtataa

SEQ ID NO: 122056 - DNA, 25 bp, Artificial
  probe
  misc_feature (1)..(25): SEQ ID NO: 650; WAN024CKD_at; Start 824; Stop 848
tgattttgacagattctggaggtgt

SEQ ID NO: 122057 - DNA, 25 bp, Artificial
  probe
  misc_feature (1)..(25): SEQ ID NO: 650; WAN024CKD_at; Start 327; Stop 351
tatgggaatcaaagtgggacacgtc

SEQ ID NO: 122058 - DNA, 25 bp, Artificial
  probe
  misc_feature (1)..(25): SEQ ID NO: 650; WAN024CKD_at; Start 581; Stop 605
gtagtaagttaatcatgctaacggc

SEQ ID NO: 122059 - DNA, 25 bp, Artificial
  probe
  misc_feature (1)..(25): SEQ ID NO: 650; WAN024CKD_at; Start 1033; Stop 1057
ccttatggagatggaatgacttgta

SEQ ID NO: 122060 - DNA, 25 bp, Artificial
  probe
  misc_feature (1)..(25): SEQ ID NO: 650; WAN024CKD_at; Start 629; Stop 653
aaccgatggaaaacatgtttaatgc

SEQ ID NO: 122061 - DNA, 25 bp, Artificial
  probe
  misc_feature (1)..(25): SEQ ID NO: 650; WAN024CKD_at; Start 519; Stop 543
tgatgctttgaagacgactgttcaa

SEQ ID NO: 122062 - DNA, 25 bp, Artificial
  probe
  misc_feature (1)..(25): SEQ ID NO: 650; WAN024CKD_at; Start 1038; Stop 1062
tggagatggaatgacttgtaaacgg

SEQ ID NO: 122063 - DNA, 25 bp, Artificial
  probe
  misc_feature (1)..(25): SEQ ID NO: 650; WAN024CKD_at; Start 373; Stop 397
aatctccaaagtccatttccagagg

SEQ ID NO: 122064 - DNA, 25 bp, Artificial
  probe
  misc_feature (1)..(25): SEQ ID NO: 650; WAN024CKD_at; Start 887; Stop 911
tgatgcgtgatacaacagagcgtcc

SEQ ID NO: 122065 - DNA, 25 bp, Artificial
  probe
  misc_feature (1)..(25): SEQ ID NO: 650; WAN024CKD_at; Start 483; Stop 507
cagaaaaaatatctttgtgacggga

SEQ ID NO: 122066 - DNA, 25 bp, Artificial
  probe
  misc_feature (1)..(25): SEQ ID NO: 650; WAN024CKD_at; Start 590; Stop 614
taatcatgctaacggctcatcgacg

SEQ ID NO: 122067 - DNA, 25 bp, Artificial
  probe
  misc_feature (1)..(25): SEQ ID NO: 650; WAN024CKD_at; Start 733; Stop 757
gcaagtaaagtttttggcgataatg

SEQ ID NO: 122068 - DNA, 25 bp, Artificial
  probe
  misc_feature (1)..(25): SEQ ID NO: 650; WAN024CKD_at; Start 12; Stop 36
catgttggtttttgggacacgtcca

SEQ ID NO: 122069 - DNA, 25 bp, Artificial
  probe
  misc_feature (1)..(25): SEQ ID NO: 650; WAN024CKD_at; Start 697; Stop 721
tatcccatccataaaaatcctaagg

SEQ ID NO: 122070 - DNA, 25 bp, Artificial
  probe
  misc_feature (1)..(25): SEQ ID NO: 650; WAN024CKD_at; Start 86; Stop 110
caatcaagacacttgtgtgtgtaac

SEQ ID NO: 122071 - DNA, 25 bp, Artificial
  probe
  misc_feature (1)..(25): SEQ ID NO: 650; WAN024CKD_at; Start 571; Stop 595
tgggcaaagggtagtaagttaatca

SEQ ID NO: 122072 - DNA, 25 bp, Artificial
  probe
  misc_feature (1)..(25): SEQ ID NO: 650; WAN024CKD_at; Start 497; Stop 521
ttgtgacgggaaatacagtcattga

SEQ ID NO: 122073 - DNA, 25 bp, Artificial
  probe
  misc_feature (1)..(25): SEQ ID NO: 650; WAN024CKD_at; Start 994; Stop 1018
gatgaaacagaatataacaagatga

SEQ ID NO: 122074 - DNA, 25 bp, Artificial
  probe
  misc_feature (1)..(25): SEQ ID NO: 650; WAN024CKD_at; Start 515; Stop 539
tcattgatgctttgaagacgactgt

SEQ ID NO: 122075 - DNA, 25 bp, Artificial
  probe
  misc_feature (1)..(25): SEQ ID NO: 650; WAN024CKD_at; Start 603; Stop 627
ggctcatcgacgagaaaatcttggg

SEQ ID NO: 122076 - DNA, 25 bp, Artificial
  probe
  misc_feature (1)..(25): SEQ ID NO: 650; WAN024CKD_at; Start 316; Stop 340
gcagcattttatatgggaatcaaag

SEQ ID NO: 122077 - DNA, 25 bp, Artificial
  probe
  misc_feature (1)..(25): SEQ ID NO: 650; WAN024CKD_at; Start 679; Stop 703
gaagatgtaaaagttgtatatccca

SEQ ID NO: 122078 - DNA, 25 bp, Artificial
  probe
  misc_feature (1)..(25): SEQ ID NO: 650; WAN024CKD_at; Start 743; Stop 767
tttttggcgataatgaacgaatgaa

SEQ ID NO: 122079 - DNA, 25 bp, Artificial
  probe
  misc_feature (1)..(25): SEQ ID NO: 650; WAN024CKD_at; Start 640; Stop 664
aacatgtttaatgctgttaatcgaa

SEQ ID NO: 122080 - DNA, 25 bp, Artificial
  probe
  misc_feature (1)..(25): SEQ ID NO: 650; WAN024CKD_at; Start 890; Stop 914
tgcgtgatacaacagagcgtcctga

SEQ ID NO: 122081 - DNA, 25 bp, Artificial
  probe
  misc_feature (1)..(25): SEQ ID NO: 650; WAN024CKD_at; Start 8; Stop 32
aagtcatgttggtttttgggacacg

SEQ ID NO: 122082 - DNA, 25 bp, Artificial
  probe
  misc_feature (1)..(25): SEQ ID NO: 650; WAN024CKD_at; Start 490; Stop 514
aatatctttgtgacgggaaatacag

SEQ ID NO: 122083 - DNA, 25 bp, Artificial
  probe
  misc_feature (1)..(25): SEQ ID NO: 650; WAN024CKD_at; Start 76; Stop 100
caaaatgattcaatcaagacacttg

SEQ ID NO: 122084 - DNA, 25 bp, Artificial
  probe
  misc_feature (1)..(25): SEQ ID NO: 650; WAN024CKD_at; Start 684; Stop 708
tgtaaaagttgtatatcccatccat

SEQ ID NO: 122085 - DNA, 25 bp, Artificial
  probe
  misc_feature (1)..(25): SEQ ID NO: 3866; WAN024CKE_at; Start 724; Stop 748
caaagtcaagagatagccttttggg

SEQ ID NO: 122086 - DNA, 25 bp, Artificial
  probe
  misc_feature (1)..(25): SEQ ID NO: 3866; WAN024CKE_at; Start 183; Stop 207
tggtttcatgatatcagctacaaaa

SEQ ID NO: 122087 - DNA, 25 bp, Artificial
  probe
  misc_feature (1)..(25): SEQ ID NO: 3866; WAN024CKE_at; Start 1006; Stop 1030
tattctatgatttacggatggcctg

SEQ ID NO: 122088 - DNA, 25 bp, Artificial
  probe
  misc_feature (1)..(25): SEQ ID NO: 3866; WAN024CKE_at; Start 166; Stop 190
caactggtgattgattttggtttca

SEQ ID NO: 122089 - DNA, 25 bp, Artificial
  probe
  misc_feature (1)..(25): SEQ ID NO: 3866; WAN024CKE_at; Start 765; Stop 789
gctttcagcagcaaaatcattgtat

SEQ ID NO: 122090 - DNA, 25 bp, Artificial
  probe
  misc_feature (1)..(25): SEQ ID NO: 3866; WAN024CKE_at; Start 673; Stop 697
gcaactactatttttggcgtcttta

SEQ ID NO: 122091 - DNA, 25 bp, Artificial
  probe
  misc_feature (1)..(25): SEQ ID NO: 3866; WAN024CKE_at; Start 84; Stop 108
aacactcccgtatttgacaagggtg

SEQ ID NO: 122092 - DNA, 25 bp, Artificial
  probe
  misc_feature (1)..(25): SEQ ID NO: 3866; WAN024CKE_at; Start 841; Stop 865
caatcggttaagagtattaatcgga

SEQ ID NO: 122093 - DNA, 25 bp, Artificial
  probe
  misc_feature (1)..(25): SEQ ID NO: 3866; WAN024CKE_at; Start 371; Stop 395
tgttagctacagtgaccaatatttt

SEQ ID NO: 122094 - DNA, 25 bp, Artificial
  probe
  misc_feature (1)..(25): SEQ ID NO: 3866; WAN024CKE_at; Start 688; Stop 712
ggcgtctttacgacagtcatttcgg

SEQ ID NO: 122095 - DNA, 25 bp, Artificial
  probe
  misc_feature (1)..(25): SEQ ID NO: 3866; WAN024CKE_at; Start 112; Stop 136
tcgctagacgcgtatggaatggtta

SEQ ID NO: 122096 - DNA, 25 bp, Artificial
  probe
  misc_feature (1)..(25): SEQ ID NO: 3866; WAN024CKE_at; Start 99; Stop 123
gacaagggtgctttcgctagacgcg

SEQ ID NO: 122097 - DNA, 25 bp, Artificial
  probe
  misc_feature (1)..(25): SEQ ID NO: 3866; WAN024CKE_at; Start 225; Stop 249
tactactccctcaaagattggaagg

SEQ ID NO: 122098 - DNA, 25 bp, Artificial
  probe
  misc_feature (1)..(25): SEQ ID NO: 3866; WAN024CKE_at; Start 148; Stop 172
gcgttaatagcttatgttcaactgg

SEQ ID NO: 122099 - DNA, 25 bp, Artificial
  probe
  misc_feature (1)..(25): SEQ ID NO: 3866; WAN024CKE_at; Start 977; Stop 1001
acttattacccgcttttgttgctag

SEQ ID NO: 122100 - DNA, 25 bp, Artificial
  probe
  misc_feature (1)..(25): SEQ ID NO: 3866; WAN024CKE_at; Start 1079; Stop 1103
tagcttcgattgtccaaactttggg

SEQ ID NO: 122101 - DNA, 25 bp, Artificial
  probe
  misc_feature (1)..(25): SEQ ID NO: 3866; WAN024CKE_at; Start 1150; Stop 1174
gctatttgttcaagtatgtctgagg

SEQ ID NO: 122102 - DNA, 25 bp, Artificial
  probe
  misc_feature (1)..(25): SEQ ID NO: 3866; WAN024CKE_at; Start 793; Stop 817
cctatagcgaatagtttatatccgc

SEQ ID NO: 122103 - DNA, 25 bp, Artificial
  probe
  misc_feature (1)..(25): SEQ ID NO: 3866; WAN024CKE_at; Start 556; Stop 580
gctgcagtagtttcttatagattcc

SEQ ID NO: 122104 - DNA, 25 bp, Artificial
  probe
  misc_feature (1)..(25): SEQ ID NO: 3866; WAN024CKE_at; Start 249; Stop 273
gatagttggagatactctagttgaa

SEQ ID NO: 122105 - DNA, 25 bp, Artificial
  probe
  misc_feature (1)..(25): SEQ ID NO: 3866; WAN024CKE_at; Start 940; Stop 964
ggtgaaaaatataccgtttcagcag

SEQ ID NO: 122106 - DNA, 25 bp, Artificial
  probe
  misc_feature (1)..(25): SEQ ID NO: 3866; WAN024CKE_at; Start 1168; Stop 1192
tctgaggtggtgttatggattagcc

SEQ ID NO: 122107 - DNA, 25 bp, Artificial
  probe
  misc_feature (1)..(25): SEQ ID NO: 3866; WAN024CKE_at; Start 813; Stop 837
tccgcatatgatacgtactaaagat

SEQ ID NO: 122108 - DNA, 25 bp, Artificial
  probe
  misc_feature (1)..(25): SEQ ID NO: 3866; WAN024CKE_at; Start 748; Stop 772
gggatagcaatgcaactgctttcag

SEQ ID NO: 122109 - DNA, 25 bp, Artificial
  probe
  misc_feature (1)..(25): SEQ ID NO: 3866; WAN024CKE_at; Start 1062; Stop 1086
tacaatgacaactatattagcttcg

SEQ ID NO: 122110 - DNA, 25 bp, Artificial
  probe
  misc_feature (1)..(25): SEQ ID NO: 3866; WAN024CKE_at; Start 309; Stop 333
caccatattgatgtggcaaatccca

SEQ ID NO: 122111 - DNA, 25 bp, Artificial
  probe
  misc_feature (1)..(25): SEQ ID NO: 3866; WAN024CKE_at; Start 429; Stop 453
gatgcatgcagttgcaattccttat

SEQ ID NO: 122112 - DNA, 25 bp, Artificial
  probe
  misc_feature (1)..(25): SEQ ID NO: 3866; WAN024CKE_at; Start 539; Stop 563
gaattgggaatttagttgctgcagt

SEQ ID NO: 122113 - DNA, 25 bp, Artificial
  probe
  misc_feature (1)..(25): SEQ ID NO: 3866; WAN024CKE_at; Start 1022; Stop 1046
gatggcctgtcttaggagctattga

SEQ ID NO: 122114 - DNA, 25 bp, Artificial
  probe
  misc_feature (1)..(25): SEQ ID NO: 3866; WAN024CKE_at; Start 526; Stop 550
cctatattggaaggaattgggaatt

SEQ ID NO: 122115 - DNA, 25 bp, Artificial
  probe
  misc_feature (1)..(25): SEQ ID NO: 3866; WAN024CKE_at; Start 414; Stop 438
tcgtggaattgaaaagatgcatgca

SEQ ID NO: 122116 - DNA, 25 bp, Artificial
  probe
  misc_feature (1)..(25): SEQ ID NO: 3866; WAN024CKE_at; Start 210; Stop 234
tattgtaaatgcttgtactactccc

SEQ ID NO: 122117 - DNA, 25 bp, Artificial
  probe
  misc_feature (1)..(25): SEQ ID NO: 3866; WAN024CKE_at; Start 323; Stop 347
ggcaaatcccaataatgagagagaa

SEQ ID NO: 122118 - DNA, 25 bp, Artificial
  probe
  misc_feature (1)..(25): SEQ ID NO: 3866; WAN024CKE_at; Start 1211; Stop 1235
agaaccgttcattatttgttaggag

SEQ ID NO: 122119 - DNA, 25 bp, Artificial
  probe
  misc_feature (1)..(25): SEQ ID NO: 4220; WAN024CKF_at; Start 728; Stop 752
gaactgaggattgttttcaattcaa

SEQ ID NO: 122120 - DNA, 25 bp, Artificial
  probe
  misc_feature (1)..(25): SEQ ID NO: 4220; WAN024CKF_at; Start 233; Stop 257
aagggcataatgcacgttttcgtga

SEQ ID NO: 122121 - DNA, 25 bp, Artificial
  probe
  misc_feature (1)..(25): SEQ ID NO: 4220; WAN024CKF_at; Start 435; Stop 459
tgattctttgaagcatttgtcgcct

SEQ ID NO: 122122 - DNA, 25 bp, Artificial
  probe
  misc_feature (1)..(25): SEQ ID NO: 4220; WAN024CKF_at; Start 745; Stop 769
caattcaagtatcattctcctgcag

SEQ ID NO: 122123 - DNA, 25 bp, Artificial
  probe
  misc_feature (1)..(25): SEQ ID NO: 4220; WAN024CKF_at; Start 305; Stop 329
catattttaaaaagcctataggagt

SEQ ID NO: 122124 - DNA, 25 bp, Artificial
  probe
  misc_feature (1)..(25): SEQ ID NO: 4220; WAN024CKF_at; Start 142; Stop 166
caaatgtacttgaaagaatatcgcc

SEQ ID NO: 122125 - DNA, 25 bp, Artificial
  probe
  misc_feature (1)..(25): SEQ ID NO: 4220; WAN024CKF_at; Start 196; Stop 220
gatgctattttgtatatcccgggag

SEQ ID NO: 122126 - DNA, 25 bp, Artificial
  probe
  misc_feature (1)..(25): SEQ ID NO: 4220; WAN024CKF_at; Start 596; Stop 620
aagctcttgaaaaatttgcggaatc

SEQ ID NO: 122127 - DNA, 25 bp, Artificial
  probe
  misc_feature (1)..(25): SEQ ID NO: 4220; WAN024CKF_at; Start 403; Stop 427
caatttattacagttcgtgatcgag

SEQ ID NO: 122128 - DNA, 25 bp, Artificial
  probe
  misc_feature (1)..(25): SEQ ID NO: 4220; WAN024CKF_at; Start 890; Stop 914
cacgttattatggagcaattggaga

SEQ ID NO: 122129 - DNA, 25 bp, Artificial
  probe
  misc_feature (1)..(25): SEQ ID NO: 4220; WAN024CKF_at; Start 342; Stop 366
tgcagggcctaataacgattctttg

SEQ ID NO: 122130 - DNA, 25 bp, Artificial
  probe
  misc_feature (1)..(25): SEQ ID NO: 4220; WAN024CKF_at; Start 986; Stop 1010
taaaaccgataacaataccttcaga

SEQ ID NO: 122131 - DNA, 25 bp, Artificial
  probe
  misc_feature (1)..(25): SEQ ID NO: 4220; WAN024CKF_at; Start 25; Stop 49
ggtgcaacggattatggttcaagta

SEQ ID NO: 122132 - DNA, 25 bp, Artificial
  probe
  misc_feature (1)..(25): SEQ ID NO: 4220; WAN024CKF_at; Start 1001; Stop 1025
taccttcagaattggtgttgaaagc

SEQ ID NO: 122133 - DNA, 25 bp, Artificial
  probe
  misc_feature (1)..(25): SEQ ID NO: 4220; WAN024CKF_at; Start 670; Stop 694
tcggattccattctaccttatgaag

SEQ ID NO: 122134 - DNA, 25 bp, Artificial
  probe
  misc_feature (1)..(25): SEQ ID NO: 4220; WAN024CKF_at; Start 580; Stop 604
tataatcattccaaaaaagctcttg

SEQ ID NO: 122135 - DNA, 25 bp, Artificial
  probe
  misc_feature (1)..(25): SEQ ID NO: 4220; WAN024CKF_at; Start 827; Stop 851
gggtagtggcaacatgttttaataa

SEQ ID NO: 122136 - DNA, 25 bp, Artificial
  probe
  misc_feature (1)..(25): SEQ ID NO: 4220; WAN024CKF_at; Start 655; Stop 679
tatgttgtagtaacttcggattcca

SEQ ID NO: 122137 - DNA, 25 bp, Artificial
  probe
  misc_feature (1)..(25): SEQ ID NO: 4220; WAN024CKF_at; Start 521; Stop 545
cagagcagctgtgtcaattgaaaag

SEQ ID NO: 122138 - DNA, 25 bp, Artificial
  probe
  misc_feature (1)..(25): SEQ ID NO: 4220; WAN024CKF_at; Start 447; Stop 471
gcatttgtcgccttcggctccagtg

SEQ ID NO: 122139 - DNA, 25 bp, Artificial
  probe
  misc_feature (1)..(25): SEQ ID NO: 4220; WAN024CKF_at; Start 10; Stop 34
aaaattatgttacatggtgcaacgg

SEQ ID NO: 122140 - DNA, 25 bp, Artificial
  probe
  misc_feature (1)..(25): SEQ ID NO: 4220; WAN024CKF_at; Start 685; Stop 709
ccttatgaagatgcttattatcagg

SEQ ID NO: 122141 - DNA, 25 bp, Artificial
  probe
  misc_feature (1)..(25): SEQ ID NO: 4220; WAN024CKF_at; Start 849; Stop 873
taaatctgtgattgccattgcatgc

SEQ ID NO: 122142 - DNA, 25 bp, Artificial
  probe
  misc_feature (1)..(25): SEQ ID NO: 4220; WAN024CKF_at; Start 52; Stop 76
tacggtgattatctttacggtgaga

SEQ ID NO: 122143 - DNA, 25 bp, Artificial
  probe
  misc_feature (1)..(25): SEQ ID NO: 4220; WAN024CKF_at; Start 284; Stop 308
tacctttgggaatttgggcttcata

SEQ ID NO: 122144 - DNA, 25 bp, Artificial
  probe
  misc_feature (1)..(25): SEQ ID NO: 4220; WAN024CKF_at; Start 872; Stop 896
gccatccagaaaaaacagcacgtta

SEQ ID NO: 122145 - DNA, 25 bp, Artificial
  probe
  misc_feature (1)..(25): SEQ ID NO: 4220; WAN024CKF_at; Start 858; Stop 882
gattgccattgcatgccatccagaa

SEQ ID NO: 122146 - DNA, 25 bp, Artificial
  probe
  misc_feature (1)..(25): SEQ ID NO: 4220; WAN024CKF_at; Start 462; Stop 486
ggctccagtgcatgaaacctttgat

SEQ ID NO: 122147 - DNA, 25 bp, Artificial
  probe
  misc_feature (1)..(25): SEQ ID NO: 4220; WAN024CKF_at; Start 505; Stop 529
ttaagagaagaaaaaacagagcagc

SEQ ID NO: 122148 - DNA, 25 bp, Artificial
  probe
  misc_feature (1)..(25): SEQ ID NO: 4220; WAN024CKF_at; Start 327; Stop 351
agtattaggtattggtgcagggcct

SEQ ID NO: 122149 - DNA, 25 bp, Artificial
  probe
  misc_feature (1)..(25): SEQ ID NO: 4220; WAN024CKF_at; Start 177; Stop 201
ttttactaaaaaacaagcagatgct

SEQ ID NO: 122150 - DNA, 25 bp, Artificial
  probe
  misc_feature (1)..(25): SEQ ID NO: 4220; WAN024CKF_at; Start 1018; Stop 1042
ttgaaagcgagaagtagtttggact

SEQ ID NO: 122151 - DNA, 25 bp, Artificial
  probe
  misc_feature (1)..(25): SEQ ID NO: 4220; WAN024CKF_at; Start 905; Stop 929
caattggagagttacaacgttgtga

SEQ ID NO: 122152 - DNA, 25 bp, Artificial
  probe
  misc_feature (1)..(25): SEQ ID NO: 4220; WAN024CKF_at; Start 759; Stop 783
ttctcctgcagaaatgacatcattg

SEQ ID NO: 122153 - DNA, 25 bp, Artificial
  probe
  misc_feature (1)..(25): SEQ ID NO: 1780; WAN024CKG_at; Start 815; Stop 839
ttttgcttccgtctaaatatgaggg

SEQ ID NO: 122154 - DNA, 25 bp, Artificial
  probe
  misc_feature (1)..(25): SEQ ID NO: 1780; WAN024CKG_at; Start 280; Stop 304
gcaattggtctgatcttatctaaaa

SEQ ID NO: 122155 - DNA, 25 bp, Artificial
  probe
  misc_feature (1)..(25): SEQ ID NO: 1780; WAN024CKG_at; Start 553; Stop 577
tgtcgtagagaattagatgtgtcaa

SEQ ID NO: 122156 - DNA, 25 bp, Artificial
  probe
  misc_feature (1)..(25): SEQ ID NO: 1780; WAN024CKG_at; Start 439; Stop 463
gattcggctaagtggttatatggag

SEQ ID NO: 122157 - DNA, 25 bp, Artificial
  probe
  misc_feature (1)..(25): SEQ ID NO: 1780; WAN024CKG_at; Start 980; Stop 1004
aagtactgtctttaacatctgagga

SEQ ID NO: 122158 - DNA, 25 bp, Artificial
  probe
  misc_feature (1)..(25): SEQ ID NO: 1780; WAN024CKG_at; Start 399; Stop 423
ggtaaaaatcttagcaactcattgg

SEQ ID NO: 122159 - DNA, 25 bp, Artificial
  probe
  misc_feature (1)..(25): SEQ ID NO: 1780; WAN024CKG_at; Start 1080; Stop 1104
gaatcgttatcaagaaatgtgtgta

SEQ ID NO: 122160 - DNA, 25 bp, Artificial
  probe
  misc_feature (1)..(25): SEQ ID NO: 1780; WAN024CKG_at; Start 205; Stop 229
catcagtttctctctcttgctagaa

SEQ ID NO: 122161 - DNA, 25 bp, Artificial
  probe
  misc_feature (1)..(25): SEQ ID NO: 1780; WAN024CKG_at; Start 906; Stop 930
gcaagaagtagatgtgaccaaaaac

SEQ ID NO: 122162 - DNA, 25 bp, Artificial
  probe
  misc_feature (1)..(25): SEQ ID NO: 1780; WAN024CKG_at; Start 583; Stop 607
ttcgtattaggaaatatagctcgcc

SEQ ID NO: 122163 - DNA, 25 bp, Artificial
  probe
  misc_feature (1)..(25): SEQ ID NO: 1780; WAN024CKG_at; Start 160; Stop 184
ggtgcaaaggtttatcatgtgcctc

SEQ ID NO: 122164 - DNA, 25 bp, Artificial
  probe
  misc_feature (1)..(25): SEQ ID NO: 1780; WAN024CKG_at; Start 838; Stop 862
gggttgcctgtttctctagtagagg

SEQ ID NO: 122165 - DNA, 25 bp, Artificial
  probe
  misc_feature (1)..(25): SEQ ID NO: 1780; WAN024CKG_at; Start 937; Stop 961
tacttacctatcaacgaagagtctg

SEQ ID NO: 122166 - DNA, 25 bp, Artificial
  probe
  misc_feature (1)..(25): SEQ ID NO: 1780; WAN024CKG_at; Start 457; Stop 481
tatggagagaaagcgtataaagacg

SEQ ID NO: 122167 - DNA, 25 bp, Artificial
  probe
  misc_feature (1)..(25): SEQ ID NO: 1780; WAN024CKG_at; Start 533; Stop 557
tgtcagatgttagagaaaaatgtcg

SEQ ID NO: 122168 - DNA, 25 bp, Artificial
  probe
  misc_feature (1)..(25): SEQ ID NO: 1780; WAN024CKG_at; Start 736; Stop 760
gaactaaatctgaccccatatgtgc

SEQ ID NO: 122169 - DNA, 25 bp, Artificial
  probe
  misc_feature (1)..(25): SEQ ID NO: 1780; WAN024CKG_at; Start 265; Stop 289
catggctataaatctgcaattggtc

SEQ ID NO: 122170 - DNA, 25 bp, Artificial
  probe
  misc_feature (1)..(25): SEQ ID NO: 1780; WAN024CKG_at; Start 111; Stop 135
tgtgcctggaaaagaacaaggattt

SEQ ID NO: 122171 - DNA, 25 bp, Artificial
  probe
  misc_feature (1)..(25): SEQ ID NO: 1780; WAN024CKG_at; Start 965; Stop 989
tgctatggaaagataaagtactgtc

SEQ ID NO: 122172 - DNA, 25 bp, Artificial
  probe
  misc_feature (1)..(25): SEQ ID NO: 1780; WAN024CKG_at; Start 337; Stop 361
catatggcttatgtaacagaaaaca

SEQ ID NO: 122173 - DNA, 25 bp, Artificial
  probe
  misc_feature (1)..(25): SEQ ID NO: 1780; WAN024CKG_at; Start 29; Stop 53
cactagatagtggtggagtagaaag

SEQ ID NO: 122174 - DNA, 25 bp, Artificial
  probe
  misc_feature (1)..(25): SEQ ID NO: 1780; WAN024CKG_at; Start 759; Stop 783
gctatttttagggagaaggactgat

SEQ ID NO: 122175 - DNA, 25 bp, Artificial
  probe
  misc_feature (1)..(25): SEQ ID NO: 1780; WAN024CKG_at; Start 683; Stop 707
tactcctagttggtaatggtgagga

SEQ ID NO: 122176 - DNA, 25 bp, Artificial
  probe
  misc_feature (1)..(25): SEQ ID NO: 1780; WAN024CKG_at; Start 141; Stop 165
ggataaaatgaaagaattgggtgca

SEQ ID NO: 122177 - DNA, 25 bp, Artificial
  probe
  misc_feature (1)..(25): SEQ ID NO: 1780; WAN024CKG_at; Start 951; Stop 975
cgaagagtctgtgttgctatggaaa

SEQ ID NO: 122178 - DNA, 25 bp, Artificial
  probe
  misc_feature (1)..(25): SEQ ID NO: 1780; WAN024CKG_at; Start 857; Stop 881
tagaggctcaggcatcgggattaca

SEQ ID NO: 122179 - DNA, 25 bp, Artificial
  probe
  misc_feature (1)..(25): SEQ ID NO: 1780; WAN024CKG_at; Start 1026; Stop 1050
taacagtatgacagatggactctat

SEQ ID NO: 122180 - DNA, 25 bp, Artificial
  probe
  misc_feature (1)..(25): SEQ ID NO: 1780; WAN024CKG_at; Start 892; Stop 916
tcagatacagtgacgcaagaagtag

SEQ ID NO: 122181 - DNA, 25 bp, Artificial
  probe
  misc_feature (1)..(25): SEQ ID NO: 1780; WAN024CKG_at; Start 702; Stop 726
tgaggatgagcagaaattaaaacag

SEQ ID NO: 122182 - DNA, 25 bp, Artificial
  probe
  misc_feature (1)..(25): SEQ ID NO: 1780; WAN024CKG_at; Start 247; Stop 271
tatgatatagttcattgccatggct

SEQ ID NO: 122183 - DNA, 25 bp, Artificial
  probe
  misc_feature (1)..(25): SEQ ID NO: 1780; WAN024CKG_at; Start 177; Stop 201
tgtgcctctattaaggaaaaagcct

SEQ ID NO: 122184 - DNA, 25 bp, Artificial
  probe
  misc_feature (1)..(25): SEQ ID NO: 1780; WAN024CKG_at; Start 995; Stop 1019
catctgaggaatgcaatcgttttga

SEQ ID NO: 122185 - DNA, 25 bp, Artificial
  probe
  misc_feature (1)..(25): SEQ ID NO: 1780; WAN024CKG_at; Start 597; Stop 621
tatagctcgcctatcagatcaaaaa

SEQ ID NO: 122186 - DNA, 25 bp, Artificial
  probe
  misc_feature (1)..(25): SEQ ID NO: 1780; WAN024CKG_at; Start 191; Stop 215
ggaaaaagcctctacatcagtttct

SEQ ID NO: 122187 - DNA, 25 bp, Artificial
  probe
  misc_feature (1)..(25): SEQ ID NO: 1542; WAN024CKH_at; Start 3; Stop 27
gagagtactgtttatactatctgat

SEQ ID NO: 122188 - DNA, 25 bp, Artificial
  probe
  misc_feature (1)..(25): SEQ ID NO: 1542; WAN024CKH_at; Start 743; Stop 767
cagatgttgttttgaatttatacgg

SEQ ID NO: 122189 - DNA, 25 bp, Artificial
  probe
  misc_feature (1)..(25): SEQ ID NO: 1542; WAN024CKH_at; Start 756; Stop 780
gaatttatacgggaatcacactccc

SEQ ID NO: 122190 - DNA, 25 bp, Artificial
  probe
  misc_feature (1)..(25): SEQ ID NO: 1542; WAN024CKH_at; Start 859; Stop 883
tatatggaaaaagtgtcaatagaga

SEQ ID NO: 122191 - DNA, 25 bp, Artificial
  probe
  misc_feature (1)..(25): SEQ ID NO: 1542; WAN024CKH_at; Start 367; Stop 391
tatcgtttggttcagaaacaattgg

SEQ ID NO: 122192 - DNA, 25 bp, Artificial
  probe
  misc_feature (1)..(25): SEQ ID NO: 1542; WAN024CKH_at; Start 936; Stop 960
ggctttgtatattcaaaaccttgac

SEQ ID NO: 122193 - DNA, 25 bp, Artificial
  probe
  misc_feature (1)..(25): SEQ ID NO: 1542; WAN024CKH_at; Start 644; Stop 668
caggagaattaagggaattttgtca

SEQ ID NO: 122194 - DNA, 25 bp, Artificial
  probe
  misc_feature (1)..(25): SEQ ID NO: 1542; WAN024CKH_at; Start 1025; Stop 1049
cagaaatagaattagagaagcgaat

SEQ ID NO: 122195 - DNA, 25 bp, Artificial
  probe
  misc_feature (1)..(25): SEQ ID NO: 1542; WAN024CKH_at; Start 601; Stop 625
gcaaatgacagtcgatttcagttga

SEQ ID NO: 122196 - DNA, 25 bp, Artificial
  probe
  misc_feature (1)..(25): SEQ ID NO: 1542; WAN024CKH_at; Start 405; Stop 429
aatgaatatcgtttcttcagacggc

SEQ ID NO: 122197 - DNA, 25 bp, Artificial
  probe
  misc_feature (1)..(25): SEQ ID NO: 1542; WAN024CKH_at; Start 902; Stop 926
tacctatgaaggatgaatcggaaaa

SEQ ID NO: 122198 - DNA, 25 bp, Artificial
  probe
  misc_feature (1)..(25): SEQ ID NO: 1542; WAN024CKH_at; Start 1039; Stop 1063
gagaagcgaatcttaagcttaagga

SEQ ID NO: 122199 - DNA, 25 bp, Artificial
  probe
  misc_feature (1)..(25): SEQ ID NO: 1542; WAN024CKH_at; Start 768; Stop 792
gaatcacactcccttactagactat

SEQ ID NO: 122200 - DNA, 25 bp, Artificial
  probe
  misc_feature (1)..(25): SEQ ID NO: 1542; WAN024CKH_at; Start 874; Stop 898
tcaatagagaatggttttggtttcg

SEQ ID NO: 122201 - DNA, 25 bp, Artificial
  probe
  misc_feature (1)..(25): SEQ ID NO: 1542; WAN024CKH_at; Start 704; Stop 728
cattccagcctaaagataccatgtc

SEQ ID NO: 122202 - DNA, 25 bp, Artificial
  probe
  misc_feature (1)..(25): SEQ ID NO: 1542; WAN024CKH_at; Start 443; Stop 467
taccaatgggagagtattttactac

SEQ ID NO: 122203 - DNA, 25 bp, Artificial
  probe
  misc_feature (1)..(25): SEQ ID NO: 1542; WAN024CKH_at; Start 797; Stop 821
tgtctaataaactctactttgctgc

SEQ ID NO: 122204 - DNA, 25 bp, Artificial
  probe
  misc_feature (1)..(25): SEQ ID NO: 1542; WAN024CKH_at; Start 978; Stop 1002
gaattgtgataacttcatggacaga

SEQ ID NO: 122205 - DNA, 25 bp, Artificial
  probe
  misc_feature (1)..(25): SEQ ID NO: 1542; WAN024CKH_at; Start 993; Stop 1017
catggacagaattagtttagaaaaa

SEQ ID NO: 122206 - DNA, 25 bp, Artificial
  probe
  misc_feature (1)..(25): SEQ ID NO: 1542; WAN024CKH_at; Start 254; Stop 278
tattgccgttacatagtattgtgtc

SEQ ID NO: 122207 - DNA, 25 bp, Artificial
  probe
  misc_feature (1)..(25): SEQ ID NO: 1542; WAN024CKH_at; Start 915; Stop 939
tgaatcggaaaaagattgtttggct

SEQ ID NO: 122208 - DNA, 25 bp, Artificial
  probe
  misc_feature (1)..(25): SEQ ID NO: 1542; WAN024CKH_at; Start 960; Stop 984
caggaaacagctaattaagaattgt

SEQ ID NO: 122209 - DNA, 25 bp, Artificial
  probe
  misc_feature (1)..(25): SEQ ID NO: 1542; WAN024CKH_at; Start 143; Stop 167
actactatcgtatttctttttctgg

SEQ ID NO: 122210 - DNA, 25 bp, Artificial
  probe
  misc_feature (1)..(25): SEQ ID NO: 1542; WAN024CKH_at; Start 629; Stop 653
ttataggtactaatgcaggagaatt

SEQ ID NO: 122211 - DNA, 25 bp, Artificial
  probe
  misc_feature (1)..(25): SEQ ID NO: 1542; WAN024CKH_at; Start 949; Stop 973
caaaaccttgacaggaaacagctaa

SEQ ID NO: 122212 - DNA, 25 bp, Artificial
  probe
  misc_feature (1)..(25): SEQ ID NO: 1542; WAN024CKH_at; Start 468; Stop 492
ccataacctacccaatatgatagaa

SEQ ID NO: 122213 - DNA, 25 bp, Artificial
  probe
  misc_feature (1)..(25): SEQ ID NO: 1542; WAN024CKH_at; Start 678; Stop 702
tatcagcaatgttaacttggtggac

SEQ ID NO: 122214 - DNA, 25 bp, Artificial
  probe
  misc_feature (1)..(25): SEQ ID NO: 1542; WAN024CKH_at; Start 72; Stop 96
gaagaaactgtctattagttacgat

SEQ ID NO: 122215 - DNA, 25 bp, Artificial
  probe
  misc_feature (1)..(25): SEQ ID NO: 1542; WAN024CKH_at; Start 241; Stop 265
gattatgatatgatattgccgttac

SEQ ID NO: 122216 - DNA, 25 bp, Artificial
  probe
  misc_feature (1)..(25): SEQ ID NO: 1542; WAN024CKH_at; Start 812; Stop 836
actttgctgcattgttgtataaacc

SEQ ID NO: 122217 - DNA, 25 bp, Artificial
  probe
  misc_feature (1)..(25): SEQ ID NO: 1542; WAN024CKH_at; Start 486; Stop 510
gatagaattaaacgaggtaaagcag

SEQ ID NO: 122218 - DNA, 25 bp, Artificial
  probe
  misc_feature (1)..(25): SEQ ID NO: 1542; WAN024CKH_at; Start 689; Stop 713
ttaacttggtggacacattccagcc

SEQ ID NO: 122219 - DNA, 25 bp, Artificial
  probe
  misc_feature (1)..(25): SEQ ID NO: 1542; WAN024CKH_at; Start 331; Stop 355
gatattcgtgattacagttatgaaa

SEQ ID NO: 122220 - DNA, 25 bp, Artificial
  probe
  misc_feature (1)..(25): SEQ ID NO: 1542; WAN024CKH_at; Start 1052; Stop 1076
taagcttaaggaagaagaatgatct

SEQ ID NO: 122221 - DNA, 25 bp, Artificial
  probe
  misc_feature (1)..(25): SEQ ID NO: 6365; WAN024CKI_at; Start 1031; Stop 1055
aagcaaagtgtggttttgtcagtcc

SEQ ID NO: 122222 - DNA, 25 bp, Artificial
  probe
  misc_feature (1)..(25): SEQ ID NO: 6365; WAN024CKI_at; Start 149; Stop 173
ggaataacaaaaatagacgagagac

SEQ ID NO: 122223 - DNA, 25 bp, Artificial
  probe
  misc_feature (1)..(25): SEQ ID NO: 6365; WAN024CKI_at; Start 494; Stop 518
tatcgaaaaaagtttatcgagctag

SEQ ID NO: 122224 - DNA, 25 bp, Artificial
  probe
  misc_feature (1)..(25): SEQ ID NO: 6365; WAN024CKI_at; Start 252; Stop 276
tagttttgctatcagttcctcgata

SEQ ID NO: 122225 - DNA, 25 bp, Artificial
  probe
  misc_feature (1)..(25): SEQ ID NO: 6365; WAN024CKI_at; Start 15; Stop 39
tgttagtcaacattatagaccagaa

SEQ ID NO: 122226 - DNA, 25 bp, Artificial
  probe
  misc_feature (1)..(25): SEQ ID NO: 6365; WAN024CKI_at; Start 91; Stop 115
gttactgttttgacaggaattccta

SEQ ID NO: 122227 - DNA, 25 bp, Artificial
  probe
  misc_feature (1)..(25): SEQ ID NO: 6365; WAN024CKI_at; Start 302; Stop 326
caaaagatggatcagaatttgattg

SEQ ID NO: 122228 - DNA, 25 bp, Artificial
  probe
  misc_feature (1)..(25): SEQ ID NO: 6365; WAN024CKI_at; Start 32; Stop 56
gaccagaaccttttagattatcaga

SEQ ID NO: 122229 - DNA, 25 bp, Artificial
  probe
  misc_feature (1)..(25): SEQ ID NO: 6365; WAN024CKI_at; Start 859; Stop 883
cgttctttggaagaaatgcctacct

SEQ ID NO: 122230 - DNA, 25 bp, Artificial
  probe
  misc_feature (1)..(25): SEQ ID NO: 6365; WAN024CKI_at; Start 951; Stop 975
tgggaaggtacaatcttacatggcg

SEQ ID NO: 122231 - DNA, 25 bp, Artificial
  probe
  misc_feature (1)..(25): SEQ ID NO: 6365; WAN024CKI_at; Start 1153; Stop 1177
tatgggaagcacttttctaaagagc

SEQ ID NO: 122232 - DNA, 25 bp, Artificial
  probe
  misc_feature (1)..(25): SEQ ID NO: 6365; WAN024CKI_at; Start 189; Stop 213
tgtttttcgttcctatacaattcca

SEQ ID NO: 122233 - DNA, 25 bp, Artificial
  probe
  misc_feature (1)..(25): SEQ ID NO: 6365; WAN024CKI_at; Start 1057; Stop 1081
gaacaagatgtggaacaattggcac

SEQ ID NO: 122234 - DNA, 25 bp, Artificial
  probe
  misc_feature (1)..(25): SEQ ID NO: 6365; WAN024CKI_at; Start 1142; Stop 1166
ctcgttgttactatgggaagcactt

SEQ ID NO: 122235 - DNA, 25 bp, Artificial
  probe
  misc_feature (1)..(25): SEQ ID NO: 6365; WAN024CKI_at; Start 279; Stop 303
ggttctactgggacagtataaagca

SEQ ID NO: 122236 - DNA, 25 bp, Artificial
  probe
  misc_feature (1)..(25): SEQ ID NO: 6365; WAN024CKI_at; Start 63; Stop 87
tgaggatcttgttgagagaggtcat

SEQ ID NO: 122237 - DNA, 25 bp, Artificial
  probe
  misc_feature (1)..(25): SEQ ID NO: 6365; WAN024CKI_at; Start 287; Stop 311
tgggacagtataaagcaaaagatgg

SEQ ID NO: 122238 - DNA, 25 bp, Artificial
  probe
  misc_feature (1)..(25): SEQ ID NO: 6365; WAN024CKI_at; Start 1046; Stop 1070
ttgtcagtcctgaacaagatgtgga

SEQ ID NO: 122239 - DNA, 25 bp, Artificial
  probe
  misc_feature (1)..(25): SEQ ID NO: 6365; WAN024CKI_at; Start 1168; Stop 1192
tctaaagagcagtttatgacacagt

SEQ ID NO: 122240 - DNA, 25 bp, Artificial
  probe
  misc_feature (1)..(25): SEQ ID NO: 6365; WAN024CKI_at; Start 561; Stop 585
tgtgaaccaatttgacataacagaa

SEQ ID NO: 122241 - DNA, 25 bp, Artificial
  probe
  misc_feature (1)..(25): SEQ ID NO: 6365; WAN024CKI_at; Start 173; Stop 197
ctatagaaggagttactgtttttcg

SEQ ID NO: 122242 - DNA, 25 bp, Artificial
  probe
  misc_feature (1)..(25): SEQ ID NO: 6365; WAN024CKI_at; Start 1198; Stop 1222
aattatttgagagagggcttttcct

SEQ ID NO: 122243 - DNA, 25 bp, Artificial
  probe
  misc_feature (1)..(25): SEQ ID NO: 6365; WAN024CKI_at; Start 118; Stop 142
tatcctgaaggtaaaacatatgcgg

SEQ ID NO: 122244 - DNA, 25 bp, Artificial
  probe
  misc_feature (1)..(25): SEQ ID NO: 6365; WAN024CKI_at; Start 867; Stop 891
ggaagaaatgcctaccttctataaa

SEQ ID NO: 122245 - DNA, 25 bp, Artificial
  probe
  misc_feature (1)..(25): SEQ ID NO: 6365; WAN024CKI_at; Start 1108; Stop 1132
tctacggaagaacaaagagagttag

SEQ ID NO: 122246 - DNA, 25 bp, Artificial
  probe
  misc_feature (1)..(25): SEQ ID NO: 6365; WAN024CKI_at; Start 573; Stop 597
tgacataacagaacaaaagattact

SEQ ID NO: 122247 - DNA, 25 bp, Artificial
  probe
  misc_feature (1)..(25): SEQ ID NO: 6365; WAN024CKI_at; Start 134; Stop 158
catatgcggattatcggaataacaa

SEQ ID NO: 122248 - DNA, 25 bp, Artificial
  probe
  misc_feature (1)..(25): SEQ ID NO: 6365; WAN024CKI_at; Start 164; Stop 188
gacgagagactatagaaggagttac

SEQ ID NO: 122249 - DNA, 25 bp, Artificial
  probe
  misc_feature (1)..(25): SEQ ID NO: 6365; WAN024CKI_at; Start 333; Stop 357
tgtaaatcaatcgtctccagttatg

SEQ ID NO: 122250 - DNA, 25 bp, Artificial
  probe
  misc_feature (1)..(25): SEQ ID NO: 6365; WAN024CKI_at; Start 1182; Stop 1206
tatgacacagttagaaaattatttg

SEQ ID NO: 122251 - DNA, 25 bp, Artificial
  probe
  misc_feature (1)..(25): SEQ ID NO: 6365; WAN024CKI_at; Start 75; Stop 99
tgagagaggtcatgaagttactgtt

SEQ ID NO: 122252 - DNA, 25 bp, Artificial
  probe
  misc_feature (1)..(25): SEQ ID NO: 6365; WAN024CKI_at; Start 1067; Stop 1091
tggaacaattggcacaaaatatttg

SEQ ID NO: 122253 - DNA, 25 bp, Artificial
  probe
  misc_feature (1)..(25): SEQ ID NO: 6365; WAN024CKI_at; Start 1096; Stop 1120
tttagtatgttgtctacggaagaac

SEQ ID NO: 122254 - DNA, 25 bp, Artificial
  probe
  misc_feature (1)..(25): SEQ ID NO: 6365; WAN024CKI_at; Start 106; Stop 130
ggaattcctaattatcctgaaggta

SEQ ID NO: 122255 - DNA, 25 bp, Artificial
  probe
  misc_feature (1)..(25): SEQ ID NO: 4204; WAN024CKJ_at; Start 913; Stop 937
tatacaaaatcagatgcgatgctag

SEQ ID NO: 122256 - DNA, 25 bp, Artificial
  probe
  misc_feature (1)..(25): SEQ ID NO: 4204; WAN024CKJ_at; Start 1003; Stop 1027
gcaggaaaaccaattataggagcga

SEQ ID NO: 122257 - DNA, 25 bp, Artificial
  probe
  misc_feature (1)..(25): SEQ ID NO: 4204; WAN024CKJ_at; Start 1120; Stop 1144
aagttctgtttgctttctgtagagg

SEQ ID NO: 122258 - DNA, 25 bp, Artificial
  probe
  misc_feature (1)..(25): SEQ ID NO: 4204; WAN024CKJ_at; Start 88; Stop 112
tgtgaggatctagttcaaagagggc

SEQ ID NO: 122259 - DNA, 25 bp, Artificial
  probe
  misc_feature (1)..(25): SEQ ID NO: 4204; WAN024CKJ_at; Start 834; Stop 858
gcaaaaattagcatgtgaactagaa

SEQ ID NO: 122260 - DNA, 25 bp, Artificial
  probe
  misc_feature (1)..(25): SEQ ID NO: 4204; WAN024CKJ_at; Start 1038; Stop 1062
tactcagagagttgtaaaagaagca

SEQ ID NO: 122261 - DNA, 25 bp, Artificial
  probe
  misc_feature (1)..(25): SEQ ID NO: 4204; WAN024CKJ_at; Start 388; Stop 412
gcttgggctggtatagcttataaga

SEQ ID NO: 122262 - DNA, 25 bp, Artificial
  probe
  misc_feature (1)..(25): SEQ ID NO: 4204; WAN024CKJ_at; Start 296; Stop 320
ctacgataggtgttatatttgggcg

SEQ ID NO: 122263 - DNA, 25 bp, Artificial
  probe
  misc_feature (1)..(25): SEQ ID NO: 4204; WAN024CKJ_at; Start 223; Stop 247
cgttcatacaccattgctaggaggc

SEQ ID NO: 122264 - DNA, 25 bp, Artificial
  probe
  misc_feature (1)..(25): SEQ ID NO: 4204; WAN024CKJ_at; Start 766; Stop 790
cagattcccgatttagcaaagagag

SEQ ID NO: 122265 - DNA, 25 bp, Artificial
  probe
  misc_feature (1)..(25): SEQ ID NO: 4204; WAN024CKJ_at; Start 1182; Stop 1206
tgaagaacagttttcgaaagagtgg

SEQ ID NO: 122266 - DNA, 25 bp, Artificial
  probe
  misc_feature (1)..(25): SEQ ID NO: 4204; WAN024CKJ_at; Start 191; Stop 215
gaagagagactataaatggtgttgc

SEQ ID NO: 122267 - DNA, 25 bp, Artificial
  probe
  misc_feature (1)..(25): SEQ ID NO: 4204; WAN024CKJ_at; Start 850; Stop 874
gaactagaattagagaacacttcat

SEQ ID NO: 122268 - DNA, 25 bp, Artificial
  probe
  misc_feature (1)..(25): SEQ ID NO: 4204; WAN024CKJ_at; Start 1022; Stop 1046
gagcgatttcaggagatactcagag

SEQ ID NO: 122269 - DNA, 25 bp, Artificial
  probe
  misc_feature (1)..(25): SEQ ID NO: 4204; WAN024CKJ_at; Start 238; Stop 262
gctaggaggcaaaatactttatacc

SEQ ID NO: 122270 - DNA, 25 bp, Artificial
  probe
  misc_feature (1)..(25): SEQ ID NO: 4204; WAN024CKJ_at; Start 408; Stop 432
taagaacaagtacaataaacctatg

SEQ ID NO: 122271 - DNA, 25 bp, Artificial
  probe
  misc_feature (1)..(25): SEQ ID NO: 4204; WAN024CKJ_at; Start 944; Stop 968
taataggcgactctataatttctcg

SEQ ID NO: 122272 - DNA, 25 bp, Artificial
  probe
  misc_feature (1)..(25): SEQ ID NO: 4204; WAN024CKJ_at; Start 1135; Stop 1159
tctgtagaggaaagagagaaactag

SEQ ID NO: 122273 - DNA, 25 bp, Artificial
  probe
  misc_feature (1)..(25): SEQ ID NO: 4204; WAN024CKJ_at; Start 1080; Stop 1104
tccggaagggaatgttgatcagtta

SEQ ID NO: 122274 - DNA, 25 bp, Artificial
  probe
  misc_feature (1)..(25): SEQ ID NO: 4204; WAN024CKJ_at; Start 527; Stop 551
aaaaagtatatcaagccagcgatta

SEQ ID NO: 122275 - DNA, 25 bp, Artificial
  probe
  misc_feature (1)..(25): SEQ ID NO: 4204; WAN024CKJ_at; Start 751; Stop 775
gccagtgcaatagaacagattcccg

SEQ ID NO: 122276 - DNA, 25 bp, Artificial
  probe
  misc_feature (1)..(25): SEQ ID NO: 4204; WAN024CKJ_at; Start 702; Stop 726
tgctggaaatattggaaaagctcag

SEQ ID NO: 122277 - DNA, 25 bp, Artificial
  probe
  misc_feature (1)..(25): SEQ ID NO: 4204; WAN024CKJ_at; Start 1150; Stop 1174
gagaaactaggaaggcaagctcgtt

SEQ ID NO: 122278 - DNA, 25 bp, Artificial
  probe
  misc_feature (1)..(25): SEQ ID NO: 4204; WAN024CKJ_at; Start 640; Stop 664
gcagaggatttatttgtaccaaatg

SEQ ID NO: 122279 - DNA, 25 bp, Artificial
  probe
  misc_feature (1)..(25): SEQ ID NO: 4204; WAN024CKJ_at; Start 736; Stop 760
actattttgaaagcagccagtgcaa

SEQ ID NO: 122280 - DNA, 25 bp, Artificial
  probe
  misc_feature (1)..(25): SEQ ID NO: 4204; WAN024CKJ_at; Start 621; Stop 645
tacttacttaccacaatatgcagag

SEQ ID NO: 122281 - DNA, 25 bp, Artificial
  probe
  misc_feature (1)..(25): SEQ ID NO: 4204; WAN024CKJ_at; Start 318; Stop 342
gcgttataaagcgaaagatggctca

SEQ ID NO: 122282 - DNA, 25 bp, Artificial
  probe
  misc_feature (1)..(25): SEQ ID NO: 4204; WAN024CKJ_at; Start 1195; Stop 1219
tcgaaagagtggtttatgacatact

SEQ ID NO: 122283 - DNA, 25 bp, Artificial
  probe
  misc_feature (1)..(25): SEQ ID NO: 4204; WAN024CKJ_at; Start 886; Stop 910
cgtccattagaagagatgccggatt

SEQ ID NO: 122284 - DNA, 25 bp, Artificial
  probe
  misc_feature (1)..(25): SEQ ID NO: 4204; WAN024CKJ_at; Start 436; Stop 460
ttgtattgcatggatgtttggccgg

SEQ ID NO: 122285 - DNA, 25 bp, Artificial
  probe
  misc_feature (1)..(25): SEQ ID NO: 4204; WAN024CKJ_at; Start 116; Stop 140
aggtggctgttttgacagggattcc

SEQ ID NO: 122286 - DNA, 25 bp, Artificial
  probe
  misc_feature (1)..(25): SEQ ID NO: 4204; WAN024CKJ_at; Start 685; Stop 709
actattgacttaacttttgctggaa

SEQ ID NO: 122287 - DNA, 25 bp, Artificial
  probe
  misc_feature (1)..(25): SEQ ID NO: 4204; WAN024CKJ_at; Start 281; Stop 305
gttttgctctttcttctacgatagg

SEQ ID NO: 122288 - DNA, 25 bp, Artificial
  probe
  misc_feature (1)..(25): SEQ ID NO: 4204; WAN024CKJ_at; Start 867; Stop 891
cacttcattttatggtagacgtcca

SEQ ID NO: 122289 - DNA, 25 bp, Artificial
  probe
  misc_feature (1)..(25): SEQ ID NO: 737; WAN024CKK_at; Start 118; Stop 142
taccctgaagggaagatatatgcag

SEQ ID NO: 122290 - DNA, 25 bp, Artificial
  probe
  misc_feature (1)..(25): SEQ ID NO: 737; WAN024CKK_at; Start 191; Stop 215
tatatcgttcttatacaatccctag

SEQ ID NO: 122291 - DNA, 25 bp, Artificial
  probe
  misc_feature (1)..(25): SEQ ID NO: 737; WAN024CKK_at; Start 254; Stop 278
gctttgcaattagttctactttagg

SEQ ID NO: 122292 - DNA, 25 bp, Artificial
  probe
  misc_feature (1)..(25): SEQ ID NO: 737; WAN024CKK_at; Start 1023; Stop 1047
tgtagaagaagcaaattgtggatat

SEQ ID NO: 122293 - DNA, 25 bp, Artificial
  probe
  misc_feature (1)..(25): SEQ ID NO: 737; WAN024CKK_at; Start 1034; Stop 1058
caaattgtggatatgttagtcccga

SEQ ID NO: 122294 - DNA, 25 bp, Artificial
  probe
  misc_feature (1)..(25): SEQ ID NO: 737; WAN024CKK_at; Start 1040; Stop 1064
gtggatatgttagtcccgaacgaga

SEQ ID NO: 122295 - DNA, 25 bp, Artificial
  probe
  misc_feature (1)..(25): SEQ ID NO: 737; WAN024CKK_at; Start 85; Stop 109
catgaagtctctgttttggctggga

SEQ ID NO: 122296 - DNA, 25 bp, Artificial
  probe
  misc_feature (1)..(25): SEQ ID NO: 737; WAN024CKK_at; Start 563; Stop 587
tgaagcaatttgacatatccgaaca

SEQ ID NO: 122297 - DNA, 25 bp, Artificial
  probe
  misc_feature (1)..(25): SEQ ID NO: 737; WAN024CKK_at; Start 328; Stop 352
gtattcgttaaccaattgtctccag

SEQ ID NO: 122298 - DNA, 25 bp, Artificial
  probe
  misc_feature (1)..(25): SEQ ID NO: 737; WAN024CKK_at; Start 75; Stop 99
tcgaaaagggcatgaagtctctgtt

SEQ ID NO: 122299 - DNA, 25 bp, Artificial
  probe
  misc_feature (1)..(25): SEQ ID NO: 737; WAN024CKK_at; Start 128; Stop 152
ggaagatatatgcagattatcgtca

SEQ ID NO: 122300 - DNA, 25 bp, Artificial
  probe
  misc_feature (1)..(25): SEQ ID NO: 737; WAN024CKK_at; Start 33; Stop 57
gccagaaccattcaggttgtcagat

SEQ ID NO: 122301 - DNA, 25 bp, Artificial
  probe
  misc_feature (1)..(25): SEQ ID NO: 737; WAN024CKK_at; Start 580; Stop 604
tccgaacaaaagattacatatttgc

SEQ ID NO: 122302 - DNA, 25 bp, Artificial
  probe
  misc_feature (1)..(25): SEQ ID NO: 737; WAN024CKK_at; Start 303; Stop 327
gaaagatggatcgaattttgactgt

SEQ ID NO: 122303 - DNA, 25 bp, Artificial
  probe
  misc_feature (1)..(25): SEQ ID NO: 737; WAN024CKK_at; Start 867; Stop 891
ggaggaaatgccatccttctataaa

SEQ ID NO: 122304 - DNA, 25 bp, Artificial
  probe
  misc_feature (1)..(25): SEQ ID NO: 737; WAN024CKK_at; Start 1142; Stop 1166
ctcgttgttactatgaaaatcactt

SEQ ID NO: 122305 - DNA, 25 bp, Artificial
  probe
  misc_feature (1)..(25): SEQ ID NO: 737; WAN024CKK_at; Start 1156; Stop 1180
gaaaatcacttttcaaaagagcagt

SEQ ID NO: 122306 - DNA, 25 bp, Artificial
  probe
  misc_feature (1)..(25): SEQ ID NO: 737; WAN024CKK_at; Start 138; Stop 162
tgcagattatcgtcataataaaaaa

SEQ ID NO: 122307 - DNA, 25 bp, Artificial
  probe
  misc_feature (1)..(25): SEQ ID NO: 737; WAN024CKK_at; Start 221; Stop 245
aaagtgttgtatttcgattgttgaa

SEQ ID NO: 122308 - DNA, 25 bp, Artificial
  probe
  misc_feature (1)..(25): SEQ ID NO: 737; WAN024CKK_at; Start 92; Stop 116
tctctgttttggctgggattcctaa

SEQ ID NO: 122309 - DNA, 25 bp, Artificial
  probe
  misc_feature (1)..(25): SEQ ID NO: 737; WAN024CKK_at; Start 27; Stop 51
ttataagccagaaccattcaggttg

SEQ ID NO: 122310 - DNA, 25 bp, Artificial
  probe
  misc_feature (1)..(25): SEQ ID NO: 737; WAN024CKK_at; Start 290; Stop 314
ggaggtataaaacgaaagatggatc

SEQ ID NO: 122311 - DNA, 25 bp, Artificial
  probe
  misc_feature (1)..(25): SEQ ID NO: 737; WAN024CKK_at; Start 103; Stop 127
gctgggattcctaattaccctgaag

SEQ ID NO: 122312 - DNA, 25 bp, Artificial
  probe
  misc_feature (1)..(25): SEQ ID NO: 737; WAN024CKK_at; Start 176; Stop 200
tagaaggtgttacgatatatcgttc

SEQ ID NO: 122313 - DNA, 25 bp, Artificial
  probe
  misc_feature (1)..(25): SEQ ID NO: 737; WAN024CKK_at; Start 476; Stop 500
tcaagctgtttaaatttatctcaaa

SEQ ID NO: 122314 - DNA, 25 bp, Artificial
  probe
  misc_feature (1)..(25): SEQ ID NO: 737; WAN024CKK_at; Start 321; Stop 345
tgactgtgtattcgttaaccaattg

SEQ ID NO: 122315 - DNA, 25 bp, Artificial
  probe
  misc_feature (1)..(25): SEQ ID NO: 737; WAN024CKK_at; Start 53; Stop 77
cagatatttgtgaagatttagttcg

SEQ ID NO: 122316 - DNA, 25 bp, Artificial
  probe
  misc_feature (1)..(25): SEQ ID NO: 737; WAN024CKK_at; Start 859; Stop 883
cgttctttggaggaaatgccatcct

SEQ ID NO: 122317 - DNA, 25 bp, Artificial
  probe
  misc_feature (1)..(25): SEQ ID NO: 737; WAN024CKK_at; Start 164; Stop 188
gacgtgagattatagaaggtgttac

SEQ ID NO: 122318 - DNA, 25 bp, Artificial
  probe
  misc_feature (1)..(25): SEQ ID NO: 737; WAN024CKK_at; Start 574; Stop 598
gacatatccgaacaaaagattacat

SEQ ID NO: 122319 - DNA, 25 bp, Artificial
  probe
  misc_feature (1)..(25): SEQ ID NO: 737; WAN024CKK_at; Start 334; Stop 358
gttaaccaattgtctccagttatga

SEQ ID NO: 122320 - DNA, 25 bp, Artificial
  probe
  misc_feature (1)..(25): SEQ ID NO: 737; WAN024CKK_at; Start 64; Stop 88
gaagatttagttcgaaaagggcatg

SEQ ID NO: 122321 - DNA, 25 bp, Artificial
  probe
  misc_feature (1)..(25): SEQ ID NO: 737; WAN024CKK_at; Start 39; Stop 63
accattcaggttgtcagatatttgt

SEQ ID NO: 122322 - DNA, 25 bp, Artificial
  probe
  misc_feature (1)..(25): SEQ ID NO: 737; WAN024CKK_at; Start 1100; Stop 1124
gtatgttatctattaagagacaaag

SEQ ID NO: 122323 - DNA, 25 bp, Artificial
  probe
  misc_feature (1)..(25): SEQ ID NO: 6948; WAN024CKL_at; Start 209; Stop 233
tggcaactcgagatttacaaaatcc

SEQ ID NO: 122324 - DNA, 25 bp, Artificial
  probe
  misc_feature (1)..(25): SEQ ID NO: 6948; WAN024CKL_at; Start 197; Stop 221
caccaaaaaatgtggcaactcgaga

SEQ ID NO: 122325 - DNA, 25 bp, Artificial
  probe
  misc_feature (1)..(25): SEQ ID NO: 6948; WAN024CKL_at; Start 544; Stop 568
tatgtgctgaaacgcaaaggaattg

SEQ ID NO: 122326 - DNA, 25 bp, Artificial
  probe
  misc_feature (1)..(25): SEQ ID NO: 6948; WAN024CKL_at; Start 275; Stop 299
catctctagatgaattgcctcaatt

SEQ ID NO: 122327 - DNA, 25 bp, Artificial
  probe
  misc_feature (1)..(25): SEQ ID NO: 6948; WAN024CKL_at; Start 246; Stop 270
cactagagtgggaactttcttaagg

SEQ ID NO: 122328 - DNA, 25 bp, Artificial
  probe
  misc_feature (1)..(25): SEQ ID NO: 6948; WAN024CKL_at; Start 224; Stop 248
tacaaaatccagagcagtggatcac

SEQ ID NO: 122329 - DNA, 25 bp, Artificial
  probe
  misc_feature (1)..(25): SEQ ID NO: 6948; WAN024CKL_at; Start 290; Stop 314
tgcctcaattatgtaatattcttgt

SEQ ID NO: 122330 - DNA, 25 bp, Artificial
  probe
  misc_feature (1)..(25): SEQ ID NO: 6948; WAN024CKL_at; Start 69; Stop 93
attttttatcctaattgcaattgcg

SEQ ID NO: 122331 - DNA, 25 bp, Artificial
  probe
  misc_feature (1)..(25): SEQ ID NO: 6948; WAN024CKL_at; Start 513; Stop 537
ggacattagatgtatagtaagaaca

SEQ ID NO: 122332 - DNA, 25 bp, Artificial
  probe
  misc_feature (1)..(25): SEQ ID NO: 6948; WAN024CKL_at; Start 17; Stop 41
aacggttaggagatatatctatatc

SEQ ID NO: 122333 - DNA, 25 bp, Artificial
  probe
  misc_feature (1)..(25): SEQ ID NO: 6948; WAN024CKL_at; Start 91; Stop 115
gcgattaagtttgattcaaaaggac

SEQ ID NO: 122334 - DNA, 25 bp, Artificial
  probe
  misc_feature (1)..(25): SEQ ID NO: 6948; WAN024CKL_at; Start 238; Stop 262
cagtggatcactagagtgggaactt

SEQ ID NO: 122335 - DNA, 25 bp, Artificial
  probe
  misc_feature (1)..(25): SEQ ID NO: 6948; WAN024CKL_at; Start 219; Stop 243
agatttacaaaatccagagcagtgg

SEQ ID NO: 122336 - DNA, 25 bp, Artificial
  probe
  misc_feature (1)..(25): SEQ ID NO: 6948; WAN024CKL_at; Start 98; Stop 122
agtttgattcaaaaggacctgtaat

SEQ ID NO: 122337 - DNA, 25 bp, Artificial
  probe
  misc_feature (1)..(25): SEQ ID NO: 6948; WAN024CKL_at; Start 567; Stop 591
tgtagagggaagtcaaaaagagagt

SEQ ID NO: 122338 - DNA, 25 bp, Artificial
  probe
  misc_feature (1)..(25): SEQ ID NO: 6948; WAN024CKL_at; Start 11; Stop 35
tattaaaacggttaggagatatatc

SEQ ID NO: 122339 - DNA, 25 bp, Artificial
  probe
  misc_feature (1)..(25): SEQ ID NO: 6948; WAN024CKL_at; Start 487; Stop 511
tatgtgacacataaatcgttgctaa

SEQ ID NO: 122340 - DNA, 25 bp, Artificial
  probe
  misc_feature (1)..(25): SEQ ID NO: 6948; WAN024CKL_at; Start 492; Stop 516
gacacataaatcgttgctaatggac

SEQ ID NO: 122341 - DNA, 25 bp, Artificial
  probe
  misc_feature (1)..(25): SEQ ID NO: 6948; WAN024CKL_at; Start 536; Stop 560
caataccttatgtgctgaaacgcaa

SEQ ID NO: 122342 - DNA, 25 bp, Artificial
  probe
  misc_feature (1)..(25): SEQ ID NO: 6948; WAN024CKL_at; Start 472; Stop 496
gaattggatggatactatgtgacac

SEQ ID NO: 122343 - DNA, 25 bp, Artificial
  probe
  misc_feature (1)..(25): SEQ ID NO: 6948; WAN024CKL_at; Start 498; Stop 522
taaatcgttgctaatggacattaga

SEQ ID NO: 122344 - DNA, 25 bp, Artificial
  probe
  misc_feature (1)..(25): SEQ ID NO: 6948; WAN024CKL_at; Start 46; Stop 70
atagttataacgttattttgtccat

SEQ ID NO: 122345 - DNA, 25 bp, Artificial
  probe
  misc_feature (1)..(25): SEQ ID NO: 6948; WAN024CKL_at; Start 177; Stop 201
tcggactatgaaagtggagacacca

SEQ ID NO: 122346 - DNA, 25 bp, Artificial
  probe
  misc_feature (1)..(25): SEQ ID NO: 6948; WAN024CKL_at; Start 435; Stop 459
caatggtcgtgataatctatcaata

SEQ ID NO: 122347 - DNA, 25 bp, Artificial
  probe
  misc_feature (1)..(25): SEQ ID NO: 6948; WAN024CKL_at; Start 556; Stop 580
cgcaaaggaattgtagagggaagtc

SEQ ID NO: 122348 - DNA, 25 bp, Artificial
  probe
  misc_feature (1)..(25): SEQ ID NO: 6948; WAN024CKL_at; Start 527; Stop 551
tagtaagaacaataccttatgtgct

SEQ ID NO: 122349 - DNA, 25 bp, Artificial
  probe
  misc_feature (1)..(25): SEQ ID NO: 6948; WAN024CKL_at; Start 262; Stop 286
ttcttaaggaaaacatctctagatg

SEQ ID NO: 122350 - DNA, 25 bp, Artificial
  probe
  misc_feature (1)..(25): SEQ ID NO: 6948; WAN024CKL_at; Start 427; Stop 451
gcacaaatcaatggtcgtgataatc

SEQ ID NO: 122351 - DNA, 25 bp, Artificial
  probe
  misc_feature (1)..(25): SEQ ID NO: 6948; WAN024CKL_at; Start 188; Stop 212
aagtggagacaccaaaaaatgtggc

SEQ ID NO: 122352 - DNA, 25 bp, Artificial
  probe
  misc_feature (1)..(25): SEQ ID NO: 6948; WAN024CKL_at; Start 450; Stop 474
tctatcaatagatatgaaagctgaa

SEQ ID NO: 122353 - DNA, 25 bp, Artificial
  probe
  misc_feature (1)..(25): SEQ ID NO: 6948; WAN024CKL_at; Start 231; Stop 255
tccagagcagtggatcactagagtg

SEQ ID NO: 122354 - DNA, 25 bp, Artificial
  probe
  misc_feature (1)..(25): SEQ ID NO: 6948; WAN024CKL_at; Start 163; Stop 187
tatgtttttaaatttcggactatga

SEQ ID NO: 122355 - DNA, 25 bp, Artificial
  probe
  misc_feature (1)..(25): SEQ ID NO: 6948; WAN024CKL_at; Start 203; Stop 227
aaaatgtggcaactcgagatttaca

SEQ ID NO: 122356 - DNA, 25 bp, Artificial
  probe
  misc_feature (1)..(25): SEQ ID NO: 6948; WAN024CKL_at; Start 462; Stop 486
tatgaaagctgaattggatggatac

SEQ ID NO: 122357 - DNA, 25 bp, Artificial
  probe
  misc_feature (1)..(25): SEQ ID NO: 2784; WAN024CKM_at; Start 238; Stop 262
caatggattacaaaggttggtaaag

SEQ ID NO: 122358 - DNA, 25 bp, Artificial
  probe
  misc_feature (1)..(25): SEQ ID NO: 2784; WAN024CKM_at; Start 550; Stop 574
tttaagagatatgggcatcgagaag

SEQ ID NO: 122359 - DNA, 25 bp, Artificial
  probe
  misc_feature (1)..(25): SEQ ID NO: 2784; WAN024CKM_at; Start 49; Stop 73
ggaattgtattattatcaccactat

SEQ ID NO: 122360 - DNA, 25 bp, Artificial
  probe
  misc_feature (1)..(25): SEQ ID NO: 2784; WAN024CKM_at; Start 448; Stop 472
gaattatctattccagtcaaagcca

SEQ ID NO: 122361 - DNA, 25 bp, Artificial
  probe
  misc_feature (1)..(25): SEQ ID NO: 2784; WAN024CKM_at; Start 512; Stop 536
tagattgtcgatgtgttgtagaaag

SEQ ID NO: 122362 - DNA, 25 bp, Artificial
  probe
  misc_feature (1)..(25): SEQ ID NO: 2784; WAN024CKM_at; Start 263; Stop 287
tcttacgtagaacctctctggatga

SEQ ID NO: 122363 - DNA, 25 bp, Artificial
  probe
  misc_feature (1)..(25): SEQ ID NO: 2784; WAN024CKM_at; Start 311; Stop 335
tggtcggtcacatgtcgcttgtagg

SEQ ID NO: 122364 - DNA, 25 bp, Artificial
  probe
  misc_feature (1)..(25): SEQ ID NO: 2784; WAN024CKM_at; Start 497; Stop 521
actgttcatttgttttagattgtcg

SEQ ID NO: 122365 - DNA, 25 bp, Artificial
  probe
  misc_feature (1)..(25): SEQ ID NO: 2784; WAN024CKM_at; Start 176; Stop 200
ttagaacgatgagaattgacactcc

SEQ ID NO: 122366 - DNA, 25 bp, Artificial
  probe
  misc_feature (1)..(25): SEQ ID NO: 2784; WAN024CKM_at; Start 258; Stop 282
taaagtcttacgtagaacctctctg

SEQ ID NO: 122367 - DNA, 25 bp, Artificial
  probe
  misc_feature (1)..(25): SEQ ID NO: 2784; WAN024CKM_at; Start 64; Stop 88
tcaccactatttttaggaattatag

SEQ ID NO: 122368 - DNA, 25 bp, Artificial
  probe
  misc_feature (1)..(25): SEQ ID NO: 2784; WAN024CKM_at; Start 271; Stop 295
agaacctctctggatgaattgccac

SEQ ID NO: 122369 - DNA, 25 bp, Artificial
  probe
  misc_feature (1)..(25): SEQ ID NO: 2784; WAN024CKM_at; Start 481; Stop 505
ggctactatgtgaagaactgttcat

SEQ ID NO: 122370 - DNA, 25 bp, Artificial
  probe
  misc_feature (1)..(25): SEQ ID NO: 2784; WAN024CKM_at; Start 233; Stop 257
cttatcaatggattacaaaggttgg

SEQ ID NO: 122371 - DNA, 25 bp, Artificial
  probe
  misc_feature (1)..(25): SEQ ID NO: 2784; WAN024CKM_at; Start 520; Stop 544
cgatgtgttgtagaaagttttttag

SEQ ID NO: 122372 - DNA, 25 bp, Artificial
  probe
  misc_feature (1)..(25): SEQ ID NO: 2784; WAN024CKM_at; Start 561; Stop 585
tgggcatcgagaaggtggtgcagat

SEQ ID NO: 122373 - DNA, 25 bp, Artificial
  probe
  misc_feature (1)..(25): SEQ ID NO: 2784; WAN024CKM_at; Start 545; Stop 569
tagtatttaagagatatgggcatcg

SEQ ID NO: 122374 - DNA, 25 bp, Artificial
  probe
  misc_feature (1)..(25): SEQ ID NO: 2784; WAN024CKM_at; Start 183; Stop 207
gatgagaattgacactccttcagct

SEQ ID NO: 122375 - DNA, 25 bp, Artificial
  probe
  misc_feature (1)..(25): SEQ ID NO: 2784; WAN024CKM_at; Start 89; Stop 113
tgttcataaaattagaatctaaagg

SEQ ID NO: 122376 - DNA, 25 bp, Artificial
  probe
  misc_feature (1)..(25): SEQ ID NO: 2784; WAN024CKM_at; Start 188; Stop 212
gaattgacactccttcagctgtccc

SEQ ID NO: 122377 - DNA, 25 bp, Artificial
  probe
  misc_feature (1)..(25): SEQ ID NO: 2784; WAN024CKM_at; Start 295; Stop 319
cagatttggaatattttggtcggtc

SEQ ID NO: 122378 - DNA, 25 bp, Artificial
  probe
  misc_feature (1)..(25): SEQ ID NO: 2784; WAN024CKM_at; Start 136; Stop 160
agaattgggctacataaaaaagaat

SEQ ID NO: 122379 - DNA, 25 bp, Artificial
  probe
  misc_feature (1)..(25): SEQ ID NO: 2784; WAN024CKM_at; Start 439; Stop 463
ggaagagatgaattatctattccag

SEQ ID NO: 122380 - DNA, 25 bp, Artificial
  probe
  misc_feature (1)..(25): SEQ ID NO: 2784; WAN024CKM_at; Start 303; Stop 327
gaatattttggtcggtcacatgtcg

SEQ ID NO: 122381 - DNA, 25 bp, Artificial
  probe
  misc_feature (1)..(25): SEQ ID NO: 2784; WAN024CKM_at; Start 477; Stop 501
tgatggctactatgtgaagaactgt

SEQ ID NO: 122382 - DNA, 25 bp, Artificial
  probe
  misc_feature (1)..(25): SEQ ID NO: 2784; WAN024CKM_at; Start 286; Stop 310
gaattgccacagatttggaatattt

SEQ ID NO: 122383 - DNA, 25 bp, Artificial
  probe
  misc_feature (1)..(25): SEQ ID NO: 2784; WAN024CKM_at; Start 426; Stop 450
ggcacaaatcaatggaagagatgaa

SEQ ID NO: 122384 - DNA, 25 bp, Artificial
  probe
  misc_feature (1)..(25): SEQ ID NO: 2784; WAN024CKM_at; Start 319; Stop 343
cacatgtcgcttgtaggaccaagac

SEQ ID NO: 122385 - DNA, 25 bp, Artificial
  probe
  misc_feature (1)..(25): SEQ ID NO: 2784; WAN024CKM_at; Start 203; Stop 227
cagctgtccctacacatcttttaaa

SEQ ID NO: 122386 - DNA, 25 bp, Artificial
  probe
  misc_feature (1)..(25): SEQ ID NO: 2784; WAN024CKM_at; Start 17; Stop 41
aacgatttatagatatagctttagc

SEQ ID NO: 122387 - DNA, 25 bp, Artificial
  probe
  misc_feature (1)..(25): SEQ ID NO: 2784; WAN024CKM_at; Start 471; Stop 495
caaatttgatggctactatgtgaag

SEQ ID NO: 122388 - DNA, 25 bp, Artificial
  probe
  misc_feature (1)..(25): SEQ ID NO: 2784; WAN024CKM_at; Start 454; Stop 478
tctattccagtcaaagccaaatttg

SEQ ID NO: 122389 - DNA, 25 bp, Artificial
  probe
  misc_feature (1)..(25): SEQ ID NO: 2784; WAN024CKM_at; Start 44; Stop 68
tgctaggaattgtattattatcacc

SEQ ID NO: 122390 - DNA, 25 bp, Artificial
  probe
  misc_feature (1)..(25): SEQ ID NO: 2784; WAN024CKM_at; Start 459; Stop 483
tccagtcaaagccaaatttgatggc

SEQ ID NO: 122391 - DNA, 25 bp, Artificial
  probe
  misc_feature (1)..(25): SEQ ID NO: 2791; WAN024CKN_at; Start 452; Stop 476
tgtcaatagagatgaaggcagaagc

SEQ ID NO: 122392 - DNA, 25 bp, Artificial
  probe
  misc_feature (1)..(25): SEQ ID NO: 2791; WAN024CKN_at; Start 240; Stop 264
gtggattaccaaagtgggagctttc

SEQ ID NO: 122393 - DNA, 25 bp, Artificial
  probe
  misc_feature (1)..(25): SEQ ID NO: 2791; WAN024CKN_at; Start 205; Stop 229
aatgtagctccacggaacttggata

SEQ ID NO: 122394 - DNA, 25 bp, Artificial
  probe
  misc_feature (1)..(25): SEQ ID NO: 2791; WAN024CKN_at; Start 2; Stop 26
tgtatagagtaacaaaacgattagg

SEQ ID NO: 122395 - DNA, 25 bp, Artificial
  probe
  misc_feature (1)..(25): SEQ ID NO: 2791; WAN024CKN_at; Start 97; Stop 121
aacactgattcggagggtccgatta

SEQ ID NO: 122396 - DNA, 25 bp, Artificial
  probe
  misc_feature (1)..(25): SEQ ID NO: 2791; WAN024CKN_at; Start 290; Stop 314
tgccacaattatggaatattcttat

SEQ ID NO: 122397 - DNA, 25 bp, Artificial
  probe
  misc_feature (1)..(25): SEQ ID NO: 2791; WAN024CKN_at; Start 246; Stop 270
taccaaagtgggagctttcttaaga

SEQ ID NO: 122398 - DNA, 25 bp, Artificial
  probe
  misc_feature (1)..(25): SEQ ID NO: 2791; WAN024CKN_at; Start 69; Stop 93
agtgtttattgtaattgcaattgcg

SEQ ID NO: 122399 - DNA, 25 bp, Artificial
  probe
  misc_feature (1)..(25): SEQ ID NO: 2791; WAN024CKN_at; Start 332; Stop 356
taggacctaggccagcaggtataaa

SEQ ID NO: 122400 - DNA, 25 bp, Artificial
  probe
  misc_feature (1)..(25): SEQ ID NO: 2791; WAN024CKN_at; Start 103; Stop 127
gattcggagggtccgattatattta

SEQ ID NO: 122401 - DNA, 25 bp, Artificial
  probe
  misc_feature (1)..(25): SEQ ID NO: 2791; WAN024CKN_at; Start 163; Stop 187
tatatcctgaaatttaggtccatga

SEQ ID NO: 122402 - DNA, 25 bp, Artificial
  probe
  misc_feature (1)..(25): SEQ ID NO: 2791; WAN024CKN_at; Start 475; Stop 499
gcagatggttattatgtgaaacata

SEQ ID NO: 122403 - DNA, 25 bp, Artificial
  probe
  misc_feature (1)..(25): SEQ ID NO: 2791; WAN024CKN_at; Start 200; Stop 224
cgaaaaatgtagctccacggaactt

SEQ ID NO: 122404 - DNA, 25 bp, Artificial
  probe
  misc_feature (1)..(25): SEQ ID NO: 2791; WAN024CKN_at; Start 368; Stop 392
tgctcaccgaaagagaaaagtttgg

SEQ ID NO: 122405 - DNA, 25 bp, Artificial
  probe
  misc_feature (1)..(25): SEQ ID NO: 2791; WAN024CKN_at; Start 470; Stop 494
cagaagcagatggttattatgtgaa

SEQ ID NO: 122406 - DNA, 25 bp, Artificial
  probe
  misc_feature (1)..(25): SEQ ID NO: 2791; WAN024CKN_at; Start 93; Stop 117
gataaacactgattcggagggtccg

SEQ ID NO: 122407 - DNA, 25 bp, Artificial
  probe
  misc_feature (1)..(25): SEQ ID NO: 2791; WAN024CKN_at; Start 382; Stop 406
gaaaagtttggtgcgaatgatgtct

SEQ ID NO: 122408 - DNA, 25 bp, Artificial
  probe
  misc_feature (1)..(25): SEQ ID NO: 2791; WAN024CKN_at; Start 353; Stop 377
taaatgagcttgatttgctcaccga

SEQ ID NO: 122409 - DNA, 25 bp, Artificial
  probe
  misc_feature (1)..(25): SEQ ID NO: 2791; WAN024CKN_at; Start 337; Stop 361
cctaggccagcaggtataaatgagc

SEQ ID NO: 122410 - DNA, 25 bp, Artificial
  probe
  misc_feature (1)..(25): SEQ ID NO: 2791; WAN024CKN_at; Start 342; Stop 366
gccagcaggtataaatgagcttgat

SEQ ID NO: 122411 - DNA, 25 bp, Artificial
  probe
  misc_feature (1)..(25): SEQ ID NO: 2791; WAN024CKN_at; Start 177; Stop 201
taggtccatgaaaataggagcaccg

SEQ ID NO: 122412 - DNA, 25 bp, Artificial
  probe
  misc_feature (1)..(25): SEQ ID NO: 2791; WAN024CKN_at; Start 319; Stop 343
aatatgagcattgtaggacctaggc

SEQ ID NO: 122413 - DNA, 25 bp, Artificial
  probe
  misc_feature (1)..(25): SEQ ID NO: 2791; WAN024CKN_at; Start 182; Stop 206
ccatgaaaataggagcaccgaaaaa

SEQ ID NO: 122414 - DNA, 25 bp, Artificial
  probe
  misc_feature (1)..(25): SEQ ID NO: 2791; WAN024CKN_at; Start 279; Stop 303
tttggacgaactgccacaattatgg

SEQ ID NO: 122415 - DNA, 25 bp, Artificial
  probe
  misc_feature (1)..(25): SEQ ID NO: 2791; WAN024CKN_at; Start 438; Stop 462
tgggcgagatactttgtcaatagag

SEQ ID NO: 122416 - DNA, 25 bp, Artificial
  probe
  misc_feature (1)..(25): SEQ ID NO: 2791; WAN024CKN_at; Start 455; Stop 479
caatagagatgaaggcagaagcaga

SEQ ID NO: 122417 - DNA, 25 bp, Artificial
  probe
  misc_feature (1)..(25): SEQ ID NO: 2791; WAN024CKN_at; Start 283; Stop 307
gacgaactgccacaattatggaata

SEQ ID NO: 122418 - DNA, 25 bp, Artificial
  probe
  misc_feature (1)..(25): SEQ ID NO: 2791; WAN024CKN_at; Start 395; Stop 419
cgaatgatgtcttacctggattaac

SEQ ID NO: 122419 - DNA, 25 bp, Artificial
  probe
  misc_feature (1)..(25): SEQ ID NO: 2791; WAN024CKN_at; Start 148; Stop 172
tacaaggaacctttttatatcctga

SEQ ID NO: 122420 - DNA, 25 bp, Artificial
  probe
  misc_feature (1)..(25): SEQ ID NO: 2791; WAN024CKN_at; Start 189; Stop 213
aataggagcaccgaaaaatgtagct

SEQ ID NO: 122421 - DNA, 25 bp, Artificial
  probe
  misc_feature (1)..(25): SEQ ID NO: 2791; WAN024CKN_at; Start 213; Stop 237
tccacggaacttggataatccagaa

SEQ ID NO: 122422 - DNA, 25 bp, Artificial
  probe
  misc_feature (1)..(25): SEQ ID NO: 2791; WAN024CKN_at; Start 360; Stop 384
gcttgatttgctcaccgaaagagaa

SEQ ID NO: 122423 - DNA, 25 bp, Artificial
  probe
  misc_feature (1)..(25): SEQ ID NO: 2791; WAN024CKN_at; Start 432; Stop 456
aattaatgggcgagatactttgtca

SEQ ID NO: 122424 - DNA, 25 bp, Artificial
  probe
  misc_feature (1)..(25): SEQ ID NO: 2791; WAN024CKN_at; Start 84; Stop 108
tgcaattgcgataaacactgattcg

SEQ ID NO: 122425 - DNA, 25 bp, Artificial
  probe
  misc_feature (1)..(25): SEQ ID NO: 2792; WAN024CKO_at; Start 283; Stop 307
gatgaactgcctcaactgtggaaca

SEQ ID NO: 122426 - DNA, 25 bp, Artificial
  probe
  misc_feature (1)..(25): SEQ ID NO: 2792; WAN024CKO_at; Start 178; Stop 202
cgaactatgaaggttgaatcgccaa

SEQ ID NO: 122427 - DNA, 25 bp, Artificial
  probe
  misc_feature (1)..(25): SEQ ID NO: 2792; WAN024CKO_at; Start 240; Stop 264
gtggattaccaaagtaggagcttgt

SEQ ID NO: 122428 - DNA, 25 bp, Artificial
  probe
  misc_feature (1)..(25): SEQ ID NO: 2792; WAN024CKO_at; Start 254; Stop 278
taggagcttgtttgcggaaaacatc

SEQ ID NO: 122429 - DNA, 25 bp, Artificial
  probe
  misc_feature (1)..(25): SEQ ID NO: 2792; WAN024CKO_at; Start 454; Stop 478
tcaacagagatgaaggcagagatag

SEQ ID NO: 122430 - DNA, 25 bp, Artificial
  probe
  misc_feature (1)..(25): SEQ ID NO: 2792; WAN024CKO_at; Start 112; Stop 136
ggtccagtaatatttaagcaaaagc

SEQ ID NO: 122431 - DNA, 25 bp, Artificial
  probe
  misc_feature (1)..(25): SEQ ID NO: 2792; WAN024CKO_at; Start 290; Stop 314
tgcctcaactgtggaacattcttgt

SEQ ID NO: 122432 - DNA, 25 bp, Artificial
  probe
  misc_feature (1)..(25): SEQ ID NO: 2792; WAN024CKO_at; Start 319; Stop 343
gatatgagtgttgtaggacctaggc

SEQ ID NO: 122433 - DNA, 25 bp, Artificial
  probe
  misc_feature (1)..(25): SEQ ID NO: 2792; WAN024CKO_at; Start 246; Stop 270
taccaaagtaggagcttgtttgcgg

SEQ ID NO: 122434 - DNA, 25 bp, Artificial
  probe
  misc_feature (1)..(25): SEQ ID NO: 2792; WAN024CKO_at; Start 92; Stop 116
caataaagcttgattcaaaaggtcc

SEQ ID NO: 122435 - DNA, 25 bp, Artificial
  probe
  misc_feature (1)..(25): SEQ ID NO: 2792; WAN024CKO_at; Start 157; Stop 181
tcgttctatgtcttgaagtttcgaa

SEQ ID NO: 122436 - DNA, 25 bp, Artificial
  probe
  misc_feature (1)..(25): SEQ ID NO: 2792; WAN024CKO_at; Start 185; Stop 209
tgaaggttgaatcgccaaaatatgt

SEQ ID NO: 122437 - DNA, 25 bp, Artificial
  probe
  misc_feature (1)..(25): SEQ ID NO: 2792; WAN024CKO_at; Start 332; Stop 356
taggacctaggcctgtagctataaa

SEQ ID NO: 122438 - DNA, 25 bp, Artificial
  probe
  misc_feature (1)..(25): SEQ ID NO: 2792; WAN024CKO_at; Start 167; Stop 191
tcttgaagtttcgaactatgaaggt

SEQ ID NO: 122439 - DNA, 25 bp, Artificial
  probe
  misc_feature (1)..(25): SEQ ID NO: 2792; WAN024CKO_at; Start 70; Stop 94
gtgtttattataattgcaatcgcaa

SEQ ID NO: 122440 - DNA, 25 bp, Artificial
  probe
  misc_feature (1)..(25): SEQ ID NO: 2792; WAN024CKO_at; Start 80; Stop 104
taattgcaatcgcaataaagcttga

SEQ ID NO: 122441 - DNA, 25 bp, Artificial
  probe
  misc_feature (1)..(25): SEQ ID NO: 2792; WAN024CKO_at; Start 385; Stop 409
cagtatggtgccaatgatatcttac

SEQ ID NO: 122442 - DNA, 25 bp, Artificial
  probe
  misc_feature (1)..(25): SEQ ID NO: 2792; WAN024CKO_at; Start 1; Stop 25
atgtatagggaaataaaacgattag

SEQ ID NO: 122443 - DNA, 25 bp, Artificial
  probe
  misc_feature (1)..(25): SEQ ID NO: 2792; WAN024CKO_at; Start 469; Stop 493
gcagagatagatggttattatgtaa

SEQ ID NO: 122444 - DNA, 25 bp, Artificial
  probe
  misc_feature (1)..(25): SEQ ID NO: 2792; WAN024CKO_at; Start 358; Stop 382
gaacttgatttgataaaagaaagag

SEQ ID NO: 122445 - DNA, 25 bp, Artificial
  probe
  misc_feature (1)..(25): SEQ ID NO: 2792; WAN024CKO_at; Start 341; Stop 365
ggcctgtagctataaatgaacttga

SEQ ID NO: 122446 - DNA, 25 bp, Artificial
  probe
  misc_feature (1)..(25): SEQ ID NO: 2792; WAN024CKO_at; Start 130; Stop 154
caaaagcgatttggacttcataaga

SEQ ID NO: 122447 - DNA, 25 bp, Artificial
  probe
  misc_feature (1)..(25): SEQ ID NO: 2792; WAN024CKO_at; Start 373; Stop 397
aaagaaagagaacagtatggtgcca

SEQ ID NO: 122448 - DNA, 25 bp, Artificial
  probe
  misc_feature (1)..(25): SEQ ID NO: 2792; WAN024CKO_at; Start 296; Stop 320
aactgtggaacattcttgttggtga

SEQ ID NO: 122449 - DNA, 25 bp, Artificial
  probe
  misc_feature (1)..(25): SEQ ID NO: 2792; WAN024CKO_at; Start 439; Stop 463
ggacgtgataatttgtcaacagaga

SEQ ID NO: 122450 - DNA, 25 bp, Artificial
  probe
  misc_feature (1)..(25): SEQ ID NO: 2792; WAN024CKO_at; Start 395; Stop 419
ccaatgatatcttaccaggattaac

SEQ ID NO: 122451 - DNA, 25 bp, Artificial
  probe
  misc_feature (1)..(25): SEQ ID NO: 2792; WAN024CKO_at; Start 99; Stop 123
gcttgattcaaaaggtccagtaata

SEQ ID NO: 122452 - DNA, 25 bp, Artificial
  probe
  misc_feature (1)..(25): SEQ ID NO: 2792; WAN024CKO_at; Start 198; Stop 222
gccaaaatatgtggcgactcgagac

SEQ ID NO: 122453 - DNA, 25 bp, Artificial
  probe
  misc_feature (1)..(25): SEQ ID NO: 2792; WAN024CKO_at; Start 268; Stop 292
cggaaaacatctttagatgaactgc

SEQ ID NO: 122454 - DNA, 25 bp, Artificial
  probe
  misc_feature (1)..(25): SEQ ID NO: 2792; WAN024CKO_at; Start 220; Stop 244
gacttagataaaccagaacagtgga

SEQ ID NO: 122455 - DNA, 25 bp, Artificial
  probe
  misc_feature (1)..(25): SEQ ID NO: 2792; WAN024CKO_at; Start 142; Stop 166
ggacttcataagaaatcgttctatg

SEQ ID NO: 122456 - DNA, 25 bp, Artificial
  probe
  misc_feature (1)..(25): SEQ ID NO: 2792; WAN024CKO_at; Start 122; Stop 146
tatttaagcaaaagcgatttggact

SEQ ID NO: 122457 - DNA, 25 bp, Artificial
  probe
  misc_feature (1)..(25): SEQ ID NO: 2792; WAN024CKO_at; Start 427; Stop 451
gcacaaattaatggacgtgataatt

SEQ ID NO: 122458 - DNA, 25 bp, Artificial
  probe
  misc_feature (1)..(25): SEQ ID NO: 2792; WAN024CKO_at; Start 209; Stop 233
tggcgactcgagacttagataaacc

SEQ ID NO: 122459 - DNA, 25 bp, Artificial
  probe
  misc_feature (1)..(25): SEQ ID NO: 694; WAN024CKP_at; Start 531; Stop 555
taaacatctgtctttgataatggat

SEQ ID NO: 122460 - DNA, 25 bp, Artificial
  probe
  misc_feature (1)..(25): SEQ ID NO: 694; WAN024CKP_at; Start 293; Stop 317
taggggctttcttgcgaaaaacatc

SEQ ID NO: 122461 - DNA, 25 bp, Artificial
  probe
  misc_feature (1)..(25): SEQ ID NO: 694; WAN024CKP_at; Start 380; Stop 404
gaccagcgggtataaatgaactaga

SEQ ID NO: 122462 - DNA, 25 bp, Artificial
  probe
  misc_feature (1)..(25): SEQ ID NO: 694; WAN024CKP_at; Start 175; Stop 199
cgctttggtattcataaagaatact

SEQ ID NO: 122463 - DNA, 25 bp, Artificial
  probe
  misc_feature (1)..(25): SEQ ID NO: 694; WAN024CKP_at; Start 472; Stop 496
attaacgggcgtgatactttgtctg

SEQ ID NO: 122464 - DNA, 25 bp, Artificial
  probe
  misc_feature (1)..(25): SEQ ID NO: 694; WAN024CKP_at; Start 256; Stop 280
cgaaacttatataatccagagcaat

SEQ ID NO: 122465 - DNA, 25 bp, Artificial
  probe
  misc_feature (1)..(25): SEQ ID NO: 694; WAN024CKP_at; Start 215; Stop 239
ttaggtctatgaaaatagatgcacc

SEQ ID NO: 122466 - DNA, 25 bp, Artificial
  probe
  misc_feature (1)..(25): SEQ ID NO: 694; WAN024CKP_at; Start 132; Stop 156
gattaaacttgattcagaaggtccg

SEQ ID NO: 122467 - DNA, 25 bp, Artificial
  probe
  misc_feature (1)..(25): SEQ ID NO: 694; WAN024CKP_at; Start 573; Stop 597
gacaataccttacgtactgaaacga

SEQ ID NO: 122468 - DNA, 25 bp, Artificial
  probe
  misc_feature (1)..(25): SEQ ID NO: 694; WAN024CKP_at; Start 101; Stop 125
tgtgtccggtttttatgataattgc

SEQ ID NO: 122469 - DNA, 25 bp, Artificial
  probe
  misc_feature (1)..(25): SEQ ID NO: 694; WAN024CKP_at; Start 562; Stop 586
tgtatagttaagacaataccttacg

SEQ ID NO: 122470 - DNA, 25 bp, Artificial
  probe
  misc_feature (1)..(25): SEQ ID NO: 694; WAN024CKP_at; Start 86; Stop 110
tagggataataatattgtgtccggt

SEQ ID NO: 122471 - DNA, 25 bp, Artificial
  probe
  misc_feature (1)..(25): SEQ ID NO: 694; WAN024CKP_at; Start 316; Stop 340
tctttggatgaactaccacaattgt

SEQ ID NO: 122472 - DNA, 25 bp, Artificial
  probe
  misc_feature (1)..(25): SEQ ID NO: 694; WAN024CKP_at; Start 249; Stop 273
ggcgcctcgaaacttatataatcca

SEQ ID NO: 122473 - DNA, 25 bp, Artificial
  probe
  misc_feature (1)..(25): SEQ ID NO: 694; WAN024CKP_at; Start 501; Stop 525
gatgaagacggagttagatggctac

SEQ ID NO: 122474 - DNA, 25 bp, Artificial
  probe
  misc_feature (1)..(25): SEQ ID NO: 694; WAN024CKP_at; Start 397; Stop 421
gaactagatttgattgcagagagag

SEQ ID NO: 122475 - DNA, 25 bp, Artificial
  probe
  misc_feature (1)..(25): SEQ ID NO: 694; WAN024CKP_at; Start 230; Stop 254
tagatgcacctaaaaatgtggcgcc

SEQ ID NO: 122476 - DNA, 25 bp, Artificial
  probe
  misc_feature (1)..(25): SEQ ID NO: 694; WAN024CKP_at; Start 371; Stop 395
taggtcctagaccagcgggtataaa

SEQ ID NO: 122477 - DNA, 25 bp, Artificial
  probe
  misc_feature (1)..(25): SEQ ID NO: 694; WAN024CKP_at; Start 21; Stop 45
ttatagttggaggttgtttatgtac

SEQ ID NO: 122478 - DNA, 25 bp, Artificial
  probe
  misc_feature (1)..(25): SEQ ID NO: 694; WAN024CKP_at; Start 366; Stop 390
tattgtaggtcctagaccagcgggt

SEQ ID NO: 122479 - DNA, 25 bp, Artificial
  probe
  misc_feature (1)..(25): SEQ ID NO: 694; WAN024CKP_at; Start 146; Stop 170
cagaaggtccggttatatttaagca

SEQ ID NO: 122480 - DNA, 25 bp, Artificial
  probe
  misc_feature (1)..(25): SEQ ID NO: 694; WAN024CKP_at; Start 486; Stop 510
tactttgtctgttgagatgaagacg

SEQ ID NO: 122481 - DNA, 25 bp, Artificial
  probe
  misc_feature (1)..(25): SEQ ID NO: 694; WAN024CKP_at; Start 109; Stop 133
gtttttatgataattgcaattgcga

SEQ ID NO: 122482 - DNA, 25 bp, Artificial
  probe
  misc_feature (1)..(25): SEQ ID NO: 694; WAN024CKP_at; Start 332; Stop 356
cacaattgtttaatattcttgttgg

SEQ ID NO: 122483 - DNA, 25 bp, Artificial
  probe
  misc_feature (1)..(25): SEQ ID NO: 694; WAN024CKP_at; Start 434; Stop 458
caaatgatatcttgccagggttaac

SEQ ID NO: 122484 - DNA, 25 bp, Artificial
  probe
  misc_feature (1)..(25): SEQ ID NO: 694; WAN024CKP_at; Start 429; Stop 453
tggagcaaatgatatcttgccaggg

SEQ ID NO: 122485 - DNA, 25 bp, Artificial
  probe
  misc_feature (1)..(25): SEQ ID NO: 694; WAN024CKP_at; Start 517; Stop 541
gatggctactatgttaaacatctgt

SEQ ID NO: 122486 - DNA, 25 bp, Artificial
  probe
  misc_feature (1)..(25): SEQ ID NO: 694; WAN024CKP_at; Start 165; Stop 189
taagcaaaaacgctttggtattcat

SEQ ID NO: 122487 - DNA, 25 bp, Artificial
  probe
  misc_feature (1)..(25): SEQ ID NO: 694; WAN024CKP_at; Start 551; Stop 575
tggatattagatgtatagttaagac

SEQ ID NO: 122488 - DNA, 25 bp, Artificial
  probe
  misc_feature (1)..(25): SEQ ID NO: 694; WAN024CKP_at; Start 413; Stop 437
cagagagagataagtatggagcaaa

SEQ ID NO: 122489 - DNA, 25 bp, Artificial
  probe
  misc_feature (1)..(25): SEQ ID NO: 694; WAN024CKP_at; Start 360; Stop 384
tatgagtattgtaggtcctagacca

SEQ ID NO: 122490 - DNA, 25 bp, Artificial
  probe
  misc_feature (1)..(25): SEQ ID NO: 694; WAN024CKP_at; Start 235; Stop 259
gcacctaaaaatgtggcgcctcgaa

SEQ ID NO: 122491 - DNA, 25 bp, Artificial
  probe
  misc_feature (1)..(25): SEQ ID NO: 694; WAN024CKP_at; Start 242; Stop 266
aaaatgtggcgcctcgaaacttata

SEQ ID NO: 122492 - DNA, 25 bp, Artificial
  probe
  misc_feature (1)..(25): SEQ ID NO: 694; WAN024CKP_at; Start 588; Stop 612
actgaaacgaaaaggtattgtagag

SEQ ID NO: 122493 - DNA, 25 bp, Artificial
  probe
  misc_feature (1)..(25): SEQ ID NO: 5688; WAN024CKQ_at; Start 916; Stop 940
ccagaccagaaagaagacattaggc

SEQ ID NO: 122494 - DNA, 25 bp, Artificial
  probe
  misc_feature (1)..(25): SEQ ID NO: 5688; WAN024CKQ_at; Start 556; Stop 580
tacttattgcaaacatcatcttacg

SEQ ID NO: 122495 - DNA, 25 bp, Artificial
  probe
  misc_feature (1)..(25): SEQ ID NO: 5688; WAN024CKQ_at; Start 150; Stop 174
taaagaggagttactagcaactggg

SEQ ID NO: 122496 - DNA, 25 bp, Artificial
  probe
  misc_feature (1)..(25): SEQ ID NO: 5688; WAN024CKQ_at; Start 1173; Stop 1197
tcagccaacagccaattacaatgga

SEQ ID NO: 122497 - DNA, 25 bp, Artificial
  probe
  misc_feature (1)..(25): SEQ ID NO: 5688; WAN024CKQ_at; Start 370; Stop 394
gacctctatttgactggatctaacg

SEQ ID NO: 122498 - DNA, 25 bp, Artificial
  probe
  misc_feature (1)..(25): SEQ ID NO: 5688; WAN024CKQ_at; Start 666; Stop 690
tattattgagcgcattgtccgaacc

SEQ ID NO: 122499 - DNA, 25 bp, Artificial
  probe
  misc_feature (1)..(25): SEQ ID NO: 5688; WAN024CKQ_at; Start 633; Stop 657
tattgtcactagattgggaaaacca

SEQ ID NO: 122500 - DNA, 25 bp, Artificial
  probe
  misc_feature (1)..(25): SEQ ID NO: 5688; WAN024CKQ_at; Start 726; Stop 750
taagattcgcaataccctagtcagc

SEQ ID NO: 122501 - DNA, 25 bp, Artificial
  probe
  misc_feature (1)..(25): SEQ ID NO: 5688; WAN024CKQ_at; Start 686; Stop 710
gaacccttctcagtagtacaggtag

SEQ ID NO: 122502 - DNA, 25 bp, Artificial
  probe
  misc_feature (1)..(25): SEQ ID NO: 5688; WAN024CKQ_at; Start 81; Stop 105
tgaccgaccaatcatcaaagttgtg

SEQ ID NO: 122503 - DNA, 25 bp, Artificial
  probe
  misc_feature (1)..(25): SEQ ID NO: 5688; WAN024CKQ_at; Start 416; Stop 440
tagcaacaaacttgactggtcggta

SEQ ID NO: 122504 - DNA, 25 bp, Artificial
  probe
  misc_feature (1)..(25): SEQ ID NO: 5688; WAN024CKQ_at; Start 1097; Stop 1121
cactagaaagagaacttagaccact

SEQ ID NO: 122505 - DNA, 25 bp, Artificial
  probe
  misc_feature (1)..(25): SEQ ID NO: 5688; WAN024CKQ_at; Start 211; Stop 235
gatttgagttactatgatctgcgac

SEQ ID NO: 122506 - DNA, 25 bp, Artificial
  probe
  misc_feature (1)..(25): SEQ ID NO: 5688; WAN024CKQ_at; Start 1079; Stop 1103
caacacttgctccagaaacactaga

SEQ ID NO: 122507 - DNA, 25 bp, Artificial
  probe
  misc_feature (1)..(25): SEQ ID NO: 5688; WAN024CKQ_at; Start 385; Stop 409
ggatctaacgcctactttatgagta

SEQ ID NO: 122508 - DNA, 25 bp, Artificial
  probe
  misc_feature (1)..(25): SEQ ID NO: 5688; WAN024CKQ_at; Start 1154; Stop 1178
tattaacaatggatacgattcagcc

SEQ ID NO: 122509 - DNA, 25 bp, Artificial
  probe
  misc_feature (1)..(25): SEQ ID NO: 5688; WAN024CKQ_at; Start 739; Stop 763
accctagtcagccaaaatgtttcaa

SEQ ID NO: 122510 - DNA, 25 bp, Artificial
  probe
  misc_feature (1)..(25): SEQ ID NO: 5688; WAN024CKQ_at; Start 402; Stop 426
tatgagtagccaattagcaacaaac

SEQ ID NO: 122511 - DNA, 25 bp, Artificial
  probe
  misc_feature (1)..(25): SEQ ID NO: 5688; WAN024CKQ_at; Start 1189; Stop 1213
tacaatggaatcgagaagaaaagca

SEQ ID NO: 122512 - DNA, 25 bp, Artificial
  probe
  misc_feature (1)..(25): SEQ ID NO: 5688; WAN024CKQ_at; Start 481; Stop 505
ctatcaggtcaatctctcacagaga

SEQ ID NO: 122513 - DNA, 25 bp, Artificial
  probe
  misc_feature (1)..(25): SEQ ID NO: 5688; WAN024CKQ_at; Start 1065; Stop 1089
tcaggtcagtgaaacaacacttgct

SEQ ID NO: 122514 - DNA, 25 bp, Artificial
  probe
  misc_feature (1)..(25): SEQ ID NO: 5688; WAN024CKQ_at; Start 354; Stop 378
catcttagcaaatgtagacctctat

SEQ ID NO: 122515 - DNA, 25 bp, Artificial
  probe
  misc_feature (1)..(25): SEQ ID NO: 5688; WAN024CKQ_at; Start 901; Stop 925
cgacatctcttattaccagaccaga

SEQ ID NO: 122516 - DNA, 25 bp, Artificial
  probe
  misc_feature (1)..(25): SEQ ID NO: 5688; WAN024CKQ_at; Start 842; Stop 866
taaaaggtagagcattattgcaacg

SEQ ID NO: 122517 - DNA, 25 bp, Artificial
  probe
  misc_feature (1)..(25): SEQ ID NO: 5688; WAN024CKQ_at; Start 701; Stop 725
gtacaggtagcttaatatcaacaaa

SEQ ID NO: 122518 - DNA, 25 bp, Artificial
  probe
  misc_feature (1)..(25): SEQ ID NO: 5688; WAN024CKQ_at; Start 884; Stop 908
ccgttgatttaggtttacgacatct

SEQ ID NO: 122519 - DNA, 25 bp, Artificial
  probe
  misc_feature (1)..(25): SEQ ID NO: 5688; WAN024CKQ_at; Start 1035; Stop 1059
tgtaactgatcttggccactacgct

SEQ ID NO: 122520 - DNA, 25 bp, Artificial
  probe
  misc_feature (1)..(25): SEQ ID NO: 5688; WAN024CKQ_at; Start 66; Stop 90
tttaagaaaacatcgtgaccgacca

SEQ ID NO: 122521 - DNA, 25 bp, Artificial
  probe
  misc_feature (1)..(25): SEQ ID NO: 5688; WAN024CKQ_at; Start 96; Stop 120
caaagttgtgagtggagttagacga

SEQ ID NO: 122522 - DNA, 25 bp, Artificial
  probe
  misc_feature (1)..(25): SEQ ID NO: 5688; WAN024CKQ_at; Start 1049; Stop 1073
gccactacgcttattatcaggtcag

SEQ ID NO: 122523 - DNA, 25 bp, Artificial
  probe
  misc_feature (1)..(25): SEQ ID NO: 5688; WAN024CKQ_at; Start 583; Stop 607
gaaaaaattgactatctcagaggaa

SEQ ID NO: 122524 - DNA, 25 bp, Artificial
  probe
  misc_feature (1)..(25): SEQ ID NO: 5688; WAN024CKQ_at; Start 112; Stop 136
gttagacgagctggtaaatctgtgc

SEQ ID NO: 122525 - DNA, 25 bp, Artificial
  probe
  misc_feature (1)..(25): SEQ ID NO: 5688; WAN024CKQ_at; Start 1113; Stop 1137
tagaccactagaagccattaaagat

SEQ ID NO: 122526 - DNA, 25 bp, Artificial
  probe
  misc_feature (1)..(25): SEQ ID NO: 5688; WAN024CKQ_at; Start 331; Stop 355
gaactggtagcagatagtctattca

SEQ ID NO: 122527 - DNA, 25 bp, Artificial
  probe
  misc_feature (1)..(25): SEQ ID NO: 3405; WAN024CKR_at; Start 73; Stop 97
gacggtgagattgaaactttgtgga

SEQ ID NO: 122528 - DNA, 25 bp, Artificial
  probe
  misc_feature (1)..(25): SEQ ID NO: 3405; WAN024CKR_at; Start 140; Stop 164
cggacatcatcagttctattaaaaa

SEQ ID NO: 122529 - DNA, 25 bp, Artificial
  probe
  misc_feature (1)..(25): SEQ ID NO: 3405; WAN024CKR_at; Start 85; Stop 109
gaaactttgtggagtattacaacag

SEQ ID NO: 122530 - DNA, 25 bp, Artificial
  probe
  misc_feature (1)..(25): SEQ ID NO: 3405; WAN024CKR_at; Start 53; Stop 77
agattactgttctttcaaatgacgg

SEQ ID NO: 122531 - DNA, 25 bp, Artificial
  probe
  misc_feature (1)..(25): SEQ ID NO: 3405; WAN024CKR_at; Start 171; Stop 195
gaccgaacggaatattcctgatagc

SEQ ID NO: 122532 - DNA, 25 bp, Artificial
  probe
  misc_feature (1)..(25): SEQ ID NO: 3405; WAN024CKR_at; Start 31; Stop 55
gacctaggtggtacaaatattaaga

SEQ ID NO: 122533 - DNA, 25 bp, Artificial
  probe
  misc_feature (1)..(25): SEQ ID NO: 3405; WAN024CKR_at; Start 61; Stop 85
gttctttcaaatgacggtgagattg

SEQ ID NO: 122534 - DNA, 25 bp, Artificial
  probe
  misc_feature (1)..(25): SEQ ID NO: 3405; WAN024CKR_at; Start 182; Stop 206
atattcctgatagcgaccttcttgg

SEQ ID NO: 122535 - DNA, 25 bp, Artificial
  probe
  misc_feature (1)..(25): SEQ ID NO: 3405; WAN024CKR_at; Start 215; Stop 239
tgggaagttgctcatcatactttcc

SEQ ID NO: 122536 - DNA, 25 bp, Artificial
  probe
  misc_feature (1)..(25): SEQ ID NO: 3405; WAN024CKR_at; Start 1; Stop 25
ctggaaatagataagaagttgatta

SEQ ID NO: 122537 - DNA, 25 bp, Artificial
  probe
  misc_feature (1)..(25): SEQ ID NO: 3405; WAN024CKR_at; Start 187; Stop 211
cctgatagcgaccttcttggaatcg

SEQ ID NO: 122538 - DNA, 25 bp, Artificial
  probe
  misc_feature (1)..(25): SEQ ID NO: 3405; WAN024CKR_at; Start 104; Stop 128
caacagatacaagtgagaaaggttc

SEQ ID NO: 122539 - DNA, 25 bp, Artificial
  probe
  misc_feature (1)..(25): SEQ ID NO: 3405; WAN024CKR_at; Start 107; Stop 131
cagatacaagtgagaaaggttctca

SEQ ID NO: 122540 - DNA, 25 bp, Artificial
  probe
  misc_feature (1)..(25): SEQ ID NO: 3405; WAN024CKR_at; Start 96; Stop 120
gagtattacaacagatacaagtgag

SEQ ID NO: 122541 - DNA, 25 bp, Artificial
  probe
  misc_feature (1)..(25): SEQ ID NO: 3405; WAN024CKR_at; Start 57; Stop 81
tactgttctttcaaatgacggtgag

SEQ ID NO: 122542 - DNA, 25 bp, Artificial
  probe
  misc_feature (1)..(25): SEQ ID NO: 3405; WAN024CKR_at; Start 166; Stop 190
aaattgaccgaacggaatattcctg

SEQ ID NO: 122543 - DNA, 25 bp, Artificial
  probe
  misc_feature (1)..(25): SEQ ID NO: 3405; WAN024CKR_at; Start 226; Stop 250
tcatcatactttccttgtaaatcac

SEQ ID NO: 122544 - DNA, 25 bp, Artificial
  probe
  misc_feature (1)..(25): SEQ ID NO: 3405; WAN024CKR_at; Start 179; Stop 203
ggaatattcctgatagcgaccttct

SEQ ID NO: 122545 - DNA, 25 bp, Artificial
  probe
  misc_feature (1)..(25): SEQ ID NO: 3405; WAN024CKR_at; Start 133; Stop 157
attatatcggacatcatcagttcta

SEQ ID NO: 122546 - DNA, 25 bp, Artificial
  probe
  misc_feature (1)..(25): SEQ ID NO: 3405; WAN024CKR_at; Start 175; Stop 199
gaacggaatattcctgatagcgacc

SEQ ID NO: 122547 - DNA, 25 bp, Artificial
  probe
  misc_feature (1)..(25): SEQ ID NO: 3405; WAN024CKR_at; Start 68; Stop 92
caaatgacggtgagattgaaacttt

SEQ ID NO: 122548 - DNA, 25 bp, Artificial
  probe
  misc_feature (1)..(25): SEQ ID NO: 3405; WAN024CKR_at; Start 10; Stop 34
gataagaagttgattagtattgacc

SEQ ID NO: 122549 - DNA, 25 bp, Artificial
  probe
  misc_feature (1)..(25): SEQ ID NO: 3405; WAN024CKR_at; Start 37; Stop 61
ggtggtacaaatattaagattactg

SEQ ID NO: 122550 - DNA, 25 bp, Artificial
  probe
  misc_feature (1)..(25): SEQ ID NO: 3405; WAN024CKR_at; Start 206; Stop 230
gaatcggtatgggaagttgctcatc

SEQ ID NO: 122551 - DNA, 25 bp, Artificial
  probe
  misc_feature (1)..(25): SEQ ID NO: 3405; WAN024CKR_at; Start 196; Stop 220
gaccttcttggaatcggtatgggaa

SEQ ID NO: 122552 - DNA, 25 bp, Artificial
  probe
  misc_feature (1)..(25): SEQ ID NO: 3405; WAN024CKR_at; Start 124; Stop 148
ggttctcaaattatatcggacatca

SEQ ID NO: 122553 - DNA, 25 bp, Artificial
  probe
  misc_feature (1)..(25): SEQ ID NO: 3405; WAN024CKR_at; Start 190; Stop 214
gatagcgaccttcttggaatcggta

SEQ ID NO: 122554 - DNA, 25 bp, Artificial
  probe
  misc_feature (1)..(25): SEQ ID NO: 3405; WAN024CKR_at; Start 120; Stop 144
gaaaggttctcaaattatatcggac

SEQ ID NO: 122555 - DNA, 25 bp, Artificial
  probe
  misc_feature (1)..(25): SEQ ID NO: 3405; WAN024CKR_at; Start 92; Stop 116
tgtggagtattacaacagatacaag

SEQ ID NO: 122556 - DNA, 25 bp, Artificial
  probe
  misc_feature (1)..(25): SEQ ID NO: 3405; WAN024CKR_at; Start 209; Stop 233
tcggtatgggaagttgctcatcata

SEQ ID NO: 122557 - DNA, 25 bp, Artificial
  probe
  misc_feature (1)..(25): SEQ ID NO: 3405; WAN024CKR_at; Start 128; Stop 152
ctcaaattatatcggacatcatcag

SEQ ID NO: 122558 - DNA, 25 bp, Artificial
  probe
  misc_feature (1)..(25): SEQ ID NO: 3405; WAN024CKR_at; Start 21; Stop 45
gattagtattgacctaggtggtaca

SEQ ID NO: 122559 - DNA, 25 bp, Artificial
  probe
  misc_feature (1)..(25): SEQ ID NO: 3405; WAN024CKR_at; Start 201; Stop 225
tcttggaatcggtatgggaagttgc

SEQ ID NO: 122560 - DNA, 25 bp, Artificial
  probe
  misc_feature (1)..(25): SEQ ID NO: 3405; WAN024CKR_at; Start 221; Stop 245
gttgctcatcatactttccttgtaa

SEQ ID NO: 122561 - DNA, 25 bp, Artificial
  probe
  misc_feature (1)..(25): SEQ ID NO: 4121; WAN024CKS_at; Start 1286; Stop 1310
agatttgtccaggtgtttataaagg

SEQ ID NO: 122562 - DNA, 25 bp, Artificial
  probe
  misc_feature (1)..(25): SEQ ID NO: 4121; WAN024CKS_at; Start 544; Stop 568
aaatcaggtattagttgctatgagg

SEQ ID NO: 122563 - DNA, 25 bp, Artificial
  probe
  misc_feature (1)..(25): SEQ ID NO: 4121; WAN024CKS_at; Start 259; Stop 283
tcttatcgttttctatgctcaccta

SEQ ID NO: 122564 - DNA, 25 bp, Artificial
  probe
  misc_feature (1)..(25): SEQ ID NO: 4121; WAN024CKS_at; Start 946; Stop 970
ctaagcctctatgaatactgtttgc

SEQ ID NO: 122565 - DNA, 25 bp, Artificial
  probe
  misc_feature (1)..(25): SEQ ID NO: 4121; WAN024CKS_at; Start 304; Stop 328
aacacgaagacattgagaagtagcc

SEQ ID NO: 122566 - DNA, 25 bp, Artificial
  probe
  misc_feature (1)..(25): SEQ ID NO: 4121; WAN024CKS_at; Start 612; Stop 636
catgatggaacccaatcgagccgat

SEQ ID NO: 122567 - DNA, 25 bp, Artificial
  probe
  misc_feature (1)..(25): SEQ ID NO: 4121; WAN024CKS_at; Start 326; Stop 350
gccaaattgaatataaatatgagcg

SEQ ID NO: 122568 - DNA, 25 bp, Artificial
  probe
  misc_feature (1)..(25): SEQ ID NO: 4121; WAN024CKS_at; Start 108; Stop 132
aaggcgagcgtttggtatttcagaa

SEQ ID NO: 122569 - DNA, 25 bp, Artificial
  probe
  misc_feature (1)..(25): SEQ ID NO: 4121; WAN024CKS_at; Start 1224; Stop 1248
tgggtttcggaatctaacagtagag

SEQ ID NO: 122570 - DNA, 25 bp, Artificial
  probe
  misc_feature (1)..(25): SEQ ID NO: 4121; WAN024CKS_at; Start 401; Stop 425
ccttcaatactttaacagctaatgg

SEQ ID NO: 122571 - DNA, 25 bp, Artificial
  probe
  misc_feature (1)..(25): SEQ ID NO: 4121; WAN024CKS_at; Start 559; Stop 583
tgctatgaggtaagtaattgtgaat

SEQ ID NO: 122572 - DNA, 25 bp, Artificial
  probe
  misc_feature (1)..(25): SEQ ID NO: 4121; WAN024CKS_at; Start 207; Stop 231
cgaatatgcatgtagaattagagag

SEQ ID NO: 122573 - DNA, 25 bp, Artificial
  probe
  misc_feature (1)..(25): SEQ ID NO: 4121; WAN024CKS_at; Start 601; Stop 625
tataatgtattcatgatggaaccca

SEQ ID NO: 122574 - DNA, 25 bp, Artificial
  probe
  misc_feature (1)..(25): SEQ ID NO: 4121; WAN024CKS_at; Start 1357; Stop 1381
gaatatttaaaaactactgatgagg

SEQ ID NO: 122575 - DNA, 25 bp, Artificial
  probe
  misc_feature (1)..(25): SEQ ID NO: 4121; WAN024CKS_at; Start 378; Stop 402
tagagcggttgatggctttgtttcc

SEQ ID NO: 122576 - DNA, 25 bp, Artificial
  probe
  misc_feature (1)..(25): SEQ ID NO: 4121; WAN024CKS_at; Start 47; Stop 71
gaaataaaactactcaaattctgga

SEQ ID NO: 122577 - DNA, 25 bp, Artificial
  probe
  misc_feature (1)..(25): SEQ ID NO: 4121; WAN024CKS_at; Start 1246; Stop 1270
gagtattttggaattattgggacag

SEQ ID NO: 122578 - DNA, 25 bp, Artificial
  probe
  misc_feature (1)..(25): SEQ ID NO: 4121; WAN024CKS_at; Start 1196; Stop 1220
gaatcacattgtatgctagaaatag

SEQ ID NO: 122579 - DNA, 25 bp, Artificial
  probe
  misc_feature (1)..(25): SEQ ID NO: 4121; WAN024CKS_at; Start 1042; Stop 1066
tatgctgatataaaagacttgttca

SEQ ID NO: 122580 - DNA, 25 bp, Artificial
  probe
  misc_feature (1)..(25): SEQ ID NO: 4121; WAN024CKS_at; Start 288; Stop 312
tacagatgattttcttaacacgaag

SEQ ID NO: 122581 - DNA, 25 bp, Artificial
  probe
  misc_feature (1)..(25): SEQ ID NO: 4121; WAN024CKS_at; Start 272; Stop 296
tatgctcacctataattacagatga

SEQ ID NO: 122582 - DNA, 25 bp, Artificial
  probe
  misc_feature (1)..(25): SEQ ID NO: 4121; WAN024CKS_at; Start 499; Stop 523
tcaaccggatattatgaaacaagat

SEQ ID NO: 122583 - DNA, 25 bp, Artificial
  probe
  misc_feature (1)..(25): SEQ ID NO: 4121; WAN024CKS_at; Start 820; Stop 844
gatcaaatgggattagaattgacaa

SEQ ID NO: 122584 - DNA, 25 bp, Artificial
  probe
  misc_feature (1)..(25): SEQ ID NO: 4121; WAN024CKS_at; Start 918; Stop 942
taaatttagaaattctcacggagct

SEQ ID NO: 122585 - DNA, 25 bp, Artificial
  probe
  misc_feature (1)..(25): SEQ ID NO: 4121; WAN024CKS_at; Start 359; Stop 383
cgaaaagttcgataggcgatagagc

SEQ ID NO: 122586 - DNA, 25 bp, Artificial
  probe
  misc_feature (1)..(25): SEQ ID NO: 4121; WAN024CKS_at; Start 871; Stop 895
cctaatcatttgagaaagttgaaaa

SEQ ID NO: 122587 - DNA, 25 bp, Artificial
  probe
  misc_feature (1)..(25): SEQ ID NO: 4121; WAN024CKS_at; Start 416; Stop 440
cagctaatggtatgtctgctattaa

SEQ ID NO: 122588 - DNA, 25 bp, Artificial
  probe
  misc_feature (1)..(25): SEQ ID NO: 4121; WAN024CKS_at; Start 931; Stop 955
tctcacggagctaatctaagcctct

SEQ ID NO: 122589 - DNA, 25 bp, Artificial
  probe
  misc_feature (1)..(25): SEQ ID NO: 4121; WAN024CKS_at; Start 429; Stop 453
gtctgctattaaactatgtcttgag

SEQ ID NO: 122590 - DNA, 25 bp, Artificial
  probe
  misc_feature (1)..(25): SEQ ID NO: 4121; WAN024CKS_at; Start 93; Stop 117
gaaacttaatgatataaggcgagcg

SEQ ID NO: 122591 - DNA, 25 bp, Artificial
  probe
  misc_feature (1)..(25): SEQ ID NO: 4121; WAN024CKS_at; Start 1088; Stop 1112
tcatccatgaagagggagtaccttt

SEQ ID NO: 122592 - DNA, 25 bp, Artificial
  probe
  misc_feature (1)..(25): SEQ ID NO: 4121; WAN024CKS_at; Start 1182; Stop 1206
ttacaaacagcttggaatcacattg

SEQ ID NO: 122593 - DNA, 25 bp, Artificial
  probe
  misc_feature (1)..(25): SEQ ID NO: 4121; WAN024CKS_at; Start 1057; Stop 1081
gacttgttcatggaaaattctgata

SEQ ID NO: 122594 - DNA, 25 bp, Artificial
  probe
  misc_feature (1)..(25): SEQ ID NO: 4121; WAN024CKS_at; Start 627; Stop 651
tcgagccgatttaacattacaaaaa

SEQ ID NO: 122595 - DNA, 25 bp, Artificial
  probe
  misc_feature (1)..(25): SEQ ID NO: 1789; WAN024CKT_at; Start 402; Stop 426
tgttggaataagagtaacggagcca

SEQ ID NO: 122596 - DNA, 25 bp, Artificial
  probe
  misc_feature (1)..(25): SEQ ID NO: 1789; WAN024CKT_at; Start 739; Stop 763
gaaccaggtagtgcaattacttcat

SEQ ID NO: 122597 - DNA, 25 bp, Artificial
  probe
  misc_feature (1)..(25): SEQ ID NO: 1789; WAN024CKT_at; Start 928; Stop 952
ggtaatacctgttatgaacatgaca

SEQ ID NO: 122598 - DNA, 25 bp, Artificial
  probe
  misc_feature (1)..(25): SEQ ID NO: 1789; WAN024CKT_at; Start 971; Stop 995
cgcttccaaggttaactcaaaatag

SEQ ID NO: 122599 - DNA, 25 bp, Artificial
  probe
  misc_feature (1)..(25): SEQ ID NO: 1789; WAN024CKT_at; Start 612; Stop 636
tagagaaataaatcttggaggcggt

SEQ ID NO: 122600 - DNA, 25 bp, Artificial
  probe
  misc_feature (1)..(25): SEQ ID NO: 1789; WAN024CKT_at; Start 900; Stop 924
taaagagcgttatagtactattctc

SEQ ID NO: 122601 - DNA, 25 bp, Artificial
  probe
  misc_feature (1)..(25): SEQ ID NO: 1789; WAN024CKT_at; Start 166; Stop 190
gccgttaaagcaaattcaaatgaga

SEQ ID NO: 122602 - DNA, 25 bp, Artificial
  probe
  misc_feature (1)..(25): SEQ ID NO: 1789; WAN024CKT_at; Start 1051; Stop 1075
catcgtaatgattttatgcgggagg

SEQ ID NO: 122603 - DNA, 25 bp, Artificial
  probe
  misc_feature (1)..(25): SEQ ID NO: 1789; WAN024CKT_at; Start 297; Stop 321
tggtcccgcattttcttatgaaact

SEQ ID NO: 122604 - DNA, 25 bp, Artificial
  probe
  misc_feature (1)..(25): SEQ ID NO: 1789; WAN024CKT_at; Start 793; Stop 817
aatgttagtgaggtgaatgagcagc

SEQ ID NO: 122605 - DNA, 25 bp, Artificial
  probe
  misc_feature (1)..(25): SEQ ID NO: 1789; WAN024CKT_at; Start 512; Stop 536
cacgactgcattttcattttggaga

SEQ ID NO: 122606 - DNA, 25 bp, Artificial
  probe
  misc_feature (1)..(25): SEQ ID NO: 1789; WAN024CKT_at; Start 465; Stop 489
tatttgcagtgataattggactagt

SEQ ID NO: 122607 - DNA, 25 bp, Artificial
  probe
  misc_feature (1)..(25): SEQ ID NO: 1789; WAN024CKT_at; Start 1012; Stop 1036
cctgtaggagcttatataaaaagca

SEQ ID NO: 122608 - DNA, 25 bp, Artificial
  probe
  misc_feature (1)..(25): SEQ ID NO: 1789; WAN024CKT_at; Start 1065; Stop 1089
tatgcgggaggtatatttgtggaca

SEQ ID NO: 122609 - DNA, 25 bp, Artificial
  probe
  misc_feature (1)..(25): SEQ ID NO: 1789; WAN024CKT_at; Start 884; Stop 908
cgttaaattcaagtagtaaagagcg

SEQ ID NO: 122610 - DNA, 25 bp, Artificial
  probe
  misc_feature (1)..(25): SEQ ID NO: 1789; WAN024CKT_at; Start 19; Stop 43
caacaagttgttttggaatcattac

SEQ ID NO: 122611 - DNA, 25 bp, Artificial
  probe
  misc_feature (1)..(25): SEQ ID NO: 1789; WAN024CKT_at; Start 998; Stop 1022
gtatagtgttttttcctgtaggagc

SEQ ID NO: 122612 - DNA, 25 bp, Artificial
  probe
  misc_feature (1)..(25): SEQ ID NO: 1789; WAN024CKT_at; Start 92; Stop 116
ttggcttgctggaaactgtacttga

SEQ ID NO: 122613 - DNA, 25 bp, Artificial
  probe
  misc_feature (1)..(25): SEQ ID NO: 1789; WAN024CKT_at; Start 497; Stop 521
aaaatcctttaattacacgactgca

SEQ ID NO: 122614 - DNA, 25 bp, Artificial
  probe
  misc_feature (1)..(25): SEQ ID NO: 1789; WAN024CKT_at; Start 419; Stop 443
cggagccagatgaacttaataatcg

SEQ ID NO: 122615 - DNA, 25 bp, Artificial
  probe
  misc_feature (1)..(25): SEQ ID NO: 1789; WAN024CKT_at; Start 766; Stop 790
tctgcctatatgattactagcccag

SEQ ID NO: 122616 - DNA, 25 bp, Artificial
  probe
  misc_feature (1)..(25): SEQ ID NO: 1789; WAN024CKT_at; Start 283; Stop 307
caaatttctgttaatggtcccgcat

SEQ ID NO: 122617 - DNA, 25 bp, Artificial
  probe
  misc_feature (1)..(25): SEQ ID NO: 1789; WAN024CKT_at; Start 708; Stop 732
cgatattgatagtactgtgactaca

SEQ ID NO: 122618 - DNA, 25 bp, Artificial
  probe
  misc_feature (1)..(25): SEQ ID NO: 1789; WAN024CKT_at; Start 213; Stop 237
taaaattgatggagttgatgtggcg

SEQ ID NO: 122619 - DNA, 25 bp, Artificial
  probe
  misc_feature (1)..(25): SEQ ID NO: 1789; WAN024CKT_at; Start 949; Stop 973
gacaagtataaaatgaaagtttcgc

SEQ ID NO: 122620 - DNA, 25 bp, Artificial
  probe
  misc_feature (1)..(25): SEQ ID NO: 1789; WAN024CKT_at; Start 849; Stop 873
caatacattatggtttgttccgcat

SEQ ID NO: 122621 - DNA, 25 bp, Artificial
  probe
  misc_feature (1)..(25): SEQ ID NO: 1789; WAN024CKT_at; Start 723; Stop 747
tgtgactacaataatagaaccaggt

SEQ ID NO: 122622 - DNA, 25 bp, Artificial
  probe
  misc_feature (1)..(25): SEQ ID NO: 1789; WAN024CKT_at; Start 811; Stop 835
gagcagcaggttatcacgttagaca

SEQ ID NO: 122623 - DNA, 25 bp, Artificial
  probe
  misc_feature (1)..(25): SEQ ID NO: 1789; WAN024CKT_at; Start 827; Stop 851
cgttagacacatcaatatacaccaa

SEQ ID NO: 122624 - DNA, 25 bp, Artificial
  probe
  misc_feature (1)..(25): SEQ ID NO: 1789; WAN024CKT_at; Start 66; Stop 90
catttcgccttgtgtagtctatgat

SEQ ID NO: 122625 - DNA, 25 bp, Artificial
  probe
  misc_feature (1)..(25): SEQ ID NO: 1789; WAN024CKT_at; Start 780; Stop 804
tactagcccagttaatgttagtgag

SEQ ID NO: 122626 - DNA, 25 bp, Artificial
  probe
  misc_feature (1)..(25): SEQ ID NO: 1789; WAN024CKT_at; Start 229; Stop 253
gatgtggcgtcattatctgaattag

SEQ ID NO: 122627 - DNA, 25 bp, Artificial
  probe
  misc_feature (1)..(25): SEQ ID NO: 1789; WAN024CKT_at; Start 50; Stop 74
ttttgaatgggaacttcatttcgcc

SEQ ID NO: 122628 - DNA, 25 bp, Artificial
  probe
  misc_feature (1)..(25): SEQ ID NO: 1789; WAN024CKT_at; Start 382; Stop 406
caattttccccaaaagaatctgttg

SEQ ID NO: 122629 - DNA, 25 bp, Artificial
  probe
  misc_feature (1)..(25): SEQ ID NO: 2312; WAN024CKU_at; Start 179; Stop 203
tatttgttgaagaggtagttccgca

SEQ ID NO: 122630 - DNA, 25 bp, Artificial
  probe
  misc_feature (1)..(25): SEQ ID NO: 2312; WAN024CKU_at; Start 230; Stop 254
tacttcttattttaccagctacggc

SEQ ID NO: 122631 - DNA, 25 bp, Artificial
  probe
  misc_feature (1)..(25): SEQ ID NO: 2312; WAN024CKU_at; Start 485; Stop 509
caatgttacaaccacagtcgttagt

SEQ ID NO: 122632 - DNA, 25 bp, Artificial
  probe
  misc_feature (1)..(25): SEQ ID NO: 2312; WAN024CKU_at; Start 253; Stop 277
gcaaatgtgattggcaaaattgcta

SEQ ID NO: 122633 - DNA, 25 bp, Artificial
  probe
  misc_feature (1)..(25): SEQ ID NO: 2312; WAN024CKU_at; Start 364; Stop 388
tgggacaatcacatagttcaaagaa

SEQ ID NO: 122634 - DNA, 25 bp, Artificial
  probe
  misc_feature (1)..(25): SEQ ID NO: 2312; WAN024CKU_at; Start 373; Stop 397
cacatagttcaaagaaatgtatcaa

SEQ ID NO: 122635 - DNA, 25 bp, Artificial
  probe
  misc_feature (1)..(25): SEQ ID NO: 2312; WAN024CKU_at; Start 491; Stop 515
tacaaccacagtcgttagtaaaaga

SEQ ID NO: 122636 - DNA, 25 bp, Artificial
  probe
  misc_feature (1)..(25): SEQ ID NO: 2312; WAN024CKU_at; Start 237; Stop 261
tattttaccagctacggcaaatgtg

SEQ ID NO: 122637 - DNA, 25 bp, Artificial
  probe
  misc_feature (1)..(25): SEQ ID NO: 2312; WAN024CKU_at; Start 23; Stop 47
tattggttactggttcggtaggtgc

SEQ ID NO: 122638 - DNA, 25 bp, Artificial
  probe
  misc_feature (1)..(25): SEQ ID NO: 2312; WAN024CKU_at; Start 399; Stop 423
tctaaaggagttgggacatatattt

SEQ ID NO: 122639 - DNA, 25 bp, Artificial
  probe
  misc_feature (1)..(25): SEQ ID NO: 2312; WAN024CKU_at; Start 210; Stop 234
tctgccatatgaatctgacttactt

SEQ ID NO: 122640 - DNA, 25 bp, Artificial
  probe
  misc_feature (1)..(25): SEQ ID NO: 2312; WAN024CKU_at; Start 96; Stop 120
taaagtgatactttctgaaaattct

SEQ ID NO: 122641 - DNA, 25 bp, Artificial
  probe
  misc_feature (1)..(25): SEQ ID NO: 2312; WAN024CKU_at; Start 292; Stop 316
gatttagttacagcaactgttttaa

SEQ ID NO: 122642 - DNA, 25 bp, Artificial
  probe
  misc_feature (1)..(25): SEQ ID NO: 2312; WAN024CKU_at; Start 183; Stop 207
tgttgaagaggtagttccgcacgtt

SEQ ID NO: 122643 - DNA, 25 bp, Artificial
  probe
  misc_feature (1)..(25): SEQ ID NO: 2312; WAN024CKU_at; Start 37; Stop 61
tcggtaggtgccagtaatgtagata

SEQ ID NO: 122644 - DNA, 25 bp, Artificial
  probe
  misc_feature (1)..(25): SEQ ID NO: 2312; WAN024CKU_at; Start 499; Stop 523
cagtcgttagtaaaagaacttatca

SEQ ID NO: 122645 - DNA, 25 bp, Artificial
  probe
  misc_feature (1)..(25): SEQ ID NO: 2312; WAN024CKU_at; Start 82; Stop 106
aaattctataatgttaaagtgatac

SEQ ID NO: 122646 - DNA, 25 bp, Artificial
  probe
  misc_feature (1)..(25): SEQ ID NO: 2312; WAN024CKU_at; Start 351; Stop 375
gaactctactatgtgggacaatcac

SEQ ID NO: 122647 - DNA, 25 bp, Artificial
  probe
  misc_feature (1)..(25): SEQ ID NO: 2312; WAN024CKU_at; Start 198; Stop 222
tccgcacgtttttctgccatatgaa

SEQ ID NO: 122648 - DNA, 25 bp, Artificial
  probe
  misc_feature (1)..(25): SEQ ID NO: 2312; WAN024CKU_at; Start 540; Stop 564
ccttgaagagggacatctaactaat

SEQ ID NO: 122649 - DNA, 25 bp, Artificial
  probe
  misc_feature (1)..(25): SEQ ID NO: 2312; WAN024CKU_at; Start 286; Stop 310
gctgatgatttagttacagcaactg

SEQ ID NO: 122650 - DNA, 25 bp, Artificial
  probe
  misc_feature (1)..(25): SEQ ID NO: 2312; WAN024CKU_at; Start 392; Stop 416
tatcaattctaaaggagttgggaca

SEQ ID NO: 122651 - DNA, 25 bp, Artificial
  probe
  misc_feature (1)..(25): SEQ ID NO: 2312; WAN024CKU_at; Start 481; Stop 505
tgttcaatgttacaaccacagtcgt

SEQ ID NO: 122652 - DNA, 25 bp, Artificial
  probe
  misc_feature (1)..(25): SEQ ID NO: 2312; WAN024CKU_at; Start 345; Stop 369
caatatgaactctactatgtgggac

SEQ ID NO: 122653 - DNA, 25 bp, Artificial
  probe
  misc_feature (1)..(25): SEQ ID NO: 2312; WAN024CKU_at; Start 437; Stop 461
aaaaaacatatgaggtaggattgcg

SEQ ID NO: 122654 - DNA, 25 bp, Artificial
  probe
  misc_feature (1)..(25): SEQ ID NO: 2312; WAN024CKU_at; Start 443; Stop 467
catatgaggtaggattgcgtaaagc

SEQ ID NO: 122655 - DNA, 25 bp, Artificial
  probe
  misc_feature (1)..(25): SEQ ID NO: 2312; WAN024CKU_at; Start 245; Stop 269
cagctacggcaaatgtgattggcaa

SEQ ID NO: 122656 - DNA, 25 bp, Artificial
  probe
  misc_feature (1)..(25): SEQ ID NO: 2312; WAN024CKU_at; Start 192; Stop 216
ggtagttccgcacgtttttctgcca

SEQ ID NO: 122657 - DNA, 25 bp, Artificial
  probe
  misc_feature (1)..(25): SEQ ID NO: 2312; WAN024CKU_at; Start 43; Stop 67
ggtgccagtaatgtagatacatact

SEQ ID NO: 122658 - DNA, 25 bp, Artificial
  probe
  misc_feature (1)..(25): SEQ ID NO: 2312; WAN024CKU_at; Start 267; Stop 291
caaaattgctaatggtattgctgat

SEQ ID NO: 122659 - DNA, 25 bp, Artificial
  probe
  misc_feature (1)..(25): SEQ ID NO: 2312; WAN024CKU_at; Start 527; Stop 551
tagaaaatattgtccttgaagaggg

SEQ ID NO: 122660 - DNA, 25 bp, Artificial
  probe
  misc_feature (1)..(25): SEQ ID NO: 2312; WAN024CKU_at; Start 336; Stop 360
tttttgtcccaatatgaactctact

SEQ ID NO: 122661 - DNA, 25 bp, Artificial
  probe
  misc_feature (1)..(25): SEQ ID NO: 2312; WAN024CKU_at; Start 466; Stop 490
gcaatagattcaacatgttcaatgt

SEQ ID NO: 122662 - DNA, 25 bp, Artificial
  probe
  misc_feature (1)..(25): SEQ ID NO: 2312; WAN024CKU_at; Start 458; Stop 482
tgcgtaaagcaatagattcaacatg

SEQ ID NO: 122663 - DNA, 25 bp, Artificial
  probe
  misc_feature (1)..(25): SEQ ID NO: 4178; WAN024CKV_at; Start 550; Stop 574
cacctcaatttgagtacaatcgaag

SEQ ID NO: 122664 - DNA, 25 bp, Artificial
  probe
  misc_feature (1)..(25): SEQ ID NO: 4178; WAN024CKV_at; Start 308; Stop 332
aagctcaccgcctatctttagcaga

SEQ ID NO: 122665 - DNA, 25 bp, Artificial
  probe
  misc_feature (1)..(25): SEQ ID NO: 4178; WAN024CKV_at; Start 156; Stop 180
taagaagttaaaagtcagtatggat

SEQ ID NO: 122666 - DNA, 25 bp, Artificial
  probe
  misc_feature (1)..(25): SEQ ID NO: 4178; WAN024CKV_at; Start 838; Stop 862
gagcattacattgcagatataacag

SEQ ID NO: 122667 - DNA, 25 bp, Artificial
  probe
  misc_feature (1)..(25): SEQ ID NO: 4178; WAN024CKV_at; Start 391; Stop 415
gaagatgcgattgtacgattagagg

SEQ ID NO: 122668 - DNA, 25 bp, Artificial
  probe
  misc_feature (1)..(25): SEQ ID NO: 4178; WAN024CKV_at; Start 213; Stop 237
tgaggagttatcagaatttaagaaa

SEQ ID NO: 122669 - DNA, 25 bp, Artificial
  probe
  misc_feature (1)..(25): SEQ ID NO: 4178; WAN024CKV_at; Start 252; Stop 276
tattacaaatcgcaattatgagtct

SEQ ID NO: 122670 - DNA, 25 bp, Artificial
  probe
  misc_feature (1)..(25): SEQ ID NO: 4178; WAN024CKV_at; Start 603; Stop 627
caacgtttgtcgttatctatggtta

SEQ ID NO: 122671 - DNA, 25 bp, Artificial
  probe
  misc_feature (1)..(25): SEQ ID NO: 4178; WAN024CKV_at; Start 295; Stop 319
ttggagaatgtaaaagctcaccgcc

SEQ ID NO: 122672 - DNA, 25 bp, Artificial
  probe
  misc_feature (1)..(25): SEQ ID NO: 4178; WAN024CKV_at; Start 583; Stop 607
ctatctattaagtttaactacaacg

SEQ ID NO: 122673 - DNA, 25 bp, Artificial
  probe
  misc_feature (1)..(25): SEQ ID NO: 4178; WAN024CKV_at; Start 379; Stop 403
tacggacagaaagaagatgcgattg

SEQ ID NO: 122674 - DNA, 25 bp, Artificial
  probe
  misc_feature (1)..(25): SEQ ID NO: 4178; WAN024CKV_at; Start 375; Stop 399
tttttacggacagaaagaagatgcg

SEQ ID NO: 122675 - DNA, 25 bp, Artificial
  probe
  misc_feature (1)..(25): SEQ ID NO: 4178; WAN024CKV_at; Start 136; Stop 160
gatttcctgaatgcccttgctaaga

SEQ ID NO: 122676 - DNA, 25 bp, Artificial
  probe
  misc_feature (1)..(25): SEQ ID NO: 4178; WAN024CKV_at; Start 646; Stop 670
gctattactaaaattacagctacta

SEQ ID NO: 122677 - DNA, 25 bp, Artificial
  probe
  misc_feature (1)..(25): SEQ ID NO: 4178; WAN024CKV_at; Start 679; Stop 703
tgtaaggcttacagaacgaattatc

SEQ ID NO: 122678 - DNA, 25 bp, Artificial
  probe
  misc_feature (1)..(25): SEQ ID NO: 4178; WAN024CKV_at; Start 262; Stop 286
cgcaattatgagtctttgaaatata

SEQ ID NO: 122679 - DNA, 25 bp, Artificial
  probe
  misc_feature (1)..(25): SEQ ID NO: 4178; WAN024CKV_at; Start 781; Stop 805
gagacggcatattttctatacaaac

SEQ ID NO: 122680 - DNA, 25 bp, Artificial
  probe
  misc_feature (1)..(25): SEQ ID NO: 4178; WAN024CKV_at; Start 126; Stop 150
ccctggagcggatttcctgaatgcc

SEQ ID NO: 122681 - DNA, 25 bp, Artificial
  probe
  misc_feature (1)..(25): SEQ ID NO: 4178; WAN024CKV_at; Start 200; Stop 224
ttgtagagaaagttgaggagttatc

SEQ ID NO: 122682 - DNA, 25 bp, Artificial
  probe
  misc_feature (1)..(25): SEQ ID NO: 4178; WAN024CKV_at; Start 703; Stop 727
cttttggctgatttgtacttattga

SEQ ID NO: 122683 - DNA, 25 bp, Artificial
  probe
  misc_feature (1)..(25): SEQ ID NO: 4178; WAN024CKV_at; Start 559; Stop 583
ttgagtacaatcgaagagttagaac

SEQ ID NO: 122684 - DNA, 25 bp, Artificial
  probe
  misc_feature (1)..(25): SEQ ID NO: 4178; WAN024CKV_at; Start 447; Stop 471
gaactatctccaagtttcaaacacc

SEQ ID NO: 122685 - DNA, 25 bp, Artificial
  probe
  misc_feature (1)..(25): SEQ ID NO: 4178; WAN024CKV_at; Start 688; Stop 712
tacagaacgaattatcttttggctg

SEQ ID NO: 122686 - DNA, 25 bp, Artificial
  probe
  misc_feature (1)..(25): SEQ ID NO: 4178; WAN024CKV_at; Start 533; Stop 557
tagagtatcaagtaaatcacctcaa

SEQ ID NO: 122687 - DNA, 25 bp, Artificial
  probe
  misc_feature (1)..(25): SEQ ID NO: 4178; WAN024CKV_at; Start 827; Stop 851
ctctgaaagttgagcattacattgc

SEQ ID NO: 122688 - DNA, 25 bp, Artificial
  probe
  misc_feature (1)..(25): SEQ ID NO: 4178; WAN024CKV_at; Start 807; Stop 831
tgaggagaacatgtcaatgactctg

SEQ ID NO: 122689 - DNA, 25 bp, Artificial
  probe
  misc_feature (1)..(25): SEQ ID NO: 4178; WAN024CKV_at; Start 322; Stop 346
tctttagcagataaaatctacatgg

SEQ ID NO: 122690 - DNA, 25 bp, Artificial
  probe
  misc_feature (1)..(25): SEQ ID NO: 4178; WAN024CKV_at; Start 518; Stop 542
aaattcgtgaaaaactagagtatca

SEQ ID NO: 122691 - DNA, 25 bp, Artificial
  probe
  misc_feature (1)..(25): SEQ ID NO: 4178; WAN024CKV_at; Start 416; Stop 440
gggtattatcacagttaagtgtatc

SEQ ID NO: 122692 - DNA, 25 bp, Artificial
  probe
  misc_feature (1)..(25): SEQ ID NO: 4178; WAN024CKV_at; Start 790; Stop 814
tattttctatacaaacttgaggaga

SEQ ID NO: 122693 - DNA, 25 bp, Artificial
  probe
  misc_feature (1)..(25): SEQ ID NO: 4178; WAN024CKV_at; Start 490; Stop 514
gatattggagatttaggtcgtttca

SEQ ID NO: 122694 - DNA, 25 bp, Artificial
  probe
  misc_feature (1)..(25): SEQ ID NO: 4178; WAN024CKV_at; Start 662; Stop 686
cagctactataaaacaatgtaaggc

SEQ ID NO: 122695 - DNA, 25 bp, Artificial
  probe
  misc_feature (1)..(25): SEQ ID NO: 4178; WAN024CKV_at; Start 503; Stop 527
taggtcgtttcaataaaattcgtga

SEQ ID NO: 122696 - DNA, 25 bp, Artificial
  probe
  misc_feature (1)..(25): SEQ ID NO: 4178; WAN024CKV_at; Start 816; Stop 840
catgtcaatgactctgaaagttgag

SEQ ID NO: 122697 - DNA, 25 bp, Artificial
  probe
  misc_feature (1)..(25): SEQ ID NO: 4188; WAN024CKW_at; Start 213; Stop 237
caatgagttatcagagtttaagaag

SEQ ID NO: 122698 - DNA, 25 bp, Artificial
  probe
  misc_feature (1)..(25): SEQ ID NO: 4188; WAN024CKW_at; Start 375; Stop 399
tttttatggacagaaagaagaggca

SEQ ID NO: 122699 - DNA, 25 bp, Artificial
  probe
  misc_feature (1)..(25): SEQ ID NO: 4188; WAN024CKW_at; Start 308; Stop 332
aagcccatcgcttatctctagcaga

SEQ ID NO: 122700 - DNA, 25 bp, Artificial
  probe
  misc_feature (1)..(25): SEQ ID NO: 4188; WAN024CKW_at; Start 391; Stop 415
gaagaggcaattacacgattagaga

SEQ ID NO: 122701 - DNA, 25 bp, Artificial
  probe
  misc_feature (1)..(25): SEQ ID NO: 4188; WAN024CKW_at; Start 685; Stop 709
gagtacaggacaacttatctattag

SEQ ID NO: 122702 - DNA, 25 bp, Artificial
  probe
  misc_feature (1)..(25): SEQ ID NO: 4188; WAN024CKW_at; Start 517; Stop 541
gagattagagacaagctagagcatc

SEQ ID NO: 122703 - DNA, 25 bp, Artificial
  probe
  misc_feature (1)..(25): SEQ ID NO: 4188; WAN024CKW_at; Start 541; Stop 565
caagtgaatcagcttaatttaaaca

SEQ ID NO: 122704 - DNA, 25 bp, Artificial
  probe
  misc_feature (1)..(25): SEQ ID NO: 4188; WAN024CKW_at; Start 419; Stop 443
tgctacctcagttaaatgtatctga

SEQ ID NO: 122705 - DNA, 25 bp, Artificial
  probe
  misc_feature (1)..(25): SEQ ID NO: 4188; WAN024CKW_at; Start 781; Stop 805
gagactgctcattttctctacaaac

SEQ ID NO: 122706 - DNA, 25 bp, Artificial
  probe
  misc_feature (1)..(25): SEQ ID NO: 4188; WAN024CKW_at; Start 136; Stop 160
gattttttacatgcccttgctaaga

SEQ ID NO: 122707 - DNA, 25 bp, Artificial
  probe
  misc_feature (1)..(25): SEQ ID NO: 4188; WAN024CKW_at; Start 296; Stop 320
tggaaaatgtaaaagcccatcgctt

SEQ ID NO: 122708 - DNA, 25 bp, Artificial
  probe
  misc_feature (1)..(25): SEQ ID NO: 4188; WAN024CKW_at; Start 646; Stop 670
gctattacgaaaatcacagctacga

SEQ ID NO: 122709 - DNA, 25 bp, Artificial
  probe
  misc_feature (1)..(25): SEQ ID NO: 4188; WAN024CKW_at; Start 383; Stop 407
gacagaaagaagaggcaattacacg

SEQ ID NO: 122710 - DNA, 25 bp, Artificial
  probe
  misc_feature (1)..(25): SEQ ID NO: 4188; WAN024CKW_at; Start 196; Stop 220
caggttgtagaggaagtcaatgagt

SEQ ID NO: 122711 - DNA, 25 bp, Artificial
  probe
  misc_feature (1)..(25): SEQ ID NO: 4188; WAN024CKW_at; Start 126; Stop 150
ccctggagcggattttttacatgcc

SEQ ID NO: 122712 - DNA, 25 bp, Artificial
  probe
  misc_feature (1)..(25): SEQ ID NO: 4188; WAN024CKW_at; Start 838; Stop 862
gaacattattttgcagatataacag

SEQ ID NO: 122713 - DNA, 25 bp, Artificial
  probe
  misc_feature (1)..(25): SEQ ID NO: 4188; WAN024CKW_at; Start 487; Stop 511
tatgatattgaagatttagaacgtt

SEQ ID NO: 122714 - DNA, 25 bp, Artificial
  probe
  misc_feature (1)..(25): SEQ ID NO: 4188; WAN024CKW_at; Start 451; Stop 475
taccttcaagtttcaaacactctat

SEQ ID NO: 122715 - DNA, 25 bp, Artificial
  probe
  misc_feature (1)..(25): SEQ ID NO: 4188; WAN024CKW_at; Start 830; Stop 854
tgaaagtcgaacattattttgcaga

SEQ ID NO: 122716 - DNA, 25 bp, Artificial
  probe
  misc_feature (1)..(25): SEQ ID NO: 4188; WAN024CKW_at; Start 660; Stop 684
cacagctacgataaagcaatgtaag

SEQ ID NO: 122717 - DNA, 25 bp, Artificial
  probe
  misc_feature (1)..(25): SEQ ID NO: 4188; WAN024CKW_at; Start 601; Stop 625
tataacgtttgtcgatacctatggt

SEQ ID NO: 122718 - DNA, 25 bp, Artificial
  probe
  misc_feature (1)..(25): SEQ ID NO: 4188; WAN024CKW_at; Start 322; Stop 346
tctctagcagataaattttacatgg

SEQ ID NO: 122719 - DNA, 25 bp, Artificial
  probe
  misc_feature (1)..(25): SEQ ID NO: 4188; WAN024CKW_at; Start 169; Stop 193
gttagtatggactacttttttgatg

SEQ ID NO: 122720 - DNA, 25 bp, Artificial
  probe
  misc_feature (1)..(25): SEQ ID NO: 4188; WAN024CKW_at; Start 693; Stop 717
gacaacttatctattagctgatttg

SEQ ID NO: 122721 - DNA, 25 bp, Artificial
  probe
  misc_feature (1)..(25): SEQ ID NO: 4188; WAN024CKW_at; Start 505; Stop 529
gaacgttttaatgagattagagaca

SEQ ID NO: 122722 - DNA, 25 bp, Artificial
  probe
  misc_feature (1)..(25): SEQ ID NO: 4188; WAN024CKW_at; Start 591; Stop 615
taagttcaattataacgtttgtcga

SEQ ID NO: 122723 - DNA, 25 bp, Artificial
  probe
  misc_feature (1)..(25): SEQ ID NO: 4188; WAN024CKW_at; Start 807; Stop 831
tgaggaaaacatgtcaatggctttg

SEQ ID NO: 122724 - DNA, 25 bp, Artificial
  probe
  misc_feature (1)..(25): SEQ ID NO: 4188; WAN024CKW_at; Start 528; Stop 552
caagctagagcatcaagtgaatcag

SEQ ID NO: 122725 - DNA, 25 bp, Artificial
  probe
  misc_feature (1)..(25): SEQ ID NO: 4188; WAN024CKW_at; Start 552; Stop 576
gcttaatttaaacacaattgaagag

SEQ ID NO: 122726 - DNA, 25 bp, Artificial
  probe
  misc_feature (1)..(25): SEQ ID NO: 4188; WAN024CKW_at; Start 675; Stop 699
gcaatgtaaggagtacaggacaact

SEQ ID NO: 122727 - DNA, 25 bp, Artificial
  probe
  misc_feature (1)..(25): SEQ ID NO: 4188; WAN024CKW_at; Start 255; Stop 279
cacaaatcgtaattatgaatcttta

SEQ ID NO: 122728 - DNA, 25 bp, Artificial
  probe
  misc_feature (1)..(25): SEQ ID NO: 4188; WAN024CKW_at; Start 789; Stop 813
tcattttctctacaaacttgaggaa

SEQ ID NO: 122729 - DNA, 25 bp, Artificial
  probe
  misc_feature (1)..(25): SEQ ID NO: 4188; WAN024CKW_at; Start 816; Stop 840
catgtcaatggctttgaaagtcgaa

SEQ ID NO: 122730 - DNA, 25 bp, Artificial
  probe
  misc_feature (1)..(25): SEQ ID NO: 4188; WAN024CKW_at; Start 404; Stop 428
cacgattagagaatatgctacctca

SEQ ID NO: 122731 - DNA, 25 bp, Artificial
  probe
  misc_feature (1)..(25): SEQ ID NO: 1408; WAN024CKX_at; Start 203; Stop 227
tatctacaagtaattcagcgagttc

SEQ ID NO: 122732 - DNA, 25 bp, Artificial
  probe
  misc_feature (1)..(25): SEQ ID NO: 1408; WAN024CKX_at; Start 319; Stop 343
gaatcagcaagtacatcggcttcga

SEQ ID NO: 122733 - DNA, 25 bp, Artificial
  probe
  misc_feature (1)..(25): SEQ ID NO: 1408; WAN024CKX_at; Start 1118; Stop 1142
tagttgaatctagcacgaccagtca

SEQ ID NO: 122734 - DNA, 25 bp, Artificial
  probe
  misc_feature (1)..(25): SEQ ID NO: 1408; WAN024CKX_at; Start 71; Stop 95
ctgcgggagctgtcataagtggaac

SEQ ID NO: 122735 - DNA, 25 bp, Artificial
  probe
  misc_feature (1)..(25): SEQ ID NO: 1408; WAN024CKX_at; Start 268; Stop 292
tctgagtcagcctcaaccagcgctt

SEQ ID NO: 122736 - DNA, 25 bp, Artificial
  probe
  misc_feature (1)..(25): SEQ ID NO: 1408; WAN024CKX_at; Start 765; Stop 789
taatatatcaagtatgcgtcctgga

SEQ ID NO: 122737 - DNA, 25 bp, Artificial
  probe
  misc_feature (1)..(25): SEQ ID NO: 1408; WAN024CKX_at; Start 1015; Stop 1039
tggactgtaccaattactggaacgg

SEQ ID NO: 122738 - DNA, 25 bp, Artificial
  probe
  misc_feature (1)..(25): SEQ ID NO: 1408; WAN024CKX_at; Start 494; Stop 518
gacgcaagcgttcagtggattccat

SEQ ID NO: 122739 - DNA, 25 bp, Artificial
  probe
  misc_feature (1)..(25): SEQ ID NO: 1408; WAN024CKX_at; Start 405; Stop 429
tgctaagaaggtcgaagaagatcgt

SEQ ID NO: 122740 - DNA, 25 bp, Artificial
  probe
  misc_feature (1)..(25): SEQ ID NO: 1408; WAN024CKX_at; Start 528; Stop 552
gctggcttctataaaaaatgctgct

SEQ ID NO: 122741 - DNA, 25 bp, Artificial
  probe
  misc_feature (1)..(25): SEQ ID NO: 1408; WAN024CKX_at; Start 35; Stop 59
caattactgggcttgatatcctcaa

SEQ ID NO: 122742 - DNA, 25 bp, Artificial
  probe
  misc_feature (1)..(25): SEQ ID NO: 1408; WAN024CKX_at; Start 387; Stop 411
tgccgctacagaagcaactgctaag

SEQ ID NO: 122743 - DNA, 25 bp, Artificial
  probe
  misc_feature (1)..(25): SEQ ID NO: 1408; WAN024CKX_at; Start 915; Stop 939
tacatctacaatgacgacgcagggt

SEQ ID NO: 122744 - DNA, 25 bp, Artificial
  probe
  misc_feature (1)..(25): SEQ ID NO: 1408; WAN024CKX_at; Start 479; Stop 503
aatcttatgctaagcgacgcaagcg

SEQ ID NO: 122745 - DNA, 25 bp, Artificial
  probe
  misc_feature (1)..(25): SEQ ID NO: 1408; WAN024CKX_at; Start 1065; Stop 1089
cgctgctagaacagatagaattgga

SEQ ID NO: 122746 - DNA, 25 bp, Artificial
  probe
  misc_feature (1)..(25): SEQ ID NO: 1408; WAN024CKX_at; Start 1088; Stop 1112
gaattaactacttcaatggtggagg

SEQ ID NO: 122747 - DNA, 25 bp, Artificial
  probe
  misc_feature (1)..(25): SEQ ID NO: 1408; WAN024CKX_at; Start 565; Stop 589
aatacgattgtaaatggcgcccctg

SEQ ID NO: 122748 - DNA, 25 bp, Artificial
  probe
  misc_feature (1)..(25): SEQ ID NO: 1408; WAN024CKX_at; Start 231; Stop 255
tagtttgtcagcttcagagtcggca

SEQ ID NO: 122749 - DNA, 25 bp, Artificial
  probe
  misc_feature (1)..(25): SEQ ID NO: 1408; WAN024CKX_at; Start 253; Stop 277
gcaagtacatctgcatctgagtcag

SEQ ID NO: 122750 - DNA, 25 bp, Artificial
  probe
  misc_feature (1)..(25): SEQ ID NO: 1408; WAN024CKX_at; Start 509; Stop 533
tggattccatcgagcaattgctggc

SEQ ID NO: 122751 - DNA, 25 bp, Artificial
  probe
  misc_feature (1)..(25): SEQ ID NO: 1408; WAN024CKX_at; Start 152; Stop 176
tagagaaaacggatgctttggcaac

SEQ ID NO: 122752 - DNA, 25 bp, Artificial
  probe
  misc_feature (1)..(25): SEQ ID NO: 1408; WAN024CKX_at; Start 356; Stop 380
catcatctactgtggtaggttcaca

SEQ ID NO: 122753 - DNA, 25 bp, Artificial
  probe
  misc_feature (1)..(25): SEQ ID NO: 1408; WAN024CKX_at; Start 1050; Stop 1074
tacatttaccccttacgctgctaga

SEQ ID NO: 122754 - DNA, 25 bp, Artificial
  probe
  misc_feature (1)..(25): SEQ ID NO: 1408; WAN024CKX_at; Start 336; Stop 360
ggcttcgacaagtatttctgcatca

SEQ ID NO: 122755 - DNA, 25 bp, Artificial
  probe
  misc_feature (1)..(25): SEQ ID NO: 1408; WAN024CKX_at; Start 649; Stop 673
gtagattcggtatatcgtgttccaa

SEQ ID NO: 122756 - DNA, 25 bp, Artificial
  probe
  misc_feature (1)..(25): SEQ ID NO: 1408; WAN024CKX_at; Start 421; Stop 445
gaagatcgtaagaaaccagctagtg

SEQ ID NO: 122757 - DNA, 25 bp, Artificial
  probe
  misc_feature (1)..(25): SEQ ID NO: 1408; WAN024CKX_at; Start 820; Stop 844
caaacaatgttaacccttggcagtg

SEQ ID NO: 122758 - DNA, 25 bp, Artificial
  probe
  misc_feature (1)..(25): SEQ ID NO: 1408; WAN024CKX_at; Start 579; Stop 603
tggcgcccctgcaattaatgcaagt

SEQ ID NO: 122759 - DNA, 25 bp, Artificial
  probe
  misc_feature (1)..(25): SEQ ID NO: 1408; WAN024CKX_at; Start 834; Stop 858
ccttggcagtgatcttggtaaacct

SEQ ID NO: 122760 - DNA, 25 bp, Artificial
  probe
  misc_feature (1)..(25): SEQ ID NO: 1408; WAN024CKX_at; Start 287; Stop 311
gcgcttcgacctcagcaagtacaag

SEQ ID NO: 122761 - DNA, 25 bp, Artificial
  probe
  misc_feature (1)..(25): SEQ ID NO: 1408; WAN024CKX_at; Start 86; Stop 110
taagtggaaccgttgcaactcaaac

SEQ ID NO: 122762 - DNA, 25 bp, Artificial
  probe
  misc_feature (1)..(25): SEQ ID NO: 1408; WAN024CKX_at; Start 373; Stop 397
ggttcacaaacagctgccgctacag

SEQ ID NO: 122763 - DNA, 25 bp, Artificial
  probe
  misc_feature (1)..(25): SEQ ID NO: 1408; WAN024CKX_at; Start 885; Stop 909
caaaaatggtagacaggttctatcc

SEQ ID NO: 122764 - DNA, 25 bp, Artificial
  probe
  misc_feature (1)..(25): SEQ ID NO: 1408; WAN024CKX_at; Start 1137; Stop 1161
cagtcagtcactttcacagtctaag

SEQ ID NO: 122765 - DNA, 25 bp, Artificial
  probe
  misc_feature (1)..(25): SEQ ID NO: 4224; WAN024CKY_at; Start 30; Stop 54
cgtcgtttccaccaggagcagtgat

SEQ ID NO: 122766 - DNA, 25 bp, Artificial
  probe
  misc_feature (1)..(25): SEQ ID NO: 4224; WAN024CKY_at; Start 348; Stop 372
tacgacggaaagcaagacgaccgat

SEQ ID NO: 122767 - DNA, 25 bp, Artificial
  probe
  misc_feature (1)..(25): SEQ ID NO: 4224; WAN024CKY_at; Start 264; Stop 288
tgtcgtatttcaacaagtgtgcaag

SEQ ID NO: 122768 - DNA, 25 bp, Artificial
  probe
  misc_feature (1)..(25): SEQ ID NO: 4224; WAN024CKY_at; Start 72; Stop 96
cacctttaaggtgtttttcagctgc

SEQ ID NO: 122769 - DNA, 25 bp, Artificial
  probe
  misc_feature (1)..(25): SEQ ID NO: 4224; WAN024CKY_at; Start 145; Stop 169
gtcagtagcccagtcgatttgttct

SEQ ID NO: 122770 - DNA, 25 bp, Artificial
  probe
  misc_feature (1)..(25): SEQ ID NO: 4224; WAN024CKY_at; Start 102; Stop 126
tcttagcaaagaaaccagtagcttc

SEQ ID NO: 122771 - DNA, 25 bp, Artificial
  probe
  misc_feature (1)..(25): SEQ ID NO: 4224; WAN024CKY_at; Start 237; Stop 261
cagtaccgtcgaaacgaccttgagt

SEQ ID NO: 122772 - DNA, 25 bp, Artificial
  probe
  misc_feature (1)..(25): SEQ ID NO: 4224; WAN024CKY_at; Start 293; Stop 317
actggatctgtaaggtcgttgatgc

SEQ ID NO: 122773 - DNA, 25 bp, Artificial
  probe
  misc_feature (1)..(25): SEQ ID NO: 4224; WAN024CKY_at; Start 277; Stop 301
caagtgtgcaagcataactggatct

SEQ ID NO: 122774 - DNA, 25 bp, Artificial
  probe
  misc_feature (1)..(25): SEQ ID NO: 4224; WAN024CKY_at; Start 303; Stop 327
taaggtcgttgatgcgtgtaacttc

SEQ ID NO: 122775 - DNA, 25 bp, Artificial
  probe
  misc_feature (1)..(25): SEQ ID NO: 4224; WAN024CKY_at; Start 337; Stop 361
tacgttttggatacgacggaaagca

SEQ ID NO: 122776 - DNA, 25 bp, Artificial
  probe
  misc_feature (1)..(25): SEQ ID NO: 4224; WAN024CKY_at; Start 355; Stop 379
gaaagcaagacgaccgatacgtccg

SEQ ID NO: 122777 - DNA, 25 bp, Artificial
  probe
  misc_feature (1)..(25): SEQ ID NO: 4224; WAN024CKY_at; Start 359; Stop 383
gcaagacgaccgatacgtccgaaac

SEQ ID NO: 122778 - DNA, 25 bp, Artificial
  probe
  misc_feature (1)..(25): SEQ ID NO: 4224; WAN024CKY_at; Start 51; Stop 75
tgataacaacttttttagctccacc

SEQ ID NO: 122779 - DNA, 25 bp, Artificial
  probe
  misc_feature (1)..(25): SEQ ID NO: 4224; WAN024CKY_at; Start 344; Stop 368
tggatacgacggaaagcaagacgac

SEQ ID NO: 122780 - DNA, 25 bp, Artificial
  probe
  misc_feature (1)..(25): SEQ ID NO: 4224; WAN024CKY_at; Start 37; Stop 61
tccaccaggagcagtgataacaact

SEQ ID NO: 122781 - DNA, 25 bp, Artificial
  probe
  misc_feature (1)..(25): SEQ ID NO: 4224; WAN024CKY_at; Start 88; Stop 112
ttcagctgcttctttcttagcaaag

SEQ ID NO: 122782 - DNA, 25 bp, Artificial
  probe
  misc_feature (1)..(25): SEQ ID NO: 4224; WAN024CKY_at; Start 252; Stop 276
gaccttgagttgtgtcgtatttcaa

SEQ ID NO: 122783 - DNA, 25 bp, Artificial
  probe
  misc_feature (1)..(25): SEQ ID NO: 4224; WAN024CKY_at; Start 243; Stop 267
cgtcgaaacgaccttgagttgtgtc

SEQ ID NO: 122784 - DNA, 25 bp, Artificial
  probe
  misc_feature (1)..(25): SEQ ID NO: 4224; WAN024CKY_at; Start 110; Stop 134
aagaaaccagtagcttcaagaacga

SEQ ID NO: 122785 - DNA, 25 bp, Artificial
  probe
  misc_feature (1)..(25): SEQ ID NO: 4224; WAN024CKY_at; Start 169; Stop 193
tggatcacgttcagcagaaactttg

SEQ ID NO: 122786 - DNA, 25 bp, Artificial
  probe
  misc_feature (1)..(25): SEQ ID NO: 4224; WAN024CKY_at; Start 25; Stop 49
tttaacgtcgtttccaccaggagca

SEQ ID NO: 122787 - DNA, 25 bp, Artificial
  probe
  misc_feature (1)..(25): SEQ ID NO: 4224; WAN024CKY_at; Start 224; Stop 248
tctttaacttcaacagtaccgtcga

SEQ ID NO: 122788 - DNA, 25 bp, Artificial
  probe
  misc_feature (1)..(25): SEQ ID NO: 4224; WAN024CKY_at; Start 191; Stop 215
ttgatgaatttaccgttaacttcaa

SEQ ID NO: 122789 - DNA, 25 bp, Artificial
  probe
  misc_feature (1)..(25): SEQ ID NO: 4224; WAN024CKY_at; Start 9; Stop 33
tgttgaatacaactgttttaacgtc

SEQ ID NO: 122790 - DNA, 25 bp, Artificial
  probe
  misc_feature (1)..(25): SEQ ID NO: 4224; WAN024CKY_at; Start 215; Stop 239
aatccaccttctttaacttcaacag

SEQ ID NO: 122791 - DNA, 25 bp, Artificial
  probe
  misc_feature (1)..(25): SEQ ID NO: 4224; WAN024CKY_at; Start 160; Stop 184
gatttgttctggatcacgttcagca

SEQ ID NO: 122792 - DNA, 25 bp, Artificial
  probe
  misc_feature (1)..(25): SEQ ID NO: 4224; WAN024CKY_at; Start 182; Stop 206
gcagaaactttgatgaatttaccgt

SEQ ID NO: 122793 - DNA, 25 bp, Artificial
  probe
  misc_feature (1)..(25): SEQ ID NO: 4224; WAN024CKY_at; Start 133; Stop 157
gatttctacaccgtcagtagcccag

SEQ ID NO: 122794 - DNA, 25 bp, Artificial
  probe
  misc_feature (1)..(25): SEQ ID NO: 4224; WAN024CKY_at; Start 139; Stop 163
tacaccgtcagtagcccagtcgatt

SEQ ID NO: 122795 - DNA, 25 bp, Artificial
  probe
  misc_feature (1)..(25): SEQ ID NO: 4224; WAN024CKY_at; Start 285; Stop 309
caagcataactggatctgtaaggtc

SEQ ID NO: 122796 - DNA, 25 bp, Artificial
  probe
  misc_feature (1)..(25): SEQ ID NO: 4224; WAN024CKY_at; Start 125; Stop 149
tcaagaacgatttctacaccgtcag

SEQ ID NO: 122797 - DNA, 25 bp, Artificial
  probe
  misc_feature (1)..(25): SEQ ID NO: 4224; WAN024CKY_at; Start 316; Stop 340
gcgtgtaacttcaacaccttctacg

SEQ ID NO: 122798 - DNA, 25 bp, Artificial
  probe
  misc_feature (1)..(25): SEQ ID NO: 4224; WAN024CKY_at; Start 330; Stop 354
caccttctacgttttggatacgacg

SEQ ID NO: 122799 - DNA, 25 bp, Artificial
  probe
  misc_feature (1)..(25): SEQ ID NO: 3436; WAN024CKZ_at; Start 84; Stop 108
tatcgtacctagaactactgtatca

SEQ ID NO: 122800 - DNA, 25 bp, Artificial
  probe
  misc_feature (1)..(25): SEQ ID NO: 3436; WAN024CKZ_at; Start 120; Stop 144
agcatccgttttctctacagttttt

SEQ ID NO: 122801 - DNA, 25 bp, Artificial
  probe
  misc_feature (1)..(25): SEQ ID NO: 3436; WAN024CKZ_at; Start 74; Stop 98
tacttgtagatatcgtacctagaac

SEQ ID NO: 122802 - DNA, 25 bp, Artificial
  probe
  misc_feature (1)..(25): SEQ ID NO: 3436; WAN024CKZ_at; Start 27; Stop 51
tgtacttgccgactctgaagctgac

SEQ ID NO: 122803 - DNA, 25 bp, Artificial
  probe
  misc_feature (1)..(25): SEQ ID NO: 3436; WAN024CKZ_at; Start 2; Stop 26
tggttgaggctgactcagatgcaga

SEQ ID NO: 122804 - DNA, 25 bp, Artificial
  probe
  misc_feature (1)..(25): SEQ ID NO: 3436; WAN024CKZ_at; Start 88; Stop 112
gtacctagaactactgtatcatttg

SEQ ID NO: 122805 - DNA, 25 bp, Artificial
  probe
  misc_feature (1)..(25): SEQ ID NO: 3436; WAN024CKZ_at; Start 70; Stop 94
gaattacttgtagatatcgtaccta

SEQ ID NO: 122806 - DNA, 25 bp, Artificial
  probe
  misc_feature (1)..(25): SEQ ID NO: 3436; WAN024CKZ_at; Start 61; Stop 85
gaactcgctgaattacttgtagata

SEQ ID NO: 122807 - DNA, 25 bp, Artificial
  probe
  misc_feature (1)..(25): SEQ ID NO: 3436; WAN024CKZ_at; Start 109; Stop 133
tttgttgccaaagcatccgttttct

SEQ ID NO: 122808 - DNA, 25 bp, Artificial
  probe
  misc_feature (1)..(25): SEQ ID NO: 3436; WAN024CKZ_at; Start 13; Stop 37
gactcagatgcagatgtacttgccg

SEQ ID NO: 122809 - DNA, 25 bp, Artificial
  probe
  misc_feature (1)..(25): SEQ ID NO: 3436; WAN024CKZ_at; Start 95; Stop 119
gaactactgtatcatttgttgccaa

SEQ ID NO: 122810 - DNA, 25 bp, Artificial
  probe
  misc_feature (1)..(25): SEQ ID NO: 3436; WAN024CKZ_at; Start 53; Stop 77
aactagttgaactcgctgaattact

SEQ ID NO: 122811 - DNA, 25 bp, Artificial
  probe
  misc_feature (1)..(25): SEQ ID NO: 3436; WAN024CKZ_at; Start 34; Stop 58
gccgactctgaagctgacaaactag

SEQ ID NO: 122812 - DNA, 25 bp, Artificial
  probe
  misc_feature (1)..(25): SEQ ID NO: 3436; WAN024CKZ_at; Start 37; Stop 61
gactctgaagctgacaaactagttg

SEQ ID NO: 122813 - DNA, 25 bp, Artificial
  probe
  misc_feature (1)..(25): SEQ ID NO: 3436; WAN024CKZ_at; Start 22; Stop 46
gcagatgtacttgccgactctgaag

SEQ ID NO: 122814 - DNA, 25 bp, Artificial
  probe
  misc_feature (1)..(25): SEQ ID NO: 3436; WAN024CKZ_at; Start 43; Stop 67
gaagctgacaaactagttgaactcg

SEQ ID NO: 122815 - DNA, 25 bp, Artificial
  probe
  misc_feature (1)..(25): SEQ ID NO: 3436; WAN024CKZ_at; Start 7; Stop 31
gaggctgactcagatgcagatgtac

SEQ ID NO: 122816 - DNA, 25 bp, Artificial
  probe
  misc_feature (1)..(25): SEQ ID NO: 3436; WAN024CKZ_at; Start 103; Stop 127
gtatcatttgttgccaaagcatccg

SEQ ID NO: 122817 - DNA, 25 bp, Artificial
  probe
  misc_feature (1)..(25): SEQ ID NO: 3436; WAN024CKZ_at; Start 40; Stop 64
tctgaagctgacaaactagttgaac

SEQ ID NO: 122818 - DNA, 25 bp, Artificial
  probe
  misc_feature (1)..(25): SEQ ID NO: 3436; WAN024CKZ_at; Start 99; Stop 123
tactgtatcatttgttgccaaagca

SEQ ID NO: 122819 - DNA, 25 bp, Artificial
  probe
  misc_feature (1)..(25): SEQ ID NO: 3436; WAN024CKZ_at; Start 115; Stop 139
gccaaagcatccgttttctctacag

SEQ ID NO: 122820 - DNA, 25 bp, Artificial
  probe
  misc_feature (1)..(25): SEQ ID NO: 3436; WAN024CKZ_at; Start 49; Stop 73
gacaaactagttgaactcgctgaat

SEQ ID NO: 122821 - DNA, 25 bp, Artificial
  probe
  misc_feature (1)..(25): SEQ ID NO: 3436; WAN024CKZ_at; Start 131; Stop 155
tctctacagttttttcaagtactgc

SEQ ID NO: 122822 - DNA, 25 bp, Artificial
  probe
  misc_feature (1)..(25): SEQ ID NO: 3436; WAN024CKZ_at; Start 16; Stop 40
tcagatgcagatgtacttgccgact

SEQ ID NO: 122823 - DNA, 25 bp, Artificial
  probe
  misc_feature (1)..(25): SEQ ID NO: 3436; WAN024CKZ_at; Start 10; Stop 34
gctgactcagatgcagatgtacttg

SEQ ID NO: 122824 - DNA, 25 bp, Artificial
  probe
  misc_feature (1)..(25): SEQ ID NO: 3436; WAN024CKZ_at; Start 80; Stop 104
tagatatcgtacctagaactactgt

SEQ ID NO: 122825 - DNA, 25 bp, Artificial
  probe
  misc_feature (1)..(25): SEQ ID NO: 3436; WAN024CKZ_at; Start 25; Stop 49
gatgtacttgccgactctgaagctg

SEQ ID NO: 122826 - DNA, 25 bp, Artificial
  probe
  misc_feature (1)..(25): SEQ ID NO: 3436; WAN024CKZ_at; Start 46; Stop 70
gctgacaaactagttgaactcgctg

SEQ ID NO: 122827 - DNA, 25 bp, Artificial
  probe
  misc_feature (1)..(25): SEQ ID NO: 3436; WAN024CKZ_at; Start 106; Stop 130
tcatttgttgccaaagcatccgttt

SEQ ID NO: 122828 - DNA, 25 bp, Artificial
  probe
  misc_feature (1)..(25): SEQ ID NO: 3436; WAN024CKZ_at; Start 58; Stop 82
gttgaactcgctgaattacttgtag

SEQ ID NO: 122829 - DNA, 25 bp, Artificial
  probe
  misc_feature (1)..(25): SEQ ID NO: 3436; WAN024CKZ_at; Start 19; Stop 43
gatgcagatgtacttgccgactctg

SEQ ID NO: 122830 - DNA, 25 bp, Artificial
  probe
  misc_feature (1)..(25): SEQ ID NO: 3436; WAN024CKZ_at; Start 29; Stop 53
tacttgccgactctgaagctgacaa

SEQ ID NO: 122831 - DNA, 25 bp, Artificial
  probe
  misc_feature (1)..(25): SEQ ID NO: 3436; WAN024CKZ_at; Start 117; Stop 141
caaagcatccgttttctctacagtt

SEQ ID NO: 122832 - DNA, 25 bp, Artificial
  probe
  misc_feature (1)..(25): SEQ ID NO: 3436; WAN024CKZ_at; Start 64; Stop 88
ctcgctgaattacttgtagatatcg

SEQ ID NO: 122833 - DNA, 25 bp, Artificial
  probe
  misc_feature (1)..(25): SEQ ID NO: 4034; WAN024CL2_at; Start 318; Stop 342
aatcgactgggctactgacggtgta

SEQ ID NO: 122834 - DNA, 25 bp, Artificial
  probe
  misc_feature (1)..(25): SEQ ID NO: 4034; WAN024CL2_at; Start 341; Stop 365
tagaaatcgttcttgaagctactgg

SEQ ID NO: 122835 - DNA, 25 bp, Artificial
  probe
  misc_feature (1)..(25): SEQ ID NO: 4034; WAN024CL2_at; Start 830; Stop 854
ttactgttgatgaagtgaacgcagc

SEQ ID NO: 122836 - DNA, 25 bp, Artificial
  probe
  misc_feature (1)..(25): SEQ ID NO: 4034; WAN024CL2_at; Start 214; Stop 238
gacacaactcaaggtcgtttcgacg

SEQ ID NO: 122837 - DNA, 25 bp, Artificial
  probe
  misc_feature (1)..(25): SEQ ID NO: 4034; WAN024CL2_at; Start 845; Stop 869
tgaacgcagctatgaaagcagcttc

SEQ ID NO: 122838 - DNA, 25 bp, Artificial
  probe
  misc_feature (1)..(25): SEQ ID NO: 4034; WAN024CL2_at; Start 154; Stop 178
gaagttacacgcatcaacgacctta

SEQ ID NO: 122839 - DNA, 25 bp, Artificial
  probe
  misc_feature (1)..(25): SEQ ID NO: 4034; WAN024CL2_at; Start 583; Stop 607
gaaggattgatgactactatccacg

SEQ ID NO: 122840 - DNA, 25 bp, Artificial
  probe
  misc_feature (1)..(25): SEQ ID NO: 4034; WAN024CL2_at; Start 1022; Stop 1046
tgtcatacactgcacaacttgttcg

SEQ ID NO: 122841 - DNA, 25 bp, Artificial
  probe
  misc_feature (1)..(25): SEQ ID NO: 4034; WAN024CL2_at; Start 597; Stop 621
tactatccacgcttacactggtgac

SEQ ID NO: 122842 - DNA, 25 bp, Artificial
  probe
  misc_feature (1)..(25): SEQ ID NO: 4034; WAN024CL2_at; Start 612; Stop 636
cactggtgaccaaatgatccttgac

SEQ ID NO: 122843 - DNA, 25 bp, Artificial
  probe
  misc_feature (1)..(25): SEQ ID NO: 4034; WAN024CL2_at; Start 177; Stop 201
tacagatccagttatgcttgcacac

SEQ ID NO: 122844 - DNA, 25 bp, Artificial
  probe
  misc_feature (1)..(25): SEQ ID NO: 4034; WAN024CL2_at; Start 955; Stop 979
caaactaaagttcttgacgttgacg

SEQ ID NO: 122845 - DNA, 25 bp, Artificial
  probe
  misc_feature (1)..(25): SEQ ID NO: 4034; WAN024CL2_at; Start 760; Stop 784
ggatctgcacaacgcgttccaactc

SEQ ID NO: 122846 - DNA, 25 bp, Artificial
  probe
  misc_feature (1)..(25): SEQ ID NO: 4034; WAN024CL2_at; Start 880; Stop 904
tacggttacacagaagatccaatcg

SEQ ID NO: 122847 - DNA, 25 bp, Artificial
  probe
  misc_feature (1)..(25): SEQ ID NO: 4034; WAN024CL2_at; Start 673; Stop 697
gctggtgctgcaaacatcgttccta

SEQ ID NO: 122848 - DNA, 25 bp, Artificial
  probe
  misc_feature (1)..(25): SEQ ID NO: 4034; WAN024CL2_at; Start 862; Stop 886
gcagcttcaaacgaatcatacggtt

SEQ ID NO: 122849 - DNA, 25 bp, Artificial
  probe
  misc_feature (1)..(25): SEQ ID NO: 4034; WAN024CL2_at; Start 931; Stop 955
tacggttcattgtttgacgcaactc

SEQ ID NO: 122850 - DNA, 25 bp, Artificial
  probe
  misc_feature (1)..(25): SEQ ID NO: 4034; WAN024CL2_at; Start 426; Stop 450
tatcactgctcctggtggaaacgac

SEQ ID NO: 122851 - DNA, 25 bp, Artificial
  probe
  misc_feature (1)..(25): SEQ ID NO: 4034; WAN024CL2_at; Start 644; Stop 668
accgtggtggtgaccttcgccgtgc

SEQ ID NO: 122852 - DNA, 25 bp, Artificial
  probe
  misc_feature (1)..(25): SEQ ID NO: 4034; WAN024CL2_at; Start 627; Stop 651
gatccttgacggaccacaccgtggt

SEQ ID NO: 122853 - DNA, 25 bp, Artificial
  probe
  misc_feature (1)..(25): SEQ ID NO: 4034; WAN024CL2_at; Start 689; Stop 713
tcgttcctaactcaactggtgctgc

SEQ ID NO: 122854 - DNA, 25 bp, Artificial
  probe
  misc_feature (1)..(25): SEQ ID NO: 4034; WAN024CL2_at; Start 540; Stop 564
ggctccaatggctaaagctcttcaa

SEQ ID NO: 122855 - DNA, 25 bp, Artificial
  probe
  misc_feature (1)..(25): SEQ ID NO: 4034; WAN024CL2_at; Start 368; Stop 392
tctttgctaagaaagaagcagctga

SEQ ID NO: 122856 - DNA, 25 bp, Artificial
  probe
  misc_feature (1)..(25): SEQ ID NO: 4034; WAN024CL2_at; Start 195; Stop 219
tgcacacttgttgaaatacgacaca

SEQ ID NO: 122857 - DNA, 25 bp, Artificial
  probe
  misc_feature (1)..(25): SEQ ID NO: 4034; WAN024CL2_at; Start 385; Stop 409
gcagctgaaaaacaccttaaaggtg

SEQ ID NO: 122858 - DNA, 25 bp, Artificial
  probe
  misc_feature (1)..(25): SEQ ID NO: 4034; WAN024CL2_at; Start 233; Stop 257
tcgacggtactgttgaagttaaaga

SEQ ID NO: 122859 - DNA, 25 bp, Artificial
  probe
  misc_feature (1)..(25): SEQ ID NO: 4034; WAN024CL2_at; Start 289; Stop 313
aaagtttctgctgaacgtgatccag

SEQ ID NO: 122860 - DNA, 25 bp, Artificial
  probe
  misc_feature (1)..(25): SEQ ID NO: 4034; WAN024CL2_at; Start 507; Stop 531
tatctcaggtgcttcatgtactaca

SEQ ID NO: 122861 - DNA, 25 bp, Artificial
  probe
  misc_feature (1)..(25): SEQ ID NO: 4034; WAN024CL2_at; Start 1041; Stop 1065
tgttcgtactcttgaatacttcgca

SEQ ID NO: 122862 - DNA, 25 bp, Artificial
  probe
  misc_feature (1)..(25): SEQ ID NO: 4034; WAN024CL2_at; Start 525; Stop 549
tactacaaactgcttggctccaatg

SEQ ID NO: 122863 - DNA, 25 bp, Artificial
  probe
  misc_feature (1)..(25): SEQ ID NO: 4034; WAN024CL2_at; Start 127; Stop 151
cgtcgtatccaaaacgtagaaggtg

SEQ ID NO: 122864 - DNA, 25 bp, Artificial
  probe
  misc_feature (1)..(25): SEQ ID NO: 4034; WAN024CL2_at; Start 483; Stop 507
cgttcttgacggtactgaaacagtt

SEQ ID NO: 122865 - DNA, 25 bp, Artificial
  probe
  misc_feature (1)..(25): SEQ ID NO: 4034; WAN024CL2_at; Start 113; Stop 137
gtcgtcttgctttccgtcgtatcca

SEQ ID NO: 122866 - DNA, 25 bp, Artificial
  probe
  misc_feature (1)..(25): SEQ ID NO: 4034; WAN024CL2_at; Start 999; Stop 1023
tgtatcatggtacgacaacgaaatg

SEQ ID NO: 122867 - DNA, 25 bp, Artificial
  probe
  misc_feature (1)..(25): SEQ ID NO: 2592; WAN024CL3_at; Start 319; Stop 343
gacttaggtgtcatgcagactggat

SEQ ID NO: 122868 - DNA, 25 bp, Artificial
  probe
  misc_feature (1)..(25): SEQ ID NO: 2592; WAN024CL3_at; Start 535; Stop 559
ggaccacactggtactatgcctacg

SEQ ID NO: 122869 - DNA, 25 bp, Artificial
  probe
  misc_feature (1)..(25): SEQ ID NO: 2592; WAN024CL3_at; Start 272; Stop 296
tgaagacaggttgggtgaaaacaga

SEQ ID NO: 122870 - DNA, 25 bp, Artificial
  probe
  misc_feature (1)..(25): SEQ ID NO: 2592; WAN024CL3_at; Start 550; Stop 574
tatgcctacggttcaggagctttgg

SEQ ID NO: 122871 - DNA, 25 bp, Artificial
  probe
  misc_feature (1)..(25): SEQ ID NO: 2592; WAN024CL3_at; Start 408; Stop 432
aacagatggtagcagatggttctac

SEQ ID NO: 122872 - DNA, 25 bp, Artificial
  probe
  misc_feature (1)..(25): SEQ ID NO: 2592; WAN024CL3_at; Start 101; Stop 125
gatatggttctgctgttcagtgtac

SEQ ID NO: 122873 - DNA, 25 bp, Artificial
  probe
  misc_feature (1)..(25): SEQ ID NO: 2592; WAN024CL3_at; Start 472; Stop 496
gaaaatggcacttggtattaccttg

SEQ ID NO: 122874 - DNA, 25 bp, Artificial
  probe
  misc_feature (1)..(25): SEQ ID NO: 2592; WAN024CL3_at; Start 127; Stop 151
gaagtgactgcctcaaacctttcaa

SEQ ID NO: 122875 - DNA, 25 bp, Artificial
  probe
  misc_feature (1)..(25): SEQ ID NO: 2592; WAN024CL3_at; Start 482; Stop 506
cttggtattaccttgacgaagcagg

SEQ ID NO: 122876 - DNA, 25 bp, Artificial
  probe
  misc_feature (1)..(25): SEQ ID NO: 2592; WAN024CL3_at; Start 50; Stop 74
caattgctcaaactctaggtgatga

SEQ ID NO: 122877 - DNA, 25 bp, Artificial
  probe
  misc_feature (1)..(25): SEQ ID NO: 2592; WAN024CL3_at; Start 563; Stop 587
caggagctttggctgtgagcacaac

SEQ ID NO: 122878 - DNA, 25 bp, Artificial
  probe
  misc_feature (1)..(25): SEQ ID NO: 2592; WAN024CL3_at; Start 255; Stop 279
ctatgagtctggtgatgtgaagaca

SEQ ID NO: 122879 - DNA, 25 bp, Artificial
  probe
  misc_feature (1)..(25): SEQ ID NO: 2592; WAN024CL3_at; Start 440; Stop 464
gctcaggagctatgaagacaggctg

SEQ ID NO: 122880 - DNA, 25 bp, Artificial
  probe
  misc_feature (1)..(25): SEQ ID NO: 2592; WAN024CL3_at; Start 587; Stop 611
caacaccagatggttaccgtgtaaa

SEQ ID NO: 122881 - DNA, 25 bp, Artificial
  probe
  misc_feature (1)..(25): SEQ ID NO: 2592; WAN024CL3_at; Start 287; Stop 311
tgaaaacagatggtaaatggtacta

SEQ ID NO: 122882 - DNA, 25 bp, Artificial
  probe
  misc_feature (1)..(25): SEQ ID NO: 2592; WAN024CL3_at; Start 215; Stop 239
atcagtctggttgggtggaatctaa

SEQ ID NO: 122883 - DNA, 25 bp, Artificial
  probe
  misc_feature (1)..(25): SEQ ID NO: 2592; WAN024CL3_at; Start 458; Stop 482
caggctggtacaaggaaaatggcac

SEQ ID NO: 122884 - DNA, 25 bp, Artificial
  probe
  misc_feature (1)..(25): SEQ ID NO: 2592; WAN024CL3_at; Start 378; Stop 402
caattcaggtgctatgtttacaggc

SEQ ID NO: 122885 - DNA, 25 bp, Artificial
  probe
  misc_feature (1)..(25): SEQ ID NO: 2592; WAN024CL3_at; Start 603; Stop 627
ccgtgtaaatggtaatggtgaatgg

SEQ ID NO: 122886 - DNA, 25 bp, Artificial
  probe
  misc_feature (1)..(25): SEQ ID NO: 2592; WAN024CL3_at; Start 185; Stop 209
cactgaaagattttagagcgtctac

SEQ ID NO: 122887 - DNA, 25 bp, Artificial
  probe
  misc_feature (1)..(25): SEQ ID NO: 2592; WAN024CL3_at; Start 576; Stop 600
tgtgagcacaacaacaccagatggt

SEQ ID NO: 122888 - DNA, 25 bp, Artificial
  probe
  misc_feature (1)..(25): SEQ ID NO: 2592; WAN024CL3_at; Start 365; Stop 389
ggtattacttgagcaattcaggtgc

SEQ ID NO: 122889 - DNA, 25 bp, Artificial
  probe
  misc_feature (1)..(25): SEQ ID NO: 2592; WAN024CL3_at; Start 200; Stop 224
gagcgtctacgtctgatcagtctgg

SEQ ID NO: 122890 - DNA, 25 bp, Artificial
  probe
  misc_feature (1)..(25): SEQ ID NO: 2592; WAN024CL3_at; Start 166; Stop 190
gctacggttgtagaaaaaccactga

SEQ ID NO: 122891 - DNA, 25 bp, Artificial
  probe
  misc_feature (1)..(25): SEQ ID NO: 2592; WAN024CL3_at; Start 89; Stop 113
aattggctggtagatatggttctgc

SEQ ID NO: 122892 - DNA, 25 bp, Artificial
  probe
  misc_feature (1)..(25): SEQ ID NO: 2592; WAN024CL3_at; Start 6; Stop 30
gatggcagcttttaaaaatcctaac

SEQ ID NO: 122893 - DNA, 25 bp, Artificial
  probe
  misc_feature (1)..(25): SEQ ID NO: 2592; WAN024CL3_at; Start 422; Stop 446
gatggttctactttgacggctcagg

SEQ ID NO: 122894 - DNA, 25 bp, Artificial
  probe
  misc_feature (1)..(25): SEQ ID NO: 2592; WAN024CL3_at; Start 65; Stop 89
taggtgatgatgcttcttcagagga

SEQ ID NO: 122895 - DNA, 25 bp, Artificial
  probe
  misc_feature (1)..(25): SEQ ID NO: 2592; WAN024CL3_at; Start 510; Stop 534
catgaagacaggttggtttaaagtc

SEQ ID NO: 122896 - DNA, 25 bp, Artificial
  probe
  misc_feature (1)..(25): SEQ ID NO: 2592; WAN024CL3_at; Start 496; Stop 520
gacgaagcaggtatcatgaagacag

SEQ ID NO: 122897 - DNA, 25 bp, Artificial
  probe
  misc_feature (1)..(25): SEQ ID NO: 2592; WAN024CL3_at; Start 243; Stop 267
taaatggtatttctatgagtctggt

SEQ ID NO: 122898 - DNA, 25 bp, Artificial
  probe
  misc_feature (1)..(25): SEQ ID NO: 2592; WAN024CL3_at; Start 114; Stop 138
tgttcagtgtacagaagtgactgcc

SEQ ID NO: 122899 - DNA, 25 bp, Artificial
  probe
  misc_feature (1)..(25): SEQ ID NO: 2592; WAN024CL3_at; Start 355; Stop 379
tctggtagctggtattacttgagca

SEQ ID NO: 122900 - DNA, 25 bp, Artificial
  probe
  misc_feature (1)..(25): SEQ ID NO: 2592; WAN024CL3_at; Start 76; Stop 100
gcttcttcagaggaattggctggta

SEQ ID NO: 122901 - DNA, 25 bp, Artificial
  probe
  misc_feature (1)..(25): SEQ ID NO: 5550; WAN024CL4_at; Start 8; Stop 32
tgaccttggctggagcagttttgac

SEQ ID NO: 122902 - DNA, 25 bp, Artificial
  probe
  misc_feature (1)..(25): SEQ ID NO: 5550; WAN024CL4_at; Start 48; Stop 72
gaacgacagacttgtggcaacacaa

SEQ ID NO: 122903 - DNA, 25 bp, Artificial
  probe
  misc_feature (1)..(25): SEQ ID NO: 5550; WAN024CL4_at; Start 186; Stop 210
tttggatgccatcaatgctatctgt

SEQ ID NO: 122904 - DNA, 25 bp, Artificial
  probe
  misc_feature (1)..(25): SEQ ID NO: 5550; WAN024CL4_at; Start 30; Stop 54
gacaaatgatgtttttgcgaacgac

SEQ ID NO: 122905 - DNA, 25 bp, Artificial
  probe
  misc_feature (1)..(25): SEQ ID NO: 5550; WAN024CL4_at; Start 114; Stop 138
gctaaaaccttctagtggcaatgtt

SEQ ID NO: 122906 - DNA, 25 bp, Artificial
  probe
  misc_feature (1)..(25): SEQ ID NO: 5550; WAN024CL4_at; Start 68; Stop 92
cacaaactactgatggtaaaaatga

SEQ ID NO: 122907 - DNA, 25 bp, Artificial
  probe
  misc_feature (1)..(25): SEQ ID NO: 5550; WAN024CL4_at; Start 15; Stop 39
ggctggagcagttttgacaaatgat

SEQ ID NO: 122908 - DNA, 25 bp, Artificial
  probe
  misc_feature (1)..(25): SEQ ID NO: 5550; WAN024CL4_at; Start 34; Stop 58
aatgatgtttttgcgaacgacagac

SEQ ID NO: 122909 - DNA, 25 bp, Artificial
  probe
  misc_feature (1)..(25): SEQ ID NO: 5550; WAN024CL4_at; Start 203; Stop 227
ctatctgtaaagaagcggctgacga

SEQ ID NO: 122910 - DNA, 25 bp, Artificial
  probe
  misc_feature (1)..(25): SEQ ID NO: 5550; WAN024CL4_at; Start 132; Stop 156
caatgttttggttggaatcaaagga

SEQ ID NO: 122911 - DNA, 25 bp, Artificial
  probe
  misc_feature (1)..(25): SEQ ID NO: 5550; WAN024CL4_at; Start 121; Stop 145
ccttctagtggcaatgttttggttg

SEQ ID NO: 122912 - DNA, 25 bp, Artificial
  probe
  misc_feature (1)..(25): SEQ ID NO: 5550; WAN024CL4_at; Start 155; Stop 179
gagaatttgtggctcctcatcaaca

SEQ ID NO: 122913 - DNA, 25 bp, Artificial
  probe
  misc_feature (1)..(25): SEQ ID NO: 5550; WAN024CL4_at; Start 175; Stop 199
caacaatctattttggatgccatca

SEQ ID NO: 122914 - DNA, 25 bp, Artificial
  probe
  misc_feature (1)..(25): SEQ ID NO: 5550; WAN024CL4_at; Start 56; Stop 80
gacttgtggcaacacaaactactga

SEQ ID NO: 122915 - DNA, 25 bp, Artificial
  probe
  misc_feature (1)..(25): SEQ ID NO: 5550; WAN024CL4_at; Start 60; Stop 84
tgtggcaacacaaactactgatggt

SEQ ID NO: 122916 - DNA, 25 bp, Artificial
  probe
  misc_feature (1)..(25): SEQ ID NO: 5550; WAN024CL4_at; Start 101; Stop 125
tgacctcagaggtgctaaaaccttc

SEQ ID NO: 122917 - DNA, 25 bp, Artificial
  probe
  misc_feature (1)..(25): SEQ ID NO: 5550; WAN024CL4_at; Start 163; Stop 187
gtggctcctcatcaacaatctattt

SEQ ID NO: 122918 - DNA, 25 bp, Artificial
  probe
  misc_feature (1)..(25): SEQ ID NO: 5550; WAN024CL4_at; Start 41; Stop 65
tttttgcgaacgacagacttgtggc

SEQ ID NO: 122919 - DNA, 25 bp, Artificial
  probe
  misc_feature (1)..(25): SEQ ID NO: 5550; WAN024CL4_at; Start 11; Stop 35
ccttggctggagcagttttgacaaa

SEQ ID NO: 122920 - DNA, 25 bp, Artificial
  probe
  misc_feature (1)..(25): SEQ ID NO: 5550; WAN024CL4_at; Start 91; Stop 115
gaaaatgtattgacctcagaggtgc

SEQ ID NO: 122921 - DNA, 25 bp, Artificial
  probe
  misc_feature (1)..(25): SEQ ID NO: 5550; WAN024CL4_at; Start 63; Stop 87
ggcaacacaaactactgatggtaaa

SEQ ID NO: 122922 - DNA, 25 bp, Artificial
  probe
  misc_feature (1)..(25): SEQ ID NO: 5550; WAN024CL4_at; Start 190; Stop 214
gatgccatcaatgctatctgtaaag

SEQ ID NO: 122923 - DNA, 25 bp, Artificial
  probe
  misc_feature (1)..(25): SEQ ID NO: 5550; WAN024CL4_at; Start 229; Stop 253
ggtttggtagataagtatgtcccta

SEQ ID NO: 122924 - DNA, 25 bp, Artificial
  probe
  misc_feature (1)..(25): SEQ ID NO: 5550; WAN024CL4_at; Start 197; Stop 221
tcaatgctatctgtaaagaagcggc

SEQ ID NO: 122925 - DNA, 25 bp, Artificial
  probe
  misc_feature (1)..(25): SEQ ID NO: 5550; WAN024CL4_at; Start 146; Stop 170
gaatcaaaggagaatttgtggctcc

SEQ ID NO: 122926 - DNA, 25 bp, Artificial
  probe
  misc_feature (1)..(25): SEQ ID NO: 5550; WAN024CL4_at; Start 37; Stop 61
gatgtttttgcgaacgacagacttg

SEQ ID NO: 122927 - DNA, 25 bp, Artificial
  probe
  misc_feature (1)..(25): SEQ ID NO: 5550; WAN024CL4_at; Start 234; Stop 258
ggtagataagtatgtccctatcaaa

SEQ ID NO: 122928 - DNA, 25 bp, Artificial
  probe
  misc_feature (1)..(25): SEQ ID NO: 5550; WAN024CL4_at; Start 45; Stop 69
tgcgaacgacagacttgtggcaaca

SEQ ID NO: 122929 - DNA, 25 bp, Artificial
  probe
  misc_feature (1)..(25): SEQ ID NO: 5550; WAN024CL4_at; Start 210; Stop 234
taaagaagcggctgacgaaggtttg

SEQ ID NO: 122930 - DNA, 25 bp, Artificial
  probe
  misc_feature (1)..(25): SEQ ID NO: 5550; WAN024CL4_at; Start 218; Stop 242
cggctgacgaaggtttggtagataa

SEQ ID NO: 122931 - DNA, 25 bp, Artificial
  probe
  misc_feature (1)..(25): SEQ ID NO: 5550; WAN024CL4_at; Start 109; Stop 133
gaggtgctaaaaccttctagtggca

SEQ ID NO: 122932 - DNA, 25 bp, Artificial
  probe
  misc_feature (1)..(25): SEQ ID NO: 5550; WAN024CL4_at; Start 1; Stop 25
ttggctttgaccttggctggagcag

SEQ ID NO: 122933 - DNA, 25 bp, Artificial
  probe
  misc_feature (1)..(25): SEQ ID NO: 5550; WAN024CL4_at; Start 74; Stop 98
ctactgatggtaaaaatgaaaatgt

SEQ ID NO: 122934 - DNA, 25 bp, Artificial
  probe
  misc_feature (1)..(25): SEQ ID NO: 5550; WAN024CL4_at; Start 126; Stop 150
tagtggcaatgttttggttggaatc

SEQ ID NO: 122935 - DNA, 25 bp, Artificial
  probe
  misc_feature (1)..(25): SEQ ID NO: 5731; WAN024CL5_at; Start 14; Stop 38
gggaaatcctagatacagtgaaggc

SEQ ID NO: 122936 - DNA, 25 bp, Artificial
  probe
  misc_feature (1)..(25): SEQ ID NO: 5731; WAN024CL5_at; Start 29; Stop 53
cagtgaaggctttaaatgctggttt

SEQ ID NO: 122937 - DNA, 25 bp, Artificial
  probe
  misc_feature (1)..(25): SEQ ID NO: 5731; WAN024CL5_at; Start 57; Stop 81
ctgtcctcagccttatattttttcg

SEQ ID NO: 122938 - DNA, 25 bp, Artificial
  probe
  misc_feature (1)..(25): SEQ ID NO: 5731; WAN024CL5_at; Start 10; Stop 34
aatagggaaatcctagatacagtga

SEQ ID NO: 122939 - DNA, 25 bp, Artificial
  probe
  misc_feature (1)..(25): SEQ ID NO: 5731; WAN024CL5_at; Start 45; Stop 69
tgctggtttttactgtcctcagcct

SEQ ID NO: 122940 - DNA, 25 bp, Artificial
  probe
  misc_feature (1)..(25): SEQ ID NO: 5731; WAN024CL5_at; Start 15; Stop 39
ggaaatcctagatacagtgaaggct

SEQ ID NO: 122941 - DNA, 25 bp, Artificial
  probe
  misc_feature (1)..(25): SEQ ID NO: 5731; WAN024CL5_at; Start 40; Stop 64
ttaaatgctggtttttactgtcctc

SEQ ID NO: 122942 - DNA, 25 bp, Artificial
  probe
  misc_feature (1)..(25): SEQ ID NO: 5731; WAN024CL5_at; Start 4; Stop 28
tctaaaaatagggaaatcctagata

SEQ ID NO: 122943 - DNA, 25 bp, Artificial
  probe
  misc_feature (1)..(25): SEQ ID NO: 5731; WAN024CL5_at; Start 16; Stop 40
gaaatcctagatacagtgaaggctt

SEQ ID NO: 122944 - DNA, 25 bp, Artificial
  probe
  misc_feature (1)..(25): SEQ ID NO: 5731; WAN024CL5_at; Start 24; Stop 48
agatacagtgaaggctttaaatgct

SEQ ID NO: 122945 - DNA, 25 bp, Artificial
  probe
  misc_feature (1)..(25): SEQ ID NO: 5731; WAN024CL5_at; Start 48; Stop 72
tggtttttactgtcctcagccttat

SEQ ID NO: 122946 - DNA, 25 bp, Artificial
  probe
  misc_feature (1)..(25): SEQ ID NO: 5731; WAN024CL5_at; Start 9; Stop 33
aaatagggaaatcctagatacagtg

SEQ ID NO: 122947 - DNA, 25 bp, Artificial
  probe
  misc_feature (1)..(25): SEQ ID NO: 5731; WAN024CL5_at; Start 41; Stop 65
taaatgctggtttttactgtcctca

SEQ ID NO: 122948 - DNA, 25 bp, Artificial
  probe
  misc_feature (1)..(25): SEQ ID NO: 5731; WAN024CL5_at; Start 12; Stop 36
tagggaaatcctagatacagtgaag

SEQ ID NO: 122949 - DNA, 25 bp, Artificial
  probe
  misc_feature (1)..(25): SEQ ID NO: 5731; WAN024CL5_at; Start 37; Stop 61
gctttaaatgctggtttttactgtc

SEQ ID NO: 122950 - DNA, 25 bp, Artificial
  probe
  misc_feature (1)..(25): SEQ ID NO: 5731; WAN024CL5_at; Start 26; Stop 50
atacagtgaaggctttaaatgctgg

SEQ ID NO: 122951 - DNA, 25 bp, Artificial
  probe
  misc_feature (1)..(25): SEQ ID NO: 5731; WAN024CL5_at; Start 47; Stop 71
ctggtttttactgtcctcagcctta

SEQ ID NO: 122952 - DNA, 25 bp, Artificial
  probe
  misc_feature (1)..(25): SEQ ID NO: 5731; WAN024CL5_at; Start 17; Stop 41
aaatcctagatacagtgaaggcttt

SEQ ID NO: 122953 - DNA, 25 bp, Artificial
  probe
  misc_feature (1)..(25): SEQ ID NO: 5731; WAN024CL5_at; Start 43; Stop 67
aatgctggtttttactgtcctcagc

SEQ ID NO: 122954 - DNA, 25 bp, Artificial
  probe
  misc_feature (1)..(25): SEQ ID NO: 5731; WAN024CL5_at; Start 27; Stop 51
tacagtgaaggctttaaatgctggt

SEQ ID NO: 122955 - DNA, 25 bp, Artificial
  probe
  misc_feature (1)..(25): SEQ ID NO: 5731; WAN024CL5_at; Start 42; Stop 66
aaatgctggtttttactgtcctcag

SEQ ID NO: 122956 - DNA, 25 bp, Artificial
  probe
  misc_feature (1)..(25): SEQ ID NO: 5731; WAN024CL5_at; Start 13; Stop 37
agggaaatcctagatacagtgaagg

SEQ ID NO: 122957 - DNA, 25 bp, Artificial
  probe
  misc_feature (1)..(25): SEQ ID NO: 5731; WAN024CL5_at; Start 32; Stop 56
tgaaggctttaaatgctggttttta

SEQ ID NO: 122958 - DNA, 25 bp, Artificial
  probe
  misc_feature (1)..(25): SEQ ID NO: 5731; WAN024CL5_at; Start 35; Stop 59
aggctttaaatgctggtttttactg

SEQ ID NO: 122959 - DNA, 25 bp, Artificial
  probe
  misc_feature (1)..(25): SEQ ID NO: 5731; WAN024CL5_at; Start 50; Stop 74
gtttttactgtcctcagccttatat

SEQ ID NO: 122960 - DNA, 25 bp, Artificial
  probe
  misc_feature (1)..(25): SEQ ID NO: 5731; WAN024CL5_at; Start 18; Stop 42
aatcctagatacagtgaaggcttta

SEQ ID NO: 122961 - DNA, 25 bp, Artificial
  probe
  misc_feature (1)..(25): SEQ ID NO: 5731; WAN024CL5_at; Start 20; Stop 44
tcctagatacagtgaaggctttaaa

SEQ ID NO: 122962 - DNA, 25 bp, Artificial
  probe
  misc_feature (1)..(25): SEQ ID NO: 5731; WAN024CL5_at; Start 7; Stop 31
aaaaatagggaaatcctagatacag

SEQ ID NO: 122963 - DNA, 25 bp, Artificial
  probe
  misc_feature (1)..(25): SEQ ID NO: 5731; WAN024CL5_at; Start 21; Stop 45
cctagatacagtgaaggctttaaat

SEQ ID NO: 122964 - DNA, 25 bp, Artificial
  probe
  misc_feature (1)..(25): SEQ ID NO: 5731; WAN024CL5_at; Start 23; Stop 47
tagatacagtgaaggctttaaatgc

SEQ ID NO: 122965 - DNA, 25 bp, Artificial
  probe
  misc_feature (1)..(25): SEQ ID NO: 5731; WAN024CL5_at; Start 30; Stop 54
agtgaaggctttaaatgctggtttt

SEQ ID NO: 122966 - DNA, 25 bp, Artificial
  probe
  misc_feature (1)..(25): SEQ ID NO: 5731; WAN024CL5_at; Start 2; Stop 26
tgtctaaaaatagggaaatcctaga

SEQ ID NO: 122967 - DNA, 25 bp, Artificial
  probe
  misc_feature (1)..(25): SEQ ID NO: 5731; WAN024CL5_at; Start 28; Stop 52
acagtgaaggctttaaatgctggtt

SEQ ID NO: 122968 - DNA, 25 bp, Artificial
  probe
  misc_feature (1)..(25): SEQ ID NO: 5731; WAN024CL5_at; Start 49; Stop 73
ggtttttactgtcctcagccttata

SEQ ID NO: 122969 - DNA, 25 bp, Artificial
  probe
  misc_feature (1)..(25): SEQ ID NO: 2260; WAN024CL6_at; Start 554; Stop 578
ggatgtcttgcttcttcaaccgaga

SEQ ID NO: 122970 - DNA, 25 bp, Artificial
  probe
  misc_feature (1)..(25): SEQ ID NO: 2260; WAN024CL6_at; Start 155; Stop 179
cctgcgctggtagcggtaaaattac

SEQ ID NO: 122971 - DNA, 25 bp, Artificial
  probe
  misc_feature (1)..(25): SEQ ID NO: 2260; WAN024CL6_at; Start 81; Stop 105
tgcttcacgggatatcaaagaggct

SEQ ID NO: 122972 - DNA, 25 bp, Artificial
  probe
  misc_feature (1)..(25): SEQ ID NO: 2260; WAN024CL6_at; Start 1145; Stop 1169
ccaaagccagagctgaagaagtcaa

SEQ ID NO: 122973 - DNA, 25 bp, Artificial
  probe
  misc_feature (1)..(25): SEQ ID NO: 2260; WAN024CL6_at; Start 351; Stop 375
taagctcaatcgtgagtacgtgacg

SEQ ID NO: 122974 - DNA, 25 bp, Artificial
  probe
  misc_feature (1)..(25): SEQ ID NO: 2260; WAN024CL6_at; Start 607; Stop 631
gagtccaacatcacgattaacgctg

SEQ ID NO: 122975 - DNA, 25 bp, Artificial
  probe
  misc_feature (1)..(25): SEQ ID NO: 2260; WAN024CL6_at; Start 570; Stop 594
caaccgagaaggaaagatggaaatc

SEQ ID NO: 122976 - DNA, 25 bp, Artificial
  probe
  misc_feature (1)..(25): SEQ ID NO: 2260; WAN024CL6_at; Start 452; Stop 476
actatttcggaatcagcgctatgcg

SEQ ID NO: 122977 - DNA, 25 bp, Artificial
  probe
  misc_feature (1)..(25): SEQ ID NO: 2260; WAN024CL6_at; Start 507; Stop 531
gaaactttcgttcagggatatgctg

SEQ ID NO: 122978 - DNA, 25 bp, Artificial
  probe
  misc_feature (1)..(25): SEQ ID NO: 2260; WAN024CL6_at; Start 4; Stop 28
gacgctttaactagacgacaatttg

SEQ ID NO: 122979 - DNA, 25 bp, Artificial
  probe
  misc_feature (1)..(25): SEQ ID NO: 2260; WAN024CL6_at; Start 939; Stop 963
taaaggtggtctgagaggtcgtatc

SEQ ID NO: 122980 - DNA, 25 bp, Artificial
  probe
  misc_feature (1)..(25): SEQ ID NO: 2260; WAN024CL6_at; Start 756; Stop 780
taatgtcttcataacccagagcgct

SEQ ID NO: 122981 - DNA, 25 bp, Artificial
  probe
  misc_feature (1)..(25): SEQ ID NO: 2260; WAN024CL6_at; Start 714; Stop 738
tctgacggtcggtatgacaacaggt

SEQ ID NO: 122982 - DNA, 25 bp, Artificial
  probe
  misc_feature (1)..(25): SEQ ID NO: 2260; WAN024CL6_at; Start 367; Stop 391
tacgtgacggatttgcatttcccag

SEQ ID NO: 122983 - DNA, 25 bp, Artificial
  probe
  misc_feature (1)..(25): SEQ ID NO: 2260; WAN024CL6_at; Start 212; Stop 236
tggataccctgcaccctgagattgg

SEQ ID NO: 122984 - DNA, 25 bp, Artificial
  probe
  misc_feature (1)..(25): SEQ ID NO: 2260; WAN024CL6_at; Start 1020; Stop 1044
caagcagattaagcaacaagatggc

SEQ ID NO: 122985 - DNA, 25 bp, Artificial
  probe
  misc_feature (1)..(25): SEQ ID NO: 2260; WAN024CL6_at; Start 44; Stop 68
ccaaggaaaggacgctggctattcg

SEQ ID NO: 122986 - DNA, 25 bp, Artificial
  probe
  misc_feature (1)..(25): SEQ ID NO: 2260; WAN024CL6_at; Start 324; Stop 348
cacacttgaacttatggacggtatg

SEQ ID NO: 122987 - DNA, 25 bp, Artificial
  probe
  misc_feature (1)..(25): SEQ ID NO: 2260; WAN024CL6_at; Start 292; Stop 316
gatattgagattgaccgaaaccgca

SEQ ID NO: 122988 - DNA, 25 bp, Artificial
  probe
  misc_feature (1)..(25): SEQ ID NO: 2260; WAN024CL6_at; Start 111; Stop 135
tgagtatggctacatcaagggcgat

SEQ ID NO: 122989 - DNA, 25 bp, Artificial
  probe
  misc_feature (1)..(25): SEQ ID NO: 2260; WAN024CL6_at; Start 28; Stop 52
gacagagccatgtttgccaaggaaa

SEQ ID NO: 122990 - DNA, 25 bp, Artificial
  probe
  misc_feature (1)..(25): SEQ ID NO: 2260; WAN024CL6_at; Start 1129; Stop 1153
gatcaagtagaactggccaaagcca

SEQ ID NO: 122991 - DNA, 25 bp, Artificial
  probe
  misc_feature (1)..(25): SEQ ID NO: 2260; WAN024CL6_at; Start 589; Stop 613
gaaatccgtgatttgaccgagtcca

SEQ ID NO: 122992 - DNA, 25 bp, Artificial
  probe
  misc_feature (1)..(25): SEQ ID NO: 2260; WAN024CL6_at; Start 1002; Stop 1026
ttacgagggtacgattaccaagcag

SEQ ID NO: 122993 - DNA, 25 bp, Artificial
  probe
  misc_feature (1)..(25): SEQ ID NO: 2260; WAN024CL6_at; Start 476; Stop 500
gttaccatatcgagcaagttcctga

SEQ ID NO: 122994 - DNA, 25 bp, Artificial
  probe
  misc_feature (1)..(25): SEQ ID NO: 2260; WAN024CL6_at; Start 970; Stop 994
gatagtaaggctggaaacgataccc

SEQ ID NO: 122995 - DNA, 25 bp, Artificial
  probe
  misc_feature (1)..(25): SEQ ID NO: 2260; WAN024CL6_at; Start 1056; Stop 1080
aatccaagcgcagattgaagcagca

SEQ ID NO: 122996 - DNA, 25 bp, Artificial
  probe
  misc_feature (1)..(25): SEQ ID NO: 2260; WAN024CL6_at; Start 200; Stop 224
cgttcaataagctggataccctgca

SEQ ID NO: 122997 - DNA, 25 bp, Artificial
  probe
  misc_feature (1)..(25): SEQ ID NO: 2260; WAN024CL6_at; Start 864; Stop 888
tgggcagtgggtaaccattcagacc

SEQ ID NO: 122998 - DNA, 25 bp, Artificial
  probe
  misc_feature (1)..(25): SEQ ID NO: 2260; WAN024CL6_at; Start 250; Stop 274
gatacctaccagtgggtcaagatgg

SEQ ID NO: 122999 - DNA, 25 bp, Artificial
  probe
  misc_feature (1)..(25): SEQ ID NO: 2260; WAN024CL6_at; Start 633; Stop 657
cagttacttcttgcatggattgacc

SEQ ID NO: 123000 - DNA, 25 bp, Artificial
  probe
  misc_feature (1)..(25): SEQ ID NO: 2260; WAN024CL6_at; Start 731; Stop 755
caacaggtcggtctttggaacttga

SEQ ID NO: 123001 - DNA, 25 bp, Artificial
  probe
  misc_feature (1)..(25): SEQ ID NO: 2260; WAN024CL6_at; Start 382; Stop 406
catttcccagctgaagtacgagagg

SEQ ID NO: 123002 - DNA, 25 bp, Artificial
  probe
  misc_feature (1)..(25): SEQ ID NO: 2260; WAN024CL6_at; Start 139; Stop 163
tataagcctggtggaacctgcgctg

SEQ ID NO: 123003 - DNA, 25 bp, Artificial
  probe
  misc_feature (1)..(25): SEQ ID NO: 5702; WAN024CL7_at; Start 83; Stop 107
tgaaacgtctgcatctctttagaga

SEQ ID NO: 123004 - DNA, 25 bp, Artificial
  probe
  misc_feature (1)..(25): SEQ ID NO: 5702; WAN024CL7_at; Start 78; Stop 102
tacgatgaaacgtctgcatctcttt

SEQ ID NO: 123005 - DNA, 25 bp, Artificial
  probe
  misc_feature (1)..(25): SEQ ID NO: 5702; WAN024CL7_at; Start 76; Stop 100
tgtacgatgaaacgtctgcatctct

SEQ ID NO: 123006 - DNA, 25 bp, Artificial
  probe
  misc_feature (1)..(25): SEQ ID NO: 5702; WAN024CL7_at; Start 12; Stop 36
tgtcctttctagtgaagaaagtaag

SEQ ID NO: 123007 - DNA, 25 bp, Artificial
  probe
  misc_feature (1)..(25): SEQ ID NO: 5702; WAN024CL7_at; Start 7; Stop 31
catcttgtcctttctagtgaagaaa

SEQ ID NO: 123008 - DNA, 25 bp, Artificial
  probe
  misc_feature (1)..(25): SEQ ID NO: 5702; WAN024CL7_at; Start 28; Stop 52
gaaagtaagggagatacgacacctc

SEQ ID NO: 123009 - DNA, 25 bp, Artificial
  probe
  misc_feature (1)..(25): SEQ ID NO: 5702; WAN024CL7_at; Start 98; Stop 122
tctttagagatttatggagcaaaca

SEQ ID NO: 123010 - DNA, 25 bp, Artificial
  probe
  misc_feature (1)..(25): SEQ ID NO: 5702; WAN024CL7_at; Start 84; Stop 108
gaaacgtctgcatctctttagagat

SEQ ID NO: 123011 - DNA, 25 bp, Artificial
  probe
  misc_feature (1)..(25): SEQ ID NO: 5702; WAN024CL7_at; Start 37; Stop 61
ggagatacgacacctccctacttgc

SEQ ID NO: 123012 - DNA, 25 bp, Artificial
  probe
  misc_feature (1)..(25): SEQ ID NO: 5702; WAN024CL7_at; Start 99; Stop 123
ctttagagatttatggagcaaacat

SEQ ID NO: 123013 - DNA, 25 bp, Artificial
  probe
  misc_feature (1)..(25): SEQ ID NO: 5702; WAN024CL7_at; Start 87; Stop 111
acgtctgcatctctttagagattta

SEQ ID NO: 123014 - DNA, 25 bp, Artificial
  probe
  misc_feature (1)..(25): SEQ ID NO: 5702; WAN024CL7_at; Start 40; Stop 64
gatacgacacctccctacttgcctt

SEQ ID NO: 123015 - DNA, 25 bp, Artificial
  probe
  misc_feature (1)..(25): SEQ ID NO: 5702; WAN024CL7_at; Start 81; Stop 105
gatgaaacgtctgcatctctttaga

SEQ ID NO: 123016 - DNA, 25 bp, Artificial
  probe
  misc_feature (1)..(25): SEQ ID NO: 5702; WAN024CL7_at; Start 68; Stop 92
tatcttattgtacgatgaaacgtct

SEQ ID NO: 123017 - DNA, 25 bp, Artificial
  probe
  misc_feature (1)..(25): SEQ ID NO: 5702; WAN024CL7_at; Start 94; Stop 118
catctctttagagatttatggagca

SEQ ID NO: 123018 - DNA, 25 bp, Artificial
  probe
  misc_feature (1)..(25): SEQ ID NO: 5702; WAN024CL7_at; Start 53; Stop 77
cctacttgccttctttatcttattg

SEQ ID NO: 123019 - DNA, 25 bp, Artificial
  probe
  misc_feature (1)..(25): SEQ ID NO: 5702; WAN024CL7_at; Start 57; Stop 81
cttgccttctttatcttattgtacg

SEQ ID NO: 123020 - DNA, 25 bp, Artificial
  probe
  misc_feature (1)..(25): SEQ ID NO: 5702; WAN024CL7_at; Start 1; Stop 25
ttgtcacatcttgtcctttctagtg

SEQ ID NO: 123021 - DNA, 25 bp, Artificial
  probe
  misc_feature (1)..(25): SEQ ID NO: 5702; WAN024CL7_at; Start 74; Stop 98
attgtacgatgaaacgtctgcatct

SEQ ID NO: 123022 - DNA, 25 bp, Artificial
  probe
  misc_feature (1)..(25): SEQ ID NO: 5702; WAN024CL7_at; Start 96; Stop 120
tctctttagagatttatggagcaaa

SEQ ID NO: 123023 - DNA, 25 bp, Artificial
  probe
  misc_feature (1)..(25): SEQ ID NO: 5702; WAN024CL7_at; Start 16; Stop 40
ctttctagtgaagaaagtaagggag

SEQ ID NO: 123024 - DNA, 25 bp, Artificial
  probe
  misc_feature (1)..(25): SEQ ID NO: 5702; WAN024CL7_at; Start 33; Stop 57
taagggagatacgacacctccctac

SEQ ID NO: 123025 - DNA, 25 bp, Artificial
  probe
  misc_feature (1)..(25): SEQ ID NO: 5702; WAN024CL7_at; Start 71; Stop 95
cttattgtacgatgaaacgtctgca

SEQ ID NO: 123026 - DNA, 25 bp, Artificial
  probe
  misc_feature (1)..(25): SEQ ID NO: 5702; WAN024CL7_at; Start 36; Stop 60
gggagatacgacacctccctacttg

SEQ ID NO: 123027 - DNA, 25 bp, Artificial
  probe
  misc_feature (1)..(25): SEQ ID NO: 5702; WAN024CL7_at; Start 31; Stop 55
agtaagggagatacgacacctccct

SEQ ID NO: 123028 - DNA, 25 bp, Artificial
  probe
  misc_feature (1)..(25): SEQ ID NO: 5702; WAN024CL7_at; Start 5; Stop 29
cacatcttgtcctttctagtgaaga

SEQ ID NO: 123029 - DNA, 25 bp, Artificial
  probe
  misc_feature (1)..(25): SEQ ID NO: 5702; WAN024CL7_at; Start 20; Stop 44
ctagtgaagaaagtaagggagatac

SEQ ID NO: 123030 - DNA, 25 bp, Artificial
  probe
  misc_feature (1)..(25): SEQ ID NO: 5702; WAN024CL7_at; Start 3; Stop 27
gtcacatcttgtcctttctagtgaa

SEQ ID NO: 123031 - DNA, 25 bp, Artificial
  probe
  misc_feature (1)..(25): SEQ ID NO: 5702; WAN024CL7_at; Start 70; Stop 94
tcttattgtacgatgaaacgtctgc

SEQ ID NO: 123032 - DNA, 25 bp, Artificial
  probe
  misc_feature (1)..(25): SEQ ID NO: 5702; WAN024CL7_at; Start 24; Stop 48
tgaagaaagtaagggagatacgaca

SEQ ID NO: 123033 - DNA, 25 bp, Artificial
  probe
  misc_feature (1)..(25): SEQ ID NO: 5702; WAN024CL7_at; Start 21; Stop 45
tagtgaagaaagtaagggagatacg

SEQ ID NO: 123034 - DNA, 25 bp, Artificial
  probe
  misc_feature (1)..(25): SEQ ID NO: 5702; WAN024CL7_at; Start 101; Stop 125
ttagagatttatggagcaaacattt

SEQ ID NO: 123035 - DNA, 25 bp, Artificial
  probe
  misc_feature (1)..(25): SEQ ID NO: 5702; WAN024CL7_at; Start 73; Stop 97
tattgtacgatgaaacgtctgcatc

SEQ ID NO: 123036 - DNA, 25 bp, Artificial
  probe
  misc_feature (1)..(25): SEQ ID NO: 5702; WAN024CL7_at; Start 60; Stop 84
gccttctttatcttattgtacgatg

SEQ ID NO: 123037 - DNA, 25 bp, Artificial
  probe
  misc_feature (1)..(25): SEQ ID NO: 3440; WAN024CL8_at; Start 28; Stop 52
caaattgagtatgacgaagtgcgct

SEQ ID NO: 123038 - DNA, 25 bp, Artificial
  probe
  misc_feature (1)..(25): SEQ ID NO: 3440; WAN024CL8_at; Start 41; Stop 65
acgaagtgcgctcccatgtcctggg

SEQ ID NO: 123039 - DNA, 25 bp, Artificial
  probe
  misc_feature (1)..(25): SEQ ID NO: 3440; WAN024CL8_at; Start 115; Stop 139
tattgggatgaatttttaaagttga

SEQ ID NO: 123040 - DNA, 25 bp, Artificial
  probe
  misc_feature (1)..(25): SEQ ID NO: 3440; WAN024CL8_at; Start 35; Stop 59
agtatgacgaagtgcgctcccatgt

SEQ ID NO: 123041 - DNA, 25 bp, Artificial
  probe
  misc_feature (1)..(25): SEQ ID NO: 3440; WAN024CL8_at; Start 27; Stop 51
tcaaattgagtatgacgaagtgcgc

SEQ ID NO: 123042 - DNA, 25 bp, Artificial
  probe
  misc_feature (1)..(25): SEQ ID NO: 3440; WAN024CL8_at; Start 32; Stop 56
ttgagtatgacgaagtgcgctccca

SEQ ID NO: 123043 - DNA, 25 bp, Artificial
  probe
  misc_feature (1)..(25): SEQ ID NO: 3440; WAN024CL8_at; Start 56; Stop 80
atgtcctgggaacgcactttcttca

SEQ ID NO: 123044 - DNA, 25 bp, Artificial
  probe
  misc_feature (1)..(25): SEQ ID NO: 3440; WAN024CL8_at; Start 25; Stop 49
tctcaaattgagtatgacgaagtgc

SEQ ID NO: 123045 - DNA, 25 bp, Artificial
  probe
  misc_feature (1)..(25): SEQ ID NO: 3440; WAN024CL8_at; Start 43; Stop 67
gaagtgcgctcccatgtcctgggaa

SEQ ID NO: 123046 - DNA, 25 bp, Artificial
  probe
  misc_feature (1)..(25): SEQ ID NO: 3440; WAN024CL8_at; Start 102; Stop 126
catcgataaagactattgggatgaa

SEQ ID NO: 123047 - DNA, 25 bp, Artificial
  probe
  misc_feature (1)..(25): SEQ ID NO: 3440; WAN024CL8_at; Start 34; Stop 58
gagtatgacgaagtgcgctcccatg

SEQ ID NO: 123048 - DNA, 25 bp, Artificial
  probe
  misc_feature (1)..(25): SEQ ID NO: 3440; WAN024CL8_at; Start 93; Stop 117
tcttgaatccatcgataaagactat

SEQ ID NO: 123049 - DNA, 25 bp, Artificial
  probe
  misc_feature (1)..(25): SEQ ID NO: 3440; WAN024CL8_at; Start 31; Stop 55
attgagtatgacgaagtgcgctccc

SEQ ID NO: 123050 - DNA, 25 bp, Artificial
  probe
  misc_feature (1)..(25): SEQ ID NO: 3440; WAN024CL8_at; Start 36; Stop 60
gtatgacgaagtgcgctcccatgtc

SEQ ID NO: 123051 - DNA, 25 bp, Artificial
  probe
  misc_feature (1)..(25): SEQ ID NO: 3440; WAN024CL8_at; Start 79; Stop 103
catatttttcatattcttgaatcca

SEQ ID NO: 123052 - DNA, 25 bp, Artificial
  probe
  misc_feature (1)..(25): SEQ ID NO: 3440; WAN024CL8_at; Start 39; Stop 63
tgacgaagtgcgctcccatgtcctg

SEQ ID NO: 123053 - DNA, 25 bp, Artificial
  probe
  misc_feature (1)..(25): SEQ ID NO: 3440; WAN024CL8_at; Start 58; Stop 82
gtcctgggaacgcactttcttcata

SEQ ID NO: 123054 - DNA, 25 bp, Artificial
  probe
  misc_feature (1)..(25): SEQ ID NO: 3440; WAN024CL8_at; Start 88; Stop 112
catattcttgaatccatcgataaag

SEQ ID NO: 123055 - DNA, 25 bp, Artificial
  probe
  misc_feature (1)..(25): SEQ ID NO: 3440; WAN024CL8_at; Start 62; Stop 86
tgggaacgcactttcttcatatttt

SEQ ID NO: 123056 - DNA, 25 bp, Artificial
  probe
  misc_feature (1)..(25): SEQ ID NO: 3440; WAN024CL8_at; Start 111; Stop 135
agactattgggatgaatttttaaag

SEQ ID NO: 123057 - DNA, 25 bp, Artificial
  probe
  misc_feature (1)..(25): SEQ ID NO: 3440; WAN024CL8_at; Start 100; Stop 124
tccatcgataaagactattgggatg

SEQ ID NO: 123058 - DNA, 25 bp, Artificial
  probe
  misc_feature (1)..(25): SEQ ID NO: 3440; WAN024CL8_at; Start 55; Stop 79
catgtcctgggaacgcactttcttc

SEQ ID NO: 123059 - DNA, 25 bp, Artificial
  probe
  misc_feature (1)..(25): SEQ ID NO: 3440; WAN024CL8_at; Start 30; Stop 54
aattgagtatgacgaagtgcgctcc

SEQ ID NO: 123060 - DNA, 25 bp, Artificial
  probe
  misc_feature (1)..(25): SEQ ID NO: 3440; WAN024CL8_at; Start 97; Stop 121
gaatccatcgataaagactattggg

SEQ ID NO: 123061 - DNA, 25 bp, Artificial
  probe
  misc_feature (1)..(25): SEQ ID NO: 3440; WAN024CL8_at; Start 90; Stop 114
tattcttgaatccatcgataaagac

SEQ ID NO: 123062 - DNA, 25 bp, Artificial
  probe
  misc_feature (1)..(25): SEQ ID NO: 3440; WAN024CL8_at; Start 65; Stop 89
gaacgcactttcttcatatttttca

SEQ ID NO: 123063 - DNA, 25 bp, Artificial
  probe
  misc_feature (1)..(25): SEQ ID NO: 3440; WAN024CL8_at; Start 33; Stop 57
tgagtatgacgaagtgcgctcccat

SEQ ID NO: 123064 - DNA, 25 bp, Artificial
  probe
  misc_feature (1)..(25): SEQ ID NO: 3440; WAN024CL8_at; Start 60; Stop 84
cctgggaacgcactttcttcatatt

SEQ ID NO: 123065 - DNA, 25 bp, Artificial
  probe
  misc_feature (1)..(25): SEQ ID NO: 3440; WAN024CL8_at; Start 50; Stop 74
gctcccatgtcctgggaacgcactt

SEQ ID NO: 123066 - DNA, 25 bp, Artificial
  probe
  misc_feature (1)..(25): SEQ ID NO: 3440; WAN024CL8_at; Start 29; Stop 53
aaattgagtatgacgaagtgcgctc

SEQ ID NO: 123067 - DNA, 25 bp, Artificial
  probe
  misc_feature (1)..(25): SEQ ID NO: 3440; WAN024CL8_at; Start 45; Stop 69
agtgcgctcccatgtcctgggaacg

SEQ ID NO: 123068 - DNA, 25 bp, Artificial
  probe
  misc_feature (1)..(25): SEQ ID NO: 3440; WAN024CL8_at; Start 105; Stop 129
cgataaagactattgggatgaattt

SEQ ID NO: 123069 - DNA, 25 bp, Artificial
  probe
  misc_feature (1)..(25): SEQ ID NO: 3440; WAN024CL8_at; Start 47; Stop 71
tgcgctcccatgtcctgggaacgca

SEQ ID NO: 123070 - DNA, 25 bp, Artificial
  probe
  misc_feature (1)..(25): SEQ ID NO: 3440; WAN024CL8_at; Start 54; Stop 78
ccatgtcctgggaacgcactttctt

SEQ ID NO: 123071 - DNA, 25 bp, Artificial
  probe
  misc_feature (1)..(25): SEQ ID NO: 1801; WAN024CL9_at; Start 25; Stop 49
catcccaatagtctttatcgatgga

SEQ ID NO: 123072 - DNA, 25 bp, Artificial
  probe
  misc_feature (1)..(25): SEQ ID NO: 1801; WAN024CL9_at; Start 70; Stop 94
gaagaaagtgcgttcccaggacatg

SEQ ID NO: 123073 - DNA, 25 bp, Artificial
  probe
  misc_feature (1)..(25): SEQ ID NO: 1801; WAN024CL9_at; Start 84; Stop 108
cccaggacatgggagcgcacttcgt

SEQ ID NO: 123074 - DNA, 25 bp, Artificial
  probe
  misc_feature (1)..(25): SEQ ID NO: 1801; WAN024CL9_at; Start 78; Stop 102
tgcgttcccaggacatgggagcgca

SEQ ID NO: 123075 - DNA, 25 bp, Artificial
  probe
  misc_feature (1)..(25): SEQ ID NO: 1801; WAN024CL9_at; Start 61; Stop 85
gaaaaatatgaagaaagtgcgttcc

SEQ ID NO: 123076 - DNA, 25 bp, Artificial
  probe
  misc_feature (1)..(25): SEQ ID NO: 1801; WAN024CL9_at; Start 40; Stop 64
tatcgatggattcaagaatatgaaa

SEQ ID NO: 123077 - DNA, 25 bp, Artificial
  probe
  misc_feature (1)..(25): SEQ ID NO: 1801; WAN024CL9_at; Start 111; Stop 135
tactcaatttgagatactaactaat

SEQ ID NO: 123078 - DNA, 25 bp, Artificial
  probe
  misc_feature (1)..(25): SEQ ID NO: 1801; WAN024CL9_at; Start 65; Stop 89
aatatgaagaaagtgcgttcccagg

SEQ ID NO: 123079 - DNA, 25 bp, Artificial
  probe
  misc_feature (1)..(25): SEQ ID NO: 1801; WAN024CL9_at; Start 30; Stop 54
caatagtctttatcgatggattcaa

SEQ ID NO: 123080 - DNA, 25 bp, Artificial
  probe
  misc_feature (1)..(25): SEQ ID NO: 1801; WAN024CL9_at; Start 14; Stop 38
ctttaaaaattcatcccaatagtct

SEQ ID NO: 123081 - DNA, 25 bp, Artificial
  probe
  misc_feature (1)..(25): SEQ ID NO: 1801; WAN024CL9_at; Start 93; Stop 117
tgggagcgcacttcgtcatactcaa

SEQ ID NO: 123082 - DNA, 25 bp, Artificial
  probe
  misc_feature (1)..(25): SEQ ID NO: 1801; WAN024CL9_at; Start 97; Stop 121
agcgcacttcgtcatactcaatttg

SEQ ID NO: 123083 - DNA, 25 bp, Artificial
  probe
  misc_feature (1)..(25): SEQ ID NO: 1801; WAN024CL9_at; Start 89; Stop 113
gacatgggagcgcacttcgtcatac

SEQ ID NO: 123084 - DNA, 25 bp, Artificial
  probe
  misc_feature (1)..(25): SEQ ID NO: 1801; WAN024CL9_at; Start 69; Stop 93
tgaagaaagtgcgttcccaggacat

SEQ ID NO: 123085 - DNA, 25 bp, Artificial
  probe
  misc_feature (1)..(25): SEQ ID NO: 1801; WAN024CL9_at; Start 82; Stop 106
ttcccaggacatgggagcgcacttc

SEQ ID NO: 123086 - DNA, 25 bp, Artificial
  probe
  misc_feature (1)..(25): SEQ ID NO: 1801; WAN024CL9_at; Start 100; Stop 124
gcacttcgtcatactcaatttgaga

SEQ ID NO: 123087 - DNA, 25 bp, Artificial
  probe
  misc_feature (1)..(25): SEQ ID NO: 1801; WAN024CL9_at; Start 67; Stop 91
tatgaagaaagtgcgttcccaggac

SEQ ID NO: 123088 - DNA, 25 bp, Artificial
  probe
  misc_feature (1)..(25): SEQ ID NO: 1801; WAN024CL9_at; Start 33; Stop 57
tagtctttatcgatggattcaagaa

SEQ ID NO: 123089 - DNA, 25 bp, Artificial
  probe
  misc_feature (1)..(25): SEQ ID NO: 1801; WAN024CL9_at; Start 71; Stop 95
aagaaagtgcgttcccaggacatgg

SEQ ID NO: 123090 - DNA, 25 bp, Artificial
  probe
  misc_feature (1)..(25): SEQ ID NO: 1801; WAN024CL9_at; Start 91; Stop 115
catgggagcgcacttcgtcatactc

SEQ ID NO: 123091 - DNA, 25 bp, Artificial
  probe
  misc_feature (1)..(25): SEQ ID NO: 1801; WAN024CL9_at; Start 80; Stop 104
cgttcccaggacatgggagcgcact

SEQ ID NO: 123092 - DNA, 25 bp, Artificial
  probe
  misc_feature (1)..(25): SEQ ID NO: 1801; WAN024CL9_at; Start 58; Stop 82
tatgaaaaatatgaagaaagtgcgt

SEQ ID NO: 123093 - DNA, 25 bp, Artificial
  probe
  misc_feature (1)..(25): SEQ ID NO: 1801; WAN024CL9_at; Start 94; Stop 118
gggagcgcacttcgtcatactcaat

SEQ ID NO: 123094 - DNA, 25 bp, Artificial
  probe
  misc_feature (1)..(25): SEQ ID NO: 1801; WAN024CL9_at; Start 86; Stop 110
caggacatgggagcgcacttcgtca

SEQ ID NO: 123095 - DNA, 25 bp, Artificial
  probe
  misc_feature (1)..(25): SEQ ID NO: 1801; WAN024CL9_at; Start 28; Stop 52
cccaatagtctttatcgatggattc

SEQ ID NO: 123096 - DNA, 25 bp, Artificial
  probe
  misc_feature (1)..(25): SEQ ID NO: 1801; WAN024CL9_at; Start 63; Stop 87
aaaatatgaagaaagtgcgttccca

SEQ ID NO: 123097 - DNA, 25 bp, Artificial
  probe
  misc_feature (1)..(25): SEQ ID NO: 1801; WAN024CL9_at; Start 75; Stop 99
aagtgcgttcccaggacatgggagc

SEQ ID NO: 123098 - DNA, 25 bp, Artificial
  probe
  misc_feature (1)..(25): SEQ ID NO: 1801; WAN024CL9_at; Start 20; Stop 44
aaattcatcccaatagtctttatcg

SEQ ID NO: 123099 - DNA, 25 bp, Artificial
  probe
  misc_feature (1)..(25): SEQ ID NO: 1801; WAN024CL9_at; Start 95; Stop 119
ggagcgcacttcgtcatactcaatt

SEQ ID NO: 123100 - DNA, 25 bp, Artificial
  probe
  misc_feature (1)..(25): SEQ ID NO: 1801; WAN024CL9_at; Start 101; Stop 125
cacttcgtcatactcaatttgagat

SEQ ID NO: 123101 - DNA, 25 bp, Artificial
  probe
  misc_feature (1)..(25): SEQ ID NO: 1801; WAN024CL9_at; Start 37; Stop 61
ctttatcgatggattcaagaatatg

SEQ ID NO: 123102 - DNA, 25 bp, Artificial
  probe
  misc_feature (1)..(25): SEQ ID NO: 1801; WAN024CL9_at; Start 98; Stop 122
gcgcacttcgtcatactcaatttga

SEQ ID NO: 123103 - DNA, 25 bp, Artificial
  probe
  misc_feature (1)..(25): SEQ ID NO: 1801; WAN024CL9_at; Start 11; Stop 35
caactttaaaaattcatcccaatag

SEQ ID NO: 123104 - DNA, 25 bp, Artificial
  probe
  misc_feature (1)..(25): SEQ ID NO: 1801; WAN024CL9_at; Start 43; Stop 67
cgatggattcaagaatatgaaaaat

SEQ ID NO: 123105 - DNA, 25 bp, Artificial
  probe
  misc_feature (1)..(25): SEQ ID NO: 3809; WAN024CLA_at; Start 343; Stop 367
tagagactactgacttccagcgtgt

SEQ ID NO: 123106 - DNA, 25 bp, Artificial
  probe
  misc_feature (1)..(25): SEQ ID NO: 3809; WAN024CLA_at; Start 1663; Stop 1687
catcgagagcaaacttctatgggaa

SEQ ID NO: 123107 - DNA, 25 bp, Artificial
  probe
  misc_feature (1)..(25): SEQ ID NO: 3809; WAN024CLA_at; Start 1832; Stop 1856
gatggaacaaaaatcagacagacgc

SEQ ID NO: 123108 - DNA, 25 bp, Artificial
  probe
  misc_feature (1)..(25): SEQ ID NO: 3809; WAN024CLA_at; Start 962; Stop 986
tagaacatggcaaccacatccagaa

SEQ ID NO: 123109 - DNA, 25 bp, Artificial
  probe
  misc_feature (1)..(25): SEQ ID NO: 3809; WAN024CLA_at; Start 1064; Stop 1088
tcaaaacatcaactcggctggagat

SEQ ID NO: 123110 - DNA, 25 bp, Artificial
  probe
  misc_feature (1)..(25): SEQ ID NO: 3809; WAN024CLA_at; Start 116; Stop 140
tacaagcagtgagcaaggaaccact

SEQ ID NO: 123111 - DNA, 25 bp, Artificial
  probe
  misc_feature (1)..(25): SEQ ID NO: 3809; WAN024CLA_at; Start 994; Stop 1018
tcgcagatgcgaataagaagcttga

SEQ ID NO: 123112 - DNA, 25 bp, Artificial
  probe
  misc_feature (1)..(25): SEQ ID NO: 3809; WAN024CLA_at; Start 1139; Stop 1163
gaaattgacccacatcactggagag

SEQ ID NO: 123113 - DNA, 25 bp, Artificial
  probe
  misc_feature (1)..(25): SEQ ID NO: 3809; WAN024CLA_at; Start 1158; Stop 1182
ggagagaccctgattgacagagcag

SEQ ID NO: 123114 - DNA, 25 bp, Artificial
  probe
  misc_feature (1)..(25): SEQ ID NO: 3809; WAN024CLA_at; Start 1049; Stop 1073
tggctcatgggcagttcaaaacatc

SEQ ID NO: 123115 - DNA, 25 bp, Artificial
  probe
  misc_feature (1)..(25): SEQ ID NO: 3809; WAN024CLA_at; Start 426; Stop 450
gataaggttgctcgcatggctctga

SEQ ID NO: 123116 - DNA, 25 bp, Artificial
  probe
  misc_feature (1)..(25): SEQ ID NO: 3809; WAN024CLA_at; Start 67; Stop 91
cttataagcaagatgtgggcggtca

SEQ ID NO: 123117 - DNA, 25 bp, Artificial
  probe
  misc_feature (1)..(25): SEQ ID NO: 3809; WAN024CLA_at; Start 215; Stop 239
gactcaggtcgctacaaacaaggat

SEQ ID NO: 123118 - DNA, 25 bp, Artificial
  probe
  misc_feature (1)..(25): SEQ ID NO: 3809; WAN024CLA_at; Start 314; Stop 338
gaatgtgaccaatcaactagcgcga

SEQ ID NO: 123119 - DNA, 25 bp, Artificial
  probe
  misc_feature (1)..(25): SEQ ID NO: 3809; WAN024CLA_at; Start 1257; Stop 1281
gacgctgaagcggtaactgctgaga

SEQ ID NO: 123120 - DNA, 25 bp, Artificial
  probe
  misc_feature (1)..(25): SEQ ID NO: 3809; WAN024CLA_at; Start 1445; Stop 1469
tcaatttgaccagggtggcggtcgc

SEQ ID NO: 123121 - DNA, 25 bp, Artificial
  probe
  misc_feature (1)..(25): SEQ ID NO: 3809; WAN024CLA_at; Start 1110; Stop 1134
ggcgccaatggacataaccgctttg

SEQ ID NO: 123122 - DNA, 25 bp, Artificial
  probe
  misc_feature (1)..(25): SEQ ID NO: 3809; WAN024CLA_at; Start 385; Stop 409
tttacgagcggattttgggcaatac

SEQ ID NO: 123123 - DNA, 25 bp, Artificial
  probe
  misc_feature (1)..(25): SEQ ID NO: 3809; WAN024CLA_at; Start 1528; Stop 1552
tccggacagccttctgggcgaactg

SEQ ID NO: 123124 - DNA, 25 bp, Artificial
  probe
  misc_feature (1)..(25): SEQ ID NO: 3809; WAN024CLA_at; Start 21; Stop 45
caatctgtagatggtaagttcacgg

SEQ ID NO: 123125 - DNA, 25 bp, Artificial
  probe
  misc_feature (1)..(25): SEQ ID NO: 3809; WAN024CLA_at; Start 358; Stop 382
tccagcgtgttaaggaaaccagtaa

SEQ ID NO: 123126 - DNA, 25 bp, Artificial
  probe
  misc_feature (1)..(25): SEQ ID NO: 3809; WAN024CLA_at; Start 1886; Stop 1910
gaaagccttggacaaaatcaacaga

SEQ ID NO: 123127 - DNA, 25 bp, Artificial
  probe
  misc_feature (1)..(25): SEQ ID NO: 3809; WAN024CLA_at; Start 276; Stop 300
gtttctgcaaacaaagcgaatgctg

SEQ ID NO: 123128 - DNA, 25 bp, Artificial
  probe
  misc_feature (1)..(25): SEQ ID NO: 3809; WAN024CLA_at; Start 479; Stop 503
gaaatatagtgtaagcggccctaac

SEQ ID NO: 123129 - DNA, 25 bp, Artificial
  probe
  misc_feature (1)..(25): SEQ ID NO: 3809; WAN024CLA_at; Start 1555; Stop 1579
gaaataattggaactatgccggacc

SEQ ID NO: 123130 - DNA, 25 bp, Artificial
  probe
  misc_feature (1)..(25): SEQ ID NO: 3809; WAN024CLA_at; Start 1765; Stop 1789
atcccaaaggcggaaggaatgcggt

SEQ ID NO: 123131 - DNA, 25 bp, Artificial
  probe
  misc_feature (1)..(25): SEQ ID NO: 3809; WAN024CLA_at; Start 590; Stop 614
tcacaacgggcagaaagaccttatg

SEQ ID NO: 123132 - DNA, 25 bp, Artificial
  probe
  misc_feature (1)..(25): SEQ ID NO: 3809; WAN024CLA_at; Start 575; Stop 599
taagcatagcttttatcacaacggg

SEQ ID NO: 123133 - DNA, 25 bp, Artificial
  probe
  misc_feature (1)..(25): SEQ ID NO: 3809; WAN024CLA_at; Start 82; Stop 106
tgggcggtcaaatcagtggtctatc

SEQ ID NO: 123134 - DNA, 25 bp, Artificial
  probe
  misc_feature (1)..(25): SEQ ID NO: 3809; WAN024CLA_at; Start 817; Stop 841
ctacctctagatgcgaagatgtctc

SEQ ID NO: 123135 - DNA, 25 bp, Artificial
  probe
  misc_feature (1)..(25): SEQ ID NO: 3809; WAN024CLA_at; Start 239; Stop 263
taatgctgaacgacaaatgggtaga

SEQ ID NO: 123136 - DNA, 25 bp, Artificial
  probe
  misc_feature (1)..(25): SEQ ID NO: 3809; WAN024CLA_at; Start 1977; Stop 2001
gaggctgaaaccatcgttccaaaaa

SEQ ID NO: 123137 - DNA, 25 bp, Artificial
  probe
  misc_feature (1)..(25): SEQ ID NO: 3809; WAN024CLA_at; Start 1227; Stop 1251
gaagctggttcggtcacgactacga

SEQ ID NO: 123138 - DNA, 25 bp, Artificial
  probe
  misc_feature (1)..(25): SEQ ID NO: 3809; WAN024CLA_at; Start 1571; Stop 1595
tgccggacctaaagcatggaacgtc

SEQ ID NO: 123139 - DNA, 25 bp, Artificial
  probe
  misc_feature (1)..(25): SEQ ID NO: 4976; WAN024CLB_at; Start 49; Stop 73
aacttgcgattttcacagagaaagg

SEQ ID NO: 123140 - DNA, 25 bp, Artificial
  probe
  misc_feature (1)..(25): SEQ ID NO: 4976; WAN024CLB_at; Start 62; Stop 86
cacagagaaaggaagaaaaagtata

SEQ ID NO: 123141 - DNA, 25 bp, Artificial
  probe
  misc_feature (1)..(25): SEQ ID NO: 4976; WAN024CLB_at; Start 45; Stop 69
gaaaaacttgcgattttcacagaga

SEQ ID NO: 123142 - DNA, 25 bp, Artificial
  probe
  misc_feature (1)..(25): SEQ ID NO: 4976; WAN024CLB_at; Start 55; Stop 79
cgattttcacagagaaaggaagaaa

SEQ ID NO: 123143 - DNA, 25 bp, Artificial
  probe
  misc_feature (1)..(25): SEQ ID NO: 4976; WAN024CLB_at; Start 41; Stop 65
gtgggaaaaacttgcgattttcaca

SEQ ID NO: 123144 - DNA, 25 bp, Artificial
  probe
  misc_feature (1)..(25): SEQ ID NO: 4976; WAN024CLB_at; Start 47; Stop 71
aaaacttgcgattttcacagagaaa

SEQ ID NO: 123145 - DNA, 25 bp, Artificial
  probe
  misc_feature (1)..(25): SEQ ID NO: 4976; WAN024CLB_at; Start 50; Stop 74
acttgcgattttcacagagaaagga

SEQ ID NO: 123146 - DNA, 25 bp, Artificial
  probe
  misc_feature (1)..(25): SEQ ID NO: 4976; WAN024CLB_at; Start 3; Stop 27
gaagttctggaaagatgttgtttca

SEQ ID NO: 123147 - DNA, 25 bp, Artificial
  probe
  misc_feature (1)..(25): SEQ ID NO: 4976; WAN024CLB_at; Start 61; Stop 85
tcacagagaaaggaagaaaaagtat

SEQ ID NO: 123148 - DNA, 25 bp, Artificial
  probe
  misc_feature (1)..(25): SEQ ID NO: 4976; WAN024CLB_at; Start 21; Stop 45
tgtttcagtattgagaaaaggtggg

SEQ ID NO: 123149 - DNA, 25 bp, Artificial
  probe
  misc_feature (1)..(25): SEQ ID NO: 4976; WAN024CLB_at; Start 4; Stop 28
aagttctggaaagatgttgtttcag

SEQ ID NO: 123150 - DNA, 25 bp, Artificial
  probe
  misc_feature (1)..(25): SEQ ID NO: 4976; WAN024CLB_at; Start 25; Stop 49
tcagtattgagaaaaggtgggaaaa

SEQ ID NO: 123151 - DNA, 25 bp, Artificial
  probe
  misc_feature (1)..(25): SEQ ID NO: 4976; WAN024CLB_at; Start 64; Stop 88
cagagaaaggaagaaaaagtataga

SEQ ID NO: 123152 - DNA, 25 bp, Artificial
  probe
  misc_feature (1)..(25): SEQ ID NO: 4976; WAN024CLB_at; Start 46; Stop 70
aaaaacttgcgattttcacagagaa

SEQ ID NO: 123153 - DNA, 25 bp, Artificial
  probe
  misc_feature (1)..(25): SEQ ID NO: 4976; WAN024CLB_at; Start 23; Stop 47
tttcagtattgagaaaaggtgggaa

SEQ ID NO: 123154 - DNA, 25 bp, Artificial
  probe
  misc_feature (1)..(25): SEQ ID NO: 4976; WAN024CLB_at; Start 48; Stop 72
aaacttgcgattttcacagagaaag

SEQ ID NO: 123155 - DNA, 25 bp, Artificial
  probe
  misc_feature (1)..(25): SEQ ID NO: 4976; WAN024CLB_at; Start 54; Stop 78
gcgattttcacagagaaaggaagaa

SEQ ID NO: 123156 - DNA, 25 bp, Artificial
  probe
  misc_feature (1)..(25): SEQ ID NO: 4976; WAN024CLB_at; Start 14; Stop 38
aagatgttgtttcagtattgagaaa

SEQ ID NO: 123157 - DNA, 25 bp, Artificial
  probe
  misc_feature (1)..(25): SEQ ID NO: 4976; WAN024CLB_at; Start 44; Stop 68
ggaaaaacttgcgattttcacagag

SEQ ID NO: 123158 - DNA, 25 bp, Artificial
  probe
  misc_feature (1)..(25): SEQ ID NO: 4976; WAN024CLB_at; Start 60; Stop 84
ttcacagagaaaggaagaaaaagta

SEQ ID NO: 123159 - DNA, 25 bp, Artificial
  probe
  misc_feature (1)..(25): SEQ ID NO: 4976; WAN024CLB_at; Start 6; Stop 30
gttctggaaagatgttgtttcagta

SEQ ID NO: 123160 - DNA, 25 bp, Artificial
  probe
  misc_feature (1)..(25): SEQ ID NO: 4976; WAN024CLB_at; Start 22; Stop 46
gtttcagtattgagaaaaggtggga

SEQ ID NO: 123161 - DNA, 25 bp, Artificial
  probe
  misc_feature (1)..(25): SEQ ID NO: 4976; WAN024CLB_at; Start 53; Stop 77
tgcgattttcacagagaaaggaaga

SEQ ID NO: 123162 - DNA, 25 bp, Artificial
  probe
  misc_feature (1)..(25): SEQ ID NO: 4976; WAN024CLB_at; Start 2; Stop 26
tgaagttctggaaagatgttgtttc

SEQ ID NO: 123163 - DNA, 25 bp, Artificial
  probe
  misc_feature (1)..(25): SEQ ID NO: 4976; WAN024CLB_at; Start 13; Stop 37
aaagatgttgtttcagtattgagaa

SEQ ID NO: 123164 - DNA, 25 bp, Artificial
  probe
  misc_feature (1)..(25): SEQ ID NO: 4976; WAN024CLB_at; Start 52; Stop 76
ttgcgattttcacagagaaaggaag

SEQ ID NO: 123165 - DNA, 25 bp, Artificial
  probe
  misc_feature (1)..(25): SEQ ID NO: 4976; WAN024CLB_at; Start 51; Stop 75
cttgcgattttcacagagaaaggaa

SEQ ID NO: 123166 - DNA, 25 bp, Artificial
  probe
  misc_feature (1)..(25): SEQ ID NO: 4976; WAN024CLB_at; Start 11; Stop 35
ggaaagatgttgtttcagtattgag

SEQ ID NO: 123167 - DNA, 25 bp, Artificial
  probe
  misc_feature (1)..(25): SEQ ID NO: 4976; WAN024CLB_at; Start 56; Stop 80
gattttcacagagaaaggaagaaaa

SEQ ID NO: 123168 - DNA, 25 bp, Artificial
  probe
  misc_feature (1)..(25): SEQ ID NO: 4976; WAN024CLB_at; Start 9; Stop 33
ctggaaagatgttgtttcagtattg

SEQ ID NO: 123169 - DNA, 25 bp, Artificial
  probe
  misc_feature (1)..(25): SEQ ID NO: 4976; WAN024CLB_at; Start 16; Stop 40
gatgttgtttcagtattgagaaaag

SEQ ID NO: 123170 - DNA, 25 bp, Artificial
  probe
  misc_feature (1)..(25): SEQ ID NO: 4976; WAN024CLB_at; Start 42; Stop 66
tgggaaaaacttgcgattttcacag

SEQ ID NO: 123171 - DNA, 25 bp, Artificial
  probe
  misc_feature (1)..(25): SEQ ID NO: 4976; WAN024CLB_at; Start 12; Stop 36
gaaagatgttgtttcagtattgaga

SEQ ID NO: 123172 - DNA, 25 bp, Artificial
  probe
  misc_feature (1)..(25): SEQ ID NO: 4976; WAN024CLB_at; Start 18; Stop 42
tgttgtttcagtattgagaaaaggt

SEQ ID NO: 123173 - DNA, 25 bp, Artificial
  probe
  misc_feature (1)..(25): SEQ ID NO: 725; WAN024CLC_at; Start 86; Stop 110
tgtcagtcctatttacagtgtcaaa

SEQ ID NO: 123174 - DNA, 25 bp, Artificial
  probe
  misc_feature (1)..(25): SEQ ID NO: 725; WAN024CLC_at; Start 15; Stop 39
tagagactgtaaaaatatacttttg

SEQ ID NO: 123175 - DNA, 25 bp, Artificial
  probe
  misc_feature (1)..(25): SEQ ID NO: 725; WAN024CLC_at; Start 80; Stop 104
agaccttgtcagtcctatttacagt

SEQ ID NO: 123176 - DNA, 25 bp, Artificial
  probe
  misc_feature (1)..(25): SEQ ID NO: 725; WAN024CLC_at; Start 72; Stop 96
tagaatgcagaccttgtcagtccta

SEQ ID NO: 123177 - DNA, 25 bp, Artificial
  probe
  misc_feature (1)..(25): SEQ ID NO: 725; WAN024CLC_at; Start 81; Stop 105
gaccttgtcagtcctatttacagtg

SEQ ID NO: 123178 - DNA, 25 bp, Artificial
  probe
  misc_feature (1)..(25): SEQ ID NO: 725; WAN024CLC_at; Start 3; Stop 27
gaaaaggacatatagagactgtaaa

SEQ ID NO: 123179 - DNA, 25 bp, Artificial
  probe
  misc_feature (1)..(25): SEQ ID NO: 725; WAN024CLC_at; Start 83; Stop 107
ccttgtcagtcctatttacagtgtc

SEQ ID NO: 123180 - DNA, 25 bp, Artificial
  probe
  misc_feature (1)..(25): SEQ ID NO: 725; WAN024CLC_at; Start 67; Stop 91
gtagatagaatgcagaccttgtcag

SEQ ID NO: 123181 - DNA, 25 bp, Artificial
  probe
  misc_feature (1)..(25): SEQ ID NO: 725; WAN024CLC_at; Start 79; Stop 103
cagaccttgtcagtcctatttacag

SEQ ID NO: 123182 - DNA, 25 bp, Artificial
  probe
  misc_feature (1)..(25): SEQ ID NO: 725; WAN024CLC_at; Start 5; Stop 29
aaaggacatatagagactgtaaaaa

SEQ ID NO: 123183 - DNA, 25 bp, Artificial
  probe
  misc_feature (1)..(25): SEQ ID NO: 725; WAN024CLC_at; Start 70; Stop 94
gatagaatgcagaccttgtcagtcc

SEQ ID NO: 123184 - DNA, 25 bp, Artificial
  probe
  misc_feature (1)..(25): SEQ ID NO: 725; WAN024CLC_at; Start 68; Stop 92
tagatagaatgcagaccttgtcagt

SEQ ID NO: 123185 - DNA, 25 bp, Artificial
  probe
  misc_feature (1)..(25): SEQ ID NO: 725; WAN024CLC_at; Start 85; Stop 109
ttgtcagtcctatttacagtgtcaa

SEQ ID NO: 123186 - DNA, 25 bp, Artificial
  probe
  misc_feature (1)..(25): SEQ ID NO: 725; WAN024CLC_at; Start 75; Stop 99
aatgcagaccttgtcagtcctattt

SEQ ID NO: 123187 - DNA, 25 bp, Artificial
  probe
  misc_feature (1)..(25): SEQ ID NO: 725; WAN024CLC_at; Start 7; Stop 31
aggacatatagagactgtaaaaata

SEQ ID NO: 123188 - DNA, 25 bp, Artificial
  probe
  misc_feature (1)..(25): SEQ ID NO: 725; WAN024CLC_at; Start 2; Stop 26
tgaaaaggacatatagagactgtaa

SEQ ID NO: 123189 - DNA, 25 bp, Artificial
  probe
  misc_feature (1)..(25): SEQ ID NO: 725; WAN024CLC_at; Start 77; Stop 101
tgcagaccttgtcagtcctatttac

SEQ ID NO: 123190 - DNA, 25 bp, Artificial
  probe
  misc_feature (1)..(25): SEQ ID NO: 725; WAN024CLC_at; Start 65; Stop 89
ttgtagatagaatgcagaccttgtc

SEQ ID NO: 123191 - DNA, 25 bp, Artificial
  probe
  misc_feature (1)..(25): SEQ ID NO: 725; WAN024CLC_at; Start 71; Stop 95
atagaatgcagaccttgtcagtcct

SEQ ID NO: 123192 - DNA, 25 bp, Artificial
  probe
  misc_feature (1)..(25): SEQ ID NO: 725; WAN024CLC_at; Start 17; Stop 41
gagactgtaaaaatatacttttgaa

SEQ ID NO: 123193 - DNA, 25 bp, Artificial
  probe
  misc_feature (1)..(25): SEQ ID NO: 725; WAN024CLC_at; Start 84; Stop 108
cttgtcagtcctatttacagtgtca

SEQ ID NO: 123194 - DNA, 25 bp, Artificial
  probe
  misc_feature (1)..(25): SEQ ID NO: 725; WAN024CLC_at; Start 61; Stop 85
gttattgtagatagaatgcagacct

SEQ ID NO: 123195 - DNA, 25 bp, Artificial
  probe
  misc_feature (1)..(25): SEQ ID NO: 725; WAN024CLC_at; Start 64; Stop 88
attgtagatagaatgcagaccttgt

SEQ ID NO: 123196 - DNA, 25 bp, Artificial
  probe
  misc_feature (1)..(25): SEQ ID NO: 725; WAN024CLC_at; Start 57; Stop 81
gggtgttattgtagatagaatgcag

SEQ ID NO: 123197 - DNA, 25 bp, Artificial
  probe
  misc_feature (1)..(25): SEQ ID NO: 725; WAN024CLC_at; Start 66; Stop 90
tgtagatagaatgcagaccttgtca

SEQ ID NO: 123198 - DNA, 25 bp, Artificial
  probe
  misc_feature (1)..(25): SEQ ID NO: 725; WAN024CLC_at; Start 82; Stop 106
accttgtcagtcctatttacagtgt

SEQ ID NO: 123199 - DNA, 25 bp, Artificial
  probe
  misc_feature (1)..(25): SEQ ID NO: 725; WAN024CLC_at; Start 78; Stop 102
gcagaccttgtcagtcctatttaca

SEQ ID NO: 123200 - DNA, 25 bp, Artificial
  probe
  misc_feature (1)..(25): SEQ ID NO: 725; WAN024CLC_at; Start 73; Stop 97
agaatgcagaccttgtcagtcctat

SEQ ID NO: 123201 - DNA, 25 bp, Artificial
  probe
  misc_feature (1)..(25): SEQ ID NO: 725; WAN024CLC_at; Start 60; Stop 84
tgttattgtagatagaatgcagacc

SEQ ID NO: 123202 - DNA, 25 bp, Artificial
  probe
  misc_feature (1)..(25): SEQ ID NO: 725; WAN024CLC_at; Start 63; Stop 87
tattgtagatagaatgcagaccttg

SEQ ID NO: 123203 - DNA, 25 bp, Artificial
  probe
  misc_feature (1)..(25): SEQ ID NO: 725; WAN024CLC_at; Start 11; Stop 35
catatagagactgtaaaaatatact

SEQ ID NO: 123204 - DNA, 25 bp, Artificial
  probe
  misc_feature (1)..(25): SEQ ID NO: 725; WAN024CLC_at; Start 69; Stop 93
agatagaatgcagaccttgtcagtc

SEQ ID NO: 123205 - DNA, 25 bp, Artificial
  probe
  misc_feature (1)..(25): SEQ ID NO: 725; WAN024CLC_at; Start 74; Stop 98
gaatgcagaccttgtcagtcctatt

SEQ ID NO: 123206 - DNA, 25 bp, Artificial
  probe
  misc_feature (1)..(25): SEQ ID NO: 725; WAN024CLC_at; Start 62; Stop 86
ttattgtagatagaatgcagacctt

SEQ ID NO: 123207 - DNA, 25 bp, Artificial
  probe
  misc_feature (1)..(25): SEQ ID NO: 4251; WAN024CLD_at; Start 47; Stop 71
cgccccagctggaagacggaagttt

SEQ ID NO: 123208 - DNA, 25 bp, Artificial
  probe
  misc_feature (1)..(25): SEQ ID NO: 4251; WAN024CLD_at; Start 31; Stop 55
tatttagatgttcttgcgccccagc

SEQ ID NO: 123209 - DNA, 25 bp, Artificial
  probe
  misc_feature (1)..(25): SEQ ID NO: 4251; WAN024CLD_at; Start 80; Stop 104
gctcaaaagaagctcctgaagatat

SEQ ID NO: 123210 - DNA, 25 bp, Artificial
  probe
  misc_feature (1)..(25): SEQ ID NO: 4251; WAN024CLD_at; Start 716; Stop 740
taagatctcgattagggaatatcgg

SEQ ID NO: 123211 - DNA, 25 bp, Artificial
  probe
  misc_feature (1)..(25): SEQ ID NO: 4251; WAN024CLD_at; Start 845; Stop 869
tgttcaatttcaaccaggaaggaac

SEQ ID NO: 123212 - DNA, 25 bp, Artificial
  probe
  misc_feature (1)..(25): SEQ ID NO: 4251; WAN024CLD_at; Start 923; Stop 947
cagaagctcctgaagatatagaagg

SEQ ID NO: 123213 - DNA, 25 bp, Artificial
  probe
  misc_feature (1)..(25): SEQ ID NO: 4251; WAN024CLD_at; Start 525; Stop 549
tagcgaaagtaagtatcttggacac

SEQ ID NO: 123214 - DNA, 25 bp, Artificial
  probe
  misc_feature (1)..(25): SEQ ID NO: 4251; WAN024CLD_at; Start 886; Stop 910
ccgaagtttgaaataagcgatgtag

SEQ ID NO: 123215 - DNA, 25 bp, Artificial
  probe
  misc_feature (1)..(25): SEQ ID NO: 4251; WAN024CLD_at; Start 363; Stop 387
taaagccagcaagtcagaactcacg

SEQ ID NO: 123216 - DNA, 25 bp, Artificial
  probe
  misc_feature (1)..(25): SEQ ID NO: 4251; WAN024CLD_at; Start 510; Stop 534
tacggctactatcgatagcgaaagt

SEQ ID NO: 123217 - DNA, 25 bp, Artificial
  probe
  misc_feature (1)..(25): SEQ ID NO: 4251; WAN024CLD_at; Start 348; Stop 372
gaatgcaaccaaggataaagccagc

SEQ ID NO: 123218 - DNA, 25 bp, Artificial
  probe
  misc_feature (1)..(25): SEQ ID NO: 4251; WAN024CLD_at; Start 182; Stop 206
ctgaagggcttagaaccaaagtgga

SEQ ID NO: 123219 - DNA, 25 bp, Artificial
  probe
  misc_feature (1)..(25): SEQ ID NO: 4251; WAN024CLD_at; Start 282; Stop 306
gctaaatcagaagttgagtcaggct

SEQ ID NO: 123220 - DNA, 25 bp, Artificial
  probe
  misc_feature (1)..(25): SEQ ID NO: 4251; WAN024CLD_at; Start 150; Stop 174
caactcgctcgacgctggtgtgaga

SEQ ID NO: 123221 - DNA, 25 bp, Artificial
  probe
  misc_feature (1)..(25): SEQ ID NO: 4251; WAN024CLD_at; Start 603; Stop 627
caaggttacttatccagctctgggt

SEQ ID NO: 123222 - DNA, 25 bp, Artificial
  probe
  misc_feature (1)..(25): SEQ ID NO: 4251; WAN024CLD_at; Start 616; Stop 640
ccagctctgggtcaattcgggaaag

SEQ ID NO: 123223 - DNA, 25 bp, Artificial
  probe
  misc_feature (1)..(25): SEQ ID NO: 4251; WAN024CLD_at; Start 127; Stop 151
gaatcgacctttaaacaacgagcca

SEQ ID NO: 123224 - DNA, 25 bp, Artificial
  probe
  misc_feature (1)..(25): SEQ ID NO: 4251; WAN024CLD_at; Start 60; Stop 84
agacggaagtttggcaacaagctca

SEQ ID NO: 123225 - DNA, 25 bp, Artificial
  probe
  misc_feature (1)..(25): SEQ ID NO: 4251; WAN024CLD_at; Start 112; Stop 136
cagatttcaacagtagaatcgacct

SEQ ID NO: 123226 - DNA, 25 bp, Artificial
  probe
  misc_feature (1)..(25): SEQ ID NO: 4251; WAN024CLD_at; Start 376; Stop 400
tcagaactcacgcagacagctgagg

SEQ ID NO: 123227 - DNA, 25 bp, Artificial
  probe
  misc_feature (1)..(25): SEQ ID NO: 4251; WAN024CLD_at; Start 641; Stop 665
taattcccggaagtacgactaatca

SEQ ID NO: 123228 - DNA, 25 bp, Artificial
  probe
  misc_feature (1)..(25): SEQ ID NO: 4251; WAN024CLD_at; Start 964; Stop 988
gaatccaactttaaacagcgtgctg

SEQ ID NO: 123229 - DNA, 25 bp, Artificial
  probe
  misc_feature (1)..(25): SEQ ID NO: 4251; WAN024CLD_at; Start 588; Stop 612
tgatggaggtaatcccaaggttact

SEQ ID NO: 123230 - DNA, 25 bp, Artificial
  probe
  misc_feature (1)..(25): SEQ ID NO: 4251; WAN024CLD_at; Start 232; Stop 256
gaaaatatccggcaatctgtgaaga

SEQ ID NO: 123231 - DNA, 25 bp, Artificial
  probe
  misc_feature (1)..(25): SEQ ID NO: 4251; WAN024CLD_at; Start 992; Stop 1016
cactcgaagctggtgtaagccgtct

SEQ ID NO: 123232 - DNA, 25 bp, Artificial
  probe
  misc_feature (1)..(25): SEQ ID NO: 4251; WAN024CLD_at; Start 977; Stop 1001
aacagcgtgctgattcactcgaagc

SEQ ID NO: 123233 - DNA, 25 bp, Artificial
  probe
  misc_feature (1)..(25): SEQ ID NO: 4251; WAN024CLD_at; Start 479; Stop 503
caaaaacaggaatttggacaacgag

SEQ ID NO: 123234 - DNA, 25 bp, Artificial
  probe
  misc_feature (1)..(25): SEQ ID NO: 4251; WAN024CLD_at; Start 786; Stop 810
tgttgtccatattccaaaaggttgg

SEQ ID NO: 123235 - DNA, 25 bp, Artificial
  probe
  misc_feature (1)..(25): SEQ ID NO: 4251; WAN024CLD_at; Start 4; Stop 28
tatctcgtaaatgctgaagtcggag

SEQ ID NO: 123236 - DNA, 25 bp, Artificial
  probe
  misc_feature (1)..(25): SEQ ID NO: 4251; WAN024CLD_at; Start 464; Stop 488
tcaagcaggatatttcaaaaacagg

SEQ ID NO: 123237 - DNA, 25 bp, Artificial
  probe
  misc_feature (1)..(25): SEQ ID NO: 4251; WAN024CLD_at; Start 701; Stop 725
aaaatggaataatgctaagatctcg

SEQ ID NO: 123238 - DNA, 25 bp, Artificial
  probe
  misc_feature (1)..(25): SEQ ID NO: 4251; WAN024CLD_at; Start 325; Stop 349
ggctctatccgtcaggaaatcctga

SEQ ID NO: 123239 - DNA, 25 bp, Artificial
  probe
  misc_feature (1)..(25): SEQ ID NO: 4251; WAN024CLD_at; Start 494; Stop 518
ggacaacgagtacatatacggctac

SEQ ID NO: 123240 - DNA, 25 bp, Artificial
  probe
  misc_feature (1)..(25): SEQ ID NO: 4251; WAN024CLD_at; Start 738; Stop 762
cggatataaaactggaaatgtgaca

SEQ ID NO: 123241 - DNA, 25 bp, Artificial
  probe
  misc_feature (1)..(25): SEQ ID NO: 5319; WAN024CLE_at; Start 71; Stop 95
atacaccatcaaagttgtttggatt

SEQ ID NO: 123242 - DNA, 25 bp, Artificial
  probe
  misc_feature (1)..(25): SEQ ID NO: 5319; WAN024CLE_at; Start 67; Stop 91
aacaatacaccatcaaagttgtttg

SEQ ID NO: 123243 - DNA, 25 bp, Artificial
  probe
  misc_feature (1)..(25): SEQ ID NO: 5319; WAN024CLE_at; Start 57; Stop 81
caaacaaaaaaacaatacaccatca

SEQ ID NO: 123244 - DNA, 25 bp, Artificial
  probe
  misc_feature (1)..(25): SEQ ID NO: 5319; WAN024CLE_at; Start 63; Stop 87
aaaaaacaatacaccatcaaagttg

SEQ ID NO: 123245 - DNA, 25 bp, Artificial
  probe
  misc_feature (1)..(25): SEQ ID NO: 5319; WAN024CLE_at; Start 69; Stop 93
caatacaccatcaaagttgtttgga

SEQ ID NO: 123246 - DNA, 25 bp, Artificial
  probe
  misc_feature (1)..(25): SEQ ID NO: 5319; WAN024CLE_at; Start 68; Stop 92
acaatacaccatcaaagttgtttgg

SEQ ID NO: 123247 - DNA, 25 bp, Artificial
  probe
  misc_feature (1)..(25): SEQ ID NO: 5319; WAN024CLE_at; Start 25; Stop 49
aacattccaaaattaactcgaatat

SEQ ID NO: 123248 - DNA, 25 bp, Artificial
  probe
  misc_feature (1)..(25): SEQ ID NO: 5319; WAN024CLE_at; Start 64; Stop 88
aaaaacaatacaccatcaaagttgt

SEQ ID NO: 123249 - DNA, 25 bp, Artificial
  probe
  misc_feature (1)..(25): SEQ ID NO: 5319; WAN024CLE_at; Start 3; Stop 27
gcatgtagtgcaaaatctagtaaac

SEQ ID NO: 123250 - DNA, 25 bp, Artificial
  probe
  misc_feature (1)..(25): SEQ ID NO: 5319; WAN024CLE_at; Start 7; Stop 31
gtagtgcaaaatctagtaaacattc

SEQ ID NO: 123251 - DNA, 25 bp, Artificial
  probe
  misc_feature (1)..(25): SEQ ID NO: 5319; WAN024CLE_at; Start 99; Stop 123
catgaaatttacagaaaatagttga

SEQ ID NO: 123252 - DNA, 25 bp, Artificial
  probe
  misc_feature (1)..(25): SEQ ID NO: 5319; WAN024CLE_at; Start 74; Stop 98
caccatcaaagttgtttggattttt

SEQ ID NO: 123253 - DNA, 25 bp, Artificial
  probe
  misc_feature (1)..(25): SEQ ID NO: 5319; WAN024CLE_at; Start 73; Stop 97
acaccatcaaagttgtttggatttt

SEQ ID NO: 123254 - DNA, 25 bp, Artificial
  probe
  misc_feature (1)..(25): SEQ ID NO: 5319; WAN024CLE_at; Start 91; Stop 115
ggatttttcatgaaatttacagaaa

SEQ ID NO: 123255 - DNA, 25 bp, Artificial
  probe
  misc_feature (1)..(25): SEQ ID NO: 5319; WAN024CLE_at; Start 38; Stop 62
taactcgaatatttatttccaaaca

SEQ ID NO: 123256 - DNA, 25 bp, Artificial
  probe
  misc_feature (1)..(25): SEQ ID NO: 5319; WAN024CLE_at; Start 11; Stop 35
tgcaaaatctagtaaacattccaaa

SEQ ID NO: 123257 - DNA, 25 bp, Artificial
  probe
  misc_feature (1)..(25): SEQ ID NO: 5319; WAN024CLE_at; Start 90; Stop 114
tggatttttcatgaaatttacagaa

SEQ ID NO: 123258 - DNA, 25 bp, Artificial
  probe
  misc_feature (1)..(25): SEQ ID NO: 5319; WAN024CLE_at; Start 13; Stop 37
caaaatctagtaaacattccaaaat

SEQ ID NO: 123259 - DNA, 25 bp, Artificial
  probe
  misc_feature (1)..(25): SEQ ID NO: 5319; WAN024CLE_at; Start 10; Stop 34
gtgcaaaatctagtaaacattccaa

SEQ ID NO: 123260 - DNA, 25 bp, Artificial
  probe
  misc_feature (1)..(25): SEQ ID NO: 5319; WAN024CLE_at; Start 70; Stop 94
aatacaccatcaaagttgtttggat

SEQ ID NO: 123261 - DNA, 25 bp, Artificial
  probe
  misc_feature (1)..(25): SEQ ID NO: 5319; WAN024CLE_at; Start 8; Stop 32
tagtgcaaaatctagtaaacattcc

SEQ ID NO: 123262 - DNA, 25 bp, Artificial
  probe
  misc_feature (1)..(25): SEQ ID NO: 5319; WAN024CLE_at; Start 77; Stop 101
catcaaagttgtttggatttttcat

SEQ ID NO: 123263 - DNA, 25 bp, Artificial
  probe
  misc_feature (1)..(25): SEQ ID NO: 5319; WAN024CLE_at; Start 4; Stop 28
catgtagtgcaaaatctagtaaaca

SEQ ID NO: 123264 - DNA, 25 bp, Artificial
  probe
  misc_feature (1)..(25): SEQ ID NO: 5319; WAN024CLE_at; Start 72; Stop 96
tacaccatcaaagttgtttggattt

SEQ ID NO: 123265 - DNA, 25 bp, Artificial
  probe
  misc_feature (1)..(25): SEQ ID NO: 5319; WAN024CLE_at; Start 80; Stop 104
caaagttgtttggatttttcatgaa

SEQ ID NO: 123266 - DNA, 25 bp, Artificial
  probe
  misc_feature (1)..(25): SEQ ID NO: 5319; WAN024CLE_at; Start 9; Stop 33
agtgcaaaatctagtaaacattcca

SEQ ID NO: 123267 - DNA, 25 bp, Artificial
  probe
  misc_feature (1)..(25): SEQ ID NO: 5319; WAN024CLE_at; Start 79; Stop 103
tcaaagttgtttggatttttcatga

SEQ ID NO: 123268 - DNA, 25 bp, Artificial
  probe
  misc_feature (1)..(25): SEQ ID NO: 5319; WAN024CLE_at; Start 6; Stop 30
tgtagtgcaaaatctagtaaacatt

SEQ ID NO: 123269 - DNA, 25 bp, Artificial
  probe
  misc_feature (1)..(25): SEQ ID NO: 5319; WAN024CLE_at; Start 12; Stop 36
gcaaaatctagtaaacattccaaaa

SEQ ID NO: 123270 - DNA, 25 bp, Artificial
  probe
  misc_feature (1)..(25): SEQ ID NO: 5319; WAN024CLE_at; Start 65; Stop 89
aaaacaatacaccatcaaagttgtt

SEQ ID NO: 123271 - DNA, 25 bp, Artificial
  probe
  misc_feature (1)..(25): SEQ ID NO: 5319; WAN024CLE_at; Start 27; Stop 51
cattccaaaattaactcgaatattt

SEQ ID NO: 123272 - DNA, 25 bp, Artificial
  probe
  misc_feature (1)..(25): SEQ ID NO: 5319; WAN024CLE_at; Start 2; Stop 26
tgcatgtagtgcaaaatctagtaaa

SEQ ID NO: 123273 - DNA, 25 bp, Artificial
  probe
  misc_feature (1)..(25): SEQ ID NO: 5319; WAN024CLE_at; Start 98; Stop 122
tcatgaaatttacagaaaatagttg

SEQ ID NO: 123274 - DNA, 25 bp, Artificial
  probe
  misc_feature (1)..(25): SEQ ID NO: 5319; WAN024CLE_at; Start 76; Stop 100
ccatcaaagttgtttggatttttca

SEQ ID NO: 123275 - DNA, 25 bp, Artificial
  probe
  misc_feature (1)..(25): SEQ ID NO: 2261; WAN024CLF_at; Start 82; Stop 106
tttaggattgaataccaacgtccag

SEQ ID NO: 123276 - DNA, 25 bp, Artificial
  probe
  misc_feature (1)..(25): SEQ ID NO: 2261; WAN024CLF_at; Start 14; Stop 38
cggtcattcccgagttgcttgtatc

SEQ ID NO: 123277 - DNA, 25 bp, Artificial
  probe
  misc_feature (1)..(25): SEQ ID NO: 2261; WAN024CLF_at; Start 25; Stop 49
gagttgcttgtatcgaatatcgaac

SEQ ID NO: 123278 - DNA, 25 bp, Artificial
  probe
  misc_feature (1)..(25): SEQ ID NO: 2261; WAN024CLF_at; Start 125; Stop 149
tcttgaagagtgtcaacctaactaa

SEQ ID NO: 123279 - DNA, 25 bp, Artificial
  probe
  misc_feature (1)..(25): SEQ ID NO: 2261; WAN024CLF_at; Start 1; Stop 25
atggactacaatgcggtcattcccg

SEQ ID NO: 123280 - DNA, 25 bp, Artificial
  probe
  misc_feature (1)..(25): SEQ ID NO: 2261; WAN024CLF_at; Start 126; Stop 150
cttgaagagtgtcaacctaactaat

SEQ ID NO: 123281 - DNA, 25 bp, Artificial
  probe
  misc_feature (1)..(25): SEQ ID NO: 2261; WAN024CLF_at; Start 90; Stop 114
tgaataccaacgtccagaagaaaac

SEQ ID NO: 123282 - DNA, 25 bp, Artificial
  probe
  misc_feature (1)..(25): SEQ ID NO: 2261; WAN024CLF_at; Start 27; Stop 51
gttgcttgtatcgaatatcgaacag

SEQ ID NO: 123283 - DNA, 25 bp, Artificial
  probe
  misc_feature (1)..(25): SEQ ID NO: 2261; WAN024CLF_at; Start 7; Stop 31
tacaatgcggtcattcccgagttgc

SEQ ID NO: 123284 - DNA, 25 bp, Artificial
  probe
  misc_feature (1)..(25): SEQ ID NO: 2261; WAN024CLF_at; Start 18; Stop 42
cattcccgagttgcttgtatcgaat

SEQ ID NO: 123285 - DNA, 25 bp, Artificial
  probe
  misc_feature (1)..(25): SEQ ID NO: 2261; WAN024CLF_at; Start 22; Stop 46
cccgagttgcttgtatcgaatatcg

SEQ ID NO: 123286 - DNA, 25 bp, Artificial
  probe
  misc_feature (1)..(25): SEQ ID NO: 2261; WAN024CLF_at; Start 86; Stop 110
ggattgaataccaacgtccagaaga

SEQ ID NO: 123287 - DNA, 25 bp, Artificial
  probe
  misc_feature (1)..(25): SEQ ID NO: 2261; WAN024CLF_at; Start 87; Stop 111
gattgaataccaacgtccagaagaa

SEQ ID NO: 123288 - DNA, 25 bp, Artificial
  probe
  misc_feature (1)..(25): SEQ ID NO: 2261; WAN024CLF_at; Start 84; Stop 108
taggattgaataccaacgtccagaa

SEQ ID NO: 123289 - DNA, 25 bp, Artificial
  probe
  misc_feature (1)..(25): SEQ ID NO: 2261; WAN024CLF_at; Start 4; Stop 28
gactacaatgcggtcattcccgagt

SEQ ID NO: 123290 - DNA, 25 bp, Artificial
  probe
  misc_feature (1)..(25): SEQ ID NO: 2261; WAN024CLF_at; Start 74; Stop 98
tactgggttttaggattgaatacca

SEQ ID NO: 123291 - DNA, 25 bp, Artificial
  probe
  misc_feature (1)..(25): SEQ ID NO: 2261; WAN024CLF_at; Start 112; Stop 136
aactttctctttctcttgaagagtg

SEQ ID NO: 123292 - DNA, 25 bp, Artificial
  probe
  misc_feature (1)..(25): SEQ ID NO: 2261; WAN024CLF_at; Start 29; Stop 53
tgcttgtatcgaatatcgaacagtc

SEQ ID NO: 123293 - DNA, 25 bp, Artificial
  probe
  misc_feature (1)..(25): SEQ ID NO: 2261; WAN024CLF_at; Start 55; Stop 79
cggtccttctactgtggtttactgg

SEQ ID NO: 123294 - DNA, 25 bp, Artificial
  probe
  misc_feature (1)..(25): SEQ ID NO: 2261; WAN024CLF_at; Start 23; Stop 47
ccgagttgcttgtatcgaatatcga

SEQ ID NO: 123295 - DNA, 25 bp, Artificial
  probe
  misc_feature (1)..(25): SEQ ID NO: 2261; WAN024CLF_at; Start 109; Stop 133
gaaaactttctctttctcttgaaga

SEQ ID NO: 123296 - DNA, 25 bp, Artificial
  probe
  misc_feature (1)..(25): SEQ ID NO: 2261; WAN024CLF_at; Start 10; Stop 34
aatgcggtcattcccgagttgcttg

SEQ ID NO: 123297 - DNA, 25 bp, Artificial
  probe
  misc_feature (1)..(25): SEQ ID NO: 2261; WAN024CLF_at; Start 123; Stop 147
tctcttgaagagtgtcaacctaact

SEQ ID NO: 123298 - DNA, 25 bp, Artificial
  probe
  misc_feature (1)..(25): SEQ ID NO: 2261; WAN024CLF_at; Start 9; Stop 33
caatgcggtcattcccgagttgctt

SEQ ID NO: 123299 - DNA, 25 bp, Artificial
  probe
  misc_feature (1)..(25): SEQ ID NO: 2261; WAN024CLF_at; Start 21; Stop 45
tcccgagttgcttgtatcgaatatc

SEQ ID NO: 123300 - DNA, 25 bp, Artificial
  probe
  misc_feature (1)..(25): SEQ ID NO: 2261; WAN024CLF_at; Start 97; Stop 121
caacgtccagaagaaaactttctct

SEQ ID NO: 123301 - DNA, 25 bp, Artificial
  probe
  misc_feature (1)..(25): SEQ ID NO: 2261; WAN024CLF_at; Start 122; Stop 146
ttctcttgaagagtgtcaacctaac

SEQ ID NO: 123302 - DNA, 25 bp, Artificial
  probe
  misc_feature (1)..(25): SEQ ID NO: 2261; WAN024CLF_at; Start 117; Stop 141
tctctttctcttgaagagtgtcaac

SEQ ID NO: 123303 - DNA, 25 bp, Artificial
  probe
  misc_feature (1)..(25): SEQ ID NO: 2261; WAN024CLF_at; Start 119; Stop 143
tctttctcttgaagagtgtcaacct

SEQ ID NO: 123304 - DNA, 25 bp, Artificial
  probe
  misc_feature (1)..(25): SEQ ID NO: 2261; WAN024CLF_at; Start 13; Stop 37
gcggtcattcccgagttgcttgtat

SEQ ID NO: 123305 - DNA, 25 bp, Artificial
  probe
  misc_feature (1)..(25): SEQ ID NO: 2261; WAN024CLF_at; Start 15; Stop 39
ggtcattcccgagttgcttgtatcg

SEQ ID NO: 123306 - DNA, 25 bp, Artificial
  probe
  misc_feature (1)..(25): SEQ ID NO: 2261; WAN024CLF_at; Start 81; Stop 105
ttttaggattgaataccaacgtcca

SEQ ID NO: 123307 - DNA, 25 bp, Artificial
  probe
  misc_feature (1)..(25): SEQ ID NO: 2261; WAN024CLF_at; Start 6; Stop 30
ctacaatgcggtcattcccgagttg

SEQ ID NO: 123308 - DNA, 25 bp, Artificial
  probe
  misc_feature (1)..(25): SEQ ID NO: 2261; WAN024CLF_at; Start 17; Stop 41
tcattcccgagttgcttgtatcgaa

SEQ ID NO: 123309 - DNA, 25 bp, Artificial
  probe
  misc_feature (1)..(25): SEQ ID NO: 4083; WAN024CLG_at; Start 98; Stop 122
taggtactctggctctaggaatcgg

SEQ ID NO: 123310 - DNA, 25 bp, Artificial
  probe
  misc_feature (1)..(25): SEQ ID NO: 4083; WAN024CLG_at; Start 63; Stop 87
caagcgtttacttttagtcatcata

SEQ ID NO: 123311 - DNA, 25 bp, Artificial
  probe
  misc_feature (1)..(25): SEQ ID NO: 4083; WAN024CLG_at; Start 153; Stop 177
gggtcaagatccatgggctatcctg

SEQ ID NO: 123312 - DNA, 25 bp, Artificial
  probe
  misc_feature (1)..(25): SEQ ID NO: 4083; WAN024CLG_at; Start 134; Stop 158
gttatggaatcttgggcaagggtca

SEQ ID NO: 123313 - DNA, 25 bp, Artificial
  probe
  misc_feature (1)..(25): SEQ ID NO: 4083; WAN024CLG_at; Start 102; Stop 126
tactctggctctaggaatcggttta

SEQ ID NO: 123314 - DNA, 25 bp, Artificial
  probe
  misc_feature (1)..(25): SEQ ID NO: 4083; WAN024CLG_at; Start 150; Stop 174
caagggtcaagatccatgggctatc

SEQ ID NO: 123315 - DNA, 25 bp, Artificial
  probe
  misc_feature (1)..(25): SEQ ID NO: 4083; WAN024CLG_at; Start 45; Stop 69
gaaatcaagctacgtagtcaagcgt

SEQ ID NO: 123316 - DNA, 25 bp, Artificial
  probe
  misc_feature (1)..(25): SEQ ID NO: 4083; WAN024CLG_at; Start 89; Stop 113
tactgattttaggtactctggctct

SEQ ID NO: 123317 - DNA, 25 bp, Artificial
  probe
  misc_feature (1)..(25): SEQ ID NO: 4083; WAN024CLG_at; Start 171; Stop 195
tatcctgtctccagcaaaatggcag

SEQ ID NO: 123318 - DNA, 25 bp, Artificial
  probe
  misc_feature (1)..(25): SEQ ID NO: 4083; WAN024CLG_at; Start 155; Stop 179
gtcaagatccatgggctatcctgtc

SEQ ID NO: 123319 - DNA, 25 bp, Artificial
  probe
  misc_feature (1)..(25): SEQ ID NO: 4083; WAN024CLG_at; Start 126; Stop 150
aatggtaggttatggaatcttgggc

SEQ ID NO: 123320 - DNA, 25 bp, Artificial
  probe
  misc_feature (1)..(25): SEQ ID NO: 4083; WAN024CLG_at; Start 168; Stop 192
ggctatcctgtctccagcaaaatgg

SEQ ID NO: 123321 - DNA, 25 bp, Artificial
  probe
  misc_feature (1)..(25): SEQ ID NO: 4083; WAN024CLG_at; Start 148; Stop 172
ggcaagggtcaagatccatgggcta

SEQ ID NO: 123322 - DNA, 25 bp, Artificial
  probe
  misc_feature (1)..(25): SEQ ID NO: 4083; WAN024CLG_at; Start 50; Stop 74
caagctacgtagtcaagcgtttact

SEQ ID NO: 123323 - DNA, 25 bp, Artificial
  probe
  misc_feature (1)..(25): SEQ ID NO: 4083; WAN024CLG_at; Start 93; Stop 117
gattttaggtactctggctctagga

SEQ ID NO: 123324 - DNA, 25 bp, Artificial
  probe
  misc_feature (1)..(25): SEQ ID NO: 4083; WAN024CLG_at; Start 71; Stop 95
tacttttagtcatcatagtactgat

SEQ ID NO: 123325 - DNA, 25 bp, Artificial
  probe
  misc_feature (1)..(25): SEQ ID NO: 4083; WAN024CLG_at; Start 160; Stop 184
gatccatgggctatcctgtctccag

SEQ ID NO: 123326 - DNA, 25 bp, Artificial
  probe
  misc_feature (1)..(25): SEQ ID NO: 4083; WAN024CLG_at; Start 105; Stop 129
tctggctctaggaatcggtttaatg

SEQ ID NO: 123327 - DNA, 25 bp, Artificial
  probe
  misc_feature (1)..(25): SEQ ID NO: 4083; WAN024CLG_at; Start 174; Stop 198
cctgtctccagcaaaatggcaggaa

SEQ ID NO: 123328 - DNA, 25 bp, Artificial
  probe
  misc_feature (1)..(25): SEQ ID NO: 4083; WAN024CLG_at; Start 164; Stop 188
catgggctatcctgtctccagcaaa

SEQ ID NO: 123329 - DNA, 25 bp, Artificial
  probe
  misc_feature (1)..(25): SEQ ID NO: 4083; WAN024CLG_at; Start 30; Stop 54
gatgaagatgaataagaaatcaagc

SEQ ID NO: 123330 - DNA, 25 bp, Artificial
  probe
  misc_feature (1)..(25): SEQ ID NO: 4083; WAN024CLG_at; Start 42; Stop 66
taagaaatcaagctacgtagtcaag

SEQ ID NO: 123331 - DNA, 25 bp, Artificial
  probe
  misc_feature (1)..(25): SEQ ID NO: 4083; WAN024CLG_at; Start 110; Stop 134
ctctaggaatcggtttaatggtagg

SEQ ID NO: 123332 - DNA, 25 bp, Artificial
  probe
  misc_feature (1)..(25): SEQ ID NO: 4083; WAN024CLG_at; Start 58; Stop 82
gtagtcaagcgtttacttttagtca

SEQ ID NO: 123333 - DNA, 25 bp, Artificial
  probe
  misc_feature (1)..(25): SEQ ID NO: 4083; WAN024CLG_at; Start 100; Stop 124
ggtactctggctctaggaatcggtt

SEQ ID NO: 123334 - DNA, 25 bp, Artificial
  probe
  misc_feature (1)..(25): SEQ ID NO: 4083; WAN024CLG_at; Start 176; Stop 200
tgtctccagcaaaatggcaggaatt

SEQ ID NO: 123335 - DNA, 25 bp, Artificial
  probe
  misc_feature (1)..(25): SEQ ID NO: 4083; WAN024CLG_at; Start 128; Stop 152
tggtaggttatggaatcttgggcaa

SEQ ID NO: 123336 - DNA, 25 bp, Artificial
  probe
  misc_feature (1)..(25): SEQ ID NO: 4083; WAN024CLG_at; Start 39; Stop 63
gaataagaaatcaagctacgtagtc

SEQ ID NO: 123337 - DNA, 25 bp, Artificial
  probe
  misc_feature (1)..(25): SEQ ID NO: 4083; WAN024CLG_at; Start 140; Stop 164
gaatcttgggcaagggtcaagatcc

SEQ ID NO: 123338 - DNA, 25 bp, Artificial
  probe
  misc_feature (1)..(25): SEQ ID NO: 4083; WAN024CLG_at; Start 179; Stop 203
ctccagcaaaatggcaggaattgat

SEQ ID NO: 123339 - DNA, 25 bp, Artificial
  probe
  misc_feature (1)..(25): SEQ ID NO: 4083; WAN024CLG_at; Start 80; Stop 104
tcatcatagtactgattttaggtac

SEQ ID NO: 123340 - DNA, 25 bp, Artificial
  probe
  misc_feature (1)..(25): SEQ ID NO: 4083; WAN024CLG_at; Start 36; Stop 60
gatgaataagaaatcaagctacgta

SEQ ID NO: 123341 - DNA, 25 bp, Artificial
  probe
  misc_feature (1)..(25): SEQ ID NO: 4083; WAN024CLG_at; Start 143; Stop 167
tcttgggcaagggtcaagatccatg

SEQ ID NO: 123342 - DNA, 25 bp, Artificial
  probe
  misc_feature (1)..(25): SEQ ID NO: 4083; WAN024CLG_at; Start 108; Stop 132
ggctctaggaatcggtttaatggta

SEQ ID NO: 123343 - DNA, 25 bp, Artificial
  probe
  misc_feature (1)..(25): SEQ ID NO: 948; WAN024CLH_at; Start 871; Stop 895
gaaggaattcgtgttcgttctcaac

SEQ ID NO: 123344 - DNA, 25 bp, Artificial
  probe
  misc_feature (1)..(25): SEQ ID NO: 948; WAN024CLH_at; Start 218; Stop 242
ccaaggttgactttgatgaggaagc

SEQ ID NO: 123345 - DNA, 25 bp, Artificial
  probe
  misc_feature (1)..(25): SEQ ID NO: 948; WAN024CLH_at; Start 100; Stop 124
gcagtcttacccttgttggcagcga

SEQ ID NO: 123346 - DNA, 25 bp, Artificial
  probe
  misc_feature (1)..(25): SEQ ID NO: 948; WAN024CLH_at; Start 938; Stop 962
caggatttccaacagatatgcaggc

SEQ ID NO: 123347 - DNA, 25 bp, Artificial
  probe
  misc_feature (1)..(25): SEQ ID NO: 948; WAN024CLH_at; Start 1033; Stop 1057
ttccaacacctagaagagatgcgcc

SEQ ID NO: 123348 - DNA, 25 bp, Artificial
  probe
  misc_feature (1)..(25): SEQ ID NO: 948; WAN024CLH_at; Start 630; Stop 654
ccttaatgaaatgggagccaaggtc

SEQ ID NO: 123349 - DNA, 25 bp, Artificial
  probe
  misc_feature (1)..(25): SEQ ID NO: 948; WAN024CLH_at; Start 648; Stop 672
caaggtcaaaggtgctggtacagag

SEQ ID NO: 123350 - DNA, 25 bp, Artificial
  probe
  misc_feature (1)..(25): SEQ ID NO: 948; WAN024CLH_at; Start 1059; Stop 1083
catgggcttgcattctgagattatc

SEQ ID NO: 123351 - DNA, 25 bp, Artificial
  probe
  misc_feature (1)..(25): SEQ ID NO: 948; WAN024CLH_at; Start 261; Stop 285
tgctactggcgacatcactgaggaa

SEQ ID NO: 123352 - DNA, 25 bp, Artificial
  probe
  misc_feature (1)..(25): SEQ ID NO: 948; WAN024CLH_at; Start 664; Stop 688
ggtacagagactataaccattactg

SEQ ID NO: 123353 - DNA, 25 bp, Artificial
  probe
  misc_feature (1)..(25): SEQ ID NO: 948; WAN024CLH_at; Start 1123; Stop 1147
ggagcagaagttctttcaactgacc

SEQ ID NO: 123354 - DNA, 25 bp, Artificial
  probe
  misc_feature (1)..(25): SEQ ID NO: 948; WAN024CLH_at; Start 362; Stop 386
ccaaggtatccatgccaggtggttg

SEQ ID NO: 123355 - DNA, 25 bp, Artificial
  probe
  misc_feature (1)..(25): SEQ ID NO: 948; WAN024CLH_at; Start 694; Stop 718
gagaaacttcatggtacgactcaca

SEQ ID NO: 123356 - DNA, 25 bp, Artificial
  probe
  misc_feature (1)..(25): SEQ ID NO: 948; WAN024CLH_at; Start 77; Stop 101
tgacgatcgagggagcaaaaaatgc

SEQ ID NO: 123357 - DNA, 25 bp, Artificial
  probe
  misc_feature (1)..(25): SEQ ID NO: 948; WAN024CLH_at; Start 279; Stop 303
tgaggaagccccttacaagtatgtc

SEQ ID NO: 123358 - DNA, 25 bp, Artificial
  probe
  misc_feature (1)..(25): SEQ ID NO: 948; WAN024CLH_at; Start 811; Stop 835
cacaaccgtcccttgattgccaagt

SEQ ID NO: 123359 - DNA, 25 bp, Artificial
  probe
  misc_feature (1)..(25): SEQ ID NO: 948; WAN024CLH_at; Start 1075; Stop 1099
gagattatccgtgatacagctcgta

SEQ ID NO: 123360 - DNA, 25 bp, Artificial
  probe
  misc_feature (1)..(25): SEQ ID NO: 948; WAN024CLH_at; Start 1107; Stop 1131
tggacagcctttgcagggagcagaa

SEQ ID NO: 123361 - DNA, 25 bp, Artificial
  probe
  misc_feature (1)..(25): SEQ ID NO: 948; WAN024CLH_at; Start 1237; Stop 1261
tacggtttccatgagaagttggcgc

SEQ ID NO: 123362 - DNA, 25 bp, Artificial
  probe
  misc_feature (1)..(25): SEQ ID NO: 948; WAN024CLH_at; Start 131; Stop 155
tagcaagtgaaggaaagaccgtctt

SEQ ID NO: 123363 - DNA, 25 bp, Artificial
  probe
  misc_feature (1)..(25): SEQ ID NO: 948; WAN024CLH_at; Start 538; Stop 562
cagaacttgatgatggcagcgactc

SEQ ID NO: 123364 - DNA, 25 bp, Artificial
  probe
  misc_feature (1)..(25): SEQ ID NO: 948; WAN024CLH_at; Start 1174; Stop 1198
acaggtttggtagcacagggagaaa

SEQ ID NO: 123365 - DNA, 25 bp, Artificial
  probe
  misc_feature (1)..(25): SEQ ID NO: 948; WAN024CLH_at; Start 196; Stop 220
caggtagttggtggtttgaatgcca

SEQ ID NO: 123366 - DNA, 25 bp, Artificial
  probe
  misc_feature (1)..(25): SEQ ID NO: 948; WAN024CLH_at; Start 680; Stop 704
ccattactggtgttgagaaacttca

SEQ ID NO: 123367 - DNA, 25 bp, Artificial
  probe
  misc_feature (1)..(25): SEQ ID NO: 948; WAN024CLH_at; Start 1091; Stop 1115
cagctcgtattgttggtggacagcc

SEQ ID NO: 123368 - DNA, 25 bp, Artificial
  probe
  misc_feature (1)..(25): SEQ ID NO: 948; WAN024CLH_at; Start 54; Stop 78
cgataatcgtctggtaggaagcgtg

SEQ ID NO: 123369 - DNA, 25 bp, Artificial
  probe
  misc_feature (1)..(25): SEQ ID NO: 948; WAN024CLH_at; Start 1218; Stop 1242
tcacttggatagaggttactacggt

SEQ ID NO: 123370 - DNA, 25 bp, Artificial
  probe
  misc_feature (1)..(25): SEQ ID NO: 948; WAN024CLH_at; Start 145; Stop 169
aagaccgtcttgcagaatgttccga

SEQ ID NO: 123371 - DNA, 25 bp, Artificial
  probe
  misc_feature (1)..(25): SEQ ID NO: 948; WAN024CLH_at; Start 415; Stop 439
catttgaaaggtctggaagctatgg

SEQ ID NO: 123372 - DNA, 25 bp, Artificial
  probe
  misc_feature (1)..(25): SEQ ID NO: 948; WAN024CLH_at; Start 444; Stop 468
taagattagtcagacagctggttac

SEQ ID NO: 123373 - DNA, 25 bp, Artificial
  probe
  misc_feature (1)..(25): SEQ ID NO: 948; WAN024CLH_at; Start 977; Stop 1001
tgatgacagttgcaaaaggcgaatc

SEQ ID NO: 123374 - DNA, 25 bp, Artificial
  probe
  misc_feature (1)..(25): SEQ ID NO: 948; WAN024CLH_at; Start 246; Stop 270
tcttgtcaaggtggatgctactggc

SEQ ID NO: 123375 - DNA, 25 bp, Artificial
  probe
  misc_feature (1)..(25): SEQ ID NO: 948; WAN024CLH_at; Start 911; Stop 935
ctgttcatgtgaaaaccttgcccca

SEQ ID NO: 123376 - DNA, 25 bp, Artificial
  probe
  misc_feature (1)..(25): SEQ ID NO: 948; WAN024CLH_at; Start 519; Stop 543
tccaagtgttggtgcaacgcagaac

SEQ ID NO: 123377 - DNA, 25 bp, Artificial
  probe
  misc_feature (1)..(25): SEQ ID NO: 1636; WAN024CLI_at; Start 40; Stop 64
cagaatattgttcaaaattttgtgc

SEQ ID NO: 123378 - DNA, 25 bp, Artificial
  probe
  misc_feature (1)..(25): SEQ ID NO: 1636; WAN024CLI_at; Start 2; Stop 26
tgagtgagattgtggaaactcgcgt

SEQ ID NO: 123379 - DNA, 25 bp, Artificial
  probe
  misc_feature (1)..(25): SEQ ID NO: 1636; WAN024CLI_at; Start 5; Stop 29
gtgagattgtggaaactcgcgtctt

SEQ ID NO: 123380 - DNA, 25 bp, Artificial
  probe
  misc_feature (1)..(25): SEQ ID NO: 1636; WAN024CLI_at; Start 71; Stop 95
ttcatgttctagtcattcttttgca

SEQ ID NO: 123381 - DNA, 25 bp, Artificial
  probe
  misc_feature (1)..(25): SEQ ID NO: 1636; WAN024CLI_at; Start 3; Stop 27
gagtgagattgtggaaactcgcgtc

SEQ ID NO: 123382 - DNA, 25 bp, Artificial
  probe
  misc_feature (1)..(25): SEQ ID NO: 1636; WAN024CLI_at; Start 4; Stop 28
agtgagattgtggaaactcgcgtct

SEQ ID NO: 123383 - DNA, 25 bp, Artificial
  probe
  misc_feature (1)..(25): SEQ ID NO: 1636; WAN024CLI_at; Start 106; Stop 130
tatagcatgttgatattactaacta

SEQ ID NO: 123384 - DNA, 25 bp, Artificial
  probe
  misc_feature (1)..(25): SEQ ID NO: 1636; WAN024CLI_at; Start 79; Stop 103
ctagtcattcttttgcatgatagaa

SEQ ID NO: 123385 - DNA, 25 bp, Artificial
  probe
  misc_feature (1)..(25): SEQ ID NO: 1636; WAN024CLI_at; Start 108; Stop 132
tagcatgttgatattactaactaat

SEQ ID NO: 123386 - DNA, 25 bp, Artificial
  probe
  misc_feature (1)..(25): SEQ ID NO: 1636; WAN024CLI_at; Start 1; Stop 25
atgagtgagattgtggaaactcgcg

SEQ ID NO: 123387 - DNA, 25 bp, Artificial
  probe
  misc_feature (1)..(25): SEQ ID NO: 1636; WAN024CLI_at; Start 87; Stop 111
tcttttgcatgatagaatttatagc

SEQ ID NO: 123388 - DNA, 25 bp, Artificial
  probe
  misc_feature (1)..(25): SEQ ID NO: 1636; WAN024CLI_at; Start 51; Stop 75
tcaaaattttgtgcctgtctttcat

SEQ ID NO: 123389 - DNA, 25 bp, Artificial
  probe
  misc_feature (1)..(25): SEQ ID NO: 1636; WAN024CLI_at; Start 88; Stop 112
cttttgcatgatagaatttatagca

SEQ ID NO: 123390 - DNA, 25 bp, Artificial
  probe
  misc_feature (1)..(25): SEQ ID NO: 1636; WAN024CLI_at; Start 93; Stop 117
gcatgatagaatttatagcatgttg

SEQ ID NO: 123391 - DNA, 25 bp, Artificial
  probe
  misc_feature (1)..(25): SEQ ID NO: 1636; WAN024CLI_at; Start 49; Stop 73
gttcaaaattttgtgcctgtctttc

SEQ ID NO: 123392 - DNA, 25 bp, Artificial
  probe
  misc_feature (1)..(25): SEQ ID NO: 1636; WAN024CLI_at; Start 80; Stop 104
tagtcattcttttgcatgatagaat

SEQ ID NO: 123393 - DNA, 25 bp, Artificial
  probe
  misc_feature (1)..(25): SEQ ID NO: 1636; WAN024CLI_at; Start 6; Stop 30
tgagattgtggaaactcgcgtcttt

SEQ ID NO: 123394 - DNA, 25 bp, Artificial
  probe
  misc_feature (1)..(25): SEQ ID NO: 1636; WAN024CLI_at; Start 58; Stop 82
tttgtgcctgtctttcatgttctag

SEQ ID NO: 123395 - DNA, 25 bp, Artificial
  probe
  misc_feature (1)..(25): SEQ ID NO: 1636; WAN024CLI_at; Start 61; Stop 85
gtgcctgtctttcatgttctagtca

SEQ ID NO: 123396 - DNA, 25 bp, Artificial
  probe
  misc_feature (1)..(25): SEQ ID NO: 1636; WAN024CLI_at; Start 53; Stop 77
aaaattttgtgcctgtctttcatgt

SEQ ID NO: 123397 - DNA, 25 bp, Artificial
  probe
  misc_feature (1)..(25): SEQ ID NO: 1636; WAN024CLI_at; Start 66; Stop 90
tgtctttcatgttctagtcattctt

SEQ ID NO: 123398 - DNA, 25 bp, Artificial
  probe
  misc_feature (1)..(25): SEQ ID NO: 1636; WAN024CLI_at; Start 42; Stop 66
gaatattgttcaaaattttgtgcct

SEQ ID NO: 123399 - DNA, 25 bp, Artificial
  probe
  misc_feature (1)..(25): SEQ ID NO: 1636; WAN024CLI_at; Start 64; Stop 88
cctgtctttcatgttctagtcattc

SEQ ID NO: 123400 - DNA, 25 bp, Artificial
  probe
  misc_feature (1)..(25): SEQ ID NO: 1636; WAN024CLI_at; Start 60; Stop 84
tgtgcctgtctttcatgttctagtc

SEQ ID NO: 123401 - DNA, 25 bp, Artificial
  probe
  misc_feature (1)..(25): SEQ ID NO: 1636; WAN024CLI_at; Start 55; Stop 79
aattttgtgcctgtctttcatgttc

SEQ ID NO: 123402 - DNA, 25 bp, Artificial
  probe
  misc_feature (1)..(25): SEQ ID NO: 1636; WAN024CLI_at; Start 8; Stop 32
agattgtggaaactcgcgtcttttt

SEQ ID NO: 123403 - DNA, 25 bp, Artificial
  probe
  misc_feature (1)..(25): SEQ ID NO: 1636; WAN024CLI_at; Start 97; Stop 121
gatagaatttatagcatgttgatat

SEQ ID NO: 123404 - DNA, 25 bp, Artificial
  probe
  misc_feature (1)..(25): SEQ ID NO: 1636; WAN024CLI_at; Start 63; Stop 87
gcctgtctttcatgttctagtcatt

SEQ ID NO: 123405 - DNA, 25 bp, Artificial
  probe
  misc_feature (1)..(25): SEQ ID NO: 1636; WAN024CLI_at; Start 7; Stop 31
gagattgtggaaactcgcgtctttt

SEQ ID NO: 123406 - DNA, 25 bp, Artificial
  probe
  misc_feature (1)..(25): SEQ ID NO: 1636; WAN024CLI_at; Start 75; Stop 99
tgttctagtcattcttttgcatgat

SEQ ID NO: 123407 - DNA, 25 bp, Artificial
  probe
  misc_feature (1)..(25): SEQ ID NO: 1636; WAN024CLI_at; Start 45; Stop 69
tattgttcaaaattttgtgcctgtc

SEQ ID NO: 123408 - DNA, 25 bp, Artificial
  probe
  misc_feature (1)..(25): SEQ ID NO: 1636; WAN024CLI_at; Start 101; Stop 125
gaatttatagcatgttgatattact

SEQ ID NO: 123409 - DNA, 25 bp, Artificial
  probe
  misc_feature (1)..(25): SEQ ID NO: 1636; WAN024CLI_at; Start 32; Stop 56
tttgttttcagaatattgttcaaaa

SEQ ID NO: 123410 - DNA, 25 bp, Artificial
  probe
  misc_feature (1)..(25): SEQ ID NO: 1636; WAN024CLI_at; Start 73; Stop 97
catgttctagtcattcttttgcatg

SEQ ID NO: 123411 - DNA, 25 bp, Artificial
  probe
  misc_feature (1)..(25): SEQ ID NO: 2534; WAN024CLJ_at; Start 92; Stop 116
tggctttgctcccatctattgtagg

SEQ ID NO: 123412 - DNA, 25 bp, Artificial
  probe
  misc_feature (1)..(25): SEQ ID NO: 2534; WAN024CLJ_at; Start 12; Stop 36
cgcaaatgtattcgctggtttagtc

SEQ ID NO: 123413 - DNA, 25 bp, Artificial
  probe
  misc_feature (1)..(25): SEQ ID NO: 2534; WAN024CLJ_at; Start 88; Stop 112
ggaatggctttgctcccatctattg

SEQ ID NO: 123414 - DNA, 25 bp, Artificial
  probe
  misc_feature (1)..(25): SEQ ID NO: 2534; WAN024CLJ_at; Start 115; Stop 139
ggtgcagcgattgtgattactgtag

SEQ ID NO: 123415 - DNA, 25 bp, Artificial
  probe
  misc_feature (1)..(25): SEQ ID NO: 2534; WAN024CLJ_at; Start 147; Stop 171
ctttacaggtagaaagctaactaat

SEQ ID NO: 123416 - DNA, 25 bp, Artificial
  probe
  misc_feature (1)..(25): SEQ ID NO: 2534; WAN024CLJ_at; Start 43; Stop 67
tatgcaggacaatctcttttaggta

SEQ ID NO: 123417 - DNA, 25 bp, Artificial
  probe
  misc_feature (1)..(25): SEQ ID NO: 2534; WAN024CLJ_at; Start 143; Stop 167
cattctttacaggtagaaagctaac

SEQ ID NO: 123418 - DNA, 25 bp, Artificial
  probe
  misc_feature (1)..(25): SEQ ID NO: 2534; WAN024CLJ_at; Start 101; Stop 125
tcccatctattgtaggtgcagcgat

SEQ ID NO: 123419 - DNA, 25 bp, Artificial
  probe
  misc_feature (1)..(25): SEQ ID NO: 2534; WAN024CLJ_at; Start 15; Stop 39
aaatgtattcgctggtttagtcggg

SEQ ID NO: 123420 - DNA, 25 bp, Artificial
  probe
  misc_feature (1)..(25): SEQ ID NO: 2534; WAN024CLJ_at; Start 45; Stop 69
tgcaggacaatctcttttaggtagt

SEQ ID NO: 123421 - DNA, 25 bp, Artificial
  probe
  misc_feature (1)..(25): SEQ ID NO: 2534; WAN024CLJ_at; Start 48; Stop 72
aggacaatctcttttaggtagttgg

SEQ ID NO: 123422 - DNA, 25 bp, Artificial
  probe
  misc_feature (1)..(25): SEQ ID NO: 2534; WAN024CLJ_at; Start 85; Stop 109
gctggaatggctttgctcccatcta

SEQ ID NO: 123423 - DNA, 25 bp, Artificial
  probe
  misc_feature (1)..(25): SEQ ID NO: 2534; WAN024CLJ_at; Start 119; Stop 143
cagcgattgtgattactgtagtgtc

SEQ ID NO: 123424 - DNA, 25 bp, Artificial
  probe
  misc_feature (1)..(25): SEQ ID NO: 2534; WAN024CLJ_at; Start 103; Stop 127
ccatctattgtaggtgcagcgattg

SEQ ID NO: 123425 - DNA, 25 bp, Artificial
  probe
  misc_feature (1)..(25): SEQ ID NO: 2534; WAN024CLJ_at; Start 108; Stop 132
tattgtaggtgcagcgattgtgatt

SEQ ID NO: 123426 - DNA, 25 bp, Artificial
  probe
  misc_feature (1)..(25): SEQ ID NO: 2534; WAN024CLJ_at; Start 135; Stop 159
tgtagtgtcattctttacaggtaga

SEQ ID NO: 123427 - DNA, 25 bp, Artificial
  probe
  misc_feature (1)..(25): SEQ ID NO: 2534; WAN024CLJ_at; Start 99; Stop 123
gctcccatctattgtaggtgcagcg

SEQ ID NO: 123428 - DNA, 25 bp, Artificial
  probe
  misc_feature (1)..(25): SEQ ID NO: 2534; WAN024CLJ_at; Start 38; Stop 62
gggcatatgcaggacaatctctttt

SEQ ID NO: 123429 - DNA, 25 bp, Artificial
  probe
  misc_feature (1)..(25): SEQ ID NO: 2534; WAN024CLJ_at; Start 9; Stop 33
catcgcaaatgtattcgctggttta

SEQ ID NO: 123430 - DNA, 25 bp, Artificial
  probe
  misc_feature (1)..(25): SEQ ID NO: 2534; WAN024CLJ_at; Start 2; Stop 26
tgggaatcatcgcaaatgtattcgc

SEQ ID NO: 123431 - DNA, 25 bp, Artificial
  probe
  misc_feature (1)..(25): SEQ ID NO: 2534; WAN024CLJ_at; Start 106; Stop 130
tctattgtaggtgcagcgattgtga

SEQ ID NO: 123432 - DNA, 25 bp, Artificial
  probe
  misc_feature (1)..(25): SEQ ID NO: 2534; WAN024CLJ_at; Start 111; Stop 135
tgtaggtgcagcgattgtgattact

SEQ ID NO: 123433 - DNA, 25 bp, Artificial
  probe
  misc_feature (1)..(25): SEQ ID NO: 2534; WAN024CLJ_at; Start 83; Stop 107
tcgctggaatggctttgctcccatc

SEQ ID NO: 123434 - DNA, 25 bp, Artificial
  probe
  misc_feature (1)..(25): SEQ ID NO: 2534; WAN024CLJ_at; Start 41; Stop 65
catatgcaggacaatctcttttagg

SEQ ID NO: 123435 - DNA, 25 bp, Artificial
  probe
  misc_feature (1)..(25): SEQ ID NO: 2534; WAN024CLJ_at; Start 97; Stop 121
ttgctcccatctattgtaggtgcag

SEQ ID NO: 123436 - DNA, 25 bp, Artificial
  probe
  misc_feature (1)..(25): SEQ ID NO: 2534; WAN024CLJ_at; Start 81; Stop 105
aatcgctggaatggctttgctccca

SEQ ID NO: 123437 - DNA, 25 bp, Artificial
  probe
  misc_feature (1)..(25): SEQ ID NO: 2534; WAN024CLJ_at; Start 139; Stop 163
gtgtcattctttacaggtagaaagc

SEQ ID NO: 123438 - DNA, 25 bp, Artificial
  probe
  misc_feature (1)..(25): SEQ ID NO: 2534; WAN024CLJ_at; Start 123; Stop 147
gattgtgattactgtagtgtcattc

SEQ ID NO: 123439 - DNA, 25 bp, Artificial
  probe
  misc_feature (1)..(25): SEQ ID NO: 2534; WAN024CLJ_at; Start 23; Stop 47
tcgctggtttagtcggggcatatgc

SEQ ID NO: 123440 - DNA, 25 bp, Artificial
  probe
  misc_feature (1)..(25): SEQ ID NO: 2534; WAN024CLJ_at; Start 129; Stop 153
gattactgtagtgtcattctttaca

SEQ ID NO: 123441 - DNA, 25 bp, Artificial
  probe
  misc_feature (1)..(25): SEQ ID NO: 2534; WAN024CLJ_at; Start 146; Stop 170
tctttacaggtagaaagctaactaa

SEQ ID NO: 123442 - DNA, 25 bp, Artificial
  probe
  misc_feature (1)..(25): SEQ ID NO: 2534; WAN024CLJ_at; Start 80; Stop 104
caatcgctggaatggctttgctccc

SEQ ID NO: 123443 - DNA, 25 bp, Artificial
  probe
  misc_feature (1)..(25): SEQ ID NO: 2534; WAN024CLJ_at; Start 5; Stop 29
gaatcatcgcaaatgtattcgctgg

SEQ ID NO: 123444 - DNA, 25 bp, Artificial
  probe
  misc_feature (1)..(25): SEQ ID NO: 2534; WAN024CLJ_at; Start 94; Stop 118
gctttgctcccatctattgtaggtg

SEQ ID NO: 123445 - DNA, 25 bp, Artificial
  probe
  misc_feature (1)..(25): SEQ ID NO: 5013; WAN024CLK_at; Start 39; Stop 63
catgttgattgacgtttatgggcat

SEQ ID NO: 123446 - DNA, 25 bp, Artificial
  probe
  misc_feature (1)..(25): SEQ ID NO: 5013; WAN024CLK_at; Start 9; Stop 33
gagccaaattttaggacataaagat

SEQ ID NO: 123447 - DNA, 25 bp, Artificial
  probe
  misc_feature (1)..(25): SEQ ID NO: 5013; WAN024CLK_at; Start 28; Stop 52
aaagatatctccatgttgattgacg

SEQ ID NO: 123448 - DNA, 25 bp, Artificial
  probe
  misc_feature (1)..(25): SEQ ID NO: 5013; WAN024CLK_at; Start 76; Stop 100
aaaattagtgaggagtttatggctg

SEQ ID NO: 123449 - DNA, 25 bp, Artificial
  probe
  misc_feature (1)..(25): SEQ ID NO: 5013; WAN024CLK_at; Start 84; Stop 108
tgaggagtttatggctgtgaaaagt

SEQ ID NO: 123450 - DNA, 25 bp, Artificial
  probe
  misc_feature (1)..(25): SEQ ID NO: 5013; WAN024CLK_at; Start 61; Stop 85
cataccttggaggaaaaaattagtg

SEQ ID NO: 123451 - DNA, 25 bp, Artificial
  probe
  misc_feature (1)..(25): SEQ ID NO: 5013; WAN024CLK_at; Start 55; Stop 79
tatgggcataccttggaggaaaaaa

SEQ ID NO: 123452 - DNA, 25 bp, Artificial
  probe
  misc_feature (1)..(25): SEQ ID NO: 5013; WAN024CLK_at; Start 43; Stop 67
ttgattgacgtttatgggcatacct

SEQ ID NO: 123453 - DNA, 25 bp, Artificial
  probe
  misc_feature (1)..(25): SEQ ID NO: 5013; WAN024CLK_at; Start 25; Stop 49
cataaagatatctccatgttgattg

SEQ ID NO: 123454 - DNA, 25 bp, Artificial
  probe
  misc_feature (1)..(25): SEQ ID NO: 5013; WAN024CLK_at; Start 50; Stop 74
acgtttatgggcataccttggagga

SEQ ID NO: 123455 - DNA, 25 bp, Artificial
  probe
  misc_feature (1)..(25): SEQ ID NO: 5013; WAN024CLK_at; Start 45; Stop 69
gattgacgtttatgggcataccttg

SEQ ID NO: 123456 - DNA, 25 bp, Artificial
  probe
  misc_feature (1)..(25): SEQ ID NO: 5013; WAN024CLK_at; Start 2; Stop 26
tgacaaagagccaaattttaggaca

SEQ ID NO: 123457 - DNA, 25 bp, Artificial
  probe
  misc_feature (1)..(25): SEQ ID NO: 5013; WAN024CLK_at; Start 56; Stop 80
atgggcataccttggaggaaaaaat

SEQ ID NO: 123458 - DNA, 25 bp, Artificial
  probe
  misc_feature (1)..(25): SEQ ID NO: 5013; WAN024CLK_at; Start 29; Stop 53
aagatatctccatgttgattgacgt

SEQ ID NO: 123459 - DNA, 25 bp, Artificial
  probe
  misc_feature (1)..(25): SEQ ID NO: 5013; WAN024CLK_at; Start 15; Stop 39
aattttaggacataaagatatctcc

SEQ ID NO: 123460 - DNA, 25 bp, Artificial
  probe
  misc_feature (1)..(25): SEQ ID NO: 5013; WAN024CLK_at; Start 37; Stop 61
tccatgttgattgacgtttatgggc

SEQ ID NO: 123461 - DNA, 25 bp, Artificial
  probe
  misc_feature (1)..(25): SEQ ID NO: 5013; WAN024CLK_at; Start 78; Stop 102
aattagtgaggagtttatggctgtg

SEQ ID NO: 123462 - DNA, 25 bp, Artificial
  probe
  misc_feature (1)..(25): SEQ ID NO: 5013; WAN024CLK_at; Start 22; Stop 46
ggacataaagatatctccatgttga

SEQ ID NO: 123463 - DNA, 25 bp, Artificial
  probe
  misc_feature (1)..(25): SEQ ID NO: 5013; WAN024CLK_at; Start 66; Stop 90
cttggaggaaaaaattagtgaggag

SEQ ID NO: 123464 - DNA, 25 bp, Artificial
  probe
  misc_feature (1)..(25): SEQ ID NO: 5013; WAN024CLK_at; Start 51; Stop 75
cgtttatgggcataccttggaggaa

SEQ ID NO: 123465 - DNA, 25 bp, Artificial
  probe
  misc_feature (1)..(25): SEQ ID NO: 5013; WAN024CLK_at; Start 18; Stop 42
tttaggacataaagatatctccatg

SEQ ID NO: 123466 - DNA, 25 bp, Artificial
  probe
  misc_feature (1)..(25): SEQ ID NO: 5013; WAN024CLK_at; Start 31; Stop 55
gatatctccatgttgattgacgttt

SEQ ID NO: 123467 - DNA, 25 bp, Artificial
  probe
  misc_feature (1)..(25): SEQ ID NO: 5013; WAN024CLK_at; Start 95; Stop 119
tggctgtgaaaagtttgttgctaac

SEQ ID NO: 123468 - DNA, 25 bp, Artificial
  probe
  misc_feature (1)..(25): SEQ ID NO: 5013; WAN024CLK_at; Start 91; Stop 115
tttatggctgtgaaaagtttgttgc

SEQ ID NO: 123469 - DNA, 25 bp, Artificial
  probe
  misc_feature (1)..(25): SEQ ID NO: 5013; WAN024CLK_at; Start 93; Stop 117
tatggctgtgaaaagtttgttgcta

SEQ ID NO: 123470 - DNA, 25 bp, Artificial
  probe
  misc_feature (1)..(25): SEQ ID NO: 5013; WAN024CLK_at; Start 42; Stop 66
gttgattgacgtttatgggcatacc

SEQ ID NO: 123471 - DNA, 25 bp, Artificial
  probe
  misc_feature (1)..(25): SEQ ID NO: 5013; WAN024CLK_at; Start 87; Stop 111
ggagtttatggctgtgaaaagtttg

SEQ ID NO: 123472 - DNA, 25 bp, Artificial
  probe
  misc_feature (1)..(25): SEQ ID NO: 5013; WAN024CLK_at; Start 46; Stop 70
attgacgtttatgggcataccttgg

SEQ ID NO: 123473 - DNA, 25 bp, Artificial
  probe
  misc_feature (1)..(25): SEQ ID NO: 5013; WAN024CLK_at; Start 3; Stop 27
gacaaagagccaaattttaggacat

SEQ ID NO: 123474 - DNA, 25 bp, Artificial
  probe
  misc_feature (1)..(25): SEQ ID NO: 5013; WAN024CLK_at; Start 52; Stop 76
gtttatgggcataccttggaggaaa

SEQ ID NO: 123475 - DNA, 25 bp, Artificial
  probe
  misc_feature (1)..(25): SEQ ID NO: 5013; WAN024CLK_at; Start 99; Stop 123
tgtgaaaagtttgttgctaactaat

SEQ ID NO: 123476 - DNA, 25 bp, Artificial
  probe
  misc_feature (1)..(25): SEQ ID NO: 5013; WAN024CLK_at; Start 97; Stop 121
gctgtgaaaagtttgttgctaacta

SEQ ID NO: 123477 - DNA, 25 bp, Artificial
  probe
  misc_feature (1)..(25): SEQ ID NO: 5013; WAN024CLK_at; Start 5; Stop 29
caaagagccaaattttaggacataa

SEQ ID NO: 123478 - DNA, 25 bp, Artificial
  probe
  misc_feature (1)..(25): SEQ ID NO: 5013; WAN024CLK_at; Start 81; Stop 105
tagtgaggagtttatggctgtgaaa

SEQ ID NO: 123479 - DNA, 25 bp, Artificial
  probe
  misc_feature (1)..(25): SEQ ID NO: 1061; WAN024CLL_at; Start 26; Stop 50
atgctctgattttgacggttagtga

SEQ ID NO: 123480 - DNA, 25 bp, Artificial
  probe
  misc_feature (1)..(25): SEQ ID NO: 1061; WAN024CLL_at; Start 29; Stop 53
ctctgattttgacggttagtgatca

SEQ ID NO: 123481 - DNA, 25 bp, Artificial
  probe
  misc_feature (1)..(25): SEQ ID NO: 1061; WAN024CLL_at; Start 20; Stop 44
taggagatgctctgattttgacggt

SEQ ID NO: 123482 - DNA, 25 bp, Artificial
  probe
  misc_feature (1)..(25): SEQ ID NO: 1061; WAN024CLL_at; Start 8; Stop 32
aaaatcatttagtaggagatgctct

SEQ ID NO: 123483 - DNA, 25 bp, Artificial
  probe
  misc_feature (1)..(25): SEQ ID NO: 1061; WAN024CLL_at; Start 6; Stop 30
gaaaaatcatttagtaggagatgct

SEQ ID NO: 123484 - DNA, 25 bp, Artificial
  probe
  misc_feature (1)..(25): SEQ ID NO: 1061; WAN024CLL_at; Start 31; Stop 55
ctgattttgacggttagtgatcaga

SEQ ID NO: 123485 - DNA, 25 bp, Artificial
  probe
  misc_feature (1)..(25): SEQ ID NO: 1061; WAN024CLL_at; Start 49; Stop 73
gatcagattgaagagttggattatt

SEQ ID NO: 123486 - DNA, 25 bp, Artificial
  probe
  misc_feature (1)..(25): SEQ ID NO: 1061; WAN024CLL_at; Start 18; Stop 42
agtaggagatgctctgattttgacg

SEQ ID NO: 123487 - DNA, 25 bp, Artificial
  probe
  misc_feature (1)..(25): SEQ ID NO: 1061; WAN024CLL_at; Start 45; Stop 69
tagtgatcagattgaagagttggat

SEQ ID NO: 123488 - DNA, 25 bp, Artificial
  probe
  misc_feature (1)..(25): SEQ ID NO: 1061; WAN024CLL_at; Start 35; Stop 59
ttttgacggttagtgatcagattga

SEQ ID NO: 123489 - DNA, 25 bp, Artificial
  probe
  misc_feature (1)..(25): SEQ ID NO: 1061; WAN024CLL_at; Start 21; Stop 45
aggagatgctctgattttgacggtt

SEQ ID NO: 123490 - DNA, 25 bp, Artificial
  probe
  misc_feature (1)..(25): SEQ ID NO: 1061; WAN024CLL_at; Start 12; Stop 36
tcatttagtaggagatgctctgatt

SEQ ID NO: 123491 - DNA, 25 bp, Artificial
  probe
  misc_feature (1)..(25): SEQ ID NO: 1061; WAN024CLL_at; Start 23; Stop 47
gagatgctctgattttgacggttag

SEQ ID NO: 123492 - DNA, 25 bp, Artificial
  probe
  misc_feature (1)..(25): SEQ ID NO: 1061; WAN024CLL_at; Start 10; Stop 34
aatcatttagtaggagatgctctga

SEQ ID NO: 123493 - DNA, 25 bp, Artificial
  probe
  misc_feature (1)..(25): SEQ ID NO: 1061; WAN024CLL_at; Start 33; Stop 57
gattttgacggttagtgatcagatt

SEQ ID NO: 123494 - DNA, 25 bp, Artificial
  probe
  misc_feature (1)..(25): SEQ ID NO: 1061; WAN024CLL_at; Start 36; Stop 60
tttgacggttagtgatcagattgaa

SEQ ID NO: 123495 - DNA, 25 bp, Artificial
  probe
  misc_feature (1)..(25): SEQ ID NO: 1061; WAN024CLL_at; Start 41; Stop 65
cggttagtgatcagattgaagagtt

SEQ ID NO: 123496 - DNA, 25 bp, Artificial
  probe
  misc_feature (1)..(25): SEQ ID NO: 1061; WAN024CLL_at; Start 38; Stop 62
tgacggttagtgatcagattgaaga

SEQ ID NO: 123497 - DNA, 25 bp, Artificial
  probe
  misc_feature (1)..(25): SEQ ID NO: 1061; WAN024CLL_at; Start 22; Stop 46
ggagatgctctgattttgacggtta

SEQ ID NO: 123498 - DNA, 25 bp, Artificial
  probe
  misc_feature (1)..(25): SEQ ID NO: 1061; WAN024CLL_at; Start 28; Stop 52
gctctgattttgacggttagtgatc

SEQ ID NO: 123499 - DNA, 25 bp, Artificial
  probe
  misc_feature (1)..(25): SEQ ID NO: 1061; WAN024CLL_at; Start 39; Stop 63
gacggttagtgatcagattgaagag

SEQ ID NO: 123500 - DNA, 25 bp, Artificial
  probe
  misc_feature (1)..(25): SEQ ID NO: 1061; WAN024CLL_at; Start 7; Stop 31
aaaaatcatttagtaggagatgctc

SEQ ID NO: 123501 - DNA, 25 bp, Artificial
  probe
  misc_feature (1)..(25): SEQ ID NO: 1061; WAN024CLL_at; Start 27; Stop 51
tgctctgattttgacggttagtgat

SEQ ID NO: 123502 - DNA, 25 bp, Artificial
  probe
  misc_feature (1)..(25): SEQ ID NO: 1061; WAN024CLL_at; Start 17; Stop 41
tagtaggagatgctctgattttgac

SEQ ID NO: 123503 - DNA, 25 bp, Artificial
  probe
  misc_feature (1)..(25): SEQ ID NO: 1061; WAN024CLL_at; Start 15; Stop 39
tttagtaggagatgctctgattttg

SEQ ID NO: 123504 - DNA, 25 bp, Artificial
  probe
  misc_feature (1)..(25): SEQ ID NO: 1061; WAN024CLL_at; Start 24; Stop 48
agatgctctgattttgacggttagt

SEQ ID NO: 123505 - DNA, 25 bp, Artificial
  probe
  misc_feature (1)..(25): SEQ ID NO: 1061; WAN024CLL_at; Start 43; Stop 67
gttagtgatcagattgaagagttgg

SEQ ID NO: 123506 - DNA, 25 bp, Artificial
  probe
  misc_feature (1)..(25): SEQ ID NO: 1061; WAN024CLL_at; Start 25; Stop 49
gatgctctgattttgacggttagtg

SEQ ID NO: 123507 - DNA, 25 bp, Artificial
  probe
  misc_feature (1)..(25): SEQ ID NO: 1061; WAN024CLL_at; Start 37; Stop 61
ttgacggttagtgatcagattgaag

SEQ ID NO: 123508 - DNA, 25 bp, Artificial
  probe
  misc_feature (1)..(25): SEQ ID NO: 1061; WAN024CLL_at; Start 54; Stop 78
gattgaagagttggattatttttta

SEQ ID NO: 123509 - DNA, 25 bp, Artificial
  probe
  misc_feature (1)..(25): SEQ ID NO: 1061; WAN024CLL_at; Start 13; Stop 37
catttagtaggagatgctctgattt

SEQ ID NO: 123510 - DNA, 25 bp, Artificial
  probe
  misc_feature (1)..(25): SEQ ID NO: 1061; WAN024CLL_at; Start 9; Stop 33
aaatcatttagtaggagatgctctg

SEQ ID NO: 123511 - DNA, 25 bp, Artificial
  probe
  misc_feature (1)..(25): SEQ ID NO: 1061; WAN024CLL_at; Start 51; Stop 75
tcagattgaagagttggattatttt

SEQ ID NO: 123512 - DNA, 25 bp, Artificial
  probe
  misc_feature (1)..(25): SEQ ID NO: 1061; WAN024CLL_at; Start 2; Stop 26
tgaagaaaaatcatttagtaggaga

SEQ ID NO: 123513 - DNA, 25 bp, Artificial
  probe
  misc_feature (1)..(25): SEQ ID NO: 2860; WAN024CLM_at; Start 39; Stop 63
ccgcatggaagagttgaaacaaaaa

SEQ ID NO: 123514 - DNA, 25 bp, Artificial
  probe
  misc_feature (1)..(25): SEQ ID NO: 2860; WAN024CLM_at; Start 153; Stop 177
ctttactttgctgggaattttgagg

SEQ ID NO: 123515 - DNA, 25 bp, Artificial
  probe
  misc_feature (1)..(25): SEQ ID NO: 2860; WAN024CLM_at; Start 21; Stop 45
ttacaaagacgttgaaggccgcatg

SEQ ID NO: 123516 - DNA, 25 bp, Artificial
  probe
  misc_feature (1)..(25): SEQ ID NO: 2860; WAN024CLM_at; Start 49; Stop 73
gagttgaaacaaaaacccatcaaga

SEQ ID NO: 123517 - DNA, 25 bp, Artificial
  probe
  misc_feature (1)..(25): SEQ ID NO: 2860; WAN024CLM_at; Start 156; Stop 180
tactttgctgggaattttgaggcta

SEQ ID NO: 123518 - DNA, 25 bp, Artificial
  probe
  misc_feature (1)..(25): SEQ ID NO: 2860; WAN024CLM_at; Start 122; Stop 146
tactgggtttgatgattctgattgg

SEQ ID NO: 123519 - DNA, 25 bp, Artificial
  probe
  misc_feature (1)..(25): SEQ ID NO: 2860; WAN024CLM_at; Start 37; Stop 61
ggccgcatggaagagttgaaacaaa

SEQ ID NO: 123520 - DNA, 25 bp, Artificial
  probe
  misc_feature (1)..(25): SEQ ID NO: 2860; WAN024CLM_at; Start 22; Stop 46
tacaaagacgttgaaggccgcatgg

SEQ ID NO: 123521 - DNA, 25 bp, Artificial
  probe
  misc_feature (1)..(25): SEQ ID NO: 2860; WAN024CLM_at; Start 116; Stop 140
cacttttactgggtttgatgattct

SEQ ID NO: 123522 - DNA, 25 bp, Artificial
  probe
  misc_feature (1)..(25): SEQ ID NO: 2860; WAN024CLM_at; Start 141; Stop 165
gattggtttgctctttactttgctg

SEQ ID NO: 123523 - DNA, 25 bp, Artificial
  probe
  misc_feature (1)..(25): SEQ ID NO: 2860; WAN024CLM_at; Start 35; Stop 59
aaggccgcatggaagagttgaaaca

SEQ ID NO: 123524 - DNA, 25 bp, Artificial
  probe
  misc_feature (1)..(25): SEQ ID NO: 2860; WAN024CLM_at; Start 23; Stop 47
acaaagacgttgaaggccgcatgga

SEQ ID NO: 123525 - DNA, 25 bp, Artificial
  probe
  misc_feature (1)..(25): SEQ ID NO: 2860; WAN024CLM_at; Start 19; Stop 43
ttttacaaagacgttgaaggccgca

SEQ ID NO: 123526 - DNA, 25 bp, Artificial
  probe
  misc_feature (1)..(25): SEQ ID NO: 2860; WAN024CLM_at; Start 2; Stop 26
tgtcagaggaagatttattttacaa

SEQ ID NO: 123527 - DNA, 25 bp, Artificial
  probe
  misc_feature (1)..(25): SEQ ID NO: 2860; WAN024CLM_at; Start 131; Stop 155
tgatgattctgattggtttgctctt

SEQ ID NO: 123528 - DNA, 25 bp, Artificial
  probe
  misc_feature (1)..(25): SEQ ID NO: 2860; WAN024CLM_at; Start 38; Stop 62
gccgcatggaagagttgaaacaaaa

SEQ ID NO: 123529 - DNA, 25 bp, Artificial
  probe
  misc_feature (1)..(25): SEQ ID NO: 2860; WAN024CLM_at; Start 127; Stop 151
ggtttgatgattctgattggtttgc

SEQ ID NO: 123530 - DNA, 25 bp, Artificial
  probe
  misc_feature (1)..(25): SEQ ID NO: 2860; WAN024CLM_at; Start 145; Stop 169
ggtttgctctttactttgctgggaa

SEQ ID NO: 123531 - DNA, 25 bp, Artificial
  probe
  misc_feature (1)..(25): SEQ ID NO: 2860; WAN024CLM_at; Start 41; Stop 65
gcatggaagagttgaaacaaaaacc

SEQ ID NO: 123532 - DNA, 25 bp, Artificial
  probe
  misc_feature (1)..(25): SEQ ID NO: 2860; WAN024CLM_at; Start 118; Stop 142
cttttactgggtttgatgattctga

SEQ ID NO: 123533 - DNA, 25 bp, Artificial
  probe
  misc_feature (1)..(25): SEQ ID NO: 2860; WAN024CLM_at; Start 34; Stop 58
gaaggccgcatggaagagttgaaac

SEQ ID NO: 123534 - DNA, 25 bp, Artificial
  probe
  misc_feature (1)..(25): SEQ ID NO: 2860; WAN024CLM_at; Start 46; Stop 70
gaagagttgaaacaaaaacccatca

SEQ ID NO: 123535 - DNA, 25 bp, Artificial
  probe
  misc_feature (1)..(25): SEQ ID NO: 2860; WAN024CLM_at; Start 53; Stop 77
tgaaacaaaaacccatcaagaagga

SEQ ID NO: 123536 - DNA, 25 bp, Artificial
  probe
  misc_feature (1)..(25): SEQ ID NO: 2860; WAN024CLM_at; Start 33; Stop 57
tgaaggccgcatggaagagttgaaa

SEQ ID NO: 123537 - DNA, 25 bp, Artificial
  probe
  misc_feature (1)..(25): SEQ ID NO: 2860; WAN024CLM_at; Start 135; Stop 159
gattctgattggtttgctctttact

SEQ ID NO: 123538 - DNA, 25 bp, Artificial
  probe
  misc_feature (1)..(25): SEQ ID NO: 2860; WAN024CLM_at; Start 32; Stop 56
ttgaaggccgcatggaagagttgaa

SEQ ID NO: 123539 - DNA, 25 bp, Artificial
  probe
  misc_feature (1)..(25): SEQ ID NO: 2860; WAN024CLM_at; Start 20; Stop 44
tttacaaagacgttgaaggccgcat

SEQ ID NO: 123540 - DNA, 25 bp, Artificial
  probe
  misc_feature (1)..(25): SEQ ID NO: 2860; WAN024CLM_at; Start 146; Stop 170
gtttgctctttactttgctgggaat

SEQ ID NO: 123541 - DNA, 25 bp, Artificial
  probe
  misc_feature (1)..(25): SEQ ID NO: 2860; WAN024CLM_at; Start 36; Stop 60
aggccgcatggaagagttgaaacaa

SEQ ID NO: 123542 - DNA, 25 bp, Artificial
  probe
  misc_feature (1)..(25): SEQ ID NO: 2860; WAN024CLM_at; Start 112; Stop 136
ttttcacttttactgggtttgatga

SEQ ID NO: 123543 - DNA, 25 bp, Artificial
  probe
  misc_feature (1)..(25): SEQ ID NO: 2860; WAN024CLM_at; Start 5; Stop 29
cagaggaagatttattttacaaaga

SEQ ID NO: 123544 - DNA, 25 bp, Artificial
  probe
  misc_feature (1)..(25): SEQ ID NO: 2860; WAN024CLM_at; Start 24; Stop 48
caaagacgttgaaggccgcatggaa

SEQ ID NO: 123545 - DNA, 25 bp, Artificial
  probe
  misc_feature (1)..(25): SEQ ID NO: 2860; WAN024CLM_at; Start 150; Stop 174
gctctttactttgctgggaattttg

SEQ ID NO: 123546 - DNA, 25 bp, Artificial
  probe
  misc_feature (1)..(25): SEQ ID NO: 2860; WAN024CLM_at; Start 25; Stop 49
aaagacgttgaaggccgcatggaag

SEQ ID NO: 123547 - DNA, 25 bp, Artificial
  probe
  misc_feature (1)..(25): SEQ ID NO: 5540; WAN024CLN_at; Start 43; Stop 67
catatgacagtaacgattaaagtaa

SEQ ID NO: 123548 - DNA, 25 bp, Artificial
  probe
  misc_feature (1)..(25): SEQ ID NO: 5540; WAN024CLN_at; Start 40; Stop 64
tctcatatgacagtaacgattaaag

SEQ ID NO: 123549 - DNA, 25 bp, Artificial
  probe
  misc_feature (1)..(25): SEQ ID NO: 5540; WAN024CLN_at; Start 45; Stop 69
tatgacagtaacgattaaagtaaat

SEQ ID NO: 123550 - DNA, 25 bp, Artificial
  probe
  misc_feature (1)..(25): SEQ ID NO: 5540; WAN024CLN_at; Start 22; Stop 46
tcaaaaagaaacgaggactctcata

SEQ ID NO: 123551 - DNA, 25 bp, Artificial
  probe
  misc_feature (1)..(25): SEQ ID NO: 5540; WAN024CLN_at; Start 20; Stop 44
catcaaaaagaaacgaggactctca

SEQ ID NO: 123552 - DNA, 25 bp, Artificial
  probe
  misc_feature (1)..(25): SEQ ID NO: 5540; WAN024CLN_at; Start 36; Stop 60
ggactctcatatgacagtaacgatt

SEQ ID NO: 123553 - DNA, 25 bp, Artificial
  probe
  misc_feature (1)..(25): SEQ ID NO: 5540; WAN024CLN_at; Start 29; Stop 53
gaaacgaggactctcatatgacagt

SEQ ID NO: 123554 - DNA, 25 bp, Artificial
  probe
  misc_feature (1)..(25): SEQ ID NO: 5540; WAN024CLN_at; Start 30; Stop 54
aaacgaggactctcatatgacagta

SEQ ID NO: 123555 - DNA, 25 bp, Artificial
  probe
  misc_feature (1)..(25): SEQ ID NO: 5540; WAN024CLN_at; Start 33; Stop 57
cgaggactctcatatgacagtaacg

SEQ ID NO: 123556 - DNA, 25 bp, Artificial
  probe
  misc_feature (1)..(25): SEQ ID NO: 5540; WAN024CLN_at; Start 27; Stop 51
aagaaacgaggactctcatatgaca

SEQ ID NO: 123557 - DNA, 25 bp, Artificial
  probe
  misc_feature (1)..(25): SEQ ID NO: 5540; WAN024CLN_at; Start 26; Stop 50
aaagaaacgaggactctcatatgac

SEQ ID NO: 123558 - DNA, 25 bp, Artificial
  probe
  misc_feature (1)..(25): SEQ ID NO: 5540; WAN024CLN_at; Start 31; Stop 55
aacgaggactctcatatgacagtaa

SEQ ID NO: 123559 - DNA, 25 bp, Artificial
  probe
  misc_feature (1)..(25): SEQ ID NO: 5540; WAN024CLN_at; Start 41; Stop 65
ctcatatgacagtaacgattaaagt

SEQ ID NO: 123560 - DNA, 25 bp, Artificial
  probe
  misc_feature (1)..(25): SEQ ID NO: 5540; WAN024CLN_at; Start 12; Stop 36
actagagtcatcaaaaagaaacgag

SEQ ID NO: 123561 - DNA, 25 bp, Artificial
  probe
  misc_feature (1)..(25): SEQ ID NO: 5540; WAN024CLN_at; Start 4; Stop 28
gctcttatactagagtcatcaaaaa

SEQ ID NO: 123562 - DNA, 25 bp, Artificial
  probe
  misc_feature (1)..(25): SEQ ID NO: 5540; WAN024CLN_at; Start 18; Stop 42
gtcatcaaaaagaaacgaggactct

SEQ ID NO: 123563 - DNA, 25 bp, Artificial
  probe
  misc_feature (1)..(25): SEQ ID NO: 5540; WAN024CLN_at; Start 2; Stop 26
tggctcttatactagagtcatcaaa

SEQ ID NO: 123564 - DNA, 25 bp, Artificial
  probe
  misc_feature (1)..(25): SEQ ID NO: 5540; WAN024CLN_at; Start 37; Stop 61
gactctcatatgacagtaacgatta

SEQ ID NO: 123565 - DNA, 25 bp, Artificial
  probe
  misc_feature (1)..(25): SEQ ID NO: 5540; WAN024CLN_at; Start 1; Stop 25
ttggctcttatactagagtcatcaa

SEQ ID NO: 123566 - DNA, 25 bp, Artificial
  probe
  misc_feature (1)..(25): SEQ ID NO: 5540; WAN024CLN_at; Start 34; Stop 58
gaggactctcatatgacagtaacga

SEQ ID NO: 123567 - DNA, 25 bp, Artificial
  probe
  misc_feature (1)..(25): SEQ ID NO: 5540; WAN024CLN_at; Start 32; Stop 56
acgaggactctcatatgacagtaac

SEQ ID NO: 123568 - DNA, 25 bp, Artificial
  probe
  misc_feature (1)..(25): SEQ ID NO: 5540; WAN024CLN_at; Start 9; Stop 33
tatactagagtcatcaaaaagaaac

SEQ ID NO: 123569 - DNA, 25 bp, Artificial
  probe
  misc_feature (1)..(25): SEQ ID NO: 5540; WAN024CLN_at; Start 21; Stop 45
atcaaaaagaaacgaggactctcat

SEQ ID NO: 123570 - DNA, 25 bp, Artificial
  probe
  misc_feature (1)..(25): SEQ ID NO: 5540; WAN024CLN_at; Start 47; Stop 71
tgacagtaacgattaaagtaaatta

SEQ ID NO: 123571 - DNA, 25 bp, Artificial
  probe
  misc_feature (1)..(25): SEQ ID NO: 5540; WAN024CLN_at; Start 14; Stop 38
tagagtcatcaaaaagaaacgagga

SEQ ID NO: 123572 - DNA, 25 bp, Artificial
  probe
  misc_feature (1)..(25): SEQ ID NO: 5540; WAN024CLN_at; Start 13; Stop 37
ctagagtcatcaaaaagaaacgagg

SEQ ID NO: 123573 - DNA, 25 bp, Artificial
  probe
  misc_feature (1)..(25): SEQ ID NO: 5540; WAN024CLN_at; Start 11; Stop 35
tactagagtcatcaaaaagaaacga

SEQ ID NO: 123574 - DNA, 25 bp, Artificial
  probe
  misc_feature (1)..(25): SEQ ID NO: 5540; WAN024CLN_at; Start 28; Stop 52
agaaacgaggactctcatatgacag

SEQ ID NO: 123575 - DNA, 25 bp, Artificial
  probe
  misc_feature (1)..(25): SEQ ID NO: 5540; WAN024CLN_at; Start 3; Stop 27
ggctcttatactagagtcatcaaaa

SEQ ID NO: 123576 - DNA, 25 bp, Artificial
  probe
  misc_feature (1)..(25): SEQ ID NO: 5540; WAN024CLN_at; Start 19; Stop 43
tcatcaaaaagaaacgaggactctc

SEQ ID NO: 123577 - DNA, 25 bp, Artificial
  probe
  misc_feature (1)..(25): SEQ ID NO: 5540; WAN024CLN_at; Start 23; Stop 47
caaaaagaaacgaggactctcatat

SEQ ID NO: 123578 - DNA, 25 bp, Artificial
  probe
  misc_feature (1)..(25): SEQ ID NO: 5540; WAN024CLN_at; Start 16; Stop 40
gagtcatcaaaaagaaacgaggact

SEQ ID NO: 123579 - DNA, 25 bp, Artificial
  probe
  misc_feature (1)..(25): SEQ ID NO: 5540; WAN024CLN_at; Start 35; Stop 59
aggactctcatatgacagtaacgat

SEQ ID NO: 123580 - DNA, 25 bp, Artificial
  probe
  misc_feature (1)..(25): SEQ ID NO: 5540; WAN024CLN_at; Start 24; Stop 48
aaaaagaaacgaggactctcatatg

SEQ ID NO: 123581 - DNA, 25 bp, Artificial
  probe
  misc_feature (1)..(25): SEQ ID NO: 3325; WAN024CLO_at; Start 28; Stop 52
gagcatttcgctctctcttctgttt

SEQ ID NO: 123582 - DNA, 25 bp, Artificial
  probe
  misc_feature (1)..(25): SEQ ID NO: 3325; WAN024CLO_at; Start 24; Stop 48
aaaagagcatttcgctctctcttct

SEQ ID NO: 123583 - DNA, 25 bp, Artificial
  probe
  misc_feature (1)..(25): SEQ ID NO: 3325; WAN024CLO_at; Start 34; Stop 58
ttcgctctctcttctgtttatacta

SEQ ID NO: 123584 - DNA, 25 bp, Artificial
  probe
  misc_feature (1)..(25): SEQ ID NO: 3325; WAN024CLO_at; Start 18; Stop 42
aacgaaaaaagagcatttcgctctc

SEQ ID NO: 123585 - DNA, 25 bp, Artificial
  probe
  misc_feature (1)..(25): SEQ ID NO: 3325; WAN024CLO_at; Start 19; Stop 43
acgaaaaaagagcatttcgctctct

SEQ ID NO: 123586 - DNA, 25 bp, Artificial
  probe
  misc_feature (1)..(25): SEQ ID NO: 3325; WAN024CLO_at; Start 36; Stop 60
cgctctctcttctgtttatactagt

SEQ ID NO: 123587 - DNA, 25 bp, Artificial
  probe
  misc_feature (1)..(25): SEQ ID NO: 3325; WAN024CLO_at; Start 44; Stop 68
cttctgtttatactagttttttgct

SEQ ID NO: 123588 - DNA, 25 bp, Artificial
  probe
  misc_feature (1)..(25): SEQ ID NO: 3325; WAN024CLO_at; Start 14; Stop 38
tagaaacgaaaaaagagcatttcgc

SEQ ID NO: 123589 - DNA, 25 bp, Artificial
  probe
  misc_feature (1)..(25): SEQ ID NO: 3325; WAN024CLO_at; Start 15; Stop 39
agaaacgaaaaaagagcatttcgct

SEQ ID NO: 123590 - DNA, 25 bp, Artificial
  probe
  misc_feature (1)..(25): SEQ ID NO: 3325; WAN024CLO_at; Start 35; Stop 59
tcgctctctcttctgtttatactag

SEQ ID NO: 123591 - DNA, 25 bp, Artificial
  probe
  misc_feature (1)..(25): SEQ ID NO: 3325; WAN024CLO_at; Start 25; Stop 49
aaagagcatttcgctctctcttctg

SEQ ID NO: 123592 - DNA, 25 bp, Artificial
  probe
  misc_feature (1)..(25): SEQ ID NO: 3325; WAN024CLO_at; Start 17; Stop 41
aaacgaaaaaagagcatttcgctct

SEQ ID NO: 123593 - DNA, 25 bp, Artificial
  probe
  misc_feature (1)..(25): SEQ ID NO: 3325; WAN024CLO_at; Start 21; Stop 45
gaaaaaagagcatttcgctctctct

SEQ ID NO: 123594 - DNA, 25 bp, Artificial
  probe
  misc_feature (1)..(25): SEQ ID NO: 3325; WAN024CLO_at; Start 22; Stop 46
aaaaaagagcatttcgctctctctt

SEQ ID NO: 123595 - DNA, 25 bp, Artificial
  probe
  misc_feature (1)..(25): SEQ ID NO: 3325; WAN024CLO_at; Start 29; Stop 53
agcatttcgctctctcttctgttta

SEQ ID NO: 123596 - DNA, 25 bp, Artificial
  probe
  misc_feature (1)..(25): SEQ ID NO: 3325; WAN024CLO_at; Start 30; Stop 54
gcatttcgctctctcttctgtttat

SEQ ID NO: 123597 - DNA, 25 bp, Artificial
  probe
  misc_feature (1)..(25): SEQ ID NO: 3325; WAN024CLO_at; Start 39; Stop 63
tctctcttctgtttatactagtttt

SEQ ID NO: 123598 - DNA, 25 bp, Artificial
  probe
  misc_feature (1)..(25): SEQ ID NO: 3325; WAN024CLO_at; Start 20; Stop 44
cgaaaaaagagcatttcgctctctc

SEQ ID NO: 123599 - DNA, 25 bp, Artificial
  probe
  misc_feature (1)..(25): SEQ ID NO: 3325; WAN024CLO_at; Start 31; Stop 55
catttcgctctctcttctgtttata

SEQ ID NO: 123600 - DNA, 25 bp, Artificial
  probe
  misc_feature (1)..(25): SEQ ID NO: 3325; WAN024CLO_at; Start 38; Stop 62
ctctctcttctgtttatactagttt

SEQ ID NO: 123601 - DNA, 25 bp, Artificial
  probe
  misc_feature (1)..(25): SEQ ID NO: 3325; WAN024CLO_at; Start 37; Stop 61
gctctctcttctgtttatactagtt

SEQ ID NO: 123602 - DNA, 25 bp, Artificial
  probe
  misc_feature (1)..(25): SEQ ID NO: 3325; WAN024CLO_at; Start 16; Stop 40
gaaacgaaaaaagagcatttcgctc

SEQ ID NO: 123603 - DNA, 25 bp, Artificial
  probe
  misc_feature (1)..(25): SEQ ID NO: 3325; WAN024CLO_at; Start 32; Stop 56
atttcgctctctcttctgtttatac

SEQ ID NO: 123604 - DNA, 25 bp, Artificial
  probe
  misc_feature (1)..(25): SEQ ID NO: 3325; WAN024CLO_at; Start 43; Stop 67
tcttctgtttatactagttttttgc

SEQ ID NO: 123605 - DNA, 25 bp, Artificial
  probe
  misc_feature (1)..(25): SEQ ID NO: 3325; WAN024CLO_at; Start 46; Stop 70
tctgtttatactagttttttgcttc

SEQ ID NO: 123606 - DNA, 25 bp, Artificial
  probe
  misc_feature (1)..(25): SEQ ID NO: 3325; WAN024CLO_at; Start 33; Stop 57
tttcgctctctcttctgtttatact

SEQ ID NO: 123607 - DNA, 25 bp, Artificial
  probe
  misc_feature (1)..(25): SEQ ID NO: 3325; WAN024CLO_at; Start 27; Stop 51
agagcatttcgctctctcttctgtt

SEQ ID NO: 123608 - DNA, 25 bp, Artificial
  probe
  misc_feature (1)..(25): SEQ ID NO: 3325; WAN024CLO_at; Start 42; Stop 66
ctcttctgtttatactagttttttg

SEQ ID NO: 123609 - DNA, 25 bp, Artificial
  probe
  misc_feature (1)..(25): SEQ ID NO: 3325; WAN024CLO_at; Start 40; Stop 64
ctctcttctgtttatactagttttt

SEQ ID NO: 123610 - DNA, 25 bp, Artificial
  probe
  misc_feature (1)..(25): SEQ ID NO: 3325; WAN024CLO_at; Start 26; Stop 50
aagagcatttcgctctctcttctgt

SEQ ID NO: 123611 - DNA, 25 bp, Artificial
  probe
  misc_feature (1)..(25): SEQ ID NO: 3325; WAN024CLO_at; Start 23; Stop 47
aaaaagagcatttcgctctctcttc

SEQ ID NO: 123612 - DNA, 25 bp, Artificial
  probe
  misc_feature (1)..(25): SEQ ID NO: 5047; WAN024CLP_at; Start 40; Stop 64
tttgccaagtgcttaggccgtgttc

SEQ ID NO: 123613 - DNA, 25 bp, Artificial
  probe
  misc_feature (1)..(25): SEQ ID NO: 5047; WAN024CLP_at; Start 27; Stop 51
agattttatcttttttgccaagtgc

SEQ ID NO: 123614 - DNA, 25 bp, Artificial
  probe
  misc_feature (1)..(25): SEQ ID NO: 5047; WAN024CLP_at; Start 3; Stop 27
gacgaagaaacttcagtttctagga

SEQ ID NO: 123615 - DNA, 25 bp, Artificial
  probe
  misc_feature (1)..(25): SEQ ID NO: 5047; WAN024CLP_at; Start 35; Stop 59
tcttttttgccaagtgcttaggccg

SEQ ID NO: 123616 - DNA, 25 bp, Artificial
  probe
  misc_feature (1)..(25): SEQ ID NO: 5047; WAN024CLP_at; Start 43; Stop 67
gccaagtgcttaggccgtgttcaat

SEQ ID NO: 123617 - DNA, 25 bp, Artificial
  probe
  misc_feature (1)..(25): SEQ ID NO: 5047; WAN024CLP_at; Start 24; Stop 48
aggagattttatcttttttgccaag

SEQ ID NO: 123618 - DNA, 25 bp, Artificial
  probe
  misc_feature (1)..(25): SEQ ID NO: 5047; WAN024CLP_at; Start 26; Stop 50
gagattttatcttttttgccaagtg

SEQ ID NO: 123619 - DNA, 25 bp, Artificial
  probe
  misc_feature (1)..(25): SEQ ID NO: 5047; WAN024CLP_at; Start 41; Stop 65
ttgccaagtgcttaggccgtgttca

SEQ ID NO: 123620 - DNA, 25 bp, Artificial
  probe
  misc_feature (1)..(25): SEQ ID NO: 5047; WAN024CLP_at; Start 6; Stop 30
gaagaaacttcagtttctaggagat

SEQ ID NO: 123621 - DNA, 25 bp, Artificial
  probe
  misc_feature (1)..(25): SEQ ID NO: 5047; WAN024CLP_at; Start 31; Stop 55
tttatcttttttgccaagtgcttag

SEQ ID NO: 123622 - DNA, 25 bp, Artificial
  probe
  misc_feature (1)..(25): SEQ ID NO: 5047; WAN024CLP_at; Start 33; Stop 57
tatcttttttgccaagtgcttaggc

SEQ ID NO: 123623 - DNA, 25 bp, Artificial
  probe
  misc_feature (1)..(25): SEQ ID NO: 5047; WAN024CLP_at; Start 39; Stop 63
ttttgccaagtgcttaggccgtgtt

SEQ ID NO: 123624 - DNA, 25 bp, Artificial
  probe
  misc_feature (1)..(25): SEQ ID NO: 5047; WAN024CLP_at; Start 38; Stop 62
tttttgccaagtgcttaggccgtgt

SEQ ID NO: 123625 - DNA, 25 bp, Artificial
  probe
  misc_feature (1)..(25): SEQ ID NO: 5047; WAN024CLP_at; Start 37; Stop 61
ttttttgccaagtgcttaggccgtg

SEQ ID NO: 123626 - DNA, 25 bp, Artificial
  probe
  misc_feature (1)..(25): SEQ ID NO: 5047; WAN024CLP_at; Start 4; Stop 28
acgaagaaacttcagtttctaggag

SEQ ID NO: 123627 - DNA, 25 bp, Artificial
  probe
  misc_feature (1)..(25): SEQ ID NO: 5047; WAN024CLP_at; Start 49; Stop 73
tgcttaggccgtgttcaattgagca

SEQ ID NO: 123628 - DNA, 25 bp, Artificial
  probe
  misc_feature (1)..(25): SEQ ID NO: 5047; WAN024CLP_at; Start 21; Stop 45
tctaggagattttatcttttttgcc

SEQ ID NO: 123629 - DNA, 25 bp, Artificial
  probe
  misc_feature (1)..(25): SEQ ID NO: 5047; WAN024CLP_at; Start 13; Stop 37
cttcagtttctaggagattttatct

SEQ ID NO: 123630 - DNA, 25 bp, Artificial
  probe
  misc_feature (1)..(25): SEQ ID NO: 5047; WAN024CLP_at; Start 50; Stop 74
gcttaggccgtgttcaattgagcat

SEQ ID NO: 123631 - DNA, 25 bp, Artificial
  probe
  misc_feature (1)..(25): SEQ ID NO: 5047; WAN024CLP_at; Start 36; Stop 60
cttttttgccaagtgcttaggccgt

SEQ ID NO: 123632 - DNA, 25 bp, Artificial
  probe
  misc_feature (1)..(25): SEQ ID NO: 5047; WAN024CLP_at; Start 28; Stop 52
gattttatcttttttgccaagtgct

SEQ ID NO: 123633 - DNA, 25 bp, Artificial
  probe
  misc_feature (1)..(25): SEQ ID NO: 5047; WAN024CLP_at; Start 5; Stop 29
cgaagaaacttcagtttctaggaga

SEQ ID NO: 123634 - DNA, 25 bp, Artificial
  probe
  misc_feature (1)..(25): SEQ ID NO: 5047; WAN024CLP_at; Start 12; Stop 36
acttcagtttctaggagattttatc

SEQ ID NO: 123635 - DNA, 25 bp, Artificial
  probe
  misc_feature (1)..(25): SEQ ID NO: 5047; WAN024CLP_at; Start 54; Stop 78
aggccgtgttcaattgagcatatct

SEQ ID NO: 123636 - DNA, 25 bp, Artificial
  probe
  misc_feature (1)..(25): SEQ ID NO: 5047; WAN024CLP_at; Start 42; Stop 66
tgccaagtgcttaggccgtgttcaa

SEQ ID NO: 123637 - DNA, 25 bp, Artificial
  probe
  misc_feature (1)..(25): SEQ ID NO: 5047; WAN024CLP_at; Start 53; Stop 77
taggccgtgttcaattgagcatatc

SEQ ID NO: 123638 - DNA, 25 bp, Artificial
  probe
  misc_feature (1)..(25): SEQ ID NO: 5047; WAN024CLP_at; Start 15; Stop 39
tcagtttctaggagattttatcttt

SEQ ID NO: 123639 - DNA, 25 bp, Artificial
  probe
  misc_feature (1)..(25): SEQ ID NO: 5047; WAN024CLP_at; Start 52; Stop 76
ttaggccgtgttcaattgagcatat

SEQ ID NO: 123640 - DNA, 25 bp, Artificial
  probe
  misc_feature (1)..(25): SEQ ID NO: 5047; WAN024CLP_at; Start 34; Stop 58
atcttttttgccaagtgcttaggcc

SEQ ID NO: 123641 - DNA, 25 bp, Artificial
  probe
  misc_feature (1)..(25): SEQ ID NO: 5047; WAN024CLP_at; Start 2; Stop 26
tgacgaagaaacttcagtttctagg

SEQ ID NO: 123642 - DNA, 25 bp, Artificial
  probe
  misc_feature (1)..(25): SEQ ID NO: 5047; WAN024CLP_at; Start 47; Stop 71
agtgcttaggccgtgttcaattgag

SEQ ID NO: 123643 - DNA, 25 bp, Artificial
  probe
  misc_feature (1)..(25): SEQ ID NO: 5047; WAN024CLP_at; Start 48; Stop 72
gtgcttaggccgtgttcaattgagc

SEQ ID NO: 123644 - DNA, 25 bp, Artificial
  probe
  misc_feature (1)..(25): SEQ ID NO: 5047; WAN024CLP_at; Start 51; Stop 75
cttaggccgtgttcaattgagcata

SEQ ID NO: 123645 - DNA, 25 bp, Artificial
  probe
  misc_feature (1)..(25): SEQ ID NO: 5047; WAN024CLP_at; Start 8; Stop 32
agaaacttcagtttctaggagattt

SEQ ID NO: 123646 - DNA, 25 bp, Artificial
  probe
  misc_feature (1)..(25): SEQ ID NO: 6715; WAN024CLQ_at; Start 55; Stop 79
aagttgcttttcgtatttgataaga

SEQ ID NO: 123647 - DNA, 25 bp, Artificial
  probe
  misc_feature (1)..(25): SEQ ID NO: 6715; WAN024CLQ_at; Start 57; Stop 81
gttgcttttcgtatttgataagaaa

SEQ ID NO: 123648 - DNA, 25 bp, Artificial
  probe
  misc_feature (1)..(25): SEQ ID NO: 6715; WAN024CLQ_at; Start 52; Stop 76
tttaagttgcttttcgtatttgata

SEQ ID NO: 123649 - DNA, 25 bp, Artificial
  probe
  misc_feature (1)..(25): SEQ ID NO: 6715; WAN024CLQ_at; Start 32; Stop 56
catctattttagttgaaatatttaa

SEQ ID NO: 123650 - DNA, 25 bp, Artificial
  probe
  misc_feature (1)..(25): SEQ ID NO: 6715; WAN024CLQ_at; Start 50; Stop 74
tatttaagttgcttttcgtatttga

SEQ ID NO: 123651 - DNA, 25 bp, Artificial
  probe
  misc_feature (1)..(25): SEQ ID NO: 6715; WAN024CLQ_at; Start 51; Stop 75
atttaagttgcttttcgtatttgat

SEQ ID NO: 123652 - DNA, 25 bp, Artificial
  probe
  misc_feature (1)..(25): SEQ ID NO: 6715; WAN024CLQ_at; Start 49; Stop 73
atatttaagttgcttttcgtatttg

SEQ ID NO: 123653 - DNA, 25 bp, Artificial
  probe
  misc_feature (1)..(25): SEQ ID NO: 6715; WAN024CLQ_at; Start 45; Stop 69
tgaaatatttaagttgcttttcgta

SEQ ID NO: 123654 - DNA, 25 bp, Artificial
  probe
  misc_feature (1)..(25): SEQ ID NO: 6715; WAN024CLQ_at; Start 54; Stop 78
taagttgcttttcgtatttgataag

SEQ ID NO: 123655 - DNA, 25 bp, Artificial
  probe
  misc_feature (1)..(25): SEQ ID NO: 6715; WAN024CLQ_at; Start 56; Stop 80
agttgcttttcgtatttgataagaa

SEQ ID NO: 123656 - DNA, 25 bp, Artificial
  probe
  misc_feature (1)..(25): SEQ ID NO: 6715; WAN024CLQ_at; Start 53; Stop 77
ttaagttgcttttcgtatttgataa

SEQ ID NO: 123657 - DNA, 25 bp, Artificial
  probe
  misc_feature (1)..(25): SEQ ID NO: 5725; WAN024CLR_at; Start 41; Stop 65
tgatatcaaatagaacagaacctca

SEQ ID NO: 123658 - DNA, 25 bp, Artificial
  probe
  misc_feature (1)..(25): SEQ ID NO: 5725; WAN024CLR_at; Start 7; Stop 31
tttgcaatggacatttttgttttta

SEQ ID NO: 123659 - DNA, 25 bp, Artificial
  probe
  misc_feature (1)..(25): SEQ ID NO: 5725; WAN024CLR_at; Start 38; Stop 62
atatgatatcaaatagaacagaacc

SEQ ID NO: 123660 - DNA, 25 bp, Artificial
  probe
  misc_feature (1)..(25): SEQ ID NO: 5725; WAN024CLR_at; Start 53; Stop 77
gaacagaacctcactatgccaaaat

SEQ ID NO: 123661 - DNA, 25 bp, Artificial
  probe
  misc_feature (1)..(25): SEQ ID NO: 5725; WAN024CLR_at; Start 49; Stop 73
aatagaacagaacctcactatgcca

SEQ ID NO: 123662 - DNA, 25 bp, Artificial
  probe
  misc_feature (1)..(25): SEQ ID NO: 5725; WAN024CLR_at; Start 52; Stop 76
agaacagaacctcactatgccaaaa

SEQ ID NO: 123663 - DNA, 25 bp, Artificial
  probe
  misc_feature (1)..(25): SEQ ID NO: 5725; WAN024CLR_at; Start 54; Stop 78
aacagaacctcactatgccaaaatc

SEQ ID NO: 123664 - DNA, 25 bp, Artificial
  probe
  misc_feature (1)..(25): SEQ ID NO: 5725; WAN024CLR_at; Start 58; Stop 82
gaacctcactatgccaaaatcattt

SEQ ID NO: 123665 - DNA, 25 bp, Artificial
  probe
  misc_feature (1)..(25): SEQ ID NO: 5725; WAN024CLR_at; Start 43; Stop 67
atatcaaatagaacagaacctcact

SEQ ID NO: 123666 - DNA, 25 bp, Artificial
  probe
  misc_feature (1)..(25): SEQ ID NO: 5725; WAN024CLR_at; Start 51; Stop 75
tagaacagaacctcactatgccaaa

SEQ ID NO: 123667 - DNA, 25 bp, Artificial
  probe
  misc_feature (1)..(25): SEQ ID NO: 5725; WAN024CLR_at; Start 3; Stop 27
gtcctttgcaatggacatttttgtt

SEQ ID NO: 123668 - DNA, 25 bp, Artificial
  probe
  misc_feature (1)..(25): SEQ ID NO: 5725; WAN024CLR_at; Start 48; Stop 72
aaatagaacagaacctcactatgcc

SEQ ID NO: 123669 - DNA, 25 bp, Artificial
  probe
  misc_feature (1)..(25): SEQ ID NO: 5725; WAN024CLR_at; Start 56; Stop 80
cagaacctcactatgccaaaatcat

SEQ ID NO: 123670 - DNA, 25 bp, Artificial
  probe
  misc_feature (1)..(25): SEQ ID NO: 5725; WAN024CLR_at; Start 33; Stop 57
caaaaatatgatatcaaatagaaca

SEQ ID NO: 123671 - DNA, 25 bp, Artificial
  probe
  misc_feature (1)..(25): SEQ ID NO: 5725; WAN024CLR_at; Start 44; Stop 68
tatcaaatagaacagaacctcacta

SEQ ID NO: 123672 - DNA, 25 bp, Artificial
  probe
  misc_feature (1)..(25): SEQ ID NO: 5725; WAN024CLR_at; Start 40; Stop 64
atgatatcaaatagaacagaacctc

SEQ ID NO: 123673 - DNA, 25 bp, Artificial
  probe
  misc_feature (1)..(25): SEQ ID NO: 5725; WAN024CLR_at; Start 5; Stop 29
cctttgcaatggacatttttgtttt

SEQ ID NO: 123674 - DNA, 25 bp, Artificial
  probe
  misc_feature (1)..(25): SEQ ID NO: 5725; WAN024CLR_at; Start 36; Stop 60
aaatatgatatcaaatagaacagaa

SEQ ID NO: 123675 - DNA, 25 bp, Artificial
  probe
  misc_feature (1)..(25): SEQ ID NO: 5725; WAN024CLR_at; Start 57; Stop 81
agaacctcactatgccaaaatcatt

SEQ ID NO: 123676 - DNA, 25 bp, Artificial
  probe
  misc_feature (1)..(25): SEQ ID NO: 5725; WAN024CLR_at; Start 32; Stop 56
tcaaaaatatgatatcaaatagaac

SEQ ID NO: 123677 - DNA, 25 bp, Artificial
  probe
  misc_feature (1)..(25): SEQ ID NO: 5725; WAN024CLR_at; Start 46; Stop 70
tcaaatagaacagaacctcactatg

SEQ ID NO: 123678 - DNA, 25 bp, Artificial
  probe
  misc_feature (1)..(25): SEQ ID NO: 5725; WAN024CLR_at; Start 45; Stop 69
atcaaatagaacagaacctcactat

SEQ ID NO: 123679 - DNA, 25 bp, Artificial
  probe
  misc_feature (1)..(25): SEQ ID NO: 5725; WAN024CLR_at; Start 4; Stop 28
tcctttgcaatggacatttttgttt

SEQ ID NO: 123680 - DNA, 25 bp, Artificial
  probe
  misc_feature (1)..(25): SEQ ID NO: 5725; WAN024CLR_at; Start 50; Stop 74
atagaacagaacctcactatgccaa

SEQ ID NO: 123681 - DNA, 25 bp, Artificial
  probe
  misc_feature (1)..(25): SEQ ID NO: 5725; WAN024CLR_at; Start 6; Stop 30
ctttgcaatggacatttttgttttt

SEQ ID NO: 123682 - DNA, 25 bp, Artificial
  probe
  misc_feature (1)..(25): SEQ ID NO: 5725; WAN024CLR_at; Start 37; Stop 61
aatatgatatcaaatagaacagaac

SEQ ID NO: 123683 - DNA, 25 bp, Artificial
  probe
  misc_feature (1)..(25): SEQ ID NO: 5725; WAN024CLR_at; Start 55; Stop 79
acagaacctcactatgccaaaatca

SEQ ID NO: 123684 - DNA, 25 bp, Artificial
  probe
  misc_feature (1)..(25): SEQ ID NO: 5725; WAN024CLR_at; Start 34; Stop 58
aaaaatatgatatcaaatagaacag

SEQ ID NO: 123685 - DNA, 25 bp, Artificial
  probe
  misc_feature (1)..(25): SEQ ID NO: 5725; WAN024CLR_at; Start 35; Stop 59
aaaatatgatatcaaatagaacaga

SEQ ID NO: 123686 - DNA, 25 bp, Artificial
  probe
  misc_feature (1)..(25): SEQ ID NO: 5725; WAN024CLR_at; Start 2; Stop 26
tgtcctttgcaatggacatttttgt

SEQ ID NO: 123687 - DNA, 25 bp, Artificial
  probe
  misc_feature (1)..(25): SEQ ID NO: 5725; WAN024CLR_at; Start 1; Stop 25
ttgtcctttgcaatggacatttttg

SEQ ID NO: 123688 - DNA, 25 bp, Artificial
  probe
  misc_feature (1)..(25): SEQ ID NO: 5725; WAN024CLR_at; Start 47; Stop 71
caaatagaacagaacctcactatgc

SEQ ID NO: 123689 - DNA, 25 bp, Artificial
  probe
  misc_feature (1)..(25): SEQ ID NO: 5725; WAN024CLR_at; Start 39; Stop 63
tatgatatcaaatagaacagaacct

SEQ ID NO: 123690 - DNA, 25 bp, Artificial
  probe
  misc_feature (1)..(25): SEQ ID NO: 5725; WAN024CLR_at; Start 42; Stop 66
gatatcaaatagaacagaacctcac

SEQ ID NO: 123691 - DNA, 25 bp, Artificial
  probe
  misc_feature (1)..(25): SEQ ID NO: 2175; WAN024CLS_at; Start 30; Stop 54
acttccagaggaagatatcattgtc

SEQ ID NO: 123692 - DNA, 25 bp, Artificial
  probe
  misc_feature (1)..(25): SEQ ID NO: 2175; WAN024CLS_at; Start 17; Stop 41
ttgaattagaactacttccagagga

SEQ ID NO: 123693 - DNA, 25 bp, Artificial
  probe
  misc_feature (1)..(25): SEQ ID NO: 2175; WAN024CLS_at; Start 47; Stop 71
tcattgtcacaggtctccctaagta

SEQ ID NO: 123694 - DNA, 25 bp, Artificial
  probe
  misc_feature (1)..(25): SEQ ID NO: 2175; WAN024CLS_at; Start 11; Stop 35
cattgtttgaattagaactacttcc

SEQ ID NO: 123695 - DNA, 25 bp, Artificial
  probe
  misc_feature (1)..(25): SEQ ID NO: 2175; WAN024CLS_at; Start 7; Stop 31
caaacattgtttgaattagaactac

SEQ ID NO: 123696 - DNA, 25 bp, Artificial
  probe
  misc_feature (1)..(25): SEQ ID NO: 2175; WAN024CLS_at; Start 20; Stop 44
aattagaactacttccagaggaaga

SEQ ID NO: 123697 - DNA, 25 bp, Artificial
  probe
  misc_feature (1)..(25): SEQ ID NO: 2175; WAN024CLS_at; Start 32; Stop 56
ttccagaggaagatatcattgtcac

SEQ ID NO: 123698 - DNA, 25 bp, Artificial
  probe
  misc_feature (1)..(25): SEQ ID NO: 2175; WAN024CLS_at; Start 50; Stop 74
ttgtcacaggtctccctaagtattg

SEQ ID NO: 123699 - DNA, 25 bp, Artificial
  probe
  misc_feature (1)..(25): SEQ ID NO: 2175; WAN024CLS_at; Start 35; Stop 59
cagaggaagatatcattgtcacagg

SEQ ID NO: 123700 - DNA, 25 bp, Artificial
  probe
  misc_feature (1)..(25): SEQ ID NO: 2175; WAN024CLS_at; Start 54; Stop 78
cacaggtctccctaagtattgttct

SEQ ID NO: 123701 - DNA, 25 bp, Artificial
  probe
  misc_feature (1)..(25): SEQ ID NO: 2175; WAN024CLS_at; Start 56; Stop 80
caggtctccctaagtattgttcttt

SEQ ID NO: 123702 - DNA, 25 bp, Artificial
  probe
  misc_feature (1)..(25): SEQ ID NO: 2175; WAN024CLS_at; Start 23; Stop 47
tagaactacttccagaggaagatat

SEQ ID NO: 123703 - DNA, 25 bp, Artificial
  probe
  misc_feature (1)..(25): SEQ ID NO: 2175; WAN024CLS_at; Start 19; Stop 43
gaattagaactacttccagaggaag

SEQ ID NO: 123704 - DNA, 25 bp, Artificial
  probe
  misc_feature (1)..(25): SEQ ID NO: 2175; WAN024CLS_at; Start 51; Stop 75
tgtcacaggtctccctaagtattgt

SEQ ID NO: 123705 - DNA, 25 bp, Artificial
  probe
  misc_feature (1)..(25): SEQ ID NO: 2175; WAN024CLS_at; Start 45; Stop 69
tatcattgtcacaggtctccctaag

SEQ ID NO: 123706 - DNA, 25 bp, Artificial
  probe
  misc_feature (1)..(25): SEQ ID NO: 2175; WAN024CLS_at; Start 28; Stop 52
ctacttccagaggaagatatcattg

SEQ ID NO: 123707 - DNA, 25 bp, Artificial
  probe
  misc_feature (1)..(25): SEQ ID NO: 2175; WAN024CLS_at; Start 53; Stop 77
tcacaggtctccctaagtattgttc

SEQ ID NO: 123708 - DNA, 25 bp, Artificial
  probe
  misc_feature (1)..(25): SEQ ID NO: 2175; WAN024CLS_at; Start 37; Stop 61
gaggaagatatcattgtcacaggtc

SEQ ID NO: 123709 - DNA, 25 bp, Artificial
  probe
  misc_feature (1)..(25): SEQ ID NO: 2175; WAN024CLS_at; Start 81; Stop 105
tacttgtttaattacaggtcgccta

SEQ ID NO: 123710 - DNA, 25 bp, Artificial
  probe
  misc_feature (1)..(25): SEQ ID NO: 2175; WAN024CLS_at; Start 41; Stop 65
aagatatcattgtcacaggtctccc

SEQ ID NO: 123711 - DNA, 25 bp, Artificial
  probe
  misc_feature (1)..(25): SEQ ID NO: 2175; WAN024CLS_at; Start 25; Stop 49
gaactacttccagaggaagatatca

SEQ ID NO: 123712 - DNA, 25 bp, Artificial
  probe
  misc_feature (1)..(25): SEQ ID NO: 2175; WAN024CLS_at; Start 44; Stop 68
atatcattgtcacaggtctccctaa

SEQ ID NO: 123713 - DNA, 25 bp, Artificial
  probe
  misc_feature (1)..(25): SEQ ID NO: 2175; WAN024CLS_at; Start 18; Stop 42
tgaattagaactacttccagaggaa

SEQ ID NO: 123714 - DNA, 25 bp, Artificial
  probe
  misc_feature (1)..(25): SEQ ID NO: 2175; WAN024CLS_at; Start 43; Stop 67
gatatcattgtcacaggtctcccta

SEQ ID NO: 123715 - DNA, 25 bp, Artificial
  probe
  misc_feature (1)..(25): SEQ ID NO: 2175; WAN024CLS_at; Start 22; Stop 46
ttagaactacttccagaggaagata

SEQ ID NO: 123716 - DNA, 25 bp, Artificial
  probe
  misc_feature (1)..(25): SEQ ID NO: 2175; WAN024CLS_at; Start 40; Stop 64
gaagatatcattgtcacaggtctcc

SEQ ID NO: 123717 - DNA, 25 bp, Artificial
  probe
  misc_feature (1)..(25): SEQ ID NO: 2175; WAN024CLS_at; Start 14; Stop 38
tgtttgaattagaactacttccaga

SEQ ID NO: 123718 - DNA, 25 bp, Artificial
  probe
  misc_feature (1)..(25): SEQ ID NO: 2175; WAN024CLS_at; Start 33; Stop 57
tccagaggaagatatcattgtcaca

SEQ ID NO: 123719 - DNA, 25 bp, Artificial
  probe
  misc_feature (1)..(25): SEQ ID NO: 2175; WAN024CLS_at; Start 34; Stop 58
ccagaggaagatatcattgtcacag

SEQ ID NO: 123720 - DNA, 25 bp, Artificial
  probe
  misc_feature (1)..(25): SEQ ID NO: 2175; WAN024CLS_at; Start 42; Stop 66
agatatcattgtcacaggtctccct

SEQ ID NO: 123721 - DNA, 25 bp, Artificial
  probe
  misc_feature (1)..(25): SEQ ID NO: 2175; WAN024CLS_at; Start 39; Stop 63
ggaagatatcattgtcacaggtctc

SEQ ID NO: 123722 - DNA, 25 bp, Artificial
  probe
  misc_feature (1)..(25): SEQ ID NO: 2175; WAN024CLS_at; Start 31; Stop 55
cttccagaggaagatatcattgtca

SEQ ID NO: 123723 - DNA, 25 bp, Artificial
  probe
  misc_feature (1)..(25): SEQ ID NO: 2175; WAN024CLS_at; Start 48; Stop 72
cattgtcacaggtctccctaagtat

SEQ ID NO: 123724 - DNA, 25 bp, Artificial
  probe
  misc_feature (1)..(25): SEQ ID NO: 2175; WAN024CLS_at; Start 16; Stop 40
tttgaattagaactacttccagagg

SEQ ID NO: 123725 - DNA, 25 bp, Artificial
  probe
  misc_feature (1)..(25): SEQ ID NO: 1230; WAN024CLT_at; Start 46; Stop 70
tcttgtgttctttgtttattagact

SEQ ID NO: 123726 - DNA, 25 bp, Artificial
  probe
  misc_feature (1)..(25): SEQ ID NO: 1230; WAN024CLT_at; Start 106; Stop 130
ttctgtcttcctgtttttgttttga

SEQ ID NO: 123727 - DNA, 25 bp, Artificial
  probe
  misc_feature (1)..(25): SEQ ID NO: 1230; WAN024CLT_at; Start 107; Stop 131
tctgtcttcctgtttttgttttgat

SEQ ID NO: 123728 - DNA, 25 bp, Artificial
  probe
  misc_feature (1)..(25): SEQ ID NO: 1230; WAN024CLT_at; Start 40; Stop 64
atagtttcttgtgttctttgtttat

SEQ ID NO: 123729 - DNA, 25 bp, Artificial
  probe
  misc_feature (1)..(25): SEQ ID NO: 1230; WAN024CLT_at; Start 44; Stop 68
tttcttgtgttctttgtttattaga

SEQ ID NO: 123730 - DNA, 25 bp, Artificial
  probe
  misc_feature (1)..(25): SEQ ID NO: 1230; WAN024CLT_at; Start 53; Stop 77
ttctttgtttattagacttaatgaa

SEQ ID NO: 123731 - DNA, 25 bp, Artificial
  probe
  misc_feature (1)..(25): SEQ ID NO: 1230; WAN024CLT_at; Start 70; Stop 94
ttaatgaattttaaaaatgtagcta

SEQ ID NO: 123732 - DNA, 25 bp, Artificial
  probe
  misc_feature (1)..(25): SEQ ID NO: 1230; WAN024CLT_at; Start 48; Stop 72
ttgtgttctttgtttattagactta

SEQ ID NO: 123733 - DNA, 25 bp, Artificial
  probe
  misc_feature (1)..(25): SEQ ID NO: 1230; WAN024CLT_at; Start 47; Stop 71
cttgtgttctttgtttattagactt

SEQ ID NO: 123734 - DNA, 25 bp, Artificial
  probe
  misc_feature (1)..(25): SEQ ID NO: 1230; WAN024CLT_at; Start 86; Stop 110
atgtagctacttttttatttttctg

SEQ ID NO: 123735 - DNA, 25 bp, Artificial
  probe
  misc_feature (1)..(25): SEQ ID NO: 1230; WAN024CLT_at; Start 51; Stop 75
tgttctttgtttattagacttaatg

SEQ ID NO: 123736 - DNA, 25 bp, Artificial
  probe
  misc_feature (1)..(25): SEQ ID NO: 1230; WAN024CLT_at; Start 26; Stop 50
ctgtattttgttttatagtttcttg

SEQ ID NO: 123737 - DNA, 25 bp, Artificial
  probe
  misc_feature (1)..(25): SEQ ID NO: 1230; WAN024CLT_at; Start 55; Stop 79
ctttgtttattagacttaatgaatt

SEQ ID NO: 123738 - DNA, 25 bp, Artificial
  probe
  misc_feature (1)..(25): SEQ ID NO: 1230; WAN024CLT_at; Start 52; Stop 76
gttctttgtttattagacttaatga

SEQ ID NO: 123739 - DNA, 25 bp, Artificial
  probe
  misc_feature (1)..(25): SEQ ID NO: 1230; WAN024CLT_at; Start 73; Stop 97
atgaattttaaaaatgtagctactt

SEQ ID NO: 123740 - DNA, 25 bp, Artificial
  probe
  misc_feature (1)..(25): SEQ ID NO: 1230; WAN024CLT_at; Start 69; Stop 93
cttaatgaattttaaaaatgtagct

SEQ ID NO: 123741 - DNA, 25 bp, Artificial
  probe
  misc_feature (1)..(25): SEQ ID NO: 1230; WAN024CLT_at; Start 54; Stop 78
tctttgtttattagacttaatgaat

SEQ ID NO: 123742 - DNA, 25 bp, Artificial
  probe
  misc_feature (1)..(25): SEQ ID NO: 1230; WAN024CLT_at; Start 45; Stop 69
ttcttgtgttctttgtttattagac

SEQ ID NO: 123743 - DNA, 25 bp, Artificial
  probe
  misc_feature (1)..(25): SEQ ID NO: 1230; WAN024CLT_at; Start 72; Stop 96
aatgaattttaaaaatgtagctact

SEQ ID NO: 123744 - DNA, 25 bp, Artificial
  probe
  misc_feature (1)..(25): SEQ ID NO: 1230; WAN024CLT_at; Start 49; Stop 73
tgtgttctttgtttattagacttaa

SEQ ID NO: 123745 - DNA, 25 bp, Artificial
  probe
  misc_feature (1)..(25): SEQ ID NO: 1230; WAN024CLT_at; Start 108; Stop 132
ctgtcttcctgtttttgttttgatt

SEQ ID NO: 123746 - DNA, 25 bp, Artificial
  probe
  misc_feature (1)..(25): SEQ ID NO: 1230; WAN024CLT_at; Start 39; Stop 63
tatagtttcttgtgttctttgttta

SEQ ID NO: 123747 - DNA, 25 bp, Artificial
  probe
  misc_feature (1)..(25): SEQ ID NO: 1230; WAN024CLT_at; Start 58; Stop 82
tgtttattagacttaatgaatttta

SEQ ID NO: 123748 - DNA, 25 bp, Artificial
  probe
  misc_feature (1)..(25): SEQ ID NO: 1230; WAN024CLT_at; Start 71; Stop 95
taatgaattttaaaaatgtagctac

SEQ ID NO: 123749 - DNA, 25 bp, Artificial
  probe
  misc_feature (1)..(25): SEQ ID NO: 5381; WAN024CLU_at; Start 4; Stop 28
ctagaaattgatttgattgtcctga

SEQ ID NO: 123750 - DNA, 25 bp, Artificial
  probe
  misc_feature (1)..(25): SEQ ID NO: 5381; WAN024CLU_at; Start 19; Stop 43
attgtcctgattgttttatcctatt

SEQ ID NO: 123751 - DNA, 25 bp, Artificial
  probe
  misc_feature (1)..(25): SEQ ID NO: 5381; WAN024CLU_at; Start 6; Stop 30
agaaattgatttgattgtcctgatt

SEQ ID NO: 123752 - DNA, 25 bp, Artificial
  probe
  misc_feature (1)..(25): SEQ ID NO: 5381; WAN024CLU_at; Start 65; Stop 89
attgctattgttttctttttcatga

SEQ ID NO: 123753 - DNA, 25 bp, Artificial
  probe
  misc_feature (1)..(25): SEQ ID NO: 5381; WAN024CLU_at; Start 36; Stop 60
atcctatttctatttcatttctcta

SEQ ID NO: 123754 - DNA, 25 bp, Artificial
  probe
  misc_feature (1)..(25): SEQ ID NO: 5381; WAN024CLU_at; Start 22; Stop 46
gtcctgattgttttatcctatttct

SEQ ID NO: 123755 - DNA, 25 bp, Artificial
  probe
  misc_feature (1)..(25): SEQ ID NO: 5381; WAN024CLU_at; Start 14; Stop 38
atttgattgtcctgattgttttatc

SEQ ID NO: 123756 - DNA, 25 bp, Artificial
  probe
  misc_feature (1)..(25): SEQ ID NO: 5381; WAN024CLU_at; Start 35; Stop 59
tatcctatttctatttcatttctct

SEQ ID NO: 123757 - DNA, 25 bp, Artificial
  probe
  misc_feature (1)..(25): SEQ ID NO: 5381; WAN024CLU_at; Start 15; Stop 39
tttgattgtcctgattgttttatcc

SEQ ID NO: 123758 - DNA, 25 bp, Artificial
  probe
  misc_feature (1)..(25): SEQ ID NO: 5381; WAN024CLU_at; Start 16; Stop 40
ttgattgtcctgattgttttatcct

SEQ ID NO: 123759 - DNA, 25 bp, Artificial
  probe
  misc_feature (1)..(25): SEQ ID NO: 5381; WAN024CLU_at; Start 85; Stop 109
catgattttaatcttactgtacaga

SEQ ID NO: 123760 - DNA, 25 bp, Artificial
  probe
  misc_feature (1)..(25): SEQ ID NO: 5381; WAN024CLU_at; Start 11; Stop 35
ttgatttgattgtcctgattgtttt

SEQ ID NO: 123761 - DNA, 25 bp, Artificial
  probe
  misc_feature (1)..(25): SEQ ID NO: 5381; WAN024CLU_at; Start 86; Stop 110
atgattttaatcttactgtacagat

SEQ ID NO: 123762 - DNA, 25 bp, Artificial
  probe
  misc_feature (1)..(25): SEQ ID NO: 5381; WAN024CLU_at; Start 21; Stop 45
tgtcctgattgttttatcctatttc

SEQ ID NO: 123763 - DNA, 25 bp, Artificial
  probe
  misc_feature (1)..(25): SEQ ID NO: 5381; WAN024CLU_at; Start 55; Stop 79
tctctatataattgctattgttttc

SEQ ID NO: 123764 - DNA, 25 bp, Artificial
  probe
  misc_feature (1)..(25): SEQ ID NO: 5381; WAN024CLU_at; Start 9; Stop 33
aattgatttgattgtcctgattgtt

SEQ ID NO: 123765 - DNA, 25 bp, Artificial
  probe
  misc_feature (1)..(25): SEQ ID NO: 5381; WAN024CLU_at; Start 27; Stop 51
gattgttttatcctatttctatttc

SEQ ID NO: 123766 - DNA, 25 bp, Artificial
  probe
  misc_feature (1)..(25): SEQ ID NO: 5381; WAN024CLU_at; Start 23; Stop 47
tcctgattgttttatcctatttcta

SEQ ID NO: 123767 - DNA, 25 bp, Artificial
  probe
  misc_feature (1)..(25): SEQ ID NO: 5381; WAN024CLU_at; Start 90; Stop 114
ttttaatcttactgtacagatttga

SEQ ID NO: 123768 - DNA, 25 bp, Artificial
  probe
  misc_feature (1)..(25): SEQ ID NO: 5381; WAN024CLU_at; Start 56; Stop 80
ctctatataattgctattgttttct

SEQ ID NO: 123769 - DNA, 25 bp, Artificial
  probe
  misc_feature (1)..(25): SEQ ID NO: 5381; WAN024CLU_at; Start 8; Stop 32
aaattgatttgattgtcctgattgt

SEQ ID NO: 123770 - DNA, 25 bp, Artificial
  probe
  misc_feature (1)..(25): SEQ ID NO: 5381; WAN024CLU_at; Start 64; Stop 88
aattgctattgttttctttttcatg

SEQ ID NO: 123771 - DNA, 25 bp, Artificial
  probe
  misc_feature (1)..(25): SEQ ID NO: 5381; WAN024CLU_at; Start 18; Stop 42
gattgtcctgattgttttatcctat

SEQ ID NO: 123772 - DNA, 25 bp, Artificial
  probe
  misc_feature (1)..(25): SEQ ID NO: 5381; WAN024CLU_at; Start 88; Stop 112
gattttaatcttactgtacagattt

SEQ ID NO: 123773 - DNA, 25 bp, Artificial
  probe
  misc_feature (1)..(25): SEQ ID NO: 5381; WAN024CLU_at; Start 7; Stop 31
gaaattgatttgattgtcctgattg

SEQ ID NO: 123774 - DNA, 25 bp, Artificial
  probe
  misc_feature (1)..(25): SEQ ID NO: 5381; WAN024CLU_at; Start 17; Stop 41
tgattgtcctgattgttttatccta

SEQ ID NO: 123775 - DNA, 25 bp, Artificial
  probe
  misc_feature (1)..(25): SEQ ID NO: 5381; WAN024CLU_at; Start 68; Stop 92
gctattgttttctttttcatgattt

SEQ ID NO: 123776 - DNA, 25 bp, Artificial
  probe
  misc_feature (1)..(25): SEQ ID NO: 5381; WAN024CLU_at; Start 24; Stop 48
cctgattgttttatcctatttctat

SEQ ID NO: 123777 - DNA, 25 bp, Artificial
  probe
  misc_feature (1)..(25): SEQ ID NO: 5381; WAN024CLU_at; Start 50; Stop 74
tcatttctctatataattgctattg

SEQ ID NO: 123778 - DNA, 25 bp, Artificial
  probe
  misc_feature (1)..(25): SEQ ID NO: 5381; WAN024CLU_at; Start 10; Stop 34
attgatttgattgtcctgattgttt

SEQ ID NO: 123779 - DNA, 25 bp, Artificial
  probe
  misc_feature (1)..(25): SEQ ID NO: 5381; WAN024CLU_at; Start 13; Stop 37
gatttgattgtcctgattgttttat

SEQ ID NO: 123780 - DNA, 25 bp, Artificial
  probe
  misc_feature (1)..(25): SEQ ID NO: 5381; WAN024CLU_at; Start 87; Stop 111
tgattttaatcttactgtacagatt

SEQ ID NO: 123781 - DNA, 25 bp, Artificial
  probe
  misc_feature (1)..(25): SEQ ID NO: 5381; WAN024CLU_at; Start 12; Stop 36
tgatttgattgtcctgattgtttta

SEQ ID NO: 123782 - DNA, 25 bp, Artificial
  probe
  misc_feature (1)..(25): SEQ ID NO: 5381; WAN024CLU_at; Start 51; Stop 75
catttctctatataattgctattgt

SEQ ID NO: 123783 - DNA, 25 bp, Artificial
  probe
  misc_feature (1)..(25): SEQ ID NO: 2369; WAN024CLV_at; Start 109; Stop 133
gaaatgaaagaagtgccaaacaata

SEQ ID NO: 123784 - DNA, 25 bp, Artificial
  probe
  misc_feature (1)..(25): SEQ ID NO: 2369; WAN024CLV_at; Start 83; Stop 107
gaaagaatttcatcgatgtttaccg

SEQ ID NO: 123785 - DNA, 25 bp, Artificial
  probe
  misc_feature (1)..(25): SEQ ID NO: 2369; WAN024CLV_at; Start 93; Stop 117
catcgatgtttaccgtgaaatgaaa

SEQ ID NO: 123786 - DNA, 25 bp, Artificial
  probe
  misc_feature (1)..(25): SEQ ID NO: 2369; WAN024CLV_at; Start 8; Stop 32
tcttaaaccattctttcgatactaa

SEQ ID NO: 123787 - DNA, 25 bp, Artificial
  probe
  misc_feature (1)..(25): SEQ ID NO: 2369; WAN024CLV_at; Start 139; Stop 163
catcaatcaaaagttaacgtggcgt

SEQ ID NO: 123788 - DNA, 25 bp, Artificial
  probe
  misc_feature (1)..(25): SEQ ID NO: 2369; WAN024CLV_at; Start 97; Stop 121
gatgtttaccgtgaaatgaaagaag

SEQ ID NO: 123789 - DNA, 25 bp, Artificial
  probe
  misc_feature (1)..(25): SEQ ID NO: 2369; WAN024CLV_at; Start 75; Stop 99
taatgttggaaagaatttcatcgat

SEQ ID NO: 123790 - DNA, 25 bp, Artificial
  probe
  misc_feature (1)..(25): SEQ ID NO: 2369; WAN024CLV_at; Start 47; Stop 71
caaaaataaatgcagttaactccaa

SEQ ID NO: 123791 - DNA, 25 bp, Artificial
  probe
  misc_feature (1)..(25): SEQ ID NO: 2369; WAN024CLV_at; Start 103; Stop 127
taccgtgaaatgaaagaagtgccaa

SEQ ID NO: 123792 - DNA, 25 bp, Artificial
  probe
  misc_feature (1)..(25): SEQ ID NO: 2369; WAN024CLV_at; Start 53; Stop 77
taaatgcagttaactccaaaaataa

SEQ ID NO: 123793 - DNA, 25 bp, Artificial
  probe
  misc_feature (1)..(25): SEQ ID NO: 2369; WAN024CLV_at; Start 85; Stop 109
aagaatttcatcgatgtttaccgtg

SEQ ID NO: 123794 - DNA, 25 bp, Artificial
  probe
  misc_feature (1)..(25): SEQ ID NO: 2369; WAN024CLV_at; Start 2; Stop 26
tggatttcttaaaccattctttcga

SEQ ID NO: 123795 - DNA, 25 bp, Artificial
  probe
  misc_feature (1)..(25): SEQ ID NO: 2369; WAN024CLV_at; Start 138; Stop 162
tcatcaatcaaaagttaacgtggcg

SEQ ID NO: 123796 - DNA, 25 bp, Artificial
  probe
  misc_feature (1)..(25): SEQ ID NO: 2369; WAN024CLV_at; Start 104; Stop 128
accgtgaaatgaaagaagtgccaaa

SEQ ID NO: 123797 - DNA, 25 bp, Artificial
  probe
  misc_feature (1)..(25): SEQ ID NO: 2369; WAN024CLV_at; Start 141; Stop 165
tcaatcaaaagttaacgtggcgtta

SEQ ID NO: 123798 - DNA, 25 bp, Artificial
  probe
  misc_feature (1)..(25): SEQ ID NO: 2369; WAN024CLV_at; Start 4; Stop 28
gatttcttaaaccattctttcgata

SEQ ID NO: 123799 - DNA, 25 bp, Artificial
  probe
  misc_feature (1)..(25): SEQ ID NO: 2369; WAN024CLV_at; Start 101; Stop 125
tttaccgtgaaatgaaagaagtgcc

SEQ ID NO: 123800 - DNA, 25 bp, Artificial
  probe
  misc_feature (1)..(25): SEQ ID NO: 2369; WAN024CLV_at; Start 105; Stop 129
ccgtgaaatgaaagaagtgccaaac

SEQ ID NO: 123801 - DNA, 25 bp, Artificial
  probe
  misc_feature (1)..(25): SEQ ID NO: 2369; WAN024CLV_at; Start 73; Stop 97
aataatgttggaaagaatttcatcg

SEQ ID NO: 123802 - DNA, 25 bp, Artificial
  probe
  misc_feature (1)..(25): SEQ ID NO: 2369; WAN024CLV_at; Start 45; Stop 69
tacaaaaataaatgcagttaactcc

SEQ ID NO: 123803 - DNA, 25 bp, Artificial
  probe
  misc_feature (1)..(25): SEQ ID NO: 2369; WAN024CLV_at; Start 91; Stop 115
ttcatcgatgtttaccgtgaaatga

SEQ ID NO: 123804 - DNA, 25 bp, Artificial
  probe
  misc_feature (1)..(25): SEQ ID NO: 2369; WAN024CLV_at; Start 106; Stop 130
cgtgaaatgaaagaagtgccaaaca

SEQ ID NO: 123805 - DNA, 25 bp, Artificial
  probe
  misc_feature (1)..(25): SEQ ID NO: 2369; WAN024CLV_at; Start 140; Stop 164
atcaatcaaaagttaacgtggcgtt

SEQ ID NO: 123806 - DNA, 25 bp, Artificial
  probe
  misc_feature (1)..(25): SEQ ID NO: 2369; WAN024CLV_at; Start 58; Stop 82
gcagttaactccaaaaataatgttg

SEQ ID NO: 123807 - DNA, 25 bp, Artificial
  probe
  misc_feature (1)..(25): SEQ ID NO: 2369; WAN024CLV_at; Start 108; Stop 132
tgaaatgaaagaagtgccaaacaat

SEQ ID NO: 123808 - DNA, 25 bp, Artificial
  probe
  misc_feature (1)..(25): SEQ ID NO: 2369; WAN024CLV_at; Start 102; Stop 126
ttaccgtgaaatgaaagaagtgcca

SEQ ID NO: 123809 - DNA, 25 bp, Artificial
  probe
  misc_feature (1)..(25): SEQ ID NO: 2369; WAN024CLV_at; Start 59; Stop 83
cagttaactccaaaaataatgttgg

SEQ ID NO: 123810 - DNA, 25 bp, Artificial
  probe
  misc_feature (1)..(25): SEQ ID NO: 2369; WAN024CLV_at; Start 87; Stop 111
gaatttcatcgatgtttaccgtgaa

SEQ ID NO: 123811 - DNA, 25 bp, Artificial
  probe
  misc_feature (1)..(25): SEQ ID NO: 2369; WAN024CLV_at; Start 121; Stop 145
gtgccaaacaataaaattcatcaat

SEQ ID NO: 123812 - DNA, 25 bp, Artificial
  probe
  misc_feature (1)..(25): SEQ ID NO: 2369; WAN024CLV_at; Start 118; Stop 142
gaagtgccaaacaataaaattcatc

SEQ ID NO: 123813 - DNA, 25 bp, Artificial
  probe
  misc_feature (1)..(25): SEQ ID NO: 2369; WAN024CLV_at; Start 123; Stop 147
gccaaacaataaaattcatcaatca

SEQ ID NO: 123814 - DNA, 25 bp, Artificial
  probe
  misc_feature (1)..(25): SEQ ID NO: 2369; WAN024CLV_at; Start 95; Stop 119
tcgatgtttaccgtgaaatgaaaga

SEQ ID NO: 123815 - DNA, 25 bp, Artificial
  probe
  misc_feature (1)..(25): SEQ ID NO: 2369; WAN024CLV_at; Start 113; Stop 137
tgaaagaagtgccaaacaataaaat

SEQ ID NO: 123816 - DNA, 25 bp, Artificial
  probe
  misc_feature (1)..(25): SEQ ID NO: 2369; WAN024CLV_at; Start 99; Stop 123
tgtttaccgtgaaatgaaagaagtg

SEQ ID NO: 123817 - DNA, 25 bp, Artificial
  probe
  misc_feature (1)..(25): SEQ ID NO: 5642; WAN024CLW_at; Start 33; Stop 57
cgtggaaagcatggctattacttct

SEQ ID NO: 123818 - DNA, 25 bp, Artificial
  probe
  misc_feature (1)..(25): SEQ ID NO: 5642; WAN024CLW_at; Start 59; Stop 83
aaagggcgatttctcaccccatgaa

SEQ ID NO: 123819 - DNA, 25 bp, Artificial
  probe
  misc_feature (1)..(25): SEQ ID NO: 5642; WAN024CLW_at; Start 63; Stop 87
ggcgatttctcaccccatgaaaagt

SEQ ID NO: 123820 - DNA, 25 bp, Artificial
  probe
  misc_feature (1)..(25): SEQ ID NO: 5642; WAN024CLW_at; Start 12; Stop 36
gccacacttggtttatatggtcgtg

SEQ ID NO: 123821 - DNA, 25 bp, Artificial
  probe
  misc_feature (1)..(25): SEQ ID NO: 5642; WAN024CLW_at; Start 68; Stop 92
tttctcaccccatgaaaagtgtcta

SEQ ID NO: 123822 - DNA, 25 bp, Artificial
  probe
  misc_feature (1)..(25): SEQ ID NO: 5642; WAN024CLW_at; Start 16; Stop 40
cacttggtttatatggtcgtggaaa

SEQ ID NO: 123823 - DNA, 25 bp, Artificial
  probe
  misc_feature (1)..(25): SEQ ID NO: 5642; WAN024CLW_at; Start 6; Stop 30
tagtttgccacacttggtttatatg

SEQ ID NO: 123824 - DNA, 25 bp, Artificial
  probe
  misc_feature (1)..(25): SEQ ID NO: 5642; WAN024CLW_at; Start 18; Stop 42
cttggtttatatggtcgtggaaagc

SEQ ID NO: 123825 - DNA, 25 bp, Artificial
  probe
  misc_feature (1)..(25): SEQ ID NO: 5642; WAN024CLW_at; Start 72; Stop 96
tcaccccatgaaaagtgtctatttt

SEQ ID NO: 123826 - DNA, 25 bp, Artificial
  probe
  misc_feature (1)..(25): SEQ ID NO: 5642; WAN024CLW_at; Start 32; Stop 56
tcgtggaaagcatggctattacttc

SEQ ID NO: 123827 - DNA, 25 bp, Artificial
  probe
  misc_feature (1)..(25): SEQ ID NO: 5642; WAN024CLW_at; Start 66; Stop 90
gatttctcaccccatgaaaagtgtc

SEQ ID NO: 123828 - DNA, 25 bp, Artificial
  probe
  misc_feature (1)..(25): SEQ ID NO: 5642; WAN024CLW_at; Start 10; Stop 34
ttgccacacttggtttatatggtcg

SEQ ID NO: 123829 - DNA, 25 bp, Artificial
  probe
  misc_feature (1)..(25): SEQ ID NO: 5642; WAN024CLW_at; Start 70; Stop 94
tctcaccccatgaaaagtgtctatt

SEQ ID NO: 123830 - DNA, 25 bp, Artificial
  probe
  misc_feature (1)..(25): SEQ ID NO: 5642; WAN024CLW_at; Start 42; Stop 66
catggctattacttctcaaagggcg

SEQ ID NO: 123831 - DNA, 25 bp, Artificial
  probe
  misc_feature (1)..(25): SEQ ID NO: 5642; WAN024CLW_at; Start 58; Stop 82
caaagggcgatttctcaccccatga

SEQ ID NO: 123832 - DNA, 25 bp, Artificial
  probe
  misc_feature (1)..(25): SEQ ID NO: 5642; WAN024CLW_at; Start 46; Stop 70
gctattacttctcaaagggcgattt

SEQ ID NO: 123833 - DNA, 25 bp, Artificial
  probe
  misc_feature (1)..(25): SEQ ID NO: 5642; WAN024CLW_at; Start 2; Stop 26
tggttagtttgccacacttggttta

SEQ ID NO: 123834 - DNA, 25 bp, Artificial
  probe
  misc_feature (1)..(25): SEQ ID NO: 5642; WAN024CLW_at; Start 50; Stop 74
ttacttctcaaagggcgatttctca

SEQ ID NO: 123835 - DNA, 25 bp, Artificial
  probe
  misc_feature (1)..(25): SEQ ID NO: 5642; WAN024CLW_at; Start 23; Stop 47
tttatatggtcgtggaaagcatggc

SEQ ID NO: 123836 - DNA, 25 bp, Artificial
  probe
  misc_feature (1)..(25): SEQ ID NO: 5642; WAN024CLW_at; Start 45; Stop 69
ggctattacttctcaaagggcgatt

SEQ ID NO: 123837 - DNA, 25 bp, Artificial
  probe
  misc_feature (1)..(25): SEQ ID NO: 5642; WAN024CLW_at; Start 14; Stop 38
cacacttggtttatatggtcgtgga

SEQ ID NO: 123838 - DNA, 25 bp, Artificial
  probe
  misc_feature (1)..(25): SEQ ID NO: 5642; WAN024CLW_at; Start 48; Stop 72
tattacttctcaaagggcgatttct

SEQ ID NO: 123839 - DNA, 25 bp, Artificial
  probe
  misc_feature (1)..(25): SEQ ID NO: 5642; WAN024CLW_at; Start 36; Stop 60
ggaaagcatggctattacttctcaa

SEQ ID NO: 123840 - DNA, 25 bp, Artificial
  probe
  misc_feature (1)..(25): SEQ ID NO: 5642; WAN024CLW_at; Start 55; Stop 79
tctcaaagggcgatttctcacccca

SEQ ID NO: 123841 - DNA, 25 bp, Artificial
  probe
  misc_feature (1)..(25): SEQ ID NO: 5642; WAN024CLW_at; Start 29; Stop 53
tggtcgtggaaagcatggctattac

SEQ ID NO: 123842 - DNA, 25 bp, Artificial
  probe
  misc_feature (1)..(25): SEQ ID NO: 5642; WAN024CLW_at; Start 27; Stop 51
tatggtcgtggaaagcatggctatt

SEQ ID NO: 123843 - DNA, 25 bp, Artificial
  probe
  misc_feature (1)..(25): SEQ ID NO: 5642; WAN024CLW_at; Start 25; Stop 49
tatatggtcgtggaaagcatggcta

SEQ ID NO: 123844 - DNA, 25 bp, Artificial
  probe
  misc_feature (1)..(25): SEQ ID NO: 5642; WAN024CLW_at; Start 57; Stop 81
tcaaagggcgatttctcaccccatg

SEQ ID NO: 123845 - DNA, 25 bp, Artificial
  probe
  misc_feature (1)..(25): SEQ ID NO: 5642; WAN024CLW_at; Start 44; Stop 68
tggctattacttctcaaagggcgat

SEQ ID NO: 123846 - DNA, 25 bp, Artificial
  probe
  misc_feature (1)..(25): SEQ ID NO: 5642; WAN024CLW_at; Start 60; Stop 84
aagggcgatttctcaccccatgaaa

SEQ ID NO: 123847 - DNA, 25 bp, Artificial
  probe
  misc_feature (1)..(25): SEQ ID NO: 5642; WAN024CLW_at; Start 40; Stop 64
agcatggctattacttctcaaaggg

SEQ ID NO: 123848 - DNA, 25 bp, Artificial
  probe
  misc_feature (1)..(25): SEQ ID NO: 5642; WAN024CLW_at; Start 62; Stop 86
gggcgatttctcaccccatgaaaag

SEQ ID NO: 123849 - DNA, 25 bp, Artificial
  probe
  misc_feature (1)..(25): SEQ ID NO: 5642; WAN024CLW_at; Start 38; Stop 62
aaagcatggctattacttctcaaag

SEQ ID NO: 123850 - DNA, 25 bp, Artificial
  probe
  misc_feature (1)..(25): SEQ ID NO: 5642; WAN024CLW_at; Start 75; Stop 99
ccccatgaaaagtgtctatttttgt

SEQ ID NO: 123851 - DNA, 25 bp, Artificial
  probe
  misc_feature (1)..(25): SEQ ID NO: 3437; WAN024CLX_at; Start 1; Stop 25
ctggttgatctcatgtataaatacc

SEQ ID NO: 123852 - DNA, 25 bp, Artificial
  probe
  misc_feature (1)..(25): SEQ ID NO: 3437; WAN024CLX_at; Start 30; Stop 54
aaaaccacgcgccttgcctgctgat

SEQ ID NO: 123853 - DNA, 25 bp, Artificial
  probe
  misc_feature (1)..(25): SEQ ID NO: 3437; WAN024CLX_at; Start 5; Stop 29
ttgatctcatgtataaatacctaac

SEQ ID NO: 123854 - DNA, 25 bp, Artificial
  probe
  misc_feature (1)..(25): SEQ ID NO: 3437; WAN024CLX_at; Start 37; Stop 61
cgcgccttgcctgctgatggaaaga

SEQ ID NO: 123855 - DNA, 25 bp, Artificial
  probe
  misc_feature (1)..(25): SEQ ID NO: 3437; WAN024CLX_at; Start 12; Stop 36
catgtataaatacctaacaaaacca

SEQ ID NO: 123856 - DNA, 25 bp, Artificial
  probe
  misc_feature (1)..(25): SEQ ID NO: 3437; WAN024CLX_at; Start 47; Stop 71
ctgctgatggaaagaaaggtacaaa

SEQ ID NO: 123857 - DNA, 25 bp, Artificial
  probe
  misc_feature (1)..(25): SEQ ID NO: 3437; WAN024CLX_at; Start 2; Stop 26
tggttgatctcatgtataaatacct

SEQ ID NO: 123858 - DNA, 25 bp, Artificial
  probe
  misc_feature (1)..(25): SEQ ID NO: 3437; WAN024CLX_at; Start 24; Stop 48
cctaacaaaaccacgcgccttgcct

SEQ ID NO: 123859 - DNA, 25 bp, Artificial
  probe
  misc_feature (1)..(25): SEQ ID NO: 3437; WAN024CLX_at; Start 49; Stop 73
gctgatggaaagaaaggtacaaata

SEQ ID NO: 123860 - DNA, 25 bp, Artificial
  probe
  misc_feature (1)..(25): SEQ ID NO: 3437; WAN024CLX_at; Start 44; Stop 68
tgcctgctgatggaaagaaaggtac

SEQ ID NO: 123861 - DNA, 25 bp, Artificial
  probe
  misc_feature (1)..(25): SEQ ID NO: 3437; WAN024CLX_at; Start 36; Stop 60
acgcgccttgcctgctgatggaaag

SEQ ID NO: 123862 - DNA, 25 bp, Artificial
  probe
  misc_feature (1)..(25): SEQ ID NO: 3437; WAN024CLX_at; Start 3; Stop 27
ggttgatctcatgtataaataccta

SEQ ID NO: 123863 - DNA, 25 bp, Artificial
  probe
  misc_feature (1)..(25): SEQ ID NO: 3437; WAN024CLX_at; Start 46; Stop 70
cctgctgatggaaagaaaggtacaa

SEQ ID NO: 123864 - DNA, 25 bp, Artificial
  probe
  misc_feature (1)..(25): SEQ ID NO: 3437; WAN024CLX_at; Start 21; Stop 45
atacctaacaaaaccacgcgccttg

SEQ ID NO: 123865 - DNA, 25 bp, Artificial
  probe
  misc_feature (1)..(25): SEQ ID NO: 3437; WAN024CLX_at; Start 43; Stop 67
ttgcctgctgatggaaagaaaggta

SEQ ID NO: 123866 - DNA, 25 bp, Artificial
  probe
  misc_feature (1)..(25): SEQ ID NO: 3437; WAN024CLX_at; Start 39; Stop 63
cgccttgcctgctgatggaaagaaa

SEQ ID NO: 123867 - DNA, 25 bp, Artificial
  probe
  misc_feature (1)..(25): SEQ ID NO: 3437; WAN024CLX_at; Start 48; Stop 72
tgctgatggaaagaaaggtacaaat

SEQ ID NO: 123868 - DNA, 25 bp, Artificial
  probe
  misc_feature (1)..(25): SEQ ID NO: 3437; WAN024CLX_at; Start 9; Stop 33
tctcatgtataaatacctaacaaaa

SEQ ID NO: 123869 - DNA, 25 bp, Artificial
  probe
  misc_feature (1)..(25): SEQ ID NO: 3437; WAN024CLX_at; Start 45; Stop 69
gcctgctgatggaaagaaaggtaca

SEQ ID NO: 123870 - DNA, 25 bp, Artificial
  probe
  misc_feature (1)..(25): SEQ ID NO: 3437; WAN024CLX_at; Start 4; Stop 28
gttgatctcatgtataaatacctaa

SEQ ID NO: 123871 - DNA, 25 bp, Artificial
  probe
  misc_feature (1)..(25): SEQ ID NO: 3437; WAN024CLX_at; Start 35; Stop 59
cacgcgccttgcctgctgatggaaa

SEQ ID NO: 123872 - DNA, 25 bp, Artificial
  probe
  misc_feature (1)..(25): SEQ ID NO: 3437; WAN024CLX_at; Start 42; Stop 66
cttgcctgctgatggaaagaaaggt

SEQ ID NO: 123873 - DNA, 25 bp, Artificial
  probe
  misc_feature (1)..(25): SEQ ID NO: 3437; WAN024CLX_at; Start 41; Stop 65
ccttgcctgctgatggaaagaaagg

SEQ ID NO: 123874 - DNA, 25 bp, Artificial
  probe
  misc_feature (1)..(25): SEQ ID NO: 3437; WAN024CLX_at; Start 22; Stop 46
tacctaacaaaaccacgcgccttgc

SEQ ID NO: 123875 - DNA, 25 bp, Artificial
  probe
  misc_feature (1)..(25): SEQ ID NO: 3437; WAN024CLX_at; Start 31; Stop 55
aaaccacgcgccttgcctgctgatg

SEQ ID NO: 123876 - DNA, 25 bp, Artificial
  probe
  misc_feature (1)..(25): SEQ ID NO: 3437; WAN024CLX_at; Start 25; Stop 49
ctaacaaaaccacgcgccttgcctg

SEQ ID NO: 123877 - DNA, 25 bp, Artificial
  probe
  misc_feature (1)..(25): SEQ ID NO: 3437; WAN024CLX_at; Start 38; Stop 62
gcgccttgcctgctgatggaaagaa

SEQ ID NO: 123878 - DNA, 25 bp, Artificial
  probe
  misc_feature (1)..(25): SEQ ID NO: 3437; WAN024CLX_at; Start 51; Stop 75
tgatggaaagaaaggtacaaataca

SEQ ID NO: 123879 - DNA, 25 bp, Artificial
  probe
  misc_feature (1)..(25): SEQ ID NO: 3437; WAN024CLX_at; Start 50; Stop 74
ctgatggaaagaaaggtacaaatac

SEQ ID NO: 123880 - DNA, 25 bp, Artificial
  probe
  misc_feature (1)..(25): SEQ ID NO: 3437; WAN024CLX_at; Start 11; Stop 35
tcatgtataaatacctaacaaaacc

SEQ ID NO: 123881 - DNA, 25 bp, Artificial
  probe
  misc_feature (1)..(25): SEQ ID NO: 3437; WAN024CLX_at; Start 6; Stop 30
tgatctcatgtataaatacctaaca

SEQ ID NO: 123882 - DNA, 25 bp, Artificial
  probe
  misc_feature (1)..(25): SEQ ID NO: 3437; WAN024CLX_at; Start 40; Stop 64
gccttgcctgctgatggaaagaaag

SEQ ID NO: 123883 - DNA, 25 bp, Artificial
  probe
  misc_feature (1)..(25): SEQ ID NO: 3437; WAN024CLX_at; Start 7; Stop 31
gatctcatgtataaatacctaacaa

SEQ ID NO: 123884 - DNA, 25 bp, Artificial
  probe
  misc_feature (1)..(25): SEQ ID NO: 3437; WAN024CLX_at; Start 32; Stop 56
aaccacgcgccttgcctgctgatgg

SEQ ID NO: 123885 - DNA, 25 bp, Artificial
  probe
  misc_feature (1)..(25): SEQ ID NO: 2097; WAN024CLY_at; Start 1; Stop 25
atgctggatttgaatgagcacaaga

SEQ ID NO: 123886 - DNA, 25 bp, Artificial
  probe
  misc_feature (1)..(25): SEQ ID NO: 2097; WAN024CLY_at; Start 10; Stop 34
ttgaatgagcacaagaaaataaatg

SEQ ID NO: 123887 - DNA, 25 bp, Artificial
  probe
  misc_feature (1)..(25): SEQ ID NO: 2097; WAN024CLY_at; Start 56; Stop 80
gtaatgcagaaactgatattgtctc

SEQ ID NO: 123888 - DNA, 25 bp, Artificial
  probe
  misc_feature (1)..(25): SEQ ID NO: 2097; WAN024CLY_at; Start 55; Stop 79
tgtaatgcagaaactgatattgtct

SEQ ID NO: 123889 - DNA, 25 bp, Artificial
  probe
  misc_feature (1)..(25): SEQ ID NO: 2097; WAN024CLY_at; Start 11; Stop 35
tgaatgagcacaagaaaataaatga

SEQ ID NO: 123890 - DNA, 25 bp, Artificial
  probe
  misc_feature (1)..(25): SEQ ID NO: 2097; WAN024CLY_at; Start 62; Stop 86
cagaaactgatattgtctcttttta

SEQ ID NO: 123891 - DNA, 25 bp, Artificial
  probe
  misc_feature (1)..(25): SEQ ID NO: 2097; WAN024CLY_at; Start 13; Stop 37
aatgagcacaagaaaataaatgaac

SEQ ID NO: 123892 - DNA, 25 bp, Artificial
  probe
  misc_feature (1)..(25): SEQ ID NO: 2097; WAN024CLY_at; Start 21; Stop 45
caagaaaataaatgaacagacaata

SEQ ID NO: 123893 - DNA, 25 bp, Artificial
  probe
  misc_feature (1)..(25): SEQ ID NO: 2097; WAN024CLY_at; Start 39; Stop 63
gacaatattagaattctgtaatgca

SEQ ID NO: 123894 - DNA, 25 bp, Artificial
  probe
  misc_feature (1)..(25): SEQ ID NO: 2097; WAN024CLY_at; Start 15; Stop 39
tgagcacaagaaaataaatgaacag

SEQ ID NO: 123895 - DNA, 25 bp, Artificial
  probe
  misc_feature (1)..(25): SEQ ID NO: 2097; WAN024CLY_at; Start 12; Stop 36
gaatgagcacaagaaaataaatgaa

SEQ ID NO: 123896 - DNA, 25 bp, Artificial
  probe
  misc_feature (1)..(25): SEQ ID NO: 2097; WAN024CLY_at; Start 16; Stop 40
gagcacaagaaaataaatgaacaga

SEQ ID NO: 123897 - DNA, 25 bp, Artificial
  probe
  misc_feature (1)..(25): SEQ ID NO: 2097; WAN024CLY_at; Start 2; Stop 26
tgctggatttgaatgagcacaagaa

SEQ ID NO: 123898 - DNA, 25 bp, Artificial
  probe
  misc_feature (1)..(25): SEQ ID NO: 2097; WAN024CLY_at; Start 58; Stop 82
aatgcagaaactgatattgtctctt

SEQ ID NO: 123899 - DNA, 25 bp, Artificial
  probe
  misc_feature (1)..(25): SEQ ID NO: 2097; WAN024CLY_at; Start 18; Stop 42
gcacaagaaaataaatgaacagaca

SEQ ID NO: 123900 - DNA, 25 bp, Artificial
  probe
  misc_feature (1)..(25): SEQ ID NO: 2097; WAN024CLY_at; Start 41; Stop 65
caatattagaattctgtaatgcaga

SEQ ID NO: 123901 - DNA, 25 bp, Artificial
  probe
  misc_feature (1)..(25): SEQ ID NO: 2097; WAN024CLY_at; Start 54; Stop 78
ctgtaatgcagaaactgatattgtc

SEQ ID NO: 123902 - DNA, 25 bp, Artificial
  probe
  misc_feature (1)..(25): SEQ ID NO: 2097; WAN024CLY_at; Start 7; Stop 31
gatttgaatgagcacaagaaaataa

SEQ ID NO: 123903 - DNA, 25 bp, Artificial
  probe
  misc_feature (1)..(25): SEQ ID NO: 2097; WAN024CLY_at; Start 57; Stop 81
taatgcagaaactgatattgtctct

SEQ ID NO: 123904 - DNA, 25 bp, Artificial
  probe
  misc_feature (1)..(25): SEQ ID NO: 2097; WAN024CLY_at; Start 61; Stop 85
gcagaaactgatattgtctcttttt

SEQ ID NO: 123905 - DNA, 25 bp, Artificial
  probe
  misc_feature (1)..(25): SEQ ID NO: 2097; WAN024CLY_at; Start 53; Stop 77
tctgtaatgcagaaactgatattgt

SEQ ID NO: 123906 - DNA, 25 bp, Artificial
  probe
  misc_feature (1)..(25): SEQ ID NO: 2097; WAN024CLY_at; Start 44; Stop 68
tattagaattctgtaatgcagaaac

SEQ ID NO: 123907 - DNA, 25 bp, Artificial
  probe
  misc_feature (1)..(25): SEQ ID NO: 2097; WAN024CLY_at; Start 47; Stop 71
tagaattctgtaatgcagaaactga

SEQ ID NO: 123908 - DNA, 25 bp, Artificial
  probe
  misc_feature (1)..(25): SEQ ID NO: 2097; WAN024CLY_at; Start 49; Stop 73
gaattctgtaatgcagaaactgata

SEQ ID NO: 123909 - DNA, 25 bp, Artificial
  probe
  misc_feature (1)..(25): SEQ ID NO: 2097; WAN024CLY_at; Start 4; Stop 28
ctggatttgaatgagcacaagaaaa

SEQ ID NO: 123910 - DNA, 25 bp, Artificial
  probe
  misc_feature (1)..(25): SEQ ID NO: 2097; WAN024CLY_at; Start 19; Stop 43
cacaagaaaataaatgaacagacaa

SEQ ID NO: 123911 - DNA, 25 bp, Artificial
  probe
  misc_feature (1)..(25): SEQ ID NO: 2097; WAN024CLY_at; Start 3; Stop 27
gctggatttgaatgagcacaagaaa

SEQ ID NO: 123912 - DNA, 25 bp, Artificial
  probe
  misc_feature (1)..(25): SEQ ID NO: 2097; WAN024CLY_at; Start 5; Stop 29
tggatttgaatgagcacaagaaaat

SEQ ID NO: 123913 - DNA, 25 bp, Artificial
  probe
  misc_feature (1)..(25): SEQ ID NO: 2097; WAN024CLY_at; Start 30; Stop 54
aaatgaacagacaatattagaattc

SEQ ID NO: 123914 - DNA, 25 bp, Artificial
  probe
  misc_feature (1)..(25): SEQ ID NO: 2097; WAN024CLY_at; Start 60; Stop 84
tgcagaaactgatattgtctctttt

SEQ ID NO: 123915 - DNA, 25 bp, Artificial
  probe
  misc_feature (1)..(25): SEQ ID NO: 2097; WAN024CLY_at; Start 33; Stop 57
tgaacagacaatattagaattctgt

SEQ ID NO: 123916 - DNA, 25 bp, Artificial
  probe
  misc_feature (1)..(25): SEQ ID NO: 2097; WAN024CLY_at; Start 6; Stop 30
ggatttgaatgagcacaagaaaata

SEQ ID NO: 123917 - DNA, 25 bp, Artificial
  probe
  misc_feature (1)..(25): SEQ ID NO: 2097; WAN024CLY_at; Start 46; Stop 70
ttagaattctgtaatgcagaaactg

SEQ ID NO: 123918 - DNA, 25 bp, Artificial
  probe
  misc_feature (1)..(25): SEQ ID NO: 2097; WAN024CLY_at; Start 34; Stop 58
gaacagacaatattagaattctgta

SEQ ID NO: 123919 - DNA, 25 bp, Artificial
  probe
  misc_feature (1)..(25): SEQ ID NO: 798; WAN024CLZ_at; Start 50; Stop 74
aaaaaggattttacttagacatgca

SEQ ID NO: 123920 - DNA, 25 bp, Artificial
  probe
  misc_feature (1)..(25): SEQ ID NO: 798; WAN024CLZ_at; Start 63; Stop 87
cttagacatgcagggacaatcccag

SEQ ID NO: 123921 - DNA, 25 bp, Artificial
  probe
  misc_feature (1)..(25): SEQ ID NO: 798; WAN024CLZ_at; Start 65; Stop 89
tagacatgcagggacaatcccagct

SEQ ID NO: 123922 - DNA, 25 bp, Artificial
  probe
  misc_feature (1)..(25): SEQ ID NO: 798; WAN024CLZ_at; Start 44; Stop 68
tgagacaaaaaggattttacttaga

SEQ ID NO: 123923 - DNA, 25 bp, Artificial
  probe
  misc_feature (1)..(25): SEQ ID NO: 798; WAN024CLZ_at; Start 35; Stop 59
tcctatttgtgagacaaaaaggatt

SEQ ID NO: 123924 - DNA, 25 bp, Artificial
  probe
  misc_feature (1)..(25): SEQ ID NO: 798; WAN024CLZ_at; Start 55; Stop 79
ggattttacttagacatgcagggac

SEQ ID NO: 123925 - DNA, 25 bp, Artificial
  probe
  misc_feature (1)..(25): SEQ ID NO: 798; WAN024CLZ_at; Start 58; Stop 82
ttttacttagacatgcagggacaat

SEQ ID NO: 123926 - DNA, 25 bp, Artificial
  probe
  misc_feature (1)..(25): SEQ ID NO: 798; WAN024CLZ_at; Start 67; Stop 91
gacatgcagggacaatcccagcttg

SEQ ID NO: 123927 - DNA, 25 bp, Artificial
  probe
  misc_feature (1)..(25): SEQ ID NO: 798; WAN024CLZ_at; Start 71; Stop 95
tgcagggacaatcccagcttgtttt

SEQ ID NO: 123928 - DNA, 25 bp, Artificial
  probe
  misc_feature (1)..(25): SEQ ID NO: 798; WAN024CLZ_at; Start 32; Stop 56
aaatcctatttgtgagacaaaaagg

SEQ ID NO: 123929 - DNA, 25 bp, Artificial
  probe
  misc_feature (1)..(25): SEQ ID NO: 798; WAN024CLZ_at; Start 54; Stop 78
aggattttacttagacatgcaggga

SEQ ID NO: 123930 - DNA, 25 bp, Artificial
  probe
  misc_feature (1)..(25): SEQ ID NO: 798; WAN024CLZ_at; Start 74; Stop 98
agggacaatcccagcttgttttaga

SEQ ID NO: 123931 - DNA, 25 bp, Artificial
  probe
  misc_feature (1)..(25): SEQ ID NO: 798; WAN024CLZ_at; Start 52; Stop 76
aaaggattttacttagacatgcagg

SEQ ID NO: 123932 - DNA, 25 bp, Artificial
  probe
  misc_feature (1)..(25): SEQ ID NO: 798; WAN024CLZ_at; Start 69; Stop 93
catgcagggacaatcccagcttgtt

SEQ ID NO: 123933 - DNA, 25 bp, Artificial
  probe
  misc_feature (1)..(25): SEQ ID NO: 798; WAN024CLZ_at; Start 49; Stop 73
caaaaaggattttacttagacatgc

SEQ ID NO: 123934 - DNA, 25 bp, Artificial
  probe
  misc_feature (1)..(25): SEQ ID NO: 798; WAN024CLZ_at; Start 68; Stop 92
acatgcagggacaatcccagcttgt

SEQ ID NO: 123935 - DNA, 25 bp, Artificial
  probe
  misc_feature (1)..(25): SEQ ID NO: 798; WAN024CLZ_at; Start 77; Stop 101
gacaatcccagcttgttttagatct

SEQ ID NO: 123936 - DNA, 25 bp, Artificial
  probe
  misc_feature (1)..(25): SEQ ID NO: 798; WAN024CLZ_at; Start 70; Stop 94
atgcagggacaatcccagcttgttt

SEQ ID NO: 123937 - DNA, 25 bp, Artificial
  probe
  misc_feature (1)..(25): SEQ ID NO: 798; WAN024CLZ_at; Start 53; Stop 77
aaggattttacttagacatgcaggg

SEQ ID NO: 123938 - DNA, 25 bp, Artificial
  probe
  misc_feature (1)..(25): SEQ ID NO: 798; WAN024CLZ_at; Start 59; Stop 83
tttacttagacatgcagggacaatc

SEQ ID NO: 123939 - DNA, 25 bp, Artificial
  probe
  misc_feature (1)..(25): SEQ ID NO: 798; WAN024CLZ_at; Start 61; Stop 85
tacttagacatgcagggacaatccc

SEQ ID NO: 123940 - DNA, 25 bp, Artificial
  probe
  misc_feature (1)..(25): SEQ ID NO: 798; WAN024CLZ_at; Start 57; Stop 81
attttacttagacatgcagggacaa

SEQ ID NO: 123941 - DNA, 25 bp, Artificial
  probe
  misc_feature (1)..(25): SEQ ID NO: 798; WAN024CLZ_at; Start 73; Stop 97
cagggacaatcccagcttgttttag

SEQ ID NO: 123942 - DNA, 25 bp, Artificial
  probe
  misc_feature (1)..(25): SEQ ID NO: 798; WAN024CLZ_at; Start 62; Stop 86
acttagacatgcagggacaatccca

SEQ ID NO: 123943 - DNA, 25 bp, Artificial
  probe
  misc_feature (1)..(25): SEQ ID NO: 798; WAN024CLZ_at; Start 60; Stop 84
ttacttagacatgcagggacaatcc

SEQ ID NO: 123944 - DNA, 25 bp, Artificial
  probe
  misc_feature (1)..(25): SEQ ID NO: 798; WAN024CLZ_at; Start 36; Stop 60
cctatttgtgagacaaaaaggattt

SEQ ID NO: 123945 - DNA, 25 bp, Artificial
  probe
  misc_feature (1)..(25): SEQ ID NO: 798; WAN024CLZ_at; Start 56; Stop 80
gattttacttagacatgcagggaca

SEQ ID NO: 123946 - DNA, 25 bp, Artificial
  probe
  misc_feature (1)..(25): SEQ ID NO: 798; WAN024CLZ_at; Start 12; Stop 36
tgtgaatttggactataaaaaaatc

SEQ ID NO: 123947 - DNA, 25 bp, Artificial
  probe
  misc_feature (1)..(25): SEQ ID NO: 798; WAN024CLZ_at; Start 76; Stop 100
ggacaatcccagcttgttttagatc

SEQ ID NO: 123948 - DNA, 25 bp, Artificial
  probe
  misc_feature (1)..(25): SEQ ID NO: 798; WAN024CLZ_at; Start 42; Stop 66
tgtgagacaaaaaggattttactta

SEQ ID NO: 123949 - DNA, 25 bp, Artificial
  probe
  misc_feature (1)..(25): SEQ ID NO: 798; WAN024CLZ_at; Start 78; Stop 102
acaatcccagcttgttttagatcta

SEQ ID NO: 123950 - DNA, 25 bp, Artificial
  probe
  misc_feature (1)..(25): SEQ ID NO: 798; WAN024CLZ_at; Start 66; Stop 90
agacatgcagggacaatcccagctt

SEQ ID NO: 123951 - DNA, 25 bp, Artificial
  probe
  misc_feature (1)..(25): SEQ ID NO: 798; WAN024CLZ_at; Start 51; Stop 75
aaaaggattttacttagacatgcag

SEQ ID NO: 123952 - DNA, 25 bp, Artificial
  probe
  misc_feature (1)..(25): SEQ ID NO: 798; WAN024CLZ_at; Start 75; Stop 99
gggacaatcccagcttgttttagat

SEQ ID NO: 123953 - DNA, 25 bp, Artificial
  probe
  misc_feature (1)..(25): SEQ ID NO: 2072; WAN024CM2_s_at; Start 164; Stop 188
ttttactatggagaatccagtttgg

SEQ ID NO: 123954 - DNA, 25 bp, Artificial
  probe
  misc_feature (1)..(25): SEQ ID NO: 2072; WAN024CM2_s_at; Start 108; Stop 132
cgttcccaagcgaaatatggactta

SEQ ID NO: 123955 - DNA, 25 bp, Artificial
  probe
  misc_feature (1)..(25): SEQ ID NO: 2072; WAN024CM2_s_at; Start 161; Stop 185
tcattttactatggagaatccagtt

SEQ ID NO: 123956 - DNA, 25 bp, Artificial
  probe
  misc_feature (1)..(25): SEQ ID NO: 2072; WAN024CM2_s_at; Start 39; Stop 63
agaacaccaagtcaaacccttcata

SEQ ID NO: 123957 - DNA, 25 bp, Artificial
  probe
  misc_feature (1)..(25): SEQ ID NO: 2072; WAN024CM2_s_at; Start 48; Stop 72
agtcaaacccttcatatcgcctgaa

SEQ ID NO: 123958 - DNA, 25 bp, Artificial
  probe
  misc_feature (1)..(25): SEQ ID NO: 2072; WAN024CM2_s_at; Start 40; Stop 64
gaacaccaagtcaaacccttcatat

SEQ ID NO: 123959 - DNA, 25 bp, Artificial
  probe
  misc_feature (1)..(25): SEQ ID NO: 2072; WAN024CM2_s_at; Start 53; Stop 77
aacccttcatatcgcctgaacgaga

SEQ ID NO: 123960 - DNA, 25 bp, Artificial
  probe
  misc_feature (1)..(25): SEQ ID NO: 2072; WAN024CM2_s_at; Start 168; Stop 192
actatggagaatccagtttggtact

SEQ ID NO: 123961 - DNA, 25 bp, Artificial
  probe
  misc_feature (1)..(25): SEQ ID NO: 2072; WAN024CM2_s_at; Start 51; Stop 75
caaacccttcatatcgcctgaacga

SEQ ID NO: 123962 - DNA, 25 bp, Artificial
  probe
  misc_feature (1)..(25): SEQ ID NO: 2072; WAN024CM2_s_at; Start 165; Stop 189
tttactatggagaatccagtttggt

SEQ ID NO: 123963 - DNA, 25 bp, Artificial
  probe
  misc_feature (1)..(25): SEQ ID NO: 2072; WAN024CM2_s_at; Start 179; Stop 203
tccagtttggtacttttaccactga

SEQ ID NO: 123964 - DNA, 25 bp, Artificial
  probe
  misc_feature (1)..(25): SEQ ID NO: 2072; WAN024CM2_s_at; Start 1; Stop 25
atgctatccgtgaatactattttag

SEQ ID NO: 123965 - DNA, 25 bp, Artificial
  probe
  misc_feature (1)..(25): SEQ ID NO: 2072; WAN024CM2_s_at; Start 3; Stop 27
gctatccgtgaatactattttagaa

SEQ ID NO: 123966 - DNA, 25 bp, Artificial
  probe
  misc_feature (1)..(25): SEQ ID NO: 2072; WAN024CM2_s_at; Start 46; Stop 70
caagtcaaacccttcatatcgcctg

SEQ ID NO: 123967 - DNA, 25 bp, Artificial
  probe
  misc_feature (1)..(25): SEQ ID NO: 2072; WAN024CM2_s_at; Start 42; Stop 66
acaccaagtcaaacccttcatatcg

SEQ ID NO: 123968 - DNA, 25 bp, Artificial
  probe
  misc_feature (1)..(25): SEQ ID NO: 2072; WAN024CM2_s_at; Start 162; Stop 186
cattttactatggagaatccagttt

SEQ ID NO: 123969 - DNA, 25 bp, Artificial
  probe
  misc_feature (1)..(25): SEQ ID NO: 2072; WAN024CM2_s_at; Start 172; Stop 196
tggagaatccagtttggtactttta

SEQ ID NO: 123970 - DNA, 25 bp, Artificial
  probe
  misc_feature (1)..(25): SEQ ID NO: 2072; WAN024CM2_s_at; Start 110; Stop 134
ttcccaagcgaaatatggacttatt

SEQ ID NO: 123971 - DNA, 25 bp, Artificial
  probe
  misc_feature (1)..(25): SEQ ID NO: 2072; WAN024CM2_s_at; Start 109; Stop 133
gttcccaagcgaaatatggacttat

SEQ ID NO: 123972 - DNA, 25 bp, Artificial
  probe
  misc_feature (1)..(25): SEQ ID NO: 2072; WAN024CM2_s_at; Start 111; Stop 135
tcccaagcgaaatatggacttatta

SEQ ID NO: 123973 - DNA, 25 bp, Artificial
  probe
  misc_feature (1)..(25): SEQ ID NO: 2072; WAN024CM2_s_at; Start 38; Stop 62
aagaacaccaagtcaaacccttcat

SEQ ID NO: 123974 - DNA, 25 bp, Artificial
  probe
  misc_feature (1)..(25): SEQ ID NO: 2072; WAN024CM2_s_at; Start 50; Stop 74
tcaaacccttcatatcgcctgaacg

SEQ ID NO: 123975 - DNA, 25 bp, Artificial
  probe
  misc_feature (1)..(25): SEQ ID NO: 2072; WAN024CM2_s_at; Start 112; Stop 136
cccaagcgaaatatggacttattag

SEQ ID NO: 123976 - DNA, 25 bp, Artificial
  probe
  misc_feature (1)..(25): SEQ ID NO: 2072; WAN024CM2_s_at; Start 170; Stop 194
tatggagaatccagtttggtacttt

SEQ ID NO: 123977 - DNA, 25 bp, Artificial
  probe
  misc_feature (1)..(25): SEQ ID NO: 2072; WAN024CM2_s_at; Start 167; Stop 191
tactatggagaatccagtttggtac

SEQ ID NO: 123978 - DNA, 25 bp, Artificial
  probe
  misc_feature (1)..(25): SEQ ID NO: 2072; WAN024CM2_s_at; Start 49; Stop 73
gtcaaacccttcatatcgcctgaac

SEQ ID NO: 123979 - DNA, 25 bp, Artificial
  probe
  misc_feature (1)..(25): SEQ ID NO: 2072; WAN024CM2_s_at; Start 155; Stop 179
gagatatcattttactatggagaat

SEQ ID NO: 123980 - DNA, 25 bp, Artificial
  probe
  misc_feature (1)..(25): SEQ ID NO: 2072; WAN024CM2_s_at; Start 169; Stop 193
ctatggagaatccagtttggtactt

SEQ ID NO: 123981 - DNA, 25 bp, Artificial
  probe
  misc_feature (1)..(25): SEQ ID NO: 2072; WAN024CM2_s_at; Start 157; Stop 181
gatatcattttactatggagaatcc

SEQ ID NO: 123982 - DNA, 25 bp, Artificial
  probe
  misc_feature (1)..(25): SEQ ID NO: 2072; WAN024CM2_s_at; Start 5; Stop 29
tatccgtgaatactattttagaaaa

SEQ ID NO: 123983 - DNA, 25 bp, Artificial
  probe
  misc_feature (1)..(25): SEQ ID NO: 2072; WAN024CM2_s_at; Start 107; Stop 131
ccgttcccaagcgaaatatggactt

SEQ ID NO: 123984 - DNA, 25 bp, Artificial
  probe
  misc_feature (1)..(25): SEQ ID NO: 2072; WAN024CM2_s_at; Start 47; Stop 71
aagtcaaacccttcatatcgcctga

SEQ ID NO: 123985 - DNA, 25 bp, Artificial
  probe
  misc_feature (1)..(25): SEQ ID NO: 2072; WAN024CM2_s_at; Start 159; Stop 183
tatcattttactatggagaatccag

SEQ ID NO: 123986 - DNA, 25 bp, Artificial
  probe
  misc_feature (1)..(25): SEQ ID NO: 2072; WAN024CM2_s_at; Start 52; Stop 76
aaacccttcatatcgcctgaacgag

SEQ ID NO: 123987 - DNA, 25 bp, Artificial
  probe
  misc_feature (1)..(25): SEQ ID NO: 3445; WAN024CM3_x_at; Start 12; Stop 36
atcattttcaagttttcacaccttt

SEQ ID NO: 123988 - DNA, 25 bp, Artificial
  probe
  misc_feature (1)..(25): SEQ ID NO: 3445; WAN024CM3_x_at; Start 8; Stop 32
gaaaatcattttcaagttttcacac

SEQ ID NO: 123989 - DNA, 25 bp, Artificial
  probe
  misc_feature (1)..(25): SEQ ID NO: 3445; WAN024CM3_x_at; Start 56; Stop 80
tttctcaaaaacgcttgactctgac

SEQ ID NO: 123990 - DNA, 25 bp, Artificial
  probe
  misc_feature (1)..(25): SEQ ID NO: 3445; WAN024CM3_x_at; Start 13; Stop 37
tcattttcaagttttcacacctttc

SEQ ID NO: 123991 - DNA, 25 bp, Artificial
  probe
  misc_feature (1)..(25): SEQ ID NO: 3445; WAN024CM3_x_at; Start 16; Stop 40
ttttcaagttttcacacctttctca

SEQ ID NO: 123992 - DNA, 25 bp, Artificial
  probe
  misc_feature (1)..(25): SEQ ID NO: 3445; WAN024CM3_x_at; Start 7; Stop 31
agaaaatcattttcaagttttcaca

SEQ ID NO: 123993 - DNA, 25 bp, Artificial
  probe
  misc_feature (1)..(25): SEQ ID NO: 3445; WAN024CM3_x_at; Start 2; Stop 26
tgtcaagaaaatcattttcaagttt

SEQ ID NO: 123994 - DNA, 25 bp, Artificial
  probe
  misc_feature (1)..(25): SEQ ID NO: 3445; WAN024CM3_x_at; Start 53; Stop 77
aattttctcaaaaacgcttgactct

SEQ ID NO: 123995 - DNA, 25 bp, Artificial
  probe
  misc_feature (1)..(25): SEQ ID NO: 3445; WAN024CM3_x_at; Start 18; Stop 42
ttcaagttttcacacctttctcaaa

SEQ ID NO: 123996 - DNA, 25 bp, Artificial
  probe
  misc_feature (1)..(25): SEQ ID NO: 3445; WAN024CM3_x_at; Start 17; Stop 41
tttcaagttttcacacctttctcaa

SEQ ID NO: 123997 - DNA, 25 bp, Artificial
  probe
  misc_feature (1)..(25): SEQ ID NO: 3445; WAN024CM3_x_at; Start 10; Stop 34
aaatcattttcaagttttcacacct

SEQ ID NO: 123998 - DNA, 25 bp, Artificial
  probe
  misc_feature (1)..(25): SEQ ID NO: 3445; WAN024CM3_x_at; Start 5; Stop 29
caagaaaatcattttcaagttttca

SEQ ID NO: 123999 - DNA, 25 bp, Artificial
  probe
  misc_feature (1)..(25): SEQ ID NO: 3445; WAN024CM3_x_at; Start 14; Stop 38
cattttcaagttttcacacctttct

SEQ ID NO: 124000 - DNA, 25 bp, Artificial
  probe
  misc_feature (1)..(25): SEQ ID NO: 3445; WAN024CM3_x_at; Start 55; Stop 79
ttttctcaaaaacgcttgactctga

SEQ ID NO: 124001 - DNA, 25 bp, Artificial
  probe
  misc_feature (1)..(25): SEQ ID NO: 3445; WAN024CM3_x_at; Start 57; Stop 81
ttctcaaaaacgcttgactctgacc

SEQ ID NO: 124002 - DNA, 25 bp, Artificial
  probe
  misc_feature (1)..(25): SEQ ID NO: 3445; WAN024CM3_x_at; Start 11; Stop 35
aatcattttcaagttttcacacctt

SEQ ID NO: 124003 - DNA, 25 bp, Artificial
  probe
  misc_feature (1)..(25): SEQ ID NO: 3445; WAN024CM3_x_at; Start 19; Stop 43
tcaagttttcacacctttctcaaaa

SEQ ID NO: 124004 - DNA, 25 bp, Artificial
  probe
  misc_feature (1)..(25): SEQ ID NO: 3445; WAN024CM3_x_at; Start 4; Stop 28
tcaagaaaatcattttcaagttttc

SEQ ID NO: 124005 - DNA, 25 bp, Artificial
  probe
  misc_feature (1)..(25): SEQ ID NO: 3445; WAN024CM3_x_at; Start 54; Stop 78
attttctcaaaaacgcttgactctg

SEQ ID NO: 124006 - DNA, 25 bp, Artificial
  probe
  misc_feature (1)..(25): SEQ ID NO: 3445; WAN024CM3_x_at; Start 1; Stop 25
ctgtcaagaaaatcattttcaagtt

SEQ ID NO: 124007 - DNA, 25 bp, Artificial
  probe
  misc_feature (1)..(25): SEQ ID NO: 3391; WAN024CM4_at; Start 44; Stop 68
tttctactagcacttgtcaagtaaa

SEQ ID NO: 124008 - DNA, 25 bp, Artificial
  probe
  misc_feature (1)..(25): SEQ ID NO: 3391; WAN024CM4_at; Start 65; Stop 89
taaaaacagctaaatccatgttgac

SEQ ID NO: 124009 - DNA, 25 bp, Artificial
  probe
  misc_feature (1)..(25): SEQ ID NO: 3391; WAN024CM4_at; Start 61; Stop 85
caagtaaaaacagctaaatccatgt

SEQ ID NO: 124010 - DNA, 25 bp, Artificial
  probe
  misc_feature (1)..(25): SEQ ID NO: 3391; WAN024CM4_at; Start 73; Stop 97
gctaaatccatgttgactgctattg

SEQ ID NO: 124011 - DNA, 25 bp, Artificial
  probe
  misc_feature (1)..(25): SEQ ID NO: 3391; WAN024CM4_at; Start 71; Stop 95
cagctaaatccatgttgactgctat

SEQ ID NO: 124012 - DNA, 25 bp, Artificial
  probe
  misc_feature (1)..(25): SEQ ID NO: 3391; WAN024CM4_at; Start 53; Stop 77
gcacttgtcaagtaaaaacagctaa

SEQ ID NO: 124013 - DNA, 25 bp, Artificial
  probe
  misc_feature (1)..(25): SEQ ID NO: 3391; WAN024CM4_at; Start 42; Stop 66
tatttctactagcacttgtcaagta

SEQ ID NO: 124014 - DNA, 25 bp, Artificial
  probe
  misc_feature (1)..(25): SEQ ID NO: 3391; WAN024CM4_at; Start 39; Stop 63
tattatttctactagcacttgtcaa

SEQ ID NO: 124015 - DNA, 25 bp, Artificial
  probe
  misc_feature (1)..(25): SEQ ID NO: 3391; WAN024CM4_at; Start 59; Stop 83
gtcaagtaaaaacagctaaatccat

SEQ ID NO: 124016 - DNA, 25 bp, Artificial
  probe
  misc_feature (1)..(25): SEQ ID NO: 3391; WAN024CM4_at; Start 97; Stop 121
gaacacctcacaagactctttccaa

SEQ ID NO: 124017 - DNA, 25 bp, Artificial
  probe
  misc_feature (1)..(25): SEQ ID NO: 3391; WAN024CM4_at; Start 54; Stop 78
cacttgtcaagtaaaaacagctaaa

SEQ ID NO: 124018 - DNA, 25 bp, Artificial
  probe
  misc_feature (1)..(25): SEQ ID NO: 3391; WAN024CM4_at; Start 1; Stop 25
ctgcctctctggactgctttaaagg

SEQ ID NO: 124019 - DNA, 25 bp, Artificial
  probe
  misc_feature (1)..(25): SEQ ID NO: 3391; WAN024CM4_at; Start 3; Stop 27
gcctctctggactgctttaaaggtt

SEQ ID NO: 124020 - DNA, 25 bp, Artificial
  probe
  misc_feature (1)..(25): SEQ ID NO: 3391; WAN024CM4_at; Start 84; Stop 108
gttgactgctattgaacacctcaca

SEQ ID NO: 124021 - DNA, 25 bp, Artificial
  probe
  misc_feature (1)..(25): SEQ ID NO: 3391; WAN024CM4_at; Start 79; Stop 103
tccatgttgactgctattgaacacc

SEQ ID NO: 124022 - DNA, 25 bp, Artificial
  probe
  misc_feature (1)..(25): SEQ ID NO: 3391; WAN024CM4_at; Start 81; Stop 105
catgttgactgctattgaacacctc

SEQ ID NO: 124023 - DNA, 25 bp, Artificial
  probe
  misc_feature (1)..(25): SEQ ID NO: 3391; WAN024CM4_at; Start 86; Stop 110
tgactgctattgaacacctcacaag

SEQ ID NO: 124024 - DNA, 25 bp, Artificial
  probe
  misc_feature (1)..(25): SEQ ID NO: 3391; WAN024CM4_at; Start 5; Stop 29
ctctctggactgctttaaaggtttt

SEQ ID NO: 124025 - DNA, 25 bp, Artificial
  probe
  misc_feature (1)..(25): SEQ ID NO: 3391; WAN024CM4_at; Start 93; Stop 117
tattgaacacctcacaagactcttt

SEQ ID NO: 124026 - DNA, 25 bp, Artificial
  probe
  misc_feature (1)..(25): SEQ ID NO: 3391; WAN024CM4_at; Start 83; Stop 107
tgttgactgctattgaacacctcac

SEQ ID NO: 124027 - DNA, 25 bp, Artificial
  probe
  misc_feature (1)..(25): SEQ ID NO: 3391; WAN024CM4_at; Start 87; Stop 111
gactgctattgaacacctcacaaga

SEQ ID NO: 124028 - DNA, 25 bp, Artificial
  probe
  misc_feature (1)..(25): SEQ ID NO: 3391; WAN024CM4_at; Start 32; Stop 56
actattctattatttctactagcac

SEQ ID NO: 124029 - DNA, 25 bp, Artificial
  probe
  misc_feature (1)..(25): SEQ ID NO: 3391; WAN024CM4_at; Start 57; Stop 81
ttgtcaagtaaaaacagctaaatcc

SEQ ID NO: 124030 - DNA, 25 bp, Artificial
  probe
  misc_feature (1)..(25): SEQ ID NO: 3391; WAN024CM4_at; Start 51; Stop 75
tagcacttgtcaagtaaaaacagct

SEQ ID NO: 124031 - DNA, 25 bp, Artificial
  probe
  misc_feature (1)..(25): SEQ ID NO: 3391; WAN024CM4_at; Start 68; Stop 92
aaacagctaaatccatgttgactgc

SEQ ID NO: 124032 - DNA, 25 bp, Artificial
  probe
  misc_feature (1)..(25): SEQ ID NO: 3391; WAN024CM4_at; Start 95; Stop 119
ttgaacacctcacaagactctttcc

SEQ ID NO: 124033 - DNA, 25 bp, Artificial
  probe
  misc_feature (1)..(25): SEQ ID NO: 3391; WAN024CM4_at; Start 102; Stop 126
cctcacaagactctttccaaaagaa

SEQ ID NO: 124034 - DNA, 25 bp, Artificial
  probe
  misc_feature (1)..(25): SEQ ID NO: 3391; WAN024CM4_at; Start 48; Stop 72
tactagcacttgtcaagtaaaaaca

SEQ ID NO: 124035 - DNA, 25 bp, Artificial
  probe
  misc_feature (1)..(25): SEQ ID NO: 3391; WAN024CM4_at; Start 63; Stop 87
agtaaaaacagctaaatccatgttg

SEQ ID NO: 124036 - DNA, 25 bp, Artificial
  probe
  misc_feature (1)..(25): SEQ ID NO: 3391; WAN024CM4_at; Start 100; Stop 124
cacctcacaagactctttccaaaag

SEQ ID NO: 124037 - DNA, 25 bp, Artificial
  probe
  misc_feature (1)..(25): SEQ ID NO: 3391; WAN024CM4_at; Start 88; Stop 112
actgctattgaacacctcacaagac

SEQ ID NO: 124038 - DNA, 25 bp, Artificial
  probe
  misc_feature (1)..(25): SEQ ID NO: 3391; WAN024CM4_at; Start 90; Stop 114
tgctattgaacacctcacaagactc

SEQ ID NO: 124039 - DNA, 25 bp, Artificial
  probe
  misc_feature (1)..(25): SEQ ID NO: 3391; WAN024CM4_at; Start 76; Stop 100
aaatccatgttgactgctattgaac

SEQ ID NO: 124040 - DNA, 25 bp, Artificial
  probe
  misc_feature (1)..(25): SEQ ID NO: 3391; WAN024CM4_at; Start 91; Stop 115
gctattgaacacctcacaagactct

SEQ ID NO: 124041 - DNA, 25 bp, Artificial
  probe
  misc_feature (1)..(25): SEQ ID NO: 1524; WAN024CM5_at; Start 54; Stop 78
tcatttatatataccatccagtaag

SEQ ID NO: 124042 - DNA, 25 bp, Artificial
  probe
  misc_feature (1)..(25): SEQ ID NO: 1524; WAN024CM5_at; Start 78; Stop 102
gaaacatgtattagttgggaaacag

SEQ ID NO: 124043 - DNA, 25 bp, Artificial
  probe
  misc_feature (1)..(25): SEQ ID NO: 1524; WAN024CM5_at; Start 24; Stop 48
gatattacctactccttatgaggga

SEQ ID NO: 124044 - DNA, 25 bp, Artificial
  probe
  misc_feature (1)..(25): SEQ ID NO: 1524; WAN024CM5_at; Start 33; Stop 57
tactccttatgagggacactatcat

SEQ ID NO: 124045 - DNA, 25 bp, Artificial
  probe
  misc_feature (1)..(25): SEQ ID NO: 1524; WAN024CM5_at; Start 28; Stop 52
ttacctactccttatgagggacact

SEQ ID NO: 124046 - DNA, 25 bp, Artificial
  probe
  misc_feature (1)..(25): SEQ ID NO: 1524; WAN024CM5_at; Start 29; Stop 53
tacctactccttatgagggacacta

SEQ ID NO: 124047 - DNA, 25 bp, Artificial
  probe
  misc_feature (1)..(25): SEQ ID NO: 1524; WAN024CM5_at; Start 36; Stop 60
tccttatgagggacactatcattta

SEQ ID NO: 124048 - DNA, 25 bp, Artificial
  probe
  misc_feature (1)..(25): SEQ ID NO: 1524; WAN024CM5_at; Start 37; Stop 61
ccttatgagggacactatcatttat

SEQ ID NO: 124049 - DNA, 25 bp, Artificial
  probe
  misc_feature (1)..(25): SEQ ID NO: 1524; WAN024CM5_at; Start 45; Stop 69
gggacactatcatttatatatacca

SEQ ID NO: 124050 - DNA, 25 bp, Artificial
  probe
  misc_feature (1)..(25): SEQ ID NO: 1524; WAN024CM5_at; Start 30; Stop 54
acctactccttatgagggacactat

SEQ ID NO: 124051 - DNA, 25 bp, Artificial
  probe
  misc_feature (1)..(25): SEQ ID NO: 1524; WAN024CM5_at; Start 13; Stop 37
gataagattaagatattacctactc

SEQ ID NO: 124052 - DNA, 25 bp, Artificial
  probe
  misc_feature (1)..(25): SEQ ID NO: 1524; WAN024CM5_at; Start 26; Stop 50
tattacctactccttatgagggaca

SEQ ID NO: 124053 - DNA, 25 bp, Artificial
  probe
  misc_feature (1)..(25): SEQ ID NO: 1524; WAN024CM5_at; Start 40; Stop 64
tatgagggacactatcatttatata

SEQ ID NO: 124054 - DNA, 25 bp, Artificial
  probe
  misc_feature (1)..(25): SEQ ID NO: 1524; WAN024CM5_at; Start 68; Stop 92
catccagtaagaaacatgtattagt

SEQ ID NO: 124055 - DNA, 25 bp, Artificial
  probe
  misc_feature (1)..(25): SEQ ID NO: 1524; WAN024CM5_at; Start 80; Stop 104
aacatgtattagttgggaaacagga

SEQ ID NO: 124056 - DNA, 25 bp, Artificial
  probe
  misc_feature (1)..(25): SEQ ID NO: 1524; WAN024CM5_at; Start 67; Stop 91
ccatccagtaagaaacatgtattag

SEQ ID NO: 124057 - DNA, 25 bp, Artificial
  probe
  misc_feature (1)..(25): SEQ ID NO: 1524; WAN024CM5_at; Start 50; Stop 74
actatcatttatatataccatccag

SEQ ID NO: 124058 - DNA, 25 bp, Artificial
  probe
  misc_feature (1)..(25): SEQ ID NO: 1524; WAN024CM5_at; Start 32; Stop 56
ctactccttatgagggacactatca

SEQ ID NO: 124059 - DNA, 25 bp, Artificial
  probe
  misc_feature (1)..(25): SEQ ID NO: 1524; WAN024CM5_at; Start 55; Stop 79
catttatatataccatccagtaaga

SEQ ID NO: 124060 - DNA, 25 bp, Artificial
  probe
  misc_feature (1)..(25): SEQ ID NO: 1524; WAN024CM5_at; Start 22; Stop 46
aagatattacctactccttatgagg

SEQ ID NO: 124061 - DNA, 25 bp, Artificial
  probe
  misc_feature (1)..(25): SEQ ID NO: 1524; WAN024CM5_at; Start 27; Stop 51
attacctactccttatgagggacac

SEQ ID NO: 124062 - DNA, 25 bp, Artificial
  probe
  misc_feature (1)..(25): SEQ ID NO: 1524; WAN024CM5_at; Start 2; Stop 26
tgagaattgttgataagattaagat

SEQ ID NO: 124063 - DNA, 25 bp, Artificial
  probe
  misc_feature (1)..(25): SEQ ID NO: 1524; WAN024CM5_at; Start 72; Stop 96
cagtaagaaacatgtattagttggg

SEQ ID NO: 124064 - DNA, 25 bp, Artificial
  probe
  misc_feature (1)..(25): SEQ ID NO: 1524; WAN024CM5_at; Start 61; Stop 85
tatataccatccagtaagaaacatg

SEQ ID NO: 124065 - DNA, 25 bp, Artificial
  probe
  misc_feature (1)..(25): SEQ ID NO: 1524; WAN024CM5_at; Start 65; Stop 89
taccatccagtaagaaacatgtatt

SEQ ID NO: 124066 - DNA, 25 bp, Artificial
  probe
  misc_feature (1)..(25): SEQ ID NO: 1524; WAN024CM5_at; Start 31; Stop 55
cctactccttatgagggacactatc

SEQ ID NO: 124067 - DNA, 25 bp, Artificial
  probe
  misc_feature (1)..(25): SEQ ID NO: 1524; WAN024CM5_at; Start 82; Stop 106
catgtattagttgggaaacaggaaa

SEQ ID NO: 124068 - DNA, 25 bp, Artificial
  probe
  misc_feature (1)..(25): SEQ ID NO: 1524; WAN024CM5_at; Start 35; Stop 59
ctccttatgagggacactatcattt

SEQ ID NO: 124069 - DNA, 25 bp, Artificial
  probe
  misc_feature (1)..(25): SEQ ID NO: 1524; WAN024CM5_at; Start 23; Stop 47
agatattacctactccttatgaggg

SEQ ID NO: 124070 - DNA, 25 bp, Artificial
  probe
  misc_feature (1)..(25): SEQ ID NO: 1524; WAN024CM5_at; Start 15; Stop 39
taagattaagatattacctactcct

SEQ ID NO: 124071 - DNA, 25 bp, Artificial
  probe
  misc_feature (1)..(25): SEQ ID NO: 1524; WAN024CM5_at; Start 63; Stop 87
tataccatccagtaagaaacatgta

SEQ ID NO: 124072 - DNA, 25 bp, Artificial
  probe
  misc_feature (1)..(25): SEQ ID NO: 1524; WAN024CM5_at; Start 59; Stop 83
tatatataccatccagtaagaaaca

SEQ ID NO: 124073 - DNA, 25 bp, Artificial
  probe
  misc_feature (1)..(25): SEQ ID NO: 1524; WAN024CM5_at; Start 43; Stop 67
gagggacactatcatttatatatac

SEQ ID NO: 124074 - DNA, 25 bp, Artificial
  probe
  misc_feature (1)..(25): SEQ ID NO: 1524; WAN024CM5_at; Start 70; Stop 94
tccagtaagaaacatgtattagttg

SEQ ID NO: 124075 - DNA, 25 bp, Artificial
  probe
  misc_feature (1)..(25): SEQ ID NO: 7157; WAN024CM6_at; Start 91; Stop 115
ttgacaacaaataataaaaatgtta

SEQ ID NO: 124076 - DNA, 25 bp, Artificial
  probe
  misc_feature (1)..(25): SEQ ID NO: 7157; WAN024CM6_at; Start 88; Stop 112
tccttgacaacaaataataaaaatg

SEQ ID NO: 124077 - DNA, 25 bp, Artificial
  probe
  misc_feature (1)..(25): SEQ ID NO: 7157; WAN024CM6_at; Start 47; Stop 71
atagaggtaatatagtaaaatatct

SEQ ID NO: 124078 - DNA, 25 bp, Artificial
  probe
  misc_feature (1)..(25): SEQ ID NO: 7157; WAN024CM6_at; Start 50; Stop 74
gaggtaatatagtaaaatatctaaa

SEQ ID NO: 124079 - DNA, 25 bp, Artificial
  probe
  misc_feature (1)..(25): SEQ ID NO: 7157; WAN024CM6_at; Start 89; Stop 113
ccttgacaacaaataataaaaatgt

SEQ ID NO: 124080 - DNA, 25 bp, Artificial
  probe
  misc_feature (1)..(25): SEQ ID NO: 7157; WAN024CM6_at; Start 42; Stop 66
tattcatagaggtaatatagtaaaa

SEQ ID NO: 124081 - DNA, 25 bp, Artificial
  probe
  misc_feature (1)..(25): SEQ ID NO: 7157; WAN024CM6_at; Start 95; Stop 119
caacaaataataaaaatgttattct

SEQ ID NO: 124082 - DNA, 25 bp, Artificial
  probe
  misc_feature (1)..(25): SEQ ID NO: 7157; WAN024CM6_at; Start 33; Stop 57
atataatattattcatagaggtaat

SEQ ID NO: 124083 - DNA, 25 bp, Artificial
  probe
  misc_feature (1)..(25): SEQ ID NO: 7157; WAN024CM6_at; Start 44; Stop 68
ttcatagaggtaatatagtaaaata

SEQ ID NO: 124084 - DNA, 25 bp, Artificial
  probe
  misc_feature (1)..(25): SEQ ID NO: 7157; WAN024CM6_at; Start 90; Stop 114
cttgacaacaaataataaaaatgtt

SEQ ID NO: 124085 - DNA, 25 bp, Artificial
  probe
  misc_feature (1)..(25): SEQ ID NO: 7157; WAN024CM6_at; Start 92; Stop 116
tgacaacaaataataaaaatgttat

SEQ ID NO: 124086 - DNA, 25 bp, Artificial
  probe
  misc_feature (1)..(25): SEQ ID NO: 7157; WAN024CM6_at; Start 46; Stop 70
catagaggtaatatagtaaaatatc

SEQ ID NO: 124087 - DNA, 25 bp, Artificial
  probe
  misc_feature (1)..(25): SEQ ID NO: 7157; WAN024CM6_at; Start 45; Stop 69
tcatagaggtaatatagtaaaatat

SEQ ID NO: 124088 - DNA, 25 bp, Artificial
  probe
  misc_feature (1)..(25): SEQ ID NO: 7157; WAN024CM6_at; Start 101; Stop 125
ataataaaaatgttattcttatcac

SEQ ID NO: 124089 - DNA, 25 bp, Artificial
  probe
  misc_feature (1)..(25): SEQ ID NO: 7157; WAN024CM6_at; Start 41; Stop 65
ttattcatagaggtaatatagtaaa

SEQ ID NO: 124090 - DNA, 25 bp, Artificial
  probe
  misc_feature (1)..(25): SEQ ID NO: 7157; WAN024CM6_at; Start 30; Stop 54
actatataatattattcatagaggt

SEQ ID NO: 124091 - DNA, 25 bp, Artificial
  probe
  misc_feature (1)..(25): SEQ ID NO: 7157; WAN024CM6_at; Start 31; Stop 55
ctatataatattattcatagaggta

SEQ ID NO: 124092 - DNA, 25 bp, Artificial
  probe
  misc_feature (1)..(25): SEQ ID NO: 7157; WAN024CM6_at; Start 43; Stop 67
attcatagaggtaatatagtaaaat

SEQ ID NO: 124093 - DNA, 25 bp, Artificial
  probe
  misc_feature (1)..(25): SEQ ID NO: 7157; WAN024CM6_at; Start 49; Stop 73
agaggtaatatagtaaaatatctaa

SEQ ID NO: 124094 - DNA, 25 bp, Artificial
  probe
  misc_feature (1)..(25): SEQ ID NO: 7157; WAN024CM6_at; Start 39; Stop 63
tattattcatagaggtaatatagta

SEQ ID NO: 124095 - DNA, 25 bp, Artificial
  probe
  misc_feature (1)..(25): SEQ ID NO: 7157; WAN024CM6_at; Start 34; Stop 58
tataatattattcatagaggtaata

SEQ ID NO: 124096 - DNA, 25 bp, Artificial
  probe
  misc_feature (1)..(25): SEQ ID NO: 7157; WAN024CM6_at; Start 32; Stop 56
tatataatattattcatagaggtaa

SEQ ID NO: 124097 - DNA, 25 bp, Artificial
  probe
  misc_feature (1)..(25): SEQ ID NO: 7157; WAN024CM6_at; Start 79; Stop 103
tcgattttttccttgacaacaaata

SEQ ID NO: 124098 - DNA, 25 bp, Artificial
  probe
  misc_feature (1)..(25): SEQ ID NO: 7157; WAN024CM6_at; Start 102; Stop 126
taataaaaatgttattcttatcaca

SEQ ID NO: 124099 - DNA, 25 bp, Artificial
  probe
  misc_feature (1)..(25): SEQ ID NO: 7157; WAN024CM6_at; Start 40; Stop 64
attattcatagaggtaatatagtaa

SEQ ID NO: 124100 - DNA, 25 bp, Artificial
  probe
  misc_feature (1)..(25): SEQ ID NO: 7157; WAN024CM6_at; Start 48; Stop 72
tagaggtaatatagtaaaatatcta

SEQ ID NO: 124101 - DNA, 25 bp, Artificial
  probe
  misc_feature (1)..(25): SEQ ID NO: 4891; WAN024CM7_at; Start 41; Stop 65
tatttgttgtcaaggaaaaaatcga

SEQ ID NO: 124102 - DNA, 25 bp, Artificial
  probe
  misc_feature (1)..(25): SEQ ID NO: 4891; WAN024CM7_at; Start 71; Stop 95
ttagatattttactatattacctct

SEQ ID NO: 124103 - DNA, 25 bp, Artificial
  probe
  misc_feature (1)..(25): SEQ ID NO: 4891; WAN024CM7_at; Start 70; Stop 94
tttagatattttactatattacctc

SEQ ID NO: 124104 - DNA, 25 bp, Artificial
  probe
  misc_feature (1)..(25): SEQ ID NO: 4314; WAN024CM8_at; Start 12; Stop 36
tgaacagaccaacgagttcatagtg

SEQ ID NO: 124105 - DNA, 25 bp, Artificial
  probe
  misc_feature (1)..(25): SEQ ID NO: 4314; WAN024CM8_at; Start 34; Stop 58
gtggtgtatgccaatgactttgata

SEQ ID NO: 124106 - DNA, 25 bp, Artificial
  probe
  misc_feature (1)..(25): SEQ ID NO: 4314; WAN024CM8_at; Start 22; Stop 46
aacgagttcatagtggtgtatgcca

SEQ ID NO: 124107 - DNA, 25 bp, Artificial
  probe
  misc_feature (1)..(25): SEQ ID NO: 4314; WAN024CM8_at; Start 25; Stop 49
gagttcatagtggtgtatgccaatg

SEQ ID NO: 124108 - DNA, 25 bp, Artificial
  probe
  misc_feature (1)..(25): SEQ ID NO: 4314; WAN024CM8_at; Start 31; Stop 55
atagtggtgtatgccaatgactttg

SEQ ID NO: 124109 - DNA, 25 bp, Artificial
  probe
  misc_feature (1)..(25): SEQ ID NO: 4314; WAN024CM8_at; Start 5; Stop 29
tgggatttgaacagaccaacgagtt

SEQ ID NO: 124110 - DNA, 25 bp, Artificial
  probe
  misc_feature (1)..(25): SEQ ID NO: 4314; WAN024CM8_at; Start 42; Stop 66
tgccaatgactttgataagtctacg

SEQ ID NO: 124111 - DNA, 25 bp, Artificial
  probe
  misc_feature (1)..(25): SEQ ID NO: 4314; WAN024CM8_at; Start 46; Stop 70
aatgactttgataagtctacgcgtc

SEQ ID NO: 124112 - DNA, 25 bp, Artificial
  probe
  misc_feature (1)..(25): SEQ ID NO: 4314; WAN024CM8_at; Start 36; Stop 60
ggtgtatgccaatgactttgataag

SEQ ID NO: 124113 - DNA, 25 bp, Artificial
  probe
  misc_feature (1)..(25): SEQ ID NO: 4314; WAN024CM8_at; Start 30; Stop 54
catagtggtgtatgccaatgacttt

SEQ ID NO: 124114 - DNA, 25 bp, Artificial
  probe
  misc_feature (1)..(25): SEQ ID NO: 4314; WAN024CM8_at; Start 21; Stop 45
caacgagttcatagtggtgtatgcc

SEQ ID NO: 124115 - DNA, 25 bp, Artificial
  probe
  misc_feature (1)..(25): SEQ ID NO: 4314; WAN024CM8_at; Start 16; Stop 40
cagaccaacgagttcatagtggtgt

SEQ ID NO: 124116 - DNA, 25 bp, Artificial
  probe
  misc_feature (1)..(25): SEQ ID NO: 4314; WAN024CM8_at; Start 27; Stop 51
gttcatagtggtgtatgccaatgac

SEQ ID NO: 124117 - DNA, 25 bp, Artificial
  probe
  misc_feature (1)..(25): SEQ ID NO: 4314; WAN024CM8_at; Start 1; Stop 25
gtgttgggatttgaacagaccaacg

SEQ ID NO: 124118 - DNA, 25 bp, Artificial
  probe
  misc_feature (1)..(25): SEQ ID NO: 4314; WAN024CM8_at; Start 23; Stop 47
acgagttcatagtggtgtatgccaa

SEQ ID NO: 124119 - DNA, 25 bp, Artificial
  probe
  misc_feature (1)..(25): SEQ ID NO: 4314; WAN024CM8_at; Start 48; Stop 72
tgactttgataagtctacgcgtcag

SEQ ID NO: 124120 - DNA, 25 bp, Artificial
  probe
  misc_feature (1)..(25): SEQ ID NO: 4314; WAN024CM8_at; Start 29; Stop 53
tcatagtggtgtatgccaatgactt

SEQ ID NO: 124121 - DNA, 25 bp, Artificial
  probe
  misc_feature (1)..(25): SEQ ID NO: 4314; WAN024CM8_at; Start 8; Stop 32
gatttgaacagaccaacgagttcat

SEQ ID NO: 124122 - DNA, 25 bp, Artificial
  probe
  misc_feature (1)..(25): SEQ ID NO: 4314; WAN024CM8_at; Start 53; Stop 77
ttgataagtctacgcgtcagactta

SEQ ID NO: 124123 - DNA, 25 bp, Artificial
  probe
  misc_feature (1)..(25): SEQ ID NO: 4314; WAN024CM8_at; Start 44; Stop 68
ccaatgactttgataagtctacgcg

SEQ ID NO: 124124 - DNA, 25 bp, Artificial
  probe
  misc_feature (1)..(25): SEQ ID NO: 4314; WAN024CM8_at; Start 10; Stop 34
tttgaacagaccaacgagttcatag

SEQ ID NO: 124125 - DNA, 25 bp, Artificial
  probe
  misc_feature (1)..(25): SEQ ID NO: 4314; WAN024CM8_at; Start 20; Stop 44
ccaacgagttcatagtggtgtatgc

SEQ ID NO: 124126 - DNA, 25 bp, Artificial
  probe
  misc_feature (1)..(25): SEQ ID NO: 4314; WAN024CM8_at; Start 24; Stop 48
cgagttcatagtggtgtatgccaat

SEQ ID NO: 124127 - DNA, 25 bp, Artificial
  probe
  misc_feature (1)..(25): SEQ ID NO: 4314; WAN024CM8_at; Start 50; Stop 74
actttgataagtctacgcgtcagac

SEQ ID NO: 124128 - DNA, 25 bp, Artificial
  probe
  misc_feature (1)..(25): SEQ ID NO: 4314; WAN024CM8_at; Start 4; Stop 28
ttgggatttgaacagaccaacgagt

SEQ ID NO: 124129 - DNA, 25 bp, Artificial
  probe
  misc_feature (1)..(25): SEQ ID NO: 4314; WAN024CM8_at; Start 38; Stop 62
tgtatgccaatgactttgataagtc

SEQ ID NO: 124130 - DNA, 25 bp, Artificial
  probe
  misc_feature (1)..(25): SEQ ID NO: 4314; WAN024CM8_at; Start 18; Stop 42
gaccaacgagttcatagtggtgtat

SEQ ID NO: 124131 - DNA, 25 bp, Artificial
  probe
  misc_feature (1)..(25): SEQ ID NO: 4314; WAN024CM8_at; Start 6; Stop 30
gggatttgaacagaccaacgagttc

SEQ ID NO: 124132 - DNA, 25 bp, Artificial
  probe
  misc_feature (1)..(25): SEQ ID NO: 4314; WAN024CM8_at; Start 2; Stop 26
tgttgggatttgaacagaccaacga

SEQ ID NO: 124133 - DNA, 25 bp, Artificial
  probe
  misc_feature (1)..(25): SEQ ID NO: 4314; WAN024CM8_at; Start 49; Stop 73
gactttgataagtctacgcgtcaga

SEQ ID NO: 124134 - DNA, 25 bp, Artificial
  probe
  misc_feature (1)..(25): SEQ ID NO: 4314; WAN024CM8_at; Start 7; Stop 31
ggatttgaacagaccaacgagttca

SEQ ID NO: 124135 - DNA, 25 bp, Artificial
  probe
  misc_feature (1)..(25): SEQ ID NO: 4314; WAN024CM8_at; Start 13; Stop 37
gaacagaccaacgagttcatagtgg

SEQ ID NO: 124136 - DNA, 25 bp, Artificial
  probe
  misc_feature (1)..(25): SEQ ID NO: 4314; WAN024CM8_at; Start 51; Stop 75
ctttgataagtctacgcgtcagact

SEQ ID NO: 124137 - DNA, 25 bp, Artificial
  probe
  misc_feature (1)..(25): SEQ ID NO: 4314; WAN024CM8_at; Start 14; Stop 38
aacagaccaacgagttcatagtggt

SEQ ID NO: 124138 - DNA, 25 bp, Artificial
  probe
  misc_feature (1)..(25): SEQ ID NO: 5544; WAN024CM9_at; Start 63; Stop 87
gacacctcaggattatttaacttat

SEQ ID NO: 124139 - DNA, 25 bp, Artificial
  probe
  misc_feature (1)..(25): SEQ ID NO: 5544; WAN024CM9_at; Start 50; Stop 74
catatctattacagacacctcagga

SEQ ID NO: 124140 - DNA, 25 bp, Artificial
  probe
  misc_feature (1)..(25): SEQ ID NO: 5544; WAN024CM9_at; Start 49; Stop 73
ccatatctattacagacacctcagg

SEQ ID NO: 124141 - DNA, 25 bp, Artificial
  probe
  misc_feature (1)..(25): SEQ ID NO: 5544; WAN024CM9_at; Start 1; Stop 25
ttggctggagaaccatataaagctt

SEQ ID NO: 124142 - DNA, 25 bp, Artificial
  probe
  misc_feature (1)..(25): SEQ ID NO: 5544; WAN024CM9_at; Start 65; Stop 89
cacctcaggattatttaacttataa

SEQ ID NO: 124143 - DNA, 25 bp, Artificial
  probe
  misc_feature (1)..(25): SEQ ID NO: 5544; WAN024CM9_at; Start 5; Stop 29
ctggagaaccatataaagcttgtaa

SEQ ID NO: 124144 - DNA, 25 bp, Artificial
  probe
  misc_feature (1)..(25): SEQ ID NO: 5544; WAN024CM9_at; Start 54; Stop 78
tctattacagacacctcaggattat

SEQ ID NO: 124145 - DNA, 25 bp, Artificial
  probe
  misc_feature (1)..(25): SEQ ID NO: 5544; WAN024CM9_at; Start 55; Stop 79
ctattacagacacctcaggattatt

SEQ ID NO: 124146 - DNA, 25 bp, Artificial
  probe
  misc_feature (1)..(25): SEQ ID NO: 5544; WAN024CM9_at; Start 2; Stop 26
tggctggagaaccatataaagcttg

SEQ ID NO: 124147 - DNA, 25 bp, Artificial
  probe
  misc_feature (1)..(25): SEQ ID NO: 5544; WAN024CM9_at; Start 7; Stop 31
ggagaaccatataaagcttgtaaaa

SEQ ID NO: 124148 - DNA, 25 bp, Artificial
  probe
  misc_feature (1)..(25): SEQ ID NO: 5544; WAN024CM9_at; Start 8; Stop 32
gagaaccatataaagcttgtaaaat

SEQ ID NO: 124149 - DNA, 25 bp, Artificial
  probe
  misc_feature (1)..(25): SEQ ID NO: 5544; WAN024CM9_at; Start 56; Stop 80
tattacagacacctcaggattattt

SEQ ID NO: 124150 - DNA, 25 bp, Artificial
  probe
  misc_feature (1)..(25): SEQ ID NO: 5544; WAN024CM9_at; Start 3; Stop 27
ggctggagaaccatataaagcttgt

SEQ ID NO: 124151 - DNA, 25 bp, Artificial
  probe
  misc_feature (1)..(25): SEQ ID NO: 5544; WAN024CM9_at; Start 33; Stop 57
tgaagttttatttactccatatcta

SEQ ID NO: 124152 - DNA, 25 bp, Artificial
  probe
  misc_feature (1)..(25): SEQ ID NO: 5544; WAN024CM9_at; Start 41; Stop 65
tatttactccatatctattacagac

SEQ ID NO: 124153 - DNA, 25 bp, Artificial
  probe
  misc_feature (1)..(25): SEQ ID NO: 5544; WAN024CM9_at; Start 62; Stop 86
agacacctcaggattatttaactta

SEQ ID NO: 124154 - DNA, 25 bp, Artificial
  probe
  misc_feature (1)..(25): SEQ ID NO: 5544; WAN024CM9_at; Start 53; Stop 77
atctattacagacacctcaggatta

SEQ ID NO: 124155 - DNA, 25 bp, Artificial
  probe
  misc_feature (1)..(25): SEQ ID NO: 5544; WAN024CM9_at; Start 10; Stop 34
gaaccatataaagcttgtaaaattg

SEQ ID NO: 124156 - DNA, 25 bp, Artificial
  probe
  misc_feature (1)..(25): SEQ ID NO: 5544; WAN024CM9_at; Start 60; Stop 84
acagacacctcaggattatttaact

SEQ ID NO: 124157 - DNA, 25 bp, Artificial
  probe
  misc_feature (1)..(25): SEQ ID NO: 5544; WAN024CM9_at; Start 4; Stop 28
gctggagaaccatataaagcttgta

SEQ ID NO: 124158 - DNA, 25 bp, Artificial
  probe
  misc_feature (1)..(25): SEQ ID NO: 5544; WAN024CM9_at; Start 13; Stop 37
ccatataaagcttgtaaaattgaag

SEQ ID NO: 124159 - DNA, 25 bp, Artificial
  probe
  misc_feature (1)..(25): SEQ ID NO: 5544; WAN024CM9_at; Start 51; Stop 75
atatctattacagacacctcaggat

SEQ ID NO: 124160 - DNA, 25 bp, Artificial
  probe
  misc_feature (1)..(25): SEQ ID NO: 5544; WAN024CM9_at; Start 11; Stop 35
aaccatataaagcttgtaaaattga

SEQ ID NO: 124161 - DNA, 25 bp, Artificial
  probe
  misc_feature (1)..(25): SEQ ID NO: 5544; WAN024CM9_at; Start 45; Stop 69
tactccatatctattacagacacct

SEQ ID NO: 124162 - DNA, 25 bp, Artificial
  probe
  misc_feature (1)..(25): SEQ ID NO: 5544; WAN024CM9_at; Start 59; Stop 83
tacagacacctcaggattatttaac

SEQ ID NO: 124163 - DNA, 25 bp, Artificial
  probe
  misc_feature (1)..(25): SEQ ID NO: 5544; WAN024CM9_at; Start 57; Stop 81
attacagacacctcaggattattta

SEQ ID NO: 124164 - DNA, 25 bp, Artificial
  probe
  misc_feature (1)..(25): SEQ ID NO: 5544; WAN024CM9_at; Start 61; Stop 85
cagacacctcaggattatttaactt

SEQ ID NO: 124165 - DNA, 25 bp, Artificial
  probe
  misc_feature (1)..(25): SEQ ID NO: 5544; WAN024CM9_at; Start 48; Stop 72
tccatatctattacagacacctcag

SEQ ID NO: 124166 - DNA, 25 bp, Artificial
  probe
  misc_feature (1)..(25): SEQ ID NO: 5544; WAN024CM9_at; Start 14; Stop 38
catataaagcttgtaaaattgaagt

SEQ ID NO: 124167 - DNA, 25 bp, Artificial
  probe
  misc_feature (1)..(25): SEQ ID NO: 5544; WAN024CM9_at; Start 67; Stop 91
cctcaggattatttaacttataagt

SEQ ID NO: 124168 - DNA, 25 bp, Artificial
  probe
  misc_feature (1)..(25): SEQ ID NO: 5544; WAN024CM9_at; Start 52; Stop 76
tatctattacagacacctcaggatt

SEQ ID NO: 124169 - DNA, 25 bp, Artificial
  probe
  misc_feature (1)..(25): SEQ ID NO: 5544; WAN024CM9_at; Start 43; Stop 67
tttactccatatctattacagacac

SEQ ID NO: 124170 - DNA, 25 bp, Artificial
  probe
  misc_feature (1)..(25): SEQ ID NO: 5544; WAN024CM9_at; Start 6; Stop 30
tggagaaccatataaagcttgtaaa

SEQ ID NO: 124171 - DNA, 25 bp, Artificial
  probe
  misc_feature (1)..(25): SEQ ID NO: 5544; WAN024CM9_at; Start 46; Stop 70
actccatatctattacagacacctc

SEQ ID NO: 124172 - DNA, 25 bp, Artificial
  probe
  misc_feature (1)..(25): SEQ ID NO: 2582; WAN024CMA_at; Start 29; Stop 53
ttaacggtgcaggtggcactacaag

SEQ ID NO: 124173 - DNA, 25 bp, Artificial
  probe
  misc_feature (1)..(25): SEQ ID NO: 2582; WAN024CMA_at; Start 65; Stop 89
aatcaggcatagatgttcaagttgc

SEQ ID NO: 124174 - DNA, 25 bp, Artificial
  probe
  misc_feature (1)..(25): SEQ ID NO: 2582; WAN024CMA_at; Start 123; Stop 147
taagttaaataatcctgaggtgtct

SEQ ID NO: 124175 - DNA, 25 bp, Artificial
  probe
  misc_feature (1)..(25): SEQ ID NO: 2582; WAN024CMA_at; Start 68; Stop 92
caggcatagatgttcaagttgctgt

SEQ ID NO: 124176 - DNA, 25 bp, Artificial
  probe
  misc_feature (1)..(25): SEQ ID NO: 2582; WAN024CMA_at; Start 131; Stop 155
ataatcctgaggtgtctgtaataga

SEQ ID NO: 124177 - DNA, 25 bp, Artificial
  probe
  misc_feature (1)..(25): SEQ ID NO: 2582; WAN024CMA_at; Start 88; Stop 112
gctgttgaaattgattccgtagctg

SEQ ID NO: 124178 - DNA, 25 bp, Artificial
  probe
  misc_feature (1)..(25): SEQ ID NO: 2582; WAN024CMA_at; Start 100; Stop 124
gattccgtagctgttaaaacttata

SEQ ID NO: 124179 - DNA, 25 bp, Artificial
  probe
  misc_feature (1)..(25): SEQ ID NO: 2582; WAN024CMA_at; Start 139; Stop 163
gaggtgtctgtaatagatatggagc

SEQ ID NO: 124180 - DNA, 25 bp, Artificial
  probe
  misc_feature (1)..(25): SEQ ID NO: 2582; WAN024CMA_at; Start 21; Stop 45
tgatttatttaacggtgcaggtggc

SEQ ID NO: 124181 - DNA, 25 bp, Artificial
  probe
  misc_feature (1)..(25): SEQ ID NO: 2582; WAN024CMA_at; Start 4; Stop 28
gggaaaattgttgctattgatttat

SEQ ID NO: 124182 - DNA, 25 bp, Artificial
  probe
  misc_feature (1)..(25): SEQ ID NO: 2582; WAN024CMA_at; Start 143; Stop 167
tgtctgtaatagatatggagctaac

SEQ ID NO: 124183 - DNA, 25 bp, Artificial
  probe
  misc_feature (1)..(25): SEQ ID NO: 2582; WAN024CMA_at; Start 38; Stop 62
caggtggcactacaagtggccttaa

SEQ ID NO: 124184 - DNA, 25 bp, Artificial
  probe
  misc_feature (1)..(25): SEQ ID NO: 2582; WAN024CMA_at; Start 56; Stop 80
gccttaaaaaatcaggcatagatgt

SEQ ID NO: 124185 - DNA, 25 bp, Artificial
  probe
  misc_feature (1)..(25): SEQ ID NO: 2582; WAN024CMA_at; Start 53; Stop 77
gtggccttaaaaaatcaggcataga

SEQ ID NO: 124186 - DNA, 25 bp, Artificial
  probe
  misc_feature (1)..(25): SEQ ID NO: 2582; WAN024CMA_at; Start 82; Stop 106
caagttgctgttgaaattgattccg

SEQ ID NO: 124187 - DNA, 25 bp, Artificial
  probe
  misc_feature (1)..(25): SEQ ID NO: 2582; WAN024CMA_at; Start 118; Stop 142
acttataagttaaataatcctgagg

SEQ ID NO: 124188 - DNA, 25 bp, Artificial
  probe
  misc_feature (1)..(25): SEQ ID NO: 2582; WAN024CMA_at; Start 147; Stop 171
tgtaatagatatggagctaactaat

SEQ ID NO: 124189 - DNA, 25 bp, Artificial
  probe
  misc_feature (1)..(25): SEQ ID NO: 2582; WAN024CMA_at; Start 145; Stop 169
tctgtaatagatatggagctaacta

SEQ ID NO: 124190 - DNA, 25 bp, Artificial
  probe
  misc_feature (1)..(25): SEQ ID NO: 2582; WAN024CMA_at; Start 16; Stop 40
gctattgatttatttaacggtgcag

SEQ ID NO: 124191 - DNA, 25 bp, Artificial
  probe
  misc_feature (1)..(25): SEQ ID NO: 2582; WAN024CMA_at; Start 61; Stop 85
aaaaaatcaggcatagatgttcaag

SEQ ID NO: 124192 - DNA, 25 bp, Artificial
  probe
  misc_feature (1)..(25): SEQ ID NO: 2582; WAN024CMA_at; Start 26; Stop 50
tatttaacggtgcaggtggcactac

SEQ ID NO: 124193 - DNA, 25 bp, Artificial
  probe
  misc_feature (1)..(25): SEQ ID NO: 2582; WAN024CMA_at; Start 96; Stop 120
aattgattccgtagctgttaaaact

SEQ ID NO: 124194 - DNA, 25 bp, Artificial
  probe
  misc_feature (1)..(25): SEQ ID NO: 2582; WAN024CMA_at; Start 42; Stop 66
tggcactacaagtggccttaaaaaa

SEQ ID NO: 124195 - DNA, 25 bp, Artificial
  probe
  misc_feature (1)..(25): SEQ ID NO: 2582; WAN024CMA_at; Start 135; Stop 159
tcctgaggtgtctgtaatagatatg

SEQ ID NO: 124196 - DNA, 25 bp, Artificial
  probe
  misc_feature (1)..(25): SEQ ID NO: 2582; WAN024CMA_at; Start 50; Stop 74
caagtggccttaaaaaatcaggcat

SEQ ID NO: 124197 - DNA, 25 bp, Artificial
  probe
  misc_feature (1)..(25): SEQ ID NO: 2582; WAN024CMA_at; Start 85; Stop 109
gttgctgttgaaattgattccgtag

SEQ ID NO: 124198 - DNA, 25 bp, Artificial
  probe
  misc_feature (1)..(25): SEQ ID NO: 2582; WAN024CMA_at; Start 71; Stop 95
gcatagatgttcaagttgctgttga

SEQ ID NO: 124199 - DNA, 25 bp, Artificial
  probe
  misc_feature (1)..(25): SEQ ID NO: 2582; WAN024CMA_at; Start 47; Stop 71
ctacaagtggccttaaaaaatcagg

SEQ ID NO: 124200 - DNA, 25 bp, Artificial
  probe
  misc_feature (1)..(25): SEQ ID NO: 2582; WAN024CMA_at; Start 126; Stop 150
gttaaataatcctgaggtgtctgta

SEQ ID NO: 124201 - DNA, 25 bp, Artificial
  probe
  misc_feature (1)..(25): SEQ ID NO: 2582; WAN024CMA_at; Start 94; Stop 118
gaaattgattccgtagctgttaaaa

SEQ ID NO: 124202 - DNA, 25 bp, Artificial
  probe
  misc_feature (1)..(25): SEQ ID NO: 2582; WAN024CMA_at; Start 23; Stop 47
atttatttaacggtgcaggtggcac

SEQ ID NO: 124203 - DNA, 25 bp, Artificial
  probe
  misc_feature (1)..(25): SEQ ID NO: 2582; WAN024CMA_at; Start 31; Stop 55
aacggtgcaggtggcactacaagtg

SEQ ID NO: 124204 - DNA, 25 bp, Artificial
  probe
  misc_feature (1)..(25): SEQ ID NO: 2582; WAN024CMA_at; Start 40; Stop 64
ggtggcactacaagtggccttaaaa

SEQ ID NO: 124205 - DNA, 25 bp, Artificial
  probe
  misc_feature (1)..(25): SEQ ID NO: 2582; WAN024CMA_at; Start 36; Stop 60
tgcaggtggcactacaagtggcctt

SEQ ID NO: 124206 - DNA, 25 bp, Artificial
  probe
  misc_feature (1)..(25): SEQ ID NO: 7509; WAN024CMB_at; Start 22; Stop 46
ctttgtgagattgttcctgggtcag

SEQ ID NO: 124207 - DNA, 25 bp, Artificial
  probe
  misc_feature (1)..(25): SEQ ID NO: 7509; WAN024CMB_at; Start 23; Stop 47
tttgtgagattgttcctgggtcagt

SEQ ID NO: 124208 - DNA, 25 bp, Artificial
  probe
  misc_feature (1)..(25): SEQ ID NO: 7509; WAN024CMB_at; Start 210; Stop 234
actcatgtttatcggcttgacaggc

SEQ ID NO: 124209 - DNA, 25 bp, Artificial
  probe
  misc_feature (1)..(25): SEQ ID NO: 7509; WAN024CMB_at; Start 324; Stop 348
gatcatcatgcttctactcatttgg

SEQ ID NO: 124210 - DNA, 25 bp, Artificial
  probe
  misc_feature (1)..(25): SEQ ID NO: 7509; WAN024CMB_at; Start 27; Stop 51
tgagattgttcctgggtcagttgcc

SEQ ID NO: 124211 - DNA, 25 bp, Artificial
  probe
  misc_feature (1)..(25): SEQ ID NO: 7509; WAN024CMB_at; Start 10; Stop 34
aagaatcatattctttgtgagattg

SEQ ID NO: 124212 - DNA, 25 bp, Artificial
  probe
  misc_feature (1)..(25): SEQ ID NO: 7509; WAN024CMB_at; Start 273; Stop 297
aggagaatcttatcaacaactaatc

SEQ ID NO: 124213 - DNA, 25 bp, Artificial
  probe
  misc_feature (1)..(25): SEQ ID NO: 7509; WAN024CMB_at; Start 297; Stop 321
cgcttatattggtgctattctttgc

SEQ ID NO: 124214 - DNA, 25 bp, Artificial
  probe
  misc_feature (1)..(25): SEQ ID NO: 7509; WAN024CMB_at; Start 37; Stop 61
cctgggtcagttgcctttgcttgtt

SEQ ID NO: 124215 - DNA, 25 bp, Artificial
  probe
  misc_feature (1)..(25): SEQ ID NO: 7509; WAN024CMB_at; Start 332; Stop 356
tgcttctactcatttggggtttgaa

SEQ ID NO: 124216 - DNA, 25 bp, Artificial
  probe
  misc_feature (1)..(25): SEQ ID NO: 7509; WAN024CMB_at; Start 213; Stop 237
catgtttatcggcttgacaggcttt

SEQ ID NO: 124217 - DNA, 25 bp, Artificial
  probe
  misc_feature (1)..(25): SEQ ID NO: 7509; WAN024CMB_at; Start 310; Stop 334
gctattctttgcttgatcatcatgc

SEQ ID NO: 124218 - DNA, 25 bp, Artificial
  probe
  misc_feature (1)..(25): SEQ ID NO: 7509; WAN024CMB_at; Start 140; Stop 164
tttatcttactagggaaatgagatt

SEQ ID NO: 124219 - DNA, 25 bp, Artificial
  probe
  misc_feature (1)..(25): SEQ ID NO: 7509; WAN024CMB_at; Start 301; Stop 325
tatattggtgctattctttgcttga

SEQ ID NO: 124220 - DNA, 25 bp, Artificial
  probe
  misc_feature (1)..(25): SEQ ID NO: 7509; WAN024CMB_at; Start 294; Stop 318
aatcgcttatattggtgctattctt

SEQ ID NO: 124221 - DNA, 25 bp, Artificial
  probe
  misc_feature (1)..(25): SEQ ID NO: 7509; WAN024CMB_at; Start 20; Stop 44
ttctttgtgagattgttcctgggtc

SEQ ID NO: 124222 - DNA, 25 bp, Artificial
  probe
  misc_feature (1)..(25): SEQ ID NO: 7509; WAN024CMB_at; Start 72; Stop 96
tatttctatttcgtcagttttccaa

SEQ ID NO: 124223 - DNA, 25 bp, Artificial
  probe
  misc_feature (1)..(25): SEQ ID NO: 7509; WAN024CMB_at; Start 142; Stop 166
tatcttactagggaaatgagattaa

SEQ ID NO: 124224 - DNA, 25 bp, Artificial
  probe
  misc_feature (1)..(25): SEQ ID NO: 7509; WAN024CMB_at; Start 18; Stop 42
tattctttgtgagattgttcctggg

SEQ ID NO: 124225 - DNA, 25 bp, Artificial
  probe
  misc_feature (1)..(25): SEQ ID NO: 7509; WAN024CMB_at; Start 268; Stop 292
acagcaggagaatcttatcaacaac

SEQ ID NO: 124226 - DNA, 25 bp, Artificial
  probe
  misc_feature (1)..(25): SEQ ID NO: 7509; WAN024CMB_at; Start 16; Stop 40
catattctttgtgagattgttcctg

SEQ ID NO: 124227 - DNA, 25 bp, Artificial
  probe
  misc_feature (1)..(25): SEQ ID NO: 7509; WAN024CMB_at; Start 315; Stop 339
tctttgcttgatcatcatgcttcta

SEQ ID NO: 124228 - DNA, 25 bp, Artificial
  probe
  misc_feature (1)..(25): SEQ ID NO: 7509; WAN024CMB_at; Start 271; Stop 295
gcaggagaatcttatcaacaactaa

SEQ ID NO: 124229 - DNA, 25 bp, Artificial
  probe
  misc_feature (1)..(25): SEQ ID NO: 7509; WAN024CMB_at; Start 21; Stop 45
tctttgtgagattgttcctgggtca

SEQ ID NO: 124230 - DNA, 25 bp, Artificial
  probe
  misc_feature (1)..(25): SEQ ID NO: 7509; WAN024CMB_at; Start 146; Stop 170
ttactagggaaatgagattaagaga

SEQ ID NO: 124231 - DNA, 25 bp, Artificial
  probe
  misc_feature (1)..(25): SEQ ID NO: 7509; WAN024CMB_at; Start 307; Stop 331
ggtgctattctttgcttgatcatca

SEQ ID NO: 124232 - DNA, 25 bp, Artificial
  probe
  misc_feature (1)..(25): SEQ ID NO: 7509; WAN024CMB_at; Start 30; Stop 54
gattgttcctgggtcagttgccttt

SEQ ID NO: 124233 - DNA, 25 bp, Artificial
  probe
  misc_feature (1)..(25): SEQ ID NO: 7509; WAN024CMB_at; Start 35; Stop 59
ttcctgggtcagttgcctttgcttg

SEQ ID NO: 124234 - DNA, 25 bp, Artificial
  probe
  misc_feature (1)..(25): SEQ ID NO: 7509; WAN024CMB_at; Start 303; Stop 327
tattggtgctattctttgcttgatc

SEQ ID NO: 124235 - DNA, 25 bp, Artificial
  probe
  misc_feature (1)..(25): SEQ ID NO: 7509; WAN024CMB_at; Start 77; Stop 101
ctatttcgtcagttttccaatttct

SEQ ID NO: 124236 - DNA, 25 bp, Artificial
  probe
  misc_feature (1)..(25): SEQ ID NO: 7509; WAN024CMB_at; Start 28; Stop 52
gagattgttcctgggtcagttgcct

SEQ ID NO: 124237 - DNA, 25 bp, Artificial
  probe
  misc_feature (1)..(25): SEQ ID NO: 7509; WAN024CMB_at; Start 269; Stop 293
cagcaggagaatcttatcaacaact

SEQ ID NO: 124238 - DNA, 25 bp, Artificial
  probe
  misc_feature (1)..(25): SEQ ID NO: 7509; WAN024CMB_at; Start 33; Stop 57
tgttcctgggtcagttgcctttgct

SEQ ID NO: 124239 - DNA, 25 bp, Artificial
  probe
  misc_feature (1)..(25): SEQ ID NO: 7509; WAN024CMB_at; Start 32; Stop 56
ttgttcctgggtcagttgcctttgc

SEQ ID NO: 124240 - DNA, 25 bp, Artificial
  probe
  misc_feature (1)..(25): SEQ ID NO: 7538; WAN024CMC_at; Start 93; Stop 117
caagaaaagttttcatttctttgct

SEQ ID NO: 124241 - DNA, 25 bp, Artificial
  probe
  misc_feature (1)..(25): SEQ ID NO: 7538; WAN024CMC_at; Start 73; Stop 97
gaagatgttccgttttttagcaaga

SEQ ID NO: 124242 - DNA, 25 bp, Artificial
  probe
  misc_feature (1)..(25): SEQ ID NO: 7538; WAN024CMC_at; Start 91; Stop 115
agcaagaaaagttttcatttctttg

SEQ ID NO: 124243 - DNA, 25 bp, Artificial
  probe
  misc_feature (1)..(25): SEQ ID NO: 7538; WAN024CMC_at; Start 92; Stop 116
gcaagaaaagttttcatttctttgc

SEQ ID NO: 124244 - DNA, 25 bp, Artificial
  probe
  misc_feature (1)..(25): SEQ ID NO: 7538; WAN024CMC_at; Start 106; Stop 130
catttctttgctcctttctttttag

SEQ ID NO: 124245 - DNA, 25 bp, Artificial
  probe
  misc_feature (1)..(25): SEQ ID NO: 7538; WAN024CMC_at; Start 105; Stop 129
tcatttctttgctcctttcttttta

SEQ ID NO: 124246 - DNA, 25 bp, Artificial
  probe
  misc_feature (1)..(25): SEQ ID NO: 7538; WAN024CMC_at; Start 28; Stop 52
tcattaacttctactttttataata

SEQ ID NO: 124247 - DNA, 25 bp, Artificial
  probe
  misc_feature (1)..(25): SEQ ID NO: 7538; WAN024CMC_at; Start 114; Stop 138
tgctcctttctttttagttaaagca

SEQ ID NO: 124248 - DNA, 25 bp, Artificial
  probe
  misc_feature (1)..(25): SEQ ID NO: 7538; WAN024CMC_at; Start 100; Stop 124
agttttcatttctttgctcctttct

SEQ ID NO: 124249 - DNA, 25 bp, Artificial
  probe
  misc_feature (1)..(25): SEQ ID NO: 711; WAN024CMD_at; Start 308; Stop 332
gagaatcctaccaacaaataatcgc

SEQ ID NO: 124250 - DNA, 25 bp, Artificial
  probe
  misc_feature (1)..(25): SEQ ID NO: 711; WAN024CMD_at; Start 175; Stop 199
tatctcactagggaaatgaggataa

SEQ ID NO: 124251 - DNA, 25 bp, Artificial
  probe
  misc_feature (1)..(25): SEQ ID NO: 711; WAN024CMD_at; Start 177; Stop 201
tctcactagggaaatgaggataaga

SEQ ID NO: 124252 - DNA, 25 bp, Artificial
  probe
  misc_feature (1)..(25): SEQ ID NO: 711; WAN024CMD_at; Start 21; Stop 45
aaaacggaacatcttccttgcgaga

SEQ ID NO: 124253 - DNA, 25 bp, Artificial
  probe
  misc_feature (1)..(25): SEQ ID NO: 711; WAN024CMD_at; Start 33; Stop 57
cttccttgcgagattgttcttaggt

SEQ ID NO: 124254 - DNA, 25 bp, Artificial
  probe
  misc_feature (1)..(25): SEQ ID NO: 711; WAN024CMD_at; Start 179; Stop 203
tcactagggaaatgaggataagaga

SEQ ID NO: 124255 - DNA, 25 bp, Artificial
  probe
  misc_feature (1)..(25): SEQ ID NO: 711; WAN024CMD_at; Start 49; Stop 73
ttcttaggtcagttgcccttgcttg

SEQ ID NO: 124256 - DNA, 25 bp, Artificial
  probe
  misc_feature (1)..(25): SEQ ID NO: 711; WAN024CMD_at; Start 51; Stop 75
cttaggtcagttgcccttgcttgtt

SEQ ID NO: 124257 - DNA, 25 bp, Artificial
  probe
  misc_feature (1)..(25): SEQ ID NO: 711; WAN024CMD_at; Start 338; Stop 362
ttggcgctgttctctgcttaatcat

SEQ ID NO: 124258 - DNA, 25 bp, Artificial
  probe
  misc_feature (1)..(25): SEQ ID NO: 711; WAN024CMD_at; Start 173; Stop 197
tttatctcactagggaaatgaggat

SEQ ID NO: 124259 - DNA, 25 bp, Artificial
  probe
  misc_feature (1)..(25): SEQ ID NO: 711; WAN024CMD_at; Start 307; Stop 331
ggagaatcctaccaacaaataatcg

SEQ ID NO: 124260 - DNA, 25 bp, Artificial
  probe
  misc_feature (1)..(25): SEQ ID NO: 711; WAN024CMD_at; Start 341; Stop 365
gcgctgttctctgcttaatcatcat

SEQ ID NO: 124261 - DNA, 25 bp, Artificial
  probe
  misc_feature (1)..(25): SEQ ID NO: 711; WAN024CMD_at; Start 334; Stop 358
tatattggcgctgttctctgcttaa

SEQ ID NO: 124262 - DNA, 25 bp, Artificial
  probe
  misc_feature (1)..(25): SEQ ID NO: 711; WAN024CMD_at; Start 36; Stop 60
ccttgcgagattgttcttaggtcag

SEQ ID NO: 124263 - DNA, 25 bp, Artificial
  probe
  misc_feature (1)..(25): SEQ ID NO: 711; WAN024CMD_at; Start 346; Stop 370
gttctctgcttaatcatcatgcttc

SEQ ID NO: 124264 - DNA, 25 bp, Artificial
  probe
  misc_feature (1)..(25): SEQ ID NO: 711; WAN024CMD_at; Start 356; Stop 380
taatcatcatgcttctgctcatgtg

SEQ ID NO: 124265 - DNA, 25 bp, Artificial
  probe
  misc_feature (1)..(25): SEQ ID NO: 711; WAN024CMD_at; Start 327; Stop 351
aatcgcttatattggcgctgttctc

SEQ ID NO: 124266 - DNA, 25 bp, Artificial
  probe
  misc_feature (1)..(25): SEQ ID NO: 711; WAN024CMD_at; Start 85; Stop 109
ctatttctatctcgtcagtttttaa

SEQ ID NO: 124267 - DNA, 25 bp, Artificial
  probe
  misc_feature (1)..(25): SEQ ID NO: 711; WAN024CMD_at; Start 301; Stop 325
acagcaggagaatcctaccaacaaa

SEQ ID NO: 124268 - DNA, 25 bp, Artificial
  probe
  misc_feature (1)..(25): SEQ ID NO: 711; WAN024CMD_at; Start 372; Stop 396
gctcatgtggggcttgaagtattat

SEQ ID NO: 124269 - DNA, 25 bp, Artificial
  probe
  misc_feature (1)..(25): SEQ ID NO: 711; WAN024CMD_at; Start 304; Stop 328
gcaggagaatcctaccaacaaataa

SEQ ID NO: 124270 - DNA, 25 bp, Artificial
  probe
  misc_feature (1)..(25): SEQ ID NO: 711; WAN024CMD_at; Start 350; Stop 374
tctgcttaatcatcatgcttctgct

SEQ ID NO: 124271 - DNA, 25 bp, Artificial
  probe
  misc_feature (1)..(25): SEQ ID NO: 711; WAN024CMD_at; Start 44; Stop 68
gattgttcttaggtcagttgccctt

SEQ ID NO: 124272 - DNA, 25 bp, Artificial
  probe
  misc_feature (1)..(25): SEQ ID NO: 711; WAN024CMD_at; Start 243; Stop 267
acttatgttcatcggcttgacaggt

SEQ ID NO: 124273 - DNA, 25 bp, Artificial
  probe
  misc_feature (1)..(25): SEQ ID NO: 711; WAN024CMD_at; Start 336; Stop 360
tattggcgctgttctctgcttaatc

SEQ ID NO: 124274 - DNA, 25 bp, Artificial
  probe
  misc_feature (1)..(25): SEQ ID NO: 711; WAN024CMD_at; Start 343; Stop 367
gctgttctctgcttaatcatcatgc

SEQ ID NO: 124275 - DNA, 25 bp, Artificial
  probe
  misc_feature (1)..(25): SEQ ID NO: 711; WAN024CMD_at; Start 42; Stop 66
gagattgttcttaggtcagttgccc

SEQ ID NO: 124276 - DNA, 25 bp, Artificial
  probe
  misc_feature (1)..(25): SEQ ID NO: 711; WAN024CMD_at; Start 20; Stop 44
aaaaacggaacatcttccttgcgag

SEQ ID NO: 124277 - DNA, 25 bp, Artificial
  probe
  misc_feature (1)..(25): SEQ ID NO: 711; WAN024CMD_at; Start 310; Stop 334
gaatcctaccaacaaataatcgctt

SEQ ID NO: 124278 - DNA, 25 bp, Artificial
  probe
  misc_feature (1)..(25): SEQ ID NO: 711; WAN024CMD_at; Start 340; Stop 364
ggcgctgttctctgcttaatcatca

SEQ ID NO: 124279 - DNA, 25 bp, Artificial
  probe
  misc_feature (1)..(25): SEQ ID NO: 711; WAN024CMD_at; Start 47; Stop 71
tgttcttaggtcagttgcccttgct

SEQ ID NO: 124280 - DNA, 25 bp, Artificial
  probe
  misc_feature (1)..(25): SEQ ID NO: 711; WAN024CMD_at; Start 41; Stop 65
cgagattgttcttaggtcagttgcc

SEQ ID NO: 124281 - DNA, 25 bp, Artificial
  probe
  misc_feature (1)..(25): SEQ ID NO: 711; WAN024CMD_at; Start 12; Stop 36
tcttgctaaaaaacggaacatcttc

SEQ ID NO: 124282 - DNA, 25 bp, Artificial
  probe
  misc_feature (1)..(25): SEQ ID NO: 711; WAN024CMD_at; Start 313; Stop 337
tcctaccaacaaataatcgcttata

SEQ ID NO: 124283 - DNA, 25 bp, Artificial
  probe
  misc_feature (1)..(25): SEQ ID NO: 5641; WAN024CME_at; Start 33; Stop 57
tatcggcttggcagattttatgttt

SEQ ID NO: 124284 - DNA, 25 bp, Artificial
  probe
  misc_feature (1)..(25): SEQ ID NO: 5641; WAN024CME_at; Start 68; Stop 92
tgtatagaggtatttcagaaacaga

SEQ ID NO: 124285 - DNA, 25 bp, Artificial
  probe
  misc_feature (1)..(25): SEQ ID NO: 5641; WAN024CME_at; Start 128; Stop 152
tctctgcttgtttatcacgcttctg

SEQ ID NO: 124286 - DNA, 25 bp, Artificial
  probe
  misc_feature (1)..(25): SEQ ID NO: 5641; WAN024CME_at; Start 87; Stop 111
aacagaattctatcaacaactaatc

SEQ ID NO: 124287 - DNA, 25 bp, Artificial
  probe
  misc_feature (1)..(25): SEQ ID NO: 5641; WAN024CME_at; Start 42; Stop 66
ggcagattttatgtttgtcatttgt

SEQ ID NO: 124288 - DNA, 25 bp, Artificial
  probe
  misc_feature (1)..(25): SEQ ID NO: 5641; WAN024CME_at; Start 111; Stop 135
cgcttatataggtgtattctctgct

SEQ ID NO: 124289 - DNA, 25 bp, Artificial
  probe
  misc_feature (1)..(25): SEQ ID NO: 5641; WAN024CME_at; Start 38; Stop 62
gcttggcagattttatgtttgtcat

SEQ ID NO: 124290 - DNA, 25 bp, Artificial
  probe
  misc_feature (1)..(25): SEQ ID NO: 5641; WAN024CME_at; Start 70; Stop 94
tatagaggtatttcagaaacagaat

SEQ ID NO: 124291 - DNA, 25 bp, Artificial
  probe
  misc_feature (1)..(25): SEQ ID NO: 5641; WAN024CME_at; Start 67; Stop 91
ttgtatagaggtatttcagaaacag

SEQ ID NO: 124292 - DNA, 25 bp, Artificial
  probe
  misc_feature (1)..(25): SEQ ID NO: 5641; WAN024CME_at; Start 123; Stop 147
tgtattctctgcttgtttatcacgc

SEQ ID NO: 124293 - DNA, 25 bp, Artificial
  probe
  misc_feature (1)..(25): SEQ ID NO: 5641; WAN024CME_at; Start 136; Stop 160
tgtttatcacgcttctgctcatgtg

SEQ ID NO: 124294 - DNA, 25 bp, Artificial
  probe
  misc_feature (1)..(25): SEQ ID NO: 5641; WAN024CME_at; Start 130; Stop 154
tctgcttgtttatcacgcttctgct

SEQ ID NO: 124295 - DNA, 25 bp, Artificial
  probe
  misc_feature (1)..(25): SEQ ID NO: 5641; WAN024CME_at; Start 125; Stop 149
tattctctgcttgtttatcacgctt

SEQ ID NO: 124296 - DNA, 25 bp, Artificial
  probe
  misc_feature (1)..(25): SEQ ID NO: 5641; WAN024CME_at; Start 23; Stop 47
aacttatgtttatcggcttggcaga

SEQ ID NO: 124297 - DNA, 25 bp, Artificial
  probe
  misc_feature (1)..(25): SEQ ID NO: 5641; WAN024CME_at; Start 24; Stop 48
acttatgtttatcggcttggcagat

SEQ ID NO: 124298 - DNA, 25 bp, Artificial
  probe
  misc_feature (1)..(25): SEQ ID NO: 5641; WAN024CME_at; Start 105; Stop 129
actaatcgcttatataggtgtattc

SEQ ID NO: 124299 - DNA, 25 bp, Artificial
  probe
  misc_feature (1)..(25): SEQ ID NO: 5641; WAN024CME_at; Start 51; Stop 75
tatgtttgtcatttgtttgtataga

SEQ ID NO: 124300 - DNA, 25 bp, Artificial
  probe
  misc_feature (1)..(25): SEQ ID NO: 5641; WAN024CME_at; Start 30; Stop 54
gtttatcggcttggcagattttatg

SEQ ID NO: 124301 - DNA, 25 bp, Artificial
  probe
  misc_feature (1)..(25): SEQ ID NO: 5641; WAN024CME_at; Start 113; Stop 137
cttatataggtgtattctctgcttg

SEQ ID NO: 124302 - DNA, 25 bp, Artificial
  probe
  misc_feature (1)..(25): SEQ ID NO: 5641; WAN024CME_at; Start 120; Stop 144
aggtgtattctctgcttgtttatca

SEQ ID NO: 124303 - DNA, 25 bp, Artificial
  probe
  misc_feature (1)..(25): SEQ ID NO: 5641; WAN024CME_at; Start 37; Stop 61
ggcttggcagattttatgtttgtca

SEQ ID NO: 124304 - DNA, 25 bp, Artificial
  probe
  misc_feature (1)..(25): SEQ ID NO: 5641; WAN024CME_at; Start 36; Stop 60
cggcttggcagattttatgtttgtc

SEQ ID NO: 124305 - DNA, 25 bp, Artificial
  probe
  misc_feature (1)..(25): SEQ ID NO: 5641; WAN024CME_at; Start 107; Stop 131
taatcgcttatataggtgtattctc

SEQ ID NO: 124306 - DNA, 25 bp, Artificial
  probe
  misc_feature (1)..(25): SEQ ID NO: 5641; WAN024CME_at; Start 115; Stop 139
tatataggtgtattctctgcttgtt

SEQ ID NO: 124307 - DNA, 25 bp, Artificial
  probe
  misc_feature (1)..(25): SEQ ID NO: 5641; WAN024CME_at; Start 74; Stop 98
gaggtatttcagaaacagaattcta

SEQ ID NO: 124308 - DNA, 25 bp, Artificial
  probe
  misc_feature (1)..(25): SEQ ID NO: 5641; WAN024CME_at; Start 110; Stop 134
tcgcttatataggtgtattctctgc

SEQ ID NO: 124309 - DNA, 25 bp, Artificial
  probe
  misc_feature (1)..(25): SEQ ID NO: 5641; WAN024CME_at; Start 132; Stop 156
tgcttgtttatcacgcttctgctca

SEQ ID NO: 124310 - DNA, 25 bp, Artificial
  probe
  misc_feature (1)..(25): SEQ ID NO: 5641; WAN024CME_at; Start 119; Stop 143
taggtgtattctctgcttgtttatc

SEQ ID NO: 124311 - DNA, 25 bp, Artificial
  probe
  misc_feature (1)..(25): SEQ ID NO: 5641; WAN024CME_at; Start 82; Stop 106
tcagaaacagaattctatcaacaac

SEQ ID NO: 124312 - DNA, 25 bp, Artificial
  probe
  misc_feature (1)..(25): SEQ ID NO: 5641; WAN024CME_at; Start 133; Stop 157
gcttgtttatcacgcttctgctcat

SEQ ID NO: 124313 - DNA, 25 bp, Artificial
  probe
  misc_feature (1)..(25): SEQ ID NO: 5641; WAN024CME_at; Start 85; Stop 109
gaaacagaattctatcaacaactaa

SEQ ID NO: 124314 - DNA, 25 bp, Artificial
  probe
  misc_feature (1)..(25): SEQ ID NO: 5641; WAN024CME_at; Start 76; Stop 100
ggtatttcagaaacagaattctatc

SEQ ID NO: 124315 - DNA, 25 bp, Artificial
  probe
  misc_feature (1)..(25): SEQ ID NO: 5641; WAN024CME_at; Start 27; Stop 51
tatgtttatcggcttggcagatttt

SEQ ID NO: 124316 - DNA, 25 bp, Artificial
  probe
  misc_feature (1)..(25): SEQ ID NO: 5641; WAN024CME_at; Start 72; Stop 96
tagaggtatttcagaaacagaattc

SEQ ID NO: 124317 - DNA, 25 bp, Artificial
  probe
  misc_feature (1)..(25): SEQ ID NO: 5605; WAN024CMF_at; Start 39; Stop 63
catgcttgcttttttaatttttaca

SEQ ID NO: 124318 - DNA, 25 bp, Artificial
  probe
  misc_feature (1)..(25): SEQ ID NO: 5605; WAN024CMF_at; Start 98; Stop 122
gtgatccaaggtcaaaactaactaa

SEQ ID NO: 124319 - DNA, 25 bp, Artificial
  probe
  misc_feature (1)..(25): SEQ ID NO: 5605; WAN024CMF_at; Start 30; Stop 54
tatgtttttcatgcttgctttttta

SEQ ID NO: 124320 - DNA, 25 bp, Artificial
  probe
  misc_feature (1)..(25): SEQ ID NO: 5605; WAN024CMF_at; Start 60; Stop 84
tacaattcaagaggttttgatgacc

SEQ ID NO: 124321 - DNA, 25 bp, Artificial
  probe
  misc_feature (1)..(25): SEQ ID NO: 5605; WAN024CMF_at; Start 94; Stop 118
ttgagtgatccaaggtcaaaactaa

SEQ ID NO: 124322 - DNA, 25 bp, Artificial
  probe
  misc_feature (1)..(25): SEQ ID NO: 5605; WAN024CMF_at; Start 63; Stop 87
aattcaagaggttttgatgaccatt

SEQ ID NO: 124323 - DNA, 25 bp, Artificial
  probe
  misc_feature (1)..(25): SEQ ID NO: 5605; WAN024CMF_at; Start 57; Stop 81
ttttacaattcaagaggttttgatg

SEQ ID NO: 124324 - DNA, 25 bp, Artificial
  probe
  misc_feature (1)..(25): SEQ ID NO: 5605; WAN024CMF_at; Start 38; Stop 62
tcatgcttgcttttttaatttttac

SEQ ID NO: 124325 - DNA, 25 bp, Artificial
  probe
  misc_feature (1)..(25): SEQ ID NO: 5605; WAN024CMF_at; Start 96; Stop 120
gagtgatccaaggtcaaaactaact

SEQ ID NO: 124326 - DNA, 25 bp, Artificial
  probe
  misc_feature (1)..(25): SEQ ID NO: 5605; WAN024CMF_at; Start 64; Stop 88
attcaagaggttttgatgaccattt

SEQ ID NO: 124327 - DNA, 25 bp, Artificial
  probe
  misc_feature (1)..(25): SEQ ID NO: 5605; WAN024CMF_at; Start 95; Stop 119
tgagtgatccaaggtcaaaactaac

SEQ ID NO: 124328 - DNA, 25 bp, Artificial
  probe
  misc_feature (1)..(25): SEQ ID NO: 5605; WAN024CMF_at; Start 99; Stop 123
tgatccaaggtcaaaactaactaat

SEQ ID NO: 124329 - DNA, 25 bp, Artificial
  probe
  misc_feature (1)..(25): SEQ ID NO: 5605; WAN024CMF_at; Start 59; Stop 83
ttacaattcaagaggttttgatgac

SEQ ID NO: 124330 - DNA, 25 bp, Artificial
  probe
  misc_feature (1)..(25): SEQ ID NO: 5605; WAN024CMF_at; Start 32; Stop 56
tgtttttcatgcttgcttttttaat

SEQ ID NO: 124331 - DNA, 25 bp, Artificial
  probe
  misc_feature (1)..(25): SEQ ID NO: 5605; WAN024CMF_at; Start 62; Stop 86
caattcaagaggttttgatgaccat

SEQ ID NO: 124332 - DNA, 25 bp, Artificial
  probe
  misc_feature (1)..(25): SEQ ID NO: 5605; WAN024CMF_at; Start 37; Stop 61
ttcatgcttgcttttttaattttta

SEQ ID NO: 124333 - DNA, 25 bp, Artificial
  probe
  misc_feature (1)..(25): SEQ ID NO: 5605; WAN024CMF_at; Start 61; Stop 85
acaattcaagaggttttgatgacca

SEQ ID NO: 124334 - DNA, 25 bp, Artificial
  probe
  misc_feature (1)..(25): SEQ ID NO: 5605; WAN024CMF_at; Start 58; Stop 82
tttacaattcaagaggttttgatga

SEQ ID NO: 124335 - DNA, 25 bp, Artificial
  probe
  misc_feature (1)..(25): SEQ ID NO: 5605; WAN024CMF_at; Start 29; Stop 53
gtatgtttttcatgcttgctttttt

SEQ ID NO: 124336 - DNA, 25 bp, Artificial
  probe
  misc_feature (1)..(25): SEQ ID NO: 5605; WAN024CMF_at; Start 93; Stop 117
tttgagtgatccaaggtcaaaacta

SEQ ID NO: 124337 - DNA, 25 bp, Artificial
  probe
  misc_feature (1)..(25): SEQ ID NO: 5605; WAN024CMF_at; Start 97; Stop 121
agtgatccaaggtcaaaactaacta

SEQ ID NO: 124338 - DNA, 25 bp, Artificial
  probe
  misc_feature (1)..(25): SEQ ID NO: 5605; WAN024CMF_at; Start 31; Stop 55
atgtttttcatgcttgcttttttaa

SEQ ID NO: 124339 - DNA, 25 bp, Artificial
  probe
  misc_feature (1)..(25): SEQ ID NO: 5433; WAN024CMG_at; Start 84; Stop 108
gttacaatccggctataaatctatc

SEQ ID NO: 124340 - DNA, 25 bp, Artificial
  probe
  misc_feature (1)..(25): SEQ ID NO: 5433; WAN024CMG_at; Start 146; Stop 170
agactatactgtcggttgtggaatc

SEQ ID NO: 124341 - DNA, 25 bp, Artificial
  probe
  misc_feature (1)..(25): SEQ ID NO: 5433; WAN024CMG_at; Start 88; Stop 112
caatccggctataaatctatcaaaa

SEQ ID NO: 124342 - DNA, 25 bp, Artificial
  probe
  misc_feature (1)..(25): SEQ ID NO: 5433; WAN024CMG_at; Start 91; Stop 115
tccggctataaatctatcaaaacag

SEQ ID NO: 124343 - DNA, 25 bp, Artificial
  probe
  misc_feature (1)..(25): SEQ ID NO: 5433; WAN024CMG_at; Start 78; Stop 102
caagtggttacaatccggctataaa

SEQ ID NO: 124344 - DNA, 25 bp, Artificial
  probe
  misc_feature (1)..(25): SEQ ID NO: 5433; WAN024CMG_at; Start 155; Stop 179
tgtcggttgtggaatctcaccacat

SEQ ID NO: 124345 - DNA, 25 bp, Artificial
  probe
  misc_feature (1)..(25): SEQ ID NO: 5433; WAN024CMG_at; Start 72; Stop 96
acaaagcaagtggttacaatccggc

SEQ ID NO: 124346 - DNA, 25 bp, Artificial
  probe
  misc_feature (1)..(25): SEQ ID NO: 5433; WAN024CMG_at; Start 152; Stop 176
tactgtcggttgtggaatctcacca

SEQ ID NO: 124347 - DNA, 25 bp, Artificial
  probe
  misc_feature (1)..(25): SEQ ID NO: 5433; WAN024CMG_at; Start 73; Stop 97
caaagcaagtggttacaatccggct

SEQ ID NO: 124348 - DNA, 25 bp, Artificial
  probe
  misc_feature (1)..(25): SEQ ID NO: 5433; WAN024CMG_at; Start 94; Stop 118
ggctataaatctatcaaaacagaca

SEQ ID NO: 124349 - DNA, 25 bp, Artificial
  probe
  misc_feature (1)..(25): SEQ ID NO: 5433; WAN024CMG_at; Start 77; Stop 101
gcaagtggttacaatccggctataa

SEQ ID NO: 124350 - DNA, 25 bp, Artificial
  probe
  misc_feature (1)..(25): SEQ ID NO: 5433; WAN024CMG_at; Start 157; Stop 181
tcggttgtggaatctcaccacatca

SEQ ID NO: 124351 - DNA, 25 bp, Artificial
  probe
  misc_feature (1)..(25): SEQ ID NO: 5433; WAN024CMG_at; Start 150; Stop 174
tatactgtcggttgtggaatctcac

SEQ ID NO: 124352 - DNA, 25 bp, Artificial
  probe
  misc_feature (1)..(25): SEQ ID NO: 5433; WAN024CMG_at; Start 3; Stop 27
ggaaaggattcctctatctattctc

SEQ ID NO: 124353 - DNA, 25 bp, Artificial
  probe
  misc_feature (1)..(25): SEQ ID NO: 5433; WAN024CMG_at; Start 22; Stop 46
attctcactttttatatcccaaaag

SEQ ID NO: 124354 - DNA, 25 bp, Artificial
  probe
  misc_feature (1)..(25): SEQ ID NO: 5433; WAN024CMG_at; Start 55; Stop 79
tactctattaaagaaaaacaaagca

SEQ ID NO: 124355 - DNA, 25 bp, Artificial
  probe
  misc_feature (1)..(25): SEQ ID NO: 5433; WAN024CMG_at; Start 5; Stop 29
aaaggattcctctatctattctcac

SEQ ID NO: 124356 - DNA, 25 bp, Artificial
  probe
  misc_feature (1)..(25): SEQ ID NO: 5433; WAN024CMG_at; Start 110; Stop 134
aaacagacaaggctattctttcgtc

SEQ ID NO: 124357 - DNA, 25 bp, Artificial
  probe
  misc_feature (1)..(25): SEQ ID NO: 5433; WAN024CMG_at; Start 99; Stop 123
taaatctatcaaaacagacaaggct

SEQ ID NO: 124358 - DNA, 25 bp, Artificial
  probe
  misc_feature (1)..(25): SEQ ID NO: 5433; WAN024CMG_at; Start 59; Stop 83
ctattaaagaaaaacaaagcaagtg

SEQ ID NO: 124359 - DNA, 25 bp, Artificial
  probe
  misc_feature (1)..(25): SEQ ID NO: 5433; WAN024CMG_at; Start 105; Stop 129
tatcaaaacagacaaggctattctt

SEQ ID NO: 124360 - DNA, 25 bp, Artificial
  probe
  misc_feature (1)..(25): SEQ ID NO: 5433; WAN024CMG_at; Start 8; Stop 32
ggattcctctatctattctcacttt

SEQ ID NO: 124361 - DNA, 25 bp, Artificial
  probe
  misc_feature (1)..(25): SEQ ID NO: 5433; WAN024CMG_at; Start 80; Stop 104
agtggttacaatccggctataaatc

SEQ ID NO: 124362 - DNA, 25 bp, Artificial
  probe
  misc_feature (1)..(25): SEQ ID NO: 5433; WAN024CMG_at; Start 148; Stop 172
actatactgtcggttgtggaatctc

SEQ ID NO: 124363 - DNA, 25 bp, Artificial
  probe
  misc_feature (1)..(25): SEQ ID NO: 5433; WAN024CMG_at; Start 103; Stop 127
tctatcaaaacagacaaggctattc

SEQ ID NO: 124364 - DNA, 25 bp, Artificial
  probe
  misc_feature (1)..(25): SEQ ID NO: 5433; WAN024CMG_at; Start 71; Stop 95
aacaaagcaagtggttacaatccgg

SEQ ID NO: 124365 - DNA, 25 bp, Artificial
  probe
  misc_feature (1)..(25): SEQ ID NO: 5433; WAN024CMG_at; Start 74; Stop 98
aaagcaagtggttacaatccggcta

SEQ ID NO: 124366 - DNA, 25 bp, Artificial
  probe
  misc_feature (1)..(25): SEQ ID NO: 5433; WAN024CMG_at; Start 86; Stop 110
tacaatccggctataaatctatcaa

SEQ ID NO: 124367 - DNA, 25 bp, Artificial
  probe
  misc_feature (1)..(25): SEQ ID NO: 5433; WAN024CMG_at; Start 115; Stop 139
gacaaggctattctttcgtcttctc

SEQ ID NO: 124368 - DNA, 25 bp, Artificial
  probe
  misc_feature (1)..(25): SEQ ID NO: 5433; WAN024CMG_at; Start 129; Stop 153
ttcgtcttctcccatccagactata

SEQ ID NO: 124369 - DNA, 25 bp, Artificial
  probe
  misc_feature (1)..(25): SEQ ID NO: 5433; WAN024CMG_at; Start 108; Stop 132
caaaacagacaaggctattctttcg

SEQ ID NO: 124370 - DNA, 25 bp, Artificial
  probe
  misc_feature (1)..(25): SEQ ID NO: 5433; WAN024CMG_at; Start 118; Stop 142
aaggctattctttcgtcttctccca

SEQ ID NO: 124371 - DNA, 25 bp, Artificial
  probe
  misc_feature (1)..(25): SEQ ID NO: 5433; WAN024CMG_at; Start 153; Stop 177
actgtcggttgtggaatctcaccac

SEQ ID NO: 124372 - DNA, 25 bp, Artificial
  probe
  misc_feature (1)..(25): SEQ ID NO: 5433; WAN024CMG_at; Start 123; Stop 147
tattctttcgtcttctcccatccag

SEQ ID NO: 124373 - DNA, 25 bp, Artificial
  probe
  misc_feature (1)..(25): SEQ ID NO: 1529; WAN024CMH_at; Start 82; Stop 106
atagacaaaaaagatgtatactgta

SEQ ID NO: 124374 - DNA, 25 bp, Artificial
  probe
  misc_feature (1)..(25): SEQ ID NO: 1529; WAN024CMH_at; Start 91; Stop 115
aaagatgtatactgtagatgtaagc

SEQ ID NO: 124375 - DNA, 25 bp, Artificial
  probe
  misc_feature (1)..(25): SEQ ID NO: 1529; WAN024CMH_at; Start 98; Stop 122
tatactgtagatgtaagcttacaaa

SEQ ID NO: 124376 - DNA, 25 bp, Artificial
  probe
  misc_feature (1)..(25): SEQ ID NO: 1529; WAN024CMH_at; Start 103; Stop 127
tgtagatgtaagcttacaaaaattt

SEQ ID NO: 124377 - DNA, 25 bp, Artificial
  probe
  misc_feature (1)..(25): SEQ ID NO: 1529; WAN024CMH_at; Start 88; Stop 112
aaaaaagatgtatactgtagatgta

SEQ ID NO: 124378 - DNA, 25 bp, Artificial
  probe
  misc_feature (1)..(25): SEQ ID NO: 1529; WAN024CMH_at; Start 117; Stop 141
tacaaaaatttatagtgtattgaat

SEQ ID NO: 124379 - DNA, 25 bp, Artificial
  probe
  misc_feature (1)..(25): SEQ ID NO: 1529; WAN024CMH_at; Start 97; Stop 121
gtatactgtagatgtaagcttacaa

SEQ ID NO: 124380 - DNA, 25 bp, Artificial
  probe
  misc_feature (1)..(25): SEQ ID NO: 1529; WAN024CMH_at; Start 87; Stop 111
caaaaaagatgtatactgtagatgt

SEQ ID NO: 124381 - DNA, 25 bp, Artificial
  probe
  misc_feature (1)..(25): SEQ ID NO: 1529; WAN024CMH_at; Start 90; Stop 114
aaaagatgtatactgtagatgtaag

SEQ ID NO: 124382 - DNA, 25 bp, Artificial
  probe
  misc_feature (1)..(25): SEQ ID NO: 1529; WAN024CMH_at; Start 105; Stop 129
tagatgtaagcttacaaaaatttat

SEQ ID NO: 124383 - DNA, 25 bp, Artificial
  probe
  misc_feature (1)..(25): SEQ ID NO: 1529; WAN024CMH_at; Start 102; Stop 126
ctgtagatgtaagcttacaaaaatt

SEQ ID NO: 124384 - DNA, 25 bp, Artificial
  probe
  misc_feature (1)..(25): SEQ ID NO: 1529; WAN024CMH_at; Start 94; Stop 118
gatgtatactgtagatgtaagctta

SEQ ID NO: 124385 - DNA, 25 bp, Artificial
  probe
  misc_feature (1)..(25): SEQ ID NO: 1529; WAN024CMH_at; Start 92; Stop 116
aagatgtatactgtagatgtaagct

SEQ ID NO: 124386 - DNA, 25 bp, Artificial
  probe
  misc_feature (1)..(25): SEQ ID NO: 1529; WAN024CMH_at; Start 114; Stop 138
gcttacaaaaatttatagtgtattg

SEQ ID NO: 124387 - DNA, 25 bp, Artificial
  probe
  misc_feature (1)..(25): SEQ ID NO: 1529; WAN024CMH_at; Start 99; Stop 123
atactgtagatgtaagcttacaaaa

SEQ ID NO: 124388 - DNA, 25 bp, Artificial
  probe
  misc_feature (1)..(25): SEQ ID NO: 1529; WAN024CMH_at; Start 96; Stop 120
tgtatactgtagatgtaagcttaca

SEQ ID NO: 124389 - DNA, 25 bp, Artificial
  probe
  misc_feature (1)..(25): SEQ ID NO: 1529; WAN024CMH_at; Start 93; Stop 117
agatgtatactgtagatgtaagctt

SEQ ID NO: 124390 - DNA, 25 bp, Artificial
  probe
  misc_feature (1)..(25): SEQ ID NO: 1529; WAN024CMH_at; Start 106; Stop 130
agatgtaagcttacaaaaatttata

SEQ ID NO: 124391 - DNA, 25 bp, Artificial
  probe
  misc_feature (1)..(25): SEQ ID NO: 1529; WAN024CMH_at; Start 112; Stop 136
aagcttacaaaaatttatagtgtat

SEQ ID NO: 124392 - DNA, 25 bp, Artificial
  probe
  misc_feature (1)..(25): SEQ ID NO: 1529; WAN024CMH_at; Start 115; Stop 139
cttacaaaaatttatagtgtattga

SEQ ID NO: 124393 - DNA, 25 bp, Artificial
  probe
  misc_feature (1)..(25): SEQ ID NO: 1529; WAN024CMH_at; Start 100; Stop 124
tactgtagatgtaagcttacaaaaa

SEQ ID NO: 124394 - DNA, 25 bp, Artificial
  probe
  misc_feature (1)..(25): SEQ ID NO: 1529; WAN024CMH_at; Start 104; Stop 128
gtagatgtaagcttacaaaaattta

SEQ ID NO: 124395 - DNA, 25 bp, Artificial
  probe
  misc_feature (1)..(25): SEQ ID NO: 1529; WAN024CMH_at; Start 107; Stop 131
gatgtaagcttacaaaaatttatag

SEQ ID NO: 124396 - DNA, 25 bp, Artificial
  probe
  misc_feature (1)..(25): SEQ ID NO: 1529; WAN024CMH_at; Start 86; Stop 110
acaaaaaagatgtatactgtagatg

SEQ ID NO: 124397 - DNA, 25 bp, Artificial
  probe
  misc_feature (1)..(25): SEQ ID NO: 1529; WAN024CMH_at; Start 108; Stop 132
atgtaagcttacaaaaatttatagt

SEQ ID NO: 124398 - DNA, 25 bp, Artificial
  probe
  misc_feature (1)..(25): SEQ ID NO: 1529; WAN024CMH_at; Start 95; Stop 119
atgtatactgtagatgtaagcttac

SEQ ID NO: 124399 - DNA, 25 bp, Artificial
  probe
  misc_feature (1)..(25): SEQ ID NO: 1529; WAN024CMH_at; Start 84; Stop 108
agacaaaaaagatgtatactgtaga

SEQ ID NO: 124400 - DNA, 25 bp, Artificial
  probe
  misc_feature (1)..(25): SEQ ID NO: 1529; WAN024CMH_at; Start 109; Stop 133
tgtaagcttacaaaaatttatagtg

SEQ ID NO: 124401 - DNA, 25 bp, Artificial
  probe
  misc_feature (1)..(25): SEQ ID NO: 1529; WAN024CMH_at; Start 83; Stop 107
tagacaaaaaagatgtatactgtag

SEQ ID NO: 124402 - DNA, 25 bp, Artificial
  probe
  misc_feature (1)..(25): SEQ ID NO: 1529; WAN024CMH_at; Start 111; Stop 135
taagcttacaaaaatttatagtgta

SEQ ID NO: 124403 - DNA, 25 bp, Artificial
  probe
  misc_feature (1)..(25): SEQ ID NO: 1529; WAN024CMH_at; Start 101; Stop 125
actgtagatgtaagcttacaaaaat

SEQ ID NO: 124404 - DNA, 25 bp, Artificial
  probe
  misc_feature (1)..(25): SEQ ID NO: 1529; WAN024CMH_at; Start 81; Stop 105
aatagacaaaaaagatgtatactgt

SEQ ID NO: 124405 - DNA, 25 bp, Artificial
  probe
  misc_feature (1)..(25): SEQ ID NO: 1529; WAN024CMH_at; Start 89; Stop 113
aaaaagatgtatactgtagatgtaa

SEQ ID NO: 124406 - DNA, 25 bp, Artificial
  probe
  misc_feature (1)..(25): SEQ ID NO: 1529; WAN024CMH_at; Start 85; Stop 109
gacaaaaaagatgtatactgtagat

SEQ ID NO: 124407 - DNA, 25 bp, Artificial
  probe
  misc_feature (1)..(25): SEQ ID NO: 1530; WAN024CMI_at; Start 36; Stop 60
tgtaattcaggtcgaaaaattgcca

SEQ ID NO: 124408 - DNA, 25 bp, Artificial
  probe
  misc_feature (1)..(25): SEQ ID NO: 1530; WAN024CMI_at; Start 35; Stop 59
atgtaattcaggtcgaaaaattgcc

SEQ ID NO: 124409 - DNA, 25 bp, Artificial
  probe
  misc_feature (1)..(25): SEQ ID NO: 1530; WAN024CMI_at; Start 34; Stop 58
aatgtaattcaggtcgaaaaattgc

SEQ ID NO: 124410 - DNA, 25 bp, Artificial
  probe
  misc_feature (1)..(25): SEQ ID NO: 1530; WAN024CMI_at; Start 33; Stop 57
aaatgtaattcaggtcgaaaaattg

SEQ ID NO: 124411 - DNA, 25 bp, Artificial
  probe
  misc_feature (1)..(25): SEQ ID NO: 1530; WAN024CMI_at; Start 55; Stop 79
ttgccagttgaggagatgggctata

SEQ ID NO: 124412 - DNA, 25 bp, Artificial
  probe
  misc_feature (1)..(25): SEQ ID NO: 1530; WAN024CMI_at; Start 50; Stop 74
aaaaattgccagttgaggagatggg

SEQ ID NO: 124413 - DNA, 25 bp, Artificial
  probe
  misc_feature (1)..(25): SEQ ID NO: 1530; WAN024CMI_at; Start 53; Stop 77
aattgccagttgaggagatgggcta

SEQ ID NO: 124414 - DNA, 25 bp, Artificial
  probe
  misc_feature (1)..(25): SEQ ID NO: 1530; WAN024CMI_at; Start 57; Stop 81
gccagttgaggagatgggctataaa

SEQ ID NO: 124415 - DNA, 25 bp, Artificial
  probe
  misc_feature (1)..(25): SEQ ID NO: 1530; WAN024CMI_at; Start 51; Stop 75
aaaattgccagttgaggagatgggc

SEQ ID NO: 124416 - DNA, 25 bp, Artificial
  probe
  misc_feature (1)..(25): SEQ ID NO: 1530; WAN024CMI_at; Start 54; Stop 78
attgccagttgaggagatgggctat

SEQ ID NO: 124417 - DNA, 25 bp, Artificial
  probe
  misc_feature (1)..(25): SEQ ID NO: 1530; WAN024CMI_at; Start 56; Stop 80
tgccagttgaggagatgggctataa

SEQ ID NO: 124418 - DNA, 25 bp, Artificial
  probe
  misc_feature (1)..(25): SEQ ID NO: 1530; WAN024CMI_at; Start 52; Stop 76
aaattgccagttgaggagatgggct

SEQ ID NO: 124419 - DNA, 25 bp, Artificial
  probe
  misc_feature (1)..(25): SEQ ID NO: 4931; WAN024CMJ_at; Start 33; Stop 57
tagtcgagggatagccattctatcg

SEQ ID NO: 124420 - DNA, 25 bp, Artificial
  probe
  misc_feature (1)..(25): SEQ ID NO: 4931; WAN024CMJ_at; Start 36; Stop 60
tcgagggatagccattctatcggat

SEQ ID NO: 124421 - DNA, 25 bp, Artificial
  probe
  misc_feature (1)..(25): SEQ ID NO: 4931; WAN024CMJ_at; Start 31; Stop 55
gatagtcgagggatagccattctat

SEQ ID NO: 124422 - DNA, 25 bp, Artificial
  probe
  misc_feature (1)..(25): SEQ ID NO: 4931; WAN024CMJ_at; Start 4; Stop 28
aacgtatttgatggaaatgtcttac

SEQ ID NO: 124423 - DNA, 25 bp, Artificial
  probe
  misc_feature (1)..(25): SEQ ID NO: 4931; WAN024CMJ_at; Start 30; Stop 54
tgatagtcgagggatagccattcta

SEQ ID NO: 124424 - DNA, 25 bp, Artificial
  probe
  misc_feature (1)..(25): SEQ ID NO: 4931; WAN024CMJ_at; Start 27; Stop 51
acttgatagtcgagggatagccatt

SEQ ID NO: 124425 - DNA, 25 bp, Artificial
  probe
  misc_feature (1)..(25): SEQ ID NO: 4931; WAN024CMJ_at; Start 43; Stop 67
atagccattctatcggatttttggc

SEQ ID NO: 124426 - DNA, 25 bp, Artificial
  probe
  misc_feature (1)..(25): SEQ ID NO: 4931; WAN024CMJ_at; Start 63; Stop 87
ttggcttgtttttgcgcttcatgtt

SEQ ID NO: 124427 - DNA, 25 bp, Artificial
  probe
  misc_feature (1)..(25): SEQ ID NO: 4931; WAN024CMJ_at; Start 24; Stop 48
cttacttgatagtcgagggatagcc

SEQ ID NO: 124428 - DNA, 25 bp, Artificial
  probe
  misc_feature (1)..(25): SEQ ID NO: 4931; WAN024CMJ_at; Start 26; Stop 50
tacttgatagtcgagggatagccat

SEQ ID NO: 124429 - DNA, 25 bp, Artificial
  probe
  misc_feature (1)..(25): SEQ ID NO: 4931; WAN024CMJ_at; Start 38; Stop 62
gagggatagccattctatcggattt

SEQ ID NO: 124430 - DNA, 25 bp, Artificial
  probe
  misc_feature (1)..(25): SEQ ID NO: 4931; WAN024CMJ_at; Start 13; Stop 37
gatggaaatgtcttacttgatagtc

SEQ ID NO: 124431 - DNA, 25 bp, Artificial
  probe
  misc_feature (1)..(25): SEQ ID NO: 4931; WAN024CMJ_at; Start 42; Stop 66
gatagccattctatcggatttttgg

SEQ ID NO: 124432 - DNA, 25 bp, Artificial
  probe
  misc_feature (1)..(25): SEQ ID NO: 4931; WAN024CMJ_at; Start 37; Stop 61
cgagggatagccattctatcggatt

SEQ ID NO: 124433 - DNA, 25 bp, Artificial
  probe
  misc_feature (1)..(25): SEQ ID NO: 4931; WAN024CMJ_at; Start 8; Stop 32
tatttgatggaaatgtcttacttga

SEQ ID NO: 124434 - DNA, 25 bp, Artificial
  probe
  misc_feature (1)..(25): SEQ ID NO: 4931; WAN024CMJ_at; Start 18; Stop 42
aaatgtcttacttgatagtcgaggg

SEQ ID NO: 124435 - DNA, 25 bp, Artificial
  probe
  misc_feature (1)..(25): SEQ ID NO: 4931; WAN024CMJ_at; Start 28; Stop 52
cttgatagtcgagggatagccattc

SEQ ID NO: 124436 - DNA, 25 bp, Artificial
  probe
  misc_feature (1)..(25): SEQ ID NO: 4931; WAN024CMJ_at; Start 16; Stop 40
ggaaatgtcttacttgatagtcgag

SEQ ID NO: 124437 - DNA, 25 bp, Artificial
  probe
  misc_feature (1)..(25): SEQ ID NO: 4931; WAN024CMJ_at; Start 58; Stop 82
gatttttggcttgtttttgcgcttc

SEQ ID NO: 124438 - DNA, 25 bp, Artificial
  probe
  misc_feature (1)..(25): SEQ ID NO: 4931; WAN024CMJ_at; Start 56; Stop 80
cggatttttggcttgtttttgcgct

SEQ ID NO: 124439 - DNA, 25 bp, Artificial
  probe
  misc_feature (1)..(25): SEQ ID NO: 4931; WAN024CMJ_at; Start 61; Stop 85
ttttggcttgtttttgcgcttcatg

SEQ ID NO: 124440 - DNA, 25 bp, Artificial
  probe
  misc_feature (1)..(25): SEQ ID NO: 4931; WAN024CMJ_at; Start 40; Stop 64
gggatagccattctatcggattttt

SEQ ID NO: 124441 - DNA, 25 bp, Artificial
  probe
  misc_feature (1)..(25): SEQ ID NO: 4931; WAN024CMJ_at; Start 6; Stop 30
cgtatttgatggaaatgtcttactt

SEQ ID NO: 124442 - DNA, 25 bp, Artificial
  probe
  misc_feature (1)..(25): SEQ ID NO: 4931; WAN024CMJ_at; Start 1; Stop 25
ttgaacgtatttgatggaaatgtct

SEQ ID NO: 124443 - DNA, 25 bp, Artificial
  probe
  misc_feature (1)..(25): SEQ ID NO: 4931; WAN024CMJ_at; Start 21; Stop 45
tgtcttacttgatagtcgagggata

SEQ ID NO: 124444 - DNA, 25 bp, Artificial
  probe
  misc_feature (1)..(25): SEQ ID NO: 4931; WAN024CMJ_at; Start 25; Stop 49
ttacttgatagtcgagggatagcca

SEQ ID NO: 124445 - DNA, 25 bp, Artificial
  probe
  misc_feature (1)..(25): SEQ ID NO: 4931; WAN024CMJ_at; Start 17; Stop 41
gaaatgtcttacttgatagtcgagg

SEQ ID NO: 124446 - DNA, 25 bp, Artificial
  probe
  misc_feature (1)..(25): SEQ ID NO: 4931; WAN024CMJ_at; Start 46; Stop 70
gccattctatcggatttttggcttg

SEQ ID NO: 124447 - DNA, 25 bp, Artificial
  probe
  misc_feature (1)..(25): SEQ ID NO: 4931; WAN024CMJ_at; Start 19; Stop 43
aatgtcttacttgatagtcgaggga

SEQ ID NO: 124448 - DNA, 25 bp, Artificial
  probe
  misc_feature (1)..(25): SEQ ID NO: 4931; WAN024CMJ_at; Start 55; Stop 79
tcggatttttggcttgtttttgcgc

SEQ ID NO: 124449 - DNA, 25 bp, Artificial
  probe
  misc_feature (1)..(25): SEQ ID NO: 4931; WAN024CMJ_at; Start 48; Stop 72
cattctatcggatttttggcttgtt

SEQ ID NO: 124450 - DNA, 25 bp, Artificial
  probe
  misc_feature (1)..(25): SEQ ID NO: 4931; WAN024CMJ_at; Start 15; Stop 39
tggaaatgtcttacttgatagtcga

SEQ ID NO: 124451 - DNA, 25 bp, Artificial
  probe
  misc_feature (1)..(25): SEQ ID NO: 4931; WAN024CMJ_at; Start 34; Stop 58
agtcgagggatagccattctatcgg

SEQ ID NO: 124452 - DNA, 25 bp, Artificial
  probe
  misc_feature (1)..(25): SEQ ID NO: 4931; WAN024CMJ_at; Start 23; Stop 47
tcttacttgatagtcgagggatagc

SEQ ID NO: 124453 - DNA, 25 bp, Artificial
  probe
  misc_feature (1)..(25): SEQ ID NO: 4232; WAN024CMK_at; Start 32; Stop 56
atcagccagcgcctaaagacgctgg

SEQ ID NO: 124454 - DNA, 25 bp, Artificial
  probe
  misc_feature (1)..(25): SEQ ID NO: 4232; WAN024CMK_at; Start 47; Stop 71
aagacgctggctttcacgttgttca

SEQ ID NO: 124455 - DNA, 25 bp, Artificial
  probe
  misc_feature (1)..(25): SEQ ID NO: 4232; WAN024CMK_at; Start 43; Stop 67
cctaaagacgctggctttcacgttg

SEQ ID NO: 124456 - DNA, 25 bp, Artificial
  probe
  misc_feature (1)..(25): SEQ ID NO: 4232; WAN024CMK_at; Start 26; Stop 50
caaatcatcagccagcgcctaaaga

SEQ ID NO: 124457 - DNA, 25 bp, Artificial
  probe
  misc_feature (1)..(25): SEQ ID NO: 4232; WAN024CMK_at; Start 19; Stop 43
ataagcccaaatcatcagccagcgc

SEQ ID NO: 124458 - DNA, 25 bp, Artificial
  probe
  misc_feature (1)..(25): SEQ ID NO: 4232; WAN024CMK_at; Start 60; Stop 84
tcacgttgttcaagccttattgctc

SEQ ID NO: 124459 - DNA, 25 bp, Artificial
  probe
  misc_feature (1)..(25): SEQ ID NO: 4232; WAN024CMK_at; Start 18; Stop 42
tataagcccaaatcatcagccagcg

SEQ ID NO: 124460 - DNA, 25 bp, Artificial
  probe
  misc_feature (1)..(25): SEQ ID NO: 4232; WAN024CMK_at; Start 52; Stop 76
gctggctttcacgttgttcaagcct

SEQ ID NO: 124461 - DNA, 25 bp, Artificial
  probe
  misc_feature (1)..(25): SEQ ID NO: 4232; WAN024CMK_at; Start 58; Stop 82
tttcacgttgttcaagccttattgc

SEQ ID NO: 124462 - DNA, 25 bp, Artificial
  probe
  misc_feature (1)..(25): SEQ ID NO: 4232; WAN024CMK_at; Start 39; Stop 63
agcgcctaaagacgctggctttcac

SEQ ID NO: 124463 - DNA, 25 bp, Artificial
  probe
  misc_feature (1)..(25): SEQ ID NO: 4232; WAN024CMK_at; Start 5; Stop 29
tttatctcagagctataagcccaaa

SEQ ID NO: 124464 - DNA, 25 bp, Artificial
  probe
  misc_feature (1)..(25): SEQ ID NO: 4232; WAN024CMK_at; Start 49; Stop 73
gacgctggctttcacgttgttcaag

SEQ ID NO: 124465 - DNA, 25 bp, Artificial
  probe
  misc_feature (1)..(25): SEQ ID NO: 4232; WAN024CMK_at; Start 50; Stop 74
acgctggctttcacgttgttcaagc

SEQ ID NO: 124466 - DNA, 25 bp, Artificial
  probe
  misc_feature (1)..(25): SEQ ID NO: 4232; WAN024CMK_at; Start 28; Stop 52
aatcatcagccagcgcctaaagacg

SEQ ID NO: 124467 - DNA, 25 bp, Artificial
  probe
  misc_feature (1)..(25): SEQ ID NO: 4232; WAN024CMK_at; Start 7; Stop 31
tatctcagagctataagcccaaatc

SEQ ID NO: 124468 - DNA, 25 bp, Artificial
  probe
  misc_feature (1)..(25): SEQ ID NO: 4232; WAN024CMK_at; Start 16; Stop 40
gctataagcccaaatcatcagccag

SEQ ID NO: 124469 - DNA, 25 bp, Artificial
  probe
  misc_feature (1)..(25): SEQ ID NO: 4232; WAN024CMK_at; Start 9; Stop 33
tctcagagctataagcccaaatcat

SEQ ID NO: 124470 - DNA, 25 bp, Artificial
  probe
  misc_feature (1)..(25): SEQ ID NO: 4232; WAN024CMK_at; Start 45; Stop 69
taaagacgctggctttcacgttgtt

SEQ ID NO: 124471 - DNA, 25 bp, Artificial
  probe
  misc_feature (1)..(25): SEQ ID NO: 4232; WAN024CMK_at; Start 90; Stop 114
tcgtcacttgcctcttctaactaat

SEQ ID NO: 124472 - DNA, 25 bp, Artificial
  probe
  misc_feature (1)..(25): SEQ ID NO: 4232; WAN024CMK_at; Start 42; Stop 66
gcctaaagacgctggctttcacgtt

SEQ ID NO: 124473 - DNA, 25 bp, Artificial
  probe
  misc_feature (1)..(25): SEQ ID NO: 4232; WAN024CMK_at; Start 11; Stop 35
tcagagctataagcccaaatcatca

SEQ ID NO: 124474 - DNA, 25 bp, Artificial
  probe
  misc_feature (1)..(25): SEQ ID NO: 4232; WAN024CMK_at; Start 3; Stop 27
ggtttatctcagagctataagccca

SEQ ID NO: 124475 - DNA, 25 bp, Artificial
  probe
  misc_feature (1)..(25): SEQ ID NO: 4232; WAN024CMK_at; Start 73; Stop 97
gccttattgctcttgactcgtcact

SEQ ID NO: 124476 - DNA, 25 bp, Artificial
  probe
  misc_feature (1)..(25): SEQ ID NO: 4232; WAN024CMK_at; Start 86; Stop 110
tgactcgtcacttgcctcttctaac

SEQ ID NO: 124477 - DNA, 25 bp, Artificial
  probe
  misc_feature (1)..(25): SEQ ID NO: 4232; WAN024CMK_at; Start 71; Stop 95
aagccttattgctcttgactcgtca

SEQ ID NO: 124478 - DNA, 25 bp, Artificial
  probe
  misc_feature (1)..(25): SEQ ID NO: 4232; WAN024CMK_at; Start 1; Stop 25
gtggtttatctcagagctataagcc

SEQ ID NO: 124479 - DNA, 25 bp, Artificial
  probe
  misc_feature (1)..(25): SEQ ID NO: 4232; WAN024CMK_at; Start 55; Stop 79
ggctttcacgttgttcaagccttat

SEQ ID NO: 124480 - DNA, 25 bp, Artificial
  probe
  misc_feature (1)..(25): SEQ ID NO: 4232; WAN024CMK_at; Start 70; Stop 94
caagccttattgctcttgactcgtc

SEQ ID NO: 124481 - DNA, 25 bp, Artificial
  probe
  misc_feature (1)..(25): SEQ ID NO: 4232; WAN024CMK_at; Start 63; Stop 87
cgttgttcaagccttattgctcttg

SEQ ID NO: 124482 - DNA, 25 bp, Artificial
  probe
  misc_feature (1)..(25): SEQ ID NO: 4232; WAN024CMK_at; Start 77; Stop 101
tattgctcttgactcgtcacttgcc

SEQ ID NO: 124483 - DNA, 25 bp, Artificial
  probe
  misc_feature (1)..(25): SEQ ID NO: 4232; WAN024CMK_at; Start 83; Stop 107
tcttgactcgtcacttgcctcttct

SEQ ID NO: 124484 - DNA, 25 bp, Artificial
  probe
  misc_feature (1)..(25): SEQ ID NO: 4232; WAN024CMK_at; Start 79; Stop 103
ttgctcttgactcgtcacttgcctc

SEQ ID NO: 124485 - DNA, 25 bp, Artificial
  probe
  misc_feature (1)..(25): SEQ ID NO: 4232; WAN024CMK_at; Start 38; Stop 62
cagcgcctaaagacgctggctttca

SEQ ID NO: 124486 - DNA, 25 bp, Artificial
  probe
  misc_feature (1)..(25): SEQ ID NO: 4232; WAN024CMK_at; Start 14; Stop 38
gagctataagcccaaatcatcagcc

SEQ ID NO: 124487 - DNA, 25 bp, Artificial
  probe
  misc_feature (1)..(25): SEQ ID NO: 4915; WAN024CML_at; Start 65; Stop 89
agcttttgctatcctatttttctct

SEQ ID NO: 124488 - DNA, 25 bp, Artificial
  probe
  misc_feature (1)..(25): SEQ ID NO: 4915; WAN024CML_at; Start 51; Stop 75
ttctcctgaaatagagcttttgcta

SEQ ID NO: 124489 - DNA, 25 bp, Artificial
  probe
  misc_feature (1)..(25): SEQ ID NO: 4915; WAN024CML_at; Start 97; Stop 121
atgatttacttcaacttcttacctc

SEQ ID NO: 124490 - DNA, 25 bp, Artificial
  probe
  misc_feature (1)..(25): SEQ ID NO: 4915; WAN024CML_at; Start 25; Stop 49
tttattatggaaatatttgcttcat

SEQ ID NO: 124491 - DNA, 25 bp, Artificial
  probe
  misc_feature (1)..(25): SEQ ID NO: 4915; WAN024CML_at; Start 55; Stop 79
cctgaaatagagcttttgctatcct

SEQ ID NO: 124492 - DNA, 25 bp, Artificial
  probe
  misc_feature (1)..(25): SEQ ID NO: 4915; WAN024CML_at; Start 72; Stop 96
gctatcctatttttctctatttcta

SEQ ID NO: 124493 - DNA, 25 bp, Artificial
  probe
  misc_feature (1)..(25): SEQ ID NO: 4915; WAN024CML_at; Start 98; Stop 122
tgatttacttcaacttcttacctct

SEQ ID NO: 124494 - DNA, 25 bp, Artificial
  probe
  misc_feature (1)..(25): SEQ ID NO: 4915; WAN024CML_at; Start 61; Stop 85
atagagcttttgctatcctattttt

SEQ ID NO: 124495 - DNA, 25 bp, Artificial
  probe
  misc_feature (1)..(25): SEQ ID NO: 4915; WAN024CML_at; Start 50; Stop 74
tttctcctgaaatagagcttttgct

SEQ ID NO: 124496 - DNA, 25 bp, Artificial
  probe
  misc_feature (1)..(25): SEQ ID NO: 4915; WAN024CML_at; Start 68; Stop 92
ttttgctatcctatttttctctatt

SEQ ID NO: 124497 - DNA, 25 bp, Artificial
  probe
  misc_feature (1)..(25): SEQ ID NO: 4915; WAN024CML_at; Start 96; Stop 120
aatgatttacttcaacttcttacct

SEQ ID NO: 124498 - DNA, 25 bp, Artificial
  probe
  misc_feature (1)..(25): SEQ ID NO: 4915; WAN024CML_at; Start 52; Stop 76
tctcctgaaatagagcttttgctat

SEQ ID NO: 124499 - DNA, 25 bp, Artificial
  probe
  misc_feature (1)..(25): SEQ ID NO: 4915; WAN024CML_at; Start 100; Stop 124
atttacttcaacttcttacctcttg

SEQ ID NO: 124500 - DNA, 25 bp, Artificial
  probe
  misc_feature (1)..(25): SEQ ID NO: 4915; WAN024CML_at; Start 69; Stop 93
tttgctatcctatttttctctattt

SEQ ID NO: 124501 - DNA, 25 bp, Artificial
  probe
  misc_feature (1)..(25): SEQ ID NO: 4915; WAN024CML_at; Start 59; Stop 83
aaatagagcttttgctatcctattt

SEQ ID NO: 124502 - DNA, 25 bp, Artificial
  probe
  misc_feature (1)..(25): SEQ ID NO: 4915; WAN024CML_at; Start 63; Stop 87
agagcttttgctatcctatttttct

SEQ ID NO: 124503 - DNA, 25 bp, Artificial
  probe
  misc_feature (1)..(25): SEQ ID NO: 4915; WAN024CML_at; Start 53; Stop 77
ctcctgaaatagagcttttgctatc

SEQ ID NO: 124504 - DNA, 25 bp, Artificial
  probe
  misc_feature (1)..(25): SEQ ID NO: 4915; WAN024CML_at; Start 62; Stop 86
tagagcttttgctatcctatttttc

SEQ ID NO: 124505 - DNA, 25 bp, Artificial
  probe
  misc_feature (1)..(25): SEQ ID NO: 4915; WAN024CML_at; Start 56; Stop 80
ctgaaatagagcttttgctatccta

SEQ ID NO: 124506 - DNA, 25 bp, Artificial
  probe
  misc_feature (1)..(25): SEQ ID NO: 4915; WAN024CML_at; Start 95; Stop 119
taatgatttacttcaacttcttacc

SEQ ID NO: 124507 - DNA, 25 bp, Artificial
  probe
  misc_feature (1)..(25): SEQ ID NO: 4915; WAN024CML_at; Start 54; Stop 78
tcctgaaatagagcttttgctatcc

SEQ ID NO: 124508 - DNA, 25 bp, Artificial
  probe
  misc_feature (1)..(25): SEQ ID NO: 4915; WAN024CML_at; Start 57; Stop 81
tgaaatagagcttttgctatcctat

SEQ ID NO: 124509 - DNA, 25 bp, Artificial
  probe
  misc_feature (1)..(25): SEQ ID NO: 4915; WAN024CML_at; Start 24; Stop 48
ttttattatggaaatatttgcttca

SEQ ID NO: 124510 - DNA, 25 bp, Artificial
  probe
  misc_feature (1)..(25): SEQ ID NO: 4915; WAN024CML_at; Start 30; Stop 54
tatggaaatatttgcttcattttct

SEQ ID NO: 124511 - DNA, 25 bp, Artificial
  probe
  misc_feature (1)..(25): SEQ ID NO: 4915; WAN024CML_at; Start 64; Stop 88
gagcttttgctatcctatttttctc

SEQ ID NO: 124512 - DNA, 25 bp, Artificial
  probe
  misc_feature (1)..(25): SEQ ID NO: 4915; WAN024CML_at; Start 66; Stop 90
gcttttgctatcctatttttctcta

SEQ ID NO: 124513 - DNA, 25 bp, Artificial
  probe
  misc_feature (1)..(25): SEQ ID NO: 4915; WAN024CML_at; Start 49; Stop 73
ttttctcctgaaatagagcttttgc

SEQ ID NO: 124514 - DNA, 25 bp, Artificial
  probe
  misc_feature (1)..(25): SEQ ID NO: 4915; WAN024CML_at; Start 60; Stop 84
aatagagcttttgctatcctatttt

SEQ ID NO: 124515 - DNA, 25 bp, Artificial
  probe
  misc_feature (1)..(25): SEQ ID NO: 4915; WAN024CML_at; Start 67; Stop 91
cttttgctatcctatttttctctat

SEQ ID NO: 124516 - DNA, 25 bp, Artificial
  probe
  misc_feature (1)..(25): SEQ ID NO: 4915; WAN024CML_at; Start 103; Stop 127
tacttcaacttcttacctcttggga

SEQ ID NO: 124517 - DNA, 25 bp, Artificial
  probe
  misc_feature (1)..(25): SEQ ID NO: 4915; WAN024CML_at; Start 70; Stop 94
ttgctatcctatttttctctatttc

SEQ ID NO: 124518 - DNA, 25 bp, Artificial
  probe
  misc_feature (1)..(25): SEQ ID NO: 4915; WAN024CML_at; Start 58; Stop 82
gaaatagagcttttgctatcctatt

SEQ ID NO: 124519 - DNA, 25 bp, Artificial
  probe
  misc_feature (1)..(25): SEQ ID NO: 4915; WAN024CML_at; Start 71; Stop 95
tgctatcctatttttctctatttct

SEQ ID NO: 124520 - DNA, 25 bp, Artificial
  probe
  misc_feature (1)..(25): SEQ ID NO: 3338; WAN024CMM_at; Start 97; Stop 121
catagcgataccgttacaactaaga

SEQ ID NO: 124521 - DNA, 25 bp, Artificial
  probe
  misc_feature (1)..(25): SEQ ID NO: 3338; WAN024CMM_at; Start 80; Stop 104
tttctgaagcattaactcatagcga

SEQ ID NO: 124522 - DNA, 25 bp, Artificial
  probe
  misc_feature (1)..(25): SEQ ID NO: 3338; WAN024CMM_at; Start 154; Stop 178
tctgctggacaagttgcctaccaac

SEQ ID NO: 124523 - DNA, 25 bp, Artificial
  probe
  misc_feature (1)..(25): SEQ ID NO: 3338; WAN024CMM_at; Start 1; Stop 25
ctgacacacgctacaccgcataaat

SEQ ID NO: 124524 - DNA, 25 bp, Artificial
  probe
  misc_feature (1)..(25): SEQ ID NO: 3338; WAN024CMM_at; Start 101; Stop 125
gcgataccgttacaactaagactta

SEQ ID NO: 124525 - DNA, 25 bp, Artificial
  probe
  misc_feature (1)..(25): SEQ ID NO: 3338; WAN024CMM_at; Start 26; Stop 50
tacgacatacaggagcgacacttgc

SEQ ID NO: 124526 - DNA, 25 bp, Artificial
  probe
  misc_feature (1)..(25): SEQ ID NO: 3338; WAN024CMM_at; Start 3; Stop 27
gacacacgctacaccgcataaatta

SEQ ID NO: 124527 - DNA, 25 bp, Artificial
  probe
  misc_feature (1)..(25): SEQ ID NO: 3338; WAN024CMM_at; Start 76; Stop 100
gccatttctgaagcattaactcata

SEQ ID NO: 124528 - DNA, 25 bp, Artificial
  probe
  misc_feature (1)..(25): SEQ ID NO: 3338; WAN024CMM_at; Start 157; Stop 181
gctggacaagttgcctaccaacatc

SEQ ID NO: 124529 - DNA, 25 bp, Artificial
  probe
  misc_feature (1)..(25): SEQ ID NO: 3338; WAN024CMM_at; Start 147; Stop 171
tccattatctgctggacaagttgcc

SEQ ID NO: 124530 - DNA, 25 bp, Artificial
  probe
  misc_feature (1)..(25): SEQ ID NO: 3338; WAN024CMM_at; Start 7; Stop 31
cacgctacaccgcataaattacgac

SEQ ID NO: 124531 - DNA, 25 bp, Artificial
  probe
  misc_feature (1)..(25): SEQ ID NO: 3338; WAN024CMM_at; Start 168; Stop 192
tgcctaccaacatcttaaaaataag

SEQ ID NO: 124532 - DNA, 25 bp, Artificial
  probe
  misc_feature (1)..(25): SEQ ID NO: 3338; WAN024CMM_at; Start 137; Stop 161
caaacatagttccattatctgctgg

SEQ ID NO: 124533 - DNA, 25 bp, Artificial
  probe
  misc_feature (1)..(25): SEQ ID NO: 3338; WAN024CMM_at; Start 161; Stop 185
gacaagttgcctaccaacatcttaa

SEQ ID NO: 124534 - DNA, 25 bp, Artificial
  probe
  misc_feature (1)..(25): SEQ ID NO: 3338; WAN024CMM_at; Start 103; Stop 127
gataccgttacaactaagacttatg

SEQ ID NO: 124535 - DNA, 25 bp, Artificial
  probe
  misc_feature (1)..(25): SEQ ID NO: 3338; WAN024CMM_at; Start 31; Stop 55
catacaggagcgacacttgctaaaa

SEQ ID NO: 124536 - DNA, 25 bp, Artificial
  probe
  misc_feature (1)..(25): SEQ ID NO: 3338; WAN024CMM_at; Start 21; Stop 45
taaattacgacatacaggagcgaca

SEQ ID NO: 124537 - DNA, 25 bp, Artificial
  probe
  misc_feature (1)..(25): SEQ ID NO: 3338; WAN024CMM_at; Start 10; Stop 34
gctacaccgcataaattacgacata

SEQ ID NO: 124538 - DNA, 25 bp, Artificial
  probe
  misc_feature (1)..(25): SEQ ID NO: 3338; WAN024CMM_at; Start 126; Stop 150
tgttaatacttcaaacatagttcca

SEQ ID NO: 124539 - DNA, 25 bp, Artificial
  probe
  misc_feature (1)..(25): SEQ ID NO: 3338; WAN024CMM_at; Start 17; Stop 41
cgcataaattacgacatacaggagc

SEQ ID NO: 124540 - DNA, 25 bp, Artificial
  probe
  misc_feature (1)..(25): SEQ ID NO: 3338; WAN024CMM_at; Start 141; Stop 165
catagttccattatctgctggacaa

SEQ ID NO: 124541 - DNA, 25 bp, Artificial
  probe
  misc_feature (1)..(25): SEQ ID NO: 3338; WAN024CMM_at; Start 19; Stop 43
cataaattacgacatacaggagcga

SEQ ID NO: 124542 - DNA, 25 bp, Artificial
  probe
  misc_feature (1)..(25): SEQ ID NO: 3338; WAN024CMM_at; Start 14; Stop 38
caccgcataaattacgacatacagg

SEQ ID NO: 124543 - DNA, 25 bp, Artificial
  probe
  misc_feature (1)..(25): SEQ ID NO: 3338; WAN024CMM_at; Start 69; Stop 93
cttagaagccatttctgaagcatta

SEQ ID NO: 124544 - DNA, 25 bp, Artificial
  probe
  misc_feature (1)..(25): SEQ ID NO: 3338; WAN024CMM_at; Start 143; Stop 167
tagttccattatctgctggacaagt

SEQ ID NO: 124545 - DNA, 25 bp, Artificial
  probe
  misc_feature (1)..(25): SEQ ID NO: 3338; WAN024CMM_at; Start 113; Stop 137
caactaagacttatgttaatacttc

SEQ ID NO: 124546 - DNA, 25 bp, Artificial
  probe
  misc_feature (1)..(25): SEQ ID NO: 3338; WAN024CMM_at; Start 149; Stop 173
cattatctgctggacaagttgccta

SEQ ID NO: 124547 - DNA, 25 bp, Artificial
  probe
  misc_feature (1)..(25): SEQ ID NO: 3338; WAN024CMM_at; Start 152; Stop 176
tatctgctggacaagttgcctacca

SEQ ID NO: 124548 - DNA, 25 bp, Artificial
  probe
  misc_feature (1)..(25): SEQ ID NO: 3338; WAN024CMM_at; Start 28; Stop 52
cgacatacaggagcgacacttgcta

SEQ ID NO: 124549 - DNA, 25 bp, Artificial
  probe
  misc_feature (1)..(25): SEQ ID NO: 3338; WAN024CMM_at; Start 92; Stop 116
taactcatagcgataccgttacaac

SEQ ID NO: 124550 - DNA, 25 bp, Artificial
  probe
  misc_feature (1)..(25): SEQ ID NO: 3338; WAN024CMM_at; Start 85; Stop 109
gaagcattaactcatagcgataccg

SEQ ID NO: 124551 - DNA, 25 bp, Artificial
  probe
  misc_feature (1)..(25): SEQ ID NO: 3338; WAN024CMM_at; Start 35; Stop 59
caggagcgacacttgctaaaaaagc

SEQ ID NO: 124552 - DNA, 25 bp, Artificial
  probe
  misc_feature (1)..(25): SEQ ID NO: 3338; WAN024CMM_at; Start 73; Stop 97
gaagccatttctgaagcattaactc

SEQ ID NO: 124553 - DNA, 25 bp, Artificial
  probe
  misc_feature (1)..(25): SEQ ID NO: 3338; WAN024CMM_at; Start 88; Stop 112
gcattaactcatagcgataccgtta

SEQ ID NO: 124554 - DNA, 25 bp, Artificial
  probe
  misc_feature (1)..(25): SEQ ID NO: 3057; WAN024CMN_at; Start 33; Stop 57
caccaagtgtatcatcaccaaaaat

SEQ ID NO: 124555 - DNA, 25 bp, Artificial
  probe
  misc_feature (1)..(25): SEQ ID NO: 3057; WAN024CMN_at; Start 69; Stop 93
ggagaatgtagatgcctacaatcta

SEQ ID NO: 124556 - DNA, 25 bp, Artificial
  probe
  misc_feature (1)..(25): SEQ ID NO: 3057; WAN024CMN_at; Start 19; Stop 43
cagatgatatctgtcaccaagtgta

SEQ ID NO: 124557 - DNA, 25 bp, Artificial
  probe
  misc_feature (1)..(25): SEQ ID NO: 3057; WAN024CMN_at; Start 5; Stop 29
tgcaaaagtacacacagatgatatc

SEQ ID NO: 124558 - DNA, 25 bp, Artificial
  probe
  misc_feature (1)..(25): SEQ ID NO: 3057; WAN024CMN_at; Start 26; Stop 50
tatctgtcaccaagtgtatcatcac

SEQ ID NO: 124559 - DNA, 25 bp, Artificial
  probe
  misc_feature (1)..(25): SEQ ID NO: 3057; WAN024CMN_at; Start 30; Stop 54
tgtcaccaagtgtatcatcaccaaa

SEQ ID NO: 124560 - DNA, 25 bp, Artificial
  probe
  misc_feature (1)..(25): SEQ ID NO: 3057; WAN024CMN_at; Start 29; Stop 53
ctgtcaccaagtgtatcatcaccaa

SEQ ID NO: 124561 - DNA, 25 bp, Artificial
  probe
  misc_feature (1)..(25): SEQ ID NO: 3057; WAN024CMN_at; Start 75; Stop 99
tgtagatgcctacaatctaactaat

SEQ ID NO: 124562 - DNA, 25 bp, Artificial
  probe
  misc_feature (1)..(25): SEQ ID NO: 3057; WAN024CMN_at; Start 67; Stop 91
caggagaatgtagatgcctacaatc

SEQ ID NO: 124563 - DNA, 25 bp, Artificial
  probe
  misc_feature (1)..(25): SEQ ID NO: 3057; WAN024CMN_at; Start 13; Stop 37
tacacacagatgatatctgtcacca

SEQ ID NO: 124564 - DNA, 25 bp, Artificial
  probe
  misc_feature (1)..(25): SEQ ID NO: 3057; WAN024CMN_at; Start 64; Stop 88
acacaggagaatgtagatgcctaca

SEQ ID NO: 124565 - DNA, 25 bp, Artificial
  probe
  misc_feature (1)..(25): SEQ ID NO: 3057; WAN024CMN_at; Start 15; Stop 39
cacacagatgatatctgtcaccaag

SEQ ID NO: 124566 - DNA, 25 bp, Artificial
  probe
  misc_feature (1)..(25): SEQ ID NO: 3057; WAN024CMN_at; Start 31; Stop 55
gtcaccaagtgtatcatcaccaaaa

SEQ ID NO: 124567 - DNA, 25 bp, Artificial
  probe
  misc_feature (1)..(25): SEQ ID NO: 3057; WAN024CMN_at; Start 60; Stop 84
aaaaacacaggagaatgtagatgcc

SEQ ID NO: 124568 - DNA, 25 bp, Artificial
  probe
  misc_feature (1)..(25): SEQ ID NO: 3057; WAN024CMN_at; Start 17; Stop 41
cacagatgatatctgtcaccaagtg

SEQ ID NO: 124569 - DNA, 25 bp, Artificial
  probe
  misc_feature (1)..(25): SEQ ID NO: 3057; WAN024CMN_at; Start 62; Stop 86
aaacacaggagaatgtagatgccta

SEQ ID NO: 124570 - DNA, 25 bp, Artificial
  probe
  misc_feature (1)..(25): SEQ ID NO: 3057; WAN024CMN_at; Start 7; Stop 31
caaaagtacacacagatgatatctg

SEQ ID NO: 124571 - DNA, 25 bp, Artificial
  probe
  misc_feature (1)..(25): SEQ ID NO: 3057; WAN024CMN_at; Start 63; Stop 87
aacacaggagaatgtagatgcctac

SEQ ID NO: 124572 - DNA, 25 bp, Artificial
  probe
  misc_feature (1)..(25): SEQ ID NO: 3057; WAN024CMN_at; Start 2; Stop 26
tgttgcaaaagtacacacagatgat

SEQ ID NO: 124573 - DNA, 25 bp, Artificial
  probe
  misc_feature (1)..(25): SEQ ID NO: 3057; WAN024CMN_at; Start 11; Stop 35
agtacacacagatgatatctgtcac

SEQ ID NO: 124574 - DNA, 25 bp, Artificial
  probe
  misc_feature (1)..(25): SEQ ID NO: 3057; WAN024CMN_at; Start 6; Stop 30
gcaaaagtacacacagatgatatct

SEQ ID NO: 124575 - DNA, 25 bp, Artificial
  probe
  misc_feature (1)..(25): SEQ ID NO: 3057; WAN024CMN_at; Start 61; Stop 85
aaaacacaggagaatgtagatgcct

SEQ ID NO: 124576 - DNA, 25 bp, Artificial
  probe
  misc_feature (1)..(25): SEQ ID NO: 3057; WAN024CMN_at; Start 36; Stop 60
caagtgtatcatcaccaaaaataaa

SEQ ID NO: 124577 - DNA, 25 bp, Artificial
  probe
  misc_feature (1)..(25): SEQ ID NO: 3057; WAN024CMN_at; Start 21; Stop 45
gatgatatctgtcaccaagtgtatc

SEQ ID NO: 124578 - DNA, 25 bp, Artificial
  probe
  misc_feature (1)..(25): SEQ ID NO: 3057; WAN024CMN_at; Start 20; Stop 44
agatgatatctgtcaccaagtgtat

SEQ ID NO: 124579 - DNA, 25 bp, Artificial
  probe
  misc_feature (1)..(25): SEQ ID NO: 3057; WAN024CMN_at; Start 45; Stop 69
catcaccaaaaataaaaaaacacag

SEQ ID NO: 124580 - DNA, 25 bp, Artificial
  probe
  misc_feature (1)..(25): SEQ ID NO: 3057; WAN024CMN_at; Start 72; Stop 96
gaatgtagatgcctacaatctaact

SEQ ID NO: 124581 - DNA, 25 bp, Artificial
  probe
  misc_feature (1)..(25): SEQ ID NO: 3057; WAN024CMN_at; Start 39; Stop 63
gtgtatcatcaccaaaaataaaaaa

SEQ ID NO: 124582 - DNA, 25 bp, Artificial
  probe
  misc_feature (1)..(25): SEQ ID NO: 3057; WAN024CMN_at; Start 65; Stop 89
cacaggagaatgtagatgcctacaa

SEQ ID NO: 124583 - DNA, 25 bp, Artificial
  probe
  misc_feature (1)..(25): SEQ ID NO: 3057; WAN024CMN_at; Start 3; Stop 27
gttgcaaaagtacacacagatgata

SEQ ID NO: 124584 - DNA, 25 bp, Artificial
  probe
  misc_feature (1)..(25): SEQ ID NO: 3057; WAN024CMN_at; Start 24; Stop 48
gatatctgtcaccaagtgtatcatc

SEQ ID NO: 124585 - DNA, 25 bp, Artificial
  probe
  misc_feature (1)..(25): SEQ ID NO: 3057; WAN024CMN_at; Start 70; Stop 94
gagaatgtagatgcctacaatctaa

SEQ ID NO: 124586 - DNA, 25 bp, Artificial
  probe
  misc_feature (1)..(25): SEQ ID NO: 3057; WAN024CMN_at; Start 9; Stop 33
aaagtacacacagatgatatctgtc

SEQ ID NO: 124587 - DNA, 25 bp, Artificial
  probe
  misc_feature (1)..(25): SEQ ID NO: 3057; WAN024CMN_at; Start 28; Stop 52
tctgtcaccaagtgtatcatcacca

SEQ ID NO: 124588 - DNA, 25 bp, Artificial
  probe
  misc_feature (1)..(25): SEQ ID NO: 2928; WAN024CMO_at; Start 59; Stop 83
cagcctttgtgacctcacgcgcatt

SEQ ID NO: 124589 - DNA, 25 bp, Artificial
  probe
  misc_feature (1)..(25): SEQ ID NO: 2928; WAN024CMO_at; Start 39; Stop 63
tctccatagaagctctatcgcagcc

SEQ ID NO: 124590 - DNA, 25 bp, Artificial
  probe
  misc_feature (1)..(25): SEQ ID NO: 2928; WAN024CMO_at; Start 29; Stop 53
aaaaagaaattctccatagaagctc

SEQ ID NO: 124591 - DNA, 25 bp, Artificial
  probe
  misc_feature (1)..(25): SEQ ID NO: 2928; WAN024CMO_at; Start 47; Stop 71
gaagctctatcgcagcctttgtgac

SEQ ID NO: 124592 - DNA, 25 bp, Artificial
  probe
  misc_feature (1)..(25): SEQ ID NO: 2928; WAN024CMO_at; Start 77; Stop 101
gcgcattctccgatacagtatcacc

SEQ ID NO: 124593 - DNA, 25 bp, Artificial
  probe
  misc_feature (1)..(25): SEQ ID NO: 2928; WAN024CMO_at; Start 79; Stop 103
gcattctccgatacagtatcaccga

SEQ ID NO: 124594 - DNA, 25 bp, Artificial
  probe
  misc_feature (1)..(25): SEQ ID NO: 2928; WAN024CMO_at; Start 6; Stop 30
tcattcctttaaaaaatctctccaa

SEQ ID NO: 124595 - DNA, 25 bp, Artificial
  probe
  misc_feature (1)..(25): SEQ ID NO: 2928; WAN024CMO_at; Start 64; Stop 88
tttgtgacctcacgcgcattctccg

SEQ ID NO: 124596 - DNA, 25 bp, Artificial
  probe
  misc_feature (1)..(25): SEQ ID NO: 2928; WAN024CMO_at; Start 61; Stop 85
gcctttgtgacctcacgcgcattct

SEQ ID NO: 124597 - DNA, 25 bp, Artificial
  probe
  misc_feature (1)..(25): SEQ ID NO: 2928; WAN024CMO_at; Start 53; Stop 77
ctatcgcagcctttgtgacctcacg

SEQ ID NO: 124598 - DNA, 25 bp, Artificial
  probe
  misc_feature (1)..(25): SEQ ID NO: 2928; WAN024CMO_at; Start 82; Stop 106
ttctccgatacagtatcaccgattc

SEQ ID NO: 124599 - DNA, 25 bp, Artificial
  probe
  misc_feature (1)..(25): SEQ ID NO: 2928; WAN024CMO_at; Start 51; Stop 75
ctctatcgcagcctttgtgacctca

SEQ ID NO: 124600 - DNA, 25 bp, Artificial
  probe
  misc_feature (1)..(25): SEQ ID NO: 2928; WAN024CMO_at; Start 43; Stop 67
catagaagctctatcgcagcctttg

SEQ ID NO: 124601 - DNA, 25 bp, Artificial
  probe
  misc_feature (1)..(25): SEQ ID NO: 2928; WAN024CMO_at; Start 20; Stop 44
aatctctccaaaaagaaattctcca

SEQ ID NO: 124602 - DNA, 25 bp, Artificial
  probe
  misc_feature (1)..(25): SEQ ID NO: 2928; WAN024CMO_at; Start 84; Stop 108
ctccgatacagtatcaccgattcta

SEQ ID NO: 124603 - DNA, 25 bp, Artificial
  probe
  misc_feature (1)..(25): SEQ ID NO: 2928; WAN024CMO_at; Start 48; Stop 72
aagctctatcgcagcctttgtgacc

SEQ ID NO: 124604 - DNA, 25 bp, Artificial
  probe
  misc_feature (1)..(25): SEQ ID NO: 2928; WAN024CMO_at; Start 58; Stop 82
gcagcctttgtgacctcacgcgcat

SEQ ID NO: 124605 - DNA, 25 bp, Artificial
  probe
  misc_feature (1)..(25): SEQ ID NO: 2928; WAN024CMO_at; Start 36; Stop 60
aattctccatagaagctctatcgca

SEQ ID NO: 124606 - DNA, 25 bp, Artificial
  probe
  misc_feature (1)..(25): SEQ ID NO: 2928; WAN024CMO_at; Start 34; Stop 58
gaaattctccatagaagctctatcg

SEQ ID NO: 124607 - DNA, 25 bp, Artificial
  probe
  misc_feature (1)..(25): SEQ ID NO: 2928; WAN024CMO_at; Start 45; Stop 69
tagaagctctatcgcagcctttgtg

SEQ ID NO: 124608 - DNA, 25 bp, Artificial
  probe
  misc_feature (1)..(25): SEQ ID NO: 2928; WAN024CMO_at; Start 23; Stop 47
ctctccaaaaagaaattctccatag

SEQ ID NO: 124609 - DNA, 25 bp, Artificial
  probe
  misc_feature (1)..(25): SEQ ID NO: 2928; WAN024CMO_at; Start 74; Stop 98
cacgcgcattctccgatacagtatc

SEQ ID NO: 124610 - DNA, 25 bp, Artificial
  probe
  misc_feature (1)..(25): SEQ ID NO: 2928; WAN024CMO_at; Start 80; Stop 104
cattctccgatacagtatcaccgat

SEQ ID NO: 124611 - DNA, 25 bp, Artificial
  probe
  misc_feature (1)..(25): SEQ ID NO: 2928; WAN024CMO_at; Start 28; Stop 52
caaaaagaaattctccatagaagct

SEQ ID NO: 124612 - DNA, 25 bp, Artificial
  probe
  misc_feature (1)..(25): SEQ ID NO: 2928; WAN024CMO_at; Start 72; Stop 96
ctcacgcgcattctccgatacagta

SEQ ID NO: 124613 - DNA, 25 bp, Artificial
  probe
  misc_feature (1)..(25): SEQ ID NO: 2928; WAN024CMO_at; Start 49; Stop 73
agctctatcgcagcctttgtgacct

SEQ ID NO: 124614 - DNA, 25 bp, Artificial
  probe
  misc_feature (1)..(25): SEQ ID NO: 2928; WAN024CMO_at; Start 54; Stop 78
tatcgcagcctttgtgacctcacgc

SEQ ID NO: 124615 - DNA, 25 bp, Artificial
  probe
  misc_feature (1)..(25): SEQ ID NO: 2928; WAN024CMO_at; Start 31; Stop 55
aaagaaattctccatagaagctcta

SEQ ID NO: 124616 - DNA, 25 bp, Artificial
  probe
  misc_feature (1)..(25): SEQ ID NO: 2928; WAN024CMO_at; Start 73; Stop 97
tcacgcgcattctccgatacagtat

SEQ ID NO: 124617 - DNA, 25 bp, Artificial
  probe
  misc_feature (1)..(25): SEQ ID NO: 2928; WAN024CMO_at; Start 41; Stop 65
tccatagaagctctatcgcagcctt

SEQ ID NO: 124618 - DNA, 25 bp, Artificial
  probe
  misc_feature (1)..(25): SEQ ID NO: 2928; WAN024CMO_at; Start 52; Stop 76
tctatcgcagcctttgtgacctcac

SEQ ID NO: 124619 - DNA, 25 bp, Artificial
  probe
  misc_feature (1)..(25): SEQ ID NO: 2928; WAN024CMO_at; Start 38; Stop 62
ttctccatagaagctctatcgcagc

SEQ ID NO: 124620 - DNA, 25 bp, Artificial
  probe
  misc_feature (1)..(25): SEQ ID NO: 2928; WAN024CMO_at; Start 2; Stop 26
tgtctcattcctttaaaaaatctct

SEQ ID NO: 124621 - DNA, 25 bp, Artificial
  probe
  misc_feature (1)..(25): SEQ ID NO: 2928; WAN024CMO_at; Start 26; Stop 50
tccaaaaagaaattctccatagaag

SEQ ID NO: 124622 - DNA, 25 bp, Artificial
  probe
  misc_feature (1)..(25): SEQ ID NO: 5586; WAN024CMP_at; Start 11; Stop 35
caagatacaaagctcgtaaagaaca

SEQ ID NO: 124623 - DNA, 25 bp, Artificial
  probe
  misc_feature (1)..(25): SEQ ID NO: 5586; WAN024CMP_at; Start 23; Stop 47
ctcgtaaagaacaaagcaaaattag

SEQ ID NO: 124624 - DNA, 25 bp, Artificial
  probe
  misc_feature (1)..(25): SEQ ID NO: 5586; WAN024CMP_at; Start 75; Stop 99
agccaacttatctattttgcacagt

SEQ ID NO: 124625 - DNA, 25 bp, Artificial
  probe
  misc_feature (1)..(25): SEQ ID NO: 5586; WAN024CMP_at; Start 71; Stop 95
aacaagccaacttatctattttgca

SEQ ID NO: 124626 - DNA, 25 bp, Artificial
  probe
  misc_feature (1)..(25): SEQ ID NO: 5586; WAN024CMP_at; Start 74; Stop 98
aagccaacttatctattttgcacag

SEQ ID NO: 124627 - DNA, 25 bp, Artificial
  probe
  misc_feature (1)..(25): SEQ ID NO: 5586; WAN024CMP_at; Start 18; Stop 42
caaagctcgtaaagaacaaagcaaa

SEQ ID NO: 124628 - DNA, 25 bp, Artificial
  probe
  misc_feature (1)..(25): SEQ ID NO: 5586; WAN024CMP_at; Start 8; Stop 32
aatcaagatacaaagctcgtaaaga

SEQ ID NO: 124629 - DNA, 25 bp, Artificial
  probe
  misc_feature (1)..(25): SEQ ID NO: 5586; WAN024CMP_at; Start 3; Stop 27
ggtaaaatcaagatacaaagctcgt

SEQ ID NO: 124630 - DNA, 25 bp, Artificial
  probe
  misc_feature (1)..(25): SEQ ID NO: 5586; WAN024CMP_at; Start 34; Stop 58
caaagcaaaattaggaagttggaga

SEQ ID NO: 124631 - DNA, 25 bp, Artificial
  probe
  misc_feature (1)..(25): SEQ ID NO: 5586; WAN024CMP_at; Start 7; Stop 31
aaatcaagatacaaagctcgtaaag

SEQ ID NO: 124632 - DNA, 25 bp, Artificial
  probe
  misc_feature (1)..(25): SEQ ID NO: 5586; WAN024CMP_at; Start 15; Stop 39
atacaaagctcgtaaagaacaaagc

SEQ ID NO: 124633 - DNA, 25 bp, Artificial
  probe
  misc_feature (1)..(25): SEQ ID NO: 5586; WAN024CMP_at; Start 5; Stop 29
taaaatcaagatacaaagctcgtaa

SEQ ID NO: 124634 - DNA, 25 bp, Artificial
  probe
  misc_feature (1)..(25): SEQ ID NO: 5586; WAN024CMP_at; Start 16; Stop 40
tacaaagctcgtaaagaacaaagca

SEQ ID NO: 124635 - DNA, 25 bp, Artificial
  probe
  misc_feature (1)..(25): SEQ ID NO: 5586; WAN024CMP_at; Start 12; Stop 36
aagatacaaagctcgtaaagaacaa

SEQ ID NO: 124636 - DNA, 25 bp, Artificial
  probe
  misc_feature (1)..(25): SEQ ID NO: 5586; WAN024CMP_at; Start 30; Stop 54
agaacaaagcaaaattaggaagttg

SEQ ID NO: 124637 - DNA, 25 bp, Artificial
  probe
  misc_feature (1)..(25): SEQ ID NO: 5586; WAN024CMP_at; Start 36; Stop 60
aagcaaaattaggaagttggagaag

SEQ ID NO: 124638 - DNA, 25 bp, Artificial
  probe
  misc_feature (1)..(25): SEQ ID NO: 5586; WAN024CMP_at; Start 20; Stop 44
aagctcgtaaagaacaaagcaaaat

SEQ ID NO: 124639 - DNA, 25 bp, Artificial
  probe
  misc_feature (1)..(25): SEQ ID NO: 5586; WAN024CMP_at; Start 10; Stop 34
tcaagatacaaagctcgtaaagaac

SEQ ID NO: 124640 - DNA, 25 bp, Artificial
  probe
  misc_feature (1)..(25): SEQ ID NO: 5586; WAN024CMP_at; Start 14; Stop 38
gatacaaagctcgtaaagaacaaag

SEQ ID NO: 124641 - DNA, 25 bp, Artificial
  probe
  misc_feature (1)..(25): SEQ ID NO: 5586; WAN024CMP_at; Start 73; Stop 97
caagccaacttatctattttgcaca

SEQ ID NO: 124642 - DNA, 25 bp, Artificial
  probe
  misc_feature (1)..(25): SEQ ID NO: 5586; WAN024CMP_at; Start 22; Stop 46
gctcgtaaagaacaaagcaaaatta

SEQ ID NO: 124643 - DNA, 25 bp, Artificial
  probe
  misc_feature (1)..(25): SEQ ID NO: 5586; WAN024CMP_at; Start 64; Stop 88
gtttacaaacaagccaacttatcta

SEQ ID NO: 124644 - DNA, 25 bp, Artificial
  probe
  misc_feature (1)..(25): SEQ ID NO: 5586; WAN024CMP_at; Start 4; Stop 28
gtaaaatcaagatacaaagctcgta

SEQ ID NO: 124645 - DNA, 25 bp, Artificial
  probe
  misc_feature (1)..(25): SEQ ID NO: 5586; WAN024CMP_at; Start 2; Stop 26
tggtaaaatcaagatacaaagctcg

SEQ ID NO: 124646 - DNA, 25 bp, Artificial
  probe
  misc_feature (1)..(25): SEQ ID NO: 5586; WAN024CMP_at; Start 63; Stop 87
tgtttacaaacaagccaacttatct

SEQ ID NO: 124647 - DNA, 25 bp, Artificial
  probe
  misc_feature (1)..(25): SEQ ID NO: 5586; WAN024CMP_at; Start 37; Stop 61
agcaaaattaggaagttggagaagt

SEQ ID NO: 124648 - DNA, 25 bp, Artificial
  probe
  misc_feature (1)..(25): SEQ ID NO: 5586; WAN024CMP_at; Start 53; Stop 77
tggagaagtttgtttacaaacaagc

SEQ ID NO: 124649 - DNA, 25 bp, Artificial
  probe
  misc_feature (1)..(25): SEQ ID NO: 5586; WAN024CMP_at; Start 76; Stop 100
gccaacttatctattttgcacagtt

SEQ ID NO: 124650 - DNA, 25 bp, Artificial
  probe
  misc_feature (1)..(25): SEQ ID NO: 5586; WAN024CMP_at; Start 78; Stop 102
caacttatctattttgcacagttct

SEQ ID NO: 124651 - DNA, 25 bp, Artificial
  probe
  misc_feature (1)..(25): SEQ ID NO: 5586; WAN024CMP_at; Start 55; Stop 79
gagaagtttgtttacaaacaagcca

SEQ ID NO: 124652 - DNA, 25 bp, Artificial
  probe
  misc_feature (1)..(25): SEQ ID NO: 5586; WAN024CMP_at; Start 33; Stop 57
acaaagcaaaattaggaagttggag

SEQ ID NO: 124653 - DNA, 25 bp, Artificial
  probe
  misc_feature (1)..(25): SEQ ID NO: 5586; WAN024CMP_at; Start 67; Stop 91
tacaaacaagccaacttatctattt

SEQ ID NO: 124654 - DNA, 25 bp, Artificial
  probe
  misc_feature (1)..(25): SEQ ID NO: 5586; WAN024CMP_at; Start 17; Stop 41
acaaagctcgtaaagaacaaagcaa

SEQ ID NO: 124655 - DNA, 25 bp, Artificial
  probe
  misc_feature (1)..(25): SEQ ID NO: 5586; WAN024CMP_at; Start 70; Stop 94
aaacaagccaacttatctattttgc

SEQ ID NO: 124656 - DNA, 25 bp, Artificial
  probe
  misc_feature (1)..(25): SEQ ID NO: 5574; WAN024CMQ_at; Start 28; Stop 52
tccttgaaaaaagtcacagcagtca

SEQ ID NO: 124657 - DNA, 25 bp, Artificial
  probe
  misc_feature (1)..(25): SEQ ID NO: 5574; WAN024CMQ_at; Start 41; Stop 65
tcacagcagtcatcacagacgatag

SEQ ID NO: 124658 - DNA, 25 bp, Artificial
  probe
  misc_feature (1)..(25): SEQ ID NO: 5574; WAN024CMQ_at; Start 26; Stop 50
gttccttgaaaaaagtcacagcagt

SEQ ID NO: 124659 - DNA, 25 bp, Artificial
  probe
  misc_feature (1)..(25): SEQ ID NO: 5574; WAN024CMQ_at; Start 56; Stop 80
cagacgatagtactgaacaaaacta

SEQ ID NO: 124660 - DNA, 25 bp, Artificial
  probe
  misc_feature (1)..(25): SEQ ID NO: 5574; WAN024CMQ_at; Start 54; Stop 78
cacagacgatagtactgaacaaaac

SEQ ID NO: 124661 - DNA, 25 bp, Artificial
  probe
  misc_feature (1)..(25): SEQ ID NO: 5574; WAN024CMQ_at; Start 51; Stop 75
catcacagacgatagtactgaacaa

SEQ ID NO: 124662 - DNA, 25 bp, Artificial
  probe
  misc_feature (1)..(25): SEQ ID NO: 5574; WAN024CMQ_at; Start 46; Stop 70
gcagtcatcacagacgatagtactg

SEQ ID NO: 124663 - DNA, 25 bp, Artificial
  probe
  misc_feature (1)..(25): SEQ ID NO: 5574; WAN024CMQ_at; Start 34; Stop 58
aaaaaagtcacagcagtcatcacag

SEQ ID NO: 124664 - DNA, 25 bp, Artificial
  probe
  misc_feature (1)..(25): SEQ ID NO: 5574; WAN024CMQ_at; Start 97; Stop 121
tatacgcaggtgattgtactaacta

SEQ ID NO: 124665 - DNA, 25 bp, Artificial
  probe
  misc_feature (1)..(25): SEQ ID NO: 5574; WAN024CMQ_at; Start 30; Stop 54
cttgaaaaaagtcacagcagtcatc

SEQ ID NO: 124666 - DNA, 25 bp, Artificial
  probe
  misc_feature (1)..(25): SEQ ID NO: 5574; WAN024CMQ_at; Start 25; Stop 49
tgttccttgaaaaaagtcacagcag

SEQ ID NO: 124667 - DNA, 25 bp, Artificial
  probe
  misc_feature (1)..(25): SEQ ID NO: 5574; WAN024CMQ_at; Start 44; Stop 68
cagcagtcatcacagacgatagtac

SEQ ID NO: 124668 - DNA, 25 bp, Artificial
  probe
  misc_feature (1)..(25): SEQ ID NO: 5574; WAN024CMQ_at; Start 42; Stop 66
cacagcagtcatcacagacgatagt

SEQ ID NO: 124669 - DNA, 25 bp, Artificial
  probe
  misc_feature (1)..(25): SEQ ID NO: 5574; WAN024CMQ_at; Start 82; Stop 106
gaagagttagaaatttatacgcagg

SEQ ID NO: 124670 - DNA, 25 bp, Artificial
  probe
  misc_feature (1)..(25): SEQ ID NO: 5574; WAN024CMQ_at; Start 93; Stop 117
aatttatacgcaggtgattgtacta

SEQ ID NO: 124671 - DNA, 25 bp, Artificial
  probe
  misc_feature (1)..(25): SEQ ID NO: 5574; WAN024CMQ_at; Start 99; Stop 123
tacgcaggtgattgtactaactaat

SEQ ID NO: 124672 - DNA, 25 bp, Artificial
  probe
  misc_feature (1)..(25): SEQ ID NO: 5574; WAN024CMQ_at; Start 38; Stop 62
aagtcacagcagtcatcacagacga

SEQ ID NO: 124673 - DNA, 25 bp, Artificial
  probe
  misc_feature (1)..(25): SEQ ID NO: 5574; WAN024CMQ_at; Start 21; Stop 45
catctgttccttgaaaaaagtcaca

SEQ ID NO: 124674 - DNA, 25 bp, Artificial
  probe
  misc_feature (1)..(25): SEQ ID NO: 5574; WAN024CMQ_at; Start 33; Stop 57
gaaaaaagtcacagcagtcatcaca

SEQ ID NO: 124675 - DNA, 25 bp, Artificial
  probe
  misc_feature (1)..(25): SEQ ID NO: 5574; WAN024CMQ_at; Start 85; Stop 109
gagttagaaatttatacgcaggtga

SEQ ID NO: 124676 - DNA, 25 bp, Artificial
  probe
  misc_feature (1)..(25): SEQ ID NO: 5574; WAN024CMQ_at; Start 69; Stop 93
tgaacaaaactatgaagagttagaa

SEQ ID NO: 124677 - DNA, 25 bp, Artificial
  probe
  misc_feature (1)..(25): SEQ ID NO: 5574; WAN024CMQ_at; Start 17; Stop 41
gcttcatctgttccttgaaaaaagt

SEQ ID NO: 124678 - DNA, 25 bp, Artificial
  probe
  misc_feature (1)..(25): SEQ ID NO: 5574; WAN024CMQ_at; Start 91; Stop 115
gaaatttatacgcaggtgattgtac

SEQ ID NO: 124679 - DNA, 25 bp, Artificial
  probe
  misc_feature (1)..(25): SEQ ID NO: 5574; WAN024CMQ_at; Start 58; Stop 82
gacgatagtactgaacaaaactatg

SEQ ID NO: 124680 - DNA, 25 bp, Artificial
  probe
  misc_feature (1)..(25): SEQ ID NO: 5574; WAN024CMQ_at; Start 48; Stop 72
agtcatcacagacgatagtactgaa

SEQ ID NO: 124681 - DNA, 25 bp, Artificial
  probe
  misc_feature (1)..(25): SEQ ID NO: 5574; WAN024CMQ_at; Start 23; Stop 47
tctgttccttgaaaaaagtcacagc

SEQ ID NO: 124682 - DNA, 25 bp, Artificial
  probe
  misc_feature (1)..(25): SEQ ID NO: 5574; WAN024CMQ_at; Start 88; Stop 112
ttagaaatttatacgcaggtgattg

SEQ ID NO: 124683 - DNA, 25 bp, Artificial
  probe
  misc_feature (1)..(25): SEQ ID NO: 5574; WAN024CMQ_at; Start 95; Stop 119
tttatacgcaggtgattgtactaac

SEQ ID NO: 124684 - DNA, 25 bp, Artificial
  probe
  misc_feature (1)..(25): SEQ ID NO: 5574; WAN024CMQ_at; Start 65; Stop 89
gtactgaacaaaactatgaagagtt

SEQ ID NO: 124685 - DNA, 25 bp, Artificial
  probe
  misc_feature (1)..(25): SEQ ID NO: 5574; WAN024CMQ_at; Start 39; Stop 63
agtcacagcagtcatcacagacgat

SEQ ID NO: 124686 - DNA, 25 bp, Artificial
  probe
  misc_feature (1)..(25): SEQ ID NO: 5574; WAN024CMQ_at; Start 35; Stop 59
aaaaagtcacagcagtcatcacaga

SEQ ID NO: 124687 - DNA, 25 bp, Artificial
  probe
  misc_feature (1)..(25): SEQ ID NO: 5574; WAN024CMQ_at; Start 32; Stop 56
tgaaaaaagtcacagcagtcatcac

SEQ ID NO: 124688 - DNA, 25 bp, Artificial
  probe
  misc_feature (1)..(25): SEQ ID NO: 5574; WAN024CMQ_at; Start 63; Stop 87
tagtactgaacaaaactatgaagag

SEQ ID NO: 124689 - DNA, 25 bp, Artificial
  probe
  misc_feature (1)..(25): SEQ ID NO: 5574; WAN024CMQ_at; Start 37; Stop 61
aaagtcacagcagtcatcacagacg

SEQ ID NO: 124690 - DNA, 25 bp, Artificial
  probe
  misc_feature (1)..(25): SEQ ID NO: 4147; WAN024CMR_at; Start 76; Stop 100
acggacttactcattgactcttcaa

SEQ ID NO: 124691 - DNA, 25 bp, Artificial
  probe
  misc_feature (1)..(25): SEQ ID NO: 4147; WAN024CMR_at; Start 77; Stop 101
cggacttactcattgactcttcaaa

SEQ ID NO: 124692 - DNA, 25 bp, Artificial
  probe
  misc_feature (1)..(25): SEQ ID NO: 4147; WAN024CMR_at; Start 6; Stop 30
tggacgtgtaataacctcttctttc

SEQ ID NO: 124693 - DNA, 25 bp, Artificial
  probe
  misc_feature (1)..(25): SEQ ID NO: 4147; WAN024CMR_at; Start 1; Stop 25
gtggatggacgtgtaataacctctt

SEQ ID NO: 124694 - DNA, 25 bp, Artificial
  probe
  misc_feature (1)..(25): SEQ ID NO: 4147; WAN024CMR_at; Start 16; Stop 40
ataacctcttctttcgaggagtatt

SEQ ID NO: 124695 - DNA, 25 bp, Artificial
  probe
  misc_feature (1)..(25): SEQ ID NO: 4147; WAN024CMR_at; Start 4; Stop 28
gatggacgtgtaataacctcttctt

SEQ ID NO: 124696 - DNA, 25 bp, Artificial
  probe
  misc_feature (1)..(25): SEQ ID NO: 4147; WAN024CMR_at; Start 14; Stop 38
taataacctcttctttcgaggagta

SEQ ID NO: 124697 - DNA, 25 bp, Artificial
  probe
  misc_feature (1)..(25): SEQ ID NO: 4147; WAN024CMR_at; Start 51; Stop 75
actagccttggagcgttccccagaa

SEQ ID NO: 124698 - DNA, 25 bp, Artificial
  probe
  misc_feature (1)..(25): SEQ ID NO: 4147; WAN024CMR_at; Start 83; Stop 107
tactcattgactcttcaaagatttg

SEQ ID NO: 124699 - DNA, 25 bp, Artificial
  probe
  misc_feature (1)..(25): SEQ ID NO: 4147; WAN024CMR_at; Start 75; Stop 99
aacggacttactcattgactcttca

SEQ ID NO: 124700 - DNA, 25 bp, Artificial
  probe
  misc_feature (1)..(25): SEQ ID NO: 4147; WAN024CMR_at; Start 79; Stop 103
gacttactcattgactcttcaaaga

SEQ ID NO: 124701 - DNA, 25 bp, Artificial
  probe
  misc_feature (1)..(25): SEQ ID NO: 4147; WAN024CMR_at; Start 50; Stop 74
aactagccttggagcgttccccaga

SEQ ID NO: 124702 - DNA, 25 bp, Artificial
  probe
  misc_feature (1)..(25): SEQ ID NO: 4147; WAN024CMR_at; Start 10; Stop 34
cgtgtaataacctcttctttcgagg

SEQ ID NO: 124703 - DNA, 25 bp, Artificial
  probe
  misc_feature (1)..(25): SEQ ID NO: 4147; WAN024CMR_at; Start 74; Stop 98
aaacggacttactcattgactcttc

SEQ ID NO: 124704 - DNA, 25 bp, Artificial
  probe
  misc_feature (1)..(25): SEQ ID NO: 4147; WAN024CMR_at; Start 70; Stop 94
ccagaaacggacttactcattgact

SEQ ID NO: 124705 - DNA, 25 bp, Artificial
  probe
  misc_feature (1)..(25): SEQ ID NO: 4147; WAN024CMR_at; Start 8; Stop 32
gacgtgtaataacctcttctttcga

SEQ ID NO: 124706 - DNA, 25 bp, Artificial
  probe
  misc_feature (1)..(25): SEQ ID NO: 4147; WAN024CMR_at; Start 3; Stop 27
ggatggacgtgtaataacctcttct

SEQ ID NO: 124707 - DNA, 25 bp, Artificial
  probe
  misc_feature (1)..(25): SEQ ID NO: 4147; WAN024CMR_at; Start 22; Stop 46
tcttctttcgaggagtattttacta

SEQ ID NO: 124708 - DNA, 25 bp, Artificial
  probe
  misc_feature (1)..(25): SEQ ID NO: 4147; WAN024CMR_at; Start 9; Stop 33
acgtgtaataacctcttctttcgag

SEQ ID NO: 124709 - DNA, 25 bp, Artificial
  probe
  misc_feature (1)..(25): SEQ ID NO: 4147; WAN024CMR_at; Start 73; Stop 97
gaaacggacttactcattgactctt

SEQ ID NO: 124710 - DNA, 25 bp, Artificial
  probe
  misc_feature (1)..(25): SEQ ID NO: 4147; WAN024CMR_at; Start 91; Stop 115
gactcttcaaagatttggggagaag

SEQ ID NO: 124711 - DNA, 25 bp, Artificial
  probe
  misc_feature (1)..(25): SEQ ID NO: 4147; WAN024CMR_at; Start 68; Stop 92
ccccagaaacggacttactcattga

SEQ ID NO: 124712 - DNA, 25 bp, Artificial
  probe
  misc_feature (1)..(25): SEQ ID NO: 4147; WAN024CMR_at; Start 54; Stop 78
agccttggagcgttccccagaaacg

SEQ ID NO: 124713 - DNA, 25 bp, Artificial
  probe
  misc_feature (1)..(25): SEQ ID NO: 4147; WAN024CMR_at; Start 12; Stop 36
tgtaataacctcttctttcgaggag

SEQ ID NO: 124714 - DNA, 25 bp, Artificial
  probe
  misc_feature (1)..(25): SEQ ID NO: 4147; WAN024CMR_at; Start 67; Stop 91
tccccagaaacggacttactcattg

SEQ ID NO: 124715 - DNA, 25 bp, Artificial
  probe
  misc_feature (1)..(25): SEQ ID NO: 4147; WAN024CMR_at; Start 85; Stop 109
ctcattgactcttcaaagatttggg

SEQ ID NO: 124716 - DNA, 25 bp, Artificial
  probe
  misc_feature (1)..(25): SEQ ID NO: 4147; WAN024CMR_at; Start 71; Stop 95
cagaaacggacttactcattgactc

SEQ ID NO: 124717 - DNA, 25 bp, Artificial
  probe
  misc_feature (1)..(25): SEQ ID NO: 4147; WAN024CMR_at; Start 53; Stop 77
tagccttggagcgttccccagaaac

SEQ ID NO: 124718 - DNA, 25 bp, Artificial
  probe
  misc_feature (1)..(25): SEQ ID NO: 4147; WAN024CMR_at; Start 69; Stop 93
cccagaaacggacttactcattgac

SEQ ID NO: 124719 - DNA, 25 bp, Artificial
  probe
  misc_feature (1)..(25): SEQ ID NO: 4147; WAN024CMR_at; Start 15; Stop 39
aataacctcttctttcgaggagtat

SEQ ID NO: 124720 - DNA, 25 bp, Artificial
  probe
  misc_feature (1)..(25): SEQ ID NO: 4147; WAN024CMR_at; Start 11; Stop 35
gtgtaataacctcttctttcgagga

SEQ ID NO: 124721 - DNA, 25 bp, Artificial
  probe
  misc_feature (1)..(25): SEQ ID NO: 4147; WAN024CMR_at; Start 78; Stop 102
ggacttactcattgactcttcaaag

SEQ ID NO: 124722 - DNA, 25 bp, Artificial
  probe
  misc_feature (1)..(25): SEQ ID NO: 4147; WAN024CMR_at; Start 49; Stop 73
aaactagccttggagcgttccccag

SEQ ID NO: 124723 - DNA, 25 bp, Artificial
  probe
  misc_feature (1)..(25): SEQ ID NO: 4147; WAN024CMR_at; Start 2; Stop 26
tggatggacgtgtaataacctcttc

SEQ ID NO: 124724 - DNA, 25 bp, Artificial
  probe
  misc_feature (1)..(25): SEQ ID NO: 3321; WAN024CMS_at; Start 41; Stop 65
gtggtgagattcgtgagacaaccca

SEQ ID NO: 124725 - DNA, 25 bp, Artificial
  probe
  misc_feature (1)..(25): SEQ ID NO: 3321; WAN024CMS_at; Start 46; Stop 70
gagattcgtgagacaacccaagctt

SEQ ID NO: 124726 - DNA, 25 bp, Artificial
  probe
  misc_feature (1)..(25): SEQ ID NO: 3321; WAN024CMS_at; Start 24; Stop 48
taaggttgttcttcttggtggtgag

SEQ ID NO: 124727 - DNA, 25 bp, Artificial
  probe
  misc_feature (1)..(25): SEQ ID NO: 3321; WAN024CMS_at; Start 7; Stop 31
aagaaaagtgatatctttaaggttg

SEQ ID NO: 124728 - DNA, 25 bp, Artificial
  probe
  misc_feature (1)..(25): SEQ ID NO: 3321; WAN024CMS_at; Start 96; Stop 120
gatggataggatgtactttagcaag

SEQ ID NO: 124729 - DNA, 25 bp, Artificial
  probe
  misc_feature (1)..(25): SEQ ID NO: 3321; WAN024CMS_at; Start 30; Stop 54
tgttcttcttggtggtgagattcgt

SEQ ID NO: 124730 - DNA, 25 bp, Artificial
  probe
  misc_feature (1)..(25): SEQ ID NO: 3321; WAN024CMS_at; Start 77; Stop 101
gaaagattaccaatgctttgatgga

SEQ ID NO: 124731 - DNA, 25 bp, Artificial
  probe
  misc_feature (1)..(25): SEQ ID NO: 3321; WAN024CMS_at; Start 39; Stop 63
tggtggtgagattcgtgagacaacc

SEQ ID NO: 124732 - DNA, 25 bp, Artificial
  probe
  misc_feature (1)..(25): SEQ ID NO: 3321; WAN024CMS_at; Start 43; Stop 67
ggtgagattcgtgagacaacccaag

SEQ ID NO: 124733 - DNA, 25 bp, Artificial
  probe
  misc_feature (1)..(25): SEQ ID NO: 3321; WAN024CMS_at; Start 33; Stop 57
tcttcttggtggtgagattcgtgag

SEQ ID NO: 124734 - DNA, 25 bp, Artificial
  probe
  misc_feature (1)..(25): SEQ ID NO: 3321; WAN024CMS_at; Start 45; Stop 69
tgagattcgtgagacaacccaagct

SEQ ID NO: 124735 - DNA, 25 bp, Artificial
  probe
  misc_feature (1)..(25): SEQ ID NO: 3321; WAN024CMS_at; Start 111; Stop 135
ctttagcaagatgtttttagtggta

SEQ ID NO: 124736 - DNA, 25 bp, Artificial
  probe
  misc_feature (1)..(25): SEQ ID NO: 3321; WAN024CMS_at; Start 69; Stop 93
ttttgtcggaaagattaccaatgct

SEQ ID NO: 124737 - DNA, 25 bp, Artificial
  probe
  misc_feature (1)..(25): SEQ ID NO: 3321; WAN024CMS_at; Start 16; Stop 40
gatatctttaaggttgttcttcttg

SEQ ID NO: 124738 - DNA, 25 bp, Artificial
  probe
  misc_feature (1)..(25): SEQ ID NO: 3321; WAN024CMS_at; Start 87; Stop 111
caatgctttgatggataggatgtac

SEQ ID NO: 124739 - DNA, 25 bp, Artificial
  probe
  misc_feature (1)..(25): SEQ ID NO: 3321; WAN024CMS_at; Start 48; Stop 72
gattcgtgagacaacccaagctttt

SEQ ID NO: 124740 - DNA, 25 bp, Artificial
  probe
  misc_feature (1)..(25): SEQ ID NO: 3321; WAN024CMS_at; Start 53; Stop 77
gtgagacaacccaagcttttgtcgg

SEQ ID NO: 124741 - DNA, 25 bp, Artificial
  probe
  misc_feature (1)..(25): SEQ ID NO: 3321; WAN024CMS_at; Start 55; Stop 79
gagacaacccaagcttttgtcggaa

SEQ ID NO: 124742 - DNA, 25 bp, Artificial
  probe
  misc_feature (1)..(25): SEQ ID NO: 3321; WAN024CMS_at; Start 105; Stop 129
gatgtactttagcaagatgttttta

SEQ ID NO: 124743 - DNA, 25 bp, Artificial
  probe
  misc_feature (1)..(25): SEQ ID NO: 3321; WAN024CMS_at; Start 98; Stop 122
tggataggatgtactttagcaagat

SEQ ID NO: 124744 - DNA, 25 bp, Artificial
  probe
  misc_feature (1)..(25): SEQ ID NO: 3321; WAN024CMS_at; Start 115; Stop 139
agcaagatgtttttagtggtaacgg

SEQ ID NO: 124745 - DNA, 25 bp, Artificial
  probe
  misc_feature (1)..(25): SEQ ID NO: 3321; WAN024CMS_at; Start 72; Stop 96
tgtcggaaagattaccaatgctttg

SEQ ID NO: 124746 - DNA, 25 bp, Artificial
  probe
  misc_feature (1)..(25): SEQ ID NO: 3321; WAN024CMS_at; Start 91; Stop 115
gctttgatggataggatgtacttta

SEQ ID NO: 124747 - DNA, 25 bp, Artificial
  probe
  misc_feature (1)..(25): SEQ ID NO: 3321; WAN024CMS_at; Start 75; Stop 99
cggaaagattaccaatgctttgatg

SEQ ID NO: 124748 - DNA, 25 bp, Artificial
  probe
  misc_feature (1)..(25): SEQ ID NO: 3321; WAN024CMS_at; Start 59; Stop 83
caacccaagcttttgtcggaaagat

SEQ ID NO: 124749 - DNA, 25 bp, Artificial
  probe
  misc_feature (1)..(25): SEQ ID NO: 3321; WAN024CMS_at; Start 129; Stop 153
agtggtaacggtatcgtggatggac

SEQ ID NO: 124750 - DNA, 25 bp, Artificial
  probe
  misc_feature (1)..(25): SEQ ID NO: 3321; WAN024CMS_at; Start 81; Stop 105
gattaccaatgctttgatggatagg

SEQ ID NO: 124751 - DNA, 25 bp, Artificial
  probe
  misc_feature (1)..(25): SEQ ID NO: 3321; WAN024CMS_at; Start 100; Stop 124
gataggatgtactttagcaagatgt

SEQ ID NO: 124752 - DNA, 25 bp, Artificial
  probe
  misc_feature (1)..(25): SEQ ID NO: 3321; WAN024CMS_at; Start 50; Stop 74
ttcgtgagacaacccaagcttttgt

SEQ ID NO: 124753 - DNA, 25 bp, Artificial
  probe
  misc_feature (1)..(25): SEQ ID NO: 3321; WAN024CMS_at; Start 67; Stop 91
gcttttgtcggaaagattaccaatg

SEQ ID NO: 124754 - DNA, 25 bp, Artificial
  probe
  misc_feature (1)..(25): SEQ ID NO: 3321; WAN024CMS_at; Start 132; Stop 156
ggtaacggtatcgtggatggacgtg

SEQ ID NO: 124755 - DNA, 25 bp, Artificial
  probe
  misc_feature (1)..(25): SEQ ID NO: 3321; WAN024CMS_at; Start 102; Stop 126
taggatgtactttagcaagatgttt

SEQ ID NO: 124756 - DNA, 25 bp, Artificial
  probe
  misc_feature (1)..(25): SEQ ID NO: 3321; WAN024CMS_at; Start 36; Stop 60
tcttggtggtgagattcgtgagaca

SEQ ID NO: 124757 - DNA, 25 bp, Artificial
  probe
  misc_feature (1)..(25): SEQ ID NO: 3321; WAN024CMS_at; Start 84; Stop 108
taccaatgctttgatggataggatg

SEQ ID NO: 124758 - DNA, 25 bp, Artificial
  probe
  misc_feature (1)..(25): SEQ ID NO: 2142; WAN024CMT_at; Start 17; Stop 41
tcgatgtagatatgctgttggaaga

SEQ ID NO: 124759 - DNA, 25 bp, Artificial
  probe
  misc_feature (1)..(25): SEQ ID NO: 2142; WAN024CMT_at; Start 60; Stop 84
ggtcgttgttgctgttgataaggac

SEQ ID NO: 124760 - DNA, 25 bp, Artificial
  probe
  misc_feature (1)..(25): SEQ ID NO: 2142; WAN024CMT_at; Start 45; Stop 69
gacacaagaagcaatggtcgttgtt

SEQ ID NO: 124761 - DNA, 25 bp, Artificial
  probe
  misc_feature (1)..(25): SEQ ID NO: 2142; WAN024CMT_at; Start 49; Stop 73
caagaagcaatggtcgttgttgctg

SEQ ID NO: 124762 - DNA, 25 bp, Artificial
  probe
  misc_feature (1)..(25): SEQ ID NO: 2142; WAN024CMT_at; Start 37; Stop 61
gaagaattgacacaagaagcaatgg

SEQ ID NO: 124763 - DNA, 25 bp, Artificial
  probe
  misc_feature (1)..(25): SEQ ID NO: 2142; WAN024CMT_at; Start 52; Stop 76
gaagcaatggtcgttgttgctgttg

SEQ ID NO: 124764 - DNA, 25 bp, Artificial
  probe
  misc_feature (1)..(25): SEQ ID NO: 2142; WAN024CMT_at; Start 47; Stop 71
cacaagaagcaatggtcgttgttgc

SEQ ID NO: 124765 - DNA, 25 bp, Artificial
  probe
  misc_feature (1)..(25): SEQ ID NO: 2142; WAN024CMT_at; Start 44; Stop 68
tgacacaagaagcaatggtcgttgt

SEQ ID NO: 124766 - DNA, 25 bp, Artificial
  probe
  misc_feature (1)..(25): SEQ ID NO: 2142; WAN024CMT_at; Start 11; Stop 35
catcaatcgatgtagatatgctgtt

SEQ ID NO: 124767 - DNA, 25 bp, Artificial
  probe
  misc_feature (1)..(25): SEQ ID NO: 2142; WAN024CMT_at; Start 21; Stop 45
tgtagatatgctgttggaagaattg

SEQ ID NO: 124768 - DNA, 25 bp, Artificial
  probe
  misc_feature (1)..(25): SEQ ID NO: 2142; WAN024CMT_at; Start 36; Stop 60
ggaagaattgacacaagaagcaatg

SEQ ID NO: 124769 - DNA, 25 bp, Artificial
  probe
  misc_feature (1)..(25): SEQ ID NO: 2142; WAN024CMT_at; Start 10; Stop 34
tcatcaatcgatgtagatatgctgt

SEQ ID NO: 124770 - DNA, 25 bp, Artificial
  probe
  misc_feature (1)..(25): SEQ ID NO: 2142; WAN024CMT_at; Start 35; Stop 59
tggaagaattgacacaagaagcaat

SEQ ID NO: 124771 - DNA, 25 bp, Artificial
  probe
  misc_feature (1)..(25): SEQ ID NO: 2142; WAN024CMT_at; Start 13; Stop 37
tcaatcgatgtagatatgctgttgg

SEQ ID NO: 124772 - DNA, 25 bp, Artificial
  probe
  misc_feature (1)..(25): SEQ ID NO: 2142; WAN024CMT_at; Start 55; Stop 79
gcaatggtcgttgttgctgttgata

SEQ ID NO: 124773 - DNA, 25 bp, Artificial
  probe
  misc_feature (1)..(25): SEQ ID NO: 2142; WAN024CMT_at; Start 58; Stop 82
atggtcgttgttgctgttgataagg

SEQ ID NO: 124774 - DNA, 25 bp, Artificial
  probe
  misc_feature (1)..(25): SEQ ID NO: 2142; WAN024CMT_at; Start 40; Stop 64
gaattgacacaagaagcaatggtcg

SEQ ID NO: 124775 - DNA, 25 bp, Artificial
  probe
  misc_feature (1)..(25): SEQ ID NO: 2142; WAN024CMT_at; Start 42; Stop 66
attgacacaagaagcaatggtcgtt

SEQ ID NO: 124776 - DNA, 25 bp, Artificial
  probe
  misc_feature (1)..(25): SEQ ID NO: 2142; WAN024CMT_at; Start 41; Stop 65
aattgacacaagaagcaatggtcgt

SEQ ID NO: 124777 - DNA, 25 bp, Artificial
  probe
  misc_feature (1)..(25): SEQ ID NO: 2142; WAN024CMT_at; Start 62; Stop 86
tcgttgttgctgttgataaggactg

SEQ ID NO: 124778 - DNA, 25 bp, Artificial
  probe
  misc_feature (1)..(25): SEQ ID NO: 2142; WAN024CMT_at; Start 43; Stop 67
ttgacacaagaagcaatggtcgttg

SEQ ID NO: 124779 - DNA, 25 bp, Artificial
  probe
  misc_feature (1)..(25): SEQ ID NO: 2142; WAN024CMT_at; Start 4; Stop 28
gaaaattcatcaatcgatgtagata

SEQ ID NO: 124780 - DNA, 25 bp, Artificial
  probe
  misc_feature (1)..(25): SEQ ID NO: 2142; WAN024CMT_at; Start 63; Stop 87
cgttgttgctgttgataaggactgt

SEQ ID NO: 124781 - DNA, 25 bp, Artificial
  probe
  misc_feature (1)..(25): SEQ ID NO: 2142; WAN024CMT_at; Start 57; Stop 81
aatggtcgttgttgctgttgataag

SEQ ID NO: 124782 - DNA, 25 bp, Artificial
  probe
  misc_feature (1)..(25): SEQ ID NO: 2142; WAN024CMT_at; Start 34; Stop 58
ttggaagaattgacacaagaagcaa

SEQ ID NO: 124783 - DNA, 25 bp, Artificial
  probe
  misc_feature (1)..(25): SEQ ID NO: 2142; WAN024CMT_at; Start 14; Stop 38
caatcgatgtagatatgctgttgga

SEQ ID NO: 124784 - DNA, 25 bp, Artificial
  probe
  misc_feature (1)..(25): SEQ ID NO: 2142; WAN024CMT_at; Start 53; Stop 77
aagcaatggtcgttgttgctgttga

SEQ ID NO: 124785 - DNA, 25 bp, Artificial
  probe
  misc_feature (1)..(25): SEQ ID NO: 2142; WAN024CMT_at; Start 56; Stop 80
caatggtcgttgttgctgttgataa

SEQ ID NO: 124786 - DNA, 25 bp, Artificial
  probe
  misc_feature (1)..(25): SEQ ID NO: 2142; WAN024CMT_at; Start 7; Stop 31
aattcatcaatcgatgtagatatgc

SEQ ID NO: 124787 - DNA, 25 bp, Artificial
  probe
  misc_feature (1)..(25): SEQ ID NO: 2142; WAN024CMT_at; Start 22; Stop 46
gtagatatgctgttggaagaattga

SEQ ID NO: 124788 - DNA, 25 bp, Artificial
  probe
  misc_feature (1)..(25): SEQ ID NO: 2142; WAN024CMT_at; Start 2; Stop 26
tggaaaattcatcaatcgatgtaga

SEQ ID NO: 124789 - DNA, 25 bp, Artificial
  probe
  misc_feature (1)..(25): SEQ ID NO: 2142; WAN024CMT_at; Start 19; Stop 43
gatgtagatatgctgttggaagaat

SEQ ID NO: 124790 - DNA, 25 bp, Artificial
  probe
  misc_feature (1)..(25): SEQ ID NO: 2142; WAN024CMT_at; Start 15; Stop 39
aatcgatgtagatatgctgttggaa

SEQ ID NO: 124791 - DNA, 25 bp, Artificial
  probe
  misc_feature (1)..(25): SEQ ID NO: 2142; WAN024CMT_at; Start 18; Stop 42
cgatgtagatatgctgttggaagaa

SEQ ID NO: 124792 - DNA, 25 bp, Artificial
  probe
  misc_feature (1)..(25): SEQ ID NO: 1512; WAN024CMU_at; Start 46; Stop 70
ttaatcctattagggactgctggag

SEQ ID NO: 124793 - DNA, 25 bp, Artificial
  probe
  misc_feature (1)..(25): SEQ ID NO: 1512; WAN024CMU_at; Start 17; Stop 41
ggaaaattgttgctttgttagtcat

SEQ ID NO: 124794 - DNA, 25 bp, Artificial
  probe
  misc_feature (1)..(25): SEQ ID NO: 1512; WAN024CMU_at; Start 109; Stop 133
ggtcctgcgaatggtatttatagac

SEQ ID NO: 124795 - DNA, 25 bp, Artificial
  probe
  misc_feature (1)..(25): SEQ ID NO: 1512; WAN024CMU_at; Start 64; Stop 88
gctggaggaactcaagttcataaga

SEQ ID NO: 124796 - DNA, 25 bp, Artificial
  probe
  misc_feature (1)..(25): SEQ ID NO: 1512; WAN024CMU_at; Start 43; Stop 67
ggattaatcctattagggactgctg

SEQ ID NO: 124797 - DNA, 25 bp, Artificial
  probe
  misc_feature (1)..(25): SEQ ID NO: 1512; WAN024CMU_at; Start 111; Stop 135
tcctgcgaatggtatttatagacta

SEQ ID NO: 124798 - DNA, 25 bp, Artificial
  probe
  misc_feature (1)..(25): SEQ ID NO: 1512; WAN024CMU_at; Start 108; Stop 132
aggtcctgcgaatggtatttataga

SEQ ID NO: 124799 - DNA, 25 bp, Artificial
  probe
  misc_feature (1)..(25): SEQ ID NO: 1512; WAN024CMU_at; Start 57; Stop 81
agggactgctggaggaactcaagtt

SEQ ID NO: 124800 - DNA, 25 bp, Artificial
  probe
  misc_feature (1)..(25): SEQ ID NO: 1512; WAN024CMU_at; Start 56; Stop 80
tagggactgctggaggaactcaagt

SEQ ID NO: 124801 - DNA, 25 bp, Artificial
  probe
  misc_feature (1)..(25): SEQ ID NO: 1512; WAN024CMU_at; Start 28; Stop 52
gctttgttagtcataggattaatcc

SEQ ID NO: 124802 - DNA, 25 bp, Artificial
  probe
  misc_feature (1)..(25): SEQ ID NO: 1512; WAN024CMU_at; Start 41; Stop 65
taggattaatcctattagggactgc

SEQ ID NO: 124803 - DNA, 25 bp, Artificial
  probe
  misc_feature (1)..(25): SEQ ID NO: 1512; WAN024CMU_at; Start 54; Stop 78
attagggactgctggaggaactcaa

SEQ ID NO: 124804 - DNA, 25 bp, Artificial
  probe
  misc_feature (1)..(25): SEQ ID NO: 1512; WAN024CMU_at; Start 15; Stop 39
taggaaaattgttgctttgttagtc

SEQ ID NO: 124805 - DNA, 25 bp, Artificial
  probe
  misc_feature (1)..(25): SEQ ID NO: 1512; WAN024CMU_at; Start 103; Stop 127
gatccaggtcctgcgaatggtattt

SEQ ID NO: 124806 - DNA, 25 bp, Artificial
  probe
  misc_feature (1)..(25): SEQ ID NO: 1512; WAN024CMU_at; Start 20; Stop 44
aaattgttgctttgttagtcatagg

SEQ ID NO: 124807 - DNA, 25 bp, Artificial
  probe
  misc_feature (1)..(25): SEQ ID NO: 1512; WAN024CMU_at; Start 24; Stop 48
tgttgctttgttagtcataggatta

SEQ ID NO: 124808 - DNA, 25 bp, Artificial
  probe
  misc_feature (1)..(25): SEQ ID NO: 1512; WAN024CMU_at; Start 51; Stop 75
cctattagggactgctggaggaact

SEQ ID NO: 124809 - DNA, 25 bp, Artificial
  probe
  misc_feature (1)..(25): SEQ ID NO: 1512; WAN024CMU_at; Start 60; Stop 84
gactgctggaggaactcaagttcat

SEQ ID NO: 124810 - DNA, 25 bp, Artificial
  probe
  misc_feature (1)..(25): SEQ ID NO: 1512; WAN024CMU_at; Start 107; Stop 131
caggtcctgcgaatggtatttatag

SEQ ID NO: 124811 - DNA, 25 bp, Artificial
  probe
  misc_feature (1)..(25): SEQ ID NO: 1512; WAN024CMU_at; Start 50; Stop 74
tcctattagggactgctggaggaac

SEQ ID NO: 124812 - DNA, 25 bp, Artificial
  probe
  misc_feature (1)..(25): SEQ ID NO: 1512; WAN024CMU_at; Start 105; Stop 129
tccaggtcctgcgaatggtatttat

SEQ ID NO: 124813 - DNA, 25 bp, Artificial
  probe
  misc_feature (1)..(25): SEQ ID NO: 1512; WAN024CMU_at; Start 52; Stop 76
ctattagggactgctggaggaactc

SEQ ID NO: 124814 - DNA, 25 bp, Artificial
  probe
  misc_feature (1)..(25): SEQ ID NO: 1512; WAN024CMU_at; Start 49; Stop 73
atcctattagggactgctggaggaa

SEQ ID NO: 124815 - DNA, 25 bp, Artificial
  probe
  misc_feature (1)..(25): SEQ ID NO: 1512; WAN024CMU_at; Start 44; Stop 68
gattaatcctattagggactgctgg

SEQ ID NO: 124816 - DNA, 25 bp, Artificial
  probe
  misc_feature (1)..(25): SEQ ID NO: 1512; WAN024CMU_at; Start 63; Stop 87
tgctggaggaactcaagttcataag

SEQ ID NO: 124817 - DNA, 25 bp, Artificial
  probe
  misc_feature (1)..(25): SEQ ID NO: 1512; WAN024CMU_at; Start 21; Stop 45
aattgttgctttgttagtcatagga

SEQ ID NO: 124818 - DNA, 25 bp, Artificial
  probe
  misc_feature (1)..(25): SEQ ID NO: 1512; WAN024CMU_at; Start 29; Stop 53
ctttgttagtcataggattaatcct

SEQ ID NO: 124819 - DNA, 25 bp, Artificial
  probe
  misc_feature (1)..(25): SEQ ID NO: 1512; WAN024CMU_at; Start 58; Stop 82
gggactgctggaggaactcaagttc

SEQ ID NO: 124820 - DNA, 25 bp, Artificial
  probe
  misc_feature (1)..(25): SEQ ID NO: 1512; WAN024CMU_at; Start 53; Stop 77
tattagggactgctggaggaactca

SEQ ID NO: 124821 - DNA, 25 bp, Artificial
  probe
  misc_feature (1)..(25): SEQ ID NO: 1512; WAN024CMU_at; Start 59; Stop 83
ggactgctggaggaactcaagttca

SEQ ID NO: 124822 - DNA, 25 bp, Artificial
  probe
  misc_feature (1)..(25): SEQ ID NO: 1512; WAN024CMU_at; Start 106; Stop 130
ccaggtcctgcgaatggtatttata

SEQ ID NO: 124823 - DNA, 25 bp, Artificial
  probe
  misc_feature (1)..(25): SEQ ID NO: 1512; WAN024CMU_at; Start 61; Stop 85
actgctggaggaactcaagttcata

SEQ ID NO: 124824 - DNA, 25 bp, Artificial
  probe
  misc_feature (1)..(25): SEQ ID NO: 1512; WAN024CMU_at; Start 48; Stop 72
aatcctattagggactgctggagga

SEQ ID NO: 124825 - DNA, 25 bp, Artificial
  probe
  misc_feature (1)..(25): SEQ ID NO: 1512; WAN024CMU_at; Start 55; Stop 79
ttagggactgctggaggaactcaag

SEQ ID NO: 124826 - DNA, 25 bp, Artificial
  probe
  misc_feature (1)..(25): SEQ ID NO: 1511; WAN024CMV_at; Start 23; Stop 47
tagttgctgtattagttattggctt

SEQ ID NO: 124827 - DNA, 25 bp, Artificial
  probe
  misc_feature (1)..(25): SEQ ID NO: 1511; WAN024CMV_at; Start 28; Stop 52
gctgtattagttattggcttaattc

SEQ ID NO: 124828 - DNA, 25 bp, Artificial
  probe
  misc_feature (1)..(25): SEQ ID NO: 1511; WAN024CMV_at; Start 22; Stop 46
atagttgctgtattagttattggct

SEQ ID NO: 124829 - DNA, 25 bp, Artificial
  probe
  misc_feature (1)..(25): SEQ ID NO: 1511; WAN024CMV_at; Start 18; Stop 42
gaaaatagttgctgtattagttatt

SEQ ID NO: 124830 - DNA, 25 bp, Artificial
  probe
  misc_feature (1)..(25): SEQ ID NO: 1511; WAN024CMV_at; Start 46; Stop 70
ttaattctgttaggaattgcgagaa

SEQ ID NO: 124831 - DNA, 25 bp, Artificial
  probe
  misc_feature (1)..(25): SEQ ID NO: 1511; WAN024CMV_at; Start 39; Stop 63
tattggcttaattctgttaggaatt

SEQ ID NO: 124832 - DNA, 25 bp, Artificial
  probe
  misc_feature (1)..(25): SEQ ID NO: 1511; WAN024CMV_at; Start 43; Stop 67
ggcttaattctgttaggaattgcga

SEQ ID NO: 124833 - DNA, 25 bp, Artificial
  probe
  misc_feature (1)..(25): SEQ ID NO: 1511; WAN024CMV_at; Start 36; Stop 60
agttattggcttaattctgttagga

SEQ ID NO: 124834 - DNA, 25 bp, Artificial
  probe
  misc_feature (1)..(25): SEQ ID NO: 1511; WAN024CMV_at; Start 38; Stop 62
ttattggcttaattctgttaggaat

SEQ ID NO: 124835 - DNA, 25 bp, Artificial
  probe
  misc_feature (1)..(25): SEQ ID NO: 1511; WAN024CMV_at; Start 15; Stop 39
taagaaaatagttgctgtattagtt

SEQ ID NO: 124836 - DNA, 25 bp, Artificial
  probe
  misc_feature (1)..(25): SEQ ID NO: 1511; WAN024CMV_at; Start 27; Stop 51
tgctgtattagttattggcttaatt

SEQ ID NO: 124837 - DNA, 25 bp, Artificial
  probe
  misc_feature (1)..(25): SEQ ID NO: 1511; WAN024CMV_at; Start 31; Stop 55
gtattagttattggcttaattctgt

SEQ ID NO: 124838 - DNA, 25 bp, Artificial
  probe
  misc_feature (1)..(25): SEQ ID NO: 1511; WAN024CMV_at; Start 42; Stop 66
tggcttaattctgttaggaattgcg

SEQ ID NO: 124839 - DNA, 25 bp, Artificial
  probe
  misc_feature (1)..(25): SEQ ID NO: 1511; WAN024CMV_at; Start 16; Stop 40
aagaaaatagttgctgtattagtta

SEQ ID NO: 124840 - DNA, 25 bp, Artificial
  probe
  misc_feature (1)..(25): SEQ ID NO: 1511; WAN024CMV_at; Start 17; Stop 41
agaaaatagttgctgtattagttat

SEQ ID NO: 124841 - DNA, 25 bp, Artificial
  probe
  misc_feature (1)..(25): SEQ ID NO: 1511; WAN024CMV_at; Start 41; Stop 65
ttggcttaattctgttaggaattgc

SEQ ID NO: 124842 - DNA, 25 bp, Artificial
  probe
  misc_feature (1)..(25): SEQ ID NO: 1511; WAN024CMV_at; Start 14; Stop 38
ttaagaaaatagttgctgtattagt

SEQ ID NO: 124843 - DNA, 25 bp, Artificial
  probe
  misc_feature (1)..(25): SEQ ID NO: 1511; WAN024CMV_at; Start 44; Stop 68
gcttaattctgttaggaattgcgag

SEQ ID NO: 124844 - DNA, 25 bp, Artificial
  probe
  misc_feature (1)..(25): SEQ ID NO: 1511; WAN024CMV_at; Start 103; Stop 127
gatcctggtcctgcgaattttattc

SEQ ID NO: 124845 - DNA, 25 bp, Artificial
  probe
  misc_feature (1)..(25): SEQ ID NO: 1511; WAN024CMV_at; Start 29; Stop 53
ctgtattagttattggcttaattct

SEQ ID NO: 124846 - DNA, 25 bp, Artificial
  probe
  misc_feature (1)..(25): SEQ ID NO: 1511; WAN024CMV_at; Start 20; Stop 44
aaatagttgctgtattagttattgg

SEQ ID NO: 124847 - DNA, 25 bp, Artificial
  probe
  misc_feature (1)..(25): SEQ ID NO: 1511; WAN024CMV_at; Start 21; Stop 45
aatagttgctgtattagttattggc

SEQ ID NO: 124848 - DNA, 25 bp, Artificial
  probe
  misc_feature (1)..(25): SEQ ID NO: 1511; WAN024CMV_at; Start 45; Stop 69
cttaattctgttaggaattgcgaga

SEQ ID NO: 124849 - DNA, 25 bp, Artificial
  probe
  misc_feature (1)..(25): SEQ ID NO: 1511; WAN024CMV_at; Start 30; Stop 54
tgtattagttattggcttaattctg

SEQ ID NO: 124850 - DNA, 25 bp, Artificial
  probe
  misc_feature (1)..(25): SEQ ID NO: 1511; WAN024CMV_at; Start 24; Stop 48
agttgctgtattagttattggctta

SEQ ID NO: 124851 - DNA, 25 bp, Artificial
  probe
  misc_feature (1)..(25): SEQ ID NO: 1511; WAN024CMV_at; Start 34; Stop 58
ttagttattggcttaattctgttag

SEQ ID NO: 124852 - DNA, 25 bp, Artificial
  probe
  misc_feature (1)..(25): SEQ ID NO: 1511; WAN024CMV_at; Start 26; Stop 50
ttgctgtattagttattggcttaat

SEQ ID NO: 124853 - DNA, 25 bp, Artificial
  probe
  misc_feature (1)..(25): SEQ ID NO: 1511; WAN024CMV_at; Start 25; Stop 49
gttgctgtattagttattggcttaa

SEQ ID NO: 124854 - DNA, 25 bp, Artificial
  probe
  misc_feature (1)..(25): SEQ ID NO: 1511; WAN024CMV_at; Start 37; Stop 61
gttattggcttaattctgttaggaa

SEQ ID NO: 124855 - DNA, 25 bp, Artificial
  probe
  misc_feature (1)..(25): SEQ ID NO: 1511; WAN024CMV_at; Start 102; Stop 126
tgatcctggtcctgcgaattttatt

SEQ ID NO: 124856 - DNA, 25 bp, Artificial
  probe
  misc_feature (1)..(25): SEQ ID NO: 1511; WAN024CMV_at; Start 101; Stop 125
ttgatcctggtcctgcgaattttat

SEQ ID NO: 124857 - DNA, 25 bp, Artificial
  probe
  misc_feature (1)..(25): SEQ ID NO: 1511; WAN024CMV_at; Start 35; Stop 59
tagttattggcttaattctgttagg

SEQ ID NO: 124858 - DNA, 25 bp, Artificial
  probe
  misc_feature (1)..(25): SEQ ID NO: 1511; WAN024CMV_at; Start 105; Stop 129
tcctggtcctgcgaattttattcta

SEQ ID NO: 124859 - DNA, 25 bp, Artificial
  probe
  misc_feature (1)..(25): SEQ ID NO: 1511; WAN024CMV_at; Start 47; Stop 71
taattctgttaggaattgcgagaac

SEQ ID NO: 124860 - DNA, 25 bp, Artificial
  probe
  misc_feature (1)..(25): SEQ ID NO: 1090; WAN024CMW_at; Start 42; Stop 66
gattattattattttgccatttcta

SEQ ID NO: 124861 - DNA, 25 bp, Artificial
  probe
  misc_feature (1)..(25): SEQ ID NO: 1090; WAN024CMW_at; Start 27; Stop 51
gaaaatcgttgctgagattattatt

SEQ ID NO: 124862 - DNA, 25 bp, Artificial
  probe
  misc_feature (1)..(25): SEQ ID NO: 1090; WAN024CMW_at; Start 33; Stop 57
cgttgctgagattattattattttg

SEQ ID NO: 124863 - DNA, 25 bp, Artificial
  probe
  misc_feature (1)..(25): SEQ ID NO: 1090; WAN024CMW_at; Start 40; Stop 64
gagattattattattttgccatttc

SEQ ID NO: 124864 - DNA, 25 bp, Artificial
  probe
  misc_feature (1)..(25): SEQ ID NO: 1090; WAN024CMW_at; Start 24; Stop 48
attgaaaatcgttgctgagattatt

SEQ ID NO: 124865 - DNA, 25 bp, Artificial
  probe
  misc_feature (1)..(25): SEQ ID NO: 1090; WAN024CMW_at; Start 38; Stop 62
ctgagattattattattttgccatt

SEQ ID NO: 124866 - DNA, 25 bp, Artificial
  probe
  misc_feature (1)..(25): SEQ ID NO: 1090; WAN024CMW_at; Start 29; Stop 53
aaatcgttgctgagattattattat

SEQ ID NO: 124867 - DNA, 25 bp, Artificial
  probe
  misc_feature (1)..(25): SEQ ID NO: 1090; WAN024CMW_at; Start 36; Stop 60
tgctgagattattattattttgcca

SEQ ID NO: 124868 - DNA, 25 bp, Artificial
  probe
  misc_feature (1)..(25): SEQ ID NO: 1090; WAN024CMW_at; Start 39; Stop 63
tgagattattattattttgccattt

SEQ ID NO: 124869 - DNA, 25 bp, Artificial
  probe
  misc_feature (1)..(25): SEQ ID NO: 1090; WAN024CMW_at; Start 34; Stop 58
gttgctgagattattattattttgc

SEQ ID NO: 124870 - DNA, 25 bp, Artificial
  probe
  misc_feature (1)..(25): SEQ ID NO: 1090; WAN024CMW_at; Start 23; Stop 47
tattgaaaatcgttgctgagattat

SEQ ID NO: 124871 - DNA, 25 bp, Artificial
  probe
  misc_feature (1)..(25): SEQ ID NO: 1090; WAN024CMW_at; Start 21; Stop 45
attattgaaaatcgttgctgagatt

SEQ ID NO: 124872 - DNA, 25 bp, Artificial
  probe
  misc_feature (1)..(25): SEQ ID NO: 1090; WAN024CMW_at; Start 26; Stop 50
tgaaaatcgttgctgagattattat

SEQ ID NO: 124873 - DNA, 25 bp, Artificial
  probe
  misc_feature (1)..(25): SEQ ID NO: 1090; WAN024CMW_at; Start 19; Stop 43
acattattgaaaatcgttgctgaga

SEQ ID NO: 124874 - DNA, 25 bp, Artificial
  probe
  misc_feature (1)..(25): SEQ ID NO: 1090; WAN024CMW_at; Start 20; Stop 44
cattattgaaaatcgttgctgagat

SEQ ID NO: 124875 - DNA, 25 bp, Artificial
  probe
  misc_feature (1)..(25): SEQ ID NO: 1090; WAN024CMW_at; Start 30; Stop 54
aatcgttgctgagattattattatt

SEQ ID NO: 124876 - DNA, 25 bp, Artificial
  probe
  misc_feature (1)..(25): SEQ ID NO: 1090; WAN024CMW_at; Start 28; Stop 52
aaaatcgttgctgagattattatta

SEQ ID NO: 124877 - DNA, 25 bp, Artificial
  probe
  misc_feature (1)..(25): SEQ ID NO: 1090; WAN024CMW_at; Start 37; Stop 61
gctgagattattattattttgccat

SEQ ID NO: 124878 - DNA, 25 bp, Artificial
  probe
  misc_feature (1)..(25): SEQ ID NO: 1090; WAN024CMW_at; Start 25; Stop 49
ttgaaaatcgttgctgagattatta

SEQ ID NO: 124879 - DNA, 25 bp, Artificial
  probe
  misc_feature (1)..(25): SEQ ID NO: 1090; WAN024CMW_at; Start 45; Stop 69
tattattattttgccatttctaact

SEQ ID NO: 124880 - DNA, 25 bp, Artificial
  probe
  misc_feature (1)..(25): SEQ ID NO: 1090; WAN024CMW_at; Start 32; Stop 56
tcgttgctgagattattattatttt

SEQ ID NO: 124881 - DNA, 25 bp, Artificial
  probe
  misc_feature (1)..(25): SEQ ID NO: 1090; WAN024CMW_at; Start 48; Stop 72
tattattttgccatttctaactaat

SEQ ID NO: 124882 - DNA, 25 bp, Artificial
  probe
  misc_feature (1)..(25): SEQ ID NO: 1090; WAN024CMW_at; Start 22; Stop 46
ttattgaaaatcgttgctgagatta

SEQ ID NO: 124883 - DNA, 25 bp, Artificial
  probe
  misc_feature (1)..(25): SEQ ID NO: 1090; WAN024CMW_at; Start 41; Stop 65
agattattattattttgccatttct

SEQ ID NO: 124884 - DNA, 25 bp, Artificial
  probe
  misc_feature (1)..(25): SEQ ID NO: 1090; WAN024CMW_at; Start 31; Stop 55
atcgttgctgagattattattattt

SEQ ID NO: 124885 - DNA, 25 bp, Artificial
  probe
  misc_feature (1)..(25): SEQ ID NO: 1090; WAN024CMW_at; Start 49; Stop 73
attattttgccatttctaactaatc

SEQ ID NO: 124886 - DNA, 25 bp, Artificial
  probe
  misc_feature (1)..(25): SEQ ID NO: 1090; WAN024CMW_at; Start 35; Stop 59
ttgctgagattattattattttgcc

SEQ ID NO: 124887 - DNA, 25 bp, Artificial
  probe
  misc_feature (1)..(25): SEQ ID NO: 3416; WAN024CMX_at; Start 4; Stop 28
gatactaagagaaatcaaaaaagca

SEQ ID NO: 124888 - DNA, 25 bp, Artificial
  probe
  misc_feature (1)..(25): SEQ ID NO: 3416; WAN024CMX_at; Start 42; Stop 66
tcccaaagtgcttaatatcaaggcc

SEQ ID NO: 124889 - DNA, 25 bp, Artificial
  probe
  misc_feature (1)..(25): SEQ ID NO: 3416; WAN024CMX_at; Start 6; Stop 30
tactaagagaaatcaaaaaagcact

SEQ ID NO: 124890 - DNA, 25 bp, Artificial
  probe
  misc_feature (1)..(25): SEQ ID NO: 3416; WAN024CMX_at; Start 47; Stop 71
aagtgcttaatatcaaggcctatct

SEQ ID NO: 124891 - DNA, 25 bp, Artificial
  probe
  misc_feature (1)..(25): SEQ ID NO: 3416; WAN024CMX_at; Start 27; Stop 51
cactaagggagaacgtcccaaagtg

SEQ ID NO: 124892 - DNA, 25 bp, Artificial
  probe
  misc_feature (1)..(25): SEQ ID NO: 3416; WAN024CMX_at; Start 39; Stop 63
acgtcccaaagtgcttaatatcaag

SEQ ID NO: 124893 - DNA, 25 bp, Artificial
  probe
  misc_feature (1)..(25): SEQ ID NO: 3416; WAN024CMX_at; Start 54; Stop 78
taatatcaaggcctatcttattcaa

SEQ ID NO: 124894 - DNA, 25 bp, Artificial
  probe
  misc_feature (1)..(25): SEQ ID NO: 3416; WAN024CMX_at; Start 45; Stop 69
caaagtgcttaatatcaaggcctat

SEQ ID NO: 124895 - DNA, 25 bp, Artificial
  probe
  misc_feature (1)..(25): SEQ ID NO: 3416; WAN024CMX_at; Start 46; Stop 70
aaagtgcttaatatcaaggcctatc

SEQ ID NO: 124896 - DNA, 25 bp, Artificial
  probe
  misc_feature (1)..(25): SEQ ID NO: 3416; WAN024CMX_at; Start 11; Stop 35
agagaaatcaaaaaagcactaaggg

SEQ ID NO: 124897 - DNA, 25 bp, Artificial
  probe
  misc_feature (1)..(25): SEQ ID NO: 3416; WAN024CMX_at; Start 35; Stop 59
gagaacgtcccaaagtgcttaatat

SEQ ID NO: 124898 - DNA, 25 bp, Artificial
  probe
  misc_feature (1)..(25): SEQ ID NO: 3416; WAN024CMX_at; Start 41; Stop 65
gtcccaaagtgcttaatatcaaggc

SEQ ID NO: 124899 - DNA, 25 bp, Artificial
  probe
  misc_feature (1)..(25): SEQ ID NO: 3416; WAN024CMX_at; Start 29; Stop 53
ctaagggagaacgtcccaaagtgct

SEQ ID NO: 124900 - DNA, 25 bp, Artificial
  probe
  misc_feature (1)..(25): SEQ ID NO: 3416; WAN024CMX_at; Start 48; Stop 72
agtgcttaatatcaaggcctatctt

SEQ ID NO: 124901 - DNA, 25 bp, Artificial
  probe
  misc_feature (1)..(25): SEQ ID NO: 3416; WAN024CMX_at; Start 5; Stop 29
atactaagagaaatcaaaaaagcac

SEQ ID NO: 124902 - DNA, 25 bp, Artificial
  probe
  misc_feature (1)..(25): SEQ ID NO: 3416; WAN024CMX_at; Start 8; Stop 32
ctaagagaaatcaaaaaagcactaa

SEQ ID NO: 124903 - DNA, 25 bp, Artificial
  probe
  misc_feature (1)..(25): SEQ ID NO: 3416; WAN024CMX_at; Start 49; Stop 73
gtgcttaatatcaaggcctatctta

SEQ ID NO: 124904 - DNA, 25 bp, Artificial
  probe
  misc_feature (1)..(25): SEQ ID NO: 3416; WAN024CMX_at; Start 25; Stop 49
agcactaagggagaacgtcccaaag

SEQ ID NO: 124905 - DNA, 25 bp, Artificial
  probe
  misc_feature (1)..(25): SEQ ID NO: 3416; WAN024CMX_at; Start 9; Stop 33
taagagaaatcaaaaaagcactaag

SEQ ID NO: 124906 - DNA, 25 bp, Artificial
  probe
  misc_feature (1)..(25): SEQ ID NO: 3416; WAN024CMX_at; Start 36; Stop 60
agaacgtcccaaagtgcttaatatc

SEQ ID NO: 124907 - DNA, 25 bp, Artificial
  probe
  misc_feature (1)..(25): SEQ ID NO: 3416; WAN024CMX_at; Start 38; Stop 62
aacgtcccaaagtgcttaatatcaa

SEQ ID NO: 124908 - DNA, 25 bp, Artificial
  probe
  misc_feature (1)..(25): SEQ ID NO: 3416; WAN024CMX_at; Start 37; Stop 61
gaacgtcccaaagtgcttaatatca

SEQ ID NO: 124909 - DNA, 25 bp, Artificial
  probe
  misc_feature (1)..(25): SEQ ID NO: 3416; WAN024CMX_at; Start 1; Stop 25
ctggatactaagagaaatcaaaaaa

SEQ ID NO: 124910 - DNA, 25 bp, Artificial
  probe
  misc_feature (1)..(25): SEQ ID NO: 3416; WAN024CMX_at; Start 7; Stop 31
actaagagaaatcaaaaaagcacta

SEQ ID NO: 124911 - DNA, 25 bp, Artificial
  probe
  misc_feature (1)..(25): SEQ ID NO: 3416; WAN024CMX_at; Start 50; Stop 74
tgcttaatatcaaggcctatcttat

SEQ ID NO: 124912 - DNA, 25 bp, Artificial
  probe
  misc_feature (1)..(25): SEQ ID NO: 3416; WAN024CMX_at; Start 51; Stop 75
gcttaatatcaaggcctatcttatt

SEQ ID NO: 124913 - DNA, 25 bp, Artificial
  probe
  misc_feature (1)..(25): SEQ ID NO: 3416; WAN024CMX_at; Start 43; Stop 67
cccaaagtgcttaatatcaaggcct

SEQ ID NO: 124914 - DNA, 25 bp, Artificial
  probe
  misc_feature (1)..(25): SEQ ID NO: 3416; WAN024CMX_at; Start 44; Stop 68
ccaaagtgcttaatatcaaggccta

SEQ ID NO: 124915 - DNA, 25 bp, Artificial
  probe
  misc_feature (1)..(25): SEQ ID NO: 3416; WAN024CMX_at; Start 2; Stop 26
tggatactaagagaaatcaaaaaag

SEQ ID NO: 124916 - DNA, 25 bp, Artificial
  probe
  misc_feature (1)..(25): SEQ ID NO: 3416; WAN024CMX_at; Start 10; Stop 34
aagagaaatcaaaaaagcactaagg

SEQ ID NO: 124917 - DNA, 25 bp, Artificial
  probe
  misc_feature (1)..(25): SEQ ID NO: 3416; WAN024CMX_at; Start 40; Stop 64
cgtcccaaagtgcttaatatcaagg

SEQ ID NO: 124918 - DNA, 25 bp, Artificial
  probe
  misc_feature (1)..(25): SEQ ID NO: 3416; WAN024CMX_at; Start 52; Stop 76
cttaatatcaaggcctatcttattc

SEQ ID NO: 124919 - DNA, 25 bp, Artificial
  probe
  misc_feature (1)..(25): SEQ ID NO: 3416; WAN024CMX_at; Start 34; Stop 58
ggagaacgtcccaaagtgcttaata

SEQ ID NO: 124920 - DNA, 25 bp, Artificial
  probe
  misc_feature (1)..(25): SEQ ID NO: 3416; WAN024CMX_at; Start 3; Stop 27
ggatactaagagaaatcaaaaaagc

SEQ ID NO: 124921 - DNA, 25 bp, Artificial
  probe
  misc_feature (1)..(25): SEQ ID NO: 3351; WAN024CMY_at; Start 37; Stop 61
aacttgcttaatgaaacagacttgc

SEQ ID NO: 124922 - DNA, 25 bp, Artificial
  probe
  misc_feature (1)..(25): SEQ ID NO: 3351; WAN024CMY_at; Start 5; Stop 29
ggagaaaaacatcccacttacgaga

SEQ ID NO: 124923 - DNA, 25 bp, Artificial
  probe
  misc_feature (1)..(25): SEQ ID NO: 3351; WAN024CMY_at; Start 12; Stop 36
aacatcccacttacgagatgctttg

SEQ ID NO: 124924 - DNA, 25 bp, Artificial
  probe
  misc_feature (1)..(25): SEQ ID NO: 3351; WAN024CMY_at; Start 64; Stop 88
agagatagagtaggtaaatgtgaac

SEQ ID NO: 124925 - DNA, 25 bp, Artificial
  probe
  misc_feature (1)..(25): SEQ ID NO: 3351; WAN024CMY_at; Start 19; Stop 43
cacttacgagatgctttgaacttgc

SEQ ID NO: 124926 - DNA, 25 bp, Artificial
  probe
  misc_feature (1)..(25): SEQ ID NO: 3351; WAN024CMY_at; Start 10; Stop 34
aaaacatcccacttacgagatgctt

SEQ ID NO: 124927 - DNA, 25 bp, Artificial
  probe
  misc_feature (1)..(25): SEQ ID NO: 3351; WAN024CMY_at; Start 8; Stop 32
gaaaaacatcccacttacgagatgc

SEQ ID NO: 124928 - DNA, 25 bp, Artificial
  probe
  misc_feature (1)..(25): SEQ ID NO: 3351; WAN024CMY_at; Start 55; Stop 79
gacttgctaagagatagagtaggta

SEQ ID NO: 124929 - DNA, 25 bp, Artificial
  probe
  misc_feature (1)..(25): SEQ ID NO: 3351; WAN024CMY_at; Start 33; Stop 57
tttgaacttgcttaatgaaacagac

SEQ ID NO: 124930 - DNA, 25 bp, Artificial
  probe
  misc_feature (1)..(25): SEQ ID NO: 3351; WAN024CMY_at; Start 26; Stop 50
gagatgctttgaacttgcttaatga

SEQ ID NO: 124931 - DNA, 25 bp, Artificial
  probe
  misc_feature (1)..(25): SEQ ID NO: 3351; WAN024CMY_at; Start 39; Stop 63
cttgcttaatgaaacagacttgcta

SEQ ID NO: 124932 - DNA, 25 bp, Artificial
  probe
  misc_feature (1)..(25): SEQ ID NO: 3351; WAN024CMY_at; Start 45; Stop 69
taatgaaacagacttgctaagagat

SEQ ID NO: 124933 - DNA, 25 bp, Artificial
  probe
  misc_feature (1)..(25): SEQ ID NO: 3351; WAN024CMY_at; Start 69; Stop 93
tagagtaggtaaatgtgaactgggt

SEQ ID NO: 124934 - DNA, 25 bp, Artificial
  probe
  misc_feature (1)..(25): SEQ ID NO: 3351; WAN024CMY_at; Start 18; Stop 42
ccacttacgagatgctttgaacttg

SEQ ID NO: 124935 - DNA, 25 bp, Artificial
  probe
  misc_feature (1)..(25): SEQ ID NO: 3351; WAN024CMY_at; Start 71; Stop 95
gagtaggtaaatgtgaactgggtaa

SEQ ID NO: 124936 - DNA, 25 bp, Artificial
  probe
  misc_feature (1)..(25): SEQ ID NO: 3351; WAN024CMY_at; Start 34; Stop 58
ttgaacttgcttaatgaaacagact

SEQ ID NO: 124937 - DNA, 25 bp, Artificial
  probe
  misc_feature (1)..(25): SEQ ID NO: 3351; WAN024CMY_at; Start 57; Stop 81
cttgctaagagatagagtaggtaaa

SEQ ID NO: 124938 - DNA, 25 bp, Artificial
  probe
  misc_feature (1)..(25): SEQ ID NO: 3351; WAN024CMY_at; Start 3; Stop 27
gaggagaaaaacatcccacttacga

SEQ ID NO: 124939 - DNA, 25 bp, Artificial
  probe
  misc_feature (1)..(25): SEQ ID NO: 3351; WAN024CMY_at; Start 51; Stop 75
aacagacttgctaagagatagagta

SEQ ID NO: 124940 - DNA, 25 bp, Artificial
  probe
  misc_feature (1)..(25): SEQ ID NO: 3351; WAN024CMY_at; Start 14; Stop 38
catcccacttacgagatgctttgaa

SEQ ID NO: 124941 - DNA, 25 bp, Artificial
  probe
  misc_feature (1)..(25): SEQ ID NO: 3351; WAN024CMY_at; Start 36; Stop 60
gaacttgcttaatgaaacagacttg

SEQ ID NO: 124942 - DNA, 25 bp, Artificial
  probe
  misc_feature (1)..(25): SEQ ID NO: 3351; WAN024CMY_at; Start 28; Stop 52
gatgctttgaacttgcttaatgaaa

SEQ ID NO: 124943 - DNA, 25 bp, Artificial
  probe
  misc_feature (1)..(25): SEQ ID NO: 3351; WAN024CMY_at; Start 25; Stop 49
cgagatgctttgaacttgcttaatg

SEQ ID NO: 124944 - DNA, 25 bp, Artificial
  probe
  misc_feature (1)..(25): SEQ ID NO: 3351; WAN024CMY_at; Start 2; Stop 26
tgaggagaaaaacatcccacttacg

SEQ ID NO: 124945 - DNA, 25 bp, Artificial
  probe
  misc_feature (1)..(25): SEQ ID NO: 3351; WAN024CMY_at; Start 42; Stop 66
gcttaatgaaacagacttgctaaga

SEQ ID NO: 124946 - DNA, 25 bp, Artificial
  probe
  misc_feature (1)..(25): SEQ ID NO: 3351; WAN024CMY_at; Start 21; Stop 45
cttacgagatgctttgaacttgctt

SEQ ID NO: 124947 - DNA, 25 bp, Artificial
  probe
  misc_feature (1)..(25): SEQ ID NO: 3351; WAN024CMY_at; Start 49; Stop 73
gaaacagacttgctaagagatagag

SEQ ID NO: 124948 - DNA, 25 bp, Artificial
  probe
  misc_feature (1)..(25): SEQ ID NO: 3351; WAN024CMY_at; Start 41; Stop 65
tgcttaatgaaacagacttgctaag

SEQ ID NO: 124949 - DNA, 25 bp, Artificial
  probe
  misc_feature (1)..(25): SEQ ID NO: 3351; WAN024CMY_at; Start 67; Stop 91
gatagagtaggtaaatgtgaactgg

SEQ ID NO: 124950 - DNA, 25 bp, Artificial
  probe
  misc_feature (1)..(25): SEQ ID NO: 3351; WAN024CMY_at; Start 16; Stop 40
tcccacttacgagatgctttgaact

SEQ ID NO: 124951 - DNA, 25 bp, Artificial
  probe
  misc_feature (1)..(25): SEQ ID NO: 3351; WAN024CMY_at; Start 53; Stop 77
cagacttgctaagagatagagtagg

SEQ ID NO: 124952 - DNA, 25 bp, Artificial
  probe
  misc_feature (1)..(25): SEQ ID NO: 3351; WAN024CMY_at; Start 60; Stop 84
gctaagagatagagtaggtaaatgt

SEQ ID NO: 124953 - DNA, 25 bp, Artificial
  probe
  misc_feature (1)..(25): SEQ ID NO: 3351; WAN024CMY_at; Start 31; Stop 55
gctttgaacttgcttaatgaaacag

SEQ ID NO: 124954 - DNA, 25 bp, Artificial
  probe
  misc_feature (1)..(25): SEQ ID NO: 3351; WAN024CMY_at; Start 23; Stop 47
tacgagatgctttgaacttgcttaa

SEQ ID NO: 124955 - DNA, 25 bp, Artificial
  probe
  misc_feature (1)..(25): SEQ ID NO: 7728; WAN024CMZ_at; Start 121; Stop 145
tgcattcaatcaaatctctacatcg

SEQ ID NO: 124956 - DNA, 25 bp, Artificial
  probe
  misc_feature (1)..(25): SEQ ID NO: 7728; WAN024CMZ_at; Start 42; Stop 66
caaatcaacattttctgtgggattg

SEQ ID NO: 124957 - DNA, 25 bp, Artificial
  probe
  misc_feature (1)..(25): SEQ ID NO: 7728; WAN024CMZ_at; Start 74; Stop 98
ccttgtcaccattggtcgttgatga

SEQ ID NO: 124958 - DNA, 25 bp, Artificial
  probe
  misc_feature (1)..(25): SEQ ID NO: 7728; WAN024CMZ_at; Start 60; Stop 84
gggattgaaatccaccttgtcacca

SEQ ID NO: 124959 - DNA, 25 bp, Artificial
  probe
  misc_feature (1)..(25): SEQ ID NO: 7728; WAN024CMZ_at; Start 80; Stop 104
caccattggtcgttgatgagttgaa

SEQ ID NO: 124960 - DNA, 25 bp, Artificial
  probe
  misc_feature (1)..(25): SEQ ID NO: 7728; WAN024CMZ_at; Start 62; Stop 86
gattgaaatccaccttgtcaccatt

SEQ ID NO: 124961 - DNA, 25 bp, Artificial
  probe
  misc_feature (1)..(25): SEQ ID NO: 7728; WAN024CMZ_at; Start 89; Stop 113
tcgttgatgagttgaagatgattcc

SEQ ID NO: 124962 - DNA, 25 bp, Artificial
  probe
  misc_feature (1)..(25): SEQ ID NO: 7728; WAN024CMZ_at; Start 108; Stop 132
gattcctgcaatctgcattcaatca

SEQ ID NO: 124963 - DNA, 25 bp, Artificial
  probe
  misc_feature (1)..(25): SEQ ID NO: 7728; WAN024CMZ_at; Start 50; Stop 74
cattttctgtgggattgaaatccac

SEQ ID NO: 124964 - DNA, 25 bp, Artificial
  probe
  misc_feature (1)..(25): SEQ ID NO: 7728; WAN024CMZ_at; Start 94; Stop 118
gatgagttgaagatgattcctgcaa

SEQ ID NO: 124965 - DNA, 25 bp, Artificial
  probe
  misc_feature (1)..(25): SEQ ID NO: 7728; WAN024CMZ_at; Start 71; Stop 95
ccaccttgtcaccattggtcgttga

SEQ ID NO: 124966 - DNA, 25 bp, Artificial
  probe
  misc_feature (1)..(25): SEQ ID NO: 7728; WAN024CMZ_at; Start 67; Stop 91
aaatccaccttgtcaccattggtcg

SEQ ID NO: 124967 - DNA, 25 bp, Artificial
  probe
  misc_feature (1)..(25): SEQ ID NO: 7728; WAN024CMZ_at; Start 112; Stop 136
cctgcaatctgcattcaatcaaatc

SEQ ID NO: 124968 - DNA, 25 bp, Artificial
  probe
  misc_feature (1)..(25): SEQ ID NO: 7728; WAN024CMZ_at; Start 52; Stop 76
ttttctgtgggattgaaatccacct

SEQ ID NO: 124969 - DNA, 25 bp, Artificial
  probe
  misc_feature (1)..(25): SEQ ID NO: 7728; WAN024CMZ_at; Start 126; Stop 150
tcaatcaaatctctacatcgatcca

SEQ ID NO: 124970 - DNA, 25 bp, Artificial
  probe
  misc_feature (1)..(25): SEQ ID NO: 7728; WAN024CMZ_at; Start 92; Stop 116
ttgatgagttgaagatgattcctgc

SEQ ID NO: 124971 - DNA, 25 bp, Artificial
  probe
  misc_feature (1)..(25): SEQ ID NO: 7728; WAN024CMZ_at; Start 105; Stop 129
gatgattcctgcaatctgcattcaa

SEQ ID NO: 124972 - DNA, 25 bp, Artificial
  probe
  misc_feature (1)..(25): SEQ ID NO: 7728; WAN024CMZ_at; Start 101; Stop 125
tgaagatgattcctgcaatctgcat

SEQ ID NO: 124973 - DNA, 25 bp, Artificial
  probe
  misc_feature (1)..(25): SEQ ID NO: 7728; WAN024CMZ_at; Start 55; Stop 79
tctgtgggattgaaatccaccttgt

SEQ ID NO: 124974 - DNA, 25 bp, Artificial
  probe
  misc_feature (1)..(25): SEQ ID NO: 7728; WAN024CMZ_at; Start 21; Stop 45
tagactagcaaagttatttctcaaa

SEQ ID NO: 124975 - DNA, 25 bp, Artificial
  probe
  misc_feature (1)..(25): SEQ ID NO: 7728; WAN024CMZ_at; Start 82; Stop 106
ccattggtcgttgatgagttgaaga

SEQ ID NO: 124976 - DNA, 25 bp, Artificial
  probe
  misc_feature (1)..(25): SEQ ID NO: 7728; WAN024CMZ_at; Start 68; Stop 92
aatccaccttgtcaccattggtcgt

SEQ ID NO: 124977 - DNA, 25 bp, Artificial
  probe
  misc_feature (1)..(25): SEQ ID NO: 7728; WAN024CMZ_at; Start 96; Stop 120
tgagttgaagatgattcctgcaatc

SEQ ID NO: 124978 - DNA, 25 bp, Artificial
  probe
  misc_feature (1)..(25): SEQ ID NO: 7728; WAN024CMZ_at; Start 39; Stop 63
tctcaaatcaacattttctgtggga

SEQ ID NO: 124979 - DNA, 25 bp, Artificial
  probe
  misc_feature (1)..(25): SEQ ID NO: 7728; WAN024CMZ_at; Start 57; Stop 81
tgtgggattgaaatccaccttgtca

SEQ ID NO: 124980 - DNA, 25 bp, Artificial
  probe
  misc_feature (1)..(25): SEQ ID NO: 7728; WAN024CMZ_at; Start 18; Stop 42
tactagactagcaaagttatttctc

SEQ ID NO: 124981 - DNA, 25 bp, Artificial
  probe
  misc_feature (1)..(25): SEQ ID NO: 7728; WAN024CMZ_at; Start 115; Stop 139
gcaatctgcattcaatcaaatctct

SEQ ID NO: 124982 - DNA, 25 bp, Artificial
  probe
  misc_feature (1)..(25): SEQ ID NO: 7728; WAN024CMZ_at; Start 99; Stop 123
gttgaagatgattcctgcaatctgc

SEQ ID NO: 124983 - DNA, 25 bp, Artificial
  probe
  misc_feature (1)..(25): SEQ ID NO: 7728; WAN024CMZ_at; Start 26; Stop 50
tagcaaagttatttctcaaatcaac

SEQ ID NO: 124984 - DNA, 25 bp, Artificial
  probe
  misc_feature (1)..(25): SEQ ID NO: 7728; WAN024CMZ_at; Start 7; Stop 31
tgtatttattttactagactagcaa

SEQ ID NO: 124985 - DNA, 25 bp, Artificial
  probe
  misc_feature (1)..(25): SEQ ID NO: 7728; WAN024CMZ_at; Start 47; Stop 71
caacattttctgtgggattgaaatc

SEQ ID NO: 124986 - DNA, 25 bp, Artificial
  probe
  misc_feature (1)..(25): SEQ ID NO: 7728; WAN024CMZ_at; Start 77; Stop 101
tgtcaccattggtcgttgatgagtt

SEQ ID NO: 124987 - DNA, 25 bp, Artificial
  probe
  misc_feature (1)..(25): SEQ ID NO: 7728; WAN024CMZ_at; Start 64; Stop 88
ttgaaatccaccttgtcaccattgg

SEQ ID NO: 124988 - DNA, 25 bp, Artificial
  probe
  misc_feature (1)..(25): SEQ ID NO: 7728; WAN024CMZ_at; Start 65; Stop 89
tgaaatccaccttgtcaccattggt

SEQ ID NO: 124989 - DNA, 25 bp, Artificial
  probe
  misc_feature (1)..(25): SEQ ID NO: 1950; WAN024CN2_at; Start 23; Stop 47
tcaactcatcaacgaccaatggtga

SEQ ID NO: 124990 - DNA, 25 bp, Artificial
  probe
  misc_feature (1)..(25): SEQ ID NO: 1950; WAN024CN2_at; Start 6; Stop 30
gattgcaggaatcatcttcaactca

SEQ ID NO: 124991 - DNA, 25 bp, Artificial
  probe
  misc_feature (1)..(25): SEQ ID NO: 1950; WAN024CN2_at; Start 25; Stop 49
aactcatcaacgaccaatggtgaca

SEQ ID NO: 124992 - DNA, 25 bp, Artificial
  probe
  misc_feature (1)..(25): SEQ ID NO: 1950; WAN024CN2_at; Start 38; Stop 62
ccaatggtgacaaggtggatttcaa

SEQ ID NO: 124993 - DNA, 25 bp, Artificial
  probe
  misc_feature (1)..(25): SEQ ID NO: 1950; WAN024CN2_at; Start 52; Stop 76
gtggatttcaatcccacagaaaatg

SEQ ID NO: 124994 - DNA, 25 bp, Artificial
  probe
  misc_feature (1)..(25): SEQ ID NO: 1950; WAN024CN2_at; Start 57; Stop 81
tttcaatcccacagaaaatgttgat

SEQ ID NO: 124995 - DNA, 25 bp, Artificial
  probe
  misc_feature (1)..(25): SEQ ID NO: 1950; WAN024CN2_at; Start 42; Stop 66
tggtgacaaggtggatttcaatccc

SEQ ID NO: 124996 - DNA, 25 bp, Artificial
  probe
  misc_feature (1)..(25): SEQ ID NO: 1950; WAN024CN2_at; Start 63; Stop 87
tcccacagaaaatgttgatttgaga

SEQ ID NO: 124997 - DNA, 25 bp, Artificial
  probe
  misc_feature (1)..(25): SEQ ID NO: 1950; WAN024CN2_at; Start 84; Stop 108
gagaaataactttgctagtctagta

SEQ ID NO: 124998 - DNA, 25 bp, Artificial
  probe
  misc_feature (1)..(25): SEQ ID NO: 1950; WAN024CN2_at; Start 32; Stop 56
caacgaccaatggtgacaaggtgga

SEQ ID NO: 124999 - DNA, 25 bp, Artificial
  probe
  misc_feature (1)..(25): SEQ ID NO: 1950; WAN024CN2_at; Start 43; Stop 67
ggtgacaaggtggatttcaatccca

SEQ ID NO: 125000 - DNA, 25 bp, Artificial
  probe
  misc_feature (1)..(25): SEQ ID NO: 1950; WAN024CN2_at; Start 29; Stop 53
catcaacgaccaatggtgacaaggt

SEQ ID NO: 125001 - DNA, 25 bp, Artificial
  probe
  misc_feature (1)..(25): SEQ ID NO: 1950; WAN024CN2_at; Start 96; Stop 120
tgctagtctagtaaaactaactaat

SEQ ID NO: 125002 - DNA, 25 bp, Artificial
  probe
  misc_feature (1)..(25): SEQ ID NO: 1950; WAN024CN2_at; Start 86; Stop 110
gaaataactttgctagtctagtaaa

SEQ ID NO: 125003 - DNA, 25 bp, Artificial
  probe
  misc_feature (1)..(25): SEQ ID NO: 1950; WAN024CN2_at; Start 3; Stop 27
gcagattgcaggaatcatcttcaac

SEQ ID NO: 125004 - DNA, 25 bp, Artificial
  probe
  misc_feature (1)..(25): SEQ ID NO: 1950; WAN024CN2_at; Start 93; Stop 117
ctttgctagtctagtaaaactaact

SEQ ID NO: 125005 - DNA, 25 bp, Artificial
  probe
  misc_feature (1)..(25): SEQ ID NO: 1950; WAN024CN2_at; Start 22; Stop 46
ttcaactcatcaacgaccaatggtg

SEQ ID NO: 125006 - DNA, 25 bp, Artificial
  probe
  misc_feature (1)..(25): SEQ ID NO: 1950; WAN024CN2_at; Start 48; Stop 72
caaggtggatttcaatcccacagaa

SEQ ID NO: 125007 - DNA, 25 bp, Artificial
  probe
  misc_feature (1)..(25): SEQ ID NO: 1950; WAN024CN2_at; Start 65; Stop 89
ccacagaaaatgttgatttgagaaa

SEQ ID NO: 125008 - DNA, 25 bp, Artificial
  probe
  misc_feature (1)..(25): SEQ ID NO: 1950; WAN024CN2_at; Start 55; Stop 79
gatttcaatcccacagaaaatgttg

SEQ ID NO: 125009 - DNA, 25 bp, Artificial
  probe
  misc_feature (1)..(25): SEQ ID NO: 1950; WAN024CN2_at; Start 45; Stop 69
tgacaaggtggatttcaatcccaca

SEQ ID NO: 125010 - DNA, 25 bp, Artificial
  probe
  misc_feature (1)..(25): SEQ ID NO: 1950; WAN024CN2_at; Start 36; Stop 60
gaccaatggtgacaaggtggatttc

SEQ ID NO: 125011 - DNA, 25 bp, Artificial
  probe
  misc_feature (1)..(25): SEQ ID NO: 1950; WAN024CN2_at; Start 20; Stop 44
tcttcaactcatcaacgaccaatgg

SEQ ID NO: 125012 - DNA, 25 bp, Artificial
  probe
  misc_feature (1)..(25): SEQ ID NO: 1950; WAN024CN2_at; Start 28; Stop 52
tcatcaacgaccaatggtgacaagg

SEQ ID NO: 125013 - DNA, 25 bp, Artificial
  probe
  misc_feature (1)..(25): SEQ ID NO: 1950; WAN024CN2_at; Start 31; Stop 55
tcaacgaccaatggtgacaaggtgg

SEQ ID NO: 125014 - DNA, 25 bp, Artificial
  probe
  misc_feature (1)..(25): SEQ ID NO: 1950; WAN024CN2_at; Start 2; Stop 26
tgcagattgcaggaatcatcttcaa

SEQ ID NO: 125015 - DNA, 25 bp, Artificial
  probe
  misc_feature (1)..(25): SEQ ID NO: 1950; WAN024CN2_at; Start 33; Stop 57
aacgaccaatggtgacaaggtggat

SEQ ID NO: 125016 - DNA, 25 bp, Artificial
  probe
  misc_feature (1)..(25): SEQ ID NO: 1950; WAN024CN2_at; Start 14; Stop 38
gaatcatcttcaactcatcaacgac

SEQ ID NO: 125017 - DNA, 25 bp, Artificial
  probe
  misc_feature (1)..(25): SEQ ID NO: 1950; WAN024CN2_at; Start 10; Stop 34
gcaggaatcatcttcaactcatcaa

SEQ ID NO: 125018 - DNA, 25 bp, Artificial
  probe
  misc_feature (1)..(25): SEQ ID NO: 1950; WAN024CN2_at; Start 13; Stop 37
ggaatcatcttcaactcatcaacga

SEQ ID NO: 125019 - DNA, 25 bp, Artificial
  probe
  misc_feature (1)..(25): SEQ ID NO: 1950; WAN024CN2_at; Start 79; Stop 103
gatttgagaaataactttgctagtc

SEQ ID NO: 125020 - DNA, 25 bp, Artificial
  probe
  misc_feature (1)..(25): SEQ ID NO: 1950; WAN024CN2_at; Start 35; Stop 59
cgaccaatggtgacaaggtggattt

SEQ ID NO: 125021 - DNA, 25 bp, Artificial
  probe
  misc_feature (1)..(25): SEQ ID NO: 1950; WAN024CN2_at; Start 46; Stop 70
gacaaggtggatttcaatcccacag

SEQ ID NO: 125022 - DNA, 25 bp, Artificial
  probe
  misc_feature (1)..(25): SEQ ID NO: 1950; WAN024CN2_at; Start 60; Stop 84
caatcccacagaaaatgttgatttg

SEQ ID NO: 125023 - DNA, 25 bp, Artificial
  probe
  misc_feature (1)..(25): SEQ ID NO: 1039; WAN024CN3_at; Start 28; Stop 52
gaacattggcctcttttgatttata

SEQ ID NO: 125024 - DNA, 25 bp, Artificial
  probe
  misc_feature (1)..(25): SEQ ID NO: 1039; WAN024CN3_at; Start 3; Stop 27
gaacgataagaaagaggttgatggc

SEQ ID NO: 125025 - DNA, 25 bp, Artificial
  probe
  misc_feature (1)..(25): SEQ ID NO: 1039; WAN024CN3_at; Start 7; Stop 31
gataagaaagaggttgatggcgaac

SEQ ID NO: 125026 - DNA, 25 bp, Artificial
  probe
  misc_feature (1)..(25): SEQ ID NO: 1039; WAN024CN3_at; Start 16; Stop 40
gaggttgatggcgaacattggcctc

SEQ ID NO: 125027 - DNA, 25 bp, Artificial
  probe
  misc_feature (1)..(25): SEQ ID NO: 1039; WAN024CN3_at; Start 21; Stop 45
tgatggcgaacattggcctcttttg

SEQ ID NO: 125028 - DNA, 25 bp, Artificial
  probe
  misc_feature (1)..(25): SEQ ID NO: 1039; WAN024CN3_at; Start 18; Stop 42
ggttgatggcgaacattggcctctt

SEQ ID NO: 125029 - DNA, 25 bp, Artificial
  probe
  misc_feature (1)..(25): SEQ ID NO: 1039; WAN024CN3_at; Start 2; Stop 26
tgaacgataagaaagaggttgatgg

SEQ ID NO: 125030 - DNA, 25 bp, Artificial
  probe
  misc_feature (1)..(25): SEQ ID NO: 1039; WAN024CN3_at; Start 29; Stop 53
aacattggcctcttttgatttataa

SEQ ID NO: 125031 - DNA, 25 bp, Artificial
  probe
  misc_feature (1)..(25): SEQ ID NO: 1039; WAN024CN3_at; Start 80; Stop 104
cagacttttctattgtaagcctaac

SEQ ID NO: 125032 - DNA, 25 bp, Artificial
  probe
  misc_feature (1)..(25): SEQ ID NO: 1039; WAN024CN3_at; Start 82; Stop 106
gacttttctattgtaagcctaacta

SEQ ID NO: 125033 - DNA, 25 bp, Artificial
  probe
  misc_feature (1)..(25): SEQ ID NO: 1039; WAN024CN3_at; Start 68; Stop 92
tcgcctcaatttcagacttttctat

SEQ ID NO: 125034 - DNA, 25 bp, Artificial
  probe
  misc_feature (1)..(25): SEQ ID NO: 1039; WAN024CN3_at; Start 60; Stop 84
gattcttgtcgcctcaatttcagac

SEQ ID NO: 125035 - DNA, 25 bp, Artificial
  probe
  misc_feature (1)..(25): SEQ ID NO: 1039; WAN024CN3_at; Start 84; Stop 108
cttttctattgtaagcctaactaat

SEQ ID NO: 125036 - DNA, 25 bp, Artificial
  probe
  misc_feature (1)..(25): SEQ ID NO: 1039; WAN024CN3_at; Start 57; Stop 81
ttggattcttgtcgcctcaatttca

SEQ ID NO: 125037 - DNA, 25 bp, Artificial
  probe
  misc_feature (1)..(25): SEQ ID NO: 1039; WAN024CN3_at; Start 11; Stop 35
agaaagaggttgatggcgaacattg

SEQ ID NO: 125038 - DNA, 25 bp, Artificial
  probe
  misc_feature (1)..(25): SEQ ID NO: 1039; WAN024CN3_at; Start 9; Stop 33
taagaaagaggttgatggcgaacat

SEQ ID NO: 125039 - DNA, 25 bp, Artificial
  probe
  misc_feature (1)..(25): SEQ ID NO: 1039; WAN024CN3_at; Start 26; Stop 50
gcgaacattggcctcttttgattta

SEQ ID NO: 125040 - DNA, 25 bp, Artificial
  probe
  misc_feature (1)..(25): SEQ ID NO: 1039; WAN024CN3_at; Start 31; Stop 55
cattggcctcttttgatttataaag

SEQ ID NO: 125041 - DNA, 25 bp, Artificial
  probe
  misc_feature (1)..(25): SEQ ID NO: 1039; WAN024CN3_at; Start 5; Stop 29
acgataagaaagaggttgatggcga

SEQ ID NO: 125042 - DNA, 25 bp, Artificial
  probe
  misc_feature (1)..(25): SEQ ID NO: 1039; WAN024CN3_at; Start 13; Stop 37
aaagaggttgatggcgaacattggc

SEQ ID NO: 125043 - DNA, 25 bp, Artificial
  probe
  misc_feature (1)..(25): SEQ ID NO: 1039; WAN024CN3_at; Start 35; Stop 59
ggcctcttttgatttataaagattg

SEQ ID NO: 125044 - DNA, 25 bp, Artificial
  probe
  misc_feature (1)..(25): SEQ ID NO: 1039; WAN024CN3_at; Start 63; Stop 87
tcttgtcgcctcaatttcagacttt

SEQ ID NO: 125045 - DNA, 25 bp, Artificial
  probe
  misc_feature (1)..(25): SEQ ID NO: 1039; WAN024CN3_at; Start 51; Stop 75
taaagattggattcttgtcgcctca

SEQ ID NO: 125046 - DNA, 25 bp, Artificial
  probe
  misc_feature (1)..(25): SEQ ID NO: 1039; WAN024CN3_at; Start 49; Stop 73
tataaagattggattcttgtcgcct

SEQ ID NO: 125047 - DNA, 25 bp, Artificial
  probe
  misc_feature (1)..(25): SEQ ID NO: 1039; WAN024CN3_at; Start 19; Stop 43
gttgatggcgaacattggcctcttt

SEQ ID NO: 125048 - DNA, 25 bp, Artificial
  probe
  misc_feature (1)..(25): SEQ ID NO: 1039; WAN024CN3_at; Start 66; Stop 90
tgtcgcctcaatttcagacttttct

SEQ ID NO: 125049 - DNA, 25 bp, Artificial
  probe
  misc_feature (1)..(25): SEQ ID NO: 1039; WAN024CN3_at; Start 6; Stop 30
cgataagaaagaggttgatggcgaa

SEQ ID NO: 125050 - DNA, 25 bp, Artificial
  probe
  misc_feature (1)..(25): SEQ ID NO: 1039; WAN024CN3_at; Start 55; Stop 79
gattggattcttgtcgcctcaattt

SEQ ID NO: 125051 - DNA, 25 bp, Artificial
  probe
  misc_feature (1)..(25): SEQ ID NO: 1039; WAN024CN3_at; Start 23; Stop 47
atggcgaacattggcctcttttgat

SEQ ID NO: 125052 - DNA, 25 bp, Artificial
  probe
  misc_feature (1)..(25): SEQ ID NO: 1039; WAN024CN3_at; Start 22; Stop 46
gatggcgaacattggcctcttttga

SEQ ID NO: 125053 - DNA, 25 bp, Artificial
  probe
  misc_feature (1)..(25): SEQ ID NO: 1039; WAN024CN3_at; Start 48; Stop 72
ttataaagattggattcttgtcgcc

SEQ ID NO: 125054 - DNA, 25 bp, Artificial
  probe
  misc_feature (1)..(25): SEQ ID NO: 1039; WAN024CN3_at; Start 17; Stop 41
aggttgatggcgaacattggcctct

SEQ ID NO: 125055 - DNA, 25 bp, Artificial
  probe
  misc_feature (1)..(25): SEQ ID NO: 1039; WAN024CN3_at; Start 52; Stop 76
aaagattggattcttgtcgcctcaa

SEQ ID NO: 125056 - DNA, 25 bp, Artificial
  probe
  misc_feature (1)..(25): SEQ ID NO: 1039; WAN024CN3_at; Start 53; Stop 77
aagattggattcttgtcgcctcaat

SEQ ID NO: 125057 - DNA, 25 bp, Artificial
  probe
  misc_feature (1)..(25): SEQ ID NO: 3327; WAN024CN4_at; Start 7; Stop 31
ttgaggcgacaagaatccaatcttt

SEQ ID NO: 125058 - DNA, 25 bp, Artificial
  probe
  misc_feature (1)..(25): SEQ ID NO: 3327; WAN024CN4_at; Start 102; Stop 126
gaatgctttacctatggccctaact

SEQ ID NO: 125059 - DNA, 25 bp, Artificial
  probe
  misc_feature (1)..(25): SEQ ID NO: 3327; WAN024CN4_at; Start 99; Stop 123
gatgaatgctttacctatggcccta

SEQ ID NO: 125060 - DNA, 25 bp, Artificial
  probe
  misc_feature (1)..(25): SEQ ID NO: 3327; WAN024CN4_at; Start 31; Stop 55
tataaatcaaaagaggccaatgttc

SEQ ID NO: 125061 - DNA, 25 bp, Artificial
  probe
  misc_feature (1)..(25): SEQ ID NO: 3327; WAN024CN4_at; Start 103; Stop 127
aatgctttacctatggccctaacta

SEQ ID NO: 125062 - DNA, 25 bp, Artificial
  probe
  misc_feature (1)..(25): SEQ ID NO: 3327; WAN024CN4_at; Start 57; Stop 81
ccatcaacctctttcttatcgttca

SEQ ID NO: 125063 - DNA, 25 bp, Artificial
  probe
  misc_feature (1)..(25): SEQ ID NO: 3327; WAN024CN4_at; Start 89; Stop 113
tgctaagtaagatgaatgctttacc

SEQ ID NO: 125064 - DNA, 25 bp, Artificial
  probe
  misc_feature (1)..(25): SEQ ID NO: 3327; WAN024CN4_at; Start 80; Stop 104
cattctttttgctaagtaagatgaa

SEQ ID NO: 125065 - DNA, 25 bp, Artificial
  probe
  misc_feature (1)..(25): SEQ ID NO: 3327; WAN024CN4_at; Start 48; Stop 72
caatgttcgccatcaacctctttct

SEQ ID NO: 125066 - DNA, 25 bp, Artificial
  probe
  misc_feature (1)..(25): SEQ ID NO: 3327; WAN024CN4_at; Start 51; Stop 75
tgttcgccatcaacctctttcttat

SEQ ID NO: 125067 - DNA, 25 bp, Artificial
  probe
  misc_feature (1)..(25): SEQ ID NO: 3327; WAN024CN4_at; Start 5; Stop 29
aattgaggcgacaagaatccaatct

SEQ ID NO: 125068 - DNA, 25 bp, Artificial
  probe
  misc_feature (1)..(25): SEQ ID NO: 3327; WAN024CN4_at; Start 96; Stop 120
taagatgaatgctttacctatggcc

SEQ ID NO: 125069 - DNA, 25 bp, Artificial
  probe
  misc_feature (1)..(25): SEQ ID NO: 3327; WAN024CN4_at; Start 83; Stop 107
tctttttgctaagtaagatgaatgc

SEQ ID NO: 125070 - DNA, 25 bp, Artificial
  probe
  misc_feature (1)..(25): SEQ ID NO: 3327; WAN024CN4_at; Start 39; Stop 63
aaaagaggccaatgttcgccatcaa

SEQ ID NO: 125071 - DNA, 25 bp, Artificial
  probe
  misc_feature (1)..(25): SEQ ID NO: 3327; WAN024CN4_at; Start 29; Stop 53
tttataaatcaaaagaggccaatgt

SEQ ID NO: 125072 - DNA, 25 bp, Artificial
  probe
  misc_feature (1)..(25): SEQ ID NO: 3327; WAN024CN4_at; Start 105; Stop 129
tgctttacctatggccctaactaat

SEQ ID NO: 125073 - DNA, 25 bp, Artificial
  probe
  misc_feature (1)..(25): SEQ ID NO: 3327; WAN024CN4_at; Start 33; Stop 57
taaatcaaaagaggccaatgttcgc

SEQ ID NO: 125074 - DNA, 25 bp, Artificial
  probe
  misc_feature (1)..(25): SEQ ID NO: 3327; WAN024CN4_at; Start 24; Stop 48
caatctttataaatcaaaagaggcc

SEQ ID NO: 125075 - DNA, 25 bp, Artificial
  probe
  misc_feature (1)..(25): SEQ ID NO: 3327; WAN024CN4_at; Start 11; Stop 35
ggcgacaagaatccaatctttataa

SEQ ID NO: 125076 - DNA, 25 bp, Artificial
  probe
  misc_feature (1)..(25): SEQ ID NO: 3327; WAN024CN4_at; Start 2; Stop 26
tgaaattgaggcgacaagaatccaa

SEQ ID NO: 125077 - DNA, 25 bp, Artificial
  probe
  misc_feature (1)..(25): SEQ ID NO: 3327; WAN024CN4_at; Start 54; Stop 78
tcgccatcaacctctttcttatcgt

SEQ ID NO: 125078 - DNA, 25 bp, Artificial
  probe
  misc_feature (1)..(25): SEQ ID NO: 3327; WAN024CN4_at; Start 9; Stop 33
gaggcgacaagaatccaatctttat

SEQ ID NO: 125079 - DNA, 25 bp, Artificial
  probe
  misc_feature (1)..(25): SEQ ID NO: 3327; WAN024CN4_at; Start 46; Stop 70
gccaatgttcgccatcaacctcttt

SEQ ID NO: 125080 - DNA, 25 bp, Artificial
  probe
  misc_feature (1)..(25): SEQ ID NO: 3327; WAN024CN4_at; Start 41; Stop 65
aagaggccaatgttcgccatcaacc

SEQ ID NO: 125081 - DNA, 25 bp, Artificial
  probe
  misc_feature (1)..(25): SEQ ID NO: 3327; WAN024CN4_at; Start 43; Stop 67
gaggccaatgttcgccatcaacctc

SEQ ID NO: 125082 - DNA, 25 bp, Artificial
  probe
  misc_feature (1)..(25): SEQ ID NO: 3327; WAN024CN4_at; Start 37; Stop 61
tcaaaagaggccaatgttcgccatc

SEQ ID NO: 125083 - DNA, 25 bp, Artificial
  probe
  misc_feature (1)..(25): SEQ ID NO: 3327; WAN024CN4_at; Start 76; Stop 100
cgttcattctttttgctaagtaaga

SEQ ID NO: 125084 - DNA, 25 bp, Artificial
  probe
  misc_feature (1)..(25): SEQ ID NO: 3327; WAN024CN4_at; Start 101; Stop 125
tgaatgctttacctatggccctaac

SEQ ID NO: 125085 - DNA, 25 bp, Artificial
  probe
  misc_feature (1)..(25): SEQ ID NO: 3327; WAN024CN4_at; Start 61; Stop 85
caacctctttcttatcgttcattct

SEQ ID NO: 125086 - DNA, 25 bp, Artificial
  probe
  misc_feature (1)..(25): SEQ ID NO: 3327; WAN024CN4_at; Start 40; Stop 64
aaagaggccaatgttcgccatcaac

SEQ ID NO: 125087 - DNA, 25 bp, Artificial
  probe
  misc_feature (1)..(25): SEQ ID NO: 3327; WAN024CN4_at; Start 97; Stop 121
aagatgaatgctttacctatggccc

SEQ ID NO: 125088 - DNA, 25 bp, Artificial
  probe
  misc_feature (1)..(25): SEQ ID NO: 3327; WAN024CN4_at; Start 14; Stop 38
gacaagaatccaatctttataaatc

SEQ ID NO: 125089 - DNA, 25 bp, Artificial
  probe
  misc_feature (1)..(25): SEQ ID NO: 3327; WAN024CN4_at; Start 3; Stop 27
gaaattgaggcgacaagaatccaat

SEQ ID NO: 125090 - DNA, 25 bp, Artificial
  probe
  misc_feature (1)..(25): SEQ ID NO: 3327; WAN024CN4_at; Start 38; Stop 62
caaaagaggccaatgttcgccatca

SEQ ID NO: 125091 - DNA, 25 bp, Artificial
  probe
  misc_feature (1)..(25): SEQ ID NO: 350; WAN024CN5_at; Start 177; Stop 201
aaatctggtcactatgagtcgccta

SEQ ID NO: 125092 - DNA, 25 bp, Artificial
  probe
  misc_feature (1)..(25): SEQ ID NO: 350; WAN024CN5_at; Start 109; Stop 133
gctattgaacaatggcgtgctgaaa

SEQ ID NO: 125093 - DNA, 25 bp, Artificial
  probe
  misc_feature (1)..(25): SEQ ID NO: 350; WAN024CN5_at; Start 68; Stop 92
tgggagaaaatttggcatggaatca

SEQ ID NO: 125094 - DNA, 25 bp, Artificial
  probe
  misc_feature (1)..(25): SEQ ID NO: 350; WAN024CN5_at; Start 31; Stop 55
gatctttggagtgcctttccaactt

SEQ ID NO: 125095 - DNA, 25 bp, Artificial
  probe
  misc_feature (1)..(25): SEQ ID NO: 350; WAN024CN5_at; Start 74; Stop 98
aaaatttggcatggaatcatgacgg

SEQ ID NO: 125096 - DNA, 25 bp, Artificial
  probe
  misc_feature (1)..(25): SEQ ID NO: 350; WAN024CN5_at; Start 115; Stop 139
gaacaatggcgtgctgaaaaagcag

SEQ ID NO: 125097 - DNA, 25 bp, Artificial
  probe
  misc_feature (1)..(25): SEQ ID NO: 350; WAN024CN5_at; Start 127; Stop 151
gctgaaaaagcagattatgtggaga

SEQ ID NO: 125098 - DNA, 25 bp, Artificial
  probe
  misc_feature (1)..(25): SEQ ID NO: 350; WAN024CN5_at; Start 160; Stop 184
gtggttcagacaacgggaaatctgg

SEQ ID NO: 125099 - DNA, 25 bp, Artificial
  probe
  misc_feature (1)..(25): SEQ ID NO: 350; WAN024CN5_at; Start 175; Stop 199
ggaaatctggtcactatgagtcgcc

SEQ ID NO: 125100 - DNA, 25 bp, Artificial
  probe
  misc_feature (1)..(25): SEQ ID NO: 350; WAN024CN5_at; Start 104; Stop 128
taaaagctattgaacaatggcgtgc

SEQ ID NO: 125101 - DNA, 25 bp, Artificial
  probe
  misc_feature (1)..(25): SEQ ID NO: 350; WAN024CN5_at; Start 16; Stop 40
cgtctttctagcaaagatctttgga

SEQ ID NO: 125102 - DNA, 25 bp, Artificial
  probe
  misc_feature (1)..(25): SEQ ID NO: 350; WAN024CN5_at; Start 87; Stop 111
gaatcatgacggttttctaaaagct

SEQ ID NO: 125103 - DNA, 25 bp, Artificial
  probe
  misc_feature (1)..(25): SEQ ID NO: 350; WAN024CN5_at; Start 50; Stop 74
caacttctaatagtataatgggaga

SEQ ID NO: 125104 - DNA, 25 bp, Artificial
  probe
  misc_feature (1)..(25): SEQ ID NO: 350; WAN024CN5_at; Start 180; Stop 204
tctggtcactatgagtcgcctaact

SEQ ID NO: 125105 - DNA, 25 bp, Artificial
  probe
  misc_feature (1)..(25): SEQ ID NO: 350; WAN024CN5_at; Start 10; Stop 34
catacccgtctttctagcaaagatc

SEQ ID NO: 125106 - DNA, 25 bp, Artificial
  probe
  misc_feature (1)..(25): SEQ ID NO: 350; WAN024CN5_at; Start 38; Stop 62
ggagtgcctttccaacttctaatag

SEQ ID NO: 125107 - DNA, 25 bp, Artificial
  probe
  misc_feature (1)..(25): SEQ ID NO: 350; WAN024CN5_at; Start 7; Stop 31
gatcatacccgtctttctagcaaag

SEQ ID NO: 125108 - DNA, 25 bp, Artificial
  probe
  misc_feature (1)..(25): SEQ ID NO: 350; WAN024CN5_at; Start 168; Stop 192
gacaacgggaaatctggtcactatg

SEQ ID NO: 125109 - DNA, 25 bp, Artificial
  probe
  misc_feature (1)..(25): SEQ ID NO: 350; WAN024CN5_at; Start 22; Stop 46
tctagcaaagatctttggagtgcct

SEQ ID NO: 125110 - DNA, 25 bp, Artificial
  probe
  misc_feature (1)..(25): SEQ ID NO: 350; WAN024CN5_at; Start 122; Stop 146
ggcgtgctgaaaaagcagattatgt

SEQ ID NO: 125111 - DNA, 25 bp, Artificial
  probe
  misc_feature (1)..(25): SEQ ID NO: 350; WAN024CN5_at; Start 183; Stop 207
ggtcactatgagtcgcctaactaat

SEQ ID NO: 125112 - DNA, 25 bp, Artificial
  probe
  misc_feature (1)..(25): SEQ ID NO: 350; WAN024CN5_at; Start 27; Stop 51
caaagatctttggagtgcctttcca

SEQ ID NO: 125113 - DNA, 25 bp, Artificial
  probe
  misc_feature (1)..(25): SEQ ID NO: 350; WAN024CN5_at; Start 165; Stop 189
tcagacaacgggaaatctggtcact

SEQ ID NO: 125114 - DNA, 25 bp, Artificial
  probe
  misc_feature (1)..(25): SEQ ID NO: 350; WAN024CN5_at; Start 156; Stop 180
aatagtggttcagacaacgggaaat

SEQ ID NO: 125115 - DNA, 25 bp, Artificial
  probe
  misc_feature (1)..(25): SEQ ID NO: 350; WAN024CN5_at; Start 93; Stop 117
tgacggttttctaaaagctattgaa

SEQ ID NO: 125116 - DNA, 25 bp, Artificial
  probe
  misc_feature (1)..(25): SEQ ID NO: 350; WAN024CN5_at; Start 158; Stop 182
tagtggttcagacaacgggaaatct

SEQ ID NO: 125117 - DNA, 25 bp, Artificial
  probe
  misc_feature (1)..(25): SEQ ID NO: 350; WAN024CN5_at; Start 63; Stop 87
tataatgggagaaaatttggcatgg

SEQ ID NO: 125118 - DNA, 25 bp, Artificial
  probe
  misc_feature (1)..(25): SEQ ID NO: 350; WAN024CN5_at; Start 172; Stop 196
acgggaaatctggtcactatgagtc

SEQ ID NO: 125119 - DNA, 25 bp, Artificial
  probe
  misc_feature (1)..(25): SEQ ID NO: 350; WAN024CN5_at; Start 118; Stop 142
caatggcgtgctgaaaaagcagatt

SEQ ID NO: 125120 - DNA, 25 bp, Artificial
  probe
  misc_feature (1)..(25): SEQ ID NO: 350; WAN024CN5_at; Start 113; Stop 137
ttgaacaatggcgtgctgaaaaagc

SEQ ID NO: 125121 - DNA, 25 bp, Artificial
  probe
  misc_feature (1)..(25): SEQ ID NO: 350; WAN024CN5_at; Start 82; Stop 106
gcatggaatcatgacggttttctaa

SEQ ID NO: 125122 - DNA, 25 bp, Artificial
  probe
  misc_feature (1)..(25): SEQ ID NO: 350; WAN024CN5_at; Start 60; Stop 84
tagtataatgggagaaaatttggca

SEQ ID NO: 125123 - DNA, 25 bp, Artificial
  probe
  misc_feature (1)..(25): SEQ ID NO: 350; WAN024CN5_at; Start 170; Stop 194
caacgggaaatctggtcactatgag

SEQ ID NO: 125124 - DNA, 25 bp, Artificial
  probe
  misc_feature (1)..(25): SEQ ID NO: 350; WAN024CN5_at; Start 2; Stop 26
ccatggatcatacccgtctttctag

SEQ ID NO: 125125 - DNA, 25 bp, Artificial
  probe
  misc_feature (1)..(25): SEQ ID NO: 7227; WAN024CN6_at; Start 101; Stop 125
gattgccagctaggacaacgttgtc

SEQ ID NO: 125126 - DNA, 25 bp, Artificial
  probe
  misc_feature (1)..(25): SEQ ID NO: 7227; WAN024CN6_at; Start 189; Stop 213
aggaaggacaatgacgccaccacca

SEQ ID NO: 125127 - DNA, 25 bp, Artificial
  probe
  misc_feature (1)..(25): SEQ ID NO: 7227; WAN024CN6_at; Start 268; Stop 292
cgttcctgtggatctagtggatgga

SEQ ID NO: 125128 - DNA, 25 bp, Artificial
  probe
  misc_feature (1)..(25): SEQ ID NO: 7227; WAN024CN6_at; Start 71; Stop 95
taacaggtatttccttaatcacgcg

SEQ ID NO: 125129 - DNA, 25 bp, Artificial
  probe
  misc_feature (1)..(25): SEQ ID NO: 7227; WAN024CN6_at; Start 131; Stop 155
aagatttggtaattactgcccctgc

SEQ ID NO: 125130 - DNA, 25 bp, Artificial
  probe
  misc_feature (1)..(25): SEQ ID NO: 7227; WAN024CN6_at; Start 157; Stop 181
cctgcaacgacattatttcccagtg

SEQ ID NO: 125131 - DNA, 25 bp, Artificial
  probe
  misc_feature (1)..(25): SEQ ID NO: 7227; WAN024CN6_at; Start 208; Stop 232
ccaccagtccagaaattatctccga

SEQ ID NO: 125132 - DNA, 25 bp, Artificial
  probe
  misc_feature (1)..(25): SEQ ID NO: 7227; WAN024CN6_at; Start 255; Stop 279
gatacctgaattgcgttcctgtgga

SEQ ID NO: 125133 - DNA, 25 bp, Artificial
  probe
  misc_feature (1)..(25): SEQ ID NO: 7227; WAN024CN6_at; Start 226; Stop 250
tctccgattgtgataggctttccgt

SEQ ID NO: 125134 - DNA, 25 bp, Artificial
  probe
  misc_feature (1)..(25): SEQ ID NO: 7227; WAN024CN6_at; Start 111; Stop 135
taggacaacgttgtcgccaaaagat

SEQ ID NO: 125135 - DNA, 25 bp, Artificial
  probe
  misc_feature (1)..(25): SEQ ID NO: 7227; WAN024CN6_at; Start 76; Stop 100
ggtatttccttaatcacgcgcgcag

SEQ ID NO: 125136 - DNA, 25 bp, Artificial
  probe
  misc_feature (1)..(25): SEQ ID NO: 7227; WAN024CN6_at; Start 213; Stop 237
agtccagaaattatctccgattgtg

SEQ ID NO: 125137 - DNA, 25 bp, Artificial
  probe
  misc_feature (1)..(25): SEQ ID NO: 7227; WAN024CN6_at; Start 151; Stop 175
cctgctcctgcaacgacattatttc

SEQ ID NO: 125138 - DNA, 25 bp, Artificial
  probe
  misc_feature (1)..(25): SEQ ID NO: 7227; WAN024CN6_at; Start 231; Stop 255
gattgtgataggctttccgtactcg

SEQ ID NO: 125139 - DNA, 25 bp, Artificial
  probe
  misc_feature (1)..(25): SEQ ID NO: 7227; WAN024CN6_at; Start 241; Stop 265
ggctttccgtactcgatacctgaat

SEQ ID NO: 125140 - DNA, 25 bp, Artificial
  probe
  misc_feature (1)..(25): SEQ ID NO: 7227; WAN024CN6_at; Start 45; Stop 69
cccagctgttcctttttacttctat

SEQ ID NO: 125141 - DNA, 25 bp, Artificial
  probe
  misc_feature (1)..(25): SEQ ID NO: 7227; WAN024CN6_at; Start 237; Stop 261
gataggctttccgtactcgatacct

SEQ ID NO: 125142 - DNA, 25 bp, Artificial
  probe
  misc_feature (1)..(25): SEQ ID NO: 7227; WAN024CN6_at; Start 183; Stop 207
cactccaggaaggacaatgacgcca

SEQ ID NO: 125143 - DNA, 25 bp, Artificial
  probe
  misc_feature (1)..(25): SEQ ID NO: 7227; WAN024CN6_at; Start 116; Stop 140
caacgttgtcgccaaaagatttggt

SEQ ID NO: 125144 - DNA, 25 bp, Artificial
  probe
  misc_feature (1)..(25): SEQ ID NO: 7227; WAN024CN6_at; Start 88; Stop 112
atcacgcgcgcaggattgccagcta

SEQ ID NO: 125145 - DNA, 25 bp, Artificial
  probe
  misc_feature (1)..(25): SEQ ID NO: 7227; WAN024CN6_at; Start 135; Stop 159
tttggtaattactgcccctgctcct

SEQ ID NO: 125146 - DNA, 25 bp, Artificial
  probe
  misc_feature (1)..(25): SEQ ID NO: 7227; WAN024CN6_at; Start 18; Stop 42
tgatgaaacctacaaaaaagaaaca

SEQ ID NO: 125147 - DNA, 25 bp, Artificial
  probe
  misc_feature (1)..(25): SEQ ID NO: 7227; WAN024CN6_at; Start 167; Stop 191
cattatttcccagtgtcactccagg

SEQ ID NO: 125148 - DNA, 25 bp, Artificial
  probe
  misc_feature (1)..(25): SEQ ID NO: 7227; WAN024CN6_at; Start 262; Stop 286
gaattgcgttcctgtggatctagtg

SEQ ID NO: 125149 - DNA, 25 bp, Artificial
  probe
  misc_feature (1)..(25): SEQ ID NO: 7227; WAN024CN6_at; Start 78; Stop 102
tatttccttaatcacgcgcgcagga

SEQ ID NO: 125150 - DNA, 25 bp, Artificial
  probe
  misc_feature (1)..(25): SEQ ID NO: 7227; WAN024CN6_at; Start 174; Stop 198
tcccagtgtcactccaggaaggaca

SEQ ID NO: 125151 - DNA, 25 bp, Artificial
  probe
  misc_feature (1)..(25): SEQ ID NO: 7227; WAN024CN6_at; Start 106; Stop 130
ccagctaggacaacgttgtcgccaa

SEQ ID NO: 125152 - DNA, 25 bp, Artificial
  probe
  misc_feature (1)..(25): SEQ ID NO: 7227; WAN024CN6_at; Start 95; Stop 119
gcgcaggattgccagctaggacaac

SEQ ID NO: 125153 - DNA, 25 bp, Artificial
  probe
  misc_feature (1)..(25): SEQ ID NO: 7227; WAN024CN6_at; Start 7; Stop 31
tgggtaaaaaatgatgaaacctaca

SEQ ID NO: 125154 - DNA, 25 bp, Artificial
  probe
  misc_feature (1)..(25): SEQ ID NO: 7227; WAN024CN6_at; Start 219; Stop 243
gaaattatctccgattgtgataggc

SEQ ID NO: 125155 - DNA, 25 bp, Artificial
  probe
  misc_feature (1)..(25): SEQ ID NO: 7227; WAN024CN6_at; Start 200; Stop 224
tgacgccaccaccagtccagaaatt

SEQ ID NO: 125156 - DNA, 25 bp, Artificial
  probe
  misc_feature (1)..(25): SEQ ID NO: 7227; WAN024CN6_at; Start 170; Stop 194
tatttcccagtgtcactccaggaag

SEQ ID NO: 125157 - DNA, 25 bp, Artificial
  probe
  misc_feature (1)..(25): SEQ ID NO: 7227; WAN024CN6_at; Start 246; Stop 270
tccgtactcgatacctgaattgcgt

SEQ ID NO: 125158 - DNA, 25 bp, Artificial
  probe
  misc_feature (1)..(25): SEQ ID NO: 7227; WAN024CN6_at; Start 249; Stop 273
gtactcgatacctgaattgcgttcc

SEQ ID NO: 125159 - DNA, 25 bp, Artificial
  probe
  misc_feature (1)..(25): SEQ ID NO: 1448; WAN024CN7_at; Start 52; Stop 76
gacccagaactgagagccttagctc

SEQ ID NO: 125160 - DNA, 25 bp, Artificial
  probe
  misc_feature (1)..(25): SEQ ID NO: 1448; WAN024CN7_at; Start 332; Stop 356
tccatccactagatccacaggaacg

SEQ ID NO: 125161 - DNA, 25 bp, Artificial
  probe
  misc_feature (1)..(25): SEQ ID NO: 1448; WAN024CN7_at; Start 498; Stop 522
cgacaacgttgtcctagctggcaat

SEQ ID NO: 125162 - DNA, 25 bp, Artificial
  probe
  misc_feature (1)..(25): SEQ ID NO: 1448; WAN024CN7_at; Start 129; Stop 153
gggagccgaaatcatcaagacttgg

SEQ ID NO: 125163 - DNA, 25 bp, Artificial
  probe
  misc_feature (1)..(25): SEQ ID NO: 1448; WAN024CN7_at; Start 373; Stop 397
tacggaaagcctatcacaatcggag

SEQ ID NO: 125164 - DNA, 25 bp, Artificial
  probe
  misc_feature (1)..(25): SEQ ID NO: 1448; WAN024CN7_at; Start 474; Stop 498
ggcagtaattaccaaatcttttggc

SEQ ID NO: 125165 - DNA, 25 bp, Artificial
  probe
  misc_feature (1)..(25): SEQ ID NO: 1448; WAN024CN7_at; Start 300; Stop 324
gattggtcctaattgtcagtttttg

SEQ ID NO: 125166 - DNA, 25 bp, Artificial
  probe
  misc_feature (1)..(25): SEQ ID NO: 1448; WAN024CN7_at; Start 359; Stop 383
attcaggtatcgagtacggaaagcc

SEQ ID NO: 125167 - DNA, 25 bp, Artificial
  probe
  misc_feature (1)..(25): SEQ ID NO: 1448; WAN024CN7_at; Start 415; Stop 439
ggtggcgtcattgtccttcctggag

SEQ ID NO: 125168 - DNA, 25 bp, Artificial
  probe
  misc_feature (1)..(25): SEQ ID NO: 1448; WAN024CN7_at; Start 313; Stop 337
tgtcagtttttgacacccctccatc

SEQ ID NO: 125169 - DNA, 25 bp, Artificial
  probe
  misc_feature (1)..(25): SEQ ID NO: 1448; WAN024CN7_at; Start 120; Stop 144
ccccttgaagggagccgaaatcatc

SEQ ID NO: 125170 - DNA, 25 bp, Artificial
  probe
  misc_feature (1)..(25): SEQ ID NO: 1448; WAN024CN7_at; Start 94; Stop 118
caggccgcctttaacaaggaagaga

SEQ ID NO: 125171 - DNA, 25 bp, Artificial
  probe
  misc_feature (1)..(25): SEQ ID NO: 1448; WAN024CN7_at; Start 264; Stop 288
ggatatctgtcccattcgtatcggg

SEQ ID NO: 125172 - DNA, 25 bp, Artificial
  probe
  misc_feature (1)..(25): SEQ ID NO: 1448; WAN024CN7_at; Start 241; Stop 265
tctaattggaacttgaccatgctgg

SEQ ID NO: 125173 - DNA, 25 bp, Artificial
  probe
  misc_feature (1)..(25): SEQ ID NO: 1448; WAN024CN7_at; Start 183; Stop 207
caacactcgcttgatggtggactac

SEQ ID NO: 125174 - DNA, 25 bp, Artificial
  probe
  misc_feature (1)..(25): SEQ ID NO: 1448; WAN024CN7_at; Start 449; Stop 473
gaaataatgtcgttgcaggagcagg

SEQ ID NO: 125175 - DNA, 25 bp, Artificial
  probe
  misc_feature (1)..(25): SEQ ID NO: 1448; WAN024CN7_at; Start 429; Stop 453
ccttcctggagtgacactgggaaat

SEQ ID NO: 125176 - DNA, 25 bp, Artificial
  probe
  misc_feature (1)..(25): SEQ ID NO: 1448; WAN024CN7_at; Start 144; Stop 168
caagacttggtttgcctcaaccggg

SEQ ID NO: 125177 - DNA, 25 bp, Artificial
  probe
  misc_feature (1)..(25): SEQ ID NO: 1448; WAN024CN7_at; Start 2; Stop 26
tgactagcgaataccagaaaatgat

SEQ ID NO: 125178 - DNA, 25 bp, Artificial
  probe
  misc_feature (1)..(25): SEQ ID NO: 1448; WAN024CN7_at; Start 387; Stop 411
cacaatcggagataatttctggact

SEQ ID NO: 125179 - DNA, 25 bp, Artificial
  probe
  misc_feature (1)..(25): SEQ ID NO: 1448; WAN024CN7_at; Start 82; Stop 106
tctcgccaaaaacaggccgccttta

SEQ ID NO: 125180 - DNA, 25 bp, Artificial
  probe
  misc_feature (1)..(25): SEQ ID NO: 1448; WAN024CN7_at; Start 68; Stop 92
ccttagctcaggcttctcgccaaaa

SEQ ID NO: 125181 - DNA, 25 bp, Artificial
  probe
  misc_feature (1)..(25): SEQ ID NO: 1448; WAN024CN7_at; Start 347; Stop 371
cacaggaacgcaattcaggtatcga

SEQ ID NO: 125182 - DNA, 25 bp, Artificial
  probe
  misc_feature (1)..(25): SEQ ID NO: 1448; WAN024CN7_at; Start 254; Stop 278
tgaccatgctggatatctgtcccat

SEQ ID NO: 125183 - DNA, 25 bp, Artificial
  probe
  misc_feature (1)..(25): SEQ ID NO: 1448; WAN024CN7_at; Start 167; Stop 191
ggaaaaatctttacatcaacactcg

SEQ ID NO: 125184 - DNA, 25 bp, Artificial
  probe
  misc_feature (1)..(25): SEQ ID NO: 1448; WAN024CN7_at; Start 525; Stop 549
tgcgcgcgtgattaaggaaatacct

SEQ ID NO: 125185 - DNA, 25 bp, Artificial
  probe
  misc_feature (1)..(25): SEQ ID NO: 1448; WAN024CN7_at; Start 42; Stop 66
ccgtccatcagacccagaactgaga

SEQ ID NO: 125186 - DNA, 25 bp, Artificial
  probe
  misc_feature (1)..(25): SEQ ID NO: 1448; WAN024CN7_at; Start 190; Stop 214
cgcttgatggtggactacggtgtca

SEQ ID NO: 125187 - DNA, 25 bp, Artificial
  probe
  misc_feature (1)..(25): SEQ ID NO: 1448; WAN024CN7_at; Start 15; Stop 39
ccagaaaatgatagcaggagagttt

SEQ ID NO: 125188 - DNA, 25 bp, Artificial
  probe
  misc_feature (1)..(25): SEQ ID NO: 1448; WAN024CN7_at; Start 513; Stop 537
agctggcaatcctgcgcgcgtgatt

SEQ ID NO: 125189 - DNA, 25 bp, Artificial
  probe
  misc_feature (1)..(25): SEQ ID NO: 1448; WAN024CN7_at; Start 204; Stop 228
ctacggtgtcaacatccatctaggg

SEQ ID NO: 125190 - DNA, 25 bp, Artificial
  probe
  misc_feature (1)..(25): SEQ ID NO: 1448; WAN024CN7_at; Start 287; Stop 311
gggacaatgctatgattggtcctaa

SEQ ID NO: 125191 - DNA, 25 bp, Artificial
  probe
  misc_feature (1)..(25): SEQ ID NO: 1448; WAN024CN7_at; Start 488; Stop 512
aatcttttggcgacaacgttgtcct

SEQ ID NO: 125192 - DNA, 25 bp, Artificial
  probe
  misc_feature (1)..(25): SEQ ID NO: 1448; WAN024CN7_at; Start 400; Stop 424
aatttctggactggtggtggcgtca

SEQ ID NO: 125193 - DNA, 25 bp, Artificial
  probe
  misc_feature (1)..(25): SEQ ID NO: 7725; WAN024CN8_at; Start 60; Stop 84
ttttaccgatgcaagtttattcgca

SEQ ID NO: 125194 - DNA, 25 bp, Artificial
  probe
  misc_feature (1)..(25): SEQ ID NO: 7725; WAN024CN8_at; Start 110; Stop 134
tcaggttatctagtccactatttcc

SEQ ID NO: 125195 - DNA, 25 bp, Artificial
  probe
  misc_feature (1)..(25): SEQ ID NO: 7725; WAN024CN8_at; Start 52; Stop 76
tcttctccttttaccgatgcaagtt

SEQ ID NO: 125196 - DNA, 25 bp, Artificial
  probe
  misc_feature (1)..(25): SEQ ID NO: 7725; WAN024CN8_at; Start 121; Stop 145
agtccactatttcctaatgcgacaa

SEQ ID NO: 125197 - DNA, 25 bp, Artificial
  probe
  misc_feature (1)..(25): SEQ ID NO: 7725; WAN024CN8_at; Start 163; Stop 187
gtctcattatttccgttaaagtcaa

SEQ ID NO: 125198 - DNA, 25 bp, Artificial
  probe
  misc_feature (1)..(25): SEQ ID NO: 7725; WAN024CN8_at; Start 36; Stop 60
gaagtcaaagactgaatcttctcct

SEQ ID NO: 125199 - DNA, 25 bp, Artificial
  probe
  misc_feature (1)..(25): SEQ ID NO: 7725; WAN024CN8_at; Start 95; Stop 119
cagtatttgaagctctcaggttatc

SEQ ID NO: 125200 - DNA, 25 bp, Artificial
  probe
  misc_feature (1)..(25): SEQ ID NO: 7725; WAN024CN8_at; Start 146; Stop 170
tagtatccaacgttgaagtctcatt

SEQ ID NO: 125201 - DNA, 25 bp, Artificial
  probe
  misc_feature (1)..(25): SEQ ID NO: 7725; WAN024CN8_at; Start 28; Stop 52
gcttctacgaagtcaaagactgaat

SEQ ID NO: 125202 - DNA, 25 bp, Artificial
  probe
  misc_feature (1)..(25): SEQ ID NO: 7725; WAN024CN8_at; Start 5; Stop 29
ttggtaagaacagttttctatacgc

SEQ ID NO: 125203 - DNA, 25 bp, Artificial
  probe
  misc_feature (1)..(25): SEQ ID NO: 7725; WAN024CN8_at; Start 89; Stop 113
aacctacagtatttgaagctctcag

SEQ ID NO: 125204 - DNA, 25 bp, Artificial
  probe
  misc_feature (1)..(25): SEQ ID NO: 7725; WAN024CN8_at; Start 143; Stop 167
caatagtatccaacgttgaagtctc

SEQ ID NO: 125205 - DNA, 25 bp, Artificial
  probe
  misc_feature (1)..(25): SEQ ID NO: 7725; WAN024CN8_at; Start 130; Stop 154
tttcctaatgcgacaatagtatcca

SEQ ID NO: 125206 - DNA, 25 bp, Artificial
  probe
  misc_feature (1)..(25): SEQ ID NO: 7725; WAN024CN8_at; Start 179; Stop 203
taaagtcaaacttgtacgtagataa

SEQ ID NO: 125207 - DNA, 25 bp, Artificial
  probe
  misc_feature (1)..(25): SEQ ID NO: 7725; WAN024CN8_at; Start 103; Stop 127
gaagctctcaggttatctagtccac

SEQ ID NO: 125208 - DNA, 25 bp, Artificial
  probe
  misc_feature (1)..(25): SEQ ID NO: 7725; WAN024CN8_at; Start 135; Stop 159
taatgcgacaatagtatccaacgtt

SEQ ID NO: 125209 - DNA, 25 bp, Artificial
  probe
  misc_feature (1)..(25): SEQ ID NO: 7725; WAN024CN8_at; Start 15; Stop 39
cagttttctatacgcttctacgaag

SEQ ID NO: 125210 - DNA, 25 bp, Artificial
  probe
  misc_feature (1)..(25): SEQ ID NO: 7725; WAN024CN8_at; Start 65; Stop 89
ccgatgcaagtttattcgcatataa

SEQ ID NO: 125211 - DNA, 25 bp, Artificial
  probe
  misc_feature (1)..(25): SEQ ID NO: 7725; WAN024CN8_at; Start 91; Stop 115
cctacagtatttgaagctctcaggt

SEQ ID NO: 125212 - DNA, 25 bp, Artificial
  probe
  misc_feature (1)..(25): SEQ ID NO: 7725; WAN024CN8_at; Start 118; Stop 142
tctagtccactatttcctaatgcga

SEQ ID NO: 125213 - DNA, 25 bp, Artificial
  probe
  misc_feature (1)..(25): SEQ ID NO: 7725; WAN024CN8_at; Start 139; Stop 163
gcgacaatagtatccaacgttgaag

SEQ ID NO: 125214 - DNA, 25 bp, Artificial
  probe
  misc_feature (1)..(25): SEQ ID NO: 7725; WAN024CN8_at; Start 183; Stop 207
gtcaaacttgtacgtagataaatct

SEQ ID NO: 125215 - DNA, 25 bp, Artificial
  probe
  misc_feature (1)..(25): SEQ ID NO: 7725; WAN024CN8_at; Start 159; Stop 183
tgaagtctcattatttccgttaaag

SEQ ID NO: 125216 - DNA, 25 bp, Artificial
  probe
  misc_feature (1)..(25): SEQ ID NO: 7725; WAN024CN8_at; Start 153; Stop 177
caacgttgaagtctcattatttccg

SEQ ID NO: 125217 - DNA, 25 bp, Artificial
  probe
  misc_feature (1)..(25): SEQ ID NO: 7725; WAN024CN8_at; Start 25; Stop 49
tacgcttctacgaagtcaaagactg

SEQ ID NO: 125218 - DNA, 25 bp, Artificial
  probe
  misc_feature (1)..(25): SEQ ID NO: 7725; WAN024CN8_at; Start 106; Stop 130
gctctcaggttatctagtccactat

SEQ ID NO: 125219 - DNA, 25 bp, Artificial
  probe
  misc_feature (1)..(25): SEQ ID NO: 7725; WAN024CN8_at; Start 187; Stop 211
aacttgtacgtagataaatcttttg

SEQ ID NO: 125220 - DNA, 25 bp, Artificial
  probe
  misc_feature (1)..(25): SEQ ID NO: 7725; WAN024CN8_at; Start 23; Stop 47
tatacgcttctacgaagtcaaagac

SEQ ID NO: 125221 - DNA, 25 bp, Artificial
  probe
  misc_feature (1)..(25): SEQ ID NO: 7725; WAN024CN8_at; Start 77; Stop 101
tattcgcatataaacctacagtatt

SEQ ID NO: 125222 - DNA, 25 bp, Artificial
  probe
  misc_feature (1)..(25): SEQ ID NO: 7725; WAN024CN8_at; Start 58; Stop 82
ccttttaccgatgcaagtttattcg

SEQ ID NO: 125223 - DNA, 25 bp, Artificial
  probe
  misc_feature (1)..(25): SEQ ID NO: 7725; WAN024CN8_at; Start 31; Stop 55
tctacgaagtcaaagactgaatctt

SEQ ID NO: 125224 - DNA, 25 bp, Artificial
  probe
  misc_feature (1)..(25): SEQ ID NO: 7725; WAN024CN8_at; Start 87; Stop 111
taaacctacagtatttgaagctctc

SEQ ID NO: 125225 - DNA, 25 bp, Artificial
  probe
  misc_feature (1)..(25): SEQ ID NO: 7725; WAN024CN8_at; Start 12; Stop 36
gaacagttttctatacgcttctacg

SEQ ID NO: 125226 - DNA, 25 bp, Artificial
  probe
  misc_feature (1)..(25): SEQ ID NO: 7725; WAN024CN8_at; Start 195; Stop 219
cgtagataaatcttttgtattcatt

SEQ ID NO: 125227 - DNA, 25 bp, Artificial
  probe
  misc_feature (1)..(25): SEQ ID NO: 7713; WAN024CN9_at; Start 140; Stop 164
ggttatctaaggctgcatcattcgc

SEQ ID NO: 125228 - DNA, 25 bp, Artificial
  probe
  misc_feature (1)..(25): SEQ ID NO: 7713; WAN024CN9_at; Start 18; Stop 42
ctcacttacgtattcaactacaccg

SEQ ID NO: 125229 - DNA, 25 bp, Artificial
  probe
  misc_feature (1)..(25): SEQ ID NO: 7713; WAN024CN9_at; Start 89; Stop 113
ggtgttctgctatattagctttaac

SEQ ID NO: 125230 - DNA, 25 bp, Artificial
  probe
  misc_feature (1)..(25): SEQ ID NO: 7713; WAN024CN9_at; Start 38; Stop 62
caccgtctcctgtagtattgattga

SEQ ID NO: 125231 - DNA, 25 bp, Artificial
  probe
  misc_feature (1)..(25): SEQ ID NO: 7713; WAN024CN9_at; Start 162; Stop 186
cgctgctcctagtacttttttagta

SEQ ID NO: 125232 - DNA, 25 bp, Artificial
  probe
  misc_feature (1)..(25): SEQ ID NO: 7713; WAN024CN9_at; Start 150; Stop 174
ggctgcatcattcgctgctcctagt

SEQ ID NO: 125233 - DNA, 25 bp, Artificial
  probe
  misc_feature (1)..(25): SEQ ID NO: 7713; WAN024CN9_at; Start 68; Stop 92
ccatcgctaatacttttcttaggtg

SEQ ID NO: 125234 - DNA, 25 bp, Artificial
  probe
  misc_feature (1)..(25): SEQ ID NO: 7713; WAN024CN9_at; Start 118; Stop 142
tcaaattgtctatctaagtataggt

SEQ ID NO: 125235 - DNA, 25 bp, Artificial
  probe
  misc_feature (1)..(25): SEQ ID NO: 7713; WAN024CN9_at; Start 200; Stop 224
gtgttacattttgcaagtcgcttag

SEQ ID NO: 125236 - DNA, 25 bp, Artificial
  probe
  misc_feature (1)..(25): SEQ ID NO: 7713; WAN024CN9_at; Start 111; Stop 135
aacttcttcaaattgtctatctaag

SEQ ID NO: 125237 - DNA, 25 bp, Artificial
  probe
  misc_feature (1)..(25): SEQ ID NO: 7713; WAN024CN9_at; Start 28; Stop 52
tattcaactacaccgtctcctgtag

SEQ ID NO: 125238 - DNA, 25 bp, Artificial
  probe
  misc_feature (1)..(25): SEQ ID NO: 7713; WAN024CN9_at; Start 143; Stop 167
tatctaaggctgcatcattcgctgc

SEQ ID NO: 125239 - DNA, 25 bp, Artificial
  probe
  misc_feature (1)..(25): SEQ ID NO: 7713; WAN024CN9_at; Start 132; Stop 156
taagtataggttatctaaggctgca

SEQ ID NO: 125240 - DNA, 25 bp, Artificial
  probe
  misc_feature (1)..(25): SEQ ID NO: 7713; WAN024CN9_at; Start 158; Stop 182
cattcgctgctcctagtactttttt

SEQ ID NO: 125241 - DNA, 25 bp, Artificial
  probe
  misc_feature (1)..(25): SEQ ID NO: 7713; WAN024CN9_at; Start 218; Stop 242
cgcttagtacgttattcgttatcgc

SEQ ID NO: 125242 - DNA, 25 bp, Artificial
  probe
  misc_feature (1)..(25): SEQ ID NO: 7713; WAN024CN9_at; Start 206; Stop 230
cattttgcaagtcgcttagtacgtt

SEQ ID NO: 125243 - DNA, 25 bp, Artificial
  probe
  misc_feature (1)..(25): SEQ ID NO: 7713; WAN024CN9_at; Start 46; Stop 70
cctgtagtattgattgatttatcca

SEQ ID NO: 125244 - DNA, 25 bp, Artificial
  probe
  misc_feature (1)..(25): SEQ ID NO: 7713; WAN024CN9_at; Start 183; Stop 207
agtagcttctgagttaagtgttaca

SEQ ID NO: 125245 - DNA, 25 bp, Artificial
  probe
  misc_feature (1)..(25): SEQ ID NO: 7713; WAN024CN9_at; Start 76; Stop 100
aatacttttcttaggtgttctgcta

SEQ ID NO: 125246 - DNA, 25 bp, Artificial
  probe
  misc_feature (1)..(25): SEQ ID NO: 7713; WAN024CN9_at; Start 196; Stop 220
ttaagtgttacattttgcaagtcgc

SEQ ID NO: 125247 - DNA, 25 bp, Artificial
  probe
  misc_feature (1)..(25): SEQ ID NO: 7713; WAN024CN9_at; Start 57; Stop 81
gattgatttatccatcgctaatact

SEQ ID NO: 125248 - DNA, 25 bp, Artificial
  probe
  misc_feature (1)..(25): SEQ ID NO: 7713; WAN024CN9_at; Start 97; Stop 121
gctatattagctttaacttcttcaa

SEQ ID NO: 125249 - DNA, 25 bp, Artificial
  probe
  misc_feature (1)..(25): SEQ ID NO: 7713; WAN024CN9_at; Start 225; Stop 249
tacgttattcgttatcgctgtatag

SEQ ID NO: 125250 - DNA, 25 bp, Artificial
  probe
  misc_feature (1)..(25): SEQ ID NO: 7713; WAN024CN9_at; Start 154; Stop 178
gcatcattcgctgctcctagtactt

SEQ ID NO: 125251 - DNA, 25 bp, Artificial
  probe
  misc_feature (1)..(25): SEQ ID NO: 7713; WAN024CN9_at; Start 128; Stop 152
tatctaagtataggttatctaaggc

SEQ ID NO: 125252 - DNA, 25 bp, Artificial
  probe
  misc_feature (1)..(25): SEQ ID NO: 7713; WAN024CN9_at; Start 24; Stop 48
tacgtattcaactacaccgtctcct

SEQ ID NO: 125253 - DNA, 25 bp, Artificial
  probe
  misc_feature (1)..(25): SEQ ID NO: 7713; WAN024CN9_at; Start 136; Stop 160
tataggttatctaaggctgcatcat

SEQ ID NO: 125254 - DNA, 25 bp, Artificial
  probe
  misc_feature (1)..(25): SEQ ID NO: 7713; WAN024CN9_at; Start 40; Stop 64
ccgtctcctgtagtattgattgatt

SEQ ID NO: 125255 - DNA, 25 bp, Artificial
  probe
  misc_feature (1)..(25): SEQ ID NO: 7713; WAN024CN9_at; Start 147; Stop 171
taaggctgcatcattcgctgctcct

SEQ ID NO: 125256 - DNA, 25 bp, Artificial
  probe
  misc_feature (1)..(25): SEQ ID NO: 7713; WAN024CN9_at; Start 211; Stop 235
tgcaagtcgcttagtacgttattcg

SEQ ID NO: 125257 - DNA, 25 bp, Artificial
  probe
  misc_feature (1)..(25): SEQ ID NO: 7713; WAN024CN9_at; Start 204; Stop 228
tacattttgcaagtcgcttagtacg

SEQ ID NO: 125258 - DNA, 25 bp, Artificial
  probe
  misc_feature (1)..(25): SEQ ID NO: 7713; WAN024CN9_at; Start 12; Stop 36
gattttctcacttacgtattcaact

SEQ ID NO: 125259 - DNA, 25 bp, Artificial
  probe
  misc_feature (1)..(25): SEQ ID NO: 7713; WAN024CN9_at; Start 84; Stop 108
tcttaggtgttctgctatattagct

SEQ ID NO: 125260 - DNA, 25 bp, Artificial
  probe
  misc_feature (1)..(25): SEQ ID NO: 7713; WAN024CN9_at; Start 169; Stop 193
cctagtacttttttagtagcttctg

SEQ ID NO: 125261 - DNA, 25 bp, Artificial
  probe
  misc_feature (1)..(25): SEQ ID NO: 5416; WAN024CNA_at; Start 67; Stop 91
catccgaatcgaaacgttccaccgg

SEQ ID NO: 125262 - DNA, 25 bp, Artificial
  probe
  misc_feature (1)..(25): SEQ ID NO: 5416; WAN024CNA_at; Start 172; Stop 196
tatctacagattgcagtaaaccaag

SEQ ID NO: 125263 - DNA, 25 bp, Artificial
  probe
  misc_feature (1)..(25): SEQ ID NO: 5416; WAN024CNA_at; Start 176; Stop 200
tacagattgcagtaaaccaagtgcg

SEQ ID NO: 125264 - DNA, 25 bp, Artificial
  probe
  misc_feature (1)..(25): SEQ ID NO: 5416; WAN024CNA_at; Start 248; Stop 272
gattgcagaatcagaattatgaacc

SEQ ID NO: 125265 - DNA, 25 bp, Artificial
  probe
  misc_feature (1)..(25): SEQ ID NO: 5416; WAN024CNA_at; Start 193; Stop 217
caagtgcgtataactccgctcccaa

SEQ ID NO: 125266 - DNA, 25 bp, Artificial
  probe
  misc_feature (1)..(25): SEQ ID NO: 5416; WAN024CNA_at; Start 325; Stop 349
caaagtgcgttaaacttccattcgc

SEQ ID NO: 125267 - DNA, 25 bp, Artificial
  probe
  misc_feature (1)..(25): SEQ ID NO: 5416; WAN024CNA_at; Start 293; Stop 317
cgttccataagcatctaataatcta

SEQ ID NO: 125268 - DNA, 25 bp, Artificial
  probe
  misc_feature (1)..(25): SEQ ID NO: 5416; WAN024CNA_at; Start 98; Stop 122
tgtatgcaatctattcaaatcatct

SEQ ID NO: 125269 - DNA, 25 bp, Artificial
  probe
  misc_feature (1)..(25): SEQ ID NO: 5416; WAN024CNA_at; Start 140; Stop 164
cgtatttaaagctaaaatatgagaa

SEQ ID NO: 125270 - DNA, 25 bp, Artificial
  probe
  misc_feature (1)..(25): SEQ ID NO: 5416; WAN024CNA_at; Start 221; Stop 245
ttcacgtctaccatttccttcaaag

SEQ ID NO: 125271 - DNA, 25 bp, Artificial
  probe
  misc_feature (1)..(25): SEQ ID NO: 5416; WAN024CNA_at; Start 253; Stop 277
cagaatcagaattatgaaccatttc

SEQ ID NO: 125272 - DNA, 25 bp, Artificial
  probe
  misc_feature (1)..(25): SEQ ID NO: 5416; WAN024CNA_at; Start 188; Stop 212
taaaccaagtgcgtataactccgct

SEQ ID NO: 125273 - DNA, 25 bp, Artificial
  probe
  misc_feature (1)..(25): SEQ ID NO: 5416; WAN024CNA_at; Start 24; Stop 48
tacattacatcatatgatccatgca

SEQ ID NO: 125274 - DNA, 25 bp, Artificial
  probe
  misc_feature (1)..(25): SEQ ID NO: 5416; WAN024CNA_at; Start 370; Stop 394
tatactcataccatttcccaacagg

SEQ ID NO: 125275 - DNA, 25 bp, Artificial
  probe
  misc_feature (1)..(25): SEQ ID NO: 5416; WAN024CNA_at; Start 333; Stop 357
gttaaacttccattcgcatacgctc

SEQ ID NO: 125276 - DNA, 25 bp, Artificial
  probe
  misc_feature (1)..(25): SEQ ID NO: 5416; WAN024CNA_at; Start 274; Stop 298
tttcatgagtataaaccgacgttcc

SEQ ID NO: 125277 - DNA, 25 bp, Artificial
  probe
  misc_feature (1)..(25): SEQ ID NO: 5416; WAN024CNA_at; Start 381; Stop 405
catttcccaacaggtccgaagaatt

SEQ ID NO: 125278 - DNA, 25 bp, Artificial
  probe
  misc_feature (1)..(25): SEQ ID NO: 5416; WAN024CNA_at; Start 285; Stop 309
taaaccgacgttccataagcatcta

SEQ ID NO: 125279 - DNA, 25 bp, Artificial
  probe
  misc_feature (1)..(25): SEQ ID NO: 5416; WAN024CNA_at; Start 309; Stop 333
aataatctatctaacacaaagtgcg

SEQ ID NO: 125280 - DNA, 25 bp, Artificial
  probe
  misc_feature (1)..(25): SEQ ID NO: 5416; WAN024CNA_at; Start 39; Stop 63
gatccatgcatataactttgaagcg

SEQ ID NO: 125281 - DNA, 25 bp, Artificial
  probe
  misc_feature (1)..(25): SEQ ID NO: 5416; WAN024CNA_at; Start 117; Stop 141
tcatctttttctgctttatataacg

SEQ ID NO: 125282 - DNA, 25 bp, Artificial
  probe
  misc_feature (1)..(25): SEQ ID NO: 5416; WAN024CNA_at; Start 7; Stop 31
ccatcgcatcaagtgtatacattac

SEQ ID NO: 125283 - DNA, 25 bp, Artificial
  probe
  misc_feature (1)..(25): SEQ ID NO: 5416; WAN024CNA_at; Start 354; Stop 378
gctcctgcactactattatactcat

SEQ ID NO: 125284 - DNA, 25 bp, Artificial
  probe
  misc_feature (1)..(25): SEQ ID NO: 5416; WAN024CNA_at; Start 237; Stop 261
ccttcaaagtagattgcagaatcag

SEQ ID NO: 125285 - DNA, 25 bp, Artificial
  probe
  misc_feature (1)..(25): SEQ ID NO: 5416; WAN024CNA_at; Start 58; Stop 82
gaagcgcctcatccgaatcgaaacg

SEQ ID NO: 125286 - DNA, 25 bp, Artificial
  probe
  misc_feature (1)..(25): SEQ ID NO: 5416; WAN024CNA_at; Start 86; Stop 110
caccggattatatgtatgcaatcta

SEQ ID NO: 125287 - DNA, 25 bp, Artificial
  probe
  misc_feature (1)..(25): SEQ ID NO: 5416; WAN024CNA_at; Start 348; Stop 372
gcatacgctcctgcactactattat

SEQ ID NO: 125288 - DNA, 25 bp, Artificial
  probe
  misc_feature (1)..(25): SEQ ID NO: 5416; WAN024CNA_at; Start 160; Stop 184
gagaatttacactatctacagattg

SEQ ID NO: 125289 - DNA, 25 bp, Artificial
  probe
  misc_feature (1)..(25): SEQ ID NO: 5416; WAN024CNA_at; Start 81; Stop 105
cgttccaccggattatatgtatgca

SEQ ID NO: 125290 - DNA, 25 bp, Artificial
  probe
  misc_feature (1)..(25): SEQ ID NO: 5416; WAN024CNA_at; Start 49; Stop 73
tataactttgaagcgcctcatccga

SEQ ID NO: 125291 - DNA, 25 bp, Artificial
  probe
  misc_feature (1)..(25): SEQ ID NO: 5416; WAN024CNA_at; Start 232; Stop 256
catttccttcaaagtagattgcaga

SEQ ID NO: 125292 - DNA, 25 bp, Artificial
  probe
  misc_feature (1)..(25): SEQ ID NO: 5416; WAN024CNA_at; Start 378; Stop 402
taccatttcccaacaggtccgaaga

SEQ ID NO: 125293 - DNA, 25 bp, Artificial
  probe
  misc_feature (1)..(25): SEQ ID NO: 5416; WAN024CNA_at; Start 2; Stop 26
tgcttccatcgcatcaagtgtatac

SEQ ID NO: 125294 - DNA, 25 bp, Artificial
  probe
  misc_feature (1)..(25): SEQ ID NO: 5416; WAN024CNA_at; Start 268; Stop 292
gaaccatttcatgagtataaaccga

SEQ ID NO: 125295 - DNA, 25 bp, Artificial
  probe
  misc_feature (1)..(25): SEQ ID NO: 3488; WAN024CNB-3_at; Start 631; Stop 655
taacggataaaaacatcggctctat

SEQ ID NO: 125296 - DNA, 25 bp, Artificial
  probe
  misc_feature (1)..(25): SEQ ID NO: 3488; WAN024CNB-3_at; Start 1743; Stop 1767
gatcgtgcaacgagtcataccccag

SEQ ID NO: 125297 - DNA, 25 bp, Artificial
  probe
  misc_feature (1)..(25): SEQ ID NO: 3488; WAN024CNB-3_at; Start 1001; Stop 1025
ggcgcttcaaagttatatgcatgga

SEQ ID NO: 125298 - DNA, 25 bp, Artificial
  probe
  misc_feature (1)..(25): SEQ ID NO: 3488; WAN024CNB-3_at; Start 1558; Stop 1582
catcatgggctgatttcaaaaaagc

SEQ ID NO: 125299 - DNA, 25 bp, Artificial
  probe
  misc_feature (1)..(25): SEQ ID NO: 3488; WAN024CNB-3_at; Start 1159; Stop 1183
cacatgcaggaaataaagtccgtcc

SEQ ID NO: 125300 - DNA, 25 bp, Artificial
  probe
  misc_feature (1)..(25): SEQ ID NO: 3488; WAN024CNB-3_at; Start 985; Stop 1009
gtttcgattcggatgaggcgcttca

SEQ ID NO: 125301 - DNA, 25 bp, Artificial
  probe
  misc_feature (1)..(25): SEQ ID NO: 3488; WAN024CNB-3_at; Start 1045; Stop 1069
cacttgatgcgatggaagcaaaagc

SEQ ID NO: 125302 - DNA, 25 bp, Artificial
  probe
  misc_feature (1)..(25): SEQ ID NO: 3488; WAN024CNB-3_at; Start 240; Stop 264
gaaaaacaagaatcaccaacagccg

SEQ ID NO: 125303 - DNA, 25 bp, Artificial
  probe
  misc_feature (1)..(25): SEQ ID NO: 3488; WAN024CNB-3_at; Start 1668; Stop 1692
gaagtaactataacaacggctgcac

SEQ ID NO: 125304 - DNA, 25 bp, Artificial
  probe
  misc_feature (1)..(25): SEQ ID NO: 3488; WAN024CNB-3_at; Start 768; Stop 792
ggaacgtcggtttatactcatgaaa

SEQ ID NO: 125305 - DNA, 25 bp, Artificial
  probe
  misc_feature (1)..(25): SEQ ID NO: 3488; WAN024CNB-3_at; Start 695; Stop 719
taatagtagtgcaggagcgtatgcg

SEQ ID NO: 125306 - DNA, 25 bp, Artificial
  probe
  misc_feature (1)..(25): SEQ ID NO: 3488; WAN024CNB-3_at; Start 1716; Stop 1740
gcggctgcgaaagatattactaata

SEQ ID NO: 125307 - DNA, 25 bp, Artificial
  probe
  misc_feature (1)..(25): SEQ ID NO: 3488; WAN024CNB-3_at; Start 847; Stop 871
gattgggagcggagttatacgcact

SEQ ID NO: 125308 - DNA, 25 bp, Artificial
  probe
  misc_feature (1)..(25): SEQ ID NO: 3488; WAN024CNB-3_at; Start 487; Stop 511
tagcagcgaaaaggcatagagacca

SEQ ID NO: 125309 - DNA, 25 bp, Artificial
  probe
  misc_feature (1)..(25): SEQ ID NO: 3488; WAN024CNB-3_at; Start 1443; Stop 1467
tacggagcagaagcatttgccagcg

SEQ ID NO: 125310 - DNA, 25 bp, Artificial
  probe
  misc_feature (1)..(25): SEQ ID NO: 3488; WAN024CNB-3_at; Start 961; Stop 985
tgcatacatataatccggtggaacg

SEQ ID NO: 125311 - DNA, 25 bp, Artificial
  probe
  misc_feature (1)..(25): SEQ ID NO: 3488; WAN024CNB-3_at; Start 82; Stop 106
cgaataaacttgcatcggtaaaagg

SEQ ID NO: 125312 - DNA, 25 bp, Artificial
  probe
  misc_feature (1)..(25): SEQ ID NO: 3488; WAN024CNB-3_at; Start 1543; Stop 1567
tcaatggtgagtactcatcatgggc

SEQ ID NO: 125313 - DNA, 25 bp, Artificial
  probe
  misc_feature (1)..(25): SEQ ID NO: 3488; WAN024CNB-3_at; Start 664; Stop 688
tcttcggacctgttgggaaatggta

SEQ ID NO: 125314 - DNA, 25 bp, Artificial
  probe
  misc_feature (1)..(25): SEQ ID NO: 3488; WAN024CNB-3_at; Start 39; Stop 63
ggactagataacctgagagcttcaa

SEQ ID NO: 125315 - DNA, 25 bp, Artificial
  probe
  misc_feature (1)..(25): SEQ ID NO: 3488; WAN024CNB-3_at; Start 1483; Stop 1507
catcatggcatggaagagatgttgc

SEQ ID NO: 125316 - DNA, 25 bp, Artificial
  probe
  misc_feature (1)..(25): SEQ ID NO: 3488; WAN024CNB-3_at; Start 3; Stop 27
tcaacgttggatactattgtcgcat

SEQ ID NO: 125317 - DNA, 25 bp, Artificial
  probe
  misc_feature (1)..(25): SEQ ID NO: 3488; WAN024CNB-3_at; Start 754; Stop 778
tattagatgcttatggaacgtcggt

SEQ ID NO: 125318 - DNA, 25 bp, Artificial
  probe
  misc_feature (1)..(25): SEQ ID NO: 3488; WAN024CNB-3_at; Start 444; Stop 468
tcaggagatgctttacgaacttatg

SEQ ID NO: 125319 - DNA, 25 bp, Artificial
  probe
  misc_feature (1)..(25): SEQ ID NO: 3488; WAN024CNB-3_at; Start 1333; Stop 1357
taagcaattcgaaaggtgctcctgg

SEQ ID NO: 125320 - DNA, 25 bp, Artificial
  probe
  misc_feature (1)..(25): SEQ ID NO: 3488; WAN024CNB-3_at; Start 1758; Stop 1782
cataccccagcaagttgggtgcatt

SEQ ID NO: 125321 - DNA, 25 bp, Artificial
  probe
  misc_feature (1)..(25): SEQ ID NO: 3488; WAN024CNB-3_at; Start 1701; Stop 1725
caattaattaatgaagcggctgcga

SEQ ID NO: 125322 - DNA, 25 bp, Artificial
  probe
  misc_feature (1)..(25): SEQ ID NO: 3488; WAN024CNB-3_at; Start 1173; Stop 1197
aaagtccgtccattaacagatgaag

SEQ ID NO: 125323 - DNA, 25 bp, Artificial
  probe
  misc_feature (1)..(25): SEQ ID NO: 3488; WAN024CNB-3_at; Start 1428; Stop 1452
tatgtttctaatcagtacggagcag

SEQ ID NO: 125324 - DNA, 25 bp, Artificial
  probe
  misc_feature (1)..(25): SEQ ID NO: 3488; WAN024CNB-3_at; Start 1307; Stop 1331
tatgttctctcctgtatacgcagcg

SEQ ID NO: 125325 - DNA, 25 bp, Artificial
  probe
  misc_feature (1)..(25): SEQ ID NO: 3488; WAN024CNB-3_at; Start 1389; Stop 1413
ttacttgcggaaaaaggttatcaca

SEQ ID NO: 125326 - DNA, 25 bp, Artificial
  probe
  misc_feature (1)..(25): SEQ ID NO: 3488; WAN024CNB-3_at; Start 291; Stop 315
gatagaatatcagcaccaagttggg

SEQ ID NO: 125327 - DNA, 25 bp, Artificial
  probe
  misc_feature (1)..(25): SEQ ID NO: 3488; WAN024CNB-3_at; Start 380; Stop 404
tatgtctacacttgcattcggttcg

SEQ ID NO: 125328 - DNA, 25 bp, Artificial
  probe
  misc_feature (1)..(25): SEQ ID NO: 3488; WAN024CNB-3_at; Start 1461; Stop 1485
gccagcggaagcaaaacattctcat

SEQ ID NO: 125329 - DNA, 25 bp, Artificial
  probe
  misc_feature (1)..(25): SEQ ID NO: 1568; WAN024CNB-5_at; Start 1146; Stop 1170
tacagtccgcgaagagactctagag

SEQ ID NO: 125330 - DNA, 25 bp, Artificial
  probe
  misc_feature (1)..(25): SEQ ID NO: 1568; WAN024CNB-5_at; Start 1065; Stop 1089
tgcagttcgcgaggaagaaccagct

SEQ ID NO: 125331 - DNA, 25 bp, Artificial
  probe
  misc_feature (1)..(25): SEQ ID NO: 1568; WAN024CNB-5_at; Start 1240; Stop 1264
gaacttccggctttagaggtcacta

SEQ ID NO: 125332 - DNA, 25 bp, Artificial
  probe
  misc_feature (1)..(25): SEQ ID NO: 1568; WAN024CNB-5_at; Start 405; Stop 429
catgggagttcaattgttgccggcc

SEQ ID NO: 125333 - DNA, 25 bp, Artificial
  probe
  misc_feature (1)..(25): SEQ ID NO: 1568; WAN024CNB-5_at; Start 1255; Stop 1279
gaggtcactacacgaaatagaacgg

SEQ ID NO: 125334 - DNA, 25 bp, Artificial
  probe
  misc_feature (1)..(25): SEQ ID NO: 1568; WAN024CNB-5_at; Start 867; Stop 891
tgctacaacggtgcagagtgcggaa

SEQ ID NO: 125335 - DNA, 25 bp, Artificial
  probe
  misc_feature (1)..(25): SEQ ID NO: 1568; WAN024CNB-5_at; Start 899; Stop 923
tattggcgacgacaaatgatcgacc

SEQ ID NO: 125336 - DNA, 25 bp, Artificial
  probe
  misc_feature (1)..(25): SEQ ID NO: 1568; WAN024CNB-5_at; Start 1361; Stop 1385
ggcaagcagggacacgtacaattca

SEQ ID NO: 125337 - DNA, 25 bp, Artificial
  probe
  misc_feature (1)..(25): SEQ ID NO: 1568; WAN024CNB-5_at; Start 587; Stop 611
cagttgatgggaaatactctgctca

SEQ ID NO: 125338 - DNA, 25 bp, Artificial
  probe
  misc_feature (1)..(25): SEQ ID NO: 1568; WAN024CNB-5_at; Start 203; Stop 227
tagaggcccttccacaactggctga

SEQ ID NO: 125339 - DNA, 25 bp, Artificial
  probe
  misc_feature (1)..(25): SEQ ID NO: 1568; WAN024CNB-5_at; Start 187; Stop 211
gaaaaatccttgctggtagaggccc

SEQ ID NO: 125340 - DNA, 25 bp, Artificial
  probe
  misc_feature (1)..(25): SEQ ID NO: 1568; WAN024CNB-5_at; Start 7; Stop 31
cgaaaaagcattggtgagaaacgcc

SEQ ID NO: 125341 - DNA, 25 bp, Artificial
  probe
  misc_feature (1)..(25): SEQ ID NO: 1568; WAN024CNB-5_at; Start 1081; Stop 1105
gaaccagcttacacagaaccgttag

SEQ ID NO: 125342 - DNA, 25 bp, Artificial
  probe
  misc_feature (1)..(25): SEQ ID NO: 1568; WAN024CNB-5_at; Start 1045; Stop 1069
cccggacatgaaggtgaagctgcag

SEQ ID NO: 125343 - DNA, 25 bp, Artificial
  probe
  misc_feature (1)..(25): SEQ ID NO: 1568; WAN024CNB-5_at; Start 102; Stop 126
tcaagggattcaatcggtatcggcc

SEQ ID NO: 125344 - DNA, 25 bp, Artificial
  probe
  misc_feature (1)..(25): SEQ ID NO: 1568; WAN024CNB-5_at; Start 850; Stop 874
caaggaaatcctgtgtctgctacaa

SEQ ID NO: 125345 - DNA, 25 bp, Artificial
  probe
  misc_feature (1)..(25): SEQ ID NO: 1568; WAN024CNB-5_at; Start 427; Stop 451
gccagtgcttttgggttgaccagcc

SEQ ID NO: 125346 - DNA, 25 bp, Artificial
  probe
  misc_feature (1)..(25): SEQ ID NO: 1568; WAN024CNB-5_at; Start 1161; Stop 1185
gactctagagtacacggaaccggta

SEQ ID NO: 125347 - DNA, 25 bp, Artificial
  probe
  misc_feature (1)..(25): SEQ ID NO: 1568; WAN024CNB-5_at; Start 825; Stop 849
tgtagttcgaccaacagtgccagaa

SEQ ID NO: 125348 - DNA, 25 bp, Artificial
  probe
  misc_feature (1)..(25): SEQ ID NO: 1568; WAN024CNB-5_at; Start 1102; Stop 1126
ttagcaacgaaaggcacgcaagagc

SEQ ID NO: 125349 - DNA, 25 bp, Artificial
  probe
  misc_feature (1)..(25): SEQ ID NO: 1568; WAN024CNB-5_at; Start 785; Stop 809
caagtcaagttgagcagaatccgga

SEQ ID NO: 125350 - DNA, 25 bp, Artificial
  probe
  misc_feature (1)..(25): SEQ ID NO: 1568; WAN024CNB-5_at; Start 503; Stop 527
taccagagcctctgaaaatcgaagg

SEQ ID NO: 125351 - DNA, 25 bp, Artificial
  probe
  misc_feature (1)..(25): SEQ ID NO: 1568; WAN024CNB-5_at; Start 976; Stop 1000
ggtgaagccgcagtccgtgaagact

SEQ ID NO: 125352 - DNA, 25 bp, Artificial
  probe
  misc_feature (1)..(25): SEQ ID NO: 1568; WAN024CNB-5_at; Start 119; Stop 143
tatcggccgataatatggaaagtcc

SEQ ID NO: 125353 - DNA, 25 bp, Artificial
  probe
  misc_feature (1)..(25): SEQ ID NO: 1568; WAN024CNB-5_at; Start 658; Stop 682
tcagctgatttagaatggaaccaag

SEQ ID NO: 125354 - DNA, 25 bp, Artificial
  probe
  misc_feature (1)..(25): SEQ ID NO: 1568; WAN024CNB-5_at; Start 1444; Stop 1468
gaagtagctccggtcaacgaagtcg

SEQ ID NO: 125355 - DNA, 25 bp, Artificial
  probe
  misc_feature (1)..(25): SEQ ID NO: 1568; WAN024CNB-5_at; Start 1176; Stop 1200
ggaaccggtagcgacaaaaggcaca

SEQ ID NO: 125356 - DNA, 25 bp, Artificial
  probe
  misc_feature (1)..(25): SEQ ID NO: 1568; WAN024CNB-5_at; Start 1344; Stop 1368
taagattgaacgacaagggcaagca

SEQ ID NO: 125357 - DNA, 25 bp, Artificial
  probe
  misc_feature (1)..(25): SEQ ID NO: 1568; WAN024CNB-5_at; Start 1029; Stop 1053
caaaggtacacaaggacccggacat

SEQ ID NO: 125358 - DNA, 25 bp, Artificial
  probe
  misc_feature (1)..(25): SEQ ID NO: 1568; WAN024CNB-5_at; Start 1131; Stop 1155
tcatgagggcaaagctacagtccgc

SEQ ID NO: 125359 - DNA, 25 bp, Artificial
  probe
  misc_feature (1)..(25): SEQ ID NO: 1568; WAN024CNB-5_at; Start 1597; Stop 1621
aaaacgcaagttttccatggagaca

SEQ ID NO: 125360 - DNA, 25 bp, Artificial
  probe
  misc_feature (1)..(25): SEQ ID NO: 1568; WAN024CNB-5_at; Start 1429; Stop 1453
gaagtgtcacgaactgaagtagctc

SEQ ID NO: 125361 - DNA, 25 bp, Artificial
  probe
  misc_feature (1)..(25): SEQ ID NO: 1568; WAN024CNB-5_at; Start 471; Stop 495
tagtcagctttctatcggagtcggg

SEQ ID NO: 125362 - DNA, 25 bp, Artificial
  probe
  misc_feature (1)..(25): SEQ ID NO: 1568; WAN024CNB-5_at; Start 1199; Stop 1223
cacaagaacccgaacatgagggcga

SEQ ID NO: 125363 - DNA, 25 bp, Artificial
  probe
  misc_feature (1)..(25): SEQ ID NO: 4445; WAN024CNB-M_at; Start 572; Stop 596
atctgttgcgggattagtagcgagc

SEQ ID NO: 125364 - DNA, 25 bp, Artificial
  probe
  misc_feature (1)..(25): SEQ ID NO: 4445; WAN024CNB-M_at; Start 329; Stop 353
gcagacaagttatctcacaggtgca

SEQ ID NO: 125365 - DNA, 25 bp, Artificial
  probe
  misc_feature (1)..(25): SEQ ID NO: 4445; WAN024CNB-M_at; Start 1562; Stop 1586
taaaaaagtactaggagcagcgaat

SEQ ID NO: 125366 - DNA, 25 bp, Artificial
  probe
  misc_feature (1)..(25): SEQ ID NO: 4445; WAN024CNB-M_at; Start 1583; Stop 1607
gaatgatgcagccttagataaccta

SEQ ID NO: 125367 - DNA, 25 bp, Artificial
  probe
  misc_feature (1)..(25): SEQ ID NO: 4445; WAN024CNB-M_at; Start 11; Stop 35
tgaagcgccgactgatacggctaaa

SEQ ID NO: 125368 - DNA, 25 bp, Artificial
  probe
  misc_feature (1)..(25): SEQ ID NO: 4445; WAN024CNB-M_at; Start 201; Stop 225
tctaaagcagagcaaccaggagttt

SEQ ID NO: 125369 - DNA, 25 bp, Artificial
  probe
  misc_feature (1)..(25): SEQ ID NO: 4445; WAN024CNB-M_at; Start 1683; Stop 1707
tcaatcaatactacaggagacggtg

SEQ ID NO: 125370 - DNA, 25 bp, Artificial
  probe
  misc_feature (1)..(25): SEQ ID NO: 4445; WAN024CNB-M_at; Start 831; Stop 855
gctactggagaaatacgaaatggtc

SEQ ID NO: 125371 - DNA, 25 bp, Artificial
  probe
  misc_feature (1)..(25): SEQ ID NO: 4445; WAN024CNB-M_at; Start 634; Stop 658
ggaaacttatcgcaaatcaccagga

SEQ ID NO: 125372 - DNA, 25 bp, Artificial
  probe
  misc_feature (1)..(25): SEQ ID NO: 4445; WAN024CNB-M_at; Start 61; Stop 85
gcttcaaagaaatgtacctacctgt

SEQ ID NO: 125373 - DNA, 25 bp, Artificial
  probe
  misc_feature (1)..(25): SEQ ID NO: 4445; WAN024CNB-M_at; Start 283; Stop 307
cattggcttcagatatgaccgcaga

SEQ ID NO: 125374 - DNA, 25 bp, Artificial
  probe
  misc_feature (1)..(25): SEQ ID NO: 4445; WAN024CNB-M_at; Start 160; Stop 184
cagacggttacaaagatgattacac

SEQ ID NO: 125375 - DNA, 25 bp, Artificial
  probe
  misc_feature (1)..(25): SEQ ID NO: 4445; WAN024CNB-M_at; Start 589; Stop 613
tagcgagcgcaacaaatacagtgat

SEQ ID NO: 125376 - DNA, 25 bp, Artificial
  probe
  misc_feature (1)..(25): SEQ ID NO: 4445; WAN024CNB-M_at; Start 1089; Stop 1113
gtaactcttgatgatactgggcaag

SEQ ID NO: 125377 - DNA, 25 bp, Artificial
  probe
  misc_feature (1)..(25): SEQ ID NO: 4445; WAN024CNB-M_at; Start 1010; Stop 1034
taatagaaaagcagacagattcgct

SEQ ID NO: 125378 - DNA, 25 bp, Artificial
  probe
  misc_feature (1)..(25): SEQ ID NO: 4445; WAN024CNB-M_at; Start 1510; Stop 1534
cgaataacgtactaagcgacttgca

SEQ ID NO: 125379 - DNA, 25 bp, Artificial
  probe
  misc_feature (1)..(25): SEQ ID NO: 4445; WAN024CNB-M_at; Start 854; Stop 878
tcaaggatattctagagtcggagga

SEQ ID NO: 125380 - DNA, 25 bp, Artificial
  probe
  misc_feature (1)..(25): SEQ ID NO: 4445; WAN024CNB-M_at; Start 484; Stop 508
gtaaagaaaatgtcgcagcgctggc

SEQ ID NO: 125381 - DNA, 25 bp, Artificial
  probe
  misc_feature (1)..(25): SEQ ID NO: 4445; WAN024CNB-M_at; Start 969; Stop 993
tacgcagcagcagatgtgaaaaatg

SEQ ID NO: 125382 - DNA, 25 bp, Artificial
  probe
  misc_feature (1)..(25): SEQ ID NO: 4445; WAN024CNB-M_at; Start 760; Stop 784
gcaataataaccaaacagctggagg

SEQ ID NO: 125383 - DNA, 25 bp, Artificial
  probe
  misc_feature (1)..(25): SEQ ID NO: 4445; WAN024CNB-M_at; Start 557; Stop 581
aatctcaggtgcgaaatctgttgcg

SEQ ID NO: 125384 - DNA, 25 bp, Artificial
  probe
  misc_feature (1)..(25): SEQ ID NO: 4445; WAN024CNB-M_at; Start 1279; Stop 1303
cagaattgttagatgttgtgccgat

SEQ ID NO: 125385 - DNA, 25 bp, Artificial
  probe
  misc_feature (1)..(25): SEQ ID NO: 4445; WAN024CNB-M_at; Start 1052; Stop 1076
ccaaatagacgcgaaagttgctgat

SEQ ID NO: 125386 - DNA, 25 bp, Artificial
  probe
  misc_feature (1)..(25): SEQ ID NO: 4445; WAN024CNB-M_at; Start 507; Stop 531
gcgaaggcagcgaatagcgcgaata

SEQ ID NO: 125387 - DNA, 25 bp, Artificial
  probe
  misc_feature (1)..(25): SEQ ID NO: 4445; WAN024CNB-M_at; Start 244; Stop 268
tggtaacagccatgcaaagcaatct

SEQ ID NO: 125388 - DNA, 25 bp, Artificial
  probe
  misc_feature (1)..(25): SEQ ID NO: 4445; WAN024CNB-M_at; Start 1239; Stop 1263
tatggtaacaaagtagcgacaacag

SEQ ID NO: 125389 - DNA, 25 bp, Artificial
  probe
  misc_feature (1)..(25): SEQ ID NO: 4445; WAN024CNB-M_at; Start 953; Stop 977
tatcaccggtgatcaatacgcagca

SEQ ID NO: 125390 - DNA, 25 bp, Artificial
  probe
  misc_feature (1)..(25): SEQ ID NO: 4445; WAN024CNB-M_at; Start 141; Stop 165
caacttgtcgaagaaggtacagacg

SEQ ID NO: 125391 - DNA, 25 bp, Artificial
  probe
  misc_feature (1)..(25): SEQ ID NO: 4445; WAN024CNB-M_at; Start 229; Stop 253
catcctttaaacagctggtaacagc

SEQ ID NO: 125392 - DNA, 25 bp, Artificial
  probe
  misc_feature (1)..(25): SEQ ID NO: 4445; WAN024CNB-M_at; Start 374; Stop 398
ttctgatggaacaaaatcgtatgcc

SEQ ID NO: 125393 - DNA, 25 bp, Artificial
  probe
  misc_feature (1)..(25): SEQ ID NO: 4445; WAN024CNB-M_at; Start 304; Stop 328
cagatgaggtgagcttaggcgataa

SEQ ID NO: 125394 - DNA, 25 bp, Artificial
  probe
  misc_feature (1)..(25): SEQ ID NO: 4445; WAN024CNB-M_at; Start 258; Stop 282
caaagcaatctgtctggtgtctata

SEQ ID NO: 125395 - DNA, 25 bp, Artificial
  probe
  misc_feature (1)..(25): SEQ ID NO: 4445; WAN024CNB-M_at; Start 352; Stop 376
catttacagggagcttgatcggttc

SEQ ID NO: 125396 - DNA, 25 bp, Artificial
  probe
  misc_feature (1)..(25): SEQ ID NO: 4445; WAN024CNB-M_at; Start 883; Stop 907
taggatctacgtggcaaaacggtcg

SEQ ID NO: 125397 - DNA, 25 bp, Artificial
  probe
  misc_feature (1)..(25): SEQ ID NO: 925; WAN024CNC_at; Start 70; Stop 94
cttgccgagacgacgattaatatta

SEQ ID NO: 125398 - DNA, 25 bp, Artificial
  probe
  misc_feature (1)..(25): SEQ ID NO: 925; WAN024CNC_at; Start 83; Stop 107
cgattaatattaagaaaaatcacag

SEQ ID NO: 125399 - DNA, 25 bp, Artificial
  probe
  misc_feature (1)..(25): SEQ ID NO: 925; WAN024CNC_at; Start 89; Stop 113
atattaagaaaaatcacagtattac

SEQ ID NO: 125400 - DNA, 25 bp, Artificial
  probe
  misc_feature (1)..(25): SEQ ID NO: 925; WAN024CNC_at; Start 66; Stop 90
ggttcttgccgagacgacgattaat

SEQ ID NO: 125401 - DNA, 25 bp, Artificial
  probe
  misc_feature (1)..(25): SEQ ID NO: 925; WAN024CNC_at; Start 76; Stop 100
gagacgacgattaatattaagaaaa

SEQ ID NO: 125402 - DNA, 25 bp, Artificial
  probe
  misc_feature (1)..(25): SEQ ID NO: 925; WAN024CNC_at; Start 173; Stop 197
accgaatcgtggtagctgaagggcc

SEQ ID NO: 125403 - DNA, 25 bp, Artificial
  probe
  misc_feature (1)..(25): SEQ ID NO: 925; WAN024CNC_at; Start 57; Stop 81
ggataagcaggttcttgccgagacg

SEQ ID NO: 125404 - DNA, 25 bp, Artificial
  probe
  misc_feature (1)..(25): SEQ ID NO: 925; WAN024CNC_at; Start 60; Stop 84
taagcaggttcttgccgagacgacg

SEQ ID NO: 125405 - DNA, 25 bp, Artificial
  probe
  misc_feature (1)..(25): SEQ ID NO: 925; WAN024CNC_at; Start 20; Stop 44
atacgtccagcaaggctctttctct

SEQ ID NO: 125406 - DNA, 25 bp, Artificial
  probe
  misc_feature (1)..(25): SEQ ID NO: 925; WAN024CNC_at; Start 134; Stop 158
ttttgatggcaagtttggattggac

SEQ ID NO: 125407 - DNA, 25 bp, Artificial
  probe
  misc_feature (1)..(25): SEQ ID NO: 925; WAN024CNC_at; Start 58; Stop 82
gataagcaggttcttgccgagacga

SEQ ID NO: 125408 - DNA, 25 bp, Artificial
  probe
  misc_feature (1)..(25): SEQ ID NO: 925; WAN024CNC_at; Start 370; Stop 394
tatgaaaatgccaaacctgtcatgg

SEQ ID NO: 125409 - DNA, 25 bp, Artificial
  probe
  misc_feature (1)..(25): SEQ ID NO: 925; WAN024CNC_at; Start 11; Stop 35
tagcttttgatacgtccagcaaggc

SEQ ID NO: 125410 - DNA, 25 bp, Artificial
  probe
  misc_feature (1)..(25): SEQ ID NO: 925; WAN024CNC_at; Start 448; Stop 472
caggtaacctttgtcggagaagttg

SEQ ID NO: 125411 - DNA, 25 bp, Artificial
  probe
  misc_feature (1)..(25): SEQ ID NO: 925; WAN024CNC_at; Start 68; Stop 92
ttcttgccgagacgacgattaatat

SEQ ID NO: 125412 - DNA, 25 bp, Artificial
  probe
  misc_feature (1)..(25): SEQ ID NO: 925; WAN024CNC_at; Start 137; Stop 161
tgatggcaagtttggattggacacc

SEQ ID NO: 125413 - DNA, 25 bp, Artificial
  probe
  misc_feature (1)..(25): SEQ ID NO: 925; WAN024CNC_at; Start 191; Stop 215
aagggccgggtagctatacaggctt

SEQ ID NO: 125414 - DNA, 25 bp, Artificial
  probe
  misc_feature (1)..(25): SEQ ID NO: 925; WAN024CNC_at; Start 72; Stop 96
tgccgagacgacgattaatattaag

SEQ ID NO: 125415 - DNA, 25 bp, Artificial
  probe
  misc_feature (1)..(25): SEQ ID NO: 925; WAN024CNC_at; Start 367; Stop 391
ttttatgaaaatgccaaacctgtca

SEQ ID NO: 125416 - DNA, 25 bp, Artificial
  probe
  misc_feature (1)..(25): SEQ ID NO: 925; WAN024CNC_at; Start 169; Stop 193
ttggaccgaatcgtggtagctgaag

SEQ ID NO: 125417 - DNA, 25 bp, Artificial
  probe
  misc_feature (1)..(25): SEQ ID NO: 925; WAN024CNC_at; Start 13; Stop 37
gcttttgatacgtccagcaaggctc

SEQ ID NO: 125418 - DNA, 25 bp, Artificial
  probe
  misc_feature (1)..(25): SEQ ID NO: 925; WAN024CNC_at; Start 371; Stop 395
atgaaaatgccaaacctgtcatggc

SEQ ID NO: 125419 - DNA, 25 bp, Artificial
  probe
  misc_feature (1)..(25): SEQ ID NO: 925; WAN024CNC_at; Start 177; Stop 201
aatcgtggtagctgaagggccgggt

SEQ ID NO: 125420 - DNA, 25 bp, Artificial
  probe
  misc_feature (1)..(25): SEQ ID NO: 925; WAN024CNC_at; Start 19; Stop 43
gatacgtccagcaaggctctttctc

SEQ ID NO: 125421 - DNA, 25 bp, Artificial
  probe
  misc_feature (1)..(25): SEQ ID NO: 925; WAN024CNC_at; Start 15; Stop 39
ttttgatacgtccagcaaggctctt

SEQ ID NO: 125422 - DNA, 25 bp, Artificial
  probe
  misc_feature (1)..(25): SEQ ID NO: 925; WAN024CNC_at; Start 17; Stop 41
ttgatacgtccagcaaggctctttc

SEQ ID NO: 125423 - DNA, 25 bp, Artificial
  probe
  misc_feature (1)..(25): SEQ ID NO: 925; WAN024CNC_at; Start 61; Stop 85
aagcaggttcttgccgagacgacga

SEQ ID NO: 125424 - DNA, 25 bp, Artificial
  probe
  misc_feature (1)..(25): SEQ ID NO: 925; WAN024CNC_at; Start 443; Stop 467
ctagtcaggtaacctttgtcggaga

SEQ ID NO: 125425 - DNA, 25 bp, Artificial
  probe
  misc_feature (1)..(25): SEQ ID NO: 925; WAN024CNC_at; Start 445; Stop 469
agtcaggtaacctttgtcggagaag

SEQ ID NO: 125426 - DNA, 25 bp, Artificial
  probe
  misc_feature (1)..(25): SEQ ID NO: 925; WAN024CNC_at; Start 3; Stop 27
gaaagtattagcttttgatacgtcc

SEQ ID NO: 125427 - DNA, 25 bp, Artificial
  probe
  misc_feature (1)..(25): SEQ ID NO: 925; WAN024CNC_at; Start 6; Stop 30
agtattagcttttgatacgtccagc

SEQ ID NO: 125428 - DNA, 25 bp, Artificial
  probe
  misc_feature (1)..(25): SEQ ID NO: 925; WAN024CNC_at; Start 8; Stop 32
tattagcttttgatacgtccagcaa

SEQ ID NO: 125429 - DNA, 25 bp, Artificial
  probe
  misc_feature (1)..(25): SEQ ID NO: 925; WAN024CNC_at; Start 64; Stop 88
caggttcttgccgagacgacgatta

SEQ ID NO: 125430 - DNA, 25 bp, Artificial
  probe
  misc_feature (1)..(25): SEQ ID NO: 925; WAN024CNC_at; Start 74; Stop 98
ccgagacgacgattaatattaagaa

SEQ ID NO: 125431 - DNA, 25 bp, Artificial
  probe
  misc_feature (1)..(25): SEQ ID NO: 4211; WAN024CND_at; Start 24; Stop 48
tacctgcgattttcttgacgtgata

SEQ ID NO: 125432 - DNA, 25 bp, Artificial
  probe
  misc_feature (1)..(25): SEQ ID NO: 4211; WAN024CND_at; Start 77; Stop 101
ccgtggtcataagttccgcctgcta

SEQ ID NO: 125433 - DNA, 25 bp, Artificial
  probe
  misc_feature (1)..(25): SEQ ID NO: 4211; WAN024CND_at; Start 11; Stop 35
ctgtcaatgaatgtacctgcgattt

SEQ ID NO: 125434 - DNA, 25 bp, Artificial
  probe
  misc_feature (1)..(25): SEQ ID NO: 4211; WAN024CND_at; Start 74; Stop 98
gaaccgtggtcataagttccgcctg

SEQ ID NO: 125435 - DNA, 25 bp, Artificial
  probe
  misc_feature (1)..(25): SEQ ID NO: 4211; WAN024CND_at; Start 5; Stop 29
tcaagtctgtcaatgaatgtacctg

SEQ ID NO: 125436 - DNA, 25 bp, Artificial
  probe
  misc_feature (1)..(25): SEQ ID NO: 4211; WAN024CND_at; Start 40; Stop 64
gacgtgataaaagtcaacaaccatc

SEQ ID NO: 125437 - DNA, 25 bp, Artificial
  probe
  misc_feature (1)..(25): SEQ ID NO: 4211; WAN024CND_at; Start 76; Stop 100
accgtggtcataagttccgcctgct

SEQ ID NO: 125438 - DNA, 25 bp, Artificial
  probe
  misc_feature (1)..(25): SEQ ID NO: 4211; WAN024CND_at; Start 26; Stop 50
cctgcgattttcttgacgtgataaa

SEQ ID NO: 125439 - DNA, 25 bp, Artificial
  probe
  misc_feature (1)..(25): SEQ ID NO: 4211; WAN024CND_at; Start 30; Stop 54
cgattttcttgacgtgataaaagtc

SEQ ID NO: 125440 - DNA, 25 bp, Artificial
  probe
  misc_feature (1)..(25): SEQ ID NO: 4211; WAN024CND_at; Start 34; Stop 58
tttcttgacgtgataaaagtcaaca

SEQ ID NO: 125441 - DNA, 25 bp, Artificial
  probe
  misc_feature (1)..(25): SEQ ID NO: 4211; WAN024CND_at; Start 45; Stop 69
gataaaagtcaacaaccatcccttg

SEQ ID NO: 125442 - DNA, 25 bp, Artificial
  probe
  misc_feature (1)..(25): SEQ ID NO: 4211; WAN024CND_at; Start 61; Stop 85
catcccttgactcgaaccgtggtca

SEQ ID NO: 125443 - DNA, 25 bp, Artificial
  probe
  misc_feature (1)..(25): SEQ ID NO: 4211; WAN024CND_at; Start 14; Stop 38
tcaatgaatgtacctgcgattttct

SEQ ID NO: 125444 - DNA, 25 bp, Artificial
  probe
  misc_feature (1)..(25): SEQ ID NO: 4211; WAN024CND_at; Start 78; Stop 102
cgtggtcataagttccgcctgctaa

SEQ ID NO: 125445 - DNA, 25 bp, Artificial
  probe
  misc_feature (1)..(25): SEQ ID NO: 4211; WAN024CND_at; Start 75; Stop 99
aaccgtggtcataagttccgcctgc

SEQ ID NO: 125446 - DNA, 25 bp, Artificial
  probe
  misc_feature (1)..(25): SEQ ID NO: 4211; WAN024CND_at; Start 52; Stop 76
gtcaacaaccatcccttgactcgaa

SEQ ID NO: 125447 - DNA, 25 bp, Artificial
  probe
  misc_feature (1)..(25): SEQ ID NO: 4211; WAN024CND_at; Start 65; Stop 89
ccttgactcgaaccgtggtcataag

SEQ ID NO: 125448 - DNA, 25 bp, Artificial
  probe
  misc_feature (1)..(25): SEQ ID NO: 4211; WAN024CND_at; Start 42; Stop 66
cgtgataaaagtcaacaaccatccc

SEQ ID NO: 125449 - DNA, 25 bp, Artificial
  probe
  misc_feature (1)..(25): SEQ ID NO: 4211; WAN024CND_at; Start 20; Stop 44
aatgtacctgcgattttcttgacgt

SEQ ID NO: 125450 - DNA, 25 bp, Artificial
  probe
  misc_feature (1)..(25): SEQ ID NO: 4211; WAN024CND_at; Start 7; Stop 31
aagtctgtcaatgaatgtacctgcg

SEQ ID NO: 125451 - DNA, 25 bp, Artificial
  probe
  misc_feature (1)..(25): SEQ ID NO: 4211; WAN024CND_at; Start 1; Stop 25
gtggtcaagtctgtcaatgaatgta

SEQ ID NO: 125452 - DNA, 25 bp, Artificial
  probe
  misc_feature (1)..(25): SEQ ID NO: 4211; WAN024CND_at; Start 19; Stop 43
gaatgtacctgcgattttcttgacg

SEQ ID NO: 125453 - DNA, 25 bp, Artificial
  probe
  misc_feature (1)..(25): SEQ ID NO: 4211; WAN024CND_at; Start 58; Stop 82
aaccatcccttgactcgaaccgtgg

SEQ ID NO: 125454 - DNA, 25 bp, Artificial
  probe
  misc_feature (1)..(25): SEQ ID NO: 4211; WAN024CND_at; Start 47; Stop 71
taaaagtcaacaaccatcccttgac

SEQ ID NO: 125455 - DNA, 25 bp, Artificial
  probe
  misc_feature (1)..(25): SEQ ID NO: 4211; WAN024CND_at; Start 10; Stop 34
tctgtcaatgaatgtacctgcgatt

SEQ ID NO: 125456 - DNA, 25 bp, Artificial
  probe
  misc_feature (1)..(25): SEQ ID NO: 4211; WAN024CND_at; Start 72; Stop 96
tcgaaccgtggtcataagttccgcc

SEQ ID NO: 125457 - DNA, 25 bp, Artificial
  probe
  misc_feature (1)..(25): SEQ ID NO: 4211; WAN024CND_at; Start 63; Stop 87
tcccttgactcgaaccgtggtcata

SEQ ID NO: 125458 - DNA, 25 bp, Artificial
  probe
  misc_feature (1)..(25): SEQ ID NO: 4211; WAN024CND_at; Start 3; Stop 27
ggtcaagtctgtcaatgaatgtacc

SEQ ID NO: 125459 - DNA, 25 bp, Artificial
  probe
  misc_feature (1)..(25): SEQ ID NO: 4211; WAN024CND_at; Start 28; Stop 52
tgcgattttcttgacgtgataaaag

SEQ ID NO: 125460 - DNA, 25 bp, Artificial
  probe
  misc_feature (1)..(25): SEQ ID NO: 4211; WAN024CND_at; Start 37; Stop 61
cttgacgtgataaaagtcaacaacc

SEQ ID NO: 125461 - DNA, 25 bp, Artificial
  probe
  misc_feature (1)..(25): SEQ ID NO: 4211; WAN024CND_at; Start 22; Stop 46
tgtacctgcgattttcttgacgtga

SEQ ID NO: 125462 - DNA, 25 bp, Artificial
  probe
  misc_feature (1)..(25): SEQ ID NO: 4211; WAN024CND_at; Start 68; Stop 92
tgactcgaaccgtggtcataagttc

SEQ ID NO: 125463 - DNA, 25 bp, Artificial
  probe
  misc_feature (1)..(25): SEQ ID NO: 4211; WAN024CND_at; Start 70; Stop 94
actcgaaccgtggtcataagttccg

SEQ ID NO: 125464 - DNA, 25 bp, Artificial
  probe
  misc_feature (1)..(25): SEQ ID NO: 4211; WAN024CND_at; Start 9; Stop 33
gtctgtcaatgaatgtacctgcgat

SEQ ID NO: 125465 - DNA, 25 bp, Artificial
  probe
  misc_feature (1)..(25): SEQ ID NO: 1583; WAN024CNE_at; Start 19; Stop 43
atcttcgttaccgtattgaccgact

SEQ ID NO: 125466 - DNA, 25 bp, Artificial
  probe
  misc_feature (1)..(25): SEQ ID NO: 1583; WAN024CNE_at; Start 75; Stop 99
tacctcaaaggctttttgtcagcct

SEQ ID NO: 125467 - DNA, 25 bp, Artificial
  probe
  misc_feature (1)..(25): SEQ ID NO: 1583; WAN024CNE_at; Start 47; Stop 71
tactcgcgaaccttcctacaagaat

SEQ ID NO: 125468 - DNA, 25 bp, Artificial
  probe
  misc_feature (1)..(25): SEQ ID NO: 1583; WAN024CNE_at; Start 74; Stop 98
atacctcaaaggctttttgtcagcc

SEQ ID NO: 125469 - DNA, 25 bp, Artificial
  probe
  misc_feature (1)..(25): SEQ ID NO: 1583; WAN024CNE_at; Start 62; Stop 86
ctacaagaattcatacctcaaaggc

SEQ ID NO: 125470 - DNA, 25 bp, Artificial
  probe
  misc_feature (1)..(25): SEQ ID NO: 1583; WAN024CNE_at; Start 17; Stop 41
ttatcttcgttaccgtattgaccga

SEQ ID NO: 125471 - DNA, 25 bp, Artificial
  probe
  misc_feature (1)..(25): SEQ ID NO: 1583; WAN024CNE_at; Start 1; Stop 25
atgaggctgctttgctttatcttcg

SEQ ID NO: 125472 - DNA, 25 bp, Artificial
  probe
  misc_feature (1)..(25): SEQ ID NO: 1583; WAN024CNE_at; Start 57; Stop 81
ccttcctacaagaattcatacctca

SEQ ID NO: 125473 - DNA, 25 bp, Artificial
  probe
  misc_feature (1)..(25): SEQ ID NO: 1583; WAN024CNE_at; Start 7; Stop 31
ctgctttgctttatcttcgttaccg

SEQ ID NO: 125474 - DNA, 25 bp, Artificial
  probe
  misc_feature (1)..(25): SEQ ID NO: 1583; WAN024CNE_at; Start 13; Stop 37
tgctttatcttcgttaccgtattga

SEQ ID NO: 125475 - DNA, 25 bp, Artificial
  probe
  misc_feature (1)..(25): SEQ ID NO: 1583; WAN024CNE_at; Start 78; Stop 102
ctcaaaggctttttgtcagccttag

SEQ ID NO: 125476 - DNA, 25 bp, Artificial
  probe
  misc_feature (1)..(25): SEQ ID NO: 1583; WAN024CNE_at; Start 54; Stop 78
gaaccttcctacaagaattcatacc

SEQ ID NO: 125477 - DNA, 25 bp, Artificial
  probe
  misc_feature (1)..(25): SEQ ID NO: 1583; WAN024CNE_at; Start 2; Stop 26
tgaggctgctttgctttatcttcgt

SEQ ID NO: 125478 - DNA, 25 bp, Artificial
  probe
  misc_feature (1)..(25): SEQ ID NO: 1583; WAN024CNE_at; Start 33; Stop 57
attgaccgacttcctactcgcgaac

SEQ ID NO: 125479 - DNA, 25 bp, Artificial
  probe
  misc_feature (1)..(25): SEQ ID NO: 1583; WAN024CNE_at; Start 51; Stop 75
cgcgaaccttcctacaagaattcat

SEQ ID NO: 125480 - DNA, 25 bp, Artificial
  probe
  misc_feature (1)..(25): SEQ ID NO: 1583; WAN024CNE_at; Start 50; Stop 74
tcgcgaaccttcctacaagaattca

SEQ ID NO: 125481 - DNA, 25 bp, Artificial
  probe
  misc_feature (1)..(25): SEQ ID NO: 1583; WAN024CNE_at; Start 10; Stop 34
ctttgctttatcttcgttaccgtat

SEQ ID NO: 125482 - DNA, 25 bp, Artificial
  probe
  misc_feature (1)..(25): SEQ ID NO: 1583; WAN024CNE_at; Start 64; Stop 88
acaagaattcatacctcaaaggctt

SEQ ID NO: 125483 - DNA, 25 bp, Artificial
  probe
  misc_feature (1)..(25): SEQ ID NO: 1583; WAN024CNE_at; Start 52; Stop 76
gcgaaccttcctacaagaattcata

SEQ ID NO: 125484 - DNA, 25 bp, Artificial
  probe
  misc_feature (1)..(25): SEQ ID NO: 1583; WAN024CNE_at; Start 14; Stop 38
gctttatcttcgttaccgtattgac

SEQ ID NO: 125485 - DNA, 25 bp, Artificial
  probe
  misc_feature (1)..(25): SEQ ID NO: 1583; WAN024CNE_at; Start 63; Stop 87
tacaagaattcatacctcaaaggct

SEQ ID NO: 125486 - DNA, 25 bp, Artificial
  probe
  misc_feature (1)..(25): SEQ ID NO: 1583; WAN024CNE_at; Start 3; Stop 27
gaggctgctttgctttatcttcgtt

SEQ ID NO: 125487 - DNA, 25 bp, Artificial
  probe
  misc_feature (1)..(25): SEQ ID NO: 1583; WAN024CNE_at; Start 30; Stop 54
cgtattgaccgacttcctactcgcg

SEQ ID NO: 125488 - DNA, 25 bp, Artificial
  probe
  misc_feature (1)..(25): SEQ ID NO: 1583; WAN024CNE_at; Start 60; Stop 84
tcctacaagaattcatacctcaaag

SEQ ID NO: 125489 - DNA, 25 bp, Artificial
  probe
  misc_feature (1)..(25): SEQ ID NO: 1583; WAN024CNE_at; Start 5; Stop 29
ggctgctttgctttatcttcgttac

SEQ ID NO: 125490 - DNA, 25 bp, Artificial
  probe
  misc_feature (1)..(25): SEQ ID NO: 1583; WAN024CNE_at; Start 72; Stop 96
tcatacctcaaaggctttttgtcag

SEQ ID NO: 125491 - DNA, 25 bp, Artificial
  probe
  misc_feature (1)..(25): SEQ ID NO: 1583; WAN024CNE_at; Start 31; Stop 55
gtattgaccgacttcctactcgcga

SEQ ID NO: 125492 - DNA, 25 bp, Artificial
  probe
  misc_feature (1)..(25): SEQ ID NO: 1583; WAN024CNE_at; Start 32; Stop 56
tattgaccgacttcctactcgcgaa

SEQ ID NO: 125493 - DNA, 25 bp, Artificial
  probe
  misc_feature (1)..(25): SEQ ID NO: 1583; WAN024CNE_at; Start 9; Stop 33
gctttgctttatcttcgttaccgta

SEQ ID NO: 125494 - DNA, 25 bp, Artificial
  probe
  misc_feature (1)..(25): SEQ ID NO: 1583; WAN024CNE_at; Start 6; Stop 30
gctgctttgctttatcttcgttacc

SEQ ID NO: 125495 - DNA, 25 bp, Artificial
  probe
  misc_feature (1)..(25): SEQ ID NO: 1583; WAN024CNE_at; Start 48; Stop 72
actcgcgaaccttcctacaagaatt

SEQ ID NO: 125496 - DNA, 25 bp, Artificial
  probe
  misc_feature (1)..(25): SEQ ID NO: 1583; WAN024CNE_at; Start 77; Stop 101
cctcaaaggctttttgtcagcctta

SEQ ID NO: 125497 - DNA, 25 bp, Artificial
  probe
  misc_feature (1)..(25): SEQ ID NO: 1583; WAN024CNE_at; Start 68; Stop 92
gaattcatacctcaaaggctttttg

SEQ ID NO: 125498 - DNA, 25 bp, Artificial
  probe
  misc_feature (1)..(25): SEQ ID NO: 1583; WAN024CNE_at; Start 65; Stop 89
caagaattcatacctcaaaggcttt

SEQ ID NO: 125499 - DNA, 25 bp, Artificial
  probe
  misc_feature (1)..(25): SEQ ID NO: 7689; WAN024CNF_at; Start 58; Stop 82
tgttggttatatgaataccatccaa

SEQ ID NO: 125500 - DNA, 25 bp, Artificial
  probe
  misc_feature (1)..(25): SEQ ID NO: 7689; WAN024CNF_at; Start 151; Stop 175
tctacaaatttgttctccataatct

SEQ ID NO: 125501 - DNA, 25 bp, Artificial
  probe
  misc_feature (1)..(25): SEQ ID NO: 7689; WAN024CNF_at; Start 213; Stop 237
aattacacctatctttctcccttat

SEQ ID NO: 125502 - DNA, 25 bp, Artificial
  probe
  misc_feature (1)..(25): SEQ ID NO: 7689; WAN024CNF_at; Start 52; Stop 76
gcttgttgttggttatatgaatacc

SEQ ID NO: 125503 - DNA, 25 bp, Artificial
  probe
  misc_feature (1)..(25): SEQ ID NO: 7689; WAN024CNF_at; Start 70; Stop 94
gaataccatccaaaccctaatacca

SEQ ID NO: 125504 - DNA, 25 bp, Artificial
  probe
  misc_feature (1)..(25): SEQ ID NO: 7689; WAN024CNF_at; Start 265; Stop 289
attaaacaacttatgttcggctcgg

SEQ ID NO: 125505 - DNA, 25 bp, Artificial
  probe
  misc_feature (1)..(25): SEQ ID NO: 7689; WAN024CNF_at; Start 98; Stop 122
caacaccaactgcaactgatgaaat

SEQ ID NO: 125506 - DNA, 25 bp, Artificial
  probe
  misc_feature (1)..(25): SEQ ID NO: 7689; WAN024CNF_at; Start 2; Stop 26
tgtctgatttgctatctttttctaa

SEQ ID NO: 125507 - DNA, 25 bp, Artificial
  probe
  misc_feature (1)..(25): SEQ ID NO: 7689; WAN024CNF_at; Start 278; Stop 302
tgttcggctcggttgatttaattta

SEQ ID NO: 125508 - DNA, 25 bp, Artificial
  probe
  misc_feature (1)..(25): SEQ ID NO: 7689; WAN024CNF_at; Start 251; Stop 275
atagcttccacaaaattaaacaact

SEQ ID NO: 125509 - DNA, 25 bp, Artificial
  probe
  misc_feature (1)..(25): SEQ ID NO: 7689; WAN024CNF_at; Start 240; Stop 264
tatttttattaatagcttccacaaa

SEQ ID NO: 125510 - DNA, 25 bp, Artificial
  probe
  misc_feature (1)..(25): SEQ ID NO: 7689; WAN024CNF_at; Start 273; Stop 297
acttatgttcggctcggttgattta

SEQ ID NO: 125511 - DNA, 25 bp, Artificial
  probe
  misc_feature (1)..(25): SEQ ID NO: 7689; WAN024CNF_at; Start 94; Stop 118
aatacaacaccaactgcaactgatg

SEQ ID NO: 125512 - DNA, 25 bp, Artificial
  probe
  misc_feature (1)..(25): SEQ ID NO: 7689; WAN024CNF_at; Start 29; Stop 53
gtacaatttttgcttgttgttctgc

SEQ ID NO: 125513 - DNA, 25 bp, Artificial
  probe
  misc_feature (1)..(25): SEQ ID NO: 7689; WAN024CNF_at; Start 78; Stop 102
tccaaaccctaataccaatacaaca

SEQ ID NO: 125514 - DNA, 25 bp, Artificial
  probe
  misc_feature (1)..(25): SEQ ID NO: 7689; WAN024CNF_at; Start 161; Stop 185
tgttctccataatctttttctttga

SEQ ID NO: 125515 - DNA, 25 bp, Artificial
  probe
  misc_feature (1)..(25): SEQ ID NO: 7689; WAN024CNF_at; Start 90; Stop 114
taccaatacaacaccaactgcaact

SEQ ID NO: 125516 - DNA, 25 bp, Artificial
  probe
  misc_feature (1)..(25): SEQ ID NO: 7689; WAN024CNF_at; Start 106; Stop 130
actgcaactgatgaaatgattactt

SEQ ID NO: 125517 - DNA, 25 bp, Artificial
  probe
  misc_feature (1)..(25): SEQ ID NO: 7689; WAN024CNF_at; Start 144; Stop 168
gataaattctacaaatttgttctcc

SEQ ID NO: 125518 - DNA, 25 bp, Artificial
  probe
  misc_feature (1)..(25): SEQ ID NO: 7689; WAN024CNF_at; Start 179; Stop 203
tctttgatagtgtccgcaattactt

SEQ ID NO: 125519 - DNA, 25 bp, Artificial
  probe
  misc_feature (1)..(25): SEQ ID NO: 7689; WAN024CNF_at; Start 39; Stop 63
tgcttgttgttctgcttgttgttgg

SEQ ID NO: 125520 - DNA, 25 bp, Artificial
  probe
  misc_feature (1)..(25): SEQ ID NO: 7689; WAN024CNF_at; Start 173; Stop 197
tctttttctttgatagtgtccgcaa

SEQ ID NO: 125521 - DNA, 25 bp, Artificial
  probe
  misc_feature (1)..(25): SEQ ID NO: 7689; WAN024CNF_at; Start 96; Stop 120
tacaacaccaactgcaactgatgaa

SEQ ID NO: 125522 - DNA, 25 bp, Artificial
  probe
  misc_feature (1)..(25): SEQ ID NO: 7689; WAN024CNF_at; Start 269; Stop 293
aacaacttatgttcggctcggttga

SEQ ID NO: 125523 - DNA, 25 bp, Artificial
  probe
  misc_feature (1)..(25): SEQ ID NO: 7689; WAN024CNF_at; Start 12; Stop 36
gctatctttttctaattgtacaatt

SEQ ID NO: 125524 - DNA, 25 bp, Artificial
  probe
  misc_feature (1)..(25): SEQ ID NO: 7689; WAN024CNF_at; Start 217; Stop 241
acacctatctttctcccttattata

SEQ ID NO: 125525 - DNA, 25 bp, Artificial
  probe
  misc_feature (1)..(25): SEQ ID NO: 7689; WAN024CNF_at; Start 101; Stop 125
caccaactgcaactgatgaaatgat

SEQ ID NO: 125526 - DNA, 25 bp, Artificial
  probe
  misc_feature (1)..(25): SEQ ID NO: 7689; WAN024CNF_at; Start 47; Stop 71
gttctgcttgttgttggttatatga

SEQ ID NO: 125527 - DNA, 25 bp, Artificial
  probe
  misc_feature (1)..(25): SEQ ID NO: 7689; WAN024CNF_at; Start 104; Stop 128
caactgcaactgatgaaatgattac

SEQ ID NO: 125528 - DNA, 25 bp, Artificial
  probe
  misc_feature (1)..(25): SEQ ID NO: 7689; WAN024CNF_at; Start 109; Stop 133
gcaactgatgaaatgattacttttt

SEQ ID NO: 125529 - DNA, 25 bp, Artificial
  probe
  misc_feature (1)..(25): SEQ ID NO: 7689; WAN024CNF_at; Start 184; Stop 208
gatagtgtccgcaattactttaaaa

SEQ ID NO: 125530 - DNA, 25 bp, Artificial
  probe
  misc_feature (1)..(25): SEQ ID NO: 7689; WAN024CNF_at; Start 67; Stop 91
tatgaataccatccaaaccctaata

SEQ ID NO: 125531 - DNA, 25 bp, Artificial
  probe
  misc_feature (1)..(25): SEQ ID NO: 7689; WAN024CNF_at; Start 134; Stop 158
tattgttttcgataaattctacaaa

SEQ ID NO: 125532 - DNA, 25 bp, Artificial
  probe
  misc_feature (1)..(25): SEQ ID NO: 7689; WAN024CNF_at; Start 63; Stop 87
gttatatgaataccatccaaaccct

SEQ ID NO: 125533 - DNA, 25 bp, Artificial
  probe
  misc_feature (1)..(25): SEQ ID NO: 5364; WAN024CNG_at; Start 318; Stop 342
caaagtcaaagaatcatctaaagca

SEQ ID NO: 125534 - DNA, 25 bp, Artificial
  probe
  misc_feature (1)..(25): SEQ ID NO: 5364; WAN024CNG_at; Start 274; Stop 298
gaaacttcacttaaaaccgatgcag

SEQ ID NO: 125535 - DNA, 25 bp, Artificial
  probe
  misc_feature (1)..(25): SEQ ID NO: 5364; WAN024CNG_at; Start 290; Stop 314
ccgatgcaggtaaagactatcttaa

SEQ ID NO: 125536 - DNA, 25 bp, Artificial
  probe
  misc_feature (1)..(25): SEQ ID NO: 5364; WAN024CNG_at; Start 766; Stop 790
tcaacaaatggtggatcatcagaac

SEQ ID NO: 125537 - DNA, 25 bp, Artificial
  probe
  misc_feature (1)..(25): SEQ ID NO: 5364; WAN024CNG_at; Start 718; Stop 742
tattcaaataattatggcggtcaag

SEQ ID NO: 125538 - DNA, 25 bp, Artificial
  probe
  misc_feature (1)..(25): SEQ ID NO: 5364; WAN024CNG_at; Start 846; Stop 870
cactggtgctgacggctatcaaaga

SEQ ID NO: 125539 - DNA, 25 bp, Artificial
  probe
  misc_feature (1)..(25): SEQ ID NO: 5364; WAN024CNG_at; Start 891; Stop 915
taatggagatgtgtatgatgacgat

SEQ ID NO: 125540 - DNA, 25 bp, Artificial
  probe
  misc_feature (1)..(25): SEQ ID NO: 5364; WAN024CNG_at; Start 145; Stop 169
gcagaacaacaagcaaaaattgtac

SEQ ID NO: 125541 - DNA, 25 bp, Artificial
  probe
  misc_feature (1)..(25): SEQ ID NO: 5364; WAN024CNG_at; Start 597; Stop 621
tgctgaaaaagcaaaggaatcttct

SEQ ID NO: 125542 - DNA, 25 bp, Artificial
  probe
  misc_feature (1)..(25): SEQ ID NO: 5364; WAN024CNG_at; Start 698; Stop 722
catctgaacaaactaatggatattc

SEQ ID NO: 125543 - DNA, 25 bp, Artificial
  probe
  misc_feature (1)..(25): SEQ ID NO: 5364; WAN024CNG_at; Start 906; Stop 930
tgatgacgatggaaattaccttggg

SEQ ID NO: 125544 - DNA, 25 bp, Artificial
  probe
  misc_feature (1)..(25): SEQ ID NO: 5364; WAN024CNG_at; Start 607; Stop 631
gcaaaggaatcttctagtcaaagta

SEQ ID NO: 125545 - DNA, 25 bp, Artificial
  probe
  misc_feature (1)..(25): SEQ ID NO: 5364; WAN024CNG_at; Start 830; Stop 854
tctacagatataaaggcactggtgc

SEQ ID NO: 125546 - DNA, 25 bp, Artificial
  probe
  misc_feature (1)..(25): SEQ ID NO: 5364; WAN024CNG_at; Start 779; Stop 803
gatcatcagaacaatattcatctag

SEQ ID NO: 125547 - DNA, 25 bp, Artificial
  probe
  misc_feature (1)..(25): SEQ ID NO: 5364; WAN024CNG_at; Start 71; Stop 95
taatcatttcatcagttgcagttgg

SEQ ID NO: 125548 - DNA, 25 bp, Artificial
  probe
  misc_feature (1)..(25): SEQ ID NO: 5364; WAN024CNG_at; Start 637; Stop 661
tctggtagtgcttctaatgagtctt

SEQ ID NO: 125549 - DNA, 25 bp, Artificial
  probe
  misc_feature (1)..(25): SEQ ID NO: 5364; WAN024CNG_at; Start 981; Stop 1005
gagctgtgttgtttcgaatggttcc

SEQ ID NO: 125550 - DNA, 25 bp, Artificial
  probe
  misc_feature (1)..(25): SEQ ID NO: 5364; WAN024CNG_at; Start 360; Stop 384
gcaaaaaggtttggcttatgatgtt

SEQ ID NO: 125551 - DNA, 25 bp, Artificial
  probe
  misc_feature (1)..(25): SEQ ID NO: 5364; WAN024CNG_at; Start 939; Stop 963
tggcggcattgcagaacctagtcaa

SEQ ID NO: 125552 - DNA, 25 bp, Artificial
  probe
  misc_feature (1)..(25): SEQ ID NO: 5364; WAN024CNG_at; Start 124; Stop 148
tattcatataaccaacaacaagcag

SEQ ID NO: 125553 - DNA, 25 bp, Artificial
  probe
  misc_feature (1)..(25): SEQ ID NO: 5364; WAN024CNG_at; Start 624; Stop 648
tcaaagtaattcttctggtagtgct

SEQ ID NO: 125554 - DNA, 25 bp, Artificial
  probe
  misc_feature (1)..(25): SEQ ID NO: 5364; WAN024CNG_at; Start 748; Stop 772
tctggttcaggagatagttcaacaa

SEQ ID NO: 125555 - DNA, 25 bp, Artificial
  probe
  misc_feature (1)..(25): SEQ ID NO: 5364; WAN024CNG_at; Start 813; Stop 837
cagcggagcaaataatgtctacaga

SEQ ID NO: 125556 - DNA, 25 bp, Artificial
  probe
  misc_feature (1)..(25): SEQ ID NO: 5364; WAN024CNG_at; Start 651; Stop 675
taatgagtcttataatggatcttcc

SEQ ID NO: 125557 - DNA, 25 bp, Artificial
  probe
  misc_feature (1)..(25): SEQ ID NO: 5364; WAN024CNG_at; Start 796; Stop 820
tcatctagcaattcaaacagcggag

SEQ ID NO: 125558 - DNA, 25 bp, Artificial
  probe
  misc_feature (1)..(25): SEQ ID NO: 5364; WAN024CNG_at; Start 220; Stop 244
gaatcatttgatgcatcttcagatg

SEQ ID NO: 125559 - DNA, 25 bp, Artificial
  probe
  misc_feature (1)..(25): SEQ ID NO: 5364; WAN024CNG_at; Start 183; Stop 207
tagcaaatcagacaaagaacaagtt

SEQ ID NO: 125560 - DNA, 25 bp, Artificial
  probe
  misc_feature (1)..(25): SEQ ID NO: 5364; WAN024CNG_at; Start 999; Stop 1023
tggttccaaaacacattaaaagcta

SEQ ID NO: 125561 - DNA, 25 bp, Artificial
  probe
  misc_feature (1)..(25): SEQ ID NO: 5364; WAN024CNG_at; Start 563; Stop 587
tgaagaaagaagaagaaaaagctgc

SEQ ID NO: 125562 - DNA, 25 bp, Artificial
  probe
  misc_feature (1)..(25): SEQ ID NO: 5364; WAN024CNG_at; Start 576; Stop 600
agaaaaagctgctgaaaaagctgct

SEQ ID NO: 125563 - DNA, 25 bp, Artificial
  probe
  misc_feature (1)..(25): SEQ ID NO: 5364; WAN024CNG_at; Start 415; Stop 439
gcaactcttgaaacaaatgtaaaag

SEQ ID NO: 125564 - DNA, 25 bp, Artificial
  probe
  misc_feature (1)..(25): SEQ ID NO: 5364; WAN024CNG_at; Start 922; Stop 946
taccttgggaactttggtggcggca

SEQ ID NO: 125565 - DNA, 25 bp, Artificial
  probe
  misc_feature (1)..(25): SEQ ID NO: 5364; WAN024CNG_at; Start 2; Stop 26
tgcggacactatcaaagaaaaagat

SEQ ID NO: 125566 - DNA, 25 bp, Artificial
  probe
  misc_feature (1)..(25): SEQ ID NO: 5364; WAN024CNG_at; Start 733; Stop 757
ggcggtcaagattattctggttcag

SEQ ID NO: 125567 - DNA, 25 bp, Artificial
  probe
  misc_feature (1)..(25): SEQ ID NO: 1878; WAN024CNH_at; Start 35; Stop 59
cgacagatagttcaagtatgccgga

SEQ ID NO: 125568 - DNA, 25 bp, Artificial
  probe
  misc_feature (1)..(25): SEQ ID NO: 1878; WAN024CNH_at; Start 32; Stop 56
taacgacagatagttcaagtatgcc

SEQ ID NO: 125569 - DNA, 25 bp, Artificial
  probe
  misc_feature (1)..(25): SEQ ID NO: 1878; WAN024CNH_at; Start 46; Stop 70
tcaagtatgccggatttttcgtcac

SEQ ID NO: 125570 - DNA, 25 bp, Artificial
  probe
  misc_feature (1)..(25): SEQ ID NO: 1878; WAN024CNH_at; Start 71; Stop 95
gcttcatagcgataactctgctagc

SEQ ID NO: 125571 - DNA, 25 bp, Artificial
  probe
  misc_feature (1)..(25): SEQ ID NO: 1878; WAN024CNH_at; Start 9; Stop 33
tcggtcttcgccatatcggttttta

SEQ ID NO: 125572 - DNA, 25 bp, Artificial
  probe
  misc_feature (1)..(25): SEQ ID NO: 1878; WAN024CNH_at; Start 48; Stop 72
aagtatgccggatttttcgtcacgc

SEQ ID NO: 125573 - DNA, 25 bp, Artificial
  probe
  misc_feature (1)..(25): SEQ ID NO: 1878; WAN024CNH_at; Start 16; Stop 40
tcgccatatcggtttttaacgacag

SEQ ID NO: 125574 - DNA, 25 bp, Artificial
  probe
  misc_feature (1)..(25): SEQ ID NO: 1878; WAN024CNH_at; Start 24; Stop 48
tcggtttttaacgacagatagttca

SEQ ID NO: 125575 - DNA, 25 bp, Artificial
  probe
  misc_feature (1)..(25): SEQ ID NO: 1878; WAN024CNH_at; Start 4; Stop 28
atttttcggtcttcgccatatcggt

SEQ ID NO: 125576 - DNA, 25 bp, Artificial
  probe
  misc_feature (1)..(25): SEQ ID NO: 1878; WAN024CNH_at; Start 69; Stop 93
acgcttcatagcgataactctgcta

SEQ ID NO: 125577 - DNA, 25 bp, Artificial
  probe
  misc_feature (1)..(25): SEQ ID NO: 1878; WAN024CNH_at; Start 47; Stop 71
caagtatgccggatttttcgtcacg

SEQ ID NO: 125578 - DNA, 25 bp, Artificial
  probe
  misc_feature (1)..(25): SEQ ID NO: 1878; WAN024CNH_at; Start 13; Stop 37
tcttcgccatatcggtttttaacga

SEQ ID NO: 125579 - DNA, 25 bp, Artificial
  probe
  misc_feature (1)..(25): SEQ ID NO: 1878; WAN024CNH_at; Start 3; Stop 27
gatttttcggtcttcgccatatcgg

SEQ ID NO: 125580 - DNA, 25 bp, Artificial
  probe
  misc_feature (1)..(25): SEQ ID NO: 1878; WAN024CNH_at; Start 54; Stop 78
gccggatttttcgtcacgcttcata

SEQ ID NO: 125581 - DNA, 25 bp, Artificial
  probe
  misc_feature (1)..(25): SEQ ID NO: 1878; WAN024CNH_at; Start 67; Stop 91
tcacgcttcatagcgataactctgc

SEQ ID NO: 125582 - DNA, 25 bp, Artificial
  probe
  misc_feature (1)..(25): SEQ ID NO: 1878; WAN024CNH_at; Start 17; Stop 41
cgccatatcggtttttaacgacaga

SEQ ID NO: 125583 - DNA, 25 bp, Artificial
  probe
  misc_feature (1)..(25): SEQ ID NO: 1878; WAN024CNH_at; Start 75; Stop 99
catagcgataactctgctagcattt

SEQ ID NO: 125584 - DNA, 25 bp, Artificial
  probe
  misc_feature (1)..(25): SEQ ID NO: 1878; WAN024CNH_at; Start 18; Stop 42
gccatatcggtttttaacgacagat

SEQ ID NO: 125585 - DNA, 25 bp, Artificial
  probe
  misc_feature (1)..(25): SEQ ID NO: 1878; WAN024CNH_at; Start 64; Stop 88
tcgtcacgcttcatagcgataactc

SEQ ID NO: 125586 - DNA, 25 bp, Artificial
  probe
  misc_feature (1)..(25): SEQ ID NO: 1878; WAN024CNH_at; Start 58; Stop 82
gatttttcgtcacgcttcatagcga

SEQ ID NO: 125587 - DNA, 25 bp, Artificial
  probe
  misc_feature (1)..(25): SEQ ID NO: 1878; WAN024CNH_at; Start 49; Stop 73
agtatgccggatttttcgtcacgct

SEQ ID NO: 125588 - DNA, 25 bp, Artificial
  probe
  misc_feature (1)..(25): SEQ ID NO: 1878; WAN024CNH_at; Start 38; Stop 62
cagatagttcaagtatgccggattt

SEQ ID NO: 125589 - DNA, 25 bp, Artificial
  probe
  misc_feature (1)..(25): SEQ ID NO: 1878; WAN024CNH_at; Start 20; Stop 44
catatcggtttttaacgacagatag

SEQ ID NO: 125590 - DNA, 25 bp, Artificial
  probe
  misc_feature (1)..(25): SEQ ID NO: 1878; WAN024CNH_at; Start 34; Stop 58
acgacagatagttcaagtatgccgg

SEQ ID NO: 125591 - DNA, 25 bp, Artificial
  probe
  misc_feature (1)..(25): SEQ ID NO: 1878; WAN024CNH_at; Start 42; Stop 66
tagttcaagtatgccggatttttcg

SEQ ID NO: 125592 - DNA, 25 bp, Artificial
  probe
  misc_feature (1)..(25): SEQ ID NO: 1878; WAN024CNH_at; Start 55; Stop 79
ccggatttttcgtcacgcttcatag

SEQ ID NO: 125593 - DNA, 25 bp, Artificial
  probe
  misc_feature (1)..(25): SEQ ID NO: 1878; WAN024CNH_at; Start 52; Stop 76
atgccggatttttcgtcacgcttca

SEQ ID NO: 125594 - DNA, 25 bp, Artificial
  probe
  misc_feature (1)..(25): SEQ ID NO: 1878; WAN024CNH_at; Start 51; Stop 75
tatgccggatttttcgtcacgcttc

SEQ ID NO: 125595 - DNA, 25 bp, Artificial
  probe
  misc_feature (1)..(25): SEQ ID NO: 1878; WAN024CNH_at; Start 36; Stop 60
gacagatagttcaagtatgccggat

SEQ ID NO: 125596 - DNA, 25 bp, Artificial
  probe
  misc_feature (1)..(25): SEQ ID NO: 1878; WAN024CNH_at; Start 62; Stop 86
tttcgtcacgcttcatagcgataac

SEQ ID NO: 125597 - DNA, 25 bp, Artificial
  probe
  misc_feature (1)..(25): SEQ ID NO: 1878; WAN024CNH_at; Start 78; Stop 102
agcgataactctgctagcattttga

SEQ ID NO: 125598 - DNA, 25 bp, Artificial
  probe
  misc_feature (1)..(25): SEQ ID NO: 1878; WAN024CNH_at; Start 60; Stop 84
tttttcgtcacgcttcatagcgata

SEQ ID NO: 125599 - DNA, 25 bp, Artificial
  probe
  misc_feature (1)..(25): SEQ ID NO: 1878; WAN024CNH_at; Start 57; Stop 81
ggatttttcgtcacgcttcatagcg

SEQ ID NO: 125600 - DNA, 25 bp, Artificial
  probe
  misc_feature (1)..(25): SEQ ID NO: 1878; WAN024CNH_at; Start 73; Stop 97
ttcatagcgataactctgctagcat

SEQ ID NO: 125601 - DNA, 25 bp, Artificial
  probe
  misc_feature (1)..(25): SEQ ID NO: 3903; WAN024CNI_at; Start 69; Stop 93
catactgctcgagttttgcttcctc

SEQ ID NO: 125602 - DNA, 25 bp, Artificial
  probe
  misc_feature (1)..(25): SEQ ID NO: 3903; WAN024CNI_at; Start 77; Stop 101
tcgagttttgcttcctcagtgatta

SEQ ID NO: 125603 - DNA, 25 bp, Artificial
  probe
  misc_feature (1)..(25): SEQ ID NO: 3903; WAN024CNI_at; Start 65; Stop 89
tctacatactgctcgagttttgctt

SEQ ID NO: 125604 - DNA, 25 bp, Artificial
  probe
  misc_feature (1)..(25): SEQ ID NO: 3903; WAN024CNI_at; Start 4; Stop 28
aatagtatcgagtccatcagtttct

SEQ ID NO: 125605 - DNA, 25 bp, Artificial
  probe
  misc_feature (1)..(25): SEQ ID NO: 3903; WAN024CNI_at; Start 41; Stop 65
cctattccgtcttcaatcattttgt

SEQ ID NO: 125606 - DNA, 25 bp, Artificial
  probe
  misc_feature (1)..(25): SEQ ID NO: 3903; WAN024CNI_at; Start 31; Stop 55
gtcaatagaacctattccgtcttca

SEQ ID NO: 125607 - DNA, 25 bp, Artificial
  probe
  misc_feature (1)..(25): SEQ ID NO: 3903; WAN024CNI_at; Start 11; Stop 35
tcgagtccatcagtttctacgtcaa

SEQ ID NO: 125608 - DNA, 25 bp, Artificial
  probe
  misc_feature (1)..(25): SEQ ID NO: 3903; WAN024CNI_at; Start 57; Stop 81
tcattttgtctacatactgctcgag

SEQ ID NO: 125609 - DNA, 25 bp, Artificial
  probe
  misc_feature (1)..(25): SEQ ID NO: 3903; WAN024CNI_at; Start 75; Stop 99
gctcgagttttgcttcctcagtgat

SEQ ID NO: 125610 - DNA, 25 bp, Artificial
  probe
  misc_feature (1)..(25): SEQ ID NO: 3903; WAN024CNI_at; Start 74; Stop 98
tgctcgagttttgcttcctcagtga

SEQ ID NO: 125611 - DNA, 25 bp, Artificial
  probe
  misc_feature (1)..(25): SEQ ID NO: 3903; WAN024CNI_at; Start 15; Stop 39
gtccatcagtttctacgtcaataga

SEQ ID NO: 125612 - DNA, 25 bp, Artificial
  probe
  misc_feature (1)..(25): SEQ ID NO: 3903; WAN024CNI_at; Start 78; Stop 102
cgagttttgcttcctcagtgattaa

SEQ ID NO: 125613 - DNA, 25 bp, Artificial
  probe
  misc_feature (1)..(25): SEQ ID NO: 3903; WAN024CNI_at; Start 12; Stop 36
cgagtccatcagtttctacgtcaat

SEQ ID NO: 125614 - DNA, 25 bp, Artificial
  probe
  misc_feature (1)..(25): SEQ ID NO: 3903; WAN024CNI_at; Start 58; Stop 82
cattttgtctacatactgctcgagt

SEQ ID NO: 125615 - DNA, 25 bp, Artificial
  probe
  misc_feature (1)..(25): SEQ ID NO: 3903; WAN024CNI_at; Start 63; Stop 87
tgtctacatactgctcgagttttgc

SEQ ID NO: 125616 - DNA, 25 bp, Artificial
  probe
  misc_feature (1)..(25): SEQ ID NO: 3903; WAN024CNI_at; Start 14; Stop 38
agtccatcagtttctacgtcaatag

SEQ ID NO: 125617 - DNA, 25 bp, Artificial
  probe
  misc_feature (1)..(25): SEQ ID NO: 3903; WAN024CNI_at; Start 55; Stop 79
aatcattttgtctacatactgctcg

SEQ ID NO: 125618 - DNA, 25 bp, Artificial
  probe
  misc_feature (1)..(25): SEQ ID NO: 3903; WAN024CNI_at; Start 21; Stop 45
cagtttctacgtcaatagaacctat

SEQ ID NO: 125619 - DNA, 25 bp, Artificial
  probe
  misc_feature (1)..(25): SEQ ID NO: 3903; WAN024CNI_at; Start 9; Stop 33
tatcgagtccatcagtttctacgtc

SEQ ID NO: 125620 - DNA, 25 bp, Artificial
  probe
  misc_feature (1)..(25): SEQ ID NO: 3903; WAN024CNI_at; Start 33; Stop 57
caatagaacctattccgtcttcaat

SEQ ID NO: 125621 - DNA, 25 bp, Artificial
  probe
  misc_feature (1)..(25): SEQ ID NO: 3903; WAN024CNI_at; Start 7; Stop 31
agtatcgagtccatcagtttctacg

SEQ ID NO: 125622 - DNA, 25 bp, Artificial
  probe
  misc_feature (1)..(25): SEQ ID NO: 3903; WAN024CNI_at; Start 18; Stop 42
catcagtttctacgtcaatagaacc

SEQ ID NO: 125623 - DNA, 25 bp, Artificial
  probe
  misc_feature (1)..(25): SEQ ID NO: 3903; WAN024CNI_at; Start 1; Stop 25
gtgaatagtatcgagtccatcagtt

SEQ ID NO: 125624 - DNA, 25 bp, Artificial
  probe
  misc_feature (1)..(25): SEQ ID NO: 3903; WAN024CNI_at; Start 6; Stop 30
tagtatcgagtccatcagtttctac

SEQ ID NO: 125625 - DNA, 25 bp, Artificial
  probe
  misc_feature (1)..(25): SEQ ID NO: 3903; WAN024CNI_at; Start 3; Stop 27
gaatagtatcgagtccatcagtttc

SEQ ID NO: 125626 - DNA, 25 bp, Artificial
  probe
  misc_feature (1)..(25): SEQ ID NO: 3903; WAN024CNI_at; Start 46; Stop 70
tccgtcttcaatcattttgtctaca

SEQ ID NO: 125627 - DNA, 25 bp, Artificial
  probe
  misc_feature (1)..(25): SEQ ID NO: 3903; WAN024CNI_at; Start 60; Stop 84
ttttgtctacatactgctcgagttt

SEQ ID NO: 125628 - DNA, 25 bp, Artificial
  probe
  misc_feature (1)..(25): SEQ ID NO: 3903; WAN024CNI_at; Start 71; Stop 95
tactgctcgagttttgcttcctcag

SEQ ID NO: 125629 - DNA, 25 bp, Artificial
  probe
  misc_feature (1)..(25): SEQ ID NO: 3903; WAN024CNI_at; Start 38; Stop 62
gaacctattccgtcttcaatcattt

SEQ ID NO: 125630 - DNA, 25 bp, Artificial
  probe
  misc_feature (1)..(25): SEQ ID NO: 3903; WAN024CNI_at; Start 35; Stop 59
atagaacctattccgtcttcaatca

SEQ ID NO: 125631 - DNA, 25 bp, Artificial
  probe
  misc_feature (1)..(25): SEQ ID NO: 3903; WAN024CNI_at; Start 25; Stop 49
ttctacgtcaatagaacctattccg

SEQ ID NO: 125632 - DNA, 25 bp, Artificial
  probe
  misc_feature (1)..(25): SEQ ID NO: 3903; WAN024CNI_at; Start 28; Stop 52
tacgtcaatagaacctattccgtct

SEQ ID NO: 125633 - DNA, 25 bp, Artificial
  probe
  misc_feature (1)..(25): SEQ ID NO: 3903; WAN024CNI_at; Start 67; Stop 91
tacatactgctcgagttttgcttcc

SEQ ID NO: 125634 - DNA, 25 bp, Artificial
  probe
  misc_feature (1)..(25): SEQ ID NO: 3903; WAN024CNI_at; Start 13; Stop 37
gagtccatcagtttctacgtcaata

SEQ ID NO: 125635 - DNA, 25 bp, Artificial
  probe
  misc_feature (1)..(25): SEQ ID NO: 2843; WAN024CNJ_at; Start 17; Stop 41
tgtgcttgacaatggattcaactac

SEQ ID NO: 125636 - DNA, 25 bp, Artificial
  probe
  misc_feature (1)..(25): SEQ ID NO: 2843; WAN024CNJ_at; Start 23; Stop 47
tgacaatggattcaactactgatgc

SEQ ID NO: 125637 - DNA, 25 bp, Artificial
  probe
  misc_feature (1)..(25): SEQ ID NO: 2843; WAN024CNJ_at; Start 49; Stop 73
tcaacctttttcaatcgcgacagct

SEQ ID NO: 125638 - DNA, 25 bp, Artificial
  probe
  misc_feature (1)..(25): SEQ ID NO: 2843; WAN024CNJ_at; Start 31; Stop 55
gattcaactactgatgcgtcaacct

SEQ ID NO: 125639 - DNA, 25 bp, Artificial
  probe
  misc_feature (1)..(25): SEQ ID NO: 2843; WAN024CNJ_at; Start 29; Stop 53
tggattcaactactgatgcgtcaac

SEQ ID NO: 125640 - DNA, 25 bp, Artificial
  probe
  misc_feature (1)..(25): SEQ ID NO: 2843; WAN024CNJ_at; Start 69; Stop 93
cagcttgtccaattcattgtcaatt

SEQ ID NO: 125641 - DNA, 25 bp, Artificial
  probe
  misc_feature (1)..(25): SEQ ID NO: 2843; WAN024CNJ_at; Start 34; Stop 58
tcaactactgatgcgtcaacctttt

SEQ ID NO: 125642 - DNA, 25 bp, Artificial
  probe
  misc_feature (1)..(25): SEQ ID NO: 2843; WAN024CNJ_at; Start 51; Stop 75
aacctttttcaatcgcgacagcttg

SEQ ID NO: 125643 - DNA, 25 bp, Artificial
  probe
  misc_feature (1)..(25): SEQ ID NO: 2843; WAN024CNJ_at; Start 39; Stop 63
tactgatgcgtcaacctttttcaat

SEQ ID NO: 125644 - DNA, 25 bp, Artificial
  probe
  misc_feature (1)..(25): SEQ ID NO: 2843; WAN024CNJ_at; Start 57; Stop 81
tttcaatcgcgacagcttgtccaat

SEQ ID NO: 125645 - DNA, 25 bp, Artificial
  probe
  misc_feature (1)..(25): SEQ ID NO: 2843; WAN024CNJ_at; Start 33; Stop 57
ttcaactactgatgcgtcaaccttt

SEQ ID NO: 125646 - DNA, 25 bp, Artificial
  probe
  misc_feature (1)..(25): SEQ ID NO: 2843; WAN024CNJ_at; Start 24; Stop 48
gacaatggattcaactactgatgcg

SEQ ID NO: 125647 - DNA, 25 bp, Artificial
  probe
  misc_feature (1)..(25): SEQ ID NO: 2843; WAN024CNJ_at; Start 8; Stop 32
tttcggtcttgtgcttgacaatgga

SEQ ID NO: 125648 - DNA, 25 bp, Artificial
  probe
  misc_feature (1)..(25): SEQ ID NO: 2843; WAN024CNJ_at; Start 75; Stop 99
gtccaattcattgtcaattctagag

SEQ ID NO: 125649 - DNA, 25 bp, Artificial
  probe
  misc_feature (1)..(25): SEQ ID NO: 2843; WAN024CNJ_at; Start 55; Stop 79
tttttcaatcgcgacagcttgtcca

SEQ ID NO: 125650 - DNA, 25 bp, Artificial
  probe
  misc_feature (1)..(25): SEQ ID NO: 2843; WAN024CNJ_at; Start 47; Stop 71
cgtcaacctttttcaatcgcgacag

SEQ ID NO: 125651 - DNA, 25 bp, Artificial
  probe
  misc_feature (1)..(25): SEQ ID NO: 2843; WAN024CNJ_at; Start 4; Stop 28
tcaatttcggtcttgtgcttgacaa

SEQ ID NO: 125652 - DNA, 25 bp, Artificial
  probe
  misc_feature (1)..(25): SEQ ID NO: 2843; WAN024CNJ_at; Start 11; Stop 35
cggtcttgtgcttgacaatggattc

SEQ ID NO: 125653 - DNA, 25 bp, Artificial
  probe
  misc_feature (1)..(25): SEQ ID NO: 2843; WAN024CNJ_at; Start 37; Stop 61
actactgatgcgtcaacctttttca

SEQ ID NO: 125654 - DNA, 25 bp, Artificial
  probe
  misc_feature (1)..(25): SEQ ID NO: 2843; WAN024CNJ_at; Start 63; Stop 87
tcgcgacagcttgtccaattcattg

SEQ ID NO: 125655 - DNA, 25 bp, Artificial
  probe
  misc_feature (1)..(25): SEQ ID NO: 2843; WAN024CNJ_at; Start 14; Stop 38
tcttgtgcttgacaatggattcaac

SEQ ID NO: 125656 - DNA, 25 bp, Artificial
  probe
  misc_feature (1)..(25): SEQ ID NO: 2843; WAN024CNJ_at; Start 1; Stop 25
atgtcaatttcggtcttgtgcttga

SEQ ID NO: 125657 - DNA, 25 bp, Artificial
  probe
  misc_feature (1)..(25): SEQ ID NO: 2843; WAN024CNJ_at; Start 26; Stop 50
caatggattcaactactgatgcgtc

SEQ ID NO: 125658 - DNA, 25 bp, Artificial
  probe
  misc_feature (1)..(25): SEQ ID NO: 2843; WAN024CNJ_at; Start 6; Stop 30
aatttcggtcttgtgcttgacaatg

SEQ ID NO: 125659 - DNA, 25 bp, Artificial
  probe
  misc_feature (1)..(25): SEQ ID NO: 2843; WAN024CNJ_at; Start 78; Stop 102
caattcattgtcaattctagagtaa

SEQ ID NO: 125660 - DNA, 25 bp, Artificial
  probe
  misc_feature (1)..(25): SEQ ID NO: 2843; WAN024CNJ_at; Start 20; Stop 44
gcttgacaatggattcaactactga

SEQ ID NO: 125661 - DNA, 25 bp, Artificial
  probe
  misc_feature (1)..(25): SEQ ID NO: 2843; WAN024CNJ_at; Start 67; Stop 91
gacagcttgtccaattcattgtcaa

SEQ ID NO: 125662 - DNA, 25 bp, Artificial
  probe
  misc_feature (1)..(25): SEQ ID NO: 2843; WAN024CNJ_at; Start 30; Stop 54
ggattcaactactgatgcgtcaacc

SEQ ID NO: 125663 - DNA, 25 bp, Artificial
  probe
  misc_feature (1)..(25): SEQ ID NO: 2843; WAN024CNJ_at; Start 52; Stop 76
acctttttcaatcgcgacagcttgt

SEQ ID NO: 125664 - DNA, 25 bp, Artificial
  probe
  misc_feature (1)..(25): SEQ ID NO: 2843; WAN024CNJ_at; Start 27; Stop 51
aatggattcaactactgatgcgtca

SEQ ID NO: 125665 - DNA, 25 bp, Artificial
  probe
  misc_feature (1)..(25): SEQ ID NO: 2843; WAN024CNJ_at; Start 43; Stop 67
gatgcgtcaacctttttcaatcgcg

SEQ ID NO: 125666 - DNA, 25 bp, Artificial
  probe
  misc_feature (1)..(25): SEQ ID NO: 2843; WAN024CNJ_at; Start 65; Stop 89
gcgacagcttgtccaattcattgtc

SEQ ID NO: 125667 - DNA, 25 bp, Artificial
  probe
  misc_feature (1)..(25): SEQ ID NO: 2843; WAN024CNJ_at; Start 60; Stop 84
caatcgcgacagcttgtccaattca

SEQ ID NO: 125668 - DNA, 25 bp, Artificial
  probe
  misc_feature (1)..(25): SEQ ID NO: 2843; WAN024CNJ_at; Start 45; Stop 69
tgcgtcaacctttttcaatcgcgac

SEQ ID NO: 125669 - DNA, 25 bp, Artificial
  probe
  misc_feature (1)..(25): SEQ ID NO: 2653; WAN024CNK_at; Start 7; Stop 31
aaggtctgttctaggttcaggaaga

SEQ ID NO: 125670 - DNA, 25 bp, Artificial
  probe
  misc_feature (1)..(25): SEQ ID NO: 2653; WAN024CNK_at; Start 64; Stop 88
gaagtcttttgcttcataccaaaca

SEQ ID NO: 125671 - DNA, 25 bp, Artificial
  probe
  misc_feature (1)..(25): SEQ ID NO: 2653; WAN024CNK_at; Start 56; Stop 80
tcttcagcgaagtcttttgcttcat

SEQ ID NO: 125672 - DNA, 25 bp, Artificial
  probe
  misc_feature (1)..(25): SEQ ID NO: 2653; WAN024CNK_at; Start 9; Stop 33
ggtctgttctaggttcaggaagaac

SEQ ID NO: 125673 - DNA, 25 bp, Artificial
  probe
  misc_feature (1)..(25): SEQ ID NO: 2653; WAN024CNK_at; Start 78; Stop 102
cataccaaacattaatcgtagatag

SEQ ID NO: 125674 - DNA, 25 bp, Artificial
  probe
  misc_feature (1)..(25): SEQ ID NO: 2653; WAN024CNK_at; Start 74; Stop 98
gcttcataccaaacattaatcgtag

SEQ ID NO: 125675 - DNA, 25 bp, Artificial
  probe
  misc_feature (1)..(25): SEQ ID NO: 2653; WAN024CNK_at; Start 1; Stop 25
atggtcaaggtctgttctaggttca

SEQ ID NO: 125676 - DNA, 25 bp, Artificial
  probe
  misc_feature (1)..(25): SEQ ID NO: 2653; WAN024CNK_at; Start 37; Stop 61
cgggaagtgaatgttattttcttca

SEQ ID NO: 125677 - DNA, 25 bp, Artificial
  probe
  misc_feature (1)..(25): SEQ ID NO: 2653; WAN024CNK_at; Start 54; Stop 78
tttcttcagcgaagtcttttgcttc

SEQ ID NO: 125678 - DNA, 25 bp, Artificial
  probe
  misc_feature (1)..(25): SEQ ID NO: 2653; WAN024CNK_at; Start 52; Stop 76
attttcttcagcgaagtcttttgct

SEQ ID NO: 125679 - DNA, 25 bp, Artificial
  probe
  misc_feature (1)..(25): SEQ ID NO: 2653; WAN024CNK_at; Start 67; Stop 91
gtcttttgcttcataccaaacatta

SEQ ID NO: 125680 - DNA, 25 bp, Artificial
  probe
  misc_feature (1)..(25): SEQ ID NO: 2653; WAN024CNK_at; Start 48; Stop 72
tgttattttcttcagcgaagtcttt

SEQ ID NO: 125681 - DNA, 25 bp, Artificial
  probe
  misc_feature (1)..(25): SEQ ID NO: 2653; WAN024CNK_at; Start 73; Stop 97
tgcttcataccaaacattaatcgta

SEQ ID NO: 125682 - DNA, 25 bp, Artificial
  probe
  misc_feature (1)..(25): SEQ ID NO: 2653; WAN024CNK_at; Start 6; Stop 30
caaggtctgttctaggttcaggaag

SEQ ID NO: 125683 - DNA, 25 bp, Artificial
  probe
  misc_feature (1)..(25): SEQ ID NO: 2653; WAN024CNK_at; Start 13; Stop 37
tgttctaggttcaggaagaacaaac

SEQ ID NO: 125684 - DNA, 25 bp, Artificial
  probe
  misc_feature (1)..(25): SEQ ID NO: 2653; WAN024CNK_at; Start 45; Stop 69
gaatgttattttcttcagcgaagtc

SEQ ID NO: 125685 - DNA, 25 bp, Artificial
  probe
  misc_feature (1)..(25): SEQ ID NO: 2653; WAN024CNK_at; Start 5; Stop 29
tcaaggtctgttctaggttcaggaa

SEQ ID NO: 125686 - DNA, 25 bp, Artificial
  probe
  misc_feature (1)..(25): SEQ ID NO: 2653; WAN024CNK_at; Start 60; Stop 84
cagcgaagtcttttgcttcatacca

SEQ ID NO: 125687 - DNA, 25 bp, Artificial
  probe
  misc_feature (1)..(25): SEQ ID NO: 2653; WAN024CNK_at; Start 41; Stop 65
aagtgaatgttattttcttcagcga

SEQ ID NO: 125688 - DNA, 25 bp, Artificial
  probe
  misc_feature (1)..(25): SEQ ID NO: 2653; WAN024CNK_at; Start 11; Stop 35
tctgttctaggttcaggaagaacaa

SEQ ID NO: 125689 - DNA, 25 bp, Artificial
  probe
  misc_feature (1)..(25): SEQ ID NO: 2653; WAN024CNK_at; Start 29; Stop 53
agaacaaacgggaagtgaatgttat

SEQ ID NO: 125690 - DNA, 25 bp, Artificial
  probe
  misc_feature (1)..(25): SEQ ID NO: 2653; WAN024CNK_at; Start 4; Stop 28
gtcaaggtctgttctaggttcagga

SEQ ID NO: 125691 - DNA, 25 bp, Artificial
  probe
  misc_feature (1)..(25): SEQ ID NO: 2653; WAN024CNK_at; Start 62; Stop 86
gcgaagtcttttgcttcataccaaa

SEQ ID NO: 125692 - DNA, 25 bp, Artificial
  probe
  misc_feature (1)..(25): SEQ ID NO: 2653; WAN024CNK_at; Start 71; Stop 95
tttgcttcataccaaacattaatcg

SEQ ID NO: 125693 - DNA, 25 bp, Artificial
  probe
  misc_feature (1)..(25): SEQ ID NO: 2653; WAN024CNK_at; Start 61; Stop 85
agcgaagtcttttgcttcataccaa

SEQ ID NO: 125694 - DNA, 25 bp, Artificial
  probe
  misc_feature (1)..(25): SEQ ID NO: 2653; WAN024CNK_at; Start 39; Stop 63
ggaagtgaatgttattttcttcagc

SEQ ID NO: 125695 - DNA, 25 bp, Artificial
  probe
  misc_feature (1)..(25): SEQ ID NO: 2653; WAN024CNK_at; Start 59; Stop 83
tcagcgaagtcttttgcttcatacc

SEQ ID NO: 125696 - DNA, 25 bp, Artificial
  probe
  misc_feature (1)..(25): SEQ ID NO: 2653; WAN024CNK_at; Start 46; Stop 70
aatgttattttcttcagcgaagtct

SEQ ID NO: 125697 - DNA, 25 bp, Artificial
  probe
  misc_feature (1)..(25): SEQ ID NO: 2653; WAN024CNK_at; Start 3; Stop 27
ggtcaaggtctgttctaggttcagg

SEQ ID NO: 125698 - DNA, 25 bp, Artificial
  probe
  misc_feature (1)..(25): SEQ ID NO: 2653; WAN024CNK_at; Start 24; Stop 48
caggaagaacaaacgggaagtgaat

SEQ ID NO: 125699 - DNA, 25 bp, Artificial
  probe
  misc_feature (1)..(25): SEQ ID NO: 2653; WAN024CNK_at; Start 2; Stop 26
tggtcaaggtctgttctaggttcag

SEQ ID NO: 125700 - DNA, 25 bp, Artificial
  probe
  misc_feature (1)..(25): SEQ ID NO: 2653; WAN024CNK_at; Start 23; Stop 47
tcaggaagaacaaacgggaagtgaa

SEQ ID NO: 125701 - DNA, 25 bp, Artificial
  probe
  misc_feature (1)..(25): SEQ ID NO: 2653; WAN024CNK_at; Start 8; Stop 32
aggtctgttctaggttcaggaagaa

SEQ ID NO: 125702 - DNA, 25 bp, Artificial
  probe
  misc_feature (1)..(25): SEQ ID NO: 2653; WAN024CNK_at; Start 22; Stop 46
ttcaggaagaacaaacgggaagtga

SEQ ID NO: 125703 - DNA, 25 bp, Artificial
  probe
  misc_feature (1)..(25): SEQ ID NO: 1999; WAN024CNL_at; Start 76; Stop 100
gacaatcaaatcctcaccaggaagt

SEQ ID NO: 125704 - DNA, 25 bp, Artificial
  probe
  misc_feature (1)..(25): SEQ ID NO: 1999; WAN024CNL_at; Start 75; Stop 99
tgacaatcaaatcctcaccaggaag

SEQ ID NO: 125705 - DNA, 25 bp, Artificial
  probe
  misc_feature (1)..(25): SEQ ID NO: 1999; WAN024CNL_at; Start 73; Stop 97
tatgacaatcaaatcctcaccagga

SEQ ID NO: 125706 - DNA, 25 bp, Artificial
  probe
  misc_feature (1)..(25): SEQ ID NO: 1999; WAN024CNL_at; Start 30; Stop 54
ttttatcaatagtccacgacttacc

SEQ ID NO: 125707 - DNA, 25 bp, Artificial
  probe
  misc_feature (1)..(25): SEQ ID NO: 1999; WAN024CNL_at; Start 33; Stop 57
tatcaatagtccacgacttaccttg

SEQ ID NO: 125708 - DNA, 25 bp, Artificial
  probe
  misc_feature (1)..(25): SEQ ID NO: 1999; WAN024CNL_at; Start 54; Stop 78
cttgtccaggtcgagccattatgac

SEQ ID NO: 125709 - DNA, 25 bp, Artificial
  probe
  misc_feature (1)..(25): SEQ ID NO: 1999; WAN024CNL_at; Start 44; Stop 68
cacgacttaccttgtccaggtcgag

SEQ ID NO: 125710 - DNA, 25 bp, Artificial
  probe
  misc_feature (1)..(25): SEQ ID NO: 1999; WAN024CNL_at; Start 7; Stop 31
gttcttccaagcagttgcaagcatt

SEQ ID NO: 125711 - DNA, 25 bp, Artificial
  probe
  misc_feature (1)..(25): SEQ ID NO: 1999; WAN024CNL_at; Start 56; Stop 80
tgtccaggtcgagccattatgacaa

SEQ ID NO: 125712 - DNA, 25 bp, Artificial
  probe
  misc_feature (1)..(25): SEQ ID NO: 1999; WAN024CNL_at; Start 66; Stop 90
gagccattatgacaatcaaatcctc

SEQ ID NO: 125713 - DNA, 25 bp, Artificial
  probe
  misc_feature (1)..(25): SEQ ID NO: 1999; WAN024CNL_at; Start 72; Stop 96
ttatgacaatcaaatcctcaccagg

SEQ ID NO: 125714 - DNA, 25 bp, Artificial
  probe
  misc_feature (1)..(25): SEQ ID NO: 1999; WAN024CNL_at; Start 17; Stop 41
gcagttgcaagcattttatcaatag

SEQ ID NO: 125715 - DNA, 25 bp, Artificial
  probe
  misc_feature (1)..(25): SEQ ID NO: 1999; WAN024CNL_at; Start 12; Stop 36
tccaagcagttgcaagcattttatc

SEQ ID NO: 125716 - DNA, 25 bp, Artificial
  probe
  misc_feature (1)..(25): SEQ ID NO: 1999; WAN024CNL_at; Start 1; Stop 25
atgcccgttcttccaagcagttgca

SEQ ID NO: 125717 - DNA, 25 bp, Artificial
  probe
  misc_feature (1)..(25): SEQ ID NO: 1999; WAN024CNL_at; Start 49; Stop 73
cttaccttgtccaggtcgagccatt

SEQ ID NO: 125718 - DNA, 25 bp, Artificial
  probe
  misc_feature (1)..(25): SEQ ID NO: 1999; WAN024CNL_at; Start 68; Stop 92
gccattatgacaatcaaatcctcac

SEQ ID NO: 125719 - DNA, 25 bp, Artificial
  probe
  misc_feature (1)..(25): SEQ ID NO: 1999; WAN024CNL_at; Start 27; Stop 51
gcattttatcaatagtccacgactt

SEQ ID NO: 125720 - DNA, 25 bp, Artificial
  probe
  misc_feature (1)..(25): SEQ ID NO: 1999; WAN024CNL_at; Start 14; Stop 38
caagcagttgcaagcattttatcaa

SEQ ID NO: 125721 - DNA, 25 bp, Artificial
  probe
  misc_feature (1)..(25): SEQ ID NO: 1999; WAN024CNL_at; Start 5; Stop 29
ccgttcttccaagcagttgcaagca

SEQ ID NO: 125722 - DNA, 25 bp, Artificial
  probe
  misc_feature (1)..(25): SEQ ID NO: 1999; WAN024CNL_at; Start 42; Stop 66
tccacgacttaccttgtccaggtcg

SEQ ID NO: 125723 - DNA, 25 bp, Artificial
  probe
  misc_feature (1)..(25): SEQ ID NO: 1999; WAN024CNL_at; Start 40; Stop 64
agtccacgacttaccttgtccaggt

SEQ ID NO: 125724 - DNA, 25 bp, Artificial
  probe
  misc_feature (1)..(25): SEQ ID NO: 1999; WAN024CNL_at; Start 3; Stop 27
gcccgttcttccaagcagttgcaag

SEQ ID NO: 125725 - DNA, 25 bp, Artificial
  probe
  misc_feature (1)..(25): SEQ ID NO: 1999; WAN024CNL_at; Start 78; Stop 102
caatcaaatcctcaccaggaagtaa

SEQ ID NO: 125726 - DNA, 25 bp, Artificial
  probe
  misc_feature (1)..(25): SEQ ID NO: 1999; WAN024CNL_at; Start 51; Stop 75
taccttgtccaggtcgagccattat

SEQ ID NO: 125727 - DNA, 25 bp, Artificial
  probe
  misc_feature (1)..(25): SEQ ID NO: 1999; WAN024CNL_at; Start 10; Stop 34
cttccaagcagttgcaagcatttta

SEQ ID NO: 125728 - DNA, 25 bp, Artificial
  probe
  misc_feature (1)..(25): SEQ ID NO: 1999; WAN024CNL_at; Start 53; Stop 77
ccttgtccaggtcgagccattatga

SEQ ID NO: 125729 - DNA, 25 bp, Artificial
  probe
  misc_feature (1)..(25): SEQ ID NO: 1999; WAN024CNL_at; Start 25; Stop 49
aagcattttatcaatagtccacgac

SEQ ID NO: 125730 - DNA, 25 bp, Artificial
  probe
  misc_feature (1)..(25): SEQ ID NO: 1999; WAN024CNL_at; Start 60; Stop 84
caggtcgagccattatgacaatcaa

SEQ ID NO: 125731 - DNA, 25 bp, Artificial
  probe
  misc_feature (1)..(25): SEQ ID NO: 1999; WAN024CNL_at; Start 64; Stop 88
tcgagccattatgacaatcaaatcc

SEQ ID NO: 125732 - DNA, 25 bp, Artificial
  probe
  misc_feature (1)..(25): SEQ ID NO: 1999; WAN024CNL_at; Start 23; Stop 47
gcaagcattttatcaatagtccacg

SEQ ID NO: 125733 - DNA, 25 bp, Artificial
  probe
  misc_feature (1)..(25): SEQ ID NO: 1999; WAN024CNL_at; Start 39; Stop 63
tagtccacgacttaccttgtccagg

SEQ ID NO: 125734 - DNA, 25 bp, Artificial
  probe
  misc_feature (1)..(25): SEQ ID NO: 1999; WAN024CNL_at; Start 58; Stop 82
tccaggtcgagccattatgacaatc

SEQ ID NO: 125735 - DNA, 25 bp, Artificial
  probe
  misc_feature (1)..(25): SEQ ID NO: 1999; WAN024CNL_at; Start 47; Stop 71
gacttaccttgtccaggtcgagcca

SEQ ID NO: 125736 - DNA, 25 bp, Artificial
  probe
  misc_feature (1)..(25): SEQ ID NO: 1999; WAN024CNL_at; Start 62; Stop 86
ggtcgagccattatgacaatcaaat

SEQ ID NO: 125737 - DNA, 25 bp, Artificial
  probe
  misc_feature (1)..(25): SEQ ID NO: 3899; WAN024CNM_at; Start 70; Stop 94
ttatctaaaatagtcgacgttgacg

SEQ ID NO: 125738 - DNA, 25 bp, Artificial
  probe
  misc_feature (1)..(25): SEQ ID NO: 3899; WAN024CNM_at; Start 3; Stop 27
gaataaagtcaagcgtttttgtata

SEQ ID NO: 125739 - DNA, 25 bp, Artificial
  probe
  misc_feature (1)..(25): SEQ ID NO: 3899; WAN024CNM_at; Start 63; Stop 87
aaagctcttatctaaaatagtcgac

SEQ ID NO: 125740 - DNA, 25 bp, Artificial
  probe
  misc_feature (1)..(25): SEQ ID NO: 3899; WAN024CNM_at; Start 56; Stop 80
agagcgaaaagctcttatctaaaat

SEQ ID NO: 125741 - DNA, 25 bp, Artificial
  probe
  misc_feature (1)..(25): SEQ ID NO: 3899; WAN024CNM_at; Start 1; Stop 25
gtgaataaagtcaagcgtttttgta

SEQ ID NO: 125742 - DNA, 25 bp, Artificial
  probe
  misc_feature (1)..(25): SEQ ID NO: 3899; WAN024CNM_at; Start 71; Stop 95
tatctaaaatagtcgacgttgacga

SEQ ID NO: 125743 - DNA, 25 bp, Artificial
  probe
  misc_feature (1)..(25): SEQ ID NO: 3899; WAN024CNM_at; Start 60; Stop 84
cgaaaagctcttatctaaaatagtc

SEQ ID NO: 125744 - DNA, 25 bp, Artificial
  probe
  misc_feature (1)..(25): SEQ ID NO: 3899; WAN024CNM_at; Start 53; Stop 77
ataagagcgaaaagctcttatctaa

SEQ ID NO: 125745 - DNA, 25 bp, Artificial
  probe
  misc_feature (1)..(25): SEQ ID NO: 3899; WAN024CNM_at; Start 61; Stop 85
gaaaagctcttatctaaaatagtcg

SEQ ID NO: 125746 - DNA, 25 bp, Artificial
  probe
  misc_feature (1)..(25): SEQ ID NO: 3899; WAN024CNM_at; Start 58; Stop 82
agcgaaaagctcttatctaaaatag

SEQ ID NO: 125747 - DNA, 25 bp, Artificial
  probe
  misc_feature (1)..(25): SEQ ID NO: 3899; WAN024CNM_at; Start 69; Stop 93
cttatctaaaatagtcgacgttgac

SEQ ID NO: 125748 - DNA, 25 bp, Artificial
  probe
  misc_feature (1)..(25): SEQ ID NO: 3899; WAN024CNM_at; Start 64; Stop 88
aagctcttatctaaaatagtcgacg

SEQ ID NO: 125749 - DNA, 25 bp, Artificial
  probe
  misc_feature (1)..(25): SEQ ID NO: 3899; WAN024CNM_at; Start 50; Stop 74
aaaataagagcgaaaagctcttatc

SEQ ID NO: 125750 - DNA, 25 bp, Artificial
  probe
  misc_feature (1)..(25): SEQ ID NO: 3899; WAN024CNM_at; Start 54; Stop 78
taagagcgaaaagctcttatctaaa

SEQ ID NO: 125751 - DNA, 25 bp, Artificial
  probe
  misc_feature (1)..(25): SEQ ID NO: 3899; WAN024CNM_at; Start 65; Stop 89
agctcttatctaaaatagtcgacgt

SEQ ID NO: 125752 - DNA, 25 bp, Artificial
  probe
  misc_feature (1)..(25): SEQ ID NO: 3899; WAN024CNM_at; Start 73; Stop 97
tctaaaatagtcgacgttgacgatt

SEQ ID NO: 125753 - DNA, 25 bp, Artificial
  probe
  misc_feature (1)..(25): SEQ ID NO: 3899; WAN024CNM_at; Start 59; Stop 83
gcgaaaagctcttatctaaaatagt

SEQ ID NO: 125754 - DNA, 25 bp, Artificial
  probe
  misc_feature (1)..(25): SEQ ID NO: 3899; WAN024CNM_at; Start 55; Stop 79
aagagcgaaaagctcttatctaaaa

SEQ ID NO: 125755 - DNA, 25 bp, Artificial
  probe
  misc_feature (1)..(25): SEQ ID NO: 3899; WAN024CNM_at; Start 62; Stop 86
aaaagctcttatctaaaatagtcga

SEQ ID NO: 125756 - DNA, 25 bp, Artificial
  probe
  misc_feature (1)..(25): SEQ ID NO: 3899; WAN024CNM_at; Start 66; Stop 90
gctcttatctaaaatagtcgacgtt

SEQ ID NO: 125757 - DNA, 25 bp, Artificial
  probe
  misc_feature (1)..(25): SEQ ID NO: 3899; WAN024CNM_at; Start 2; Stop 26
tgaataaagtcaagcgtttttgtat

SEQ ID NO: 125758 - DNA, 25 bp, Artificial
  probe
  misc_feature (1)..(25): SEQ ID NO: 3899; WAN024CNM_at; Start 52; Stop 76
aataagagcgaaaagctcttatcta

SEQ ID NO: 125759 - DNA, 25 bp, Artificial
  probe
  misc_feature (1)..(25): SEQ ID NO: 3899; WAN024CNM_at; Start 67; Stop 91
ctcttatctaaaatagtcgacgttg

SEQ ID NO: 125760 - DNA, 25 bp, Artificial
  probe
  misc_feature (1)..(25): SEQ ID NO: 3899; WAN024CNM_at; Start 72; Stop 96
atctaaaatagtcgacgttgacgat

SEQ ID NO: 125761 - DNA, 25 bp, Artificial
  probe
  misc_feature (1)..(25): SEQ ID NO: 3899; WAN024CNM_at; Start 57; Stop 81
gagcgaaaagctcttatctaaaata

SEQ ID NO: 125762 - DNA, 25 bp, Artificial
  probe
  misc_feature (1)..(25): SEQ ID NO: 3899; WAN024CNM_at; Start 49; Stop 73
aaaaataagagcgaaaagctcttat

SEQ ID NO: 125763 - DNA, 25 bp, Artificial
  probe
  misc_feature (1)..(25): SEQ ID NO: 3899; WAN024CNM_at; Start 68; Stop 92
tcttatctaaaatagtcgacgttga

SEQ ID NO: 125764 - DNA, 25 bp, Artificial
  probe
  misc_feature (1)..(25): SEQ ID NO: 3899; WAN024CNM_at; Start 51; Stop 75
aaataagagcgaaaagctcttatct

SEQ ID NO: 125765 - DNA, 25 bp, Artificial
  probe
  misc_feature (1)..(25): SEQ ID NO: 3899; WAN024CNM_at; Start 74; Stop 98
ctaaaatagtcgacgttgacgattt

SEQ ID NO: 125766 - DNA, 25 bp, Artificial
  probe
  misc_feature (1)..(25): SEQ ID NO: 3902; WAN024CNN_at; Start 11; Stop 35
caaggcggtctaatacgctcaggat

SEQ ID NO: 125767 - DNA, 25 bp, Artificial
  probe
  misc_feature (1)..(25): SEQ ID NO: 3902; WAN024CNN_at; Start 78; Stop 102
gtcaagctgtgaaacgtcttcataa

SEQ ID NO: 125768 - DNA, 25 bp, Artificial
  probe
  misc_feature (1)..(25): SEQ ID NO: 3902; WAN024CNN_at; Start 39; Stop 63
tgctgtagggatagccgcatcatct

SEQ ID NO: 125769 - DNA, 25 bp, Artificial
  probe
  misc_feature (1)..(25): SEQ ID NO: 3902; WAN024CNN_at; Start 33; Stop 57
gatttctgctgtagggatagccgca

SEQ ID NO: 125770 - DNA, 25 bp, Artificial
  probe
  misc_feature (1)..(25): SEQ ID NO: 3902; WAN024CNN_at; Start 40; Stop 64
gctgtagggatagccgcatcatctt

SEQ ID NO: 125771 - DNA, 25 bp, Artificial
  probe
  misc_feature (1)..(25): SEQ ID NO: 3902; WAN024CNN_at; Start 36; Stop 60
ttctgctgtagggatagccgcatca

SEQ ID NO: 125772 - DNA, 25 bp, Artificial
  probe
  misc_feature (1)..(25): SEQ ID NO: 3902; WAN024CNN_at; Start 26; Stop 50
cgctcaggatttctgctgtagggat

SEQ ID NO: 125773 - DNA, 25 bp, Artificial
  probe
  misc_feature (1)..(25): SEQ ID NO: 3902; WAN024CNN_at; Start 75; Stop 99
tgagtcaagctgtgaaacgtcttca

SEQ ID NO: 125774 - DNA, 25 bp, Artificial
  probe
  misc_feature (1)..(25): SEQ ID NO: 3902; WAN024CNN_at; Start 29; Stop 53
tcaggatttctgctgtagggatagc

SEQ ID NO: 125775 - DNA, 25 bp, Artificial
  probe
  misc_feature (1)..(25): SEQ ID NO: 3902; WAN024CNN_at; Start 34; Stop 58
atttctgctgtagggatagccgcat

SEQ ID NO: 125776 - DNA, 25 bp, Artificial
  probe
  misc_feature (1)..(25): SEQ ID NO: 3902; WAN024CNN_at; Start 46; Stop 70
gggatagccgcatcatcttcaaact

SEQ ID NO: 125777 - DNA, 25 bp, Artificial
  probe
  misc_feature (1)..(25): SEQ ID NO: 3902; WAN024CNN_at; Start 64; Stop 88
tcaaactcaattgagtcaagctgtg

SEQ ID NO: 125778 - DNA, 25 bp, Artificial
  probe
  misc_feature (1)..(25): SEQ ID NO: 3902; WAN024CNN_at; Start 59; Stop 83
catcttcaaactcaattgagtcaag

SEQ ID NO: 125779 - DNA, 25 bp, Artificial
  probe
  misc_feature (1)..(25): SEQ ID NO: 3902; WAN024CNN_at; Start 2; Stop 26
tgaatagtacaaggcggtctaatac

SEQ ID NO: 125780 - DNA, 25 bp, Artificial
  probe
  misc_feature (1)..(25): SEQ ID NO: 3902; WAN024CNN_at; Start 7; Stop 31
agtacaaggcggtctaatacgctca

SEQ ID NO: 125781 - DNA, 25 bp, Artificial
  probe
  misc_feature (1)..(25): SEQ ID NO: 3902; WAN024CNN_at; Start 48; Stop 72
gatagccgcatcatcttcaaactca

SEQ ID NO: 125782 - DNA, 25 bp, Artificial
  probe
  misc_feature (1)..(25): SEQ ID NO: 3902; WAN024CNN_at; Start 24; Stop 48
tacgctcaggatttctgctgtaggg

SEQ ID NO: 125783 - DNA, 25 bp, Artificial
  probe
  misc_feature (1)..(25): SEQ ID NO: 3902; WAN024CNN_at; Start 44; Stop 68
tagggatagccgcatcatcttcaaa

SEQ ID NO: 125784 - DNA, 25 bp, Artificial
  probe
  misc_feature (1)..(25): SEQ ID NO: 3902; WAN024CNN_at; Start 6; Stop 30
tagtacaaggcggtctaatacgctc

SEQ ID NO: 125785 - DNA, 25 bp, Artificial
  probe
  misc_feature (1)..(25): SEQ ID NO: 3902; WAN024CNN_at; Start 19; Stop 43
tctaatacgctcaggatttctgctg

SEQ ID NO: 125786 - DNA, 25 bp, Artificial
  probe
  misc_feature (1)..(25): SEQ ID NO: 3902; WAN024CNN_at; Start 52; Stop 76
gccgcatcatcttcaaactcaattg

SEQ ID NO: 125787 - DNA, 25 bp, Artificial
  probe
  misc_feature (1)..(25): SEQ ID NO: 3902; WAN024CNN_at; Start 74; Stop 98
ttgagtcaagctgtgaaacgtcttc

SEQ ID NO: 125788 - DNA, 25 bp, Artificial
  probe
  misc_feature (1)..(25): SEQ ID NO: 3902; WAN024CNN_at; Start 37; Stop 61
tctgctgtagggatagccgcatcat

SEQ ID NO: 125789 - DNA, 25 bp, Artificial
  probe
  misc_feature (1)..(25): SEQ ID NO: 3902; WAN024CNN_at; Start 55; Stop 79
gcatcatcttcaaactcaattgagt

SEQ ID NO: 125790 - DNA, 25 bp, Artificial
  probe
  misc_feature (1)..(25): SEQ ID NO: 3902; WAN024CNN_at; Start 70; Stop 94
tcaattgagtcaagctgtgaaacgt

SEQ ID NO: 125791 - DNA, 25 bp, Artificial
  probe
  misc_feature (1)..(25): SEQ ID NO: 3902; WAN024CNN_at; Start 17; Stop 41
ggtctaatacgctcaggatttctgc

SEQ ID NO: 125792 - DNA, 25 bp, Artificial
  probe
  misc_feature (1)..(25): SEQ ID NO: 3902; WAN024CNN_at; Start 21; Stop 45
taatacgctcaggatttctgctgta

SEQ ID NO: 125793 - DNA, 25 bp, Artificial
  probe
  misc_feature (1)..(25): SEQ ID NO: 3902; WAN024CNN_at; Start 76; Stop 100
gagtcaagctgtgaaacgtcttcat

SEQ ID NO: 125794 - DNA, 25 bp, Artificial
  probe
  misc_feature (1)..(25): SEQ ID NO: 3902; WAN024CNN_at; Start 9; Stop 33
tacaaggcggtctaatacgctcagg

SEQ ID NO: 125795 - DNA, 25 bp, Artificial
  probe
  misc_feature (1)..(25): SEQ ID NO: 3902; WAN024CNN_at; Start 71; Stop 95
caattgagtcaagctgtgaaacgtc

SEQ ID NO: 125796 - DNA, 25 bp, Artificial
  probe
  misc_feature (1)..(25): SEQ ID NO: 3902; WAN024CNN_at; Start 30; Stop 54
caggatttctgctgtagggatagcc

SEQ ID NO: 125797 - DNA, 25 bp, Artificial
  probe
  misc_feature (1)..(25): SEQ ID NO: 3902; WAN024CNN_at; Start 67; Stop 91
aactcaattgagtcaagctgtgaaa

SEQ ID NO: 125798 - DNA, 25 bp, Artificial
  probe
  misc_feature (1)..(25): SEQ ID NO: 3902; WAN024CNN_at; Start 50; Stop 74
tagccgcatcatcttcaaactcaat

SEQ ID NO: 125799 - DNA, 25 bp, Artificial
  probe
  misc_feature (1)..(25): SEQ ID NO: 3902; WAN024CNN_at; Start 14; Stop 38
ggcggtctaatacgctcaggatttc

SEQ ID NO: 125800 - DNA, 25 bp, Artificial
  probe
  misc_feature (1)..(25): SEQ ID NO: 1270; WAN024CNO_at; Start 68; Stop 92
tccaaacgaaaagatggttgaatct

SEQ ID NO: 125801 - DNA, 25 bp, Artificial
  probe
  misc_feature (1)..(25): SEQ ID NO: 1270; WAN024CNO_at; Start 25; Stop 49
aaacaggacagcctgacttcgcgaa

SEQ ID NO: 125802 - DNA, 25 bp, Artificial
  probe
  misc_feature (1)..(25): SEQ ID NO: 1270; WAN024CNO_at; Start 63; Stop 87
tacattccaaacgaaaagatggttg

SEQ ID NO: 125803 - DNA, 25 bp, Artificial
  probe
  misc_feature (1)..(25): SEQ ID NO: 1270; WAN024CNO_at; Start 21; Stop 45
cctaaaacaggacagcctgacttcg

SEQ ID NO: 125804 - DNA, 25 bp, Artificial
  probe
  misc_feature (1)..(25): SEQ ID NO: 1270; WAN024CNO_at; Start 18; Stop 42
tgccctaaaacaggacagcctgact

SEQ ID NO: 125805 - DNA, 25 bp, Artificial
  probe
  misc_feature (1)..(25): SEQ ID NO: 1270; WAN024CNO_at; Start 28; Stop 52
caggacagcctgacttcgcgaatgt

SEQ ID NO: 125806 - DNA, 25 bp, Artificial
  probe
  misc_feature (1)..(25): SEQ ID NO: 1270; WAN024CNO_at; Start 23; Stop 47
taaaacaggacagcctgacttcgcg

SEQ ID NO: 125807 - DNA, 25 bp, Artificial
  probe
  misc_feature (1)..(25): SEQ ID NO: 1270; WAN024CNO_at; Start 70; Stop 94
caaacgaaaagatggttgaatctaa

SEQ ID NO: 125808 - DNA, 25 bp, Artificial
  probe
  misc_feature (1)..(25): SEQ ID NO: 1270; WAN024CNO_at; Start 65; Stop 89
cattccaaacgaaaagatggttgaa

SEQ ID NO: 125809 - DNA, 25 bp, Artificial
  probe
  misc_feature (1)..(25): SEQ ID NO: 1270; WAN024CNO_at; Start 1; Stop 25
atgaattcacttccctttgccctaa

SEQ ID NO: 125810 - DNA, 25 bp, Artificial
  probe
  misc_feature (1)..(25): SEQ ID NO: 1270; WAN024CNO_at; Start 17; Stop 41
ttgccctaaaacaggacagcctgac

SEQ ID NO: 125811 - DNA, 25 bp, Artificial
  probe
  misc_feature (1)..(25): SEQ ID NO: 1270; WAN024CNO_at; Start 29; Stop 53
aggacagcctgacttcgcgaatgtt

SEQ ID NO: 125812 - DNA, 25 bp, Artificial
  probe
  misc_feature (1)..(25): SEQ ID NO: 1270; WAN024CNO_at; Start 19; Stop 43
gccctaaaacaggacagcctgactt

SEQ ID NO: 125813 - DNA, 25 bp, Artificial
  probe
  misc_feature (1)..(25): SEQ ID NO: 1270; WAN024CNO_at; Start 59; Stop 83
tagttacattccaaacgaaaagatg

SEQ ID NO: 125814 - DNA, 25 bp, Artificial
  probe
  misc_feature (1)..(25): SEQ ID NO: 1270; WAN024CNO_at; Start 41; Stop 65
cttcgcgaatgttttcattagttac

SEQ ID NO: 125815 - DNA, 25 bp, Artificial
  probe
  misc_feature (1)..(25): SEQ ID NO: 1270; WAN024CNO_at; Start 38; Stop 62
tgacttcgcgaatgttttcattagt

SEQ ID NO: 125816 - DNA, 25 bp, Artificial
  probe
  misc_feature (1)..(25): SEQ ID NO: 1270; WAN024CNO_at; Start 56; Stop 80
cattagttacattccaaacgaaaag

SEQ ID NO: 125817 - DNA, 25 bp, Artificial
  probe
  misc_feature (1)..(25): SEQ ID NO: 1270; WAN024CNO_at; Start 31; Stop 55
gacagcctgacttcgcgaatgtttt

SEQ ID NO: 125818 - DNA, 25 bp, Artificial
  probe
  misc_feature (1)..(25): SEQ ID NO: 1270; WAN024CNO_at; Start 16; Stop 40
tttgccctaaaacaggacagcctga

SEQ ID NO: 125819 - DNA, 25 bp, Artificial
  probe
  misc_feature (1)..(25): SEQ ID NO: 1270; WAN024CNO_at; Start 14; Stop 38
cctttgccctaaaacaggacagcct

SEQ ID NO: 125820 - DNA, 25 bp, Artificial
  probe
  misc_feature (1)..(25): SEQ ID NO: 1270; WAN024CNO_at; Start 15; Stop 39
ctttgccctaaaacaggacagcctg

SEQ ID NO: 125821 - DNA, 25 bp, Artificial
  probe
  misc_feature (1)..(25): SEQ ID NO: 1270; WAN024CNO_at; Start 30; Stop 54
ggacagcctgacttcgcgaatgttt

SEQ ID NO: 125822 - DNA, 25 bp, Artificial
  probe
  misc_feature (1)..(25): SEQ ID NO: 1270; WAN024CNO_at; Start 60; Stop 84
agttacattccaaacgaaaagatgg

SEQ ID NO: 125823 - DNA, 25 bp, Artificial
  probe
  misc_feature (1)..(25): SEQ ID NO: 1270; WAN024CNO_at; Start 74; Stop 98
cgaaaagatggttgaatctaaatca

SEQ ID NO: 125824 - DNA, 25 bp, Artificial
  probe
  misc_feature (1)..(25): SEQ ID NO: 1270; WAN024CNO_at; Start 36; Stop 60
cctgacttcgcgaatgttttcatta

SEQ ID NO: 125825 - DNA, 25 bp, Artificial
  probe
  misc_feature (1)..(25): SEQ ID NO: 1270; WAN024CNO_at; Start 78; Stop 102
aagatggttgaatctaaatcattga

SEQ ID NO: 125826 - DNA, 25 bp, Artificial
  probe
  misc_feature (1)..(25): SEQ ID NO: 1270; WAN024CNO_at; Start 52; Stop 76
ttttcattagttacattccaaacga

SEQ ID NO: 125827 - DNA, 25 bp, Artificial
  probe
  misc_feature (1)..(25): SEQ ID NO: 1270; WAN024CNO_at; Start 35; Stop 59
gcctgacttcgcgaatgttttcatt

SEQ ID NO: 125828 - DNA, 25 bp, Artificial
  probe
  misc_feature (1)..(25): SEQ ID NO: 1270; WAN024CNO_at; Start 67; Stop 91
ttccaaacgaaaagatggttgaatc

SEQ ID NO: 125829 - DNA, 25 bp, Artificial
  probe
  misc_feature (1)..(25): SEQ ID NO: 1270; WAN024CNO_at; Start 12; Stop 36
tccctttgccctaaaacaggacagc

SEQ ID NO: 125830 - DNA, 25 bp, Artificial
  probe
  misc_feature (1)..(25): SEQ ID NO: 1270; WAN024CNO_at; Start 27; Stop 51
acaggacagcctgacttcgcgaatg

SEQ ID NO: 125831 - DNA, 25 bp, Artificial
  probe
  misc_feature (1)..(25): SEQ ID NO: 1270; WAN024CNO_at; Start 26; Stop 50
aacaggacagcctgacttcgcgaat

SEQ ID NO: 125832 - DNA, 25 bp, Artificial
  probe
  misc_feature (1)..(25): SEQ ID NO: 1270; WAN024CNO_at; Start 43; Stop 67
tcgcgaatgttttcattagttacat

SEQ ID NO: 125833 - DNA, 25 bp, Artificial
  probe
  misc_feature (1)..(25): SEQ ID NO: 1270; WAN024CNO_at; Start 32; Stop 56
acagcctgacttcgcgaatgttttc

SEQ ID NO: 125834 - DNA, 25 bp, Artificial
  probe
  misc_feature (1)..(25): SEQ ID NO: 5600; WAN024CNP_at; Start 70; Stop 94
cctgctcaaagagtagatgtaaaag

SEQ ID NO: 125835 - DNA, 25 bp, Artificial
  probe
  misc_feature (1)..(25): SEQ ID NO: 5600; WAN024CNP_at; Start 53; Stop 77
aatcaactgttaaagcacctgctca

SEQ ID NO: 125836 - DNA, 25 bp, Artificial
  probe
  misc_feature (1)..(25): SEQ ID NO: 5600; WAN024CNP_at; Start 173; Stop 197
caatcaatgtagctggagatggtac

SEQ ID NO: 125837 - DNA, 25 bp, Artificial
  probe
  misc_feature (1)..(25): SEQ ID NO: 5600; WAN024CNP_at; Start 1; Stop 25
ttggtagcacaagatccaaaagcac

SEQ ID NO: 125838 - DNA, 25 bp, Artificial
  probe
  misc_feature (1)..(25): SEQ ID NO: 5600; WAN024CNP_at; Start 49; Stop 73
gaaaaatcaactgttaaagcacctg

SEQ ID NO: 125839 - DNA, 25 bp, Artificial
  probe
  misc_feature (1)..(25): SEQ ID NO: 5600; WAN024CNP_at; Start 123; Stop 147
agttaaggttgctattttacaagca

SEQ ID NO: 125840 - DNA, 25 bp, Artificial
  probe
  misc_feature (1)..(25): SEQ ID NO: 5600; WAN024CNP_at; Start 166; Stop 190
ggagcgacaatcaatgtagctggag

SEQ ID NO: 125841 - DNA, 25 bp, Artificial
  probe
  misc_feature (1)..(25): SEQ ID NO: 5600; WAN024CNP_at; Start 203; Stop 227
caatcacattcccagatggttcagt

SEQ ID NO: 125842 - DNA, 25 bp, Artificial
  probe
  misc_feature (1)..(25): SEQ ID NO: 5600; WAN024CNP_at; Start 199; Stop 223
gcaacaatcacattcccagatggtt

SEQ ID NO: 125843 - DNA, 25 bp, Artificial
  probe
  misc_feature (1)..(25): SEQ ID NO: 5600; WAN024CNP_at; Start 73; Stop 97
gctcaaagagtagatgtaaaagata

SEQ ID NO: 125844 - DNA, 25 bp, Artificial
  probe
  misc_feature (1)..(25): SEQ ID NO: 5600; WAN024CNP_at; Start 177; Stop 201
caatgtagctggagatggtacagca

SEQ ID NO: 125845 - DNA, 25 bp, Artificial
  probe
  misc_feature (1)..(25): SEQ ID NO: 5600; WAN024CNP_at; Start 210; Stop 234
attcccagatggttcagtagtgacg

SEQ ID NO: 125846 - DNA, 25 bp, Artificial
  probe
  misc_feature (1)..(25): SEQ ID NO: 5600; WAN024CNP_at; Start 10; Stop 34
caagatccaaaagcacaagatagca

SEQ ID NO: 125847 - DNA, 25 bp, Artificial
  probe
  misc_feature (1)..(25): SEQ ID NO: 5600; WAN024CNP_at; Start 63; Stop 87
taaagcacctgctcaaagagtagat

SEQ ID NO: 125848 - DNA, 25 bp, Artificial
  probe
  misc_feature (1)..(25): SEQ ID NO: 5600; WAN024CNP_at; Start 190; Stop 214
gatggtacagcaacaatcacattcc

SEQ ID NO: 125849 - DNA, 25 bp, Artificial
  probe
  misc_feature (1)..(25): SEQ ID NO: 5600; WAN024CNP_at; Start 214; Stop 238
ccagatggttcagtagtgacgattc

SEQ ID NO: 125850 - DNA, 25 bp, Artificial
  probe
  misc_feature (1)..(25): SEQ ID NO: 5600; WAN024CNP_at; Start 212; Stop 236
tcccagatggttcagtagtgacgat

SEQ ID NO: 125851 - DNA, 25 bp, Artificial
  probe
  misc_feature (1)..(25): SEQ ID NO: 5600; WAN024CNP_at; Start 216; Stop 240
agatggttcagtagtgacgattcta

SEQ ID NO: 125852 - DNA, 25 bp, Artificial
  probe
  misc_feature (1)..(25): SEQ ID NO: 5600; WAN024CNP_at; Start 186; Stop 210
tggagatggtacagcaacaatcaca

SEQ ID NO: 125853 - DNA, 25 bp, Artificial
  probe
  misc_feature (1)..(25): SEQ ID NO: 5600; WAN024CNP_at; Start 13; Stop 37
gatccaaaagcacaagatagcacta

SEQ ID NO: 125854 - DNA, 25 bp, Artificial
  probe
  misc_feature (1)..(25): SEQ ID NO: 5600; WAN024CNP_at; Start 67; Stop 91
gcacctgctcaaagagtagatgtaa

SEQ ID NO: 125855 - DNA, 25 bp, Artificial
  probe
  misc_feature (1)..(25): SEQ ID NO: 5600; WAN024CNP_at; Start 42; Stop 66
gactgctgaaaaatcaactgttaaa

SEQ ID NO: 125856 - DNA, 25 bp, Artificial
  probe
  misc_feature (1)..(25): SEQ ID NO: 5600; WAN024CNP_at; Start 16; Stop 40
ccaaaagcacaagatagcactaaac

SEQ ID NO: 125857 - DNA, 25 bp, Artificial
  probe
  misc_feature (1)..(25): SEQ ID NO: 5600; WAN024CNP_at; Start 60; Stop 84
tgttaaagcacctgctcaaagagta

SEQ ID NO: 125858 - DNA, 25 bp, Artificial
  probe
  misc_feature (1)..(25): SEQ ID NO: 5600; WAN024CNP_at; Start 4; Stop 28
gtagcacaagatccaaaagcacaag

SEQ ID NO: 125859 - DNA, 25 bp, Artificial
  probe
  misc_feature (1)..(25): SEQ ID NO: 5600; WAN024CNP_at; Start 140; Stop 164
tacaagcaaatggttcagcattaga

SEQ ID NO: 125860 - DNA, 25 bp, Artificial
  probe
  misc_feature (1)..(25): SEQ ID NO: 5600; WAN024CNP_at; Start 182; Stop 206
tagctggagatggtacagcaacaat

SEQ ID NO: 125861 - DNA, 25 bp, Artificial
  probe
  misc_feature (1)..(25): SEQ ID NO: 5600; WAN024CNP_at; Start 135; Stop 159
tattttacaagcaaatggttcagca

SEQ ID NO: 125862 - DNA, 25 bp, Artificial
  probe
  misc_feature (1)..(25): SEQ ID NO: 5600; WAN024CNP_at; Start 80; Stop 104
gagtagatgtaaaagatataactca

SEQ ID NO: 125863 - DNA, 25 bp, Artificial
  probe
  misc_feature (1)..(25): SEQ ID NO: 5600; WAN024CNP_at; Start 169; Stop 193
gcgacaatcaatgtagctggagatg

SEQ ID NO: 125864 - DNA, 25 bp, Artificial
  probe
  misc_feature (1)..(25): SEQ ID NO: 5600; WAN024CNP_at; Start 207; Stop 231
cacattcccagatggttcagtagtg

SEQ ID NO: 125865 - DNA, 25 bp, Artificial
  probe
  misc_feature (1)..(25): SEQ ID NO: 5600; WAN024CNP_at; Start 110; Stop 134
cagatgaagaaaaagttaaggttgc

SEQ ID NO: 125866 - DNA, 25 bp, Artificial
  probe
  misc_feature (1)..(25): SEQ ID NO: 5600; WAN024CNP_at; Start 193; Stop 217
ggtacagcaacaatcacattcccag

SEQ ID NO: 125867 - DNA, 25 bp, Artificial
  probe
  misc_feature (1)..(25): SEQ ID NO: 5600; WAN024CNP_at; Start 94; Stop 118
gatataactcatttaacagatgaag

SEQ ID NO: 125868 - DNA, 25 bp, Artificial
  probe
  misc_feature (1)..(25): SEQ ID NO: 1451; WAN024CNQ_at; Start 4; Stop 28
actcgactacgaagcataaagacaa

SEQ ID NO: 125869 - DNA, 25 bp, Artificial
  probe
  misc_feature (1)..(25): SEQ ID NO: 1451; WAN024CNQ_at; Start 64; Stop 88
gttctaatccagacgttaagactca

SEQ ID NO: 125870 - DNA, 25 bp, Artificial
  probe
  misc_feature (1)..(25): SEQ ID NO: 1451; WAN024CNQ_at; Start 30; Stop 54
tggatggaaagagtattcgaagtta

SEQ ID NO: 125871 - DNA, 25 bp, Artificial
  probe
  misc_feature (1)..(25): SEQ ID NO: 1451; WAN024CNQ_at; Start 69; Stop 93
aatccagacgttaagactcacgcat

SEQ ID NO: 125872 - DNA, 25 bp, Artificial
  probe
  misc_feature (1)..(25): SEQ ID NO: 1451; WAN024CNQ_at; Start 20; Stop 44
taaagacaagtggatggaaagagta

SEQ ID NO: 125873 - DNA, 25 bp, Artificial
  probe
  misc_feature (1)..(25): SEQ ID NO: 1451; WAN024CNQ_at; Start 11; Stop 35
tacgaagcataaagacaagtggatg

SEQ ID NO: 125874 - DNA, 25 bp, Artificial
  probe
  misc_feature (1)..(25): SEQ ID NO: 1451; WAN024CNQ_at; Start 75; Stop 99
gacgttaagactcacgcatttggga

SEQ ID NO: 125875 - DNA, 25 bp, Artificial
  probe
  misc_feature (1)..(25): SEQ ID NO: 1451; WAN024CNQ_at; Start 10; Stop 34
ctacgaagcataaagacaagtggat

SEQ ID NO: 125876 - DNA, 25 bp, Artificial
  probe
  misc_feature (1)..(25): SEQ ID NO: 1451; WAN024CNQ_at; Start 24; Stop 48
gacaagtggatggaaagagtattcg

SEQ ID NO: 125877 - DNA, 25 bp, Artificial
  probe
  misc_feature (1)..(25): SEQ ID NO: 1451; WAN024CNQ_at; Start 73; Stop 97
cagacgttaagactcacgcatttgg

SEQ ID NO: 125878 - DNA, 25 bp, Artificial
  probe
  misc_feature (1)..(25): SEQ ID NO: 1451; WAN024CNQ_at; Start 55; Stop 79
ttcgaaacagttctaatccagacgt

SEQ ID NO: 125879 - DNA, 25 bp, Artificial
  probe
  misc_feature (1)..(25): SEQ ID NO: 1451; WAN024CNQ_at; Start 58; Stop 82
gaaacagttctaatccagacgttaa

SEQ ID NO: 125880 - DNA, 25 bp, Artificial
  probe
  misc_feature (1)..(25): SEQ ID NO: 1451; WAN024CNQ_at; Start 5; Stop 29
ctcgactacgaagcataaagacaag

SEQ ID NO: 125881 - DNA, 25 bp, Artificial
  probe
  misc_feature (1)..(25): SEQ ID NO: 1451; WAN024CNQ_at; Start 2; Stop 26
tgactcgactacgaagcataaagac

SEQ ID NO: 125882 - DNA, 25 bp, Artificial
  probe
  misc_feature (1)..(25): SEQ ID NO: 1451; WAN024CNQ_at; Start 56; Stop 80
tcgaaacagttctaatccagacgtt

SEQ ID NO: 125883 - DNA, 25 bp, Artificial
  probe
  misc_feature (1)..(25): SEQ ID NO: 1451; WAN024CNQ_at; Start 51; Stop 75
gttattcgaaacagttctaatccag

SEQ ID NO: 125884 - DNA, 25 bp, Artificial
  probe
  misc_feature (1)..(25): SEQ ID NO: 1451; WAN024CNQ_at; Start 14; Stop 38
gaagcataaagacaagtggatggaa

SEQ ID NO: 125885 - DNA, 25 bp, Artificial
  probe
  misc_feature (1)..(25): SEQ ID NO: 1451; WAN024CNQ_at; Start 47; Stop 71
cgaagttattcgaaacagttctaat

SEQ ID NO: 125886 - DNA, 25 bp, Artificial
  probe
  misc_feature (1)..(25): SEQ ID NO: 1451; WAN024CNQ_at; Start 71; Stop 95
tccagacgttaagactcacgcattt

SEQ ID NO: 125887 - DNA, 25 bp, Artificial
  probe
  misc_feature (1)..(25): SEQ ID NO: 1451; WAN024CNQ_at; Start 8; Stop 32
gactacgaagcataaagacaagtgg

SEQ ID NO: 125888 - DNA, 25 bp, Artificial
  probe
  misc_feature (1)..(25): SEQ ID NO: 1451; WAN024CNQ_at; Start 77; Stop 101
cgttaagactcacgcatttgggatg

SEQ ID NO: 125889 - DNA, 25 bp, Artificial
  probe
  misc_feature (1)..(25): SEQ ID NO: 1451; WAN024CNQ_at; Start 40; Stop 64
gagtattcgaagttattcgaaacag

SEQ ID NO: 125890 - DNA, 25 bp, Artificial
  probe
  misc_feature (1)..(25): SEQ ID NO: 1451; WAN024CNQ_at; Start 3; Stop 27
gactcgactacgaagcataaagaca

SEQ ID NO: 125891 - DNA, 25 bp, Artificial
  probe
  misc_feature (1)..(25): SEQ ID NO: 1451; WAN024CNQ_at; Start 43; Stop 67
tattcgaagttattcgaaacagttc

SEQ ID NO: 125892 - DNA, 25 bp, Artificial
  probe
  misc_feature (1)..(25): SEQ ID NO: 1451; WAN024CNQ_at; Start 53; Stop 77
tattcgaaacagttctaatccagac

SEQ ID NO: 125893 - DNA, 25 bp, Artificial
  probe
  misc_feature (1)..(25): SEQ ID NO: 1451; WAN024CNQ_at; Start 62; Stop 86
cagttctaatccagacgttaagact

SEQ ID NO: 125894 - DNA, 25 bp, Artificial
  probe
  misc_feature (1)..(25): SEQ ID NO: 1451; WAN024CNQ_at; Start 60; Stop 84
aacagttctaatccagacgttaaga

SEQ ID NO: 125895 - DNA, 25 bp, Artificial
  probe
  misc_feature (1)..(25): SEQ ID NO: 1451; WAN024CNQ_at; Start 66; Stop 90
tctaatccagacgttaagactcacg

SEQ ID NO: 125896 - DNA, 25 bp, Artificial
  probe
  misc_feature (1)..(25): SEQ ID NO: 1451; WAN024CNQ_at; Start 6; Stop 30
tcgactacgaagcataaagacaagt

SEQ ID NO: 125897 - DNA, 25 bp, Artificial
  probe
  misc_feature (1)..(25): SEQ ID NO: 1451; WAN024CNQ_at; Start 13; Stop 37
cgaagcataaagacaagtggatgga

SEQ ID NO: 125898 - DNA, 25 bp, Artificial
  probe
  misc_feature (1)..(25): SEQ ID NO: 1451; WAN024CNQ_at; Start 18; Stop 42
cataaagacaagtggatggaaagag

SEQ ID NO: 125899 - DNA, 25 bp, Artificial
  probe
  misc_feature (1)..(25): SEQ ID NO: 1451; WAN024CNQ_at; Start 26; Stop 50
caagtggatggaaagagtattcgaa

SEQ ID NO: 125900 - DNA, 25 bp, Artificial
  probe
  misc_feature (1)..(25): SEQ ID NO: 1451; WAN024CNQ_at; Start 34; Stop 58
tggaaagagtattcgaagttattcg

SEQ ID NO: 125901 - DNA, 25 bp, Artificial
  probe
  misc_feature (1)..(25): SEQ ID NO: 1451; WAN024CNQ_at; Start 68; Stop 92
taatccagacgttaagactcacgca

SEQ ID NO: 125902 - DNA, 25 bp, Artificial
  probe
  misc_feature (1)..(25): SEQ ID NO: 2172; WAN024CNR_at; Start 78; Stop 102
ttcaatcgcgatggttcaatggtaa

SEQ ID NO: 125903 - DNA, 25 bp, Artificial
  probe
  misc_feature (1)..(25): SEQ ID NO: 2172; WAN024CNR_at; Start 33; Stop 57
tacatggctacgtcatggaaacgga

SEQ ID NO: 125904 - DNA, 25 bp, Artificial
  probe
  misc_feature (1)..(25): SEQ ID NO: 2172; WAN024CNR_at; Start 39; Stop 63
gctacgtcatggaaacggattggcg

SEQ ID NO: 125905 - DNA, 25 bp, Artificial
  probe
  misc_feature (1)..(25): SEQ ID NO: 2172; WAN024CNR_at; Start 63; Stop 87
gagtcatggtactacttcaatcgcg

SEQ ID NO: 125906 - DNA, 25 bp, Artificial
  probe
  misc_feature (1)..(25): SEQ ID NO: 2172; WAN024CNR_at; Start 41; Stop 65
tacgtcatggaaacggattggcgag

SEQ ID NO: 125907 - DNA, 25 bp, Artificial
  probe
  misc_feature (1)..(25): SEQ ID NO: 2172; WAN024CNR_at; Start 14; Stop 38
ttggttcgaccgtgacggatacatg

SEQ ID NO: 125908 - DNA, 25 bp, Artificial
  probe
  misc_feature (1)..(25): SEQ ID NO: 2172; WAN024CNR_at; Start 60; Stop 84
ggcgagtcatggtactacttcaatc

SEQ ID NO: 125909 - DNA, 25 bp, Artificial
  probe
  misc_feature (1)..(25): SEQ ID NO: 2172; WAN024CNR_at; Start 72; Stop 96
tactacttcaatcgcgatggttcaa

SEQ ID NO: 125910 - DNA, 25 bp, Artificial
  probe
  misc_feature (1)..(25): SEQ ID NO: 2172; WAN024CNR_at; Start 16; Stop 40
ggttcgaccgtgacggatacatggc

SEQ ID NO: 125911 - DNA, 25 bp, Artificial
  probe
  misc_feature (1)..(25): SEQ ID NO: 2172; WAN024CNR_at; Start 31; Stop 55
gatacatggctacgtcatggaaacg

SEQ ID NO: 125912 - DNA, 25 bp, Artificial
  probe
  misc_feature (1)..(25): SEQ ID NO: 2172; WAN024CNR_at; Start 65; Stop 89
gtcatggtactacttcaatcgcgat

SEQ ID NO: 125913 - DNA, 25 bp, Artificial
  probe
  misc_feature (1)..(25): SEQ ID NO: 2172; WAN024CNR_at; Start 69; Stop 93
tggtactacttcaatcgcgatggtt

SEQ ID NO: 125914 - DNA, 25 bp, Artificial
  probe
  misc_feature (1)..(25): SEQ ID NO: 2172; WAN024CNR_at; Start 1; Stop 25
atggaaattggtattggttcgaccg

SEQ ID NO: 125915 - DNA, 25 bp, Artificial
  probe
  misc_feature (1)..(25): SEQ ID NO: 2172; WAN024CNR_at; Start 4; Stop 28
gaaattggtattggttcgaccgtga

SEQ ID NO: 125916 - DNA, 25 bp, Artificial
  probe
  misc_feature (1)..(25): SEQ ID NO: 2172; WAN024CNR_at; Start 56; Stop 80
gattggcgagtcatggtactacttc

SEQ ID NO: 125917 - DNA, 25 bp, Artificial
  probe
  misc_feature (1)..(25): SEQ ID NO: 2172; WAN024CNR_at; Start 75; Stop 99
tacttcaatcgcgatggttcaatgg

SEQ ID NO: 125918 - DNA, 25 bp, Artificial
  probe
  misc_feature (1)..(25): SEQ ID NO: 2172; WAN024CNR_at; Start 6; Stop 30
aattggtattggttcgaccgtgacg

SEQ ID NO: 125919 - DNA, 25 bp, Artificial
  probe
  misc_feature (1)..(25): SEQ ID NO: 2172; WAN024CNR_at; Start 77; Stop 101
cttcaatcgcgatggttcaatggta

SEQ ID NO: 125920 - DNA, 25 bp, Artificial
  probe
  misc_feature (1)..(25): SEQ ID NO: 2172; WAN024CNR_at; Start 54; Stop 78
cggattggcgagtcatggtactact

SEQ ID NO: 125921 - DNA, 25 bp, Artificial
  probe
  misc_feature (1)..(25): SEQ ID NO: 2172; WAN024CNR_at; Start 46; Stop 70
catggaaacggattggcgagtcatg

SEQ ID NO: 125922 - DNA, 25 bp, Artificial
  probe
  misc_feature (1)..(25): SEQ ID NO: 2172; WAN024CNR_at; Start 58; Stop 82
ttggcgagtcatggtactacttcaa

SEQ ID NO: 125923 - DNA, 25 bp, Artificial
  probe
  misc_feature (1)..(25): SEQ ID NO: 2172; WAN024CNR_at; Start 19; Stop 43
tcgaccgtgacggatacatggctac

SEQ ID NO: 125924 - DNA, 25 bp, Artificial
  probe
  misc_feature (1)..(25): SEQ ID NO: 2172; WAN024CNR_at; Start 51; Stop 75
aaacggattggcgagtcatggtact

SEQ ID NO: 125925 - DNA, 25 bp, Artificial
  probe
  misc_feature (1)..(25): SEQ ID NO: 2172; WAN024CNR_at; Start 53; Stop 77
acggattggcgagtcatggtactac

SEQ ID NO: 125926 - DNA, 25 bp, Artificial
  probe
  misc_feature (1)..(25): SEQ ID NO: 2172; WAN024CNR_at; Start 67; Stop 91
catggtactacttcaatcgcgatgg

SEQ ID NO: 125927 - DNA, 25 bp, Artificial
  probe
  misc_feature (1)..(25): SEQ ID NO: 2172; WAN024CNR_at; Start 11; Stop 35
gtattggttcgaccgtgacggatac

SEQ ID NO: 125928 - DNA, 25 bp, Artificial
  probe
  misc_feature (1)..(25): SEQ ID NO: 2172; WAN024CNR_at; Start 29; Stop 53
cggatacatggctacgtcatggaaa

SEQ ID NO: 125929 - DNA, 25 bp, Artificial
  probe
  misc_feature (1)..(25): SEQ ID NO: 2172; WAN024CNR_at; Start 23; Stop 47
ccgtgacggatacatggctacgtca

SEQ ID NO: 125930 - DNA, 25 bp, Artificial
  probe
  misc_feature (1)..(25): SEQ ID NO: 2172; WAN024CNR_at; Start 21; Stop 45
gaccgtgacggatacatggctacgt

SEQ ID NO: 125931 - DNA, 25 bp, Artificial
  probe
  misc_feature (1)..(25): SEQ ID NO: 2172; WAN024CNR_at; Start 26; Stop 50
tgacggatacatggctacgtcatgg

SEQ ID NO: 125932 - DNA, 25 bp, Artificial
  probe
  misc_feature (1)..(25): SEQ ID NO: 2172; WAN024CNR_at; Start 37; Stop 61
tggctacgtcatggaaacggattgg

SEQ ID NO: 125933 - DNA, 25 bp, Artificial
  probe
  misc_feature (1)..(25): SEQ ID NO: 2172; WAN024CNR_at; Start 9; Stop 33
tggtattggttcgaccgtgacggat

SEQ ID NO: 125934 - DNA, 25 bp, Artificial
  probe
  misc_feature (1)..(25): SEQ ID NO: 2172; WAN024CNR_at; Start 44; Stop 68
gtcatggaaacggattggcgagtca

SEQ ID NO: 125935 - DNA, 25 bp, Artificial
  probe
  misc_feature (1)..(25): SEQ ID NO: 2172; WAN024CNR_at; Start 35; Stop 59
catggctacgtcatggaaacggatt

SEQ ID NO: 125936 - DNA, 25 bp, Artificial
  probe
  misc_feature (1)..(25): SEQ ID NO: 3881; WAN024CNS_at; Start 6; Stop 30
cgtgctggatttagcaaacaagcta

SEQ ID NO: 125937 - DNA, 25 bp, Artificial
  probe
  misc_feature (1)..(25): SEQ ID NO: 3881; WAN024CNS_at; Start 25; Stop 49
aagctactgagatggcattcttccg

SEQ ID NO: 125938 - DNA, 25 bp, Artificial
  probe
  misc_feature (1)..(25): SEQ ID NO: 3881; WAN024CNS_at; Start 51; Stop 75
gagtctatgcgacttggtgaaaaag

SEQ ID NO: 125939 - DNA, 25 bp, Artificial
  probe
  misc_feature (1)..(25): SEQ ID NO: 3881; WAN024CNS_at; Start 40; Stop 64
cattcttccgtgagtctatgcgact

SEQ ID NO: 125940 - DNA, 25 bp, Artificial
  probe
  misc_feature (1)..(25): SEQ ID NO: 3881; WAN024CNS_at; Start 56; Stop 80
tatgcgacttggtgaaaaagaccgt

SEQ ID NO: 125941 - DNA, 25 bp, Artificial
  probe
  misc_feature (1)..(25): SEQ ID NO: 3881; WAN024CNS_at; Start 35; Stop 59
gatggcattcttccgtgagtctatg

SEQ ID NO: 125942 - DNA, 25 bp, Artificial
  probe
  misc_feature (1)..(25): SEQ ID NO: 3881; WAN024CNS_at; Start 47; Stop 71
ccgtgagtctatgcgacttggtgaa

SEQ ID NO: 125943 - DNA, 25 bp, Artificial
  probe
  misc_feature (1)..(25): SEQ ID NO: 3881; WAN024CNS_at; Start 38; Stop 62
ggcattcttccgtgagtctatgcga

SEQ ID NO: 125944 - DNA, 25 bp, Artificial
  probe
  misc_feature (1)..(25): SEQ ID NO: 3881; WAN024CNS_at; Start 33; Stop 57
gagatggcattcttccgtgagtcta

SEQ ID NO: 125945 - DNA, 25 bp, Artificial
  probe
  misc_feature (1)..(25): SEQ ID NO: 3881; WAN024CNS_at; Start 54; Stop 78
tctatgcgacttggtgaaaaagacc

SEQ ID NO: 125946 - DNA, 25 bp, Artificial
  probe
  misc_feature (1)..(25): SEQ ID NO: 3881; WAN024CNS_at; Start 45; Stop 69
ttccgtgagtctatgcgacttggtg

SEQ ID NO: 125947 - DNA, 25 bp, Artificial
  probe
  misc_feature (1)..(25): SEQ ID NO: 3881; WAN024CNS_at; Start 43; Stop 67
tcttccgtgagtctatgcgacttgg

SEQ ID NO: 125948 - DNA, 25 bp, Artificial
  probe
  misc_feature (1)..(25): SEQ ID NO: 3881; WAN024CNS_at; Start 20; Stop 44
caaacaagctactgagatggcattc

SEQ ID NO: 125949 - DNA, 25 bp, Artificial
  probe
  misc_feature (1)..(25): SEQ ID NO: 3881; WAN024CNS_at; Start 4; Stop 28
aacgtgctggatttagcaaacaagc

SEQ ID NO: 125950 - DNA, 25 bp, Artificial
  probe
  misc_feature (1)..(25): SEQ ID NO: 3881; WAN024CNS_at; Start 78; Stop 102
cgtcaaaacttgcaaatgctattga

SEQ ID NO: 125951 - DNA, 25 bp, Artificial
  probe
  misc_feature (1)..(25): SEQ ID NO: 3881; WAN024CNS_at; Start 26; Stop 50
agctactgagatggcattcttccgt

SEQ ID NO: 125952 - DNA, 25 bp, Artificial
  probe
  misc_feature (1)..(25): SEQ ID NO: 3881; WAN024CNS_at; Start 19; Stop 43
gcaaacaagctactgagatggcatt

SEQ ID NO: 125953 - DNA, 25 bp, Artificial
  probe
  misc_feature (1)..(25): SEQ ID NO: 3881; WAN024CNS_at; Start 11; Stop 35
tggatttagcaaacaagctactgag

SEQ ID NO: 125954 - DNA, 25 bp, Artificial
  probe
  misc_feature (1)..(25): SEQ ID NO: 3881; WAN024CNS_at; Start 59; Stop 83
gcgacttggtgaaaaagaccgtcaa

SEQ ID NO: 125955 - DNA, 25 bp, Artificial
  probe
  misc_feature (1)..(25): SEQ ID NO: 3881; WAN024CNS_at; Start 77; Stop 101
ccgtcaaaacttgcaaatgctattg

SEQ ID NO: 125956 - DNA, 25 bp, Artificial
  probe
  misc_feature (1)..(25): SEQ ID NO: 3881; WAN024CNS_at; Start 21; Stop 45
aaacaagctactgagatggcattct

SEQ ID NO: 125957 - DNA, 25 bp, Artificial
  probe
  misc_feature (1)..(25): SEQ ID NO: 3881; WAN024CNS_at; Start 15; Stop 39
tttagcaaacaagctactgagatgg

SEQ ID NO: 125958 - DNA, 25 bp, Artificial
  probe
  misc_feature (1)..(25): SEQ ID NO: 3881; WAN024CNS_at; Start 75; Stop 99
gaccgtcaaaacttgcaaatgctat

SEQ ID NO: 125959 - DNA, 25 bp, Artificial
  probe
  misc_feature (1)..(25): SEQ ID NO: 3881; WAN024CNS_at; Start 24; Stop 48
caagctactgagatggcattcttcc

SEQ ID NO: 125960 - DNA, 25 bp, Artificial
  probe
  misc_feature (1)..(25): SEQ ID NO: 3881; WAN024CNS_at; Start 58; Stop 82
tgcgacttggtgaaaaagaccgtca

SEQ ID NO: 125961 - DNA, 25 bp, Artificial
  probe
  misc_feature (1)..(25): SEQ ID NO: 3881; WAN024CNS_at; Start 67; Stop 91
gtgaaaaagaccgtcaaaacttgca

SEQ ID NO: 125962 - DNA, 25 bp, Artificial
  probe
  misc_feature (1)..(25): SEQ ID NO: 3881; WAN024CNS_at; Start 17; Stop 41
tagcaaacaagctactgagatggca

SEQ ID NO: 125963 - DNA, 25 bp, Artificial
  probe
  misc_feature (1)..(25): SEQ ID NO: 3881; WAN024CNS_at; Start 71; Stop 95
aaaagaccgtcaaaacttgcaaatg

SEQ ID NO: 125964 - DNA, 25 bp, Artificial
  probe
  misc_feature (1)..(25): SEQ ID NO: 3881; WAN024CNS_at; Start 12; Stop 36
ggatttagcaaacaagctactgaga

SEQ ID NO: 125965 - DNA, 25 bp, Artificial
  probe
  misc_feature (1)..(25): SEQ ID NO: 3881; WAN024CNS_at; Start 9; Stop 33
gctggatttagcaaacaagctactg

SEQ ID NO: 125966 - DNA, 25 bp, Artificial
  probe
  misc_feature (1)..(25): SEQ ID NO: 3881; WAN024CNS_at; Start 68; Stop 92
tgaaaaagaccgtcaaaacttgcaa

SEQ ID NO: 125967 - DNA, 25 bp, Artificial
  probe
  misc_feature (1)..(25): SEQ ID NO: 3881; WAN024CNS_at; Start 31; Stop 55
ctgagatggcattcttccgtgagtc

SEQ ID NO: 125968 - DNA, 25 bp, Artificial
  probe
  misc_feature (1)..(25): SEQ ID NO: 3881; WAN024CNS_at; Start 73; Stop 97
aagaccgtcaaaacttgcaaatgct

SEQ ID NO: 125969 - DNA, 25 bp, Artificial
  probe
  misc_feature (1)..(25): SEQ ID NO: 3881; WAN024CNS_at; Start 29; Stop 53
tactgagatggcattcttccgtgag

SEQ ID NO: 125970 - DNA, 25 bp, Artificial
  probe
  misc_feature (1)..(25): SEQ ID NO: 1416; WAN024CNT_at; Start 43; Stop 67
actatacatgggttcaccaacttcg

SEQ ID NO: 125971 - DNA, 25 bp, Artificial
  probe
  misc_feature (1)..(25): SEQ ID NO: 1416; WAN024CNT_at; Start 56; Stop 80
tcaccaacttcgagacaaagcagtt

SEQ ID NO: 125972 - DNA, 25 bp, Artificial
  probe
  misc_feature (1)..(25): SEQ ID NO: 1416; WAN024CNT_at; Start 45; Stop 69
tatacatgggttcaccaacttcgag

SEQ ID NO: 125973 - DNA, 25 bp, Artificial
  probe
  misc_feature (1)..(25): SEQ ID NO: 1416; WAN024CNT_at; Start 49; Stop 73
catgggttcaccaacttcgagacaa

SEQ ID NO: 125974 - DNA, 25 bp, Artificial
  probe
  misc_feature (1)..(25): SEQ ID NO: 1416; WAN024CNT_at; Start 7; Stop 31
ttccagtcactaatgcggccgctga

SEQ ID NO: 125975 - DNA, 25 bp, Artificial
  probe
  misc_feature (1)..(25): SEQ ID NO: 1416; WAN024CNT_at; Start 37; Stop 61
gataccactatacatgggttcacca

SEQ ID NO: 125976 - DNA, 25 bp, Artificial
  probe
  misc_feature (1)..(25): SEQ ID NO: 1416; WAN024CNT_at; Start 6; Stop 30
cttccagtcactaatgcggccgctg

SEQ ID NO: 125977 - DNA, 25 bp, Artificial
  probe
  misc_feature (1)..(25): SEQ ID NO: 1416; WAN024CNT_at; Start 63; Stop 87
cttcgagacaaagcagttgaaacac

SEQ ID NO: 125978 - DNA, 25 bp, Artificial
  probe
  misc_feature (1)..(25): SEQ ID NO: 1416; WAN024CNT_at; Start 3; Stop 27
gaccttccagtcactaatgcggccg

SEQ ID NO: 125979 - DNA, 25 bp, Artificial
  probe
  misc_feature (1)..(25): SEQ ID NO: 1416; WAN024CNT_at; Start 36; Stop 60
ggataccactatacatgggttcacc

SEQ ID NO: 125980 - DNA, 25 bp, Artificial
  probe
  misc_feature (1)..(25): SEQ ID NO: 1416; WAN024CNT_at; Start 18; Stop 42
aatgcggccgctgaaattggatacc

SEQ ID NO: 125981 - DNA, 25 bp, Artificial
  probe
  misc_feature (1)..(25): SEQ ID NO: 1416; WAN024CNT_at; Start 39; Stop 63
taccactatacatgggttcaccaac

SEQ ID NO: 125982 - DNA, 25 bp, Artificial
  probe
  misc_feature (1)..(25): SEQ ID NO: 1416; WAN024CNT_at; Start 21; Stop 45
gcggccgctgaaattggataccact

SEQ ID NO: 125983 - DNA, 25 bp, Artificial
  probe
  misc_feature (1)..(25): SEQ ID NO: 1416; WAN024CNT_at; Start 23; Stop 47
ggccgctgaaattggataccactat

SEQ ID NO: 125984 - DNA, 25 bp, Artificial
  probe
  misc_feature (1)..(25): SEQ ID NO: 1416; WAN024CNT_at; Start 64; Stop 88
ttcgagacaaagcagttgaaacact

SEQ ID NO: 125985 - DNA, 25 bp, Artificial
  probe
  misc_feature (1)..(25): SEQ ID NO: 1416; WAN024CNT_at; Start 20; Stop 44
tgcggccgctgaaattggataccac

SEQ ID NO: 125986 - DNA, 25 bp, Artificial
  probe
  misc_feature (1)..(25): SEQ ID NO: 1416; WAN024CNT_at; Start 54; Stop 78
gttcaccaacttcgagacaaagcag

SEQ ID NO: 125987 - DNA, 25 bp, Artificial
  probe
  misc_feature (1)..(25): SEQ ID NO: 1416; WAN024CNT_at; Start 61; Stop 85
aacttcgagacaaagcagttgaaac

SEQ ID NO: 125988 - DNA, 25 bp, Artificial
  probe
  misc_feature (1)..(25): SEQ ID NO: 1416; WAN024CNT_at; Start 59; Stop 83
ccaacttcgagacaaagcagttgaa

SEQ ID NO: 125989 - DNA, 25 bp, Artificial
  probe
  misc_feature (1)..(25): SEQ ID NO: 1416; WAN024CNT_at; Start 76; Stop 100
cagttgaaacacttgaagaaatttt

SEQ ID NO: 125990 - DNA, 25 bp, Artificial
  probe
  misc_feature (1)..(25): SEQ ID NO: 1416; WAN024CNT_at; Start 1; Stop 25
atgaccttccagtcactaatgcggc

SEQ ID NO: 125991 - DNA, 25 bp, Artificial
  probe
  misc_feature (1)..(25): SEQ ID NO: 1416; WAN024CNT_at; Start 17; Stop 41
taatgcggccgctgaaattggatac

SEQ ID NO: 125992 - DNA, 25 bp, Artificial
  probe
  misc_feature (1)..(25): SEQ ID NO: 1416; WAN024CNT_at; Start 52; Stop 76
gggttcaccaacttcgagacaaagc

SEQ ID NO: 125993 - DNA, 25 bp, Artificial
  probe
  misc_feature (1)..(25): SEQ ID NO: 1416; WAN024CNT_at; Start 25; Stop 49
ccgctgaaattggataccactatac

SEQ ID NO: 125994 - DNA, 25 bp, Artificial
  probe
  misc_feature (1)..(25): SEQ ID NO: 1416; WAN024CNT_at; Start 51; Stop 75
tgggttcaccaacttcgagacaaag

SEQ ID NO: 125995 - DNA, 25 bp, Artificial
  probe
  misc_feature (1)..(25): SEQ ID NO: 1416; WAN024CNT_at; Start 53; Stop 77
ggttcaccaacttcgagacaaagca

SEQ ID NO: 125996 - DNA, 25 bp, Artificial
  probe
  misc_feature (1)..(25): SEQ ID NO: 1416; WAN024CNT_at; Start 22; Stop 46
cggccgctgaaattggataccacta

SEQ ID NO: 125997 - DNA, 25 bp, Artificial
  probe
  misc_feature (1)..(25): SEQ ID NO: 1416; WAN024CNT_at; Start 57; Stop 81
caccaacttcgagacaaagcagttg

SEQ ID NO: 125998 - DNA, 25 bp, Artificial
  probe
  misc_feature (1)..(25): SEQ ID NO: 1416; WAN024CNT_at; Start 48; Stop 72
acatgggttcaccaacttcgagaca

SEQ ID NO: 125999 - DNA, 25 bp, Artificial
  probe
  misc_feature (1)..(25): SEQ ID NO: 1416; WAN024CNT_at; Start 24; Stop 48
gccgctgaaattggataccactata

SEQ ID NO: 126000 - DNA, 25 bp, Artificial
  probe
  misc_feature (1)..(25): SEQ ID NO: 1416; WAN024CNT_at; Start 55; Stop 79
ttcaccaacttcgagacaaagcagt

SEQ ID NO: 126001 - DNA, 25 bp, Artificial
  probe
  misc_feature (1)..(25): SEQ ID NO: 1416; WAN024CNT_at; Start 40; Stop 64
accactatacatgggttcaccaact

SEQ ID NO: 126002 - DNA, 25 bp, Artificial
  probe
  misc_feature (1)..(25): SEQ ID NO: 1416; WAN024CNT_at; Start 47; Stop 71
tacatgggttcaccaacttcgagac

SEQ ID NO: 126003 - DNA, 25 bp, Artificial
  probe
  misc_feature (1)..(25): SEQ ID NO: 1416; WAN024CNT_at; Start 9; Stop 33
ccagtcactaatgcggccgctgaaa

SEQ ID NO: 126004 - DNA, 25 bp, Artificial
  probe
  misc_feature (1)..(25): SEQ ID NO: 2130; WAN024CNU_at; Start 25; Stop 49
actctactacattccctgcagggtt

SEQ ID NO: 126005 - DNA, 25 bp, Artificial
  probe
  misc_feature (1)..(25): SEQ ID NO: 2130; WAN024CNU_at; Start 71; Stop 95
tgcaccgttttcgtcaaggtagtca

SEQ ID NO: 126006 - DNA, 25 bp, Artificial
  probe
  misc_feature (1)..(25): SEQ ID NO: 2130; WAN024CNU_at; Start 5; Stop 29
tttggtcttctcgacgaatgactct

SEQ ID NO: 126007 - DNA, 25 bp, Artificial
  probe
  misc_feature (1)..(25): SEQ ID NO: 2130; WAN024CNU_at; Start 69; Stop 93
gatgcaccgttttcgtcaaggtagt

SEQ ID NO: 126008 - DNA, 25 bp, Artificial
  probe
  misc_feature (1)..(25): SEQ ID NO: 2130; WAN024CNU_at; Start 11; Stop 35
cttctcgacgaatgactctactaca

SEQ ID NO: 126009 - DNA, 25 bp, Artificial
  probe
  misc_feature (1)..(25): SEQ ID NO: 2130; WAN024CNU_at; Start 37; Stop 61
tccctgcagggtttcgagcagtacg

SEQ ID NO: 126010 - DNA, 25 bp, Artificial
  probe
  misc_feature (1)..(25): SEQ ID NO: 2130; WAN024CNU_at; Start 47; Stop 71
gtttcgagcagtacgggtcaatgat

SEQ ID NO: 126011 - DNA, 25 bp, Artificial
  probe
  misc_feature (1)..(25): SEQ ID NO: 2130; WAN024CNU_at; Start 3; Stop 27
gctttggtcttctcgacgaatgact

SEQ ID NO: 126012 - DNA, 25 bp, Artificial
  probe
  misc_feature (1)..(25): SEQ ID NO: 2130; WAN024CNU_at; Start 81; Stop 105
tcgtcaaggtagtcaccttttctaa

SEQ ID NO: 126013 - DNA, 25 bp, Artificial
  probe
  misc_feature (1)..(25): SEQ ID NO: 2130; WAN024CNU_at; Start 51; Stop 75
cgagcagtacgggtcaatgatgcac

SEQ ID NO: 126014 - DNA, 25 bp, Artificial
  probe
  misc_feature (1)..(25): SEQ ID NO: 2130; WAN024CNU_at; Start 32; Stop 56
tacattccctgcagggtttcgagca

SEQ ID NO: 126015 - DNA, 25 bp, Artificial
  probe
  misc_feature (1)..(25): SEQ ID NO: 2130; WAN024CNU_at; Start 46; Stop 70
ggtttcgagcagtacgggtcaatga

SEQ ID NO: 126016 - DNA, 25 bp, Artificial
  probe
  misc_feature (1)..(25): SEQ ID NO: 2130; WAN024CNU_at; Start 72; Stop 96
gcaccgttttcgtcaaggtagtcac

SEQ ID NO: 126017 - DNA, 25 bp, Artificial
  probe
  misc_feature (1)..(25): SEQ ID NO: 2130; WAN024CNU_at; Start 44; Stop 68
agggtttcgagcagtacgggtcaat

SEQ ID NO: 126018 - DNA, 25 bp, Artificial
  probe
  misc_feature (1)..(25): SEQ ID NO: 2130; WAN024CNU_at; Start 53; Stop 77
agcagtacgggtcaatgatgcaccg

SEQ ID NO: 126019 - DNA, 25 bp, Artificial
  probe
  misc_feature (1)..(25): SEQ ID NO: 2130; WAN024CNU_at; Start 13; Stop 37
tctcgacgaatgactctactacatt

SEQ ID NO: 126020 - DNA, 25 bp, Artificial
  probe
  misc_feature (1)..(25): SEQ ID NO: 2130; WAN024CNU_at; Start 24; Stop 48
gactctactacattccctgcagggt

SEQ ID NO: 126021 - DNA, 25 bp, Artificial
  probe
  misc_feature (1)..(25): SEQ ID NO: 2130; WAN024CNU_at; Start 52; Stop 76
gagcagtacgggtcaatgatgcacc

SEQ ID NO: 126022 - DNA, 25 bp, Artificial
  probe
  misc_feature (1)..(25): SEQ ID NO: 2130; WAN024CNU_at; Start 68; Stop 92
tgatgcaccgttttcgtcaaggtag

SEQ ID NO: 126023 - DNA, 25 bp, Artificial
  probe
  misc_feature (1)..(25): SEQ ID NO: 2130; WAN024CNU_at; Start 54; Stop 78
gcagtacgggtcaatgatgcaccgt

SEQ ID NO: 126024 - DNA, 25 bp, Artificial
  probe
  misc_feature (1)..(25): SEQ ID NO: 2130; WAN024CNU_at; Start 29; Stop 53
tactacattccctgcagggtttcga

SEQ ID NO: 126025 - DNA, 25 bp, Artificial
  probe
  misc_feature (1)..(25): SEQ ID NO: 2130; WAN024CNU_at; Start 10; Stop 34
tcttctcgacgaatgactctactac

SEQ ID NO: 126026 - DNA, 25 bp, Artificial
  probe
  misc_feature (1)..(25): SEQ ID NO: 2130; WAN024CNU_at; Start 65; Stop 89
caatgatgcaccgttttcgtcaagg

SEQ ID NO: 126027 - DNA, 25 bp, Artificial
  probe
  misc_feature (1)..(25): SEQ ID NO: 2130; WAN024CNU_at; Start 38; Stop 62
ccctgcagggtttcgagcagtacgg

SEQ ID NO: 126028 - DNA, 25 bp, Artificial
  probe
  misc_feature (1)..(25): SEQ ID NO: 2130; WAN024CNU_at; Start 23; Stop 47
tgactctactacattccctgcaggg

SEQ ID NO: 126029 - DNA, 25 bp, Artificial
  probe
  misc_feature (1)..(25): SEQ ID NO: 2130; WAN024CNU_at; Start 62; Stop 86
ggtcaatgatgcaccgttttcgtca

SEQ ID NO: 126030 - DNA, 25 bp, Artificial
  probe
  misc_feature (1)..(25): SEQ ID NO: 2130; WAN024CNU_at; Start 8; Stop 32
ggtcttctcgacgaatgactctact

SEQ ID NO: 126031 - DNA, 25 bp, Artificial
  probe
  misc_feature (1)..(25): SEQ ID NO: 2130; WAN024CNU_at; Start 66; Stop 90
aatgatgcaccgttttcgtcaaggt

SEQ ID NO: 126032 - DNA, 25 bp, Artificial
  probe
  misc_feature (1)..(25): SEQ ID NO: 2130; WAN024CNU_at; Start 58; Stop 82
tacgggtcaatgatgcaccgttttc

SEQ ID NO: 126033 - DNA, 25 bp, Artificial
  probe
  misc_feature (1)..(25): SEQ ID NO: 2130; WAN024CNU_at; Start 2; Stop 26
tgctttggtcttctcgacgaatgac

SEQ ID NO: 126034 - DNA, 25 bp, Artificial
  probe
  misc_feature (1)..(25): SEQ ID NO: 2130; WAN024CNU_at; Start 55; Stop 79
cagtacgggtcaatgatgcaccgtt

SEQ ID NO: 126035 - DNA, 25 bp, Artificial
  probe
  misc_feature (1)..(25): SEQ ID NO: 2130; WAN024CNU_at; Start 36; Stop 60
ttccctgcagggtttcgagcagtac

SEQ ID NO: 126036 - DNA, 25 bp, Artificial
  probe
  misc_feature (1)..(25): SEQ ID NO: 2130; WAN024CNU_at; Start 61; Stop 85
gggtcaatgatgcaccgttttcgtc

SEQ ID NO: 126037 - DNA, 25 bp, Artificial
  probe
  misc_feature (1)..(25): SEQ ID NO: 2130; WAN024CNU_at; Start 33; Stop 57
acattccctgcagggtttcgagcag

SEQ ID NO: 126038 - DNA, 25 bp, Artificial
  probe
  misc_feature (1)..(25): SEQ ID NO: 2014; WAN024CNV_at; Start 32; Stop 56
gaagcatgcttgtgcagttcgactt

SEQ ID NO: 126039 - DNA, 25 bp, Artificial
  probe
  misc_feature (1)..(25): SEQ ID NO: 2014; WAN024CNV_at; Start 30; Stop 54
tggaagcatgcttgtgcagttcgac

SEQ ID NO: 126040 - DNA, 25 bp, Artificial
  probe
  misc_feature (1)..(25): SEQ ID NO: 2014; WAN024CNV_at; Start 72; Stop 96
gactaccttgacgaaaacggtgcat

SEQ ID NO: 126041 - DNA, 25 bp, Artificial
  probe
  misc_feature (1)..(25): SEQ ID NO: 2014; WAN024CNV_at; Start 3; Stop 27
gcctattcaactccaggcggaaaga

SEQ ID NO: 126042 - DNA, 25 bp, Artificial
  probe
  misc_feature (1)..(25): SEQ ID NO: 2014; WAN024CNV_at; Start 12; Stop 36
actccaggcggaaagatgtggaagc

SEQ ID NO: 126043 - DNA, 25 bp, Artificial
  probe
  misc_feature (1)..(25): SEQ ID NO: 2014; WAN024CNV_at; Start 33; Stop 57
aagcatgcttgtgcagttcgactta

SEQ ID NO: 126044 - DNA, 25 bp, Artificial
  probe
  misc_feature (1)..(25): SEQ ID NO: 2014; WAN024CNV_at; Start 73; Stop 97
actaccttgacgaaaacggtgcatc

SEQ ID NO: 126045 - DNA, 25 bp, Artificial
  probe
  misc_feature (1)..(25): SEQ ID NO: 2014; WAN024CNV_at; Start 31; Stop 55
ggaagcatgcttgtgcagttcgact

SEQ ID NO: 126046 - DNA, 25 bp, Artificial
  probe
  misc_feature (1)..(25): SEQ ID NO: 2014; WAN024CNV_at; Start 71; Stop 95
tgactaccttgacgaaaacggtgca

SEQ ID NO: 126047 - DNA, 25 bp, Artificial
  probe
  misc_feature (1)..(25): SEQ ID NO: 2014; WAN024CNV_at; Start 23; Stop 47
aaagatgtggaagcatgcttgtgca

SEQ ID NO: 126048 - DNA, 25 bp, Artificial
  probe
  misc_feature (1)..(25): SEQ ID NO: 2014; WAN024CNV_at; Start 25; Stop 49
agatgtggaagcatgcttgtgcagt

SEQ ID NO: 126049 - DNA, 25 bp, Artificial
  probe
  misc_feature (1)..(25): SEQ ID NO: 2014; WAN024CNV_at; Start 70; Stop 94
gtgactaccttgacgaaaacggtgc

SEQ ID NO: 126050 - DNA, 25 bp, Artificial
  probe
  misc_feature (1)..(25): SEQ ID NO: 2014; WAN024CNV_at; Start 61; Stop 85
ttagaaaaggtgactaccttgacga

SEQ ID NO: 126051 - DNA, 25 bp, Artificial
  probe
  misc_feature (1)..(25): SEQ ID NO: 2014; WAN024CNV_at; Start 36; Stop 60
catgcttgtgcagttcgacttaaat

SEQ ID NO: 126052 - DNA, 25 bp, Artificial
  probe
  misc_feature (1)..(25): SEQ ID NO: 2014; WAN024CNV_at; Start 34; Stop 58
agcatgcttgtgcagttcgacttaa

SEQ ID NO: 126053 - DNA, 25 bp, Artificial
  probe
  misc_feature (1)..(25): SEQ ID NO: 2014; WAN024CNV_at; Start 11; Stop 35
aactccaggcggaaagatgtggaag

SEQ ID NO: 126054 - DNA, 25 bp, Artificial
  probe
  misc_feature (1)..(25): SEQ ID NO: 2014; WAN024CNV_at; Start 74; Stop 98
ctaccttgacgaaaacggtgcatca

SEQ ID NO: 126055 - DNA, 25 bp, Artificial
  probe
  misc_feature (1)..(25): SEQ ID NO: 2014; WAN024CNV_at; Start 35; Stop 59
gcatgcttgtgcagttcgacttaaa

SEQ ID NO: 126056 - DNA, 25 bp, Artificial
  probe
  misc_feature (1)..(25): SEQ ID NO: 2014; WAN024CNV_at; Start 4; Stop 28
cctattcaactccaggcggaaagat

SEQ ID NO: 126057 - DNA, 25 bp, Artificial
  probe
  misc_feature (1)..(25): SEQ ID NO: 2014; WAN024CNV_at; Start 44; Stop 68
tgcagttcgacttaaatttagaaaa

SEQ ID NO: 126058 - DNA, 25 bp, Artificial
  probe
  misc_feature (1)..(25): SEQ ID NO: 2014; WAN024CNV_at; Start 13; Stop 37
ctccaggcggaaagatgtggaagca

SEQ ID NO: 126059 - DNA, 25 bp, Artificial
  probe
  misc_feature (1)..(25): SEQ ID NO: 2014; WAN024CNV_at; Start 6; Stop 30
tattcaactccaggcggaaagatgt

SEQ ID NO: 126060 - DNA, 25 bp, Artificial
  probe
  misc_feature (1)..(25): SEQ ID NO: 2014; WAN024CNV_at; Start 10; Stop 34
caactccaggcggaaagatgtggaa

SEQ ID NO: 126061 - DNA, 25 bp, Artificial
  probe
  misc_feature (1)..(25): SEQ ID NO: 2014; WAN024CNV_at; Start 2; Stop 26
tgcctattcaactccaggcggaaag

SEQ ID NO: 126062 - DNA, 25 bp, Artificial
  probe
  misc_feature (1)..(25): SEQ ID NO: 2014; WAN024CNV_at; Start 39; Stop 63
gcttgtgcagttcgacttaaattta

SEQ ID NO: 126063 - DNA, 25 bp, Artificial
  probe
  misc_feature (1)..(25): SEQ ID NO: 2014; WAN024CNV_at; Start 5; Stop 29
ctattcaactccaggcggaaagatg

SEQ ID NO: 126064 - DNA, 25 bp, Artificial
  probe
  misc_feature (1)..(25): SEQ ID NO: 2014; WAN024CNV_at; Start 14; Stop 38
tccaggcggaaagatgtggaagcat

SEQ ID NO: 126065 - DNA, 25 bp, Artificial
  probe
  misc_feature (1)..(25): SEQ ID NO: 2014; WAN024CNV_at; Start 42; Stop 66
tgtgcagttcgacttaaatttagaa

SEQ ID NO: 126066 - DNA, 25 bp, Artificial
  probe
  misc_feature (1)..(25): SEQ ID NO: 2014; WAN024CNV_at; Start 20; Stop 44
cggaaagatgtggaagcatgcttgt

SEQ ID NO: 126067 - DNA, 25 bp, Artificial
  probe
  misc_feature (1)..(25): SEQ ID NO: 2014; WAN024CNV_at; Start 76; Stop 100
accttgacgaaaacggtgcatcatt

SEQ ID NO: 126068 - DNA, 25 bp, Artificial
  probe
  misc_feature (1)..(25): SEQ ID NO: 2014; WAN024CNV_at; Start 27; Stop 51
atgtggaagcatgcttgtgcagttc

SEQ ID NO: 126069 - DNA, 25 bp, Artificial
  probe
  misc_feature (1)..(25): SEQ ID NO: 2014; WAN024CNV_at; Start 77; Stop 101
ccttgacgaaaacggtgcatcattg

SEQ ID NO: 126070 - DNA, 25 bp, Artificial
  probe
  misc_feature (1)..(25): SEQ ID NO: 2014; WAN024CNV_at; Start 75; Stop 99
taccttgacgaaaacggtgcatcat

SEQ ID NO: 126071 - DNA, 25 bp, Artificial
  probe
  misc_feature (1)..(25): SEQ ID NO: 2014; WAN024CNV_at; Start 62; Stop 86
tagaaaaggtgactaccttgacgaa

SEQ ID NO: 126072 - DNA, 25 bp, Artificial
  probe
  misc_feature (1)..(25): SEQ ID NO: 1035; WAN024CNW_at; Start 76; Stop 100
agttcaatgttcgactcaatgttta

SEQ ID NO: 126073 - DNA, 25 bp, Artificial
  probe
  misc_feature (1)..(25): SEQ ID NO: 1035; WAN024CNW_at; Start 66; Stop 90
aaatcgacaaagttcaatgttcgac

SEQ ID NO: 126074 - DNA, 25 bp, Artificial
  probe
  misc_feature (1)..(25): SEQ ID NO: 1035; WAN024CNW_at; Start 74; Stop 98
aaagttcaatgttcgactcaatgtt

SEQ ID NO: 126075 - DNA, 25 bp, Artificial
  probe
  misc_feature (1)..(25): SEQ ID NO: 1035; WAN024CNW_at; Start 12; Stop 36
gcttaggttcaatctttttcgaaca

SEQ ID NO: 126076 - DNA, 25 bp, Artificial
  probe
  misc_feature (1)..(25): SEQ ID NO: 1035; WAN024CNW_at; Start 18; Stop 42
gttcaatctttttcgaacattttca

SEQ ID NO: 126077 - DNA, 25 bp, Artificial
  probe
  misc_feature (1)..(25): SEQ ID NO: 1035; WAN024CNW_at; Start 67; Stop 91
aatcgacaaagttcaatgttcgact

SEQ ID NO: 126078 - DNA, 25 bp, Artificial
  probe
  misc_feature (1)..(25): SEQ ID NO: 1035; WAN024CNW_at; Start 61; Stop 85
gctaaaaatcgacaaagttcaatgt

SEQ ID NO: 126079 - DNA, 25 bp, Artificial
  probe
  misc_feature (1)..(25): SEQ ID NO: 1035; WAN024CNW_at; Start 56; Stop 80
tttcagctaaaaatcgacaaagttc

SEQ ID NO: 126080 - DNA, 25 bp, Artificial
  probe
  misc_feature (1)..(25): SEQ ID NO: 1035; WAN024CNW_at; Start 60; Stop 84
agctaaaaatcgacaaagttcaatg

SEQ ID NO: 126081 - DNA, 25 bp, Artificial
  probe
  misc_feature (1)..(25): SEQ ID NO: 1035; WAN024CNW_at; Start 58; Stop 82
tcagctaaaaatcgacaaagttcaa

SEQ ID NO: 126082 - DNA, 25 bp, Artificial
  probe
  misc_feature (1)..(25): SEQ ID NO: 1035; WAN024CNW_at; Start 79; Stop 103
tcaatgttcgactcaatgtttaaat

SEQ ID NO: 126083 - DNA, 25 bp, Artificial
  probe
  misc_feature (1)..(25): SEQ ID NO: 1035; WAN024CNW_at; Start 81; Stop 105
aatgttcgactcaatgtttaaataa

SEQ ID NO: 126084 - DNA, 25 bp, Artificial
  probe
  misc_feature (1)..(25): SEQ ID NO: 1035; WAN024CNW_at; Start 40; Stop 64
tcatatttaacaaaactttcagcta

SEQ ID NO: 126085 - DNA, 25 bp, Artificial
  probe
  misc_feature (1)..(25): SEQ ID NO: 1035; WAN024CNW_at; Start 72; Stop 96
acaaagttcaatgttcgactcaatg

SEQ ID NO: 126086 - DNA, 25 bp, Artificial
  probe
  misc_feature (1)..(25): SEQ ID NO: 1035; WAN024CNW_at; Start 13; Stop 37
cttaggttcaatctttttcgaacat

SEQ ID NO: 126087 - DNA, 25 bp, Artificial
  probe
  misc_feature (1)..(25): SEQ ID NO: 1035; WAN024CNW_at; Start 2; Stop 26
tgaacctttcgcttaggttcaatct

SEQ ID NO: 126088 - DNA, 25 bp, Artificial
  probe
  misc_feature (1)..(25): SEQ ID NO: 1035; WAN024CNW_at; Start 57; Stop 81
ttcagctaaaaatcgacaaagttca

SEQ ID NO: 126089 - DNA, 25 bp, Artificial
  probe
  misc_feature (1)..(25): SEQ ID NO: 1035; WAN024CNW_at; Start 38; Stop 62
tttcatatttaacaaaactttcagc

SEQ ID NO: 126090 - DNA, 25 bp, Artificial
  probe
  misc_feature (1)..(25): SEQ ID NO: 1035; WAN024CNW_at; Start 53; Stop 77
aactttcagctaaaaatcgacaaag

SEQ ID NO: 126091 - DNA, 25 bp, Artificial
  probe
  misc_feature (1)..(25): SEQ ID NO: 1035; WAN024CNW_at; Start 59; Stop 83
cagctaaaaatcgacaaagttcaat

SEQ ID NO: 126092 - DNA, 25 bp, Artificial
  probe
  misc_feature (1)..(25): SEQ ID NO: 1035; WAN024CNW_at; Start 21; Stop 45
caatctttttcgaacattttcatat

SEQ ID NO: 126093 - DNA, 25 bp, Artificial
  probe
  misc_feature (1)..(25): SEQ ID NO: 1035; WAN024CNW_at; Start 69; Stop 93
tcgacaaagttcaatgttcgactca

SEQ ID NO: 126094 - DNA, 25 bp, Artificial
  probe
  misc_feature (1)..(25): SEQ ID NO: 1035; WAN024CNW_at; Start 70; Stop 94
cgacaaagttcaatgttcgactcaa

SEQ ID NO: 126095 - DNA, 25 bp, Artificial
  probe
  misc_feature (1)..(25): SEQ ID NO: 1035; WAN024CNW_at; Start 71; Stop 95
gacaaagttcaatgttcgactcaat

SEQ ID NO: 126096 - DNA, 25 bp, Artificial
  probe
  misc_feature (1)..(25): SEQ ID NO: 1035; WAN024CNW_at; Start 80; Stop 104
caatgttcgactcaatgtttaaata

SEQ ID NO: 126097 - DNA, 25 bp, Artificial
  probe
  misc_feature (1)..(25): SEQ ID NO: 1035; WAN024CNW_at; Start 50; Stop 74
caaaactttcagctaaaaatcgaca

SEQ ID NO: 126098 - DNA, 25 bp, Artificial
  probe
  misc_feature (1)..(25): SEQ ID NO: 1035; WAN024CNW_at; Start 30; Stop 54
tcgaacattttcatatttaacaaaa

SEQ ID NO: 126099 - DNA, 25 bp, Artificial
  probe
  misc_feature (1)..(25): SEQ ID NO: 1035; WAN024CNW_at; Start 77; Stop 101
gttcaatgttcgactcaatgtttaa

SEQ ID NO: 126100 - DNA, 25 bp, Artificial
  probe
  misc_feature (1)..(25): SEQ ID NO: 1035; WAN024CNW_at; Start 41; Stop 65
catatttaacaaaactttcagctaa

SEQ ID NO: 126101 - DNA, 25 bp, Artificial
  probe
  misc_feature (1)..(25): SEQ ID NO: 1035; WAN024CNW_at; Start 73; Stop 97
caaagttcaatgttcgactcaatgt

SEQ ID NO: 126102 - DNA, 25 bp, Artificial
  probe
  misc_feature (1)..(25): SEQ ID NO: 1035; WAN024CNW_at; Start 64; Stop 88
aaaaatcgacaaagttcaatgttcg

SEQ ID NO: 126103 - DNA, 25 bp, Artificial
  probe
  misc_feature (1)..(25): SEQ ID NO: 1035; WAN024CNW_at; Start 75; Stop 99
aagttcaatgttcgactcaatgttt

SEQ ID NO: 126104 - DNA, 25 bp, Artificial
  probe
  misc_feature (1)..(25): SEQ ID NO: 1035; WAN024CNW_at; Start 10; Stop 34
tcgcttaggttcaatctttttcgaa

SEQ ID NO: 126105 - DNA, 25 bp, Artificial
  probe
  misc_feature (1)..(25): SEQ ID NO: 1035; WAN024CNW_at; Start 63; Stop 87
taaaaatcgacaaagttcaatgttc

SEQ ID NO: 126106 - DNA, 25 bp, Artificial
  probe
  misc_feature (1)..(25): SEQ ID NO: 2715; WAN024CNX_at; Start 32; Stop 56
tagacaaagcatttgcaatcttcga

SEQ ID NO: 126107 - DNA, 25 bp, Artificial
  probe
  misc_feature (1)..(25): SEQ ID NO: 2715; WAN024CNX_at; Start 28; Stop 52
ttgctagacaaagcatttgcaatct

SEQ ID NO: 126108 - DNA, 25 bp, Artificial
  probe
  misc_feature (1)..(25): SEQ ID NO: 2715; WAN024CNX_at; Start 72; Stop 96
gagcttgtcgaatataaagacactt

SEQ ID NO: 126109 - DNA, 25 bp, Artificial
  probe
  misc_feature (1)..(25): SEQ ID NO: 2715; WAN024CNX_at; Start 70; Stop 94
gagagcttgtcgaatataaagacac

SEQ ID NO: 126110 - DNA, 25 bp, Artificial
  probe
  misc_feature (1)..(25): SEQ ID NO: 2715; WAN024CNX_at; Start 81; Stop 105
gaatataaagacacttgctttttga

SEQ ID NO: 126111 - DNA, 25 bp, Artificial
  probe
  misc_feature (1)..(25): SEQ ID NO: 2715; WAN024CNX_at; Start 8; Stop 32
cgtctataatagaaccgatgttgct

SEQ ID NO: 126112 - DNA, 25 bp, Artificial
  probe
  misc_feature (1)..(25): SEQ ID NO: 2715; WAN024CNX_at; Start 20; Stop 44
aaccgatgttgctagacaaagcatt

SEQ ID NO: 126113 - DNA, 25 bp, Artificial
  probe
  misc_feature (1)..(25): SEQ ID NO: 2715; WAN024CNX_at; Start 14; Stop 38
taatagaaccgatgttgctagacaa

SEQ ID NO: 126114 - DNA, 25 bp, Artificial
  probe
  misc_feature (1)..(25): SEQ ID NO: 2715; WAN024CNX_at; Start 26; Stop 50
tgttgctagacaaagcatttgcaat

SEQ ID NO: 126115 - DNA, 25 bp, Artificial
  probe
  misc_feature (1)..(25): SEQ ID NO: 2715; WAN024CNX_at; Start 10; Stop 34
tctataatagaaccgatgttgctag

SEQ ID NO: 126116 - DNA, 25 bp, Artificial
  probe
  misc_feature (1)..(25): SEQ ID NO: 2715; WAN024CNX_at; Start 36; Stop 60
caaagcatttgcaatcttcgagtct

SEQ ID NO: 126117 - DNA, 25 bp, Artificial
  probe
  misc_feature (1)..(25): SEQ ID NO: 2715; WAN024CNX_at; Start 68; Stop 92
tcgagagcttgtcgaatataaagac

SEQ ID NO: 126118 - DNA, 25 bp, Artificial
  probe
  misc_feature (1)..(25): SEQ ID NO: 2715; WAN024CNX_at; Start 40; Stop 64
gcatttgcaatcttcgagtctaatt

SEQ ID NO: 126119 - DNA, 25 bp, Artificial
  probe
  misc_feature (1)..(25): SEQ ID NO: 2715; WAN024CNX_at; Start 51; Stop 75
cttcgagtctaatttattcgagagc

SEQ ID NO: 126120 - DNA, 25 bp, Artificial
  probe
  misc_feature (1)..(25): SEQ ID NO: 2715; WAN024CNX_at; Start 24; Stop 48
gatgttgctagacaaagcatttgca

SEQ ID NO: 126121 - DNA, 25 bp, Artificial
  probe
  misc_feature (1)..(25): SEQ ID NO: 2715; WAN024CNX_at; Start 59; Stop 83
ctaatttattcgagagcttgtcgaa

SEQ ID NO: 126122 - DNA, 25 bp, Artificial
  probe
  misc_feature (1)..(25): SEQ ID NO: 2715; WAN024CNX_at; Start 57; Stop 81
gtctaatttattcgagagcttgtcg

SEQ ID NO: 126123 - DNA, 25 bp, Artificial
  probe
  misc_feature (1)..(25): SEQ ID NO: 2715; WAN024CNX_at; Start 74; Stop 98
gcttgtcgaatataaagacacttgc

SEQ ID NO: 126124 - DNA, 25 bp, Artificial
  probe
  misc_feature (1)..(25): SEQ ID NO: 2715; WAN024CNX_at; Start 12; Stop 36
tataatagaaccgatgttgctagac

SEQ ID NO: 126125 - DNA, 25 bp, Artificial
  probe
  misc_feature (1)..(25): SEQ ID NO: 2715; WAN024CNX_at; Start 69; Stop 93
cgagagcttgtcgaatataaagaca

SEQ ID NO: 126126 - DNA, 25 bp, Artificial
  probe
  misc_feature (1)..(25): SEQ ID NO: 2715; WAN024CNX_at; Start 1; Stop 25
atggttgcgtctataatagaaccga

SEQ ID NO: 126127 - DNA, 25 bp, Artificial
  probe
  misc_feature (1)..(25): SEQ ID NO: 2715; WAN024CNX_at; Start 15; Stop 39
aatagaaccgatgttgctagacaaa

SEQ ID NO: 126128 - DNA, 25 bp, Artificial
  probe
  misc_feature (1)..(25): SEQ ID NO: 2715; WAN024CNX_at; Start 7; Stop 31
gcgtctataatagaaccgatgttgc

SEQ ID NO: 126129 - DNA, 25 bp, Artificial
  probe
  misc_feature (1)..(25): SEQ ID NO: 2715; WAN024CNX_at; Start 17; Stop 41
tagaaccgatgttgctagacaaagc

SEQ ID NO: 126130 - DNA, 25 bp, Artificial
  probe
  misc_feature (1)..(25): SEQ ID NO: 2715; WAN024CNX_at; Start 19; Stop 43
gaaccgatgttgctagacaaagcat

SEQ ID NO: 126131 - DNA, 25 bp, Artificial
  probe
  misc_feature (1)..(25): SEQ ID NO: 2715; WAN024CNX_at; Start 30; Stop 54
gctagacaaagcatttgcaatcttc

SEQ ID NO: 126132 - DNA, 25 bp, Artificial
  probe
  misc_feature (1)..(25): SEQ ID NO: 2715; WAN024CNX_at; Start 41; Stop 65
catttgcaatcttcgagtctaattt

SEQ ID NO: 126133 - DNA, 25 bp, Artificial
  probe
  misc_feature (1)..(25): SEQ ID NO: 2715; WAN024CNX_at; Start 46; Stop 70
gcaatcttcgagtctaatttattcg

SEQ ID NO: 126134 - DNA, 25 bp, Artificial
  probe
  misc_feature (1)..(25): SEQ ID NO: 2715; WAN024CNX_at; Start 3; Stop 27
ggttgcgtctataatagaaccgatg

SEQ ID NO: 126135 - DNA, 25 bp, Artificial
  probe
  misc_feature (1)..(25): SEQ ID NO: 2715; WAN024CNX_at; Start 54; Stop 78
cgagtctaatttattcgagagcttg

SEQ ID NO: 126136 - DNA, 25 bp, Artificial
  probe
  misc_feature (1)..(25): SEQ ID NO: 2715; WAN024CNX_at; Start 77; Stop 101
tgtcgaatataaagacacttgcttt

SEQ ID NO: 126137 - DNA, 25 bp, Artificial
  probe
  misc_feature (1)..(25): SEQ ID NO: 2715; WAN024CNX_at; Start 34; Stop 58
gacaaagcatttgcaatcttcgagt

SEQ ID NO: 126138 - DNA, 25 bp, Artificial
  probe
  misc_feature (1)..(25): SEQ ID NO: 2715; WAN024CNX_at; Start 38; Stop 62
aagcatttgcaatcttcgagtctaa

SEQ ID NO: 126139 - DNA, 25 bp, Artificial
  probe
  misc_feature (1)..(25): SEQ ID NO: 2715; WAN024CNX_at; Start 22; Stop 46
ccgatgttgctagacaaagcatttg

SEQ ID NO: 126140 - DNA, 25 bp, Artificial
  probe
  misc_feature (1)..(25): SEQ ID NO: 4315; WAN024CNY_at; Start 61; Stop 85
tatcgttatcaaaatgctcgacaat

SEQ ID NO: 126141 - DNA, 25 bp, Artificial
  probe
  misc_feature (1)..(25): SEQ ID NO: 4315; WAN024CNY_at; Start 58; Stop 82
agatatcgttatcaaaatgctcgac

SEQ ID NO: 126142 - DNA, 25 bp, Artificial
  probe
  misc_feature (1)..(25): SEQ ID NO: 4315; WAN024CNY_at; Start 76; Stop 100
gctcgacaatactttcgcctgttcc

SEQ ID NO: 126143 - DNA, 25 bp, Artificial
  probe
  misc_feature (1)..(25): SEQ ID NO: 4315; WAN024CNY_at; Start 60; Stop 84
atatcgttatcaaaatgctcgacaa

SEQ ID NO: 126144 - DNA, 25 bp, Artificial
  probe
  misc_feature (1)..(25): SEQ ID NO: 4315; WAN024CNY_at; Start 28; Stop 52
catattttctatatttcaaaagtgc

SEQ ID NO: 126145 - DNA, 25 bp, Artificial
  probe
  misc_feature (1)..(25): SEQ ID NO: 4315; WAN024CNY_at; Start 46; Stop 70
aaagtgcttttgagatatcgttatc

SEQ ID NO: 126146 - DNA, 25 bp, Artificial
  probe
  misc_feature (1)..(25): SEQ ID NO: 4315; WAN024CNY_at; Start 9; Stop 33
taggtcgaaactaattttgcatatt

SEQ ID NO: 126147 - DNA, 25 bp, Artificial
  probe
  misc_feature (1)..(25): SEQ ID NO: 4315; WAN024CNY_at; Start 10; Stop 34
aggtcgaaactaattttgcatattt

SEQ ID NO: 126148 - DNA, 25 bp, Artificial
  probe
  misc_feature (1)..(25): SEQ ID NO: 4315; WAN024CNY_at; Start 70; Stop 94
caaaatgctcgacaatactttcgcc

SEQ ID NO: 126149 - DNA, 25 bp, Artificial
  probe
  misc_feature (1)..(25): SEQ ID NO: 4315; WAN024CNY_at; Start 44; Stop 68
caaaagtgcttttgagatatcgtta

SEQ ID NO: 126150 - DNA, 25 bp, Artificial
  probe
  misc_feature (1)..(25): SEQ ID NO: 4315; WAN024CNY_at; Start 64; Stop 88
cgttatcaaaatgctcgacaatact

SEQ ID NO: 126151 - DNA, 25 bp, Artificial
  probe
  misc_feature (1)..(25): SEQ ID NO: 4315; WAN024CNY_at; Start 48; Stop 72
agtgcttttgagatatcgttatcaa

SEQ ID NO: 126152 - DNA, 25 bp, Artificial
  probe
  misc_feature (1)..(25): SEQ ID NO: 4315; WAN024CNY_at; Start 33; Stop 57
tttctatatttcaaaagtgcttttg

SEQ ID NO: 126153 - DNA, 25 bp, Artificial
  probe
  misc_feature (1)..(25): SEQ ID NO: 4315; WAN024CNY_at; Start 57; Stop 81
gagatatcgttatcaaaatgctcga

SEQ ID NO: 126154 - DNA, 25 bp, Artificial
  probe
  misc_feature (1)..(25): SEQ ID NO: 4315; WAN024CNY_at; Start 7; Stop 31
tataggtcgaaactaattttgcata

SEQ ID NO: 126155 - DNA, 25 bp, Artificial
  probe
  misc_feature (1)..(25): SEQ ID NO: 4315; WAN024CNY_at; Start 4; Stop 28
ttgtataggtcgaaactaattttgc

SEQ ID NO: 126156 - DNA, 25 bp, Artificial
  probe
  misc_feature (1)..(25): SEQ ID NO: 4315; WAN024CNY_at; Start 59; Stop 83
gatatcgttatcaaaatgctcgaca

SEQ ID NO: 126157 - DNA, 25 bp, Artificial
  probe
  misc_feature (1)..(25): SEQ ID NO: 4315; WAN024CNY_at; Start 56; Stop 80
tgagatatcgttatcaaaatgctcg

SEQ ID NO: 126158 - DNA, 25 bp, Artificial
  probe
  misc_feature (1)..(25): SEQ ID NO: 4315; WAN024CNY_at; Start 79; Stop 103
cgacaatactttcgcctgttcctct

SEQ ID NO: 126159 - DNA, 25 bp, Artificial
  probe
  misc_feature (1)..(25): SEQ ID NO: 4315; WAN024CNY_at; Start 6; Stop 30
gtataggtcgaaactaattttgcat

SEQ ID NO: 126160 - DNA, 25 bp, Artificial
  probe
  misc_feature (1)..(25): SEQ ID NO: 4315; WAN024CNY_at; Start 72; Stop 96
aaatgctcgacaatactttcgcctg

SEQ ID NO: 126161 - DNA, 25 bp, Artificial
  probe
  misc_feature (1)..(25): SEQ ID NO: 4315; WAN024CNY_at; Start 81; Stop 105
acaatactttcgcctgttcctctag

SEQ ID NO: 126162 - DNA, 25 bp, Artificial
  probe
  misc_feature (1)..(25): SEQ ID NO: 4315; WAN024CNY_at; Start 73; Stop 97
aatgctcgacaatactttcgcctgt

SEQ ID NO: 126163 - DNA, 25 bp, Artificial
  probe
  misc_feature (1)..(25): SEQ ID NO: 4315; WAN024CNY_at; Start 63; Stop 87
tcgttatcaaaatgctcgacaatac

SEQ ID NO: 126164 - DNA, 25 bp, Artificial
  probe
  misc_feature (1)..(25): SEQ ID NO: 4315; WAN024CNY_at; Start 14; Stop 38
cgaaactaattttgcatattttcta

SEQ ID NO: 126165 - DNA, 25 bp, Artificial
  probe
  misc_feature (1)..(25): SEQ ID NO: 4315; WAN024CNY_at; Start 74; Stop 98
atgctcgacaatactttcgcctgtt

SEQ ID NO: 126166 - DNA, 25 bp, Artificial
  probe
  misc_feature (1)..(25): SEQ ID NO: 4315; WAN024CNY_at; Start 47; Stop 71
aagtgcttttgagatatcgttatca

SEQ ID NO: 126167 - DNA, 25 bp, Artificial
  probe
  misc_feature (1)..(25): SEQ ID NO: 4315; WAN024CNY_at; Start 78; Stop 102
tcgacaatactttcgcctgttcctc

SEQ ID NO: 126168 - DNA, 25 bp, Artificial
  probe
  misc_feature (1)..(25): SEQ ID NO: 4315; WAN024CNY_at; Start 75; Stop 99
tgctcgacaatactttcgcctgttc

SEQ ID NO: 126169 - DNA, 25 bp, Artificial
  probe
  misc_feature (1)..(25): SEQ ID NO: 4315; WAN024CNY_at; Start 67; Stop 91
tatcaaaatgctcgacaatactttc

SEQ ID NO: 126170 - DNA, 25 bp, Artificial
  probe
  misc_feature (1)..(25): SEQ ID NO: 4315; WAN024CNY_at; Start 65; Stop 89
gttatcaaaatgctcgacaatactt

SEQ ID NO: 126171 - DNA, 25 bp, Artificial
  probe
  misc_feature (1)..(25): SEQ ID NO: 4315; WAN024CNY_at; Start 5; Stop 29
tgtataggtcgaaactaattttgca

SEQ ID NO: 126172 - DNA, 25 bp, Artificial
  probe
  misc_feature (1)..(25): SEQ ID NO: 4315; WAN024CNY_at; Start 69; Stop 93
tcaaaatgctcgacaatactttcgc

SEQ ID NO: 126173 - DNA, 25 bp, Artificial
  probe
  misc_feature (1)..(25): SEQ ID NO: 4315; WAN024CNY_at; Start 71; Stop 95
aaaatgctcgacaatactttcgcct

SEQ ID NO: 126174 - DNA, 25 bp, Artificial
  probe
  misc_feature (1)..(25): SEQ ID NO: 2157; WAN024CNZ_at; Start 39; Stop 63
cgggtatcccttgagctccgtcatt

SEQ ID NO: 126175 - DNA, 25 bp, Artificial
  probe
  misc_feature (1)..(25): SEQ ID NO: 2157; WAN024CNZ_at; Start 40; Stop 64
gggtatcccttgagctccgtcattc

SEQ ID NO: 126176 - DNA, 25 bp, Artificial
  probe
  misc_feature (1)..(25): SEQ ID NO: 2157; WAN024CNZ_at; Start 75; Stop 99
tcgtccatgtataggctgcagggtc

SEQ ID NO: 126177 - DNA, 25 bp, Artificial
  probe
  misc_feature (1)..(25): SEQ ID NO: 2157; WAN024CNZ_at; Start 7; Stop 31
ataattagtcttaccgtctgcgcct

SEQ ID NO: 126178 - DNA, 25 bp, Artificial
  probe
  misc_feature (1)..(25): SEQ ID NO: 2157; WAN024CNZ_at; Start 50; Stop 74
tgagctccgtcattccccttccatt

SEQ ID NO: 126179 - DNA, 25 bp, Artificial
  probe
  misc_feature (1)..(25): SEQ ID NO: 2157; WAN024CNZ_at; Start 78; Stop 102
tccatgtataggctgcagggtcttt

SEQ ID NO: 126180 - DNA, 25 bp, Artificial
  probe
  misc_feature (1)..(25): SEQ ID NO: 2157; WAN024CNZ_at; Start 74; Stop 98
ttcgtccatgtataggctgcagggt

SEQ ID NO: 126181 - DNA, 25 bp, Artificial
  probe
  misc_feature (1)..(25): SEQ ID NO: 2157; WAN024CNZ_at; Start 4; Stop 28
gaaataattagtcttaccgtctgcg

SEQ ID NO: 126182 - DNA, 25 bp, Artificial
  probe
  misc_feature (1)..(25): SEQ ID NO: 2157; WAN024CNZ_at; Start 12; Stop 36
tagtcttaccgtctgcgcctggctt

SEQ ID NO: 126183 - DNA, 25 bp, Artificial
  probe
  misc_feature (1)..(25): SEQ ID NO: 2157; WAN024CNZ_at; Start 3; Stop 27
ggaaataattagtcttaccgtctgc

SEQ ID NO: 126184 - DNA, 25 bp, Artificial
  probe
  misc_feature (1)..(25): SEQ ID NO: 2157; WAN024CNZ_at; Start 73; Stop 97
tttcgtccatgtataggctgcaggg

SEQ ID NO: 126185 - DNA, 25 bp, Artificial
  probe
  misc_feature (1)..(25): SEQ ID NO: 2157; WAN024CNZ_at; Start 5; Stop 29
aaataattagtcttaccgtctgcgc

SEQ ID NO: 126186 - DNA, 25 bp, Artificial
  probe
  misc_feature (1)..(25): SEQ ID NO: 2157; WAN024CNZ_at; Start 13; Stop 37
agtcttaccgtctgcgcctggcttc

SEQ ID NO: 126187 - DNA, 25 bp, Artificial
  probe
  misc_feature (1)..(25): SEQ ID NO: 2157; WAN024CNZ_at; Start 2; Stop 26
tggaaataattagtcttaccgtctg

SEQ ID NO: 126188 - DNA, 25 bp, Artificial
  probe
  misc_feature (1)..(25): SEQ ID NO: 2157; WAN024CNZ_at; Start 81; Stop 105
atgtataggctgcagggtcttttga

SEQ ID NO: 126189 - DNA, 25 bp, Artificial
  probe
  misc_feature (1)..(25): SEQ ID NO: 2157; WAN024CNZ_at; Start 6; Stop 30
aataattagtcttaccgtctgcgcc

SEQ ID NO: 126190 - DNA, 25 bp, Artificial
  probe
  misc_feature (1)..(25): SEQ ID NO: 2157; WAN024CNZ_at; Start 76; Stop 100
cgtccatgtataggctgcagggtct

SEQ ID NO: 126191 - DNA, 25 bp, Artificial
  probe
  misc_feature (1)..(25): SEQ ID NO: 2157; WAN024CNZ_at; Start 11; Stop 35
ttagtcttaccgtctgcgcctggct

SEQ ID NO: 126192 - DNA, 25 bp, Artificial
  probe
  misc_feature (1)..(25): SEQ ID NO: 2157; WAN024CNZ_at; Start 79; Stop 103
ccatgtataggctgcagggtctttt

SEQ ID NO: 126193 - DNA, 25 bp, Artificial
  probe
  misc_feature (1)..(25): SEQ ID NO: 2157; WAN024CNZ_at; Start 69; Stop 93
tccatttcgtccatgtataggctgc

SEQ ID NO: 126194 - DNA, 25 bp, Artificial
  probe
  misc_feature (1)..(25): SEQ ID NO: 2157; WAN024CNZ_at; Start 71; Stop 95
catttcgtccatgtataggctgcag

SEQ ID NO: 126195 - DNA, 25 bp, Artificial
  probe
  misc_feature (1)..(25): SEQ ID NO: 2157; WAN024CNZ_at; Start 22; Stop 46
gtctgcgcctggcttcccgggtatc

SEQ ID NO: 126196 - DNA, 25 bp, Artificial
  probe
  misc_feature (1)..(25): SEQ ID NO: 2157; WAN024CNZ_at; Start 61; Stop 85
attccccttccatttcgtccatgta

SEQ ID NO: 126197 - DNA, 25 bp, Artificial
  probe
  misc_feature (1)..(25): SEQ ID NO: 2157; WAN024CNZ_at; Start 80; Stop 104
catgtataggctgcagggtcttttg

SEQ ID NO: 126198 - DNA, 25 bp, Artificial
  probe
  misc_feature (1)..(25): SEQ ID NO: 2157; WAN024CNZ_at; Start 10; Stop 34
attagtcttaccgtctgcgcctggc

SEQ ID NO: 126199 - DNA, 25 bp, Artificial
  probe
  misc_feature (1)..(25): SEQ ID NO: 2157; WAN024CNZ_at; Start 31; Stop 55
tggcttcccgggtatcccttgagct

SEQ ID NO: 126200 - DNA, 25 bp, Artificial
  probe
  misc_feature (1)..(25): SEQ ID NO: 2157; WAN024CNZ_at; Start 32; Stop 56
ggcttcccgggtatcccttgagctc

SEQ ID NO: 126201 - DNA, 25 bp, Artificial
  probe
  misc_feature (1)..(25): SEQ ID NO: 2157; WAN024CNZ_at; Start 8; Stop 32
taattagtcttaccgtctgcgcctg

SEQ ID NO: 126202 - DNA, 25 bp, Artificial
  probe
  misc_feature (1)..(25): SEQ ID NO: 2157; WAN024CNZ_at; Start 70; Stop 94
ccatttcgtccatgtataggctgca

SEQ ID NO: 126203 - DNA, 25 bp, Artificial
  probe
  misc_feature (1)..(25): SEQ ID NO: 2157; WAN024CNZ_at; Start 67; Stop 91
cttccatttcgtccatgtataggct

SEQ ID NO: 126204 - DNA, 25 bp, Artificial
  probe
  misc_feature (1)..(25): SEQ ID NO: 2157; WAN024CNZ_at; Start 72; Stop 96
atttcgtccatgtataggctgcagg

SEQ ID NO: 126205 - DNA, 25 bp, Artificial
  probe
  misc_feature (1)..(25): SEQ ID NO: 2157; WAN024CNZ_at; Start 65; Stop 89
cccttccatttcgtccatgtatagg

SEQ ID NO: 126206 - DNA, 25 bp, Artificial
  probe
  misc_feature (1)..(25): SEQ ID NO: 2157; WAN024CNZ_at; Start 68; Stop 92
ttccatttcgtccatgtataggctg

SEQ ID NO: 126207 - DNA, 25 bp, Artificial
  probe
  misc_feature (1)..(25): SEQ ID NO: 2157; WAN024CNZ_at; Start 38; Stop 62
ccgggtatcccttgagctccgtcat

SEQ ID NO: 126208 - DNA, 25 bp, Artificial
  probe
  misc_feature (1)..(25): SEQ ID NO: 2565; WAN024CO2_at; Start 8; Stop 32
aacatggaagattgacgaagactca

SEQ ID NO: 126209 - DNA, 25 bp, Artificial
  probe
  misc_feature (1)..(25): SEQ ID NO: 2565; WAN024CO2_at; Start 24; Stop 48
gaagactcagtcgactataaaccta

SEQ ID NO: 126210 - DNA, 25 bp, Artificial
  probe
  misc_feature (1)..(25): SEQ ID NO: 2565; WAN024CO2_at; Start 52; Stop 76
gagaaattcgaaactatattcgaca

SEQ ID NO: 126211 - DNA, 25 bp, Artificial
  probe
  misc_feature (1)..(25): SEQ ID NO: 2565; WAN024CO2_at; Start 61; Stop 85
gaaactatattcgacaacttatcaa

SEQ ID NO: 126212 - DNA, 25 bp, Artificial
  probe
  misc_feature (1)..(25): SEQ ID NO: 2565; WAN024CO2_at; Start 7; Stop 31
aaacatggaagattgacgaagactc

SEQ ID NO: 126213 - DNA, 25 bp, Artificial
  probe
  misc_feature (1)..(25): SEQ ID NO: 2565; WAN024CO2_at; Start 66; Stop 90
tatattcgacaacttatcaaaaagc

SEQ ID NO: 126214 - DNA, 25 bp, Artificial
  probe
  misc_feature (1)..(25): SEQ ID NO: 2565; WAN024CO2_at; Start 31; Stop 55
cagtcgactataaacctactcgaga

SEQ ID NO: 126215 - DNA, 25 bp, Artificial
  probe
  misc_feature (1)..(25): SEQ ID NO: 2565; WAN024CO2_at; Start 19; Stop 43
ttgacgaagactcagtcgactataa

SEQ ID NO: 126216 - DNA, 25 bp, Artificial
  probe
  misc_feature (1)..(25): SEQ ID NO: 2565; WAN024CO2_at; Start 5; Stop 29
gcaaacatggaagattgacgaagac

SEQ ID NO: 126217 - DNA, 25 bp, Artificial
  probe
  misc_feature (1)..(25): SEQ ID NO: 2565; WAN024CO2_at; Start 30; Stop 54
tcagtcgactataaacctactcgag

SEQ ID NO: 126218 - DNA, 25 bp, Artificial
  probe
  misc_feature (1)..(25): SEQ ID NO: 2565; WAN024CO2_at; Start 10; Stop 34
catggaagattgacgaagactcagt

SEQ ID NO: 126219 - DNA, 25 bp, Artificial
  probe
  misc_feature (1)..(25): SEQ ID NO: 2565; WAN024CO2_at; Start 37; Stop 61
actataaacctactcgagaaattcg

SEQ ID NO: 126220 - DNA, 25 bp, Artificial
  probe
  misc_feature (1)..(25): SEQ ID NO: 2565; WAN024CO2_at; Start 23; Stop 47
cgaagactcagtcgactataaacct

SEQ ID NO: 126221 - DNA, 25 bp, Artificial
  probe
  misc_feature (1)..(25): SEQ ID NO: 2565; WAN024CO2_at; Start 27; Stop 51
gactcagtcgactataaacctactc

SEQ ID NO: 126222 - DNA, 25 bp, Artificial
  probe
  misc_feature (1)..(25): SEQ ID NO: 2565; WAN024CO2_at; Start 54; Stop 78
gaaattcgaaactatattcgacaac

SEQ ID NO: 126223 - DNA, 25 bp, Artificial
  probe
  misc_feature (1)..(25): SEQ ID NO: 2565; WAN024CO2_at; Start 39; Stop 63
tataaacctactcgagaaattcgaa

SEQ ID NO: 126224 - DNA, 25 bp, Artificial
  probe
  misc_feature (1)..(25): SEQ ID NO: 2565; WAN024CO2_at; Start 49; Stop 73
ctcgagaaattcgaaactatattcg

SEQ ID NO: 126225 - DNA, 25 bp, Artificial
  probe
  misc_feature (1)..(25): SEQ ID NO: 2565; WAN024CO2_at; Start 25; Stop 49
aagactcagtcgactataaacctac

SEQ ID NO: 126226 - DNA, 25 bp, Artificial
  probe
  misc_feature (1)..(25): SEQ ID NO: 2565; WAN024CO2_at; Start 12; Stop 36
tggaagattgacgaagactcagtcg

SEQ ID NO: 126227 - DNA, 25 bp, Artificial
  probe
  misc_feature (1)..(25): SEQ ID NO: 2565; WAN024CO2_at; Start 15; Stop 39
aagattgacgaagactcagtcgact

SEQ ID NO: 126228 - DNA, 25 bp, Artificial
  probe
  misc_feature (1)..(25): SEQ ID NO: 2565; WAN024CO2_at; Start 73; Stop 97
gacaacttatcaaaaagcaatcacg

SEQ ID NO: 126229 - DNA, 25 bp, Artificial
  probe
  misc_feature (1)..(25): SEQ ID NO: 2565; WAN024CO2_at; Start 13; Stop 37
ggaagattgacgaagactcagtcga

SEQ ID NO: 126230 - DNA, 25 bp, Artificial
  probe
  misc_feature (1)..(25): SEQ ID NO: 2565; WAN024CO2_at; Start 17; Stop 41
gattgacgaagactcagtcgactat

SEQ ID NO: 126231 - DNA, 25 bp, Artificial
  probe
  misc_feature (1)..(25): SEQ ID NO: 2565; WAN024CO2_at; Start 36; Stop 60
gactataaacctactcgagaaattc

SEQ ID NO: 126232 - DNA, 25 bp, Artificial
  probe
  misc_feature (1)..(25): SEQ ID NO: 2565; WAN024CO2_at; Start 14; Stop 38
gaagattgacgaagactcagtcgac

SEQ ID NO: 126233 - DNA, 25 bp, Artificial
  probe
  misc_feature (1)..(25): SEQ ID NO: 2565; WAN024CO2_at; Start 3; Stop 27
gggcaaacatggaagattgacgaag

SEQ ID NO: 126234 - DNA, 25 bp, Artificial
  probe
  misc_feature (1)..(25): SEQ ID NO: 2565; WAN024CO2_at; Start 80; Stop 104
tatcaaaaagcaatcacgctttatg

SEQ ID NO: 126235 - DNA, 25 bp, Artificial
  probe
  misc_feature (1)..(25): SEQ ID NO: 2565; WAN024CO2_at; Start 68; Stop 92
tattcgacaacttatcaaaaagcaa

SEQ ID NO: 126236 - DNA, 25 bp, Artificial
  probe
  misc_feature (1)..(25): SEQ ID NO: 2565; WAN024CO2_at; Start 75; Stop 99
caacttatcaaaaagcaatcacgct

SEQ ID NO: 126237 - DNA, 25 bp, Artificial
  probe
  misc_feature (1)..(25): SEQ ID NO: 2565; WAN024CO2_at; Start 33; Stop 57
gtcgactataaacctactcgagaaa

SEQ ID NO: 126238 - DNA, 25 bp, Artificial
  probe
  misc_feature (1)..(25): SEQ ID NO: 2565; WAN024CO2_at; Start 21; Stop 45
gacgaagactcagtcgactataaac

SEQ ID NO: 126239 - DNA, 25 bp, Artificial
  probe
  misc_feature (1)..(25): SEQ ID NO: 2565; WAN024CO2_at; Start 6; Stop 30
caaacatggaagattgacgaagact

SEQ ID NO: 126240 - DNA, 25 bp, Artificial
  probe
  misc_feature (1)..(25): SEQ ID NO: 2565; WAN024CO2_at; Start 45; Stop 69
cctactcgagaaattcgaaactata

SEQ ID NO: 126241 - DNA, 25 bp, Artificial
  probe
  misc_feature (1)..(25): SEQ ID NO: 2565; WAN024CO2_at; Start 2; Stop 26
tgggcaaacatggaagattgacgaa

SEQ ID NO: 126242 - DNA, 25 bp, Artificial
  probe
  misc_feature (1)..(25): SEQ ID NO: 4146; WAN024CO3_at; Start 12; Stop 36
tatcattgcaactggtgtgactcag

SEQ ID NO: 126243 - DNA, 25 bp, Artificial
  probe
  misc_feature (1)..(25): SEQ ID NO: 4146; WAN024CO3_at; Start 40; Stop 64
ttacctggaacggtactactgagcc

SEQ ID NO: 126244 - DNA, 25 bp, Artificial
  probe
  misc_feature (1)..(25): SEQ ID NO: 4146; WAN024CO3_at; Start 30; Stop 54
gactcagcctttacctggaacggta

SEQ ID NO: 126245 - DNA, 25 bp, Artificial
  probe
  misc_feature (1)..(25): SEQ ID NO: 4146; WAN024CO3_at; Start 20; Stop 44
caactggtgtgactcagcctttacc

SEQ ID NO: 126246 - DNA, 25 bp, Artificial
  probe
  misc_feature (1)..(25): SEQ ID NO: 4146; WAN024CO3_at; Start 50; Stop 74
cggtactactgagccggaatatatc

SEQ ID NO: 126247 - DNA, 25 bp, Artificial
  probe
  misc_feature (1)..(25): SEQ ID NO: 4146; WAN024CO3_at; Start 43; Stop 67
cctggaacggtactactgagccgga

SEQ ID NO: 126248 - DNA, 25 bp, Artificial
  probe
  misc_feature (1)..(25): SEQ ID NO: 4146; WAN024CO3_at; Start 18; Stop 42
tgcaactggtgtgactcagccttta

SEQ ID NO: 126249 - DNA, 25 bp, Artificial
  probe
  misc_feature (1)..(25): SEQ ID NO: 4146; WAN024CO3_at; Start 41; Stop 65
tacctggaacggtactactgagccg

SEQ ID NO: 126250 - DNA, 25 bp, Artificial
  probe
  misc_feature (1)..(25): SEQ ID NO: 4146; WAN024CO3_at; Start 4; Stop 28
gatgcgactatcattgcaactggtg

SEQ ID NO: 126251 - DNA, 25 bp, Artificial
  probe
  misc_feature (1)..(25): SEQ ID NO: 4146; WAN024CO3_at; Start 60; Stop 84
gagccggaatatatcacaggcaaag

SEQ ID NO: 126252 - DNA, 25 bp, Artificial
  probe
  misc_feature (1)..(25): SEQ ID NO: 4146; WAN024CO3_at; Start 64; Stop 88
cggaatatatcacaggcaaagaagc

SEQ ID NO: 126253 - DNA, 25 bp, Artificial
  probe
  misc_feature (1)..(25): SEQ ID NO: 4146; WAN024CO3_at; Start 14; Stop 38
tcattgcaactggtgtgactcagcc

SEQ ID NO: 126254 - DNA, 25 bp, Artificial
  probe
  misc_feature (1)..(25): SEQ ID NO: 4146; WAN024CO3_at; Start 66; Stop 90
gaatatatcacaggcaaagaagctg

SEQ ID NO: 126255 - DNA, 25 bp, Artificial
  probe
  misc_feature (1)..(25): SEQ ID NO: 4146; WAN024CO3_at; Start 47; Stop 71
gaacggtactactgagccggaatat

SEQ ID NO: 126256 - DNA, 25 bp, Artificial
  probe
  misc_feature (1)..(25): SEQ ID NO: 4146; WAN024CO3_at; Start 15; Stop 39
cattgcaactggtgtgactcagcct

SEQ ID NO: 126257 - DNA, 25 bp, Artificial
  probe
  misc_feature (1)..(25): SEQ ID NO: 4146; WAN024CO3_at; Start 71; Stop 95
tatcacaggcaaagaagctgctagt

SEQ ID NO: 126258 - DNA, 25 bp, Artificial
  probe
  misc_feature (1)..(25): SEQ ID NO: 4146; WAN024CO3_at; Start 81; Stop 105
aaagaagctgctagtcgaatcttga

SEQ ID NO: 126259 - DNA, 25 bp, Artificial
  probe
  misc_feature (1)..(25): SEQ ID NO: 4146; WAN024CO3_at; Start 45; Stop 69
tggaacggtactactgagccggaat

SEQ ID NO: 126260 - DNA, 25 bp, Artificial
  probe
  misc_feature (1)..(25): SEQ ID NO: 4146; WAN024CO3_at; Start 38; Stop 62
ctttacctggaacggtactactgag

SEQ ID NO: 126261 - DNA, 25 bp, Artificial
  probe
  misc_feature (1)..(25): SEQ ID NO: 4146; WAN024CO3_at; Start 54; Stop 78
actactgagccggaatatatcacag

SEQ ID NO: 126262 - DNA, 25 bp, Artificial
  probe
  misc_feature (1)..(25): SEQ ID NO: 4146; WAN024CO3_at; Start 56; Stop 80
tactgagccggaatatatcacaggc

SEQ ID NO: 126263 - DNA, 25 bp, Artificial
  probe
  misc_feature (1)..(25): SEQ ID NO: 4146; WAN024CO3_at; Start 58; Stop 82
ctgagccggaatatatcacaggcaa

SEQ ID NO: 126264 - DNA, 25 bp, Artificial
  probe
  misc_feature (1)..(25): SEQ ID NO: 4146; WAN024CO3_at; Start 76; Stop 100
caggcaaagaagctgctagtcgaat

SEQ ID NO: 126265 - DNA, 25 bp, Artificial
  probe
  misc_feature (1)..(25): SEQ ID NO: 4146; WAN024CO3_at; Start 24; Stop 48
tggtgtgactcagcctttacctgga

SEQ ID NO: 126266 - DNA, 25 bp, Artificial
  probe
  misc_feature (1)..(25): SEQ ID NO: 4146; WAN024CO3_at; Start 29; Stop 53
tgactcagcctttacctggaacggt

SEQ ID NO: 126267 - DNA, 25 bp, Artificial
  probe
  misc_feature (1)..(25): SEQ ID NO: 4146; WAN024CO3_at; Start 74; Stop 98
cacaggcaaagaagctgctagtcga

SEQ ID NO: 126268 - DNA, 25 bp, Artificial
  probe
  misc_feature (1)..(25): SEQ ID NO: 4146; WAN024CO3_at; Start 7; Stop 31
gcgactatcattgcaactggtgtga

SEQ ID NO: 126269 - DNA, 25 bp, Artificial
  probe
  misc_feature (1)..(25): SEQ ID NO: 4146; WAN024CO3_at; Start 78; Stop 102
ggcaaagaagctgctagtcgaatct

SEQ ID NO: 126270 - DNA, 25 bp, Artificial
  probe
  misc_feature (1)..(25): SEQ ID NO: 4146; WAN024CO3_at; Start 9; Stop 33
gactatcattgcaactggtgtgact

SEQ ID NO: 126271 - DNA, 25 bp, Artificial
  probe
  misc_feature (1)..(25): SEQ ID NO: 4146; WAN024CO3_at; Start 33; Stop 57
tcagcctttacctggaacggtacta

SEQ ID NO: 126272 - DNA, 25 bp, Artificial
  probe
  misc_feature (1)..(25): SEQ ID NO: 4146; WAN024CO3_at; Start 73; Stop 97
tcacaggcaaagaagctgctagtcg

SEQ ID NO: 126273 - DNA, 25 bp, Artificial
  probe
  misc_feature (1)..(25): SEQ ID NO: 4146; WAN024CO3_at; Start 69; Stop 93
tatatcacaggcaaagaagctgcta

SEQ ID NO: 126274 - DNA, 25 bp, Artificial
  probe
  misc_feature (1)..(25): SEQ ID NO: 4146; WAN024CO3_at; Start 2; Stop 26
tggatgcgactatcattgcaactgg

SEQ ID NO: 126275 - DNA, 25 bp, Artificial
  probe
  misc_feature (1)..(25): SEQ ID NO: 4146; WAN024CO3_at; Start 27; Stop 51
tgtgactcagcctttacctggaacg

SEQ ID NO: 126276 - DNA, 25 bp, Artificial
  probe
  misc_feature (1)..(25): SEQ ID NO: 4046; WAN024CO4_at; Start 47; Stop 71
tcaacggaaaaacaggaagcctgca

SEQ ID NO: 126277 - DNA, 25 bp, Artificial
  probe
  misc_feature (1)..(25): SEQ ID NO: 4046; WAN024CO4_at; Start 81; Stop 105
acttacatttcaggaaacgctctaa

SEQ ID NO: 126278 - DNA, 25 bp, Artificial
  probe
  misc_feature (1)..(25): SEQ ID NO: 4046; WAN024CO4_at; Start 32; Stop 56
tgctcagttacttgctcaacggaaa

SEQ ID NO: 126279 - DNA, 25 bp, Artificial
  probe
  misc_feature (1)..(25): SEQ ID NO: 4046; WAN024CO4_at; Start 53; Stop 77
gaaaaacaggaagcctgcagttgag

SEQ ID NO: 126280 - DNA, 25 bp, Artificial
  probe
  misc_feature (1)..(25): SEQ ID NO: 4046; WAN024CO4_at; Start 6; Stop 30
aagcctcgttctagcaagaagaacg

SEQ ID NO: 126281 - DNA, 25 bp, Artificial
  probe
  misc_feature (1)..(25): SEQ ID NO: 4046; WAN024CO4_at; Start 74; Stop 98
tgaggttacttacatttcaggaaac

SEQ ID NO: 126282 - DNA, 25 bp, Artificial
  probe
  misc_feature (1)..(25): SEQ ID NO: 4046; WAN024CO4_at; Start 78; Stop 102
gttacttacatttcaggaaacgctc

SEQ ID NO: 126283 - DNA, 25 bp, Artificial
  probe
  misc_feature (1)..(25): SEQ ID NO: 4046; WAN024CO4_at; Start 55; Stop 79
aaaacaggaagcctgcagttgaggt

SEQ ID NO: 126284 - DNA, 25 bp, Artificial
  probe
  misc_feature (1)..(25): SEQ ID NO: 4046; WAN024CO4_at; Start 35; Stop 59
tcagttacttgctcaacggaaaaac

SEQ ID NO: 126285 - DNA, 25 bp, Artificial
  probe
  misc_feature (1)..(25): SEQ ID NO: 4046; WAN024CO4_at; Start 30; Stop 54
gatgctcagttacttgctcaacgga

SEQ ID NO: 126286 - DNA, 25 bp, Artificial
  probe
  misc_feature (1)..(25): SEQ ID NO: 4046; WAN024CO4_at; Start 44; Stop 68
tgctcaacggaaaaacaggaagcct

SEQ ID NO: 126287 - DNA, 25 bp, Artificial
  probe
  misc_feature (1)..(25): SEQ ID NO: 4046; WAN024CO4_at; Start 39; Stop 63
ttacttgctcaacggaaaaacagga

SEQ ID NO: 126288 - DNA, 25 bp, Artificial
  probe
  misc_feature (1)..(25): SEQ ID NO: 4046; WAN024CO4_at; Start 29; Stop 53
cgatgctcagttacttgctcaacgg

SEQ ID NO: 126289 - DNA, 25 bp, Artificial
  probe
  misc_feature (1)..(25): SEQ ID NO: 4046; WAN024CO4_at; Start 46; Stop 70
ctcaacggaaaaacaggaagcctgc

SEQ ID NO: 126290 - DNA, 25 bp, Artificial
  probe
  misc_feature (1)..(25): SEQ ID NO: 4046; WAN024CO4_at; Start 33; Stop 57
gctcagttacttgctcaacggaaaa

SEQ ID NO: 126291 - DNA, 25 bp, Artificial
  probe
  misc_feature (1)..(25): SEQ ID NO: 4046; WAN024CO4_at; Start 51; Stop 75
cggaaaaacaggaagcctgcagttg

SEQ ID NO: 126292 - DNA, 25 bp, Artificial
  probe
  misc_feature (1)..(25): SEQ ID NO: 4046; WAN024CO4_at; Start 70; Stop 94
cagttgaggttacttacatttcagg

SEQ ID NO: 126293 - DNA, 25 bp, Artificial
  probe
  misc_feature (1)..(25): SEQ ID NO: 4046; WAN024CO4_at; Start 37; Stop 61
agttacttgctcaacggaaaaacag

SEQ ID NO: 126294 - DNA, 25 bp, Artificial
  probe
  misc_feature (1)..(25): SEQ ID NO: 4046; WAN024CO4_at; Start 62; Stop 86
gaagcctgcagttgaggttacttac

SEQ ID NO: 126295 - DNA, 25 bp, Artificial
  probe
  misc_feature (1)..(25): SEQ ID NO: 4046; WAN024CO4_at; Start 13; Stop 37
gttctagcaagaagaacgatgctca

SEQ ID NO: 126296 - DNA, 25 bp, Artificial
  probe
  misc_feature (1)..(25): SEQ ID NO: 4046; WAN024CO4_at; Start 3; Stop 27
gcaaagcctcgttctagcaagaaga

SEQ ID NO: 126297 - DNA, 25 bp, Artificial
  probe
  misc_feature (1)..(25): SEQ ID NO: 4046; WAN024CO4_at; Start 19; Stop 43
gcaagaagaacgatgctcagttact

SEQ ID NO: 126298 - DNA, 25 bp, Artificial
  probe
  misc_feature (1)..(25): SEQ ID NO: 4046; WAN024CO4_at; Start 15; Stop 39
tctagcaagaagaacgatgctcagt

SEQ ID NO: 126299 - DNA, 25 bp, Artificial
  probe
  misc_feature (1)..(25): SEQ ID NO: 4046; WAN024CO4_at; Start 59; Stop 83
caggaagcctgcagttgaggttact

SEQ ID NO: 126300 - DNA, 25 bp, Artificial
  probe
  misc_feature (1)..(25): SEQ ID NO: 4046; WAN024CO4_at; Start 42; Stop 66
cttgctcaacggaaaaacaggaagc

SEQ ID NO: 126301 - DNA, 25 bp, Artificial
  probe
  misc_feature (1)..(25): SEQ ID NO: 4046; WAN024CO4_at; Start 65; Stop 89
gcctgcagttgaggttacttacatt

SEQ ID NO: 126302 - DNA, 25 bp, Artificial
  probe
  misc_feature (1)..(25): SEQ ID NO: 4046; WAN024CO4_at; Start 8; Stop 32
gcctcgttctagcaagaagaacgat

SEQ ID NO: 126303 - DNA, 25 bp, Artificial
  probe
  misc_feature (1)..(25): SEQ ID NO: 4046; WAN024CO4_at; Start 4; Stop 28
caaagcctcgttctagcaagaagaa

SEQ ID NO: 126304 - DNA, 25 bp, Artificial
  probe
  misc_feature (1)..(25): SEQ ID NO: 4046; WAN024CO4_at; Start 17; Stop 41
tagcaagaagaacgatgctcagtta

SEQ ID NO: 126305 - DNA, 25 bp, Artificial
  probe
  misc_feature (1)..(25): SEQ ID NO: 4046; WAN024CO4_at; Start 57; Stop 81
aacaggaagcctgcagttgaggtta

SEQ ID NO: 126306 - DNA, 25 bp, Artificial
  probe
  misc_feature (1)..(25): SEQ ID NO: 4046; WAN024CO4_at; Start 1; Stop 25
gtgcaaagcctcgttctagcaagaa

SEQ ID NO: 126307 - DNA, 25 bp, Artificial
  probe
  misc_feature (1)..(25): SEQ ID NO: 4046; WAN024CO4_at; Start 48; Stop 72
caacggaaaaacaggaagcctgcag

SEQ ID NO: 126308 - DNA, 25 bp, Artificial
  probe
  misc_feature (1)..(25): SEQ ID NO: 4046; WAN024CO4_at; Start 23; Stop 47
gaagaacgatgctcagttacttgct

SEQ ID NO: 126309 - DNA, 25 bp, Artificial
  probe
  misc_feature (1)..(25): SEQ ID NO: 4046; WAN024CO4_at; Start 26; Stop 50
gaacgatgctcagttacttgctcaa

SEQ ID NO: 126310 - DNA, 25 bp, Artificial
  probe
  misc_feature (1)..(25): SEQ ID NO: 3938; WAN024CO5_at; Start 12; Stop 36
tactggaaacaaatggcgcaattct

SEQ ID NO: 126311 - DNA, 25 bp, Artificial
  probe
  misc_feature (1)..(25): SEQ ID NO: 3938; WAN024CO5_at; Start 48; Stop 72
tataagcaagaacagcttgaaactg

SEQ ID NO: 126312 - DNA, 25 bp, Artificial
  probe
  misc_feature (1)..(25): SEQ ID NO: 3938; WAN024CO5_at; Start 19; Stop 43
aacaaatggcgcaattctattatga

SEQ ID NO: 126313 - DNA, 25 bp, Artificial
  probe
  misc_feature (1)..(25): SEQ ID NO: 3938; WAN024CO5_at; Start 71; Stop 95
tgatgaaaagtcgaacgctggttcg

SEQ ID NO: 126314 - DNA, 25 bp, Artificial
  probe
  misc_feature (1)..(25): SEQ ID NO: 3938; WAN024CO5_at; Start 42; Stop 66
gaccaatataagcaagaacagcttg

SEQ ID NO: 126315 - DNA, 25 bp, Artificial
  probe
  misc_feature (1)..(25): SEQ ID NO: 3938; WAN024CO5_at; Start 54; Stop 78
caagaacagcttgaaactgatgaaa

SEQ ID NO: 126316 - DNA, 25 bp, Artificial
  probe
  misc_feature (1)..(25): SEQ ID NO: 3938; WAN024CO5_at; Start 81; Stop 105
tcgaacgctggttcgacaatcttaa

SEQ ID NO: 126317 - DNA, 25 bp, Artificial
  probe
  misc_feature (1)..(25): SEQ ID NO: 3938; WAN024CO5_at; Start 44; Stop 68
ccaatataagcaagaacagcttgaa

SEQ ID NO: 126318 - DNA, 25 bp, Artificial
  probe
  misc_feature (1)..(25): SEQ ID NO: 3938; WAN024CO5_at; Start 56; Stop 80
agaacagcttgaaactgatgaaaag

SEQ ID NO: 126319 - DNA, 25 bp, Artificial
  probe
  misc_feature (1)..(25): SEQ ID NO: 3938; WAN024CO5_at; Start 77; Stop 101
aaagtcgaacgctggttcgacaatc

SEQ ID NO: 126320 - DNA, 25 bp, Artificial
  probe
  misc_feature (1)..(25): SEQ ID NO: 3938; WAN024CO5_at; Start 72; Stop 96
gatgaaaagtcgaacgctggttcga

SEQ ID NO: 126321 - DNA, 25 bp, Artificial
  probe
  misc_feature (1)..(25): SEQ ID NO: 3938; WAN024CO5_at; Start 68; Stop 92
aactgatgaaaagtcgaacgctggt

SEQ ID NO: 126322 - DNA, 25 bp, Artificial
  probe
  misc_feature (1)..(25): SEQ ID NO: 3938; WAN024CO5_at; Start 21; Stop 45
caaatggcgcaattctattatgacc

SEQ ID NO: 126323 - DNA, 25 bp, Artificial
  probe
  misc_feature (1)..(25): SEQ ID NO: 3938; WAN024CO5_at; Start 70; Stop 94
ctgatgaaaagtcgaacgctggttc

SEQ ID NO: 126324 - DNA, 25 bp, Artificial
  probe
  misc_feature (1)..(25): SEQ ID NO: 3938; WAN024CO5_at; Start 6; Stop 30
gcagactactggaaacaaatggcgc

SEQ ID NO: 126325 - DNA, 25 bp, Artificial
  probe
  misc_feature (1)..(25): SEQ ID NO: 3938; WAN024CO5_at; Start 39; Stop 63
tatgaccaatataagcaagaacagc

SEQ ID NO: 126326 - DNA, 25 bp, Artificial
  probe
  misc_feature (1)..(25): SEQ ID NO: 3938; WAN024CO5_at; Start 11; Stop 35
ctactggaaacaaatggcgcaattc

SEQ ID NO: 126327 - DNA, 25 bp, Artificial
  probe
  misc_feature (1)..(25): SEQ ID NO: 3938; WAN024CO5_at; Start 1; Stop 25
gtgacgcagactactggaaacaaat

SEQ ID NO: 126328 - DNA, 25 bp, Artificial
  probe
  misc_feature (1)..(25): SEQ ID NO: 3938; WAN024CO5_at; Start 3; Stop 27
gacgcagactactggaaacaaatgg

SEQ ID NO: 126329 - DNA, 25 bp, Artificial
  probe
  misc_feature (1)..(25): SEQ ID NO: 3938; WAN024CO5_at; Start 74; Stop 98
tgaaaagtcgaacgctggttcgaca

SEQ ID NO: 126330 - DNA, 25 bp, Artificial
  probe
  misc_feature (1)..(25): SEQ ID NO: 3938; WAN024CO5_at; Start 50; Stop 74
taagcaagaacagcttgaaactgat

SEQ ID NO: 126331 - DNA, 25 bp, Artificial
  probe
  misc_feature (1)..(25): SEQ ID NO: 3938; WAN024CO5_at; Start 9; Stop 33
gactactggaaacaaatggcgcaat

SEQ ID NO: 126332 - DNA, 25 bp, Artificial
  probe
  misc_feature (1)..(25): SEQ ID NO: 3938; WAN024CO5_at; Start 27; Stop 51
gcgcaattctattatgaccaatata

SEQ ID NO: 126333 - DNA, 25 bp, Artificial
  probe
  misc_feature (1)..(25): SEQ ID NO: 3938; WAN024CO5_at; Start 41; Stop 65
tgaccaatataagcaagaacagctt

SEQ ID NO: 126334 - DNA, 25 bp, Artificial
  probe
  misc_feature (1)..(25): SEQ ID NO: 3938; WAN024CO5_at; Start 25; Stop 49
tggcgcaattctattatgaccaata

SEQ ID NO: 126335 - DNA, 25 bp, Artificial
  probe
  misc_feature (1)..(25): SEQ ID NO: 3938; WAN024CO5_at; Start 8; Stop 32
agactactggaaacaaatggcgcaa

SEQ ID NO: 126336 - DNA, 25 bp, Artificial
  probe
  misc_feature (1)..(25): SEQ ID NO: 3938; WAN024CO5_at; Start 7; Stop 31
cagactactggaaacaaatggcgca

SEQ ID NO: 126337 - DNA, 25 bp, Artificial
  probe
  misc_feature (1)..(25): SEQ ID NO: 3938; WAN024CO5_at; Start 13; Stop 37
actggaaacaaatggcgcaattcta

SEQ ID NO: 126338 - DNA, 25 bp, Artificial
  probe
  misc_feature (1)..(25): SEQ ID NO: 3938; WAN024CO5_at; Start 4; Stop 28
acgcagactactggaaacaaatggc

SEQ ID NO: 126339 - DNA, 25 bp, Artificial
  probe
  misc_feature (1)..(25): SEQ ID NO: 3938; WAN024CO5_at; Start 69; Stop 93
actgatgaaaagtcgaacgctggtt

SEQ ID NO: 126340 - DNA, 25 bp, Artificial
  probe
  misc_feature (1)..(25): SEQ ID NO: 3938; WAN024CO5_at; Start 14; Stop 38
ctggaaacaaatggcgcaattctat

SEQ ID NO: 126341 - DNA, 25 bp, Artificial
  probe
  misc_feature (1)..(25): SEQ ID NO: 3938; WAN024CO5_at; Start 23; Stop 47
aatggcgcaattctattatgaccaa

SEQ ID NO: 126342 - DNA, 25 bp, Artificial
  probe
  misc_feature (1)..(25): SEQ ID NO: 3938; WAN024CO5_at; Start 67; Stop 91
aaactgatgaaaagtcgaacgctgg

SEQ ID NO: 126343 - DNA, 25 bp, Artificial
  probe
  misc_feature (1)..(25): SEQ ID NO: 3938; WAN024CO5_at; Start 53; Stop 77
gcaagaacagcttgaaactgatgaa

SEQ ID NO: 126344 - DNA, 25 bp, Artificial
  probe
  misc_feature (1)..(25): SEQ ID NO: 2809; WAN024CO6_at; Start 75; Stop 99
ttcccaaagagaaacttgcttcgct

SEQ ID NO: 126345 - DNA, 25 bp, Artificial
  probe
  misc_feature (1)..(25): SEQ ID NO: 2809; WAN024CO6_at; Start 97; Stop 121
gctttgctattcatagcaacctcct

SEQ ID NO: 126346 - DNA, 25 bp, Artificial
  probe
  misc_feature (1)..(25): SEQ ID NO: 2809; WAN024CO6_at; Start 81; Stop 105
aagagaaacttgcttcgctttgcta

SEQ ID NO: 126347 - DNA, 25 bp, Artificial
  probe
  misc_feature (1)..(25): SEQ ID NO: 2809; WAN024CO6_at; Start 36; Stop 60
gacagtcatcaataacaagagtttt

SEQ ID NO: 126348 - DNA, 25 bp, Artificial
  probe
  misc_feature (1)..(25): SEQ ID NO: 2809; WAN024CO6_at; Start 88; Stop 112
acttgcttcgctttgctattcatag

SEQ ID NO: 126349 - DNA, 25 bp, Artificial
  probe
  misc_feature (1)..(25): SEQ ID NO: 2809; WAN024CO6_at; Start 143; Stop 167
ttctagaaaagatagcgcttggcgc

SEQ ID NO: 126350 - DNA, 25 bp, Artificial
  probe
  misc_feature (1)..(25): SEQ ID NO: 2809; WAN024CO6_at; Start 74; Stop 98
tttcccaaagagaaacttgcttcgc

SEQ ID NO: 126351 - DNA, 25 bp, Artificial
  probe
  misc_feature (1)..(25): SEQ ID NO: 2809; WAN024CO6_at; Start 141; Stop 165
ttttctagaaaagatagcgcttggc

SEQ ID NO: 126352 - DNA, 25 bp, Artificial
  probe
  misc_feature (1)..(25): SEQ ID NO: 2809; WAN024CO6_at; Start 34; Stop 58
gggacagtcatcaataacaagagtt

SEQ ID NO: 126353 - DNA, 25 bp, Artificial
  probe
  misc_feature (1)..(25): SEQ ID NO: 2809; WAN024CO6_at; Start 79; Stop 103
caaagagaaacttgcttcgctttgc

SEQ ID NO: 126354 - DNA, 25 bp, Artificial
  probe
  misc_feature (1)..(25): SEQ ID NO: 2809; WAN024CO6_at; Start 91; Stop 115
tgcttcgctttgctattcatagcaa

SEQ ID NO: 126355 - DNA, 25 bp, Artificial
  probe
  misc_feature (1)..(25): SEQ ID NO: 2809; WAN024CO6_at; Start 61; Stop 85
tgtttcttgattctttcccaaagag

SEQ ID NO: 126356 - DNA, 25 bp, Artificial
  probe
  misc_feature (1)..(25): SEQ ID NO: 2809; WAN024CO6_at; Start 24; Stop 48
aactaaaccggggacagtcatcaat

SEQ ID NO: 126357 - DNA, 25 bp, Artificial
  probe
  misc_feature (1)..(25): SEQ ID NO: 2809; WAN024CO6_at; Start 142; Stop 166
tttctagaaaagatagcgcttggcg

SEQ ID NO: 126358 - DNA, 25 bp, Artificial
  probe
  misc_feature (1)..(25): SEQ ID NO: 2809; WAN024CO6_at; Start 69; Stop 93
gattctttcccaaagagaaacttgc

SEQ ID NO: 126359 - DNA, 25 bp, Artificial
  probe
  misc_feature (1)..(25): SEQ ID NO: 2809; WAN024CO6_at; Start 215; Stop 239
aaatcttttttatctgaattcattc

SEQ ID NO: 126360 - DNA, 25 bp, Artificial
  probe
  misc_feature (1)..(25): SEQ ID NO: 2809; WAN024CO6_at; Start 76; Stop 100
tcccaaagagaaacttgcttcgctt

SEQ ID NO: 126361 - DNA, 25 bp, Artificial
  probe
  misc_feature (1)..(25): SEQ ID NO: 2809; WAN024CO6_at; Start 108; Stop 132
catagcaacctccttttttgaaacg

SEQ ID NO: 126362 - DNA, 25 bp, Artificial
  probe
  misc_feature (1)..(25): SEQ ID NO: 2809; WAN024CO6_at; Start 159; Stop 183
gcttggcgctgtctctttatttctt

SEQ ID NO: 126363 - DNA, 25 bp, Artificial
  probe
  misc_feature (1)..(25): SEQ ID NO: 2809; WAN024CO6_at; Start 102; Stop 126
gctattcatagcaacctcctttttt

SEQ ID NO: 126364 - DNA, 25 bp, Artificial
  probe
  misc_feature (1)..(25): SEQ ID NO: 2809; WAN024CO6_at; Start 148; Stop 172
gaaaagatagcgcttggcgctgtct

SEQ ID NO: 126365 - DNA, 25 bp, Artificial
  probe
  misc_feature (1)..(25): SEQ ID NO: 2809; WAN024CO6_at; Start 68; Stop 92
tgattctttcccaaagagaaacttg

SEQ ID NO: 126366 - DNA, 25 bp, Artificial
  probe
  misc_feature (1)..(25): SEQ ID NO: 2809; WAN024CO6_at; Start 72; Stop 96
tctttcccaaagagaaacttgcttc

SEQ ID NO: 126367 - DNA, 25 bp, Artificial
  probe
  misc_feature (1)..(25): SEQ ID NO: 2809; WAN024CO6_at; Start 65; Stop 89
tcttgattctttcccaaagagaaac

SEQ ID NO: 126368 - DNA, 25 bp, Artificial
  probe
  misc_feature (1)..(25): SEQ ID NO: 2809; WAN024CO6_at; Start 86; Stop 110
aaacttgcttcgctttgctattcat

SEQ ID NO: 126369 - DNA, 25 bp, Artificial
  probe
  misc_feature (1)..(25): SEQ ID NO: 2809; WAN024CO6_at; Start 38; Stop 62
cagtcatcaataacaagagtttttg

SEQ ID NO: 126370 - DNA, 25 bp, Artificial
  probe
  misc_feature (1)..(25): SEQ ID NO: 2809; WAN024CO6_at; Start 83; Stop 107
gagaaacttgcttcgctttgctatt

SEQ ID NO: 126371 - DNA, 25 bp, Artificial
  probe
  misc_feature (1)..(25): SEQ ID NO: 2809; WAN024CO6_at; Start 144; Stop 168
tctagaaaagatagcgcttggcgct

SEQ ID NO: 126372 - DNA, 25 bp, Artificial
  probe
  misc_feature (1)..(25): SEQ ID NO: 2809; WAN024CO6_at; Start 45; Stop 69
caataacaagagtttttgtttcttg

SEQ ID NO: 126373 - DNA, 25 bp, Artificial
  probe
  misc_feature (1)..(25): SEQ ID NO: 2809; WAN024CO6_at; Start 149; Stop 173
aaaagatagcgcttggcgctgtctc

SEQ ID NO: 126374 - DNA, 25 bp, Artificial
  probe
  misc_feature (1)..(25): SEQ ID NO: 2809; WAN024CO6_at; Start 145; Stop 169
ctagaaaagatagcgcttggcgctg

SEQ ID NO: 126375 - DNA, 25 bp, Artificial
  probe
  misc_feature (1)..(25): SEQ ID NO: 2809; WAN024CO6_at; Start 157; Stop 181
gcgcttggcgctgtctctttatttc

SEQ ID NO: 126376 - DNA, 25 bp, Artificial
  probe
  misc_feature (1)..(25): SEQ ID NO: 2809; WAN024CO6_at; Start 164; Stop 188
gcgctgtctctttatttcttttttg

SEQ ID NO: 126377 - DNA, 25 bp, Artificial
  probe
  misc_feature (1)..(25): SEQ ID NO: 2809; WAN024CO6_at; Start 151; Stop 175
aagatagcgcttggcgctgtctctt

SEQ ID NO: 126378 - DNA, 25 bp, Artificial
  probe
  misc_feature (1)..(25): SEQ ID NO: 1206; WAN024CO7_at; Start 735; Stop 759
gcagacatcgttaaatttgccaact

SEQ ID NO: 126379 - DNA, 25 bp, Artificial
  probe
  misc_feature (1)..(25): SEQ ID NO: 1206; WAN024CO7_at; Start 462; Stop 486
gaaggctgacttcttgacaaatcca

SEQ ID NO: 126380 - DNA, 25 bp, Artificial
  probe
  misc_feature (1)..(25): SEQ ID NO: 1206; WAN024CO7_at; Start 448; Stop 472
tctatgtttggaatgaaggctgact

SEQ ID NO: 126381 - DNA, 25 bp, Artificial
  probe
  misc_feature (1)..(25): SEQ ID NO: 1206; WAN024CO7_at; Start 375; Stop 399
tatctcagtcgttgttattgtcggt

SEQ ID NO: 126382 - DNA, 25 bp, Artificial
  probe
  misc_feature (1)..(25): SEQ ID NO: 1206; WAN024CO7_at; Start 652; Stop 676
gctcttaagcctattatggttatcc

SEQ ID NO: 126383 - DNA, 25 bp, Artificial
  probe
  misc_feature (1)..(25): SEQ ID NO: 1206; WAN024CO7_at; Start 526; Stop 550
caaggaatgggctgggcttcaacgc

SEQ ID NO: 126384 - DNA, 25 bp, Artificial
  probe
  misc_feature (1)..(25): SEQ ID NO: 1206; WAN024CO7_at; Start 544; Stop 568
tcaacgctctacacggcaacattgg

SEQ ID NO: 126385 - DNA, 25 bp, Artificial
  probe
  misc_feature (1)..(25): SEQ ID NO: 1206; WAN024CO7_at; Start 635; Stop 659
ggcacattgatattccagctcttaa

SEQ ID NO: 126386 - DNA, 25 bp, Artificial
  probe
  misc_feature (1)..(25): SEQ ID NO: 1206; WAN024CO7_at; Start 786; Stop 810
taaagttggtcttgtatcaggagac

SEQ ID NO: 126387 - DNA, 25 bp, Artificial
  probe
  misc_feature (1)..(25): SEQ ID NO: 1206; WAN024CO7_at; Start 702; Stop 726
tatgaatgtcggatatgaaaaagca

SEQ ID NO: 126388 - DNA, 25 bp, Artificial
  probe
  misc_feature (1)..(25): SEQ ID NO: 1206; WAN024CO7_at; Start 216; Stop 240
tcccaactttggtatcttgttagcc

SEQ ID NO: 126389 - DNA, 25 bp, Artificial
  probe
  misc_feature (1)..(25): SEQ ID NO: 1206; WAN024CO7_at; Start 575; Stop 599
tagatccagccttagtagaagcagc

SEQ ID NO: 126390 - DNA, 25 bp, Artificial
  probe
  misc_feature (1)..(25): SEQ ID NO: 1206; WAN024CO7_at; Start 56; Stop 80
tcttgttattgatgactgtccccgg

SEQ ID NO: 126391 - DNA, 25 bp, Artificial
  probe
  misc_feature (1)..(25): SEQ ID NO: 1206; WAN024CO7_at; Start 361; Stop 385
tacgcaccaaactttatctcagtcg

SEQ ID NO: 126392 - DNA, 25 bp, Artificial
  probe
  misc_feature (1)..(25): SEQ ID NO: 1206; WAN024CO7_at; Start 884; Stop 908
tcgttaaacgcatgaataatggtga

SEQ ID NO: 126393 - DNA, 25 bp, Artificial
  probe
  misc_feature (1)..(25): SEQ ID NO: 1206; WAN024CO7_at; Start 560; Stop 584
caacattggtaaatgtagatccagc

SEQ ID NO: 126394 - DNA, 25 bp, Artificial
  probe
  misc_feature (1)..(25): SEQ ID NO: 1206; WAN024CO7_at; Start 415; Stop 439
ttttcagtgggaggaccaatcaaca

SEQ ID NO: 126395 - DNA, 25 bp, Artificial
  probe
  misc_feature (1)..(25): SEQ ID NO: 1206; WAN024CO7_at; Start 863; Stop 887
tgcttgttgcagttaaccaaatcgt

SEQ ID NO: 126396 - DNA, 25 bp, Artificial
  probe
  misc_feature (1)..(25): SEQ ID NO: 1206; WAN024CO7_at; Start 823; Stop 847
acagcggttggtttgtttaatgcag

SEQ ID NO: 126397 - DNA, 25 bp, Artificial
  probe
  misc_feature (1)..(25): SEQ ID NO: 1206; WAN024CO7_at; Start 720; Stop 744
aaaagcattcttgatgcagacatcg

SEQ ID NO: 126398 - DNA, 25 bp, Artificial
  probe
  misc_feature (1)..(25): SEQ ID NO: 1206; WAN024CO7_at; Start 688; Stop 712
gctgcaggtggaattatgaatgtcg

SEQ ID NO: 126399 - DNA, 25 bp, Artificial
  probe
  misc_feature (1)..(25): SEQ ID NO: 1206; WAN024CO7_at; Start 331; Stop 355
aaagtcaaaaaacgaattcagctca

SEQ ID NO: 126400 - DNA, 25 bp, Artificial
  probe
  misc_feature (1)..(25): SEQ ID NO: 1206; WAN024CO7_at; Start 601; Stop 625
cgactggatggagccaatatcttcc

SEQ ID NO: 126401 - DNA, 25 bp, Artificial
  probe
  misc_feature (1)..(25): SEQ ID NO: 1206; WAN024CO7_at; Start 507; Stop 531
catctttagtggtatctggcaagga

SEQ ID NO: 126402 - DNA, 25 bp, Artificial
  probe
  misc_feature (1)..(25): SEQ ID NO: 1206; WAN024CO7_at; Start 808; Stop 832
gactattcttactcaacagcggttg

SEQ ID NO: 126403 - DNA, 25 bp, Artificial
  probe
  misc_feature (1)..(25): SEQ ID NO: 1206; WAN024CO7_at; Start 616; Stop 640
aatatcttccaacgaatctggcaca

SEQ ID NO: 126404 - DNA, 25 bp, Artificial
  probe
  misc_feature (1)..(25): SEQ ID NO: 1206; WAN024CO7_at; Start 26; Stop 50
ctctttgggaaagaatcaagaaaca

SEQ ID NO: 126405 - DNA, 25 bp, Artificial
  probe
  misc_feature (1)..(25): SEQ ID NO: 1206; WAN024CO7_at; Start 676; Stop 700
caatttgttttagctgcaggtggaa

SEQ ID NO: 126406 - DNA, 25 bp, Artificial
  probe
  misc_feature (1)..(25): SEQ ID NO: 1206; WAN024CO7_at; Start 312; Stop 336
caatcaactcttgagtgaaaaagtc

SEQ ID NO: 126407 - DNA, 25 bp, Artificial
  probe
  misc_feature (1)..(25): SEQ ID NO: 1206; WAN024CO7_at; Start 6; Stop 30
tagcaaagcgaagcaagtttctctt

SEQ ID NO: 126408 - DNA, 25 bp, Artificial
  probe
  misc_feature (1)..(25): SEQ ID NO: 1206; WAN024CO7_at; Start 344; Stop 368
gaattcagctcattttatacgcacc

SEQ ID NO: 126409 - DNA, 25 bp, Artificial
  probe
  misc_feature (1)..(25): SEQ ID NO: 1206; WAN024CO7_at; Start 476; Stop 500
tgacaaatccagacttctttagacc

SEQ ID NO: 126410 - DNA, 25 bp, Artificial
  probe
  misc_feature (1)..(25): SEQ ID NO: 1206; WAN024CO7_at; Start 753; Stop 777
gccaacttctgaaattatctcgaca

SEQ ID NO: 126411 - DNA, 25 bp, Artificial
  probe
  misc_feature (1)..(25): SEQ ID NO: 1206; WAN024CO7_at; Start 845; Stop 869
cagtgattaacgtagtattgcttgt

SEQ ID NO: 126412 - DNA, 25 bp, Artificial
  probe
  misc_feature (1)..(25): SEQ ID NO: 5469; WAN024CO8_at; Start 34; Stop 58
ggtattaaattaagtagagatagcg

SEQ ID NO: 126413 - DNA, 25 bp, Artificial
  probe
  misc_feature (1)..(25): SEQ ID NO: 5469; WAN024CO8_at; Start 333; Stop 357
gagagtattcttttcatttgtagtg

SEQ ID NO: 126414 - DNA, 25 bp, Artificial
  probe
  misc_feature (1)..(25): SEQ ID NO: 5469; WAN024CO8_at; Start 101; Stop 125
cagatatcccagtttctgatggcta

SEQ ID NO: 126415 - DNA, 25 bp, Artificial
  probe
  misc_feature (1)..(25): SEQ ID NO: 5469; WAN024CO8_at; Start 80; Stop 104
gaaggctttatttaggcagttcaga

SEQ ID NO: 126416 - DNA, 25 bp, Artificial
  probe
  misc_feature (1)..(25): SEQ ID NO: 5469; WAN024CO8_at; Start 88; Stop 112
tatttaggcagttcagatatcccag

SEQ ID NO: 126417 - DNA, 25 bp, Artificial
  probe
  misc_feature (1)..(25): SEQ ID NO: 5469; WAN024CO8_at; Start 11; Stop 35
tgatgaagaacaatgaaagattagg

SEQ ID NO: 126418 - DNA, 25 bp, Artificial
  probe
  misc_feature (1)..(25): SEQ ID NO: 5469; WAN024CO8_at; Start 252; Stop 276
gagaacaactttgactttagacaca

SEQ ID NO: 126419 - DNA, 25 bp, Artificial
  probe
  misc_feature (1)..(25): SEQ ID NO: 5469; WAN024CO8_at; Start 65; Stop 89
gattgagggaagttagaaggcttta

SEQ ID NO: 126420 - DNA, 25 bp, Artificial
  probe
  misc_feature (1)..(25): SEQ ID NO: 5469; WAN024CO8_at; Start 116; Stop 140
ctgatggctatgtgattgaagttgc

SEQ ID NO: 126421 - DNA, 25 bp, Artificial
  probe
  misc_feature (1)..(25): SEQ ID NO: 5469; WAN024CO8_at; Start 144; Stop 168
taaccagatatcacatgagattgat

SEQ ID NO: 126422 - DNA, 25 bp, Artificial
  probe
  misc_feature (1)..(25): SEQ ID NO: 5469; WAN024CO8_at; Start 51; Stop 75
agatagcgttttaggattgagggaa

SEQ ID NO: 126423 - DNA, 25 bp, Artificial
  probe
  misc_feature (1)..(25): SEQ ID NO: 5469; WAN024CO8_at; Start 92; Stop 116
taggcagttcagatatcccagtttc

SEQ ID NO: 126424 - DNA, 25 bp, Artificial
  probe
  misc_feature (1)..(25): SEQ ID NO: 5469; WAN024CO8_at; Start 308; Stop 332
taaagttgagagagcttacaaaggg

SEQ ID NO: 126425 - DNA, 25 bp, Artificial
  probe
  misc_feature (1)..(25): SEQ ID NO: 5469; WAN024CO8_at; Start 157; Stop 181
catgagattgatattattgattggg

SEQ ID NO: 126426 - DNA, 25 bp, Artificial
  probe
  misc_feature (1)..(25): SEQ ID NO: 5469; WAN024CO8_at; Start 48; Stop 72
tagagatagcgttttaggattgagg

SEQ ID NO: 126427 - DNA, 25 bp, Artificial
  probe
  misc_feature (1)..(25): SEQ ID NO: 5469; WAN024CO8_at; Start 192; Stop 216
caagtcaaaaattaagataagtgaa

SEQ ID NO: 126428 - DNA, 25 bp, Artificial
  probe
  misc_feature (1)..(25): SEQ ID NO: 5469; WAN024CO8_at; Start 18; Stop 42
gaacaatgaaagattaggtattaaa

SEQ ID NO: 126429 - DNA, 25 bp, Artificial
  probe
  misc_feature (1)..(25): SEQ ID NO: 5469; WAN024CO8_at; Start 351; Stop 375
tgtagtgaagttagttttgtttgct

SEQ ID NO: 126430 - DNA, 25 bp, Artificial
  probe
  misc_feature (1)..(25): SEQ ID NO: 5469; WAN024CO8_at; Start 264; Stop 288
gactttagacacattagtatatgaa

SEQ ID NO: 126431 - DNA, 25 bp, Artificial
  probe
  misc_feature (1)..(25): SEQ ID NO: 5469; WAN024CO8_at; Start 108; Stop 132
cccagtttctgatggctatgtgatt

SEQ ID NO: 126432 - DNA, 25 bp, Artificial
  probe
  misc_feature (1)..(25): SEQ ID NO: 5469; WAN024CO8_at; Start 171; Stop 195
tattgattgggtagagttgaacaag

SEQ ID NO: 126433 - DNA, 25 bp, Artificial
  probe
  misc_feature (1)..(25): SEQ ID NO: 5469; WAN024CO8_at; Start 241; Stop 265
gccactagcttgagaacaactttga

SEQ ID NO: 126434 - DNA, 25 bp, Artificial
  probe
  misc_feature (1)..(25): SEQ ID NO: 5469; WAN024CO8_at; Start 219; Stop 243
tagtgaaagcgtggatatagatgcc

SEQ ID NO: 126435 - DNA, 25 bp, Artificial
  probe
  misc_feature (1)..(25): SEQ ID NO: 5469; WAN024CO8_at; Start 273; Stop 297
cacattagtatatgaaggtatgaga

SEQ ID NO: 126436 - DNA, 25 bp, Artificial
  probe
  misc_feature (1)..(25): SEQ ID NO: 5469; WAN024CO8_at; Start 283; Stop 307
tatgaaggtatgagagatatacagt

SEQ ID NO: 126437 - DNA, 25 bp, Artificial
  probe
  misc_feature (1)..(25): SEQ ID NO: 5469; WAN024CO8_at; Start 231; Stop 255
ggatatagatgccactagcttgaga

SEQ ID NO: 126438 - DNA, 25 bp, Artificial
  probe
  misc_feature (1)..(25): SEQ ID NO: 5469; WAN024CO8_at; Start 223; Stop 247
gaaagcgtggatatagatgccacta

SEQ ID NO: 126439 - DNA, 25 bp, Artificial
  probe
  misc_feature (1)..(25): SEQ ID NO: 5469; WAN024CO8_at; Start 139; Stop 163
gcttataaccagatatcacatgaga

SEQ ID NO: 126440 - DNA, 25 bp, Artificial
  probe
  misc_feature (1)..(25): SEQ ID NO: 5469; WAN024CO8_at; Start 298; Stop 322
gatatacagttaaagttgagagagc

SEQ ID NO: 126441 - DNA, 25 bp, Artificial
  probe
  misc_feature (1)..(25): SEQ ID NO: 5469; WAN024CO8_at; Start 178; Stop 202
tgggtagagttgaacaagtcaaaaa

SEQ ID NO: 126442 - DNA, 25 bp, Artificial
  probe
  misc_feature (1)..(25): SEQ ID NO: 5469; WAN024CO8_at; Start 207; Stop 231
gataagtgaaattagtgaaagcgtg

SEQ ID NO: 126443 - DNA, 25 bp, Artificial
  probe
  misc_feature (1)..(25): SEQ ID NO: 5469; WAN024CO8_at; Start 2; Stop 26
tggaggaactgatgaagaacaatga

SEQ ID NO: 126444 - DNA, 25 bp, Artificial
  probe
  misc_feature (1)..(25): SEQ ID NO: 5469; WAN024CO8_at; Start 127; Stop 151
gtgattgaagttgcttataaccaga

SEQ ID NO: 126445 - DNA, 25 bp, Artificial
  probe
  misc_feature (1)..(25): SEQ ID NO: 5469; WAN024CO8_at; Start 236; Stop 260
tagatgccactagcttgagaacaac

SEQ ID NO: 126446 - DNA, 25 bp, Artificial
  probe
  misc_feature (1)..(25): SEQ ID NO: 2298; WAN024CO9_at; Start 48; Stop 72
ccaaaaagtctttgaacggctgcct

SEQ ID NO: 126447 - DNA, 25 bp, Artificial
  probe
  misc_feature (1)..(25): SEQ ID NO: 2298; WAN024CO9_at; Start 38; Stop 62
gcctaatagaccaaaaagtctttga

SEQ ID NO: 126448 - DNA, 25 bp, Artificial
  probe
  misc_feature (1)..(25): SEQ ID NO: 2298; WAN024CO9_at; Start 56; Stop 80
tctttgaacggctgcctcagtattg

SEQ ID NO: 126449 - DNA, 25 bp, Artificial
  probe
  misc_feature (1)..(25): SEQ ID NO: 2298; WAN024CO9_at; Start 66; Stop 90
gctgcctcagtattgtccaaggtta

SEQ ID NO: 126450 - DNA, 25 bp, Artificial
  probe
  misc_feature (1)..(25): SEQ ID NO: 2298; WAN024CO9_at; Start 83; Stop 107
caaggttacaatttcatccggctta

SEQ ID NO: 126451 - DNA, 25 bp, Artificial
  probe
  misc_feature (1)..(25): SEQ ID NO: 2298; WAN024CO9_at; Start 9; Stop 33
tcttgcaacccgtcacgttctgcgt

SEQ ID NO: 126452 - DNA, 25 bp, Artificial
  probe
  misc_feature (1)..(25): SEQ ID NO: 2298; WAN024CO9_at; Start 25; Stop 49
gttctgcgtcctcgcctaatagacc

SEQ ID NO: 126453 - DNA, 25 bp, Artificial
  probe
  misc_feature (1)..(25): SEQ ID NO: 2298; WAN024CO9_at; Start 62; Stop 86
aacggctgcctcagtattgtccaag

SEQ ID NO: 126454 - DNA, 25 bp, Artificial
  probe
  misc_feature (1)..(25): SEQ ID NO: 2298; WAN024CO9_at; Start 5; Stop 29
agtatcttgcaacccgtcacgttct

SEQ ID NO: 126455 - DNA, 25 bp, Artificial
  probe
  misc_feature (1)..(25): SEQ ID NO: 2298; WAN024CO9_at; Start 1; Stop 25
atggagtatcttgcaacccgtcacg

SEQ ID NO: 126456 - DNA, 25 bp, Artificial
  probe
  misc_feature (1)..(25): SEQ ID NO: 2298; WAN024CO9_at; Start 24; Stop 48
cgttctgcgtcctcgcctaatagac

SEQ ID NO: 126457 - DNA, 25 bp, Artificial
  probe
  misc_feature (1)..(25): SEQ ID NO: 2298; WAN024CO9_at; Start 35; Stop 59
ctcgcctaatagaccaaaaagtctt

SEQ ID NO: 126458 - DNA, 25 bp, Artificial
  probe
  misc_feature (1)..(25): SEQ ID NO: 2298; WAN024CO9_at; Start 68; Stop 92
tgcctcagtattgtccaaggttaca

SEQ ID NO: 126459 - DNA, 25 bp, Artificial
  probe
  misc_feature (1)..(25): SEQ ID NO: 2298; WAN024CO9_at; Start 73; Stop 97
cagtattgtccaaggttacaatttc

SEQ ID NO: 126460 - DNA, 25 bp, Artificial
  probe
  misc_feature (1)..(25): SEQ ID NO: 2298; WAN024CO9_at; Start 33; Stop 57
tcctcgcctaatagaccaaaaagtc

SEQ ID NO: 126461 - DNA, 25 bp, Artificial
  probe
  misc_feature (1)..(25): SEQ ID NO: 2298; WAN024CO9_at; Start 61; Stop 85
gaacggctgcctcagtattgtccaa

SEQ ID NO: 126462 - DNA, 25 bp, Artificial
  probe
  misc_feature (1)..(25): SEQ ID NO: 2298; WAN024CO9_at; Start 29; Stop 53
tgcgtcctcgcctaatagaccaaaa

SEQ ID NO: 126463 - DNA, 25 bp, Artificial
  probe
  misc_feature (1)..(25): SEQ ID NO: 2298; WAN024CO9_at; Start 31; Stop 55
cgtcctcgcctaatagaccaaaaag

SEQ ID NO: 126464 - DNA, 25 bp, Artificial
  probe
  misc_feature (1)..(25): SEQ ID NO: 2298; WAN024CO9_at; Start 49; Stop 73
caaaaagtctttgaacggctgcctc

SEQ ID NO: 126465 - DNA, 25 bp, Artificial
  probe
  misc_feature (1)..(25): SEQ ID NO: 2298; WAN024CO9_at; Start 65; Stop 89
ggctgcctcagtattgtccaaggtt

SEQ ID NO: 126466 - DNA, 25 bp, Artificial
  probe
  misc_feature (1)..(25): SEQ ID NO: 2298; WAN024CO9_at; Start 51; Stop 75
aaaagtctttgaacggctgcctcag

SEQ ID NO: 126467 - DNA, 25 bp, Artificial
  probe
  misc_feature (1)..(25): SEQ ID NO: 2298; WAN024CO9_at; Start 60; Stop 84
tgaacggctgcctcagtattgtcca

SEQ ID NO: 126468 - DNA, 25 bp, Artificial
  probe
  misc_feature (1)..(25): SEQ ID NO: 2298; WAN024CO9_at; Start 69; Stop 93
gcctcagtattgtccaaggttacaa

SEQ ID NO: 126469 - DNA, 25 bp, Artificial
  probe
  misc_feature (1)..(25): SEQ ID NO: 2298; WAN024CO9_at; Start 22; Stop 46
cacgttctgcgtcctcgcctaatag

SEQ ID NO: 126470 - DNA, 25 bp, Artificial
  probe
  misc_feature (1)..(25): SEQ ID NO: 2298; WAN024CO9_at; Start 4; Stop 28
gagtatcttgcaacccgtcacgttc

SEQ ID NO: 126471 - DNA, 25 bp, Artificial
  probe
  misc_feature (1)..(25): SEQ ID NO: 2298; WAN024CO9_at; Start 81; Stop 105
tccaaggttacaatttcatccggct

SEQ ID NO: 126472 - DNA, 25 bp, Artificial
  probe
  misc_feature (1)..(25): SEQ ID NO: 2298; WAN024CO9_at; Start 63; Stop 87
acggctgcctcagtattgtccaagg

SEQ ID NO: 126473 - DNA, 25 bp, Artificial
  probe
  misc_feature (1)..(25): SEQ ID NO: 2298; WAN024CO9_at; Start 70; Stop 94
cctcagtattgtccaaggttacaat

SEQ ID NO: 126474 - DNA, 25 bp, Artificial
  probe
  misc_feature (1)..(25): SEQ ID NO: 2298; WAN024CO9_at; Start 2; Stop 26
tggagtatcttgcaacccgtcacgt

SEQ ID NO: 126475 - DNA, 25 bp, Artificial
  probe
  misc_feature (1)..(25): SEQ ID NO: 2298; WAN024CO9_at; Start 50; Stop 74
aaaaagtctttgaacggctgcctca

SEQ ID NO: 126476 - DNA, 25 bp, Artificial
  probe
  misc_feature (1)..(25): SEQ ID NO: 2298; WAN024CO9_at; Start 46; Stop 70
gaccaaaaagtctttgaacggctgc

SEQ ID NO: 126477 - DNA, 25 bp, Artificial
  probe
  misc_feature (1)..(25): SEQ ID NO: 2298; WAN024CO9_at; Start 52; Stop 76
aaagtctttgaacggctgcctcagt

SEQ ID NO: 126478 - DNA, 25 bp, Artificial
  probe
  misc_feature (1)..(25): SEQ ID NO: 2298; WAN024CO9_at; Start 79; Stop 103
tgtccaaggttacaatttcatccgg

SEQ ID NO: 126479 - DNA, 25 bp, Artificial
  probe
  misc_feature (1)..(25): SEQ ID NO: 2298; WAN024CO9_at; Start 3; Stop 27
ggagtatcttgcaacccgtcacgtt

SEQ ID NO: 126480 - DNA, 25 bp, Artificial
  probe
  misc_feature (1)..(25): SEQ ID NO: 4155; WAN024COA_at; Start 45; Stop 69
cgtacatgatgtcttcataactgct

SEQ ID NO: 126481 - DNA, 25 bp, Artificial
  probe
  misc_feature (1)..(25): SEQ ID NO: 4155; WAN024COA_at; Start 20; Stop 44
ttcgaaactttcttgccagcagatg

SEQ ID NO: 126482 - DNA, 25 bp, Artificial
  probe
  misc_feature (1)..(25): SEQ ID NO: 4155; WAN024COA_at; Start 35; Stop 59
ccagcagatgcgtacatgatgtctt

SEQ ID NO: 126483 - DNA, 25 bp, Artificial
  probe
  misc_feature (1)..(25): SEQ ID NO: 4155; WAN024COA_at; Start 18; Stop 42
tcttcgaaactttcttgccagcaga

SEQ ID NO: 126484 - DNA, 25 bp, Artificial
  probe
  misc_feature (1)..(25): SEQ ID NO: 4155; WAN024COA_at; Start 64; Stop 88
actgctagtagaagttttaattcga

SEQ ID NO: 126485 - DNA, 25 bp, Artificial
  probe
  misc_feature (1)..(25): SEQ ID NO: 4155; WAN024COA_at; Start 39; Stop 63
cagatgcgtacatgatgtcttcata

SEQ ID NO: 126486 - DNA, 25 bp, Artificial
  probe
  misc_feature (1)..(25): SEQ ID NO: 4155; WAN024COA_at; Start 25; Stop 49
aactttcttgccagcagatgcgtac

SEQ ID NO: 126487 - DNA, 25 bp, Artificial
  probe
  misc_feature (1)..(25): SEQ ID NO: 4155; WAN024COA_at; Start 29; Stop 53
ttcttgccagcagatgcgtacatga

SEQ ID NO: 126488 - DNA, 25 bp, Artificial
  probe
  misc_feature (1)..(25): SEQ ID NO: 4155; WAN024COA_at; Start 51; Stop 75
tgatgtcttcataactgctagtaga

SEQ ID NO: 126489 - DNA, 25 bp, Artificial
  probe
  misc_feature (1)..(25): SEQ ID NO: 4155; WAN024COA_at; Start 28; Stop 52
tttcttgccagcagatgcgtacatg

SEQ ID NO: 126490 - DNA, 25 bp, Artificial
  probe
  misc_feature (1)..(25): SEQ ID NO: 4155; WAN024COA_at; Start 30; Stop 54
tcttgccagcagatgcgtacatgat

SEQ ID NO: 126491 - DNA, 25 bp, Artificial
  probe
  misc_feature (1)..(25): SEQ ID NO: 4155; WAN024COA_at; Start 84; Stop 108
ttcgaagtcggtctttcaagaataa

SEQ ID NO: 126492 - DNA, 25 bp, Artificial
  probe
  misc_feature (1)..(25): SEQ ID NO: 4155; WAN024COA_at; Start 26; Stop 50
actttcttgccagcagatgcgtaca

SEQ ID NO: 126493 - DNA, 25 bp, Artificial
  probe
  misc_feature (1)..(25): SEQ ID NO: 4155; WAN024COA_at; Start 32; Stop 56
ttgccagcagatgcgtacatgatgt

SEQ ID NO: 126494 - DNA, 25 bp, Artificial
  probe
  misc_feature (1)..(25): SEQ ID NO: 4155; WAN024COA_at; Start 1; Stop 25
gtggcaagtgaattctttcttcgaa

SEQ ID NO: 126495 - DNA, 25 bp, Artificial
  probe
  misc_feature (1)..(25): SEQ ID NO: 4155; WAN024COA_at; Start 41; Stop 65
gatgcgtacatgatgtcttcataac

SEQ ID NO: 126496 - DNA, 25 bp, Artificial
  probe
  misc_feature (1)..(25): SEQ ID NO: 4155; WAN024COA_at; Start 3; Stop 27
ggcaagtgaattctttcttcgaaac

SEQ ID NO: 126497 - DNA, 25 bp, Artificial
  probe
  misc_feature (1)..(25): SEQ ID NO: 4155; WAN024COA_at; Start 21; Stop 45
tcgaaactttcttgccagcagatgc

SEQ ID NO: 126498 - DNA, 25 bp, Artificial
  probe
  misc_feature (1)..(25): SEQ ID NO: 4155; WAN024COA_at; Start 14; Stop 38
tctttcttcgaaactttcttgccag

SEQ ID NO: 126499 - DNA, 25 bp, Artificial
  probe
  misc_feature (1)..(25): SEQ ID NO: 4155; WAN024COA_at; Start 54; Stop 78
tgtcttcataactgctagtagaagt

SEQ ID NO: 126500 - DNA, 25 bp, Artificial
  probe
  misc_feature (1)..(25): SEQ ID NO: 4155; WAN024COA_at; Start 47; Stop 71
tacatgatgtcttcataactgctag

SEQ ID NO: 126501 - DNA, 25 bp, Artificial
  probe
  misc_feature (1)..(25): SEQ ID NO: 4155; WAN024COA_at; Start 38; Stop 62
gcagatgcgtacatgatgtcttcat

SEQ ID NO: 126502 - DNA, 25 bp, Artificial
  probe
  misc_feature (1)..(25): SEQ ID NO: 4155; WAN024COA_at; Start 56; Stop 80
tcttcataactgctagtagaagttt

SEQ ID NO: 126503 - DNA, 25 bp, Artificial
  probe
  misc_feature (1)..(25): SEQ ID NO: 4155; WAN024COA_at; Start 36; Stop 60
cagcagatgcgtacatgatgtcttc

SEQ ID NO: 126504 - DNA, 25 bp, Artificial
  probe
  misc_feature (1)..(25): SEQ ID NO: 4155; WAN024COA_at; Start 24; Stop 48
aaactttcttgccagcagatgcgta

SEQ ID NO: 126505 - DNA, 25 bp, Artificial
  probe
  misc_feature (1)..(25): SEQ ID NO: 4155; WAN024COA_at; Start 43; Stop 67
tgcgtacatgatgtcttcataactg

SEQ ID NO: 126506 - DNA, 25 bp, Artificial
  probe
  misc_feature (1)..(25): SEQ ID NO: 4155; WAN024COA_at; Start 59; Stop 83
tcataactgctagtagaagttttaa

SEQ ID NO: 126507 - DNA, 25 bp, Artificial
  probe
  misc_feature (1)..(25): SEQ ID NO: 4155; WAN024COA_at; Start 31; Stop 55
cttgccagcagatgcgtacatgatg

SEQ ID NO: 126508 - DNA, 25 bp, Artificial
  probe
  misc_feature (1)..(25): SEQ ID NO: 4155; WAN024COA_at; Start 4; Stop 28
gcaagtgaattctttcttcgaaact

SEQ ID NO: 126509 - DNA, 25 bp, Artificial
  probe
  misc_feature (1)..(25): SEQ ID NO: 4155; WAN024COA_at; Start 80; Stop 104
ttaattcgaagtcggtctttcaaga

SEQ ID NO: 126510 - DNA, 25 bp, Artificial
  probe
  misc_feature (1)..(25): SEQ ID NO: 4155; WAN024COA_at; Start 22; Stop 46
cgaaactttcttgccagcagatgcg

SEQ ID NO: 126511 - DNA, 25 bp, Artificial
  probe
  misc_feature (1)..(25): SEQ ID NO: 4155; WAN024COA_at; Start 34; Stop 58
gccagcagatgcgtacatgatgtct

SEQ ID NO: 126512 - DNA, 25 bp, Artificial
  probe
  misc_feature (1)..(25): SEQ ID NO: 4155; WAN024COA_at; Start 52; Stop 76
gatgtcttcataactgctagtagaa

SEQ ID NO: 126513 - DNA, 25 bp, Artificial
  probe
  misc_feature (1)..(25): SEQ ID NO: 4155; WAN024COA_at; Start 49; Stop 73
catgatgtcttcataactgctagta

SEQ ID NO: 126514 - DNA, 25 bp, Artificial
  probe
  misc_feature (1)..(25): SEQ ID NO: 6656; WAN024COB_at; Start 57; Stop 81
cacgataggtttgggccgccaaatc

SEQ ID NO: 126515 - DNA, 25 bp, Artificial
  probe
  misc_feature (1)..(25): SEQ ID NO: 6656; WAN024COB_at; Start 20; Stop 44
tctgtccattcaagcccatgatagt

SEQ ID NO: 126516 - DNA, 25 bp, Artificial
  probe
  misc_feature (1)..(25): SEQ ID NO: 6656; WAN024COB_at; Start 26; Stop 50
cattcaagcccatgatagtaccacc

SEQ ID NO: 126517 - DNA, 25 bp, Artificial
  probe
  misc_feature (1)..(25): SEQ ID NO: 6656; WAN024COB_at; Start 16; Stop 40
caattctgtccattcaagcccatga

SEQ ID NO: 126518 - DNA, 25 bp, Artificial
  probe
  misc_feature (1)..(25): SEQ ID NO: 6656; WAN024COB_at; Start 140; Stop 164
ggcaattgataatcagcaaactgtt

SEQ ID NO: 126519 - DNA, 25 bp, Artificial
  probe
  misc_feature (1)..(25): SEQ ID NO: 6656; WAN024COB_at; Start 189; Stop 213
caaagtccaattccaaccatttatg

SEQ ID NO: 126520 - DNA, 25 bp, Artificial
  probe
  misc_feature (1)..(25): SEQ ID NO: 6656; WAN024COB_at; Start 165; Stop 189
tatgaatgacaatatgattataatc

SEQ ID NO: 126521 - DNA, 25 bp, Artificial
  probe
  misc_feature (1)..(25): SEQ ID NO: 6656; WAN024COB_at; Start 229; Stop 253
caagatgctctgatctgcctgatcc

SEQ ID NO: 126522 - DNA, 25 bp, Artificial
  probe
  misc_feature (1)..(25): SEQ ID NO: 6656; WAN024COB_at; Start 84; Stop 108
tccacggtttccgatgagaaagata

SEQ ID NO: 126523 - DNA, 25 bp, Artificial
  probe
  misc_feature (1)..(25): SEQ ID NO: 6656; WAN024COB_at; Start 240; Stop 264
gatctgcctgatccaccttatcatg

SEQ ID NO: 126524 - DNA, 25 bp, Artificial
  probe
  misc_feature (1)..(25): SEQ ID NO: 6656; WAN024COB_at; Start 153; Stop 177
cagcaaactgtttatgaatgacaat

SEQ ID NO: 126525 - DNA, 25 bp, Artificial
  probe
  misc_feature (1)..(25): SEQ ID NO: 6656; WAN024COB_at; Start 88; Stop 112
cggtttccgatgagaaagatagtga

SEQ ID NO: 126526 - DNA, 25 bp, Artificial
  probe
  misc_feature (1)..(25): SEQ ID NO: 6656; WAN024COB_at; Start 131; Stop 155
tgaccctcaggcaattgataatcag

SEQ ID NO: 126527 - DNA, 25 bp, Artificial
  probe
  misc_feature (1)..(25): SEQ ID NO: 6656; WAN024COB_at; Start 76; Stop 100
caaatctttccacggtttccgatga

SEQ ID NO: 126528 - DNA, 25 bp, Artificial
  probe
  misc_feature (1)..(25): SEQ ID NO: 6656; WAN024COB_at; Start 93; Stop 117
tccgatgagaaagatagtgaataat

SEQ ID NO: 126529 - DNA, 25 bp, Artificial
  probe
  misc_feature (1)..(25): SEQ ID NO: 6656; WAN024COB_at; Start 180; Stop 204
gattataatcaaagtccaattccaa

SEQ ID NO: 126530 - DNA, 25 bp, Artificial
  probe
  misc_feature (1)..(25): SEQ ID NO: 6656; WAN024COB_at; Start 55; Stop 79
ttcacgataggtttgggccgccaaa

SEQ ID NO: 126531 - DNA, 25 bp, Artificial
  probe
  misc_feature (1)..(25): SEQ ID NO: 6656; WAN024COB_at; Start 36; Stop 60
catgatagtaccaccaaacttcacg

SEQ ID NO: 126532 - DNA, 25 bp, Artificial
  probe
  misc_feature (1)..(25): SEQ ID NO: 6656; WAN024COB_at; Start 41; Stop 65
tagtaccaccaaacttcacgatagg

SEQ ID NO: 126533 - DNA, 25 bp, Artificial
  probe
  misc_feature (1)..(25): SEQ ID NO: 6656; WAN024COB_at; Start 80; Stop 104
tctttccacggtttccgatgagaaa

SEQ ID NO: 126534 - DNA, 25 bp, Artificial
  probe
  misc_feature (1)..(25): SEQ ID NO: 6656; WAN024COB_at; Start 53; Stop 77
acttcacgataggtttgggccgcca

SEQ ID NO: 126535 - DNA, 25 bp, Artificial
  probe
  misc_feature (1)..(25): SEQ ID NO: 6656; WAN024COB_at; Start 212; Stop 236
tgttcaaaaagcatattcaagatgc

SEQ ID NO: 126536 - DNA, 25 bp, Artificial
  probe
  misc_feature (1)..(25): SEQ ID NO: 6656; WAN024COB_at; Start 249; Stop 273
gatccaccttatcatgccattcatt

SEQ ID NO: 126537 - DNA, 25 bp, Artificial
  probe
  misc_feature (1)..(25): SEQ ID NO: 6656; WAN024COB_at; Start 119; Stop 143
gcaggataatcctgaccctcaggca

SEQ ID NO: 126538 - DNA, 25 bp, Artificial
  probe
  misc_feature (1)..(25): SEQ ID NO: 6656; WAN024COB_at; Start 107; Stop 131
tagtgaataatagcaggataatcct

SEQ ID NO: 126539 - DNA, 25 bp, Artificial
  probe
  misc_feature (1)..(25): SEQ ID NO: 6656; WAN024COB_at; Start 134; Stop 158
ccctcaggcaattgataatcagcaa

SEQ ID NO: 126540 - DNA, 25 bp, Artificial
  probe
  misc_feature (1)..(25): SEQ ID NO: 6656; WAN024COB_at; Start 264; Stop 288
gccattcattggttacatcaattaa

SEQ ID NO: 126541 - DNA, 25 bp, Artificial
  probe
  misc_feature (1)..(25): SEQ ID NO: 6656; WAN024COB_at; Start 225; Stop 249
tattcaagatgctctgatctgcctg

SEQ ID NO: 126542 - DNA, 25 bp, Artificial
  probe
  misc_feature (1)..(25): SEQ ID NO: 6656; WAN024COB_at; Start 232; Stop 256
gatgctctgatctgcctgatccacc

SEQ ID NO: 126543 - DNA, 25 bp, Artificial
  probe
  misc_feature (1)..(25): SEQ ID NO: 6656; WAN024COB_at; Start 2; Stop 26
tgatggttttgtcccaattctgtcc

SEQ ID NO: 126544 - DNA, 25 bp, Artificial
  probe
  misc_feature (1)..(25): SEQ ID NO: 6656; WAN024COB_at; Start 30; Stop 54
caagcccatgatagtaccaccaaac

SEQ ID NO: 126545 - DNA, 25 bp, Artificial
  probe
  misc_feature (1)..(25): SEQ ID NO: 6656; WAN024COB_at; Start 258; Stop 282
tatcatgccattcattggttacatc

SEQ ID NO: 126546 - DNA, 25 bp, Artificial
  probe
  misc_feature (1)..(25): SEQ ID NO: 6656; WAN024COB_at; Start 200; Stop 224
tccaaccatttatgttcaaaaagca

SEQ ID NO: 126547 - DNA, 25 bp, Artificial
  probe
  misc_feature (1)..(25): SEQ ID NO: 6656; WAN024COB_at; Start 6; Stop 30
ggttttgtcccaattctgtccattc

SEQ ID NO: 126548 - DNA, 25 bp, Artificial
  probe
  misc_feature (1)..(25): SEQ ID NO: 5386; WAN024COC_at; Start 1399; Stop 1423
catgataaggtggatcaggcagatc

SEQ ID NO: 126549 - DNA, 25 bp, Artificial
  probe
  misc_feature (1)..(25): SEQ ID NO: 5386; WAN024COC_at; Start 1564; Stop 1588
catcggaaaccgtggaaagatttgg

SEQ ID NO: 126550 - DNA, 25 bp, Artificial
  probe
  misc_feature (1)..(25): SEQ ID NO: 5386; WAN024COC_at; Start 160; Stop 184
gaattttcagaaatggatcaccgaa

SEQ ID NO: 126551 - DNA, 25 bp, Artificial
  probe
  misc_feature (1)..(25): SEQ ID NO: 5386; WAN024COC_at; Start 2025; Stop 2049
tcaggaggcatatgctgttgaccaa

SEQ ID NO: 126552 - DNA, 25 bp, Artificial
  probe
  misc_feature (1)..(25): SEQ ID NO: 5386; WAN024COC_at; Start 1637; Stop 1661
ggacagaattgggacaaaaccatca

SEQ ID NO: 126553 - DNA, 25 bp, Artificial
  probe
  misc_feature (1)..(25): SEQ ID NO: 5386; WAN024COC_at; Start 1284; Stop 1308
gggcagagcttattttggtcaagaa

SEQ ID NO: 126554 - DNA, 25 bp, Artificial
  probe
  misc_feature (1)..(25): SEQ ID NO: 5386; WAN024COC_at; Start 1165; Stop 1189
ttcgtgcaagaagacaaggccctct

SEQ ID NO: 126555 - DNA, 25 bp, Artificial
  probe
  misc_feature (1)..(25): SEQ ID NO: 5386; WAN024COC_at; Start 872; Stop 896
taaatcagctatcgagacaagagga

SEQ ID NO: 126556 - DNA, 25 bp, Artificial
  probe
  misc_feature (1)..(25): SEQ ID NO: 5386; WAN024COC_at; Start 1812; Stop 1836
tagtgatcgattggctcagatgaca

SEQ ID NO: 126557 - DNA, 25 bp, Artificial
  probe
  misc_feature (1)..(25): SEQ ID NO: 5386; WAN024COC_at; Start 1080; Stop 1104
taattgtcgggtaacttctgagcaa

SEQ ID NO: 126558 - DNA, 25 bp, Artificial
  probe
  misc_feature (1)..(25): SEQ ID NO: 5386; WAN024COC_at; Start 1761; Stop 1785
ggttcaatccttgcctgatattcag

SEQ ID NO: 126559 - DNA, 25 bp, Artificial
  probe
  misc_feature (1)..(25): SEQ ID NO: 5386; WAN024COC_at; Start 1314; Stop 1338
taatgccggtgttctcttggtaaac

SEQ ID NO: 126560 - DNA, 25 bp, Artificial
  probe
  misc_feature (1)..(25): SEQ ID NO: 5386; WAN024COC_at; Start 1047; Stop 1071
taagcgcttagagaagtttgactca

SEQ ID NO: 126561 - DNA, 25 bp, Artificial
  probe
  misc_feature (1)..(25): SEQ ID NO: 5386; WAN024COC_at; Start 1509; Stop 1533
tgattatcaattgcctgagggtcag

SEQ ID NO: 126562 - DNA, 25 bp, Artificial
  probe
  misc_feature (1)..(25): SEQ ID NO: 5386; WAN024COC_at; Start 1779; Stop 1803
tattcagtttaagatagcagctaga

SEQ ID NO: 126563 - DNA, 25 bp, Artificial
  probe
  misc_feature (1)..(25): SEQ ID NO: 5386; WAN024COC_at; Start 1830; Stop 1854
gatgacaatttatccaaacgtgact

SEQ ID NO: 126564 - DNA, 25 bp, Artificial
  probe
  misc_feature (1)..(25): SEQ ID NO: 5386; WAN024COC_at; Start 1620; Stop 1644
ctatcatgggcttgaatggacagaa

SEQ ID NO: 126565 - DNA, 25 bp, Artificial
  probe
  misc_feature (1)..(25): SEQ ID NO: 5386; WAN024COC_at; Start 1606; Stop 1630
gaagtttggtggtactatcatgggc

SEQ ID NO: 126566 - DNA, 25 bp, Artificial
  probe
  misc_feature (1)..(25): SEQ ID NO: 5386; WAN024COC_at; Start 49; Stop 73
gaaaactatctgaggaagtgcctag

SEQ ID NO: 126567 - DNA, 25 bp, Artificial
  probe
  misc_feature (1)..(25): SEQ ID NO: 5386; WAN024COC_at; Start 527; Stop 551
gattgtttgagcagttgcgctttga

SEQ ID NO: 126568 - DNA, 25 bp, Artificial
  probe
  misc_feature (1)..(25): SEQ ID NO: 5386; WAN024COC_at; Start 1182; Stop 1206
ggccctctacttggactgtgatcta

SEQ ID NO: 126569 - DNA, 25 bp, Artificial
  probe
  misc_feature (1)..(25): SEQ ID NO: 5386; WAN024COC_at; Start 1225; Stop 1249
gatgacttgtttgctacagacttac

SEQ ID NO: 126570 - DNA, 25 bp, Artificial
  probe
  misc_feature (1)..(25): SEQ ID NO: 5386; WAN024COC_at; Start 1414; Stop 1438
caggcagatcagagcatcttgaata

SEQ ID NO: 126571 - DNA, 25 bp, Artificial
  probe
  misc_feature (1)..(25): SEQ ID NO: 5386; WAN024COC_at; Start 227; Stop 251
gaaacaccggtctgaataatatgtc

SEQ ID NO: 126572 - DNA, 25 bp, Artificial
  probe
  misc_feature (1)..(25): SEQ ID NO: 5386; WAN024COC_at; Start 124; Stop 148
gatggttctacggatgcttcaggtg

SEQ ID NO: 126573 - DNA, 25 bp, Artificial
  probe
  misc_feature (1)..(25): SEQ ID NO: 5386; WAN024COC_at; Start 243; Stop 267
taatatgtccggaaattatgtgacc

SEQ ID NO: 126574 - DNA, 25 bp, Artificial
  probe
  misc_feature (1)..(25): SEQ ID NO: 5386; WAN024COC_at; Start 372; Stop 396
caacgaaagtgaaggaatgttctac

SEQ ID NO: 126575 - DNA, 25 bp, Artificial
  probe
  misc_feature (1)..(25): SEQ ID NO: 5386; WAN024COC_at; Start 558; Stop 582
taaattaggagaagatggttacctc

SEQ ID NO: 126576 - DNA, 25 bp, Artificial
  probe
  misc_feature (1)..(25): SEQ ID NO: 5386; WAN024COC_at; Start 895; Stop 919
gaaagtgaaaagaaagccattgtcc

SEQ ID NO: 126577 - DNA, 25 bp, Artificial
  probe
  misc_feature (1)..(25): SEQ ID NO: 5386; WAN024COC_at; Start 259; Stop 283
tatgtgacctttgtggactcggatg

SEQ ID NO: 126578 - DNA, 25 bp, Artificial
  probe
  misc_feature (1)..(25): SEQ ID NO: 5386; WAN024COC_at; Start 1725; Stop 1749
tactgcctcagaccatattgaacaa

SEQ ID NO: 126579 - DNA, 25 bp, Artificial
  probe
  misc_feature (1)..(25): SEQ ID NO: 5386; WAN024COC_at; Start 1586; Stop 1610
tggcggcccaaacctatcgtgaagt

SEQ ID NO: 126580 - DNA, 25 bp, Artificial
  probe
  misc_feature (1)..(25): SEQ ID NO: 5386; WAN024COC_at; Start 207; Stop 231
tgctggtctttctgccgcacgaaac

SEQ ID NO: 126581 - DNA, 25 bp, Artificial
  probe
  misc_feature (1)..(25): SEQ ID NO: 5386; WAN024COC_at; Start 190; Stop 214
tatatagaacaagaaaatgctggtc

SEQ ID NO: 126582 - DNA, 25 bp, Artificial
  probe
  misc_feature (1)..(25): SEQ ID NO: 2998; WAN024COD_at; Start 375; Stop 399
tgccttggcagcagtagaagattct

SEQ ID NO: 126583 - DNA, 25 bp, Artificial
  probe
  misc_feature (1)..(25): SEQ ID NO: 2998; WAN024COD_at; Start 889; Stop 913
ttgatagaaaatttaccagaggtac

SEQ ID NO: 126584 - DNA, 25 bp, Artificial
  probe
  misc_feature (1)..(25): SEQ ID NO: 2998; WAN024COD_at; Start 359; Stop 383
tagaactagatggttatgccttggc

SEQ ID NO: 126585 - DNA, 25 bp, Artificial
  probe
  misc_feature (1)..(25): SEQ ID NO: 2998; WAN024COD_at; Start 1173; Stop 1197
cgaaccaaacaaaatggtagaggct

SEQ ID NO: 126586 - DNA, 25 bp, Artificial
  probe
  misc_feature (1)..(25): SEQ ID NO: 2998; WAN024COD_at; Start 1075; Stop 1099
aatattgtatccgttgttcaacaac

SEQ ID NO: 126587 - DNA, 25 bp, Artificial
  probe
  misc_feature (1)..(25): SEQ ID NO: 2998; WAN024COD_at; Start 452; Stop 476
tagatacttggagagatgaagatgc

SEQ ID NO: 126588 - DNA, 25 bp, Artificial
  probe
  misc_feature (1)..(25): SEQ ID NO: 2998; WAN024COD_at; Start 513; Stop 537
tgaaacagcatatggagatcaagga

SEQ ID NO: 126589 - DNA, 25 bp, Artificial
  probe
  misc_feature (1)..(25): SEQ ID NO: 2998; WAN024COD_at; Start 117; Stop 141
taatgatgatattgcgtcagagtgg

SEQ ID NO: 126590 - DNA, 25 bp, Artificial
  probe
  misc_feature (1)..(25): SEQ ID NO: 2998; WAN024COD_at; Start 664; Stop 688
aatggagatttacctagtgttatac

SEQ ID NO: 126591 - DNA, 25 bp, Artificial
  probe
  misc_feature (1)..(25): SEQ ID NO: 2998; WAN024COD_at; Start 824; Stop 848
tatacagtcctaaagctcatacagc

SEQ ID NO: 126592 - DNA, 25 bp, Artificial
  probe
  misc_feature (1)..(25): SEQ ID NO: 2998; WAN024COD_at; Start 321; Stop 345
catcattgttacaggaagtttagac

SEQ ID NO: 126593 - DNA, 25 bp, Artificial
  probe
  misc_feature (1)..(25): SEQ ID NO: 2998; WAN024COD_at; Start 809; Stop 833
gtttcgaagaacttgtatacagtcc

SEQ ID NO: 126594 - DNA, 25 bp, Artificial
  probe
  misc_feature (1)..(25): SEQ ID NO: 2998; WAN024COD_at; Start 497; Stop 521
tgaccaatcaatatcatgaaacagc

SEQ ID NO: 126595 - DNA, 25 bp, Artificial
  probe
  misc_feature (1)..(25): SEQ ID NO: 2998; WAN024COD_at; Start 935; Stop 959
catattttgcgtctagtgtcgttgc

SEQ ID NO: 126596 - DNA, 25 bp, Artificial
  probe
  misc_feature (1)..(25): SEQ ID NO: 2998; WAN024COD_at; Start 146; Stop 170
tgatgatgaataagcgattgaagac

SEQ ID NO: 126597 - DNA, 25 bp, Artificial
  probe
  misc_feature (1)..(25): SEQ ID NO: 2998; WAN024COD_at; Start 298; Stop 322
cgtgctttatacctagattctgaca

SEQ ID NO: 126598 - DNA, 25 bp, Artificial
  probe
  misc_feature (1)..(25): SEQ ID NO: 2998; WAN024COD_at; Start 1155; Stop 1179
taatatattttcttcaaccgaacca

SEQ ID NO: 126599 - DNA, 25 bp, Artificial
  probe
  misc_feature (1)..(25): SEQ ID NO: 2998; WAN024COD_at; Start 404; Stop 428
gtgatgttccttctaccaattttaa

SEQ ID NO: 126600 - DNA, 25 bp, Artificial
  probe
  misc_feature (1)..(25): SEQ ID NO: 2998; WAN024COD_at; Start 921; Stop 945
tatactagcacatacatattttgcg

SEQ ID NO: 126601 - DNA, 25 bp, Artificial
  probe
  misc_feature (1)..(25): SEQ ID NO: 2998; WAN024COD_at; Start 481; Stop 505
tcgaaactgttagaactgaccaatc

SEQ ID NO: 126602 - DNA, 25 bp, Artificial
  probe
  misc_feature (1)..(25): SEQ ID NO: 2998; WAN024COD_at; Start 606; Stop 630
ggatagcgtcgcacacatagaagga

SEQ ID NO: 126603 - DNA, 25 bp, Artificial
  probe
  misc_feature (1)..(25): SEQ ID NO: 2998; WAN024COD_at; Start 855; Stop 879
tacagctagttgtgagatggagcat

SEQ ID NO: 126604 - DNA, 25 bp, Artificial
  probe
  misc_feature (1)..(25): SEQ ID NO: 2998; WAN024COD_at; Start 793; Stop 817
gacattattagtcgtagtttcgaag

SEQ ID NO: 126605 - DNA, 25 bp, Artificial
  probe
  misc_feature (1)..(25): SEQ ID NO: 2998; WAN024COD_at; Start 1123; Stop 1147
gaaaatactagtcatgatataggca

SEQ ID NO: 126606 - DNA, 25 bp, Artificial
  probe
  misc_feature (1)..(25): SEQ ID NO: 2998; WAN024COD_at; Start 907; Stop 931
gaggtacatttttctatactagcac

SEQ ID NO: 126607 - DNA, 25 bp, Artificial
  probe
  misc_feature (1)..(25): SEQ ID NO: 2998; WAN024COD_at; Start 840; Stop 864
tcatacagcaatttttacagctagt

SEQ ID NO: 126608 - DNA, 25 bp, Artificial
  probe
  misc_feature (1)..(25): SEQ ID NO: 2998; WAN024COD_at; Start 1182; Stop 1206
caaaatggtagaggctattagacaa

SEQ ID NO: 126609 - DNA, 25 bp, Artificial
  probe
  misc_feature (1)..(25): SEQ ID NO: 2998; WAN024COD_at; Start 389; Stop 413
tagaagattcttttggtgatgttcc

SEQ ID NO: 126610 - DNA, 25 bp, Artificial
  probe
  misc_feature (1)..(25): SEQ ID NO: 2998; WAN024COD_at; Start 164; Stop 188
tgaagactatacaatctgaaatcgt

SEQ ID NO: 126611 - DNA, 25 bp, Artificial
  probe
  misc_feature (1)..(25): SEQ ID NO: 2998; WAN024COD_at; Start 466; Stop 490
gatgaagatgcttgttcgaaactgt

SEQ ID NO: 126612 - DNA, 25 bp, Artificial
  probe
  misc_feature (1)..(25): SEQ ID NO: 2998; WAN024COD_at; Start 279; Stop 303
taattttgtcaaagaaagtcgtgct

SEQ ID NO: 126613 - DNA, 25 bp, Artificial
  probe
  misc_feature (1)..(25): SEQ ID NO: 2998; WAN024COD_at; Start 131; Stop 155
cgtcagagtggtttttgatgatgaa

SEQ ID NO: 126614 - DNA, 25 bp, Artificial
  probe
  misc_feature (1)..(25): SEQ ID NO: 2998; WAN024COD_at; Start 556; Stop 580
catgatagatggaaaagattagacc

SEQ ID NO: 126615 - DNA, 25 bp, Artificial
  probe
  misc_feature (1)..(25): SEQ ID NO: 2998; WAN024COD_at; Start 726; Stop 750
taatcgctttagagaagtttggtgg

SEQ ID NO: 126616 - DNA, 25 bp, Artificial
  probe
  misc_feature (1)..(25): SEQ ID NO: 2428; WAN024COE_at; Start 812; Stop 836
gaacaaaatatgcagttcacagaga

SEQ ID NO: 126617 - DNA, 25 bp, Artificial
  probe
  misc_feature (1)..(25): SEQ ID NO: 2428; WAN024COE_at; Start 517; Stop 541
gagagagttactacaagatttacca

SEQ ID NO: 126618 - DNA, 25 bp, Artificial
  probe
  misc_feature (1)..(25): SEQ ID NO: 2428; WAN024COE_at; Start 66; Stop 90
tttggatagcattcagaatcagacg

SEQ ID NO: 126619 - DNA, 25 bp, Artificial
  probe
  misc_feature (1)..(25): SEQ ID NO: 2428; WAN024COE_at; Start 389; Stop 413
tatatgacttatgttacggatccag

SEQ ID NO: 126620 - DNA, 25 bp, Artificial
  probe
  misc_feature (1)..(25): SEQ ID NO: 2428; WAN024COE_at; Start 530; Stop 554
caagatttaccatttcctataggaa

SEQ ID NO: 126621 - DNA, 25 bp, Artificial
  probe
  misc_feature (1)..(25): SEQ ID NO: 2428; WAN024COE_at; Start 618; Stop 642
tgaatcgttgtgtttactggtaccg

SEQ ID NO: 126622 - DNA, 25 bp, Artificial
  probe
  misc_feature (1)..(25): SEQ ID NO: 2428; WAN024COE_at; Start 656; Stop 680
gatactttatcgaatacatggagtg

SEQ ID NO: 126623 - DNA, 25 bp, Artificial
  probe
  misc_feature (1)..(25): SEQ ID NO: 2428; WAN024COE_at; Start 289; Stop 313
ggaacatgatgctttagaccgatta

SEQ ID NO: 126624 - DNA, 25 bp, Artificial
  probe
  misc_feature (1)..(25): SEQ ID NO: 2428; WAN024COE_at; Start 474; Stop 498
tcagaaatgggaactggactgtagc

SEQ ID NO: 126625 - DNA, 25 bp, Artificial
  probe
  misc_feature (1)..(25): SEQ ID NO: 2428; WAN024COE_at; Start 333; Stop 357
aaaacgcagatattagtatcgggcg

SEQ ID NO: 126626 - DNA, 25 bp, Artificial
  probe
  misc_feature (1)..(25): SEQ ID NO: 2428; WAN024COE_at; Start 738; Stop 762
gttcagactatgacttgaccaatca

SEQ ID NO: 126627 - DNA, 25 bp, Artificial
  probe
  misc_feature (1)..(25): SEQ ID NO: 2428; WAN024COE_at; Start 458; Stop 482
gaaggtgtcgaagaagtcagaaatg

SEQ ID NO: 126628 - DNA, 25 bp, Artificial
  probe
  misc_feature (1)..(25): SEQ ID NO: 2428; WAN024COE_at; Start 214; Stop 238
tcatcagctcgtaacctaggtattg

SEQ ID NO: 126629 - DNA, 25 bp, Artificial
  probe
  misc_feature (1)..(25): SEQ ID NO: 2428; WAN024COE_at; Start 570; Stop 594
cttactggacatggaaggtacttct

SEQ ID NO: 126630 - DNA, 25 bp, Artificial
  probe
  misc_feature (1)..(25): SEQ ID NO: 2428; WAN024COE_at; Start 584; Stop 608
aaggtacttctaagagcttcgagga

SEQ ID NO: 126631 - DNA, 25 bp, Artificial
  probe
  misc_feature (1)..(25): SEQ ID NO: 2428; WAN024COE_at; Start 2; Stop 26
tggcagacgaactaattagtattgt

SEQ ID NO: 126632 - DNA, 25 bp, Artificial
  probe
  misc_feature (1)..(25): SEQ ID NO: 2428; WAN024COE_at; Start 484; Stop 508
gaactggactgtagctgtcttgaag

SEQ ID NO: 126633 - DNA, 25 bp, Artificial
  probe
  misc_feature (1)..(25): SEQ ID NO: 2428; WAN024COE_at; Start 672; Stop 696
catggagtgaaaagcgtatgtatga

SEQ ID NO: 126634 - DNA, 25 bp, Artificial
  probe
  misc_feature (1)..(25): SEQ ID NO: 2428; WAN024COE_at; Start 130; Stop 154
ccagatcattcatccaaaatatgtg

SEQ ID NO: 126635 - DNA, 25 bp, Artificial
  probe
  misc_feature (1)..(25): SEQ ID NO: 2428; WAN024COE_at; Start 721; Stop 745
gatagctattttagcaagttcagac

SEQ ID NO: 126636 - DNA, 25 bp, Artificial
  probe
  misc_feature (1)..(25): SEQ ID NO: 2428; WAN024COE_at; Start 81; Stop 105
gaatcagacgtatcaaaattttgag

SEQ ID NO: 126637 - DNA, 25 bp, Artificial
  probe
  misc_feature (1)..(25): SEQ ID NO: 2428; WAN024COE_at; Start 320; Stop 344
gctttgaaaaaggaaaacgcagata

SEQ ID NO: 126638 - DNA, 25 bp, Artificial
  probe
  misc_feature (1)..(25): SEQ ID NO: 2428; WAN024COE_at; Start 305; Stop 329
gaccgattatatggtgctttgaaaa

SEQ ID NO: 126639 - DNA, 25 bp, Artificial
  probe
  misc_feature (1)..(25): SEQ ID NO: 2428; WAN024COE_at; Start 636; Stop 660
ggtaccgtgttggtttatctgatac

SEQ ID NO: 126640 - DNA, 25 bp, Artificial
  probe
  misc_feature (1)..(25): SEQ ID NO: 2428; WAN024COE_at; Start 788; Stop 812
caaagagtgatagcaaaattagaag

SEQ ID NO: 126641 - DNA, 25 bp, Artificial
  probe
  misc_feature (1)..(25): SEQ ID NO: 2428; WAN024COE_at; Start 705; Stop 729
gggctagggaagaaaagatagctat

SEQ ID NO: 126642 - DNA, 25 bp, Artificial
  probe
  misc_feature (1)..(25): SEQ ID NO: 2428; WAN024COE_at; Start 200; Stop 224
caaacggcggtctttcatcagctcg

SEQ ID NO: 126643 - DNA, 25 bp, Artificial
  probe
  misc_feature (1)..(25): SEQ ID NO: 2428; WAN024COE_at; Start 365; Stop 389
tcttatgatgaaacacgctatgtgt

SEQ ID NO: 126644 - DNA, 25 bp, Artificial
  probe
  misc_feature (1)..(25): SEQ ID NO: 2428; WAN024COE_at; Start 398; Stop 422
tatgttacggatccagatgattctc

SEQ ID NO: 126645 - DNA, 25 bp, Artificial
  probe
  misc_feature (1)..(25): SEQ ID NO: 2428; WAN024COE_at; Start 187; Stop 211
tattttgagaaagcaaacggcggtc

SEQ ID NO: 126646 - DNA, 25 bp, Artificial
  probe
  misc_feature (1)..(25): SEQ ID NO: 2428; WAN024COE_at; Start 596; Stop 620
agagcttcgaggatagtctatttga

SEQ ID NO: 126647 - DNA, 25 bp, Artificial
  probe
  misc_feature (1)..(25): SEQ ID NO: 2428; WAN024COE_at; Start 52; Stop 76
tatttgcgaatgtgtttggatagca

SEQ ID NO: 126648 - DNA, 25 bp, Artificial
  probe
  misc_feature (1)..(25): SEQ ID NO: 2428; WAN024COE_at; Start 555; Stop 579
aaattgcagaggatacttactggac

SEQ ID NO: 126649 - DNA, 25 bp, Artificial
  probe
  misc_feature (1)..(25): SEQ ID NO: 2428; WAN024COE_at; Start 348; Stop 372
gtatcgggcgttataattcttatga

SEQ ID NO: 126650 - DNA, 25 bp, Artificial
  probe
  misc_feature (1)..(25): SEQ ID NO: 3979; WAN024COF_at; Start 11; Stop 35
aaatgttgaccgtcgccgtcaatga

SEQ ID NO: 126651 - DNA, 25 bp, Artificial
  probe
  misc_feature (1)..(25): SEQ ID NO: 3979; WAN024COF_at; Start 10; Stop 34
aaaatgttgaccgtcgccgtcaatg

SEQ ID NO: 126652 - DNA, 25 bp, Artificial
  probe
  misc_feature (1)..(25): SEQ ID NO: 3979; WAN024COF_at; Start 20; Stop 44
ccgtcgccgtcaatgaaaattttag

SEQ ID NO: 126653 - DNA, 25 bp, Artificial
  probe
  misc_feature (1)..(25): SEQ ID NO: 3979; WAN024COF_at; Start 30; Stop 54
caatgaaaattttagcatcgagttc

SEQ ID NO: 126654 - DNA, 25 bp, Artificial
  probe
  misc_feature (1)..(25): SEQ ID NO: 3979; WAN024COF_at; Start 78; Stop 102
ccttcacctgtttgatagttggttc

SEQ ID NO: 126655 - DNA, 25 bp, Artificial
  probe
  misc_feature (1)..(25): SEQ ID NO: 3979; WAN024COF_at; Start 93; Stop 117
tagttggttcatctagaccttttaa

SEQ ID NO: 126656 - DNA, 25 bp, Artificial
  probe
  misc_feature (1)..(25): SEQ ID NO: 3979; WAN024COF_at; Start 97; Stop 121
tggttcatctagaccttttaacaag

SEQ ID NO: 126657 - DNA, 25 bp, Artificial
  probe
  misc_feature (1)..(25): SEQ ID NO: 3979; WAN024COF_at; Start 81; Stop 105
tcacctgtttgatagttggttcatc

SEQ ID NO: 126658 - DNA, 25 bp, Artificial
  probe
  misc_feature (1)..(25): SEQ ID NO: 3979; WAN024COF_at; Start 35; Stop 59
aaaattttagcatcgagttctttcg

SEQ ID NO: 126659 - DNA, 25 bp, Artificial
  probe
  misc_feature (1)..(25): SEQ ID NO: 3979; WAN024COF_at; Start 3; Stop 27
gaggtacaaaatgttgaccgtcgcc

SEQ ID NO: 126660 - DNA, 25 bp, Artificial
  probe
  misc_feature (1)..(25): SEQ ID NO: 3979; WAN024COF_at; Start 22; Stop 46
gtcgccgtcaatgaaaattttagca

SEQ ID NO: 126661 - DNA, 25 bp, Artificial
  probe
  misc_feature (1)..(25): SEQ ID NO: 3979; WAN024COF_at; Start 45; Stop 69
catcgagttctttcgaagttttcga

SEQ ID NO: 126662 - DNA, 25 bp, Artificial
  probe
  misc_feature (1)..(25): SEQ ID NO: 3979; WAN024COF_at; Start 25; Stop 49
gccgtcaatgaaaattttagcatcg

SEQ ID NO: 126663 - DNA, 25 bp, Artificial
  probe
  misc_feature (1)..(25): SEQ ID NO: 3979; WAN024COF_at; Start 75; Stop 99
tttccttcacctgtttgatagttgg

SEQ ID NO: 126664 - DNA, 25 bp, Artificial
  probe
  misc_feature (1)..(25): SEQ ID NO: 3979; WAN024COF_at; Start 27; Stop 51
cgtcaatgaaaattttagcatcgag

SEQ ID NO: 126665 - DNA, 25 bp, Artificial
  probe
  misc_feature (1)..(25): SEQ ID NO: 3979; WAN024COF_at; Start 37; Stop 61
aattttagcatcgagttctttcgaa

SEQ ID NO: 126666 - DNA, 25 bp, Artificial
  probe
  misc_feature (1)..(25): SEQ ID NO: 3979; WAN024COF_at; Start 7; Stop 31
tacaaaatgttgaccgtcgccgtca

SEQ ID NO: 126667 - DNA, 25 bp, Artificial
  probe
  misc_feature (1)..(25): SEQ ID NO: 3979; WAN024COF_at; Start 71; Stop 95
ataatttccttcacctgtttgatag

SEQ ID NO: 126668 - DNA, 25 bp, Artificial
  probe
  misc_feature (1)..(25): SEQ ID NO: 3979; WAN024COF_at; Start 68; Stop 92
gaaataatttccttcacctgtttga

SEQ ID NO: 126669 - DNA, 25 bp, Artificial
  probe
  misc_feature (1)..(25): SEQ ID NO: 3979; WAN024COF_at; Start 12; Stop 36
aatgttgaccgtcgccgtcaatgaa

SEQ ID NO: 126670 - DNA, 25 bp, Artificial
  probe
  misc_feature (1)..(25): SEQ ID NO: 3979; WAN024COF_at; Start 102; Stop 126
catctagaccttttaacaagtcttc

SEQ ID NO: 126671 - DNA, 25 bp, Artificial
  probe
  misc_feature (1)..(25): SEQ ID NO: 3979; WAN024COF_at; Start 39; Stop 63
ttttagcatcgagttctttcgaagt

SEQ ID NO: 126672 - DNA, 25 bp, Artificial
  probe
  misc_feature (1)..(25): SEQ ID NO: 3979; WAN024COF_at; Start 21; Stop 45
cgtcgccgtcaatgaaaattttagc

SEQ ID NO: 126673 - DNA, 25 bp, Artificial
  probe
  misc_feature (1)..(25): SEQ ID NO: 3979; WAN024COF_at; Start 6; Stop 30
gtacaaaatgttgaccgtcgccgtc

SEQ ID NO: 126674 - DNA, 25 bp, Artificial
  probe
  misc_feature (1)..(25): SEQ ID NO: 3979; WAN024COF_at; Start 84; Stop 108
cctgtttgatagttggttcatctag

SEQ ID NO: 126675 - DNA, 25 bp, Artificial
  probe
  misc_feature (1)..(25): SEQ ID NO: 3979; WAN024COF_at; Start 90; Stop 114
tgatagttggttcatctagaccttt

SEQ ID NO: 126676 - DNA, 25 bp, Artificial
  probe
  misc_feature (1)..(25): SEQ ID NO: 3979; WAN024COF_at; Start 99; Stop 123
gttcatctagaccttttaacaagtc

SEQ ID NO: 126677 - DNA, 25 bp, Artificial
  probe
  misc_feature (1)..(25): SEQ ID NO: 3979; WAN024COF_at; Start 87; Stop 111
gtttgatagttggttcatctagacc

SEQ ID NO: 126678 - DNA, 25 bp, Artificial
  probe
  misc_feature (1)..(25): SEQ ID NO: 3979; WAN024COF_at; Start 4; Stop 28
aggtacaaaatgttgaccgtcgccg

SEQ ID NO: 126679 - DNA, 25 bp, Artificial
  probe
  misc_feature (1)..(25): SEQ ID NO: 3979; WAN024COF_at; Start 44; Stop 68
gcatcgagttctttcgaagttttcg

SEQ ID NO: 126680 - DNA, 25 bp, Artificial
  probe
  misc_feature (1)..(25): SEQ ID NO: 3979; WAN024COF_at; Start 8; Stop 32
acaaaatgttgaccgtcgccgtcaa

SEQ ID NO: 126681 - DNA, 25 bp, Artificial
  probe
  misc_feature (1)..(25): SEQ ID NO: 3979; WAN024COF_at; Start 104; Stop 128
tctagaccttttaacaagtcttcta

SEQ ID NO: 126682 - DNA, 25 bp, Artificial
  probe
  misc_feature (1)..(25): SEQ ID NO: 3979; WAN024COF_at; Start 17; Stop 41
tgaccgtcgccgtcaatgaaaattt

SEQ ID NO: 126683 - DNA, 25 bp, Artificial
  probe
  misc_feature (1)..(25): SEQ ID NO: 3979; WAN024COF_at; Start 2; Stop 26
tgaggtacaaaatgttgaccgtcgc

SEQ ID NO: 126684 - DNA, 25 bp, Artificial
  probe
  misc_feature (1)..(25): SEQ ID NO: 7561; WAN024COG_at; Start 156; Stop 180
caactccatgttcaaccttagcaaa

SEQ ID NO: 126685 - DNA, 25 bp, Artificial
  probe
  misc_feature (1)..(25): SEQ ID NO: 7561; WAN024COG_at; Start 38; Stop 62
gctgcttgcccatcttcaaaaaaga

SEQ ID NO: 126686 - DNA, 25 bp, Artificial
  probe
  misc_feature (1)..(25): SEQ ID NO: 7561; WAN024COG_at; Start 138; Stop 162
tatcactgatgaagccttcaactcc

SEQ ID NO: 126687 - DNA, 25 bp, Artificial
  probe
  misc_feature (1)..(25): SEQ ID NO: 7561; WAN024COG_at; Start 99; Stop 123
ggtgcatatgtatttgaccatttgg

SEQ ID NO: 126688 - DNA, 25 bp, Artificial
  probe
  misc_feature (1)..(25): SEQ ID NO: 7561; WAN024COG_at; Start 60; Stop 84
agataatgctcgatacaaacccacg

SEQ ID NO: 126689 - DNA, 25 bp, Artificial
  probe
  misc_feature (1)..(25): SEQ ID NO: 7561; WAN024COG_at; Start 93; Stop 117
cgatatggtgcatatgtatttgacc

SEQ ID NO: 126690 - DNA, 25 bp, Artificial
  probe
  misc_feature (1)..(25): SEQ ID NO: 7561; WAN024COG_at; Start 135; Stop 159
gtatatcactgatgaagccttcaac

SEQ ID NO: 126691 - DNA, 25 bp, Artificial
  probe
  misc_feature (1)..(25): SEQ ID NO: 7561; WAN024COG_at; Start 24; Stop 48
gatattcttgataggctgcttgccc

SEQ ID NO: 126692 - DNA, 25 bp, Artificial
  probe
  misc_feature (1)..(25): SEQ ID NO: 7561; WAN024COG_at; Start 114; Stop 138
gaccatttggttcaaaatactgtat

SEQ ID NO: 126693 - DNA, 25 bp, Artificial
  probe
  misc_feature (1)..(25): SEQ ID NO: 7561; WAN024COG_at; Start 10; Stop 34
tcccttgaggttcagatattcttga

SEQ ID NO: 126694 - DNA, 25 bp, Artificial
  probe
  misc_feature (1)..(25): SEQ ID NO: 7561; WAN024COG_at; Start 145; Stop 169
gatgaagccttcaactccatgttca

SEQ ID NO: 126695 - DNA, 25 bp, Artificial
  probe
  misc_feature (1)..(25): SEQ ID NO: 7561; WAN024COG_at; Start 76; Stop 100
aaacccacgatcatccacgatatgg

SEQ ID NO: 126696 - DNA, 25 bp, Artificial
  probe
  misc_feature (1)..(25): SEQ ID NO: 7561; WAN024COG_at; Start 221; Stop 245
taaataaattcacagtcatcatccc

SEQ ID NO: 126697 - DNA, 25 bp, Artificial
  probe
  misc_feature (1)..(25): SEQ ID NO: 7561; WAN024COG_at; Start 225; Stop 249
taaattcacagtcatcatcccactc

SEQ ID NO: 126698 - DNA, 25 bp, Artificial
  probe
  misc_feature (1)..(25): SEQ ID NO: 7561; WAN024COG_at; Start 15; Stop 39
tgaggttcagatattcttgataggc

SEQ ID NO: 126699 - DNA, 25 bp, Artificial
  probe
  misc_feature (1)..(25): SEQ ID NO: 7561; WAN024COG_at; Start 33; Stop 57
gataggctgcttgcccatcttcaaa

SEQ ID NO: 126700 - DNA, 25 bp, Artificial
  probe
  misc_feature (1)..(25): SEQ ID NO: 7561; WAN024COG_at; Start 71; Stop 95
gatacaaacccacgatcatccacga

SEQ ID NO: 126701 - DNA, 25 bp, Artificial
  probe
  misc_feature (1)..(25): SEQ ID NO: 7561; WAN024COG_at; Start 48; Stop 72
catcttcaaaaaagataatgctcga

SEQ ID NO: 126702 - DNA, 25 bp, Artificial
  probe
  misc_feature (1)..(25): SEQ ID NO: 7561; WAN024COG_at; Start 201; Stop 225
cgataatcgtaaagggactataaat

SEQ ID NO: 126703 - DNA, 25 bp, Artificial
  probe
  misc_feature (1)..(25): SEQ ID NO: 7561; WAN024COG_at; Start 103; Stop 127
catatgtatttgaccatttggttca

SEQ ID NO: 126704 - DNA, 25 bp, Artificial
  probe
  misc_feature (1)..(25): SEQ ID NO: 7561; WAN024COG_at; Start 235; Stop 259
gtcatcatcccactcaatatctcta

SEQ ID NO: 126705 - DNA, 25 bp, Artificial
  probe
  misc_feature (1)..(25): SEQ ID NO: 7561; WAN024COG_at; Start 84; Stop 108
gatcatccacgatatggtgcatatg

SEQ ID NO: 126706 - DNA, 25 bp, Artificial
  probe
  misc_feature (1)..(25): SEQ ID NO: 7561; WAN024COG_at; Start 66; Stop 90
tgctcgatacaaacccacgatcatc

SEQ ID NO: 126707 - DNA, 25 bp, Artificial
  probe
  misc_feature (1)..(25): SEQ ID NO: 7561; WAN024COG_at; Start 1; Stop 25
ttgccactctcccttgaggttcaga

SEQ ID NO: 126708 - DNA, 25 bp, Artificial
  probe
  misc_feature (1)..(25): SEQ ID NO: 7561; WAN024COG_at; Start 148; Stop 172
gaagccttcaactccatgttcaacc

SEQ ID NO: 126709 - DNA, 25 bp, Artificial
  probe
  misc_feature (1)..(25): SEQ ID NO: 7561; WAN024COG_at; Start 167; Stop 191
tcaaccttagcaaatttcttcccat

SEQ ID NO: 126710 - DNA, 25 bp, Artificial
  probe
  misc_feature (1)..(25): SEQ ID NO: 7561; WAN024COG_at; Start 129; Stop 153
aatactgtatatcactgatgaagcc

SEQ ID NO: 126711 - DNA, 25 bp, Artificial
  probe
  misc_feature (1)..(25): SEQ ID NO: 7561; WAN024COG_at; Start 243; Stop 267
cccactcaatatctctaatgcttaa

SEQ ID NO: 126712 - DNA, 25 bp, Artificial
  probe
  misc_feature (1)..(25): SEQ ID NO: 7561; WAN024COG_at; Start 81; Stop 105
cacgatcatccacgatatggtgcat

SEQ ID NO: 126713 - DNA, 25 bp, Artificial
  probe
  misc_feature (1)..(25): SEQ ID NO: 7561; WAN024COG_at; Start 164; Stop 188
tgttcaaccttagcaaatttcttcc

SEQ ID NO: 126714 - DNA, 25 bp, Artificial
  probe
  misc_feature (1)..(25): SEQ ID NO: 7561; WAN024COG_at; Start 63; Stop 87
taatgctcgatacaaacccacgatc

SEQ ID NO: 126715 - DNA, 25 bp, Artificial
  probe
  misc_feature (1)..(25): SEQ ID NO: 7561; WAN024COG_at; Start 211; Stop 235
aaagggactataaataaattcacag

SEQ ID NO: 126716 - DNA, 25 bp, Artificial
  probe
  misc_feature (1)..(25): SEQ ID NO: 7561; WAN024COG_at; Start 3; Stop 27
gccactctcccttgaggttcagata

SEQ ID NO: 126717 - DNA, 25 bp, Artificial
  probe
  misc_feature (1)..(25): SEQ ID NO: 7561; WAN024COG_at; Start 198; Stop 222
gaacgataatcgtaaagggactata

SEQ ID NO: 126718 - DNA, 25 bp, Artificial
  probe
  misc_feature (1)..(25): SEQ ID NO: 7532; WAN024COH_at; Start 59; Stop 83
tcggattgaatgttttcttggatga

SEQ ID NO: 126719 - DNA, 25 bp, Artificial
  probe
  misc_feature (1)..(25): SEQ ID NO: 7532; WAN024COH_at; Start 213; Stop 237
cctgctcaaaatccagttgaaaata

SEQ ID NO: 126720 - DNA, 25 bp, Artificial
  probe
  misc_feature (1)..(25): SEQ ID NO: 7532; WAN024COH_at; Start 38; Stop 62
tcaatcgcctttcccagattttcgg

SEQ ID NO: 126721 - DNA, 25 bp, Artificial
  probe
  misc_feature (1)..(25): SEQ ID NO: 7532; WAN024COH_at; Start 255; Stop 279
tagtttggcttcgtcccaatcgtaa

SEQ ID NO: 126722 - DNA, 25 bp, Artificial
  probe
  misc_feature (1)..(25): SEQ ID NO: 7532; WAN024COH_at; Start 153; Stop 177
cagtatccttattttcagcgacaaa

SEQ ID NO: 126723 - DNA, 25 bp, Artificial
  probe
  misc_feature (1)..(25): SEQ ID NO: 7532; WAN024COH_at; Start 15; Stop 39
gaggattttctgcatcaccataatc

SEQ ID NO: 126724 - DNA, 25 bp, Artificial
  probe
  misc_feature (1)..(25): SEQ ID NO: 7532; WAN024COH_at; Start 128; Stop 152
gcagcaaaggctccaaaaatcacct

SEQ ID NO: 126725 - DNA, 25 bp, Artificial
  probe
  misc_feature (1)..(25): SEQ ID NO: 7532; WAN024COH_at; Start 122; Stop 146
tgactagcagcaaaggctccaaaaa

SEQ ID NO: 126726 - DNA, 25 bp, Artificial
  probe
  misc_feature (1)..(25): SEQ ID NO: 7532; WAN024COH_at; Start 225; Stop 249
ccagttgaaaataaatgatggattc

SEQ ID NO: 126727 - DNA, 25 bp, Artificial
  probe
  misc_feature (1)..(25): SEQ ID NO: 7532; WAN024COH_at; Start 23; Stop 47
tctgcatcaccataatcaatcgcct

SEQ ID NO: 126728 - DNA, 25 bp, Artificial
  probe
  misc_feature (1)..(25): SEQ ID NO: 7532; WAN024COH_at; Start 188; Stop 212
tgaagcagagcttgattatcaatcc

SEQ ID NO: 126729 - DNA, 25 bp, Artificial
  probe
  misc_feature (1)..(25): SEQ ID NO: 7532; WAN024COH_at; Start 174; Stop 198
caaaggacaagacttgaagcagagc

SEQ ID NO: 126730 - DNA, 25 bp, Artificial
  probe
  misc_feature (1)..(25): SEQ ID NO: 7532; WAN024COH_at; Start 248; Stop 272
tctttcttagtttggcttcgtccca

SEQ ID NO: 126731 - DNA, 25 bp, Artificial
  probe
  misc_feature (1)..(25): SEQ ID NO: 7532; WAN024COH_at; Start 148; Stop 172
cacctcagtatccttattttcagcg

SEQ ID NO: 126732 - DNA, 25 bp, Artificial
  probe
  misc_feature (1)..(25): SEQ ID NO: 7532; WAN024COH_at; Start 165; Stop 189
tttcagcgacaaaggacaagacttg

SEQ ID NO: 126733 - DNA, 25 bp, Artificial
  probe
  misc_feature (1)..(25): SEQ ID NO: 7532; WAN024COH_at; Start 51; Stop 75
ccagattttcggattgaatgttttc

SEQ ID NO: 126734 - DNA, 25 bp, Artificial
  probe
  misc_feature (1)..(25): SEQ ID NO: 7532; WAN024COH_at; Start 178; Stop 202
ggacaagacttgaagcagagcttga

SEQ ID NO: 126735 - DNA, 25 bp, Artificial
  probe
  misc_feature (1)..(25): SEQ ID NO: 7532; WAN024COH_at; Start 74; Stop 98
tcttggatgaaagactcaacaatcc

SEQ ID NO: 126736 - DNA, 25 bp, Artificial
  probe
  misc_feature (1)..(25): SEQ ID NO: 7532; WAN024COH_at; Start 131; Stop 155
gcaaaggctccaaaaatcacctcag

SEQ ID NO: 126737 - DNA, 25 bp, Artificial
  probe
  misc_feature (1)..(25): SEQ ID NO: 7532; WAN024COH_at; Start 3; Stop 27
gattttcttccagaggattttctgc

SEQ ID NO: 126738 - DNA, 25 bp, Artificial
  probe
  misc_feature (1)..(25): SEQ ID NO: 7532; WAN024COH_at; Start 162; Stop 186
tattttcagcgacaaaggacaagac

SEQ ID NO: 126739 - DNA, 25 bp, Artificial
  probe
  misc_feature (1)..(25): SEQ ID NO: 7532; WAN024COH_at; Start 197; Stop 221
gcttgattatcaatcccctgctcaa

SEQ ID NO: 126740 - DNA, 25 bp, Artificial
  probe
  misc_feature (1)..(25): SEQ ID NO: 7532; WAN024COH_at; Start 10; Stop 34
ttccagaggattttctgcatcacca

SEQ ID NO: 126741 - DNA, 25 bp, Artificial
  probe
  misc_feature (1)..(25): SEQ ID NO: 7532; WAN024COH_at; Start 31; Stop 55
accataatcaatcgcctttcccaga

SEQ ID NO: 126742 - DNA, 25 bp, Artificial
  probe
  misc_feature (1)..(25): SEQ ID NO: 7532; WAN024COH_at; Start 94; Stop 118
aatcccttcaacctcattcatttgc

SEQ ID NO: 126743 - DNA, 25 bp, Artificial
  probe
  misc_feature (1)..(25): SEQ ID NO: 7532; WAN024COH_at; Start 44; Stop 68
gcctttcccagattttcggattgaa

SEQ ID NO: 126744 - DNA, 25 bp, Artificial
  probe
  misc_feature (1)..(25): SEQ ID NO: 7532; WAN024COH_at; Start 116; Stop 140
tgctcctgactagcagcaaaggctc

SEQ ID NO: 126745 - DNA, 25 bp, Artificial
  probe
  misc_feature (1)..(25): SEQ ID NO: 7532; WAN024COH_at; Start 136; Stop 160
ggctccaaaaatcacctcagtatcc

SEQ ID NO: 126746 - DNA, 25 bp, Artificial
  probe
  misc_feature (1)..(25): SEQ ID NO: 7532; WAN024COH_at; Start 78; Stop 102
ggatgaaagactcaacaatcccttc

SEQ ID NO: 126747 - DNA, 25 bp, Artificial
  probe
  misc_feature (1)..(25): SEQ ID NO: 7532; WAN024COH_at; Start 108; Stop 132
cattcatttgctcctgactagcagc

SEQ ID NO: 126748 - DNA, 25 bp, Artificial
  probe
  misc_feature (1)..(25): SEQ ID NO: 7532; WAN024COH_at; Start 240; Stop 264
tgatggattctttcttagtttggct

SEQ ID NO: 126749 - DNA, 25 bp, Artificial
  probe
  misc_feature (1)..(25): SEQ ID NO: 7532; WAN024COH_at; Start 208; Stop 232
aatcccctgctcaaaatccagttga

SEQ ID NO: 126750 - DNA, 25 bp, Artificial
  probe
  misc_feature (1)..(25): SEQ ID NO: 7532; WAN024COH_at; Start 82; Stop 106
gaaagactcaacaatcccttcaacc

SEQ ID NO: 126751 - DNA, 25 bp, Artificial
  probe
  misc_feature (1)..(25): SEQ ID NO: 7532; WAN024COH_at; Start 168; Stop 192
cagcgacaaaggacaagacttgaag

SEQ ID NO: 126752 - DNA, 25 bp, Artificial
  probe
  misc_feature (1)..(25): SEQ ID NO: 2808; WAN024COI_at; Start 27; Stop 51
tgggtcagaaagaacatggcatgca

SEQ ID NO: 126753 - DNA, 25 bp, Artificial
  probe
  misc_feature (1)..(25): SEQ ID NO: 2808; WAN024COI_at; Start 1495; Stop 1519
gataagattaaggagcacacaggac

SEQ ID NO: 126754 - DNA, 25 bp, Artificial
  probe
  misc_feature (1)..(25): SEQ ID NO: 2808; WAN024COI_at; Start 1021; Stop 1045
caagtcttgtcctttgtcgctgaaa

SEQ ID NO: 126755 - DNA, 25 bp, Artificial
  probe
  misc_feature (1)..(25): SEQ ID NO: 2808; WAN024COI_at; Start 1174; Stop 1198
tatggtgatgcagaaaatcctctgg

SEQ ID NO: 126756 - DNA, 25 bp, Artificial
  probe
  misc_feature (1)..(25): SEQ ID NO: 2808; WAN024COI_at; Start 1434; Stop 1458
ggctgcacattattacacagatagg

SEQ ID NO: 126757 - DNA, 25 bp, Artificial
  probe
  misc_feature (1)..(25): SEQ ID NO: 2808; WAN024COI_at; Start 911; Stop 935
tatcatcttttgacacccgattacg

SEQ ID NO: 126758 - DNA, 25 bp, Artificial
  probe
  misc_feature (1)..(25): SEQ ID NO: 2808; WAN024COI_at; Start 12; Stop 36
tattccagcttggtatgggtcagaa

SEQ ID NO: 126759 - DNA, 25 bp, Artificial
  probe
  misc_feature (1)..(25): SEQ ID NO: 2808; WAN024COI_at; Start 155; Stop 179
tattagcttaccagcctcatctacg

SEQ ID NO: 126760 - DNA, 25 bp, Artificial
  probe
  misc_feature (1)..(25): SEQ ID NO: 2808; WAN024COI_at; Start 1345; Stop 1369
ggaattcctcaaatcaacctagttg

SEQ ID NO: 126761 - DNA, 25 bp, Artificial
  probe
  misc_feature (1)..(25): SEQ ID NO: 2808; WAN024COI_at; Start 941; Stop 965
gacgaagccaaactaagaaagaatc

SEQ ID NO: 126762 - DNA, 25 bp, Artificial
  probe
  misc_feature (1)..(25): SEQ ID NO: 2808; WAN024COI_at; Start 1070; Stop 1094
gagcctttgctgctagtcaggagca

SEQ ID NO: 126763 - DNA, 25 bp, Artificial
  probe
  misc_feature (1)..(25): SEQ ID NO: 2808; WAN024COI_at; Start 1419; Stop 1443
tacagaattttctaaggctgcacat

SEQ ID NO: 126764 - DNA, 25 bp, Artificial
  probe
  misc_feature (1)..(25): SEQ ID NO: 2808; WAN024COI_at; Start 754; Stop 778
aaactgttgagtctgttcattggac

SEQ ID NO: 126765 - DNA, 25 bp, Artificial
  probe
  misc_feature (1)..(25): SEQ ID NO: 2808; WAN024COI_at; Start 1036; Stop 1060
gtcgctgaaaataaggatactgagg

SEQ ID NO: 126766 - DNA, 25 bp, Artificial
  probe
  misc_feature (1)..(25): SEQ ID NO: 2808; WAN024COI_at; Start 860; Stop 884
tacgattgttgcaggagttgtatcc

SEQ ID NO: 126767 - DNA, 25 bp, Artificial
  probe
  misc_feature (1)..(25): SEQ ID NO: 2808; WAN024COI_at; Start 370; Stop 394
gaacatggagttgaaggcttcatca

SEQ ID NO: 126768 - DNA, 25 bp, Artificial
  probe
  misc_feature (1)..(25): SEQ ID NO: 2808; WAN024COI_at; Start 478; Stop 502
ttttttgaagatgggcaagcagcct

SEQ ID NO: 126769 - DNA, 25 bp, Artificial
  probe
  misc_feature (1)..(25): SEQ ID NO: 2808; WAN024COI_at; Start 926; Stop 950
cccgattacgattgggacgaagcca

SEQ ID NO: 126770 - DNA, 25 bp, Artificial
  probe
  misc_feature (1)..(25): SEQ ID NO: 2808; WAN024COI_at; Start 878; Stop 902
tgtatcctgaacgaatgcatcaatg

SEQ ID NO: 126771 - DNA, 25 bp, Artificial
  probe
  misc_feature (1)..(25): SEQ ID NO: 2808; WAN024COI_at; Start 88; Stop 112
gagtttgatgatacctttcaccaga

SEQ ID NO: 126772 - DNA, 25 bp, Artificial
  probe
  misc_feature (1)..(25): SEQ ID NO: 2808; WAN024COI_at; Start 1311; Stop 1335
tcatctctacacacagattgctggg

SEQ ID NO: 126773 - DNA, 25 bp, Artificial
  probe
  misc_feature (1)..(25): SEQ ID NO: 2808; WAN024COI_at; Start 715; Stop 739
gaccagttggtactagatcgtttac

SEQ ID NO: 126774 - DNA, 25 bp, Artificial
  probe
  misc_feature (1)..(25): SEQ ID NO: 2808; WAN024COI_at; Start 259; Stop 283
catacccaagttttaagcattagag

SEQ ID NO: 126775 - DNA, 25 bp, Artificial
  probe
  misc_feature (1)..(25): SEQ ID NO: 2808; WAN024COI_at; Start 616; Stop 640
caaaatatgggagatctggtggcag

SEQ ID NO: 126776 - DNA, 25 bp, Artificial
  probe
  misc_feature (1)..(25): SEQ ID NO: 2808; WAN024COI_at; Start 1189; Stop 1213
aatcctctggaagaaaatcaacacc

SEQ ID NO: 126777 - DNA, 25 bp, Artificial
  probe
  misc_feature (1)..(25): SEQ ID NO: 2808; WAN024COI_at; Start 1051; Stop 1075
gatactgaggtgatttttggagcct

SEQ ID NO: 126778 - DNA, 25 bp, Artificial
  probe
  misc_feature (1)..(25): SEQ ID NO: 2808; WAN024COI_at; Start 1330; Stop 1354
gctgggattagtgcaggaattcctc

SEQ ID NO: 126779 - DNA, 25 bp, Artificial
  probe
  misc_feature (1)..(25): SEQ ID NO: 2808; WAN024COI_at; Start 1143; Stop 1167
tcaatccgaaaatctgggaaaggcg

SEQ ID NO: 126780 - DNA, 25 bp, Artificial
  probe
  misc_feature (1)..(25): SEQ ID NO: 2808; WAN024COI_at; Start 44; Stop 68
ggcatgcagatatcactccatggta

SEQ ID NO: 126781 - DNA, 25 bp, Artificial
  probe
  misc_feature (1)..(25): SEQ ID NO: 2808; WAN024COI_at; Start 559; Stop 583
ggaggacaggtagaagtcaatccaa

SEQ ID NO: 126782 - DNA, 25 bp, Artificial
  probe
  misc_feature (1)..(25): SEQ ID NO: 2808; WAN024COI_at; Start 1206; Stop 1230
tcaacaccaggacttacgcttacag

SEQ ID NO: 126783 - DNA, 25 bp, Artificial
  probe
  misc_feature (1)..(25): SEQ ID NO: 2808; WAN024COI_at; Start 657; Stop 681
tctgcaaacgtatgtgaaggatcag

SEQ ID NO: 126784 - DNA, 25 bp, Artificial
  probe
  misc_feature (1)..(25): SEQ ID NO: 2808; WAN024COI_at; Start 771; Stop 795
cattggacgtaatcctcaagatacc

SEQ ID NO: 126785 - DNA, 25 bp, Artificial
  probe
  misc_feature (1)..(25): SEQ ID NO: 2808; WAN024COI_at; Start 998; Stop 1022
ggattgataatcaagctctgcttca

SEQ ID NO: 126786 - DNA, 25 bp, Artificial
  probe
  misc_feature (1)..(25): SEQ ID NO: 2825; WAN024COJ_at; Start 43; Stop 67
tgggaaaatcactatgacatacctg

SEQ ID NO: 126787 - DNA, 25 bp, Artificial
  probe
  misc_feature (1)..(25): SEQ ID NO: 2825; WAN024COJ_at; Start 1117; Stop 1141
ggtgcttcttttgaaccccatgcca

SEQ ID NO: 126788 - DNA, 25 bp, Artificial
  probe
  misc_feature (1)..(25): SEQ ID NO: 2825; WAN024COJ_at; Start 883; Stop 907
ggttatcgacctgcagaaggattcg

SEQ ID NO: 126789 - DNA, 25 bp, Artificial
  probe
  misc_feature (1)..(25): SEQ ID NO: 2825; WAN024COJ_at; Start 839; Stop 863
tccatccaggtgattttaaaccgcc

SEQ ID NO: 126790 - DNA, 25 bp, Artificial
  probe
  misc_feature (1)..(25): SEQ ID NO: 2825; WAN024COJ_at; Start 1274; Stop 1298
cggagttggatcagcgtttttggaa

SEQ ID NO: 126791 - DNA, 25 bp, Artificial
  probe
  misc_feature (1)..(25): SEQ ID NO: 2825; WAN024COJ_at; Start 1078; Stop 1102
tcaggtctttctatgggaacgtttc

SEQ ID NO: 126792 - DNA, 25 bp, Artificial
  probe
  misc_feature (1)..(25): SEQ ID NO: 2825; WAN024COJ_at; Start 411; Stop 435
tacaggagctatttcttatcaagga

SEQ ID NO: 126793 - DNA, 25 bp, Artificial
  probe
  misc_feature (1)..(25): SEQ ID NO: 2825; WAN024COJ_at; Start 1360; Stop 1384
gaaatggatccacaagcctatgaac

SEQ ID NO: 126794 - DNA, 25 bp, Artificial
  probe
  misc_feature (1)..(25): SEQ ID NO: 2825; WAN024COJ_at; Start 1137; Stop 1161
tgccatcatagttggtaagcccttg

SEQ ID NO: 126795 - DNA, 25 bp, Artificial
  probe
  misc_feature (1)..(25): SEQ ID NO: 2825; WAN024COJ_at; Start 1182; Stop 1206
tagtcgtggacgtttggacgcaccg

SEQ ID NO: 126796 - DNA, 25 bp, Artificial
  probe
  misc_feature (1)..(25): SEQ ID NO: 2825; WAN024COJ_at; Start 472; Stop 496
gattttgcccagcttgcctattggg

SEQ ID NO: 126797 - DNA, 25 bp, Artificial
  probe
  misc_feature (1)..(25): SEQ ID NO: 2825; WAN024COJ_at; Start 677; Stop 701
gagacggagactactttctctcgat

SEQ ID NO: 126798 - DNA, 25 bp, Artificial
  probe
  misc_feature (1)..(25): SEQ ID NO: 2825; WAN024COJ_at; Start 950; Stop 974
tattttctgatccacgtttagaggg

SEQ ID NO: 126799 - DNA, 25 bp, Artificial
  probe
  misc_feature (1)..(25): SEQ ID NO: 2825; WAN024COJ_at; Start 23; Stop 47
tacagataggacttgccaattggga

SEQ ID NO: 126800 - DNA, 25 bp, Artificial
  probe
  misc_feature (1)..(25): SEQ ID NO: 2825; WAN024COJ_at; Start 1198; Stop 1222
gacgcaccgggtgtctctaacttag

SEQ ID NO: 126801 - DNA, 25 bp, Artificial
  probe
  misc_feature (1)..(25): SEQ ID NO: 2825; WAN024COJ_at; Start 547; Stop 571
tatgagaaggaaggcaattgtgact

SEQ ID NO: 126802 - DNA, 25 bp, Artificial
  probe
  misc_feature (1)..(25): SEQ ID NO: 2825; WAN024COJ_at; Start 585; Stop 609
ccgtaaaatgtggagtgggtctgtt

SEQ ID NO: 126803 - DNA, 25 bp, Artificial
  probe
  misc_feature (1)..(25): SEQ ID NO: 2825; WAN024COJ_at; Start 1436; Stop 1460
ctgctggacgacacaatgatgatac

SEQ ID NO: 126804 - DNA, 25 bp, Artificial
  probe
  misc_feature (1)..(25): SEQ ID NO: 2825; WAN024COJ_at; Start 737; Stop 761
taggtaatcttcaccaacgatggag

SEQ ID NO: 126805 - DNA, 25 bp, Artificial
  probe
  misc_feature (1)..(25): SEQ ID NO: 2825; WAN024COJ_at; Start 1240; Stop 1264
catcatacaggtgggacaagttctc

SEQ ID NO: 126806 - DNA, 25 bp, Artificial
  probe
  misc_feature (1)..(25): SEQ ID NO: 2825; WAN024COJ_at; Start 794; Stop 818
gaaatatcctacatgattccaagcg

SEQ ID NO: 126807 - DNA, 25 bp, Artificial
  probe
  misc_feature (1)..(25): SEQ ID NO: 2825; WAN024COJ_at; Start 754; Stop 778
cgatggagtcgaaaacaatttggta

SEQ ID NO: 126808 - DNA, 25 bp, Artificial
  probe
  misc_feature (1)..(25): SEQ ID NO: 2825; WAN024COJ_at; Start 166; Stop 190
gaagatggtcagtattccagagact

SEQ ID NO: 126809 - DNA, 25 bp, Artificial
  probe
  misc_feature (1)..(25): SEQ ID NO: 2825; WAN024COJ_at; Start 635; Stop 659
tatctgaaaaagacttggagcaagc

SEQ ID NO: 126810 - DNA, 25 bp, Artificial
  probe
  misc_feature (1)..(25): SEQ ID NO: 2825; WAN024COJ_at; Start 659; Stop 683
cactttttatggatagtcgagacgg

SEQ ID NO: 126811 - DNA, 25 bp, Artificial
  probe
  misc_feature (1)..(25): SEQ ID NO: 2825; WAN024COJ_at; Start 1421; Stop 1445
ttttatctaaaggaactgctggacg

SEQ ID NO: 126812 - DNA, 25 bp, Artificial
  probe
  misc_feature (1)..(25): SEQ ID NO: 2825; WAN024COJ_at; Start 712; Stop 736
gcaagaggtcgtggaactatcaaac

SEQ ID NO: 126813 - DNA, 25 bp, Artificial
  probe
  misc_feature (1)..(25): SEQ ID NO: 2825; WAN024COJ_at; Start 1094; Stop 1118
gaacgtttccggctctctattatgg

SEQ ID NO: 126814 - DNA, 25 bp, Artificial
  probe
  misc_feature (1)..(25): SEQ ID NO: 2825; WAN024COJ_at; Start 697; Stop 721
tcgatatctgttgaagcaagaggtc

SEQ ID NO: 126815 - DNA, 25 bp, Artificial
  probe
  misc_feature (1)..(25): SEQ ID NO: 2825; WAN024COJ_at; Start 985; Stop 1009
tatctcggaacggatgagctagagg

SEQ ID NO: 126816 - DNA, 25 bp, Artificial
  probe
  misc_feature (1)..(25): SEQ ID NO: 2825; WAN024COJ_at; Start 1254; Stop 1278
gacaagttctcaagatatgacggag

SEQ ID NO: 126817 - DNA, 25 bp, Artificial
  probe
  misc_feature (1)..(25): SEQ ID NO: 2825; WAN024COJ_at; Start 367; Stop 391
ggtgataaactctttcctccgacga

SEQ ID NO: 126818 - DNA, 25 bp, Artificial
  probe
  misc_feature (1)..(25): SEQ ID NO: 2825; WAN024COJ_at; Start 343; Stop 367
aaatctctttttggcggtgggtatg

SEQ ID NO: 126819 - DNA, 25 bp, Artificial
  probe
  misc_feature (1)..(25): SEQ ID NO: 2825; WAN024COJ_at; Start 504; Stop 528
tattatggtgcaaaaaacactccct

SEQ ID NO: 126820 - DNA, 25 bp, Artificial
  probe
  misc_feature (1)..(25): SEQ ID NO: 4318; WAN024COK_at; Start 1176; Stop 1200
tccaaccaatcgtccgagacaacgg

SEQ ID NO: 126821 - DNA, 25 bp, Artificial
  probe
  misc_feature (1)..(25): SEQ ID NO: 4318; WAN024COK_at; Start 1049; Stop 1073
gggctatggcctcgatcacctatca

SEQ ID NO: 126822 - DNA, 25 bp, Artificial
  probe
  misc_feature (1)..(25): SEQ ID NO: 4318; WAN024COK_at; Start 63; Stop 87
taatgccctgaaaggcaagatgtcc

SEQ ID NO: 126823 - DNA, 25 bp, Artificial
  probe
  misc_feature (1)..(25): SEQ ID NO: 4318; WAN024COK_at; Start 1006; Stop 1030
gctattgaagccaaggaacatgtca

SEQ ID NO: 126824 - DNA, 25 bp, Artificial
  probe
  misc_feature (1)..(25): SEQ ID NO: 4318; WAN024COK_at; Start 1394; Stop 1418
cgcgtgaggctcagattatctccga

SEQ ID NO: 126825 - DNA, 25 bp, Artificial
  probe
  misc_feature (1)..(25): SEQ ID NO: 4318; WAN024COK_at; Start 828; Stop 852
taatttatacaaggaagagcatgcg

SEQ ID NO: 126826 - DNA, 25 bp, Artificial
  probe
  misc_feature (1)..(25): SEQ ID NO: 4318; WAN024COK_at; Start 722; Stop 746
taacaaccttggtcgaaggagagga

SEQ ID NO: 126827 - DNA, 25 bp, Artificial
  probe
  misc_feature (1)..(25): SEQ ID NO: 4318; WAN024COK_at; Start 2338; Stop 2362
actccaaaaggtgaaatcgtgactc

SEQ ID NO: 126828 - DNA, 25 bp, Artificial
  probe
  misc_feature (1)..(25): SEQ ID NO: 4318; WAN024COK_at; Start 865; Stop 889
catttggtttatgcgattcgagctc

SEQ ID NO: 126829 - DNA, 25 bp, Artificial
  probe
  misc_feature (1)..(25): SEQ ID NO: 4318; WAN024COK_at; Start 1463; Stop 1487
gacgtggtacggatatcaagcttgg

SEQ ID NO: 126830 - DNA, 25 bp, Artificial
  probe
  misc_feature (1)..(25): SEQ ID NO: 4318; WAN024COK_at; Start 2176; Stop 2200
gactatctacaacagctatccatgg

SEQ ID NO: 126831 - DNA, 25 bp, Artificial
  probe
  misc_feature (1)..(25): SEQ ID NO: 4318; WAN024COK_at; Start 666; Stop 690
tattgcgggttctcctcgtgttcag

SEQ ID NO: 126832 - DNA, 25 bp, Artificial
  probe
  misc_feature (1)..(25): SEQ ID NO: 4318; WAN024COK_at; Start 1343; Stop 1367
tcttgtttcgtgaagggattgccca

SEQ ID NO: 126833 - DNA, 25 bp, Artificial
  probe
  misc_feature (1)..(25): SEQ ID NO: 4318; WAN024COK_at; Start 1536; Stop 1560
gatggaaagtcagcggatcgaccta

SEQ ID NO: 126834 - DNA, 25 bp, Artificial
  probe
  misc_feature (1)..(25): SEQ ID NO: 4318; WAN024COK_at; Start 2245; Stop 2269
tactatcaagaagcctacgcgggct

SEQ ID NO: 126835 - DNA, 25 bp, Artificial
  probe
  misc_feature (1)..(25): SEQ ID NO: 4318; WAN024COK_at; Start 2202; Stop 2226
tatcggtggtcaatctgctagtcag

SEQ ID NO: 126836 - DNA, 25 bp, Artificial
  probe
  misc_feature (1)..(25): SEQ ID NO: 4318; WAN024COK_at; Start 127; Stop 151
tttcgtcagcgtctttccgagggag

SEQ ID NO: 126837 - DNA, 25 bp, Artificial
  probe
  misc_feature (1)..(25): SEQ ID NO: 4318; WAN024COK_at; Start 442; Stop 466
ggtgtaccatttacggaagatccaa

SEQ ID NO: 126838 - DNA, 25 bp, Artificial
  probe
  misc_feature (1)..(25): SEQ ID NO: 4318; WAN024COK_at; Start 385; Stop 409
tcaaagcgtgatgccgaggaaatgg

SEQ ID NO: 126839 - DNA, 25 bp, Artificial
  probe
  misc_feature (1)..(25): SEQ ID NO: 4318; WAN024COK_at; Start 1732; Stop 1756
cggaaactagtcgaaaaggctcagc

SEQ ID NO: 126840 - DNA, 25 bp, Artificial
  probe
  misc_feature (1)..(25): SEQ ID NO: 4318; WAN024COK_at; Start 1479; Stop 1503
caagcttggtaaaggagtcgcagag

SEQ ID NO: 126841 - DNA, 25 bp, Artificial
  probe
  misc_feature (1)..(25): SEQ ID NO: 4318; WAN024COK_at; Start 2147; Stop 2171
ccattgatgacaactgggtagagca

SEQ ID NO: 126842 - DNA, 25 bp, Artificial
  probe
  misc_feature (1)..(25): SEQ ID NO: 4318; WAN024COK_at; Start 559; Stop 583
gataacctagcctcgaatgaagaag

SEQ ID NO: 126843 - DNA, 25 bp, Artificial
  probe
  misc_feature (1)..(25): SEQ ID NO: 4318; WAN024COK_at; Start 247; Stop 271
ggagctattgtcatgcactatggaa

SEQ ID NO: 126844 - DNA, 25 bp, Artificial
  probe
  misc_feature (1)..(25): SEQ ID NO: 4318; WAN024COK_at; Start 650; Stop 674
cacaaactcctctgattattgcggg

SEQ ID NO: 126845 - DNA, 25 bp, Artificial
  probe
  misc_feature (1)..(25): SEQ ID NO: 4318; WAN024COK_at; Start 8; Stop 32
gacgtttaggtcaagatttccagct

SEQ ID NO: 126846 - DNA, 25 bp, Artificial
  probe
  misc_feature (1)..(25): SEQ ID NO: 4318; WAN024COK_at; Start 142; Stop 166
tccgagggagaaagtctagacgata

SEQ ID NO: 126847 - DNA, 25 bp, Artificial
  probe
  misc_feature (1)..(25): SEQ ID NO: 4318; WAN024COK_at; Start 1373; Stop 1397
tcctaaatgctaataatgcggcgcg

SEQ ID NO: 126848 - DNA, 25 bp, Artificial
  probe
  misc_feature (1)..(25): SEQ ID NO: 4318; WAN024COK_at; Start 989; Stop 1013
aaggaggtctccatcaggctattga

SEQ ID NO: 126849 - DNA, 25 bp, Artificial
  probe
  misc_feature (1)..(25): SEQ ID NO: 4318; WAN024COK_at; Start 1440; Stop 1464
gacagtggctacctctatggcagga

SEQ ID NO: 126850 - DNA, 25 bp, Artificial
  probe
  misc_feature (1)..(25): SEQ ID NO: 4318; WAN024COK_at; Start 1029; Stop 1053
caaattatctcctgagacgcgggct

SEQ ID NO: 126851 - DNA, 25 bp, Artificial
  probe
  misc_feature (1)..(25): SEQ ID NO: 4318; WAN024COK_at; Start 1562; Stop 1586
aaattcgtggccgttctggtcgtca

SEQ ID NO: 126852 - DNA, 25 bp, Artificial
  probe
  misc_feature (1)..(25): SEQ ID NO: 4318; WAN024COK_at; Start 300; Stop 324
taagaccttgacagctaccatgcct

SEQ ID NO: 126853 - DNA, 25 bp, Artificial
  probe
  misc_feature (1)..(25): SEQ ID NO: 4318; WAN024COK_at; Start 1914; Stop 1938
tacagaagaggtagcggctgatcac

SEQ ID NO: 126854 - DNA, 25 bp, Artificial
  probe
  misc_feature (1)..(25): SEQ ID NO: 6988; WAN024COL_at; Start 178; Stop 202
gatatcatagactggagtcccgtct

SEQ ID NO: 126855 - DNA, 25 bp, Artificial
  probe
  misc_feature (1)..(25): SEQ ID NO: 6988; WAN024COL_at; Start 51; Stop 75
tatcgagaatgaccaaatcagactt

SEQ ID NO: 126856 - DNA, 25 bp, Artificial
  probe
  misc_feature (1)..(25): SEQ ID NO: 6988; WAN024COL_at; Start 144; Stop 168
aatgataaacttcttccttcccttg

SEQ ID NO: 126857 - DNA, 25 bp, Artificial
  probe
  misc_feature (1)..(25): SEQ ID NO: 6988; WAN024COL_at; Start 137; Stop 161
tccttgaaatgataaacttcttcct

SEQ ID NO: 126858 - DNA, 25 bp, Artificial
  probe
  misc_feature (1)..(25): SEQ ID NO: 6988; WAN024COL_at; Start 190; Stop 214
tggagtcccgtcttcattataaaaa

SEQ ID NO: 126859 - DNA, 25 bp, Artificial
  probe
  misc_feature (1)..(25): SEQ ID NO: 6988; WAN024COL_at; Start 61; Stop 85
gaccaaatcagacttattcaaattc

SEQ ID NO: 126860 - DNA, 25 bp, Artificial
  probe
  misc_feature (1)..(25): SEQ ID NO: 6988; WAN024COL_at; Start 149; Stop 173
taaacttcttccttcccttgattca

SEQ ID NO: 126861 - DNA, 25 bp, Artificial
  probe
  misc_feature (1)..(25): SEQ ID NO: 6988; WAN024COL_at; Start 105; Stop 129
gcacaaaagcttgctttccatagaa

SEQ ID NO: 126862 - DNA, 25 bp, Artificial
  probe
  misc_feature (1)..(25): SEQ ID NO: 6988; WAN024COL_at; Start 11; Stop 35
tgtgcttcctcaaacacaacctgtc

SEQ ID NO: 126863 - DNA, 25 bp, Artificial
  probe
  misc_feature (1)..(25): SEQ ID NO: 6988; WAN024COL_at; Start 100; Stop 124
ggcacgcacaaaagcttgctttcca

SEQ ID NO: 126864 - DNA, 25 bp, Artificial
  probe
  misc_feature (1)..(25): SEQ ID NO: 6988; WAN024COL_at; Start 81; Stop 105
aattcaaagatttcataaaggcacg

SEQ ID NO: 126865 - DNA, 25 bp, Artificial
  probe
  misc_feature (1)..(25): SEQ ID NO: 6988; WAN024COL_at; Start 203; Stop 227
tcattataaaaagttcgttggtata

SEQ ID NO: 126866 - DNA, 25 bp, Artificial
  probe
  misc_feature (1)..(25): SEQ ID NO: 6988; WAN024COL_at; Start 109; Stop 133
aaaagcttgctttccatagaaaatc

SEQ ID NO: 126867 - DNA, 25 bp, Artificial
  probe
  misc_feature (1)..(25): SEQ ID NO: 6988; WAN024COL_at; Start 85; Stop 109
caaagatttcataaaggcacgcaca

SEQ ID NO: 126868 - DNA, 25 bp, Artificial
  probe
  misc_feature (1)..(25): SEQ ID NO: 6988; WAN024COL_at; Start 96; Stop 120
taaaggcacgcacaaaagcttgctt

SEQ ID NO: 126869 - DNA, 25 bp, Artificial
  probe
  misc_feature (1)..(25): SEQ ID NO: 6988; WAN024COL_at; Start 174; Stop 198
tcaagatatcatagactggagtccc

SEQ ID NO: 126870 - DNA, 25 bp, Artificial
  probe
  misc_feature (1)..(25): SEQ ID NO: 6988; WAN024COL_at; Start 20; Stop 44
tcaaacacaacctgtccaatacctg

SEQ ID NO: 126871 - DNA, 25 bp, Artificial
  probe
  misc_feature (1)..(25): SEQ ID NO: 6988; WAN024COL_at; Start 116; Stop 140
tgctttccatagaaaatcttatcct

SEQ ID NO: 126872 - DNA, 25 bp, Artificial
  probe
  misc_feature (1)..(25): SEQ ID NO: 6988; WAN024COL_at; Start 168; Stop 192
gattcatcaagatatcatagactgg

SEQ ID NO: 126873 - DNA, 25 bp, Artificial
  probe
  misc_feature (1)..(25): SEQ ID NO: 6988; WAN024COL_at; Start 180; Stop 204
tatcatagactggagtcccgtcttc

SEQ ID NO: 126874 - DNA, 25 bp, Artificial
  probe
  misc_feature (1)..(25): SEQ ID NO: 6988; WAN024COL_at; Start 39; Stop 63
tacctgtctccctatcgagaatgac

SEQ ID NO: 126875 - DNA, 25 bp, Artificial
  probe
  misc_feature (1)..(25): SEQ ID NO: 6988; WAN024COL_at; Start 66; Stop 90
aatcagacttattcaaattcaaaga

SEQ ID NO: 126876 - DNA, 25 bp, Artificial
  probe
  misc_feature (1)..(25): SEQ ID NO: 6988; WAN024COL_at; Start 5; Stop 29
gctgtctgtgcttcctcaaacacaa

SEQ ID NO: 126877 - DNA, 25 bp, Artificial
  probe
  misc_feature (1)..(25): SEQ ID NO: 6988; WAN024COL_at; Start 187; Stop 211
gactggagtcccgtcttcattataa

SEQ ID NO: 126878 - DNA, 25 bp, Artificial
  probe
  misc_feature (1)..(25): SEQ ID NO: 6988; WAN024COL_at; Start 91; Stop 115
tttcataaaggcacgcacaaaagct

SEQ ID NO: 126879 - DNA, 25 bp, Artificial
  probe
  misc_feature (1)..(25): SEQ ID NO: 6988; WAN024COL_at; Start 1; Stop 25
atgtgctgtctgtgcttcctcaaac

SEQ ID NO: 126880 - DNA, 25 bp, Artificial
  probe
  misc_feature (1)..(25): SEQ ID NO: 6988; WAN024COL_at; Start 198; Stop 222
cgtcttcattataaaaagttcgttg

SEQ ID NO: 126881 - DNA, 25 bp, Artificial
  probe
  misc_feature (1)..(25): SEQ ID NO: 6988; WAN024COL_at; Start 123; Stop 147
catagaaaatcttatccttgaaatg

SEQ ID NO: 126882 - DNA, 25 bp, Artificial
  probe
  misc_feature (1)..(25): SEQ ID NO: 6988; WAN024COL_at; Start 47; Stop 71
tccctatcgagaatgaccaaatcag

SEQ ID NO: 126883 - DNA, 25 bp, Artificial
  probe
  misc_feature (1)..(25): SEQ ID NO: 6988; WAN024COL_at; Start 155; Stop 179
tcttccttcccttgattcatcaaga

SEQ ID NO: 126884 - DNA, 25 bp, Artificial
  probe
  misc_feature (1)..(25): SEQ ID NO: 6988; WAN024COL_at; Start 43; Stop 67
tgtctccctatcgagaatgaccaaa

SEQ ID NO: 126885 - DNA, 25 bp, Artificial
  probe
  misc_feature (1)..(25): SEQ ID NO: 6988; WAN024COL_at; Start 54; Stop 78
cgagaatgaccaaatcagacttatt

SEQ ID NO: 126886 - DNA, 25 bp, Artificial
  probe
  misc_feature (1)..(25): SEQ ID NO: 6988; WAN024COL_at; Start 94; Stop 118
cataaaggcacgcacaaaagcttgc

SEQ ID NO: 126887 - DNA, 25 bp, Artificial
  probe
  misc_feature (1)..(25): SEQ ID NO: 6988; WAN024COL_at; Start 33; Stop 57
gtccaatacctgtctccctatcgag

SEQ ID NO: 126888 - DNA, 25 bp, Artificial
  probe
  misc_feature (1)..(25): SEQ ID NO: 1340; WAN024COM_at; Start 587; Stop 611
gaaagcaagcttttgtgcgtgcctt

SEQ ID NO: 126889 - DNA, 25 bp, Artificial
  probe
  misc_feature (1)..(25): SEQ ID NO: 1340; WAN024COM_at; Start 213; Stop 237
tatcaaaattgcacctactagcgtg

SEQ ID NO: 126890 - DNA, 25 bp, Artificial
  probe
  misc_feature (1)..(25): SEQ ID NO: 1340; WAN024COM_at; Start 1288; Stop 1312
cagacctttatagaggatgggcaaa

SEQ ID NO: 126891 - DNA, 25 bp, Artificial
  probe
  misc_feature (1)..(25): SEQ ID NO: 1340; WAN024COM_at; Start 363; Stop 387
caaggacttggttcaacatgccgag

SEQ ID NO: 126892 - DNA, 25 bp, Artificial
  probe
  misc_feature (1)..(25): SEQ ID NO: 1340; WAN024COM_at; Start 1069; Stop 1093
tatggtagtggtggagaagattctc

SEQ ID NO: 126893 - DNA, 25 bp, Artificial
  probe
  misc_feature (1)..(25): SEQ ID NO: 1340; WAN024COM_at; Start 850; Stop 874
gaagttctacaagagcaatttgcca

SEQ ID NO: 126894 - DNA, 25 bp, Artificial
  probe
  misc_feature (1)..(25): SEQ ID NO: 1340; WAN024COM_at; Start 1203; Stop 1227
taccagcgaaggatttggtctgacc

SEQ ID NO: 126895 - DNA, 25 bp, Artificial
  probe
  misc_feature (1)..(25): SEQ ID NO: 1340; WAN024COM_at; Start 683; Stop 707
tgtttgaggaagcacagacagcaca

SEQ ID NO: 126896 - DNA, 25 bp, Artificial
  probe
  misc_feature (1)..(25): SEQ ID NO: 1340; WAN024COM_at; Start 937; Stop 961
gattcaagtcaagggcgcaaaccat

SEQ ID NO: 126897 - DNA, 25 bp, Artificial
  probe
  misc_feature (1)..(25): SEQ ID NO: 1340; WAN024COM_at; Start 1234; Stop 1258
gaagctattggttcaggtctacctc

SEQ ID NO: 126898 - DNA, 25 bp, Artificial
  probe
  misc_feature (1)..(25): SEQ ID NO: 1340; WAN024COM_at; Start 877; Stop 901
tatactcagcatcagccaaagattg

SEQ ID NO: 126899 - DNA, 25 bp, Artificial
  probe
  misc_feature (1)..(25): SEQ ID NO: 1340; WAN024COM_at; Start 1429; Stop 1453
tcttaccaaattgcagaaggcttct

SEQ ID NO: 126900 - DNA, 25 bp, Artificial
  probe
  misc_feature (1)..(25): SEQ ID NO: 1340; WAN024COM_at; Start 639; Stop 663
tgatttggtcattctcgatagggag

SEQ ID NO: 126901 - DNA, 25 bp, Artificial
  probe
  misc_feature (1)..(25): SEQ ID NO: 1340; WAN024COM_at; Start 1155; Stop 1179
ggaactttcgcagatttatagccag

SEQ ID NO: 126902 - DNA, 25 bp, Artificial
  probe
  misc_feature (1)..(25): SEQ ID NO: 1340; WAN024COM_at; Start 44; Stop 68
gcggtgttgaatacgctcaagccta

SEQ ID NO: 126903 - DNA, 25 bp, Artificial
  probe
  misc_feature (1)..(25): SEQ ID NO: 1340; WAN024COM_at; Start 798; Stop 822
taccaatgcagataaggttgacttc

SEQ ID NO: 126904 - DNA, 25 bp, Artificial
  probe
  misc_feature (1)..(25): SEQ ID NO: 1340; WAN024COM_at; Start 972; Stop 996
tacggcttcacgtcttgccaaagaa

SEQ ID NO: 126905 - DNA, 25 bp, Artificial
  probe
  misc_feature (1)..(25): SEQ ID NO: 1340; WAN024COM_at; Start 511; Stop 535
gggactccagtctatgatatcttga

SEQ ID NO: 126906 - DNA, 25 bp, Artificial
  probe
  misc_feature (1)..(25): SEQ ID NO: 1340; WAN024COM_at; Start 1219; Stop 1243
ggtctgaccttgatggaagctattg

SEQ ID NO: 126907 - DNA, 25 bp, Artificial
  probe
  misc_feature (1)..(25): SEQ ID NO: 1340; WAN024COM_at; Start 1270; Stop 1294
gatgtgccttatggtaatcagacct

SEQ ID NO: 126908 - DNA, 25 bp, Artificial
  probe
  misc_feature (1)..(25): SEQ ID NO: 1340; WAN024COM_at; Start 143; Stop 167
ttcagcacttaacagccaatattgg

SEQ ID NO: 126909 - DNA, 25 bp, Artificial
  probe
  misc_feature (1)..(25): SEQ ID NO: 1340; WAN024COM_at; Start 1124; Stop 1148
cagaggactatatccaactcaaggg

SEQ ID NO: 126910 - DNA, 25 bp, Artificial
  probe
  misc_feature (1)..(25): SEQ ID NO: 1340; WAN024COM_at; Start 896; Stop 920
agattgttaccattcctgtaggcag

SEQ ID NO: 126911 - DNA, 25 bp, Artificial
  probe
  misc_feature (1)..(25): SEQ ID NO: 1340; WAN024COM_at; Start 1482; Stop 1506
gaaaacagtagaggaggtgctccat

SEQ ID NO: 126912 - DNA, 25 bp, Artificial
  probe
  misc_feature (1)..(25): SEQ ID NO: 1340; WAN024COM_at; Start 496; Stop 520
ttttataatgaagacgggactccag

SEQ ID NO: 126913 - DNA, 25 bp, Artificial
  probe
  misc_feature (1)..(25): SEQ ID NO: 1340; WAN024COM_at; Start 1183; Stop 1207
gaggtctacttaacggcttctacca

SEQ ID NO: 126914 - DNA, 25 bp, Artificial
  probe
  misc_feature (1)..(25): SEQ ID NO: 1340; WAN024COM_at; Start 65; Stop 89
cctatcgtgctggtgtttttcggaa

SEQ ID NO: 126915 - DNA, 25 bp, Artificial
  probe
  misc_feature (1)..(25): SEQ ID NO: 1340; WAN024COM_at; Start 1323; Stop 1347
gattccaagttcatctgaccatgta

SEQ ID NO: 126916 - DNA, 25 bp, Artificial
  probe
  misc_feature (1)..(25): SEQ ID NO: 1340; WAN024COM_at; Start 1107; Stop 1131
tattgcaaatcatcaggcagaggac

SEQ ID NO: 126917 - DNA, 25 bp, Artificial
  probe
  misc_feature (1)..(25): SEQ ID NO: 1340; WAN024COM_at; Start 1030; Stop 1054
gaagctcataaggagttaccggaac

SEQ ID NO: 126918 - DNA, 25 bp, Artificial
  probe
  misc_feature (1)..(25): SEQ ID NO: 1340; WAN024COM_at; Start 1344; Stop 1368
tgtagaagaccaaatcaagcaagct

SEQ ID NO: 126919 - DNA, 25 bp, Artificial
  probe
  misc_feature (1)..(25): SEQ ID NO: 1340; WAN024COM_at; Start 1401; Stop 1425
aaatcgtttggaagctatgcgtgcc

SEQ ID NO: 126920 - DNA, 25 bp, Artificial
  probe
  misc_feature (1)..(25): SEQ ID NO: 1340; WAN024COM_at; Start 444; Stop 468
tagcgagtattttgctcccaaggac

SEQ ID NO: 126921 - DNA, 25 bp, Artificial
  probe
  misc_feature (1)..(25): SEQ ID NO: 1340; WAN024COM_at; Start 710; Stop 734
tagcggtagttgttcatgcggagca

SEQ ID NO: 126922 - DNA, 25 bp, Artificial
  probe
  misc_feature (1)..(25): SEQ ID NO: 3036; WAN024CON_at; Start 77; Stop 101
ttcagttagtcctgaagtgtagccg

SEQ ID NO: 126923 - DNA, 25 bp, Artificial
  probe
  misc_feature (1)..(25): SEQ ID NO: 3036; WAN024CON_at; Start 82; Stop 106
ttagtcctgaagtgtagccgcaagt

SEQ ID NO: 126924 - DNA, 25 bp, Artificial
  probe
  misc_feature (1)..(25): SEQ ID NO: 3036; WAN024CON_at; Start 83; Stop 107
tagtcctgaagtgtagccgcaagtg

SEQ ID NO: 126925 - DNA, 25 bp, Artificial
  probe
  misc_feature (1)..(25): SEQ ID NO: 3036; WAN024CON_at; Start 27; Stop 51
tggtttccatagaaccctccatcgt

SEQ ID NO: 126926 - DNA, 25 bp, Artificial
  probe
  misc_feature (1)..(25): SEQ ID NO: 3036; WAN024CON_at; Start 6; Stop 30
ccaaaattccttttcagccactggt

SEQ ID NO: 126927 - DNA, 25 bp, Artificial
  probe
  misc_feature (1)..(25): SEQ ID NO: 3036; WAN024CON_at; Start 5; Stop 29
tccaaaattccttttcagccactgg

SEQ ID NO: 126928 - DNA, 25 bp, Artificial
  probe
  misc_feature (1)..(25): SEQ ID NO: 3036; WAN024CON_at; Start 75; Stop 99
aattcagttagtcctgaagtgtagc

SEQ ID NO: 126929 - DNA, 25 bp, Artificial
  probe
  misc_feature (1)..(25): SEQ ID NO: 3036; WAN024CON_at; Start 79; Stop 103
cagttagtcctgaagtgtagccgca

SEQ ID NO: 126930 - DNA, 25 bp, Artificial
  probe
  misc_feature (1)..(25): SEQ ID NO: 3036; WAN024CON_at; Start 57; Stop 81
cctaatacattcgagacgaattcag

SEQ ID NO: 126931 - DNA, 25 bp, Artificial
  probe
  misc_feature (1)..(25): SEQ ID NO: 3036; WAN024CON_at; Start 81; Stop 105
gttagtcctgaagtgtagccgcaag

SEQ ID NO: 126932 - DNA, 25 bp, Artificial
  probe
  misc_feature (1)..(25): SEQ ID NO: 3036; WAN024CON_at; Start 78; Stop 102
tcagttagtcctgaagtgtagccgc

SEQ ID NO: 126933 - DNA, 25 bp, Artificial
  probe
  misc_feature (1)..(25): SEQ ID NO: 3036; WAN024CON_at; Start 7; Stop 31
caaaattccttttcagccactggtt

SEQ ID NO: 126934 - DNA, 25 bp, Artificial
  probe
  misc_feature (1)..(25): SEQ ID NO: 3036; WAN024CON_at; Start 2; Stop 26
tgttccaaaattccttttcagccac

SEQ ID NO: 126935 - DNA, 25 bp, Artificial
  probe
  misc_feature (1)..(25): SEQ ID NO: 3036; WAN024CON_at; Start 54; Stop 78
cgacctaatacattcgagacgaatt

SEQ ID NO: 126936 - DNA, 25 bp, Artificial
  probe
  misc_feature (1)..(25): SEQ ID NO: 3036; WAN024CON_at; Start 11; Stop 35
attccttttcagccactggtttcca

SEQ ID NO: 126937 - DNA, 25 bp, Artificial
  probe
  misc_feature (1)..(25): SEQ ID NO: 3036; WAN024CON_at; Start 31; Stop 55
ttccatagaaccctccatcgtttcg

SEQ ID NO: 126938 - DNA, 25 bp, Artificial
  probe
  misc_feature (1)..(25): SEQ ID NO: 3036; WAN024CON_at; Start 73; Stop 97
cgaattcagttagtcctgaagtgta

SEQ ID NO: 126939 - DNA, 25 bp, Artificial
  probe
  misc_feature (1)..(25): SEQ ID NO: 3036; WAN024CON_at; Start 45; Stop 69
ccatcgtttcgacctaatacattcg

SEQ ID NO: 126940 - DNA, 25 bp, Artificial
  probe
  misc_feature (1)..(25): SEQ ID NO: 3036; WAN024CON_at; Start 80; Stop 104
agttagtcctgaagtgtagccgcaa

SEQ ID NO: 126941 - DNA, 25 bp, Artificial
  probe
  misc_feature (1)..(25): SEQ ID NO: 3036; WAN024CON_at; Start 36; Stop 60
tagaaccctccatcgtttcgaccta

SEQ ID NO: 126942 - DNA, 25 bp, Artificial
  probe
  misc_feature (1)..(25): SEQ ID NO: 3036; WAN024CON_at; Start 42; Stop 66
cctccatcgtttcgacctaatacat

SEQ ID NO: 126943 - DNA, 25 bp, Artificial
  probe
  misc_feature (1)..(25): SEQ ID NO: 3036; WAN024CON_at; Start 66; Stop 90
ttcgagacgaattcagttagtcctg

SEQ ID NO: 126944 - DNA, 25 bp, Artificial
  probe
  misc_feature (1)..(25): SEQ ID NO: 3036; WAN024CON_at; Start 69; Stop 93
gagacgaattcagttagtcctgaag

SEQ ID NO: 126945 - DNA, 25 bp, Artificial
  probe
  misc_feature (1)..(25): SEQ ID NO: 3036; WAN024CON_at; Start 84; Stop 108
agtcctgaagtgtagccgcaagtga

SEQ ID NO: 126946 - DNA, 25 bp, Artificial
  probe
  misc_feature (1)..(25): SEQ ID NO: 3036; WAN024CON_at; Start 47; Stop 71
atcgtttcgacctaatacattcgag

SEQ ID NO: 126947 - DNA, 25 bp, Artificial
  probe
  misc_feature (1)..(25): SEQ ID NO: 3036; WAN024CON_at; Start 48; Stop 72
tcgtttcgacctaatacattcgaga

SEQ ID NO: 126948 - DNA, 25 bp, Artificial
  probe
  misc_feature (1)..(25): SEQ ID NO: 3036; WAN024CON_at; Start 24; Stop 48
cactggtttccatagaaccctccat

SEQ ID NO: 126949 - DNA, 25 bp, Artificial
  probe
  misc_feature (1)..(25): SEQ ID NO: 3036; WAN024CON_at; Start 32; Stop 56
tccatagaaccctccatcgtttcga

SEQ ID NO: 126950 - DNA, 25 bp, Artificial
  probe
  misc_feature (1)..(25): SEQ ID NO: 3036; WAN024CON_at; Start 51; Stop 75
tttcgacctaatacattcgagacga

SEQ ID NO: 126951 - DNA, 25 bp, Artificial
  probe
  misc_feature (1)..(25): SEQ ID NO: 3036; WAN024CON_at; Start 53; Stop 77
tcgacctaatacattcgagacgaat

SEQ ID NO: 126952 - DNA, 25 bp, Artificial
  probe
  misc_feature (1)..(25): SEQ ID NO: 3036; WAN024CON_at; Start 50; Stop 74
gtttcgacctaatacattcgagacg

SEQ ID NO: 126953 - DNA, 25 bp, Artificial
  probe
  misc_feature (1)..(25): SEQ ID NO: 3036; WAN024CON_at; Start 64; Stop 88
cattcgagacgaattcagttagtcc

SEQ ID NO: 126954 - DNA, 25 bp, Artificial
  probe
  misc_feature (1)..(25): SEQ ID NO: 3036; WAN024CON_at; Start 71; Stop 95
gacgaattcagttagtcctgaagtg

SEQ ID NO: 126955 - DNA, 25 bp, Artificial
  probe
  misc_feature (1)..(25): SEQ ID NO: 3036; WAN024CON_at; Start 67; Stop 91
tcgagacgaattcagttagtcctga

SEQ ID NO: 126956 - DNA, 25 bp, Artificial
  probe
  misc_feature (1)..(25): SEQ ID NO: 4269; WAN024COO_at; Start 11; Stop 35
cccatgctcttacggtagcggagcc

SEQ ID NO: 126957 - DNA, 25 bp, Artificial
  probe
  misc_feature (1)..(25): SEQ ID NO: 4269; WAN024COO_at; Start 33; Stop 57
gccattaaagttcatcatacccaat

SEQ ID NO: 126958 - DNA, 25 bp, Artificial
  probe
  misc_feature (1)..(25): SEQ ID NO: 4269; WAN024COO_at; Start 60; Stop 84
gccgccgttttcgttgatagcttgg

SEQ ID NO: 126959 - DNA, 25 bp, Artificial
  probe
  misc_feature (1)..(25): SEQ ID NO: 4269; WAN024COO_at; Start 31; Stop 55
gagccattaaagttcatcataccca

SEQ ID NO: 126960 - DNA, 25 bp, Artificial
  probe
  misc_feature (1)..(25): SEQ ID NO: 4269; WAN024COO_at; Start 23; Stop 47
cggtagcggagccattaaagttcat

SEQ ID NO: 126961 - DNA, 25 bp, Artificial
  probe
  misc_feature (1)..(25): SEQ ID NO: 4269; WAN024COO_at; Start 13; Stop 37
catgctcttacggtagcggagccat

SEQ ID NO: 126962 - DNA, 25 bp, Artificial
  probe
  misc_feature (1)..(25): SEQ ID NO: 4269; WAN024COO_at; Start 84; Stop 108
gtttttacctacgagctcagcgtga

SEQ ID NO: 126963 - DNA, 25 bp, Artificial
  probe
  misc_feature (1)..(25): SEQ ID NO: 4269; WAN024COO_at; Start 15; Stop 39
tgctcttacggtagcggagccatta

SEQ ID NO: 126964 - DNA, 25 bp, Artificial
  probe
  misc_feature (1)..(25): SEQ ID NO: 4269; WAN024COO_at; Start 16; Stop 40
gctcttacggtagcggagccattaa

SEQ ID NO: 126965 - DNA, 25 bp, Artificial
  probe
  misc_feature (1)..(25): SEQ ID NO: 4269; WAN024COO_at; Start 2; Stop 26
tgtctgtaacccatgctcttacggt

SEQ ID NO: 126966 - DNA, 25 bp, Artificial
  probe
  misc_feature (1)..(25): SEQ ID NO: 4269; WAN024COO_at; Start 8; Stop 32
taacccatgctcttacggtagcgga

SEQ ID NO: 126967 - DNA, 25 bp, Artificial
  probe
  misc_feature (1)..(25): SEQ ID NO: 4269; WAN024COO_at; Start 47; Stop 71
tcatacccaatttgccgccgttttc

SEQ ID NO: 126968 - DNA, 25 bp, Artificial
  probe
  misc_feature (1)..(25): SEQ ID NO: 4269; WAN024COO_at; Start 57; Stop 81
tttgccgccgttttcgttgatagct

SEQ ID NO: 126969 - DNA, 25 bp, Artificial
  probe
  misc_feature (1)..(25): SEQ ID NO: 4269; WAN024COO_at; Start 24; Stop 48
ggtagcggagccattaaagttcatc

SEQ ID NO: 126970 - DNA, 25 bp, Artificial
  probe
  misc_feature (1)..(25): SEQ ID NO: 4269; WAN024COO_at; Start 59; Stop 83
tgccgccgttttcgttgatagcttg

SEQ ID NO: 126971 - DNA, 25 bp, Artificial
  probe
  misc_feature (1)..(25): SEQ ID NO: 4269; WAN024COO_at; Start 26; Stop 50
tagcggagccattaaagttcatcat

SEQ ID NO: 126972 - DNA, 25 bp, Artificial
  probe
  misc_feature (1)..(25): SEQ ID NO: 4269; WAN024COO_at; Start 75; Stop 99
gatagcttggtttttacctacgagc

SEQ ID NO: 126973 - DNA, 25 bp, Artificial
  probe
  misc_feature (1)..(25): SEQ ID NO: 4269; WAN024COO_at; Start 55; Stop 79
aatttgccgccgttttcgttgatag

SEQ ID NO: 126974 - DNA, 25 bp, Artificial
  probe
  misc_feature (1)..(25): SEQ ID NO: 4269; WAN024COO_at; Start 62; Stop 86
cgccgttttcgttgatagcttggtt

SEQ ID NO: 126975 - DNA, 25 bp, Artificial
  probe
  misc_feature (1)..(25): SEQ ID NO: 4269; WAN024COO_at; Start 81; Stop 105
ttggtttttacctacgagctcagcg

SEQ ID NO: 126976 - DNA, 25 bp, Artificial
  probe
  misc_feature (1)..(25): SEQ ID NO: 4269; WAN024COO_at; Start 54; Stop 78
caatttgccgccgttttcgttgata

SEQ ID NO: 126977 - DNA, 25 bp, Artificial
  probe
  misc_feature (1)..(25): SEQ ID NO: 4269; WAN024COO_at; Start 28; Stop 52
gcggagccattaaagttcatcatac

SEQ ID NO: 126978 - DNA, 25 bp, Artificial
  probe
  misc_feature (1)..(25): SEQ ID NO: 4269; WAN024COO_at; Start 42; Stop 66
gttcatcatacccaatttgccgccg

SEQ ID NO: 126979 - DNA, 25 bp, Artificial
  probe
  misc_feature (1)..(25): SEQ ID NO: 4269; WAN024COO_at; Start 6; Stop 30
tgtaacccatgctcttacggtagcg

SEQ ID NO: 126980 - DNA, 25 bp, Artificial
  probe
  misc_feature (1)..(25): SEQ ID NO: 4269; WAN024COO_at; Start 38; Stop 62
taaagttcatcatacccaatttgcc

SEQ ID NO: 126981 - DNA, 25 bp, Artificial
  probe
  misc_feature (1)..(25): SEQ ID NO: 4269; WAN024COO_at; Start 9; Stop 33
aacccatgctcttacggtagcggag

SEQ ID NO: 126982 - DNA, 25 bp, Artificial
  probe
  misc_feature (1)..(25): SEQ ID NO: 4269; WAN024COO_at; Start 19; Stop 43
cttacggtagcggagccattaaagt

SEQ ID NO: 126983 - DNA, 25 bp, Artificial
  probe
  misc_feature (1)..(25): SEQ ID NO: 4269; WAN024COO_at; Start 4; Stop 28
tctgtaacccatgctcttacggtag

SEQ ID NO: 126984 - DNA, 25 bp, Artificial
  probe
  misc_feature (1)..(25): SEQ ID NO: 4269; WAN024COO_at; Start 21; Stop 45
tacggtagcggagccattaaagttc

SEQ ID NO: 126985 - DNA, 25 bp, Artificial
  probe
  misc_feature (1)..(25): SEQ ID NO: 4269; WAN024COO_at; Start 1; Stop 25
gtgtctgtaacccatgctcttacgg

SEQ ID NO: 126986 - DNA, 25 bp, Artificial
  probe
  misc_feature (1)..(25): SEQ ID NO: 4269; WAN024COO_at; Start 79; Stop 103
gcttggtttttacctacgagctcag

SEQ ID NO: 126987 - DNA, 25 bp, Artificial
  probe
  misc_feature (1)..(25): SEQ ID NO: 4269; WAN024COO_at; Start 83; Stop 107
ggtttttacctacgagctcagcgtg

SEQ ID NO: 126988 - DNA, 25 bp, Artificial
  probe
  misc_feature (1)..(25): SEQ ID NO: 4269; WAN024COO_at; Start 40; Stop 64
aagttcatcatacccaatttgccgc

SEQ ID NO: 126989 - DNA, 25 bp, Artificial
  probe
  misc_feature (1)..(25): SEQ ID NO: 4269; WAN024COO_at; Start 44; Stop 68
tcatcatacccaatttgccgccgtt

SEQ ID NO: 126990 - DNA, 25 bp, Artificial
  probe
  misc_feature (1)..(25): SEQ ID NO: 4272; WAN024COP_at; Start 82; Stop 106
cttaccatctacgatataatctgct

SEQ ID NO: 126991 - DNA, 25 bp, Artificial
  probe
  misc_feature (1)..(25): SEQ ID NO: 4272; WAN024COP_at; Start 39; Stop 63
taagcaggatatcgaaaaggttacc

SEQ ID NO: 126992 - DNA, 25 bp, Artificial
  probe
  misc_feature (1)..(25): SEQ ID NO: 4272; WAN024COP_at; Start 35; Stop 59
tatttaagcaggatatcgaaaaggt

SEQ ID NO: 126993 - DNA, 25 bp, Artificial
  probe
  misc_feature (1)..(25): SEQ ID NO: 4272; WAN024COP_at; Start 63; Stop 87
caattttagatttcataggcttacc

SEQ ID NO: 126994 - DNA, 25 bp, Artificial
  probe
  misc_feature (1)..(25): SEQ ID NO: 4272; WAN024COP_at; Start 37; Stop 61
tttaagcaggatatcgaaaaggtta

SEQ ID NO: 126995 - DNA, 25 bp, Artificial
  probe
  misc_feature (1)..(25): SEQ ID NO: 4272; WAN024COP_at; Start 62; Stop 86
ccaattttagatttcataggcttac

SEQ ID NO: 126996 - DNA, 25 bp, Artificial
  probe
  misc_feature (1)..(25): SEQ ID NO: 4272; WAN024COP_at; Start 43; Stop 67
caggatatcgaaaaggttaccaatt

SEQ ID NO: 126997 - DNA, 25 bp, Artificial
  probe
  misc_feature (1)..(25): SEQ ID NO: 4272; WAN024COP_at; Start 28; Stop 52
ttcattctatttaagcaggatatcg

SEQ ID NO: 126998 - DNA, 25 bp, Artificial
  probe
  misc_feature (1)..(25): SEQ ID NO: 4272; WAN024COP_at; Start 9; Stop 33
ccttaatatggagatagttttcatt

SEQ ID NO: 126999 - DNA, 25 bp, Artificial
  probe
  misc_feature (1)..(25): SEQ ID NO: 4272; WAN024COP_at; Start 75; Stop 99
tcataggcttaccatctacgatata

SEQ ID NO: 127000 - DNA, 25 bp, Artificial
  probe
  misc_feature (1)..(25): SEQ ID NO: 4272; WAN024COP_at; Start 66; Stop 90
ttttagatttcataggcttaccatc

SEQ ID NO: 127001 - DNA, 25 bp, Artificial
  probe
  misc_feature (1)..(25): SEQ ID NO: 4272; WAN024COP_at; Start 80; Stop 104
ggcttaccatctacgatataatctg

SEQ ID NO: 127002 - DNA, 25 bp, Artificial
  probe
  misc_feature (1)..(25): SEQ ID NO: 4272; WAN024COP_at; Start 38; Stop 62
ttaagcaggatatcgaaaaggttac

SEQ ID NO: 127003 - DNA, 25 bp, Artificial
  probe
  misc_feature (1)..(25): SEQ ID NO: 4272; WAN024COP_at; Start 32; Stop 56
ttctatttaagcaggatatcgaaaa

SEQ ID NO: 127004 - DNA, 25 bp, Artificial
  probe
  misc_feature (1)..(25): SEQ ID NO: 4272; WAN024COP_at; Start 60; Stop 84
taccaattttagatttcataggctt

SEQ ID NO: 127005 - DNA, 25 bp, Artificial
  probe
  misc_feature (1)..(25): SEQ ID NO: 4272; WAN024COP_at; Start 23; Stop 47
tagttttcattctatttaagcagga

SEQ ID NO: 127006 - DNA, 25 bp, Artificial
  probe
  misc_feature (1)..(25): SEQ ID NO: 4272; WAN024COP_at; Start 81; Stop 105
gcttaccatctacgatataatctgc

SEQ ID NO: 127007 - DNA, 25 bp, Artificial
  probe
  misc_feature (1)..(25): SEQ ID NO: 4272; WAN024COP_at; Start 41; Stop 65
agcaggatatcgaaaaggttaccaa

SEQ ID NO: 127008 - DNA, 25 bp, Artificial
  probe
  misc_feature (1)..(25): SEQ ID NO: 4272; WAN024COP_at; Start 71; Stop 95
gatttcataggcttaccatctacga

SEQ ID NO: 127009 - DNA, 25 bp, Artificial
  probe
  misc_feature (1)..(25): SEQ ID NO: 4272; WAN024COP_at; Start 78; Stop 102
taggcttaccatctacgatataatc

SEQ ID NO: 127010 - DNA, 25 bp, Artificial
  probe
  misc_feature (1)..(25): SEQ ID NO: 4272; WAN024COP_at; Start 2; Stop 26
tgtctttccttaatatggagatagt

SEQ ID NO: 127011 - DNA, 25 bp, Artificial
  probe
  misc_feature (1)..(25): SEQ ID NO: 4272; WAN024COP_at; Start 33; Stop 57
tctatttaagcaggatatcgaaaag

SEQ ID NO: 127012 - DNA, 25 bp, Artificial
  probe
  misc_feature (1)..(25): SEQ ID NO: 4272; WAN024COP_at; Start 76; Stop 100
cataggcttaccatctacgatataa

SEQ ID NO: 127013 - DNA, 25 bp, Artificial
  probe
  misc_feature (1)..(25): SEQ ID NO: 4272; WAN024COP_at; Start 64; Stop 88
aattttagatttcataggcttacca

SEQ ID NO: 127014 - DNA, 25 bp, Artificial
  probe
  misc_feature (1)..(25): SEQ ID NO: 4272; WAN024COP_at; Start 84; Stop 108
taccatctacgatataatctgctaa

SEQ ID NO: 127015 - DNA, 25 bp, Artificial
  probe
  misc_feature (1)..(25): SEQ ID NO: 4272; WAN024COP_at; Start 1; Stop 25
gtgtctttccttaatatggagatag

SEQ ID NO: 127016 - DNA, 25 bp, Artificial
  probe
  misc_feature (1)..(25): SEQ ID NO: 4272; WAN024COP_at; Start 7; Stop 31
ttccttaatatggagatagttttca

SEQ ID NO: 127017 - DNA, 25 bp, Artificial
  probe
  misc_feature (1)..(25): SEQ ID NO: 4272; WAN024COP_at; Start 25; Stop 49
gttttcattctatttaagcaggata

SEQ ID NO: 127018 - DNA, 25 bp, Artificial
  probe
  misc_feature (1)..(25): SEQ ID NO: 4272; WAN024COP_at; Start 34; Stop 58
ctatttaagcaggatatcgaaaagg

SEQ ID NO: 127019 - DNA, 25 bp, Artificial
  probe
  misc_feature (1)..(25): SEQ ID NO: 4272; WAN024COP_at; Start 30; Stop 54
cattctatttaagcaggatatcgaa

SEQ ID NO: 127020 - DNA, 25 bp, Artificial
  probe
  misc_feature (1)..(25): SEQ ID NO: 4272; WAN024COP_at; Start 73; Stop 97
tttcataggcttaccatctacgata

SEQ ID NO: 127021 - DNA, 25 bp, Artificial
  probe
  misc_feature (1)..(25): SEQ ID NO: 4272; WAN024COP_at; Start 58; Stop 82
gttaccaattttagatttcataggc

SEQ ID NO: 127022 - DNA, 25 bp, Artificial
  probe
  misc_feature (1)..(25): SEQ ID NO: 4272; WAN024COP_at; Start 42; Stop 66
gcaggatatcgaaaaggttaccaat

SEQ ID NO: 127023 - DNA, 25 bp, Artificial
  probe
  misc_feature (1)..(25): SEQ ID NO: 4272; WAN024COP_at; Start 40; Stop 64
aagcaggatatcgaaaaggttacca

SEQ ID NO: 127024 - DNA, 25 bp, Artificial
  probe
  misc_feature (1)..(25): SEQ ID NO: 3098; WAN024COQ_at; Start 26; Stop 50
gtttacatggcgaagtaacaaatac

SEQ ID NO: 127025 - DNA, 25 bp, Artificial
  probe
  misc_feature (1)..(25): SEQ ID NO: 3098; WAN024COQ_at; Start 4; Stop 28
tttggaataagcgtgaaacagagtt

SEQ ID NO: 127026 - DNA, 25 bp, Artificial
  probe
  misc_feature (1)..(25): SEQ ID NO: 3098; WAN024COQ_at; Start 16; Stop 40
gtgaaacagagtttacatggcgaag

SEQ ID NO: 127027 - DNA, 25 bp, Artificial
  probe
  misc_feature (1)..(25): SEQ ID NO: 3098; WAN024COQ_at; Start 18; Stop 42
gaaacagagtttacatggcgaagta

SEQ ID NO: 127028 - DNA, 25 bp, Artificial
  probe
  misc_feature (1)..(25): SEQ ID NO: 3098; WAN024COQ_at; Start 33; Stop 57
tggcgaagtaacaaatacgaggaca

SEQ ID NO: 127029 - DNA, 25 bp, Artificial
  probe
  misc_feature (1)..(25): SEQ ID NO: 3098; WAN024COQ_at; Start 13; Stop 37
agcgtgaaacagagtttacatggcg

SEQ ID NO: 127030 - DNA, 25 bp, Artificial
  probe
  misc_feature (1)..(25): SEQ ID NO: 3098; WAN024COQ_at; Start 31; Stop 55
catggcgaagtaacaaatacgagga

SEQ ID NO: 127031 - DNA, 25 bp, Artificial
  probe
  misc_feature (1)..(25): SEQ ID NO: 3098; WAN024COQ_at; Start 58; Stop 82
accctacgggaactcgaggtgaatg

SEQ ID NO: 127032 - DNA, 25 bp, Artificial
  probe
  misc_feature (1)..(25): SEQ ID NO: 3098; WAN024COQ_at; Start 15; Stop 39
cgtgaaacagagtttacatggcgaa

SEQ ID NO: 127033 - DNA, 25 bp, Artificial
  probe
  misc_feature (1)..(25): SEQ ID NO: 3098; WAN024COQ_at; Start 5; Stop 29
ttggaataagcgtgaaacagagttt

SEQ ID NO: 127034 - DNA, 25 bp, Artificial
  probe
  misc_feature (1)..(25): SEQ ID NO: 3098; WAN024COQ_at; Start 17; Stop 41
tgaaacagagtttacatggcgaagt

SEQ ID NO: 127035 - DNA, 25 bp, Artificial
  probe
  misc_feature (1)..(25): SEQ ID NO: 3098; WAN024COQ_at; Start 12; Stop 36
aagcgtgaaacagagtttacatggc

SEQ ID NO: 127036 - DNA, 25 bp, Artificial
  probe
  misc_feature (1)..(25): SEQ ID NO: 3098; WAN024COQ_at; Start 8; Stop 32
gaataagcgtgaaacagagtttaca

SEQ ID NO: 127037 - DNA, 25 bp, Artificial
  probe
  misc_feature (1)..(25): SEQ ID NO: 3098; WAN024COQ_at; Start 2; Stop 26
tgtttggaataagcgtgaaacagag

SEQ ID NO: 127038 - DNA, 25 bp, Artificial
  probe
  misc_feature (1)..(25): SEQ ID NO: 3098; WAN024COQ_at; Start 30; Stop 54
acatggcgaagtaacaaatacgagg

SEQ ID NO: 127039 - DNA, 25 bp, Artificial
  probe
  misc_feature (1)..(25): SEQ ID NO: 3098; WAN024COQ_at; Start 29; Stop 53
tacatggcgaagtaacaaatacgag

SEQ ID NO: 127040 - DNA, 25 bp, Artificial
  probe
  misc_feature (1)..(25): SEQ ID NO: 3098; WAN024COQ_at; Start 59; Stop 83
ccctacgggaactcgaggtgaatgg

SEQ ID NO: 127041 - DNA, 25 bp, Artificial
  probe
  misc_feature (1)..(25): SEQ ID NO: 3098; WAN024COQ_at; Start 35; Stop 59
gcgaagtaacaaatacgaggacaac

SEQ ID NO: 127042 - DNA, 25 bp, Artificial
  probe
  misc_feature (1)..(25): SEQ ID NO: 3098; WAN024COQ_at; Start 11; Stop 35
taagcgtgaaacagagtttacatgg

SEQ ID NO: 127043 - DNA, 25 bp, Artificial
  probe
  misc_feature (1)..(25): SEQ ID NO: 3098; WAN024COQ_at; Start 34; Stop 58
ggcgaagtaacaaatacgaggacaa

SEQ ID NO: 127044 - DNA, 25 bp, Artificial
  probe
  misc_feature (1)..(25): SEQ ID NO: 3098; WAN024COQ_at; Start 20; Stop 44
aacagagtttacatggcgaagtaac

SEQ ID NO: 127045 - DNA, 25 bp, Artificial
  probe
  misc_feature (1)..(25): SEQ ID NO: 3098; WAN024COQ_at; Start 69; Stop 93
actcgaggtgaatggggactatttc

SEQ ID NO: 127046 - DNA, 25 bp, Artificial
  probe
  misc_feature (1)..(25): SEQ ID NO: 3098; WAN024COQ_at; Start 21; Stop 45
acagagtttacatggcgaagtaaca

SEQ ID NO: 127047 - DNA, 25 bp, Artificial
  probe
  misc_feature (1)..(25): SEQ ID NO: 3098; WAN024COQ_at; Start 7; Stop 31
ggaataagcgtgaaacagagtttac

SEQ ID NO: 127048 - DNA, 25 bp, Artificial
  probe
  misc_feature (1)..(25): SEQ ID NO: 3098; WAN024COQ_at; Start 19; Stop 43
aaacagagtttacatggcgaagtaa

SEQ ID NO: 127049 - DNA, 25 bp, Artificial
  probe
  misc_feature (1)..(25): SEQ ID NO: 3098; WAN024COQ_at; Start 27; Stop 51
tttacatggcgaagtaacaaatacg

SEQ ID NO: 127050 - DNA, 25 bp, Artificial
  probe
  misc_feature (1)..(25): SEQ ID NO: 3098; WAN024COQ_at; Start 80; Stop 104
atggggactatttcaaaatttctgg

SEQ ID NO: 127051 - DNA, 25 bp, Artificial
  probe
  misc_feature (1)..(25): SEQ ID NO: 3098; WAN024COQ_at; Start 22; Stop 46
cagagtttacatggcgaagtaacaa

SEQ ID NO: 127052 - DNA, 25 bp, Artificial
  probe
  misc_feature (1)..(25): SEQ ID NO: 3098; WAN024COQ_at; Start 60; Stop 84
cctacgggaactcgaggtgaatggg

SEQ ID NO: 127053 - DNA, 25 bp, Artificial
  probe
  misc_feature (1)..(25): SEQ ID NO: 3098; WAN024COQ_at; Start 6; Stop 30
tggaataagcgtgaaacagagttta

SEQ ID NO: 127054 - DNA, 25 bp, Artificial
  probe
  misc_feature (1)..(25): SEQ ID NO: 3098; WAN024COQ_at; Start 28; Stop 52
ttacatggcgaagtaacaaatacga

SEQ ID NO: 127055 - DNA, 25 bp, Artificial
  probe
  misc_feature (1)..(25): SEQ ID NO: 3098; WAN024COQ_at; Start 14; Stop 38
gcgtgaaacagagtttacatggcga

SEQ ID NO: 127056 - DNA, 25 bp, Artificial
  probe
  misc_feature (1)..(25): SEQ ID NO: 3098; WAN024COQ_at; Start 9; Stop 33
aataagcgtgaaacagagtttacat

SEQ ID NO: 127057 - DNA, 25 bp, Artificial
  probe
  misc_feature (1)..(25): SEQ ID NO: 3098; WAN024COQ_at; Start 32; Stop 56
atggcgaagtaacaaatacgaggac

SEQ ID NO: 127058 - DNA, 25 bp, Artificial
  probe
  misc_feature (1)..(25): SEQ ID NO: 2672; WAN024COR_at; Start 4; Stop 28
gtgaagtatttcctatcgaagaatg

SEQ ID NO: 127059 - DNA, 25 bp, Artificial
  probe
  misc_feature (1)..(25): SEQ ID NO: 2672; WAN024COR_at; Start 49; Stop 73
gaatgtgctaccaaactgtatggta

SEQ ID NO: 127060 - DNA, 25 bp, Artificial
  probe
  misc_feature (1)..(25): SEQ ID NO: 2672; WAN024COR_at; Start 44; Stop 68
taatggaatgtgctaccaaactgta

SEQ ID NO: 127061 - DNA, 25 bp, Artificial
  probe
  misc_feature (1)..(25): SEQ ID NO: 2672; WAN024COR_at; Start 65; Stop 89
tgtatggtacgaaaactcactcgaa

SEQ ID NO: 127062 - DNA, 25 bp, Artificial
  probe
  misc_feature (1)..(25): SEQ ID NO: 2672; WAN024COR_at; Start 62; Stop 86
aactgtatggtacgaaaactcactc

SEQ ID NO: 127063 - DNA, 25 bp, Artificial
  probe
  misc_feature (1)..(25): SEQ ID NO: 2672; WAN024COR_at; Start 75; Stop 99
gaaaactcactcgaagaaatcgctg

SEQ ID NO: 127064 - DNA, 25 bp, Artificial
  probe
  misc_feature (1)..(25): SEQ ID NO: 2672; WAN024COR_at; Start 12; Stop 36
tttcctatcgaagaatgtcctttcg

SEQ ID NO: 127065 - DNA, 25 bp, Artificial
  probe
  misc_feature (1)..(25): SEQ ID NO: 2672; WAN024COR_at; Start 29; Stop 53
tcctttcgaccatcctaatggaatg

SEQ ID NO: 127066 - DNA, 25 bp, Artificial
  probe
  misc_feature (1)..(25): SEQ ID NO: 2672; WAN024COR_at; Start 63; Stop 87
actgtatggtacgaaaactcactcg

SEQ ID NO: 127067 - DNA, 25 bp, Artificial
  probe
  misc_feature (1)..(25): SEQ ID NO: 2672; WAN024COR_at; Start 17; Stop 41
tatcgaagaatgtcctttcgaccat

SEQ ID NO: 127068 - DNA, 25 bp, Artificial
  probe
  misc_feature (1)..(25): SEQ ID NO: 2672; WAN024COR_at; Start 52; Stop 76
tgtgctaccaaactgtatggtacga

SEQ ID NO: 127069 - DNA, 25 bp, Artificial
  probe
  misc_feature (1)..(25): SEQ ID NO: 2672; WAN024COR_at; Start 79; Stop 103
actcactcgaagaaatcgctgatga

SEQ ID NO: 127070 - DNA, 25 bp, Artificial
  probe
  misc_feature (1)..(25): SEQ ID NO: 2672; WAN024COR_at; Start 36; Stop 60
gaccatcctaatggaatgtgctacc

SEQ ID NO: 127071 - DNA, 25 bp, Artificial
  probe
  misc_feature (1)..(25): SEQ ID NO: 2672; WAN024COR_at; Start 42; Stop 66
cctaatggaatgtgctaccaaactg

SEQ ID NO: 127072 - DNA, 25 bp, Artificial
  probe
  misc_feature (1)..(25): SEQ ID NO: 2672; WAN024COR_at; Start 67; Stop 91
tatggtacgaaaactcactcgaaga

SEQ ID NO: 127073 - DNA, 25 bp, Artificial
  probe
  misc_feature (1)..(25): SEQ ID NO: 2672; WAN024COR_at; Start 38; Stop 62
ccatcctaatggaatgtgctaccaa

SEQ ID NO: 127074 - DNA, 25 bp, Artificial
  probe
  misc_feature (1)..(25): SEQ ID NO: 2672; WAN024COR_at; Start 60; Stop 84
caaactgtatggtacgaaaactcac

SEQ ID NO: 127075 - DNA, 25 bp, Artificial
  probe
  misc_feature (1)..(25): SEQ ID NO: 2672; WAN024COR_at; Start 21; Stop 45
gaagaatgtcctttcgaccatccta

SEQ ID NO: 127076 - DNA, 25 bp, Artificial
  probe
  misc_feature (1)..(25): SEQ ID NO: 2672; WAN024COR_at; Start 14; Stop 38
tcctatcgaagaatgtcctttcgac

SEQ ID NO: 127077 - DNA, 25 bp, Artificial
  probe
  misc_feature (1)..(25): SEQ ID NO: 2672; WAN024COR_at; Start 2; Stop 26
tggtgaagtatttcctatcgaagaa

SEQ ID NO: 127078 - DNA, 25 bp, Artificial
  probe
  misc_feature (1)..(25): SEQ ID NO: 2672; WAN024COR_at; Start 78; Stop 102
aactcactcgaagaaatcgctgatg

SEQ ID NO: 127079 - DNA, 25 bp, Artificial
  probe
  misc_feature (1)..(25): SEQ ID NO: 2672; WAN024COR_at; Start 39; Stop 63
catcctaatggaatgtgctaccaaa

SEQ ID NO: 127080 - DNA, 25 bp, Artificial
  probe
  misc_feature (1)..(25): SEQ ID NO: 2672; WAN024COR_at; Start 27; Stop 51
tgtcctttcgaccatcctaatggaa

SEQ ID NO: 127081 - DNA, 25 bp, Artificial
  probe
  misc_feature (1)..(25): SEQ ID NO: 2672; WAN024COR_at; Start 34; Stop 58
tcgaccatcctaatggaatgtgcta

SEQ ID NO: 127082 - DNA, 25 bp, Artificial
  probe
  misc_feature (1)..(25): SEQ ID NO: 2672; WAN024COR_at; Start 47; Stop 71
tggaatgtgctaccaaactgtatgg

SEQ ID NO: 127083 - DNA, 25 bp, Artificial
  probe
  misc_feature (1)..(25): SEQ ID NO: 2672; WAN024COR_at; Start 55; Stop 79
gctaccaaactgtatggtacgaaaa

SEQ ID NO: 127084 - DNA, 25 bp, Artificial
  probe
  misc_feature (1)..(25): SEQ ID NO: 2672; WAN024COR_at; Start 72; Stop 96
tacgaaaactcactcgaagaaatcg

SEQ ID NO: 127085 - DNA, 25 bp, Artificial
  probe
  misc_feature (1)..(25): SEQ ID NO: 2672; WAN024COR_at; Start 7; Stop 31
aagtatttcctatcgaagaatgtcc

SEQ ID NO: 127086 - DNA, 25 bp, Artificial
  probe
  misc_feature (1)..(25): SEQ ID NO: 2672; WAN024COR_at; Start 69; Stop 93
tggtacgaaaactcactcgaagaaa

SEQ ID NO: 127087 - DNA, 25 bp, Artificial
  probe
  misc_feature (1)..(25): SEQ ID NO: 2672; WAN024COR_at; Start 24; Stop 48
gaatgtcctttcgaccatcctaatg

SEQ ID NO: 127088 - DNA, 25 bp, Artificial
  probe
  misc_feature (1)..(25): SEQ ID NO: 2672; WAN024COR_at; Start 9; Stop 33
gtatttcctatcgaagaatgtcctt

SEQ ID NO: 127089 - DNA, 25 bp, Artificial
  probe
  misc_feature (1)..(25): SEQ ID NO: 2672; WAN024COR_at; Start 32; Stop 56
tttcgaccatcctaatggaatgtgc

SEQ ID NO: 127090 - DNA, 25 bp, Artificial
  probe
  misc_feature (1)..(25): SEQ ID NO: 2672; WAN024COR_at; Start 59; Stop 83
ccaaactgtatggtacgaaaactca

SEQ ID NO: 127091 - DNA, 25 bp, Artificial
  probe
  misc_feature (1)..(25): SEQ ID NO: 2672; WAN024COR_at; Start 25; Stop 49
aatgtcctttcgaccatcctaatgg

SEQ ID NO: 127092 - DNA, 25 bp, Artificial
  probe
  misc_feature (1)..(25): SEQ ID NO: 2027; WAN024COS_at; Start 73; Stop 97
tcaagaaataaggaacatctaaatc

SEQ ID NO: 127093 - DNA, 25 bp, Artificial
  probe
  misc_feature (1)..(25): SEQ ID NO: 2027; WAN024COS_at; Start 33; Stop 57
gttccacaactttcagcgtcacttt

SEQ ID NO: 127094 - DNA, 25 bp, Artificial
  probe
  misc_feature (1)..(25): SEQ ID NO: 2027; WAN024COS_at; Start 6; Stop 30
tttttgcggtcgatacaagttgcgc

SEQ ID NO: 127095 - DNA, 25 bp, Artificial
  probe
  misc_feature (1)..(25): SEQ ID NO: 2027; WAN024COS_at; Start 19; Stop 43
tacaagttgcgcaagttccacaact

SEQ ID NO: 127096 - DNA, 25 bp, Artificial
  probe
  misc_feature (1)..(25): SEQ ID NO: 2027; WAN024COS_at; Start 81; Stop 105
taaggaacatctaaatcaattcccc

SEQ ID NO: 127097 - DNA, 25 bp, Artificial
  probe
  misc_feature (1)..(25): SEQ ID NO: 2027; WAN024COS_at; Start 14; Stop 38
gtcgatacaagttgcgcaagttcca

SEQ ID NO: 127098 - DNA, 25 bp, Artificial
  probe
  misc_feature (1)..(25): SEQ ID NO: 2027; WAN024COS_at; Start 38; Stop 62
acaactttcagcgtcactttcataa

SEQ ID NO: 127099 - DNA, 25 bp, Artificial
  probe
  misc_feature (1)..(25): SEQ ID NO: 2027; WAN024COS_at; Start 2; Stop 26
tgcctttttgcggtcgatacaagtt

SEQ ID NO: 127100 - DNA, 25 bp, Artificial
  probe
  misc_feature (1)..(25): SEQ ID NO: 2027; WAN024COS_at; Start 4; Stop 28
cctttttgcggtcgatacaagttgc

SEQ ID NO: 127101 - DNA, 25 bp, Artificial
  probe
  misc_feature (1)..(25): SEQ ID NO: 2027; WAN024COS_at; Start 85; Stop 109
gaacatctaaatcaattccccattt

SEQ ID NO: 127102 - DNA, 25 bp, Artificial
  probe
  misc_feature (1)..(25): SEQ ID NO: 2027; WAN024COS_at; Start 48; Stop 72
gcgtcactttcataacatgaacgag

SEQ ID NO: 127103 - DNA, 25 bp, Artificial
  probe
  misc_feature (1)..(25): SEQ ID NO: 2027; WAN024COS_at; Start 54; Stop 78
ctttcataacatgaacgagtcaaga

SEQ ID NO: 127104 - DNA, 25 bp, Artificial
  probe
  misc_feature (1)..(25): SEQ ID NO: 2027; WAN024COS_at; Start 7; Stop 31
ttttgcggtcgatacaagttgcgca

SEQ ID NO: 127105 - DNA, 25 bp, Artificial
  probe
  misc_feature (1)..(25): SEQ ID NO: 2027; WAN024COS_at; Start 65; Stop 89
tgaacgagtcaagaaataaggaaca

SEQ ID NO: 127106 - DNA, 25 bp, Artificial
  probe
  misc_feature (1)..(25): SEQ ID NO: 2027; WAN024COS_at; Start 24; Stop 48
gttgcgcaagttccacaactttcag

SEQ ID NO: 127107 - DNA, 25 bp, Artificial
  probe
  misc_feature (1)..(25): SEQ ID NO: 2027; WAN024COS_at; Start 57; Stop 81
tcataacatgaacgagtcaagaaat

SEQ ID NO: 127108 - DNA, 25 bp, Artificial
  probe
  misc_feature (1)..(25): SEQ ID NO: 2027; WAN024COS_at; Start 67; Stop 91
aacgagtcaagaaataaggaacatc

SEQ ID NO: 127109 - DNA, 25 bp, Artificial
  probe
  misc_feature (1)..(25): SEQ ID NO: 2027; WAN024COS_at; Start 31; Stop 55
aagttccacaactttcagcgtcact

SEQ ID NO: 127110 - DNA, 25 bp, Artificial
  probe
  misc_feature (1)..(25): SEQ ID NO: 2027; WAN024COS_at; Start 50; Stop 74
gtcactttcataacatgaacgagtc

SEQ ID NO: 127111 - DNA, 25 bp, Artificial
  probe
  misc_feature (1)..(25): SEQ ID NO: 2027; WAN024COS_at; Start 40; Stop 64
aactttcagcgtcactttcataaca

SEQ ID NO: 127112 - DNA, 25 bp, Artificial
  probe
  misc_feature (1)..(25): SEQ ID NO: 2027; WAN024COS_at; Start 10; Stop 34
tgcggtcgatacaagttgcgcaagt

SEQ ID NO: 127113 - DNA, 25 bp, Artificial
  probe
  misc_feature (1)..(25): SEQ ID NO: 2027; WAN024COS_at; Start 13; Stop 37
ggtcgatacaagttgcgcaagttcc

SEQ ID NO: 127114 - DNA, 25 bp, Artificial
  probe
  misc_feature (1)..(25): SEQ ID NO: 2027; WAN024COS_at; Start 15; Stop 39
tcgatacaagttgcgcaagttccac

SEQ ID NO: 127115 - DNA, 25 bp, Artificial
  probe
  misc_feature (1)..(25): SEQ ID NO: 2027; WAN024COS_at; Start 29; Stop 53
gcaagttccacaactttcagcgtca

SEQ ID NO: 127116 - DNA, 25 bp, Artificial
  probe
  misc_feature (1)..(25): SEQ ID NO: 2027; WAN024COS_at; Start 63; Stop 87
catgaacgagtcaagaaataaggaa

SEQ ID NO: 127117 - DNA, 25 bp, Artificial
  probe
  misc_feature (1)..(25): SEQ ID NO: 2027; WAN024COS_at; Start 35; Stop 59
tccacaactttcagcgtcactttca

SEQ ID NO: 127118 - DNA, 25 bp, Artificial
  probe
  misc_feature (1)..(25): SEQ ID NO: 2027; WAN024COS_at; Start 12; Stop 36
cggtcgatacaagttgcgcaagttc

SEQ ID NO: 127119 - DNA, 25 bp, Artificial
  probe
  misc_feature (1)..(25): SEQ ID NO: 2027; WAN024COS_at; Start 45; Stop 69
tcagcgtcactttcataacatgaac

SEQ ID NO: 127120 - DNA, 25 bp, Artificial
  probe
  misc_feature (1)..(25): SEQ ID NO: 2027; WAN024COS_at; Start 69; Stop 93
cgagtcaagaaataaggaacatcta

SEQ ID NO: 127121 - DNA, 25 bp, Artificial
  probe
  misc_feature (1)..(25): SEQ ID NO: 2027; WAN024COS_at; Start 43; Stop 67
tttcagcgtcactttcataacatga

SEQ ID NO: 127122 - DNA, 25 bp, Artificial
  probe
  misc_feature (1)..(25): SEQ ID NO: 2027; WAN024COS_at; Start 5; Stop 29
ctttttgcggtcgatacaagttgcg

SEQ ID NO: 127123 - DNA, 25 bp, Artificial
  probe
  misc_feature (1)..(25): SEQ ID NO: 2027; WAN024COS_at; Start 26; Stop 50
tgcgcaagttccacaactttcagcg

SEQ ID NO: 127124 - DNA, 25 bp, Artificial
  probe
  misc_feature (1)..(25): SEQ ID NO: 2027; WAN024COS_at; Start 8; Stop 32
tttgcggtcgatacaagttgcgcaa

SEQ ID NO: 127125 - DNA, 25 bp, Artificial
  probe
  misc_feature (1)..(25): SEQ ID NO: 2027; WAN024COS_at; Start 60; Stop 84
taacatgaacgagtcaagaaataag

SEQ ID NO: 127126 - DNA, 25 bp, Artificial
  probe
  misc_feature (1)..(25): SEQ ID NO: 3958; WAN024COT_at; Start 54; Stop 78
aaatagaactcgcttggtgtcaact

SEQ ID NO: 127127 - DNA, 25 bp, Artificial
  probe
  misc_feature (1)..(25): SEQ ID NO: 3958; WAN024COT_at; Start 77; Stop 101
ctgcatttgctaaagcgattggttc

SEQ ID NO: 127128 - DNA, 25 bp, Artificial
  probe
  misc_feature (1)..(25): SEQ ID NO: 3958; WAN024COT_at; Start 82; Stop 106
tttgctaaagcgattggttcattcc

SEQ ID NO: 127129 - DNA, 25 bp, Artificial
  probe
  misc_feature (1)..(25): SEQ ID NO: 3958; WAN024COT_at; Start 35; Stop 59
cagccgtagttctaaatccaaatag

SEQ ID NO: 127130 - DNA, 25 bp, Artificial
  probe
  misc_feature (1)..(25): SEQ ID NO: 3958; WAN024COT_at; Start 63; Stop 87
tcgcttggtgtcaactgcatttgct

SEQ ID NO: 127131 - DNA, 25 bp, Artificial
  probe
  misc_feature (1)..(25): SEQ ID NO: 3958; WAN024COT_at; Start 55; Stop 79
aatagaactcgcttggtgtcaactg

SEQ ID NO: 127132 - DNA, 25 bp, Artificial
  probe
  misc_feature (1)..(25): SEQ ID NO: 3958; WAN024COT_at; Start 51; Stop 75
tccaaatagaactcgcttggtgtca

SEQ ID NO: 127133 - DNA, 25 bp, Artificial
  probe
  misc_feature (1)..(25): SEQ ID NO: 3958; WAN024COT_at; Start 19; Stop 43
aatcttgacatattctcagccgtag

SEQ ID NO: 127134 - DNA, 25 bp, Artificial
  probe
  misc_feature (1)..(25): SEQ ID NO: 3958; WAN024COT_at; Start 29; Stop 53
tattctcagccgtagttctaaatcc

SEQ ID NO: 127135 - DNA, 25 bp, Artificial
  probe
  misc_feature (1)..(25): SEQ ID NO: 3958; WAN024COT_at; Start 37; Stop 61
gccgtagttctaaatccaaatagaa

SEQ ID NO: 127136 - DNA, 25 bp, Artificial
  probe
  misc_feature (1)..(25): SEQ ID NO: 3958; WAN024COT_at; Start 5; Stop 29
gagtccaggtaaggaatcttgacat

SEQ ID NO: 127137 - DNA, 25 bp, Artificial
  probe
  misc_feature (1)..(25): SEQ ID NO: 3958; WAN024COT_at; Start 32; Stop 56
tctcagccgtagttctaaatccaaa

SEQ ID NO: 127138 - DNA, 25 bp, Artificial
  probe
  misc_feature (1)..(25): SEQ ID NO: 3958; WAN024COT_at; Start 48; Stop 72
aaatccaaatagaactcgcttggtg

SEQ ID NO: 127139 - DNA, 25 bp, Artificial
  probe
  misc_feature (1)..(25): SEQ ID NO: 3958; WAN024COT_at; Start 58; Stop 82
agaactcgcttggtgtcaactgcat

SEQ ID NO: 127140 - DNA, 25 bp, Artificial
  probe
  misc_feature (1)..(25): SEQ ID NO: 3958; WAN024COT_at; Start 61; Stop 85
actcgcttggtgtcaactgcatttg

SEQ ID NO: 127141 - DNA, 25 bp, Artificial
  probe
  misc_feature (1)..(25): SEQ ID NO: 3958; WAN024COT_at; Start 87; Stop 111
taaagcgattggttcattcccttga

SEQ ID NO: 127142 - DNA, 25 bp, Artificial
  probe
  misc_feature (1)..(25): SEQ ID NO: 3958; WAN024COT_at; Start 79; Stop 103
gcatttgctaaagcgattggttcat

SEQ ID NO: 127143 - DNA, 25 bp, Artificial
  probe
  misc_feature (1)..(25): SEQ ID NO: 3958; WAN024COT_at; Start 74; Stop 98
caactgcatttgctaaagcgattgg

SEQ ID NO: 127144 - DNA, 25 bp, Artificial
  probe
  misc_feature (1)..(25): SEQ ID NO: 3958; WAN024COT_at; Start 1; Stop 25
gtgagagtccaggtaaggaatcttg

SEQ ID NO: 127145 - DNA, 25 bp, Artificial
  probe
  misc_feature (1)..(25): SEQ ID NO: 3958; WAN024COT_at; Start 14; Stop 38
taaggaatcttgacatattctcagc

SEQ ID NO: 127146 - DNA, 25 bp, Artificial
  probe
  misc_feature (1)..(25): SEQ ID NO: 3958; WAN024COT_at; Start 57; Stop 81
tagaactcgcttggtgtcaactgca

SEQ ID NO: 127147 - DNA, 25 bp, Artificial
  probe
  misc_feature (1)..(25): SEQ ID NO: 3958; WAN024COT_at; Start 84; Stop 108
tgctaaagcgattggttcattccct

SEQ ID NO: 127148 - DNA, 25 bp, Artificial
  probe
  misc_feature (1)..(25): SEQ ID NO: 3958; WAN024COT_at; Start 3; Stop 27
gagagtccaggtaaggaatcttgac

SEQ ID NO: 127149 - DNA, 25 bp, Artificial
  probe
  misc_feature (1)..(25): SEQ ID NO: 3958; WAN024COT_at; Start 45; Stop 69
tctaaatccaaatagaactcgcttg

SEQ ID NO: 127150 - DNA, 25 bp, Artificial
  probe
  misc_feature (1)..(25): SEQ ID NO: 3958; WAN024COT_at; Start 25; Stop 49
gacatattctcagccgtagttctaa

SEQ ID NO: 127151 - DNA, 25 bp, Artificial
  probe
  misc_feature (1)..(25): SEQ ID NO: 3958; WAN024COT_at; Start 69; Stop 93
ggtgtcaactgcatttgctaaagcg

SEQ ID NO: 127152 - DNA, 25 bp, Artificial
  probe
  misc_feature (1)..(25): SEQ ID NO: 3958; WAN024COT_at; Start 59; Stop 83
gaactcgcttggtgtcaactgcatt

SEQ ID NO: 127153 - DNA, 25 bp, Artificial
  probe
  misc_feature (1)..(25): SEQ ID NO: 3958; WAN024COT_at; Start 52; Stop 76
ccaaatagaactcgcttggtgtcaa

SEQ ID NO: 127154 - DNA, 25 bp, Artificial
  probe
  misc_feature (1)..(25): SEQ ID NO: 3958; WAN024COT_at; Start 16; Stop 40
aggaatcttgacatattctcagccg

SEQ ID NO: 127155 - DNA, 25 bp, Artificial
  probe
  misc_feature (1)..(25): SEQ ID NO: 3958; WAN024COT_at; Start 65; Stop 89
gcttggtgtcaactgcatttgctaa

SEQ ID NO: 127156 - DNA, 25 bp, Artificial
  probe
  misc_feature (1)..(25): SEQ ID NO: 3958; WAN024COT_at; Start 18; Stop 42
gaatcttgacatattctcagccgta

SEQ ID NO: 127157 - DNA, 25 bp, Artificial
  probe
  misc_feature (1)..(25): SEQ ID NO: 3958; WAN024COT_at; Start 9; Stop 33
ccaggtaaggaatcttgacatattc

SEQ ID NO: 127158 - DNA, 25 bp, Artificial
  probe
  misc_feature (1)..(25): SEQ ID NO: 3958; WAN024COT_at; Start 21; Stop 45
tcttgacatattctcagccgtagtt

SEQ ID NO: 127159 - DNA, 25 bp, Artificial
  probe
  misc_feature (1)..(25): SEQ ID NO: 3958; WAN024COT_at; Start 71; Stop 95
tgtcaactgcatttgctaaagcgat

SEQ ID NO: 127160 - DNA, 25 bp, Artificial
  probe
  misc_feature (1)..(25): SEQ ID NO: 3040; WAN024COU_at; Start 21; Stop 45
tagcaatatatcgaggcttcatgtg

SEQ ID NO: 127161 - DNA, 25 bp, Artificial
  probe
  misc_feature (1)..(25): SEQ ID NO: 3040; WAN024COU_at; Start 87; Stop 111
cattgttgatagaagcaaacgttaa

SEQ ID NO: 127162 - DNA, 25 bp, Artificial
  probe
  misc_feature (1)..(25): SEQ ID NO: 3040; WAN024COU_at; Start 27; Stop 51
tatatcgaggcttcatgtggcgtgt

SEQ ID NO: 127163 - DNA, 25 bp, Artificial
  probe
  misc_feature (1)..(25): SEQ ID NO: 3040; WAN024COU_at; Start 44; Stop 68
tggcgtgtagtaaaccacgaaacat

SEQ ID NO: 127164 - DNA, 25 bp, Artificial
  probe
  misc_feature (1)..(25): SEQ ID NO: 3040; WAN024COU_at; Start 33; Stop 57
gaggcttcatgtggcgtgtagtaaa

SEQ ID NO: 127165 - DNA, 25 bp, Artificial
  probe
  misc_feature (1)..(25): SEQ ID NO: 3040; WAN024COU_at; Start 13; Stop 37
tttagatttagcaatatatcgaggc

SEQ ID NO: 127166 - DNA, 25 bp, Artificial
  probe
  misc_feature (1)..(25): SEQ ID NO: 3040; WAN024COU_at; Start 79; Stop 103
ttcacttccattgttgatagaagca

SEQ ID NO: 127167 - DNA, 25 bp, Artificial
  probe
  misc_feature (1)..(25): SEQ ID NO: 3040; WAN024COU_at; Start 49; Stop 73
tgtagtaaaccacgaaacatcaatg

SEQ ID NO: 127168 - DNA, 25 bp, Artificial
  probe
  misc_feature (1)..(25): SEQ ID NO: 3040; WAN024COU_at; Start 81; Stop 105
cacttccattgttgatagaagcaaa

SEQ ID NO: 127169 - DNA, 25 bp, Artificial
  probe
  misc_feature (1)..(25): SEQ ID NO: 3040; WAN024COU_at; Start 46; Stop 70
gcgtgtagtaaaccacgaaacatca

SEQ ID NO: 127170 - DNA, 25 bp, Artificial
  probe
  misc_feature (1)..(25): SEQ ID NO: 3040; WAN024COU_at; Start 51; Stop 75
tagtaaaccacgaaacatcaatgag

SEQ ID NO: 127171 - DNA, 25 bp, Artificial
  probe
  misc_feature (1)..(25): SEQ ID NO: 3040; WAN024COU_at; Start 19; Stop 43
tttagcaatatatcgaggcttcatg

SEQ ID NO: 127172 - DNA, 25 bp, Artificial
  probe
  misc_feature (1)..(25): SEQ ID NO: 3040; WAN024COU_at; Start 75; Stop 99
gatattcacttccattgttgataga

SEQ ID NO: 127173 - DNA, 25 bp, Artificial
  probe
  misc_feature (1)..(25): SEQ ID NO: 3040; WAN024COU_at; Start 72; Stop 96
tgagatattcacttccattgttgat

SEQ ID NO: 127174 - DNA, 25 bp, Artificial
  probe
  misc_feature (1)..(25): SEQ ID NO: 3040; WAN024COU_at; Start 53; Stop 77
gtaaaccacgaaacatcaatgagat

SEQ ID NO: 127175 - DNA, 25 bp, Artificial
  probe
  misc_feature (1)..(25): SEQ ID NO: 3040; WAN024COU_at; Start 40; Stop 64
catgtggcgtgtagtaaaccacgaa

SEQ ID NO: 127176 - DNA, 25 bp, Artificial
  probe
  misc_feature (1)..(25): SEQ ID NO: 3040; WAN024COU_at; Start 36; Stop 60
gcttcatgtggcgtgtagtaaacca

SEQ ID NO: 127177 - DNA, 25 bp, Artificial
  probe
  misc_feature (1)..(25): SEQ ID NO: 3040; WAN024COU_at; Start 86; Stop 110
ccattgttgatagaagcaaacgtta

SEQ ID NO: 127178 - DNA, 25 bp, Artificial
  probe
  misc_feature (1)..(25): SEQ ID NO: 3040; WAN024COU_at; Start 38; Stop 62
ttcatgtggcgtgtagtaaaccacg

SEQ ID NO: 127179 - DNA, 25 bp, Artificial
  probe
  misc_feature (1)..(25): SEQ ID NO: 3040; WAN024COU_at; Start 2; Stop 26
tgttcgtcgcttttagatttagcaa

SEQ ID NO: 127180 - DNA, 25 bp, Artificial
  probe
  misc_feature (1)..(25): SEQ ID NO: 3040; WAN024COU_at; Start 15; Stop 39
tagatttagcaatatatcgaggctt

SEQ ID NO: 127181 - DNA, 25 bp, Artificial
  probe
  misc_feature (1)..(25): SEQ ID NO: 3040; WAN024COU_at; Start 83; Stop 107
cttccattgttgatagaagcaaacg

SEQ ID NO: 127182 - DNA, 25 bp, Artificial
  probe
  misc_feature (1)..(25): SEQ ID NO: 3040; WAN024COU_at; Start 85; Stop 109
tccattgttgatagaagcaaacgtt

SEQ ID NO: 127183 - DNA, 25 bp, Artificial
  probe
  misc_feature (1)..(25): SEQ ID NO: 3040; WAN024COU_at; Start 62; Stop 86
gaaacatcaatgagatattcacttc

SEQ ID NO: 127184 - DNA, 25 bp, Artificial
  probe
  misc_feature (1)..(25): SEQ ID NO: 3040; WAN024COU_at; Start 23; Stop 47
gcaatatatcgaggcttcatgtggc

SEQ ID NO: 127185 - DNA, 25 bp, Artificial
  probe
  misc_feature (1)..(25): SEQ ID NO: 3040; WAN024COU_at; Start 64; Stop 88
aacatcaatgagatattcacttcca

SEQ ID NO: 127186 - DNA, 25 bp, Artificial
  probe
  misc_feature (1)..(25): SEQ ID NO: 3040; WAN024COU_at; Start 42; Stop 66
tgtggcgtgtagtaaaccacgaaac

SEQ ID NO: 127187 - DNA, 25 bp, Artificial
  probe
  misc_feature (1)..(25): SEQ ID NO: 3040; WAN024COU_at; Start 25; Stop 49
aatatatcgaggcttcatgtggcgt

SEQ ID NO: 127188 - DNA, 25 bp, Artificial
  probe
  misc_feature (1)..(25): SEQ ID NO: 3040; WAN024COU_at; Start 31; Stop 55
tcgaggcttcatgtggcgtgtagta

SEQ ID NO: 127189 - DNA, 25 bp, Artificial
  probe
  misc_feature (1)..(25): SEQ ID NO: 3040; WAN024COU_at; Start 17; Stop 41
gatttagcaatatatcgaggcttca

SEQ ID NO: 127190 - DNA, 25 bp, Artificial
  probe
  misc_feature (1)..(25): SEQ ID NO: 3040; WAN024COU_at; Start 32; Stop 56
cgaggcttcatgtggcgtgtagtaa

SEQ ID NO: 127191 - DNA, 25 bp, Artificial
  probe
  misc_feature (1)..(25): SEQ ID NO: 3040; WAN024COU_at; Start 59; Stop 83
cacgaaacatcaatgagatattcac

SEQ ID NO: 127192 - DNA, 25 bp, Artificial
  probe
  misc_feature (1)..(25): SEQ ID NO: 3040; WAN024COU_at; Start 29; Stop 53
tatcgaggcttcatgtggcgtgtag

SEQ ID NO: 127193 - DNA, 25 bp, Artificial
  probe
  misc_feature (1)..(25): SEQ ID NO: 3040; WAN024COU_at; Start 6; Stop 30
cgtcgcttttagatttagcaatata

SEQ ID NO: 127194 - DNA, 25 bp, Artificial
  probe
  misc_feature (1)..(25): SEQ ID NO: 3489; WAN024COV_at; Start 46; Stop 70
gatagagtagctgcccaaaaaatta

SEQ ID NO: 127195 - DNA, 25 bp, Artificial
  probe
  misc_feature (1)..(25): SEQ ID NO: 3489; WAN024COV_at; Start 89; Stop 113
atgtggcacactggaggagcaagac

SEQ ID NO: 127196 - DNA, 25 bp, Artificial
  probe
  misc_feature (1)..(25): SEQ ID NO: 3489; WAN024COV_at; Start 21; Stop 45
gcaagaccccatcggctggctcttt

SEQ ID NO: 127197 - DNA, 25 bp, Artificial
  probe
  misc_feature (1)..(25): SEQ ID NO: 3489; WAN024COV_at; Start 124; Stop 148
accgcttcgccaaataataaacgca

SEQ ID NO: 127198 - DNA, 25 bp, Artificial
  probe
  misc_feature (1)..(25): SEQ ID NO: 3489; WAN024COV_at; Start 77; Stop 101
ttactcgtgctgatgtggcacactg

SEQ ID NO: 127199 - DNA, 25 bp, Artificial
  probe
  misc_feature (1)..(25): SEQ ID NO: 3489; WAN024COV_at; Start 122; Stop 146
tcaccgcttcgccaaataataaacg

SEQ ID NO: 127200 - DNA, 25 bp, Artificial
  probe
  misc_feature (1)..(25): SEQ ID NO: 3489; WAN024COV_at; Start 33; Stop 57
cggctggctctttgatagagtagct

SEQ ID NO: 127201 - DNA, 25 bp, Artificial
  probe
  misc_feature (1)..(25): SEQ ID NO: 3489; WAN024COV_at; Start 2; Stop 26
ttccgtatgccgcgttcctgcaaga

SEQ ID NO: 127202 - DNA, 25 bp, Artificial
  probe
  misc_feature (1)..(25): SEQ ID NO: 3489; WAN024COV_at; Start 126; Stop 150
cgcttcgccaaataataaacgcaat

SEQ ID NO: 127203 - DNA, 25 bp, Artificial
  probe
  misc_feature (1)..(25): SEQ ID NO: 3489; WAN024COV_at; Start 99; Stop 123
ctggaggagcaagaccgccgatatc

SEQ ID NO: 127204 - DNA, 25 bp, Artificial
  probe
  misc_feature (1)..(25): SEQ ID NO: 3489; WAN024COV_at; Start 26; Stop 50
accccatcggctggctctttgatag

SEQ ID NO: 127205 - DNA, 25 bp, Artificial
  probe
  misc_feature (1)..(25): SEQ ID NO: 3489; WAN024COV_at; Start 45; Stop 69
tgatagagtagctgcccaaaaaatt

SEQ ID NO: 127206 - DNA, 25 bp, Artificial
  probe
  misc_feature (1)..(25): SEQ ID NO: 3489; WAN024COV_at; Start 79; Stop 103
actcgtgctgatgtggcacactgga

SEQ ID NO: 127207 - DNA, 25 bp, Artificial
  probe
  misc_feature (1)..(25): SEQ ID NO: 3489; WAN024COV_at; Start 35; Stop 59
gctggctctttgatagagtagctgc

SEQ ID NO: 127208 - DNA, 25 bp, Artificial
  probe
  misc_feature (1)..(25): SEQ ID NO: 3489; WAN024COV_at; Start 40; Stop 64
ctctttgatagagtagctgcccaaa

SEQ ID NO: 127209 - DNA, 25 bp, Artificial
  probe
  misc_feature (1)..(25): SEQ ID NO: 3489; WAN024COV_at; Start 127; Stop 151
gcttcgccaaataataaacgcaata

SEQ ID NO: 127210 - DNA, 25 bp, Artificial
  probe
  misc_feature (1)..(25): SEQ ID NO: 3489; WAN024COV_at; Start 41; Stop 65
tctttgatagagtagctgcccaaaa

SEQ ID NO: 127211 - DNA, 25 bp, Artificial
  probe
  misc_feature (1)..(25): SEQ ID NO: 3489; WAN024COV_at; Start 75; Stop 99
tattactcgtgctgatgtggcacac

SEQ ID NO: 127212 - DNA, 25 bp, Artificial
  probe
  misc_feature (1)..(25): SEQ ID NO: 3489; WAN024COV_at; Start 98; Stop 122
actggaggagcaagaccgccgatat

SEQ ID NO: 127213 - DNA, 25 bp, Artificial
  probe
  misc_feature (1)..(25): SEQ ID NO: 3489; WAN024COV_at; Start 80; Stop 104
ctcgtgctgatgtggcacactggag

SEQ ID NO: 127214 - DNA, 25 bp, Artificial
  probe
  misc_feature (1)..(25): SEQ ID NO: 3489; WAN024COV_at; Start 101; Stop 125
ggaggagcaagaccgccgatatcac

SEQ ID NO: 127215 - DNA, 25 bp, Artificial
  probe
  misc_feature (1)..(25): SEQ ID NO: 3489; WAN024COV_at; Start 25; Stop 49
gaccccatcggctggctctttgata

SEQ ID NO: 127216 - DNA, 25 bp, Artificial
  probe
  misc_feature (1)..(25): SEQ ID NO: 3489; WAN024COV_at; Start 37; Stop 61
tggctctttgatagagtagctgccc

SEQ ID NO: 127217 - DNA, 25 bp, Artificial
  probe
  misc_feature (1)..(25): SEQ ID NO: 3489; WAN024COV_at; Start 106; Stop 130
agcaagaccgccgatatcaccgctt

SEQ ID NO: 127218 - DNA, 25 bp, Artificial
  probe
  misc_feature (1)..(25): SEQ ID NO: 3489; WAN024COV_at; Start 42; Stop 66
ctttgatagagtagctgcccaaaaa

SEQ ID NO: 127219 - DNA, 25 bp, Artificial
  probe
  misc_feature (1)..(25): SEQ ID NO: 3489; WAN024COV_at; Start 39; Stop 63
gctctttgatagagtagctgcccaa

SEQ ID NO: 127220 - DNA, 25 bp, Artificial
  probe
  misc_feature (1)..(25): SEQ ID NO: 3489; WAN024COV_at; Start 20; Stop 44
tgcaagaccccatcggctggctctt

SEQ ID NO: 127221 - DNA, 25 bp, Artificial
  probe
  misc_feature (1)..(25): SEQ ID NO: 3489; WAN024COV_at; Start 78; Stop 102
tactcgtgctgatgtggcacactgg

SEQ ID NO: 127222 - DNA, 25 bp, Artificial
  probe
  misc_feature (1)..(25): SEQ ID NO: 3489; WAN024COV_at; Start 30; Stop 54
catcggctggctctttgatagagta

SEQ ID NO: 127223 - DNA, 25 bp, Artificial
  probe
  misc_feature (1)..(25): SEQ ID NO: 3489; WAN024COV_at; Start 28; Stop 52
cccatcggctggctctttgatagag

SEQ ID NO: 127224 - DNA, 25 bp, Artificial
  probe
  misc_feature (1)..(25): SEQ ID NO: 3489; WAN024COV_at; Start 38; Stop 62
ggctctttgatagagtagctgccca

SEQ ID NO: 127225 - DNA, 25 bp, Artificial
  probe
  misc_feature (1)..(25): SEQ ID NO: 3489; WAN024COV_at; Start 32; Stop 56
tcggctggctctttgatagagtagc

SEQ ID NO: 127226 - DNA, 25 bp, Artificial
  probe
  misc_feature (1)..(25): SEQ ID NO: 3489; WAN024COV_at; Start 15; Stop 39
gttcctgcaagaccccatcggctgg

SEQ ID NO: 127227 - DNA, 25 bp, Artificial
  probe
  misc_feature (1)..(25): SEQ ID NO: 3489; WAN024COV_at; Start 100; Stop 124
tggaggagcaagaccgccgatatca

SEQ ID NO: 127228 - DNA, 25 bp, Artificial
  probe
  misc_feature (1)..(25): SEQ ID NO: 2285; WAN024COW_at; Start 211; Stop 235
gacttgcaggcaggaacatacttgg

SEQ ID NO: 127229 - DNA, 25 bp, Artificial
  probe
  misc_feature (1)..(25): SEQ ID NO: 2285; WAN024COW_at; Start 614; Stop 638
tgaaacgtcctgaagatgttgaaga

SEQ ID NO: 127230 - DNA, 25 bp, Artificial
  probe
  misc_feature (1)..(25): SEQ ID NO: 2285; WAN024COW_at; Start 443; Stop 467
aaaagatcgtcgctgtaacgcgagt

SEQ ID NO: 127231 - DNA, 25 bp, Artificial
  probe
  misc_feature (1)..(25): SEQ ID NO: 2285; WAN024COW_at; Start 637; Stop 661
gatgtactgcaaattccacttttag

SEQ ID NO: 127232 - DNA, 25 bp, Artificial
  probe
  misc_feature (1)..(25): SEQ ID NO: 2285; WAN024COW_at; Start 622; Stop 646
cctgaagatgttgaagatgtactgc

SEQ ID NO: 127233 - DNA, 25 bp, Artificial
  probe
  misc_feature (1)..(25): SEQ ID NO: 2285; WAN024COW_at; Start 593; Stop 617
ttgagttgctcgacacccgtgtgaa

SEQ ID NO: 127234 - DNA, 25 bp, Artificial
  probe
  misc_feature (1)..(25): SEQ ID NO: 2285; WAN024COW_at; Start 664; Stop 688
ctcgttccagatttggacaaaatga

SEQ ID NO: 127235 - DNA, 25 bp, Artificial
  probe
  misc_feature (1)..(25): SEQ ID NO: 2285; WAN024COW_at; Start 440; Stop 464
cagaaaagatcgtcgctgtaacgcg

SEQ ID NO: 127236 - DNA, 25 bp, Artificial
  probe
  misc_feature (1)..(25): SEQ ID NO: 2285; WAN024COW_at; Start 549; Stop 573
ttttcttggaggagccgtcgtaaca

SEQ ID NO: 127237 - DNA, 25 bp, Artificial
  probe
  misc_feature (1)..(25): SEQ ID NO: 2285; WAN024COW_at; Start 619; Stop 643
cgtcctgaagatgttgaagatgtac

SEQ ID NO: 127238 - DNA, 25 bp, Artificial
  probe
  misc_feature (1)..(25): SEQ ID NO: 2285; WAN024COW_at; Start 512; Stop 536
cctcttctccaaatgttcgacgcaa

SEQ ID NO: 127239 - DNA, 25 bp, Artificial
  probe
  misc_feature (1)..(25): SEQ ID NO: 2285; WAN024COW_at; Start 357; Stop 381
tacccgtattgtctcaatctctgtc

SEQ ID NO: 127240 - DNA, 25 bp, Artificial
  probe
  misc_feature (1)..(25): SEQ ID NO: 2285; WAN024COW_at; Start 657; Stop 681
tttagggctcgttccagatttggac

SEQ ID NO: 127241 - DNA, 25 bp, Artificial
  probe
  misc_feature (1)..(25): SEQ ID NO: 2285; WAN024COW_at; Start 661; Stop 685
gggctcgttccagatttggacaaaa

SEQ ID NO: 127242 - DNA, 25 bp, Artificial
  probe
  misc_feature (1)..(25): SEQ ID NO: 2285; WAN024COW_at; Start 224; Stop 248
gaacatacttggttaaagactatcg

SEQ ID NO: 127243 - DNA, 25 bp, Artificial
  probe
  misc_feature (1)..(25): SEQ ID NO: 2285; WAN024COW_at; Start 525; Stop 549
tgttcgacgcaacaccttgtttggt

SEQ ID NO: 127244 - DNA, 25 bp, Artificial
  probe
  misc_feature (1)..(25): SEQ ID NO: 2285; WAN024COW_at; Start 553; Stop 577
cttggaggagccgtcgtaacagtaa

SEQ ID NO: 127245 - DNA, 25 bp, Artificial
  probe
  misc_feature (1)..(25): SEQ ID NO: 2285; WAN024COW_at; Start 596; Stop 620
agttgctcgacacccgtgtgaaacg

SEQ ID NO: 127246 - DNA, 25 bp, Artificial
  probe
  misc_feature (1)..(25): SEQ ID NO: 2285; WAN024COW_at; Start 220; Stop 244
gcaggaacatacttggttaaagact

SEQ ID NO: 127247 - DNA, 25 bp, Artificial
  probe
  misc_feature (1)..(25): SEQ ID NO: 2285; WAN024COW_at; Start 562; Stop 586
gccgtcgtaacagtaattgctgttc

SEQ ID NO: 127248 - DNA, 25 bp, Artificial
  probe
  misc_feature (1)..(25): SEQ ID NO: 2285; WAN024COW_at; Start 559; Stop 583
ggagccgtcgtaacagtaattgctg

SEQ ID NO: 127249 - DNA, 25 bp, Artificial
  probe
  misc_feature (1)..(25): SEQ ID NO: 2285; WAN024COW_at; Start 419; Stop 443
attctctacgagaagttgctgcaga

SEQ ID NO: 127250 - DNA, 25 bp, Artificial
  probe
  misc_feature (1)..(25): SEQ ID NO: 2285; WAN024COW_at; Start 213; Stop 237
cttgcaggcaggaacatacttggtt

SEQ ID NO: 127251 - DNA, 25 bp, Artificial
  probe
  misc_feature (1)..(25): SEQ ID NO: 2285; WAN024COW_at; Start 433; Stop 457
gttgctgcagaaaagatcgtcgctg

SEQ ID NO: 127252 - DNA, 25 bp, Artificial
  probe
  misc_feature (1)..(25): SEQ ID NO: 2285; WAN024COW_at; Start 423; Stop 447
tctacgagaagttgctgcagaaaag

SEQ ID NO: 127253 - DNA, 25 bp, Artificial
  probe
  misc_feature (1)..(25): SEQ ID NO: 2285; WAN024COW_at; Start 430; Stop 454
gaagttgctgcagaaaagatcgtcg

SEQ ID NO: 127254 - DNA, 25 bp, Artificial
  probe
  misc_feature (1)..(25): SEQ ID NO: 2285; WAN024COW_at; Start 532; Stop 556
cgcaacaccttgtttggttttcttg

SEQ ID NO: 127255 - DNA, 25 bp, Artificial
  probe
  misc_feature (1)..(25): SEQ ID NO: 2285; WAN024COW_at; Start 216; Stop 240
gcaggcaggaacatacttggttaaa

SEQ ID NO: 127256 - DNA, 25 bp, Artificial
  probe
  misc_feature (1)..(25): SEQ ID NO: 2285; WAN024COW_at; Start 631; Stop 655
gttgaagatgtactgcaaattccac

SEQ ID NO: 127257 - DNA, 25 bp, Artificial
  probe
  misc_feature (1)..(25): SEQ ID NO: 2285; WAN024COW_at; Start 519; Stop 543
tccaaatgttcgacgcaacaccttg

SEQ ID NO: 127258 - DNA, 25 bp, Artificial
  probe
  misc_feature (1)..(25): SEQ ID NO: 2285; WAN024COW_at; Start 546; Stop 570
tggttttcttggaggagccgtcgta

SEQ ID NO: 127259 - DNA, 25 bp, Artificial
  probe
  misc_feature (1)..(25): SEQ ID NO: 2285; WAN024COW_at; Start 591; Stop 615
gattgagttgctcgacacccgtgtg

SEQ ID NO: 127260 - DNA, 25 bp, Artificial
  probe
  misc_feature (1)..(25): SEQ ID NO: 2285; WAN024COW_at; Start 436; Stop 460
gctgcagaaaagatcgtcgctgtaa

SEQ ID NO: 127261 - DNA, 25 bp, Artificial
  probe
  misc_feature (1)..(25): SEQ ID NO: 2285; WAN024COW_at; Start 557; Stop 581
gaggagccgtcgtaacagtaattgc

SEQ ID NO: 127262 - DNA, 25 bp, Artificial
  probe
  misc_feature (1)..(25): SEQ ID NO: 1735; WAN024COX_at; Start 244; Stop 268
gactaccgtgagattatcctttcgc

SEQ ID NO: 127263 - DNA, 25 bp, Artificial
  probe
  misc_feature (1)..(25): SEQ ID NO: 1735; WAN024COX_at; Start 553; Stop 577
tttttggcaggggtgattggaacta

SEQ ID NO: 127264 - DNA, 25 bp, Artificial
  probe
  misc_feature (1)..(25): SEQ ID NO: 1735; WAN024COX_at; Start 161; Stop 185
gaatttacgtagtgaatcgcaatca

SEQ ID NO: 127265 - DNA, 25 bp, Artificial
  probe
  misc_feature (1)..(25): SEQ ID NO: 1735; WAN024COX_at; Start 158; Stop 182
cgcgaatttacgtagtgaatcgcaa

SEQ ID NO: 127266 - DNA, 25 bp, Artificial
  probe
  misc_feature (1)..(25): SEQ ID NO: 1735; WAN024COX_at; Start 46; Stop 70
gttaaaagcttgtggaaacgcaagc

SEQ ID NO: 127267 - DNA, 25 bp, Artificial
  probe
  misc_feature (1)..(25): SEQ ID NO: 1735; WAN024COX_at; Start 58; Stop 82
tggaaacgcaagctaatgattttaa

SEQ ID NO: 127268 - DNA, 25 bp, Artificial
  probe
  misc_feature (1)..(25): SEQ ID NO: 1735; WAN024COX_at; Start 381; Stop 405
agttaatgatcgagttcctgaagag

SEQ ID NO: 127269 - DNA, 25 bp, Artificial
  probe
  misc_feature (1)..(25): SEQ ID NO: 1735; WAN024COX_at; Start 56; Stop 80
tgtggaaacgcaagctaatgatttt

SEQ ID NO: 127270 - DNA, 25 bp, Artificial
  probe
  misc_feature (1)..(25): SEQ ID NO: 1735; WAN024COX_at; Start 155; Stop 179
ccacgcgaatttacgtagtgaatcg

SEQ ID NO: 127271 - DNA, 25 bp, Artificial
  probe
  misc_feature (1)..(25): SEQ ID NO: 1735; WAN024COX_at; Start 67; Stop 91
aagctaatgattttaatagtggcac

SEQ ID NO: 127272 - DNA, 25 bp, Artificial
  probe
  misc_feature (1)..(25): SEQ ID NO: 1735; WAN024COX_at; Start 54; Stop 78
cttgtggaaacgcaagctaatgatt

SEQ ID NO: 127273 - DNA, 25 bp, Artificial
  probe
  misc_feature (1)..(25): SEQ ID NO: 1735; WAN024COX_at; Start 564; Stop 588
ggtgattggaactagtgttatagtt

SEQ ID NO: 127274 - DNA, 25 bp, Artificial
  probe
  misc_feature (1)..(25): SEQ ID NO: 1735; WAN024COX_at; Start 51; Stop 75
aagcttgtggaaacgcaagctaatg

SEQ ID NO: 127275 - DNA, 25 bp, Artificial
  probe
  misc_feature (1)..(25): SEQ ID NO: 1735; WAN024COX_at; Start 70; Stop 94
ctaatgattttaatagtggcacttg

SEQ ID NO: 127276 - DNA, 25 bp, Artificial
  probe
  misc_feature (1)..(25): SEQ ID NO: 1735; WAN024COX_at; Start 166; Stop 190
tacgtagtgaatcgcaatcaaggag

SEQ ID NO: 127277 - DNA, 25 bp, Artificial
  probe
  misc_feature (1)..(25): SEQ ID NO: 1735; WAN024COX_at; Start 60; Stop 84
gaaacgcaagctaatgattttaata

SEQ ID NO: 127278 - DNA, 25 bp, Artificial
  probe
  misc_feature (1)..(25): SEQ ID NO: 1735; WAN024COX_at; Start 240; Stop 264
aaaagactaccgtgagattatcctt

SEQ ID NO: 127279 - DNA, 25 bp, Artificial
  probe
  misc_feature (1)..(25): SEQ ID NO: 1735; WAN024COX_at; Start 236; Stop 260
tggtaaaagactaccgtgagattat

SEQ ID NO: 127280 - DNA, 25 bp, Artificial
  probe
  misc_feature (1)..(25): SEQ ID NO: 1735; WAN024COX_at; Start 65; Stop 89
gcaagctaatgattttaatagtggc

SEQ ID NO: 127281 - DNA, 25 bp, Artificial
  probe
  misc_feature (1)..(25): SEQ ID NO: 1735; WAN024COX_at; Start 160; Stop 184
cgaatttacgtagtgaatcgcaatc

SEQ ID NO: 127282 - DNA, 25 bp, Artificial
  probe
  misc_feature (1)..(25): SEQ ID NO: 1735; WAN024COX_at; Start 89; Stop 113
cacttgtgacaggtgcgggggcttt

SEQ ID NO: 127283 - DNA, 25 bp, Artificial
  probe
  misc_feature (1)..(25): SEQ ID NO: 1735; WAN024COX_at; Start 170; Stop 194
tagtgaatcgcaatcaaggagacaa

SEQ ID NO: 127284 - DNA, 25 bp, Artificial
  probe
  misc_feature (1)..(25): SEQ ID NO: 1735; WAN024COX_at; Start 48; Stop 72
taaaagcttgtggaaacgcaagcta

SEQ ID NO: 127285 - DNA, 25 bp, Artificial
  probe
  misc_feature (1)..(25): SEQ ID NO: 1735; WAN024COX_at; Start 156; Stop 180
cacgcgaatttacgtagtgaatcgc

SEQ ID NO: 127286 - DNA, 25 bp, Artificial
  probe
  misc_feature (1)..(25): SEQ ID NO: 1735; WAN024COX_at; Start 249; Stop 273
ccgtgagattatcctttcgcaggat

SEQ ID NO: 127287 - DNA, 25 bp, Artificial
  probe
  misc_feature (1)..(25): SEQ ID NO: 1735; WAN024COX_at; Start 168; Stop 192
cgtagtgaatcgcaatcaaggagac

SEQ ID NO: 127288 - DNA, 25 bp, Artificial
  probe
  misc_feature (1)..(25): SEQ ID NO: 1735; WAN024COX_at; Start 380; Stop 404
cagttaatgatcgagttcctgaaga

SEQ ID NO: 127289 - DNA, 25 bp, Artificial
  probe
  misc_feature (1)..(25): SEQ ID NO: 1735; WAN024COX_at; Start 248; Stop 272
accgtgagattatcctttcgcagga

SEQ ID NO: 127290 - DNA, 25 bp, Artificial
  probe
  misc_feature (1)..(25): SEQ ID NO: 1735; WAN024COX_at; Start 44; Stop 68
tagttaaaagcttgtggaaacgcaa

SEQ ID NO: 127291 - DNA, 25 bp, Artificial
  probe
  misc_feature (1)..(25): SEQ ID NO: 1735; WAN024COX_at; Start 37; Stop 61
tttcaattagttaaaagcttgtgga

SEQ ID NO: 127292 - DNA, 25 bp, Artificial
  probe
  misc_feature (1)..(25): SEQ ID NO: 1735; WAN024COX_at; Start 43; Stop 67
ttagttaaaagcttgtggaaacgca

SEQ ID NO: 127293 - DNA, 25 bp, Artificial
  probe
  misc_feature (1)..(25): SEQ ID NO: 1735; WAN024COX_at; Start 164; Stop 188
tttacgtagtgaatcgcaatcaagg

SEQ ID NO: 127294 - DNA, 25 bp, Artificial
  probe
  misc_feature (1)..(25): SEQ ID NO: 1735; WAN024COX_at; Start 171; Stop 195
agtgaatcgcaatcaaggagacaag

SEQ ID NO: 127295 - DNA, 25 bp, Artificial
  probe
  misc_feature (1)..(25): SEQ ID NO: 1735; WAN024COX_at; Start 247; Stop 271
taccgtgagattatcctttcgcagg

SEQ ID NO: 127296 - DNA, 25 bp, Artificial
  probe
  misc_feature (1)..(25): SEQ ID NO: 6913; WAN024COY_at; Start 109; Stop 133
ggctgcaactactgcttgatcgtta

SEQ ID NO: 127297 - DNA, 25 bp, Artificial
  probe
  misc_feature (1)..(25): SEQ ID NO: 6913; WAN024COY_at; Start 118; Stop 142
tactgcttgatcgttagaaccaccc

SEQ ID NO: 127298 - DNA, 25 bp, Artificial
  probe
  misc_feature (1)..(25): SEQ ID NO: 6913; WAN024COY_at; Start 162; Stop 186
cctgcttctgacgtttaatctcttc

SEQ ID NO: 127299 - DNA, 25 bp, Artificial
  probe
  misc_feature (1)..(25): SEQ ID NO: 6913; WAN024COY_at; Start 267; Stop 291
ccttgatttcattgacaatgtctga

SEQ ID NO: 127300 - DNA, 25 bp, Artificial
  probe
  misc_feature (1)..(25): SEQ ID NO: 6913; WAN024COY_at; Start 5; Stop 29
taatggtcgccgtgaggaacgatat

SEQ ID NO: 127301 - DNA, 25 bp, Artificial
  probe
  misc_feature (1)..(25): SEQ ID NO: 6913; WAN024COY_at; Start 90; Stop 114
tatagcgtccttgggctctggctgc

SEQ ID NO: 127302 - DNA, 25 bp, Artificial
  probe
  misc_feature (1)..(25): SEQ ID NO: 6913; WAN024COY_at; Start 48; Stop 72
caatgatatcagatgcattgaagat

SEQ ID NO: 127303 - DNA, 25 bp, Artificial
  probe
  misc_feature (1)..(25): SEQ ID NO: 6913; WAN024COY_at; Start 103; Stop 127
ggctctggctgcaactactgcttga

SEQ ID NO: 127304 - DNA, 25 bp, Artificial
  probe
  misc_feature (1)..(25): SEQ ID NO: 6913; WAN024COY_at; Start 156; Stop 180
tgtgttcctgcttctgacgtttaat

SEQ ID NO: 127305 - DNA, 25 bp, Artificial
  probe
  misc_feature (1)..(25): SEQ ID NO: 6913; WAN024COY_at; Start 80; Stop 104
tcatccgttgtatagcgtccttggg

SEQ ID NO: 127306 - DNA, 25 bp, Artificial
  probe
  misc_feature (1)..(25): SEQ ID NO: 6913; WAN024COY_at; Start 185; Stop 209
tcttttgtccgaatattatccgcat

SEQ ID NO: 127307 - DNA, 25 bp, Artificial
  probe
  misc_feature (1)..(25): SEQ ID NO: 6913; WAN024COY_at; Start 84; Stop 108
ccgttgtatagcgtccttgggctct

SEQ ID NO: 127308 - DNA, 25 bp, Artificial
  probe
  misc_feature (1)..(25): SEQ ID NO: 6913; WAN024COY_at; Start 36; Stop 60
cacccgtgtcctcaatgatatcaga

SEQ ID NO: 127309 - DNA, 25 bp, Artificial
  probe
  misc_feature (1)..(25): SEQ ID NO: 6913; WAN024COY_at; Start 153; Stop 177
gactgtgttcctgcttctgacgttt

SEQ ID NO: 127310 - DNA, 25 bp, Artificial
  probe
  misc_feature (1)..(25): SEQ ID NO: 6913; WAN024COY_at; Start 150; Stop 174
tatgactgtgttcctgcttctgacg

SEQ ID NO: 127311 - DNA, 25 bp, Artificial
  probe
  misc_feature (1)..(25): SEQ ID NO: 6913; WAN024COY_at; Start 106; Stop 130
tctggctgcaactactgcttgatcg

SEQ ID NO: 127312 - DNA, 25 bp, Artificial
  probe
  misc_feature (1)..(25): SEQ ID NO: 6913; WAN024COY_at; Start 40; Stop 64
cgtgtcctcaatgatatcagatgca

SEQ ID NO: 127313 - DNA, 25 bp, Artificial
  probe
  misc_feature (1)..(25): SEQ ID NO: 6913; WAN024COY_at; Start 170; Stop 194
tgacgtttaatctcttcttttgtcc

SEQ ID NO: 127314 - DNA, 25 bp, Artificial
  probe
  misc_feature (1)..(25): SEQ ID NO: 6913; WAN024COY_at; Start 192; Stop 216
tccgaatattatccgcatgagctgc

SEQ ID NO: 127315 - DNA, 25 bp, Artificial
  probe
  misc_feature (1)..(25): SEQ ID NO: 6913; WAN024COY_at; Start 99; Stop 123
cttgggctctggctgcaactactgc

SEQ ID NO: 127316 - DNA, 25 bp, Artificial
  probe
  misc_feature (1)..(25): SEQ ID NO: 6913; WAN024COY_at; Start 143; Stop 167
ccgtgattatgactgtgttcctgct

SEQ ID NO: 127317 - DNA, 25 bp, Artificial
  probe
  misc_feature (1)..(25): SEQ ID NO: 6913; WAN024COY_at; Start 32; Stop 56
gcatcacccgtgtcctcaatgatat

SEQ ID NO: 127318 - DNA, 25 bp, Artificial
  probe
  misc_feature (1)..(25): SEQ ID NO: 6913; WAN024COY_at; Start 7; Stop 31
atggtcgccgtgaggaacgatataa

SEQ ID NO: 127319 - DNA, 25 bp, Artificial
  probe
  misc_feature (1)..(25): SEQ ID NO: 6913; WAN024COY_at; Start 256; Stop 280
aacataaccacccttgatttcattg

SEQ ID NO: 127320 - DNA, 25 bp, Artificial
  probe
  misc_feature (1)..(25): SEQ ID NO: 6913; WAN024COY_at; Start 29; Stop 53
taagcatcacccgtgtcctcaatga

SEQ ID NO: 127321 - DNA, 25 bp, Artificial
  probe
  misc_feature (1)..(25): SEQ ID NO: 6913; WAN024COY_at; Start 201; Stop 225
tatccgcatgagctgcatccttaag

SEQ ID NO: 127322 - DNA, 25 bp, Artificial
  probe
  misc_feature (1)..(25): SEQ ID NO: 6913; WAN024COY_at; Start 114; Stop 138
caactactgcttgatcgttagaacc

SEQ ID NO: 127323 - DNA, 25 bp, Artificial
  probe
  misc_feature (1)..(25): SEQ ID NO: 6913; WAN024COY_at; Start 125; Stop 149
tgatcgttagaaccacccccgtgat

SEQ ID NO: 127324 - DNA, 25 bp, Artificial
  probe
  misc_feature (1)..(25): SEQ ID NO: 6913; WAN024COY_at; Start 95; Stop 119
cgtccttgggctctggctgcaacta

SEQ ID NO: 127325 - DNA, 25 bp, Artificial
  probe
  misc_feature (1)..(25): SEQ ID NO: 6913; WAN024COY_at; Start 141; Stop 165
ccccgtgattatgactgtgttcctg

SEQ ID NO: 127326 - DNA, 25 bp, Artificial
  probe
  misc_feature (1)..(25): SEQ ID NO: 6913; WAN024COY_at; Start 205; Stop 229
cgcatgagctgcatccttaaggtaa

SEQ ID NO: 127327 - DNA, 25 bp, Artificial
  probe
  misc_feature (1)..(25): SEQ ID NO: 6913; WAN024COY_at; Start 25; Stop 49
gatataagcatcacccgtgtcctca

SEQ ID NO: 127328 - DNA, 25 bp, Artificial
  probe
  misc_feature (1)..(25): SEQ ID NO: 6913; WAN024COY_at; Start 196; Stop 220
aatattatccgcatgagctgcatcc

SEQ ID NO: 127329 - DNA, 25 bp, Artificial
  probe
  misc_feature (1)..(25): SEQ ID NO: 6913; WAN024COY_at; Start 251; Stop 275
ttgataacataaccacccttgattt

SEQ ID NO: 127330 - DNA, 25 bp, Artificial
  probe
  misc_feature (1)..(25): SEQ ID NO: 7618; WAN024COZ_at; Start 140; Stop 164
gctttgcggtttctcttctcgaggg

SEQ ID NO: 127331 - DNA, 25 bp, Artificial
  probe
  misc_feature (1)..(25): SEQ ID NO: 7618; WAN024COZ_at; Start 83; Stop 107
tgattcctctggtgattcttctggt

SEQ ID NO: 127332 - DNA, 25 bp, Artificial
  probe
  misc_feature (1)..(25): SEQ ID NO: 7618; WAN024COZ_at; Start 90; Stop 114
tctggtgattcttctggttcctctg

SEQ ID NO: 127333 - DNA, 25 bp, Artificial
  probe
  misc_feature (1)..(25): SEQ ID NO: 7618; WAN024COZ_at; Start 187; Stop 211
tctgaggtttctcctcgcttggttt

SEQ ID NO: 127334 - DNA, 25 bp, Artificial
  probe
  misc_feature (1)..(25): SEQ ID NO: 7618; WAN024COZ_at; Start 73; Stop 97
gaggttcttctgattcctctggtga

SEQ ID NO: 127335 - DNA, 25 bp, Artificial
  probe
  misc_feature (1)..(25): SEQ ID NO: 7618; WAN024COZ_at; Start 52; Stop 76
caaccttttcagtctcgacctgagg

SEQ ID NO: 127336 - DNA, 25 bp, Artificial
  probe
  misc_feature (1)..(25): SEQ ID NO: 7618; WAN024COZ_at; Start 219; Stop 243
tgattggtatcagcttgaccatttt

SEQ ID NO: 127337 - DNA, 25 bp, Artificial
  probe
  misc_feature (1)..(25): SEQ ID NO: 7618; WAN024COZ_at; Start 11; Stop 35
gatttttccaagtaaatcttcagcc

SEQ ID NO: 127338 - DNA, 25 bp, Artificial
  probe
  misc_feature (1)..(25): SEQ ID NO: 7618; WAN024COZ_at; Start 175; Stop 199
caggtttttctgtctgaggtttctc

SEQ ID NO: 127339 - DNA, 25 bp, Artificial
  probe
  misc_feature (1)..(25): SEQ ID NO: 7618; WAN024COZ_at; Start 19; Stop 43
caagtaaatcttcagcctctctcag

SEQ ID NO: 127340 - DNA, 25 bp, Artificial
  probe
  misc_feature (1)..(25): SEQ ID NO: 7618; WAN024COZ_at; Start 75; Stop 99
ggttcttctgattcctctggtgatt

SEQ ID NO: 127341 - DNA, 25 bp, Artificial
  probe
  misc_feature (1)..(25): SEQ ID NO: 7618; WAN024COZ_at; Start 2; Stop 26
tggatcctggatttttccaagtaaa

SEQ ID NO: 127342 - DNA, 25 bp, Artificial
  probe
  misc_feature (1)..(25): SEQ ID NO: 7618; WAN024COZ_at; Start 96; Stop 120
gattcttctggttcctctgttggtt

SEQ ID NO: 127343 - DNA, 25 bp, Artificial
  probe
  misc_feature (1)..(25): SEQ ID NO: 7618; WAN024COZ_at; Start 45; Stop 69
ttttcttcaaccttttcagtctcga

SEQ ID NO: 127344 - DNA, 25 bp, Artificial
  probe
  misc_feature (1)..(25): SEQ ID NO: 7618; WAN024COZ_at; Start 231; Stop 255
gcttgaccatttttgtttctttgaa

SEQ ID NO: 127345 - DNA, 25 bp, Artificial
  probe
  misc_feature (1)..(25): SEQ ID NO: 7618; WAN024COZ_at; Start 117; Stop 141
ggttttggagactctggtttctcgc

SEQ ID NO: 127346 - DNA, 25 bp, Artificial
  probe
  misc_feature (1)..(25): SEQ ID NO: 7618; WAN024COZ_at; Start 178; Stop 202
gtttttctgtctgaggtttctcctc

SEQ ID NO: 127347 - DNA, 25 bp, Artificial
  probe
  misc_feature (1)..(25): SEQ ID NO: 7618; WAN024COZ_at; Start 21; Stop 45
agtaaatcttcagcctctctcagtt

SEQ ID NO: 127348 - DNA, 25 bp, Artificial
  probe
  misc_feature (1)..(25): SEQ ID NO: 7618; WAN024COZ_at; Start 109; Stop 133
cctctgttggttttggagactctgg

SEQ ID NO: 127349 - DNA, 25 bp, Artificial
  probe
  misc_feature (1)..(25): SEQ ID NO: 7618; WAN024COZ_at; Start 153; Stop 177
tcttctcgaggggtttcttcctcag

SEQ ID NO: 127350 - DNA, 25 bp, Artificial
  probe
  misc_feature (1)..(25): SEQ ID NO: 7618; WAN024COZ_at; Start 168; Stop 192
tcttcctcaggtttttctgtctgag

SEQ ID NO: 127351 - DNA, 25 bp, Artificial
  probe
  misc_feature (1)..(25): SEQ ID NO: 7618; WAN024COZ_at; Start 185; Stop 209
tgtctgaggtttctcctcgcttggt

SEQ ID NO: 127352 - DNA, 25 bp, Artificial
  probe
  misc_feature (1)..(25): SEQ ID NO: 7618; WAN024COZ_at; Start 214; Stop 238
ccgtttgattggtatcagcttgacc

SEQ ID NO: 127353 - DNA, 25 bp, Artificial
  probe
  misc_feature (1)..(25): SEQ ID NO: 7618; WAN024COZ_at; Start 66; Stop 90
tcgacctgaggttcttctgattcct

SEQ ID NO: 127354 - DNA, 25 bp, Artificial
  probe
  misc_feature (1)..(25): SEQ ID NO: 7618; WAN024COZ_at; Start 103; Stop 127
ctggttcctctgttggttttggaga

SEQ ID NO: 127355 - DNA, 25 bp, Artificial
  probe
  misc_feature (1)..(25): SEQ ID NO: 7618; WAN024COZ_at; Start 30; Stop 54
tcagcctctctcagtttttcttcaa

SEQ ID NO: 127356 - DNA, 25 bp, Artificial
  probe
  misc_feature (1)..(25): SEQ ID NO: 7618; WAN024COZ_at; Start 243; Stop 267
ttgtttctttgaacatggtcgctag

SEQ ID NO: 127357 - DNA, 25 bp, Artificial
  probe
  misc_feature (1)..(25): SEQ ID NO: 7618; WAN024COZ_at; Start 87; Stop 111
tcctctggtgattcttctggttcct

SEQ ID NO: 127358 - DNA, 25 bp, Artificial
  probe
  misc_feature (1)..(25): SEQ ID NO: 7618; WAN024COZ_at; Start 124; Stop 148
gagactctggtttctcgctttgcgg

SEQ ID NO: 127359 - DNA, 25 bp, Artificial
  probe
  misc_feature (1)..(25): SEQ ID NO: 7618; WAN024COZ_at; Start 126; Stop 150
gactctggtttctcgctttgcggtt

SEQ ID NO: 127360 - DNA, 25 bp, Artificial
  probe
  misc_feature (1)..(25): SEQ ID NO: 7618; WAN024COZ_at; Start 61; Stop 85
cagtctcgacctgaggttcttctga

SEQ ID NO: 127361 - DNA, 25 bp, Artificial
  probe
  misc_feature (1)..(25): SEQ ID NO: 7618; WAN024COZ_at; Start 58; Stop 82
tttcagtctcgacctgaggttcttc

SEQ ID NO: 127362 - DNA, 25 bp, Artificial
  probe
  misc_feature (1)..(25): SEQ ID NO: 7618; WAN024COZ_at; Start 225; Stop 249
gtatcagcttgaccatttttgtttc

SEQ ID NO: 127363 - DNA, 25 bp, Artificial
  probe
  misc_feature (1)..(25): SEQ ID NO: 7618; WAN024COZ_at; Start 200; Stop 224
ctcgcttggtttttccgtttgattg

SEQ ID NO: 127364 - DNA, 25 bp, Artificial
  probe
  misc_feature (1)..(25): SEQ ID NO: 6270; WAN024CP2_at; Start 282; Stop 306
tttgatgcgctctttagtgaagagc

SEQ ID NO: 127365 - DNA, 25 bp, Artificial
  probe
  misc_feature (1)..(25): SEQ ID NO: 6270; WAN024CP2_at; Start 135; Stop 159
gacactaagaagactgaaaatttga

SEQ ID NO: 127366 - DNA, 25 bp, Artificial
  probe
  misc_feature (1)..(25): SEQ ID NO: 6270; WAN024CP2_at; Start 36; Stop 60
gttatcctttccttaagtctgtgtg

SEQ ID NO: 127367 - DNA, 25 bp, Artificial
  probe
  misc_feature (1)..(25): SEQ ID NO: 6270; WAN024CP2_at; Start 218; Stop 242
tacagatcaaggttatgtaacttct

SEQ ID NO: 127368 - DNA, 25 bp, Artificial
  probe
  misc_feature (1)..(25): SEQ ID NO: 6270; WAN024CP2_at; Start 332; Stop 356
gccgaaagatcaagatatcgtcagt

SEQ ID NO: 127369 - DNA, 25 bp, Artificial
  probe
  misc_feature (1)..(25): SEQ ID NO: 6270; WAN024CP2_at; Start 514; Stop 538
tagcaaaattacagggacgttatac

SEQ ID NO: 127370 - DNA, 25 bp, Artificial
  probe
  misc_feature (1)..(25): SEQ ID NO: 6270; WAN024CP2_at; Start 405; Stop 429
taccttaaagatcaagctcatgcag

SEQ ID NO: 127371 - DNA, 25 bp, Artificial
  probe
  misc_feature (1)..(25): SEQ ID NO: 6270; WAN024CP2_at; Start 323; Stop 347
caactatcagccgaaagatcaagat

SEQ ID NO: 127372 - DNA, 25 bp, Artificial
  probe
  misc_feature (1)..(25): SEQ ID NO: 6270; WAN024CP2_at; Start 417; Stop 441
caagctcatgcagaaaatgtacgaa

SEQ ID NO: 127373 - DNA, 25 bp, Artificial
  probe
  misc_feature (1)..(25): SEQ ID NO: 6270; WAN024CP2_at; Start 488; Stop 512
taaaggagctagtgcagaagtatct

SEQ ID NO: 127374 - DNA, 25 bp, Artificial
  probe
  misc_feature (1)..(25): SEQ ID NO: 6270; WAN024CP2_at; Start 474; Stop 498
catggtaaagacgataaaggagcta

SEQ ID NO: 127375 - DNA, 25 bp, Artificial
  probe
  misc_feature (1)..(25): SEQ ID NO: 6270; WAN024CP2_at; Start 66; Stop 90
gctctgaaccaacatagctaacagg

SEQ ID NO: 127376 - DNA, 25 bp, Artificial
  probe
  misc_feature (1)..(25): SEQ ID NO: 6270; WAN024CP2_at; Start 163; Stop 187
cagactaggttagtcaaaaagaagg

SEQ ID NO: 127377 - DNA, 25 bp, Artificial
  probe
  misc_feature (1)..(25): SEQ ID NO: 6270; WAN024CP2_at; Start 150; Stop 174
gaaaatttgactccagactaggtta

SEQ ID NO: 127378 - DNA, 25 bp, Artificial
  probe
  misc_feature (1)..(25): SEQ ID NO: 6270; WAN024CP2_at; Start 267; Stop 291
aatggtaaagttccttttgatgcgc

SEQ ID NO: 127379 - DNA, 25 bp, Artificial
  probe
  misc_feature (1)..(25): SEQ ID NO: 6270; WAN024CP2_at; Start 561; Stop 585
tgagttgaatttagaatagcacatc

SEQ ID NO: 127380 - DNA, 25 bp, Artificial
  probe
  misc_feature (1)..(25): SEQ ID NO: 6270; WAN024CP2_at; Start 51; Stop 75
agtctgtgtgtttatgctctgaacc

SEQ ID NO: 127381 - DNA, 25 bp, Artificial
  probe
  misc_feature (1)..(25): SEQ ID NO: 6270; WAN024CP2_at; Start 426; Stop 450
gcagaaaatgtacgaacaaaagatg

SEQ ID NO: 127382 - DNA, 25 bp, Artificial
  probe
  misc_feature (1)..(25): SEQ ID NO: 6270; WAN024CP2_at; Start 243; Stop 267
catggcgatcattatcactactata

SEQ ID NO: 127383 - DNA, 25 bp, Artificial
  probe
  misc_feature (1)..(25): SEQ ID NO: 6270; WAN024CP2_at; Start 501; Stop 525
gcagaagtatctgtagcaaaattac

SEQ ID NO: 127384 - DNA, 25 bp, Artificial
  probe
  misc_feature (1)..(25): SEQ ID NO: 6270; WAN024CP2_at; Start 525; Stop 549
cagggacgttatactaccgatgatg

SEQ ID NO: 127385 - DNA, 25 bp, Artificial
  probe
  misc_feature (1)..(25): SEQ ID NO: 6270; WAN024CP2_at; Start 87; Stop 111
caggccaatacagataaaaatcgtg

SEQ ID NO: 127386 - DNA, 25 bp, Artificial
  probe
  misc_feature (1)..(25): SEQ ID NO: 6270; WAN024CP2_at; Start 80; Stop 104
tagctaacaggccaatacagataaa

SEQ ID NO: 127387 - DNA, 25 bp, Artificial
  probe
  misc_feature (1)..(25): SEQ ID NO: 6270; WAN024CP2_at; Start 347; Stop 371
tatcgtcagttaggttaagggagga

SEQ ID NO: 127388 - DNA, 25 bp, Artificial
  probe
  misc_feature (1)..(25): SEQ ID NO: 6270; WAN024CP2_at; Start 541; Stop 565
ccgatgatggttatatatagtgagt

SEQ ID NO: 127389 - DNA, 25 bp, Artificial
  probe
  misc_feature (1)..(25): SEQ ID NO: 6270; WAN024CP2_at; Start 183; Stop 207
gaaggaattcaagcaaaacaaattg

SEQ ID NO: 127390 - DNA, 25 bp, Artificial
  probe
  misc_feature (1)..(25): SEQ ID NO: 6270; WAN024CP2_at; Start 228; Stop 252
ggttatgtaacttctcatggcgatc

SEQ ID NO: 127391 - DNA, 25 bp, Artificial
  probe
  misc_feature (1)..(25): SEQ ID NO: 6270; WAN024CP2_at; Start 19; Stop 43
tagcagctggatctgttgttatcct

SEQ ID NO: 127392 - DNA, 25 bp, Artificial
  probe
  misc_feature (1)..(25): SEQ ID NO: 6270; WAN024CP2_at; Start 101; Stop 125
taaaaatcgtgtttcatatgtaaac

SEQ ID NO: 127393 - DNA, 25 bp, Artificial
  probe
  misc_feature (1)..(25): SEQ ID NO: 6270; WAN024CP2_at; Start 464; Stop 488
aaaacaagaacatggtaaagacgat

SEQ ID NO: 127394 - DNA, 25 bp, Artificial
  probe
  misc_feature (1)..(25): SEQ ID NO: 6270; WAN024CP2_at; Start 119; Stop 143
tgtaaacagtaataaagacactaag

SEQ ID NO: 127395 - DNA, 25 bp, Artificial
  probe
  misc_feature (1)..(25): SEQ ID NO: 6270; WAN024CP2_at; Start 579; Stop 603
gcacatcatagtttctaaatcattg

SEQ ID NO: 127396 - DNA, 25 bp, Artificial
  probe
  misc_feature (1)..(25): SEQ ID NO: 6270; WAN024CP2_at; Start 362; Stop 386
taagggaggatatattattaaggta

SEQ ID NO: 127397 - DNA, 25 bp, Artificial
  probe
  misc_feature (1)..(25): SEQ ID NO: 6270; WAN024CP2_at; Start 298; Stop 322
gtgaagagctattaatgaaagcccc

SEQ ID NO: 127398 - DNA, 25 bp, Artificial
  probe
  misc_feature (1)..(25): SEQ ID NO: 2627; WAN024CP3_at; Start 257; Stop 281
ttgataacatatccacccttgacct

SEQ ID NO: 127399 - DNA, 25 bp, Artificial
  probe
  misc_feature (1)..(25): SEQ ID NO: 2627; WAN024CP3_at; Start 92; Stop 116
tagcgtccttgcgaacgtgccaagg

SEQ ID NO: 127400 - DNA, 25 bp, Artificial
  probe
  misc_feature (1)..(25): SEQ ID NO: 2627; WAN024CP3_at; Start 49; Stop 73
tatgatatcagaagcattaaagata

SEQ ID NO: 127401 - DNA, 25 bp, Artificial
  probe
  misc_feature (1)..(25): SEQ ID NO: 2627; WAN024CP3_at; Start 81; Stop 105
catctgtagtatagcgtccttgcga

SEQ ID NO: 127402 - DNA, 25 bp, Artificial
  probe
  misc_feature (1)..(25): SEQ ID NO: 2627; WAN024CP3_at; Start 282; Stop 306
cattaacaatatcctcatcttttag

SEQ ID NO: 127403 - DNA, 25 bp, Artificial
  probe
  misc_feature (1)..(25): SEQ ID NO: 2627; WAN024CP3_at; Start 259; Stop 283
gataacatatccacccttgacctca

SEQ ID NO: 127404 - DNA, 25 bp, Artificial
  probe
  misc_feature (1)..(25): SEQ ID NO: 2627; WAN024CP3_at; Start 115; Stop 139
ggcaacagcaccatcgtttcttgga

SEQ ID NO: 127405 - DNA, 25 bp, Artificial
  probe
  misc_feature (1)..(25): SEQ ID NO: 2627; WAN024CP3_at; Start 39; Stop 63
cagtatcctctatgatatcagaagc

SEQ ID NO: 127406 - DNA, 25 bp, Artificial
  probe
  misc_feature (1)..(25): SEQ ID NO: 2627; WAN024CP3_at; Start 80; Stop 104
tcatctgtagtatagcgtccttgcg

SEQ ID NO: 127407 - DNA, 25 bp, Artificial
  probe
  misc_feature (1)..(25): SEQ ID NO: 2627; WAN024CP3_at; Start 209; Stop 233
tccgcgtgggcagcatccttaaggt

SEQ ID NO: 127408 - DNA, 25 bp, Artificial
  probe
  misc_feature (1)..(25): SEQ ID NO: 2627; WAN024CP3_at; Start 109; Stop 133
tgccaaggcaacagcaccatcgttt

SEQ ID NO: 127409 - DNA, 25 bp, Artificial
  probe
  misc_feature (1)..(25): SEQ ID NO: 2627; WAN024CP3_at; Start 111; Stop 135
ccaaggcaacagcaccatcgtttct

SEQ ID NO: 127410 - DNA, 25 bp, Artificial
  probe
  misc_feature (1)..(25): SEQ ID NO: 2627; WAN024CP3_at; Start 87; Stop 111
tagtatagcgtccttgcgaacgtgc

SEQ ID NO: 127411 - DNA, 25 bp, Artificial
  probe
  misc_feature (1)..(25): SEQ ID NO: 2627; WAN024CP3_at; Start 97; Stop 121
tccttgcgaacgtgccaaggcaaca

SEQ ID NO: 127412 - DNA, 25 bp, Artificial
  probe
  misc_feature (1)..(25): SEQ ID NO: 2627; WAN024CP3_at; Start 266; Stop 290
tatccacccttgacctcattaacaa

SEQ ID NO: 127413 - DNA, 25 bp, Artificial
  probe
  misc_feature (1)..(25): SEQ ID NO: 2627; WAN024CP3_at; Start 211; Stop 235
cgcgtgggcagcatccttaaggtaa

SEQ ID NO: 127414 - DNA, 25 bp, Artificial
  probe
  misc_feature (1)..(25): SEQ ID NO: 2627; WAN024CP3_at; Start 94; Stop 118
gcgtccttgcgaacgtgccaaggca

SEQ ID NO: 127415 - DNA, 25 bp, Artificial
  probe
  misc_feature (1)..(25): SEQ ID NO: 2627; WAN024CP3_at; Start 105; Stop 129
aacgtgccaaggcaacagcaccatc

SEQ ID NO: 127416 - DNA, 25 bp, Artificial
  probe
  misc_feature (1)..(25): SEQ ID NO: 2627; WAN024CP3_at; Start 44; Stop 68
tcctctatgatatcagaagcattaa

SEQ ID NO: 127417 - DNA, 25 bp, Artificial
  probe
  misc_feature (1)..(25): SEQ ID NO: 2627; WAN024CP3_at; Start 179; Stop 203
cgattgatttcctcttttgtacgga

SEQ ID NO: 127418 - DNA, 25 bp, Artificial
  probe
  misc_feature (1)..(25): SEQ ID NO: 2627; WAN024CP3_at; Start 203; Stop 227
acgttatccgcgtgggcagcatcct

SEQ ID NO: 127419 - DNA, 25 bp, Artificial
  probe
  misc_feature (1)..(25): SEQ ID NO: 2627; WAN024CP3_at; Start 6; Stop 30
aatgatctccatgaggaacgatata

SEQ ID NO: 127420 - DNA, 25 bp, Artificial
  probe
  misc_feature (1)..(25): SEQ ID NO: 2627; WAN024CP3_at; Start 29; Stop 53
taagcatcaccagtatcctctatga

SEQ ID NO: 127421 - DNA, 25 bp, Artificial
  probe
  misc_feature (1)..(25): SEQ ID NO: 2627; WAN024CP3_at; Start 85; Stop 109
tgtagtatagcgtccttgcgaacgt

SEQ ID NO: 127422 - DNA, 25 bp, Artificial
  probe
  misc_feature (1)..(25): SEQ ID NO: 2627; WAN024CP3_at; Start 196; Stop 220
tgtacggacgttatccgcgtgggca

SEQ ID NO: 127423 - DNA, 25 bp, Artificial
  probe
  misc_feature (1)..(25): SEQ ID NO: 2627; WAN024CP3_at; Start 90; Stop 114
tatagcgtccttgcgaacgtgccaa

SEQ ID NO: 127424 - DNA, 25 bp, Artificial
  probe
  misc_feature (1)..(25): SEQ ID NO: 2627; WAN024CP3_at; Start 192; Stop 216
cttttgtacggacgttatccgcgtg

SEQ ID NO: 127425 - DNA, 25 bp, Artificial
  probe
  misc_feature (1)..(25): SEQ ID NO: 2627; WAN024CP3_at; Start 117; Stop 141
caacagcaccatcgtttcttggagt

SEQ ID NO: 127426 - DNA, 25 bp, Artificial
  probe
  misc_feature (1)..(25): SEQ ID NO: 2627; WAN024CP3_at; Start 190; Stop 214
ctcttttgtacggacgttatccgcg

SEQ ID NO: 127427 - DNA, 25 bp, Artificial
  probe
  misc_feature (1)..(25): SEQ ID NO: 2627; WAN024CP3_at; Start 2; Stop 26
tggtaatgatctccatgaggaacga

SEQ ID NO: 127428 - DNA, 25 bp, Artificial
  probe
  misc_feature (1)..(25): SEQ ID NO: 2627; WAN024CP3_at; Start 181; Stop 205
attgatttcctcttttgtacggacg

SEQ ID NO: 127429 - DNA, 25 bp, Artificial
  probe
  misc_feature (1)..(25): SEQ ID NO: 2627; WAN024CP3_at; Start 101; Stop 125
tgcgaacgtgccaaggcaacagcac

SEQ ID NO: 127430 - DNA, 25 bp, Artificial
  probe
  misc_feature (1)..(25): SEQ ID NO: 2627; WAN024CP3_at; Start 25; Stop 49
gatataagcatcaccagtatcctct

SEQ ID NO: 127431 - DNA, 25 bp, Artificial
  probe
  misc_feature (1)..(25): SEQ ID NO: 2627; WAN024CP3_at; Start 35; Stop 59
tcaccagtatcctctatgatatcag

SEQ ID NO: 127432 - DNA, 25 bp, Artificial
  probe
  misc_feature (1)..(25): SEQ ID NO: 1578; WAN024CP4_at; Start 301; Stop 325
caagagttcttcactaaagagggca

SEQ ID NO: 127433 - DNA, 25 bp, Artificial
  probe
  misc_feature (1)..(25): SEQ ID NO: 1578; WAN024CP4_at; Start 186; Stop 210
catgagctgcatctttcaggtagac

SEQ ID NO: 127434 - DNA, 25 bp, Artificial
  probe
  misc_feature (1)..(25): SEQ ID NO: 1578; WAN024CP4_at; Start 133; Stop 157
gacatgttcttgtttttgacgattg

SEQ ID NO: 127435 - DNA, 25 bp, Artificial
  probe
  misc_feature (1)..(25): SEQ ID NO: 1578; WAN024CP4_at; Start 25; Stop 49
cgtatcttcgataatatcagctgga

SEQ ID NO: 127436 - DNA, 25 bp, Artificial
  probe
  misc_feature (1)..(25): SEQ ID NO: 1578; WAN024CP4_at; Start 182; Stop 206
tcagcatgagctgcatctttcaggt

SEQ ID NO: 127437 - DNA, 25 bp, Artificial
  probe
  misc_feature (1)..(25): SEQ ID NO: 1578; WAN024CP4_at; Start 330; Stop 354
aaggaactttcccattatagtaatg

SEQ ID NO: 127438 - DNA, 25 bp, Artificial
  probe
  misc_feature (1)..(25): SEQ ID NO: 1578; WAN024CP4_at; Start 191; Stop 215
gctgcatctttcaggtagacataat

SEQ ID NO: 127439 - DNA, 25 bp, Artificial
  probe
  misc_feature (1)..(25): SEQ ID NO: 1578; WAN024CP4_at; Start 162; Stop 186
catctttagttcgaacattatcagc

SEQ ID NO: 127440 - DNA, 25 bp, Artificial
  probe
  misc_feature (1)..(25): SEQ ID NO: 1578; WAN024CP4_at; Start 66; Stop 90
catttgtcgtatatcgtccctgaga

SEQ ID NO: 127441 - DNA, 25 bp, Artificial
  probe
  misc_feature (1)..(25): SEQ ID NO: 1578; WAN024CP4_at; Start 259; Stop 283
gacaatatcagcgtctttaagttga

SEQ ID NO: 127442 - DNA, 25 bp, Artificial
  probe
  misc_feature (1)..(25): SEQ ID NO: 1578; WAN024CP4_at; Start 95; Stop 119
gctacagcaacattagagttaacct

SEQ ID NO: 127443 - DNA, 25 bp, Artificial
  probe
  misc_feature (1)..(25): SEQ ID NO: 1578; WAN024CP4_at; Start 235; Stop 259
gatataaccacccttgacttcattg

SEQ ID NO: 127444 - DNA, 25 bp, Artificial
  probe
  misc_feature (1)..(25): SEQ ID NO: 1578; WAN024CP4_at; Start 282; Stop 306
gatagtttggatccttcatcaagag

SEQ ID NO: 127445 - DNA, 25 bp, Artificial
  probe
  misc_feature (1)..(25): SEQ ID NO: 1578; WAN024CP4_at; Start 39; Stop 63
tatcagctggattaaagacataacc

SEQ ID NO: 127446 - DNA, 25 bp, Artificial
  probe
  misc_feature (1)..(25): SEQ ID NO: 1578; WAN024CP4_at; Start 204; Stop 228
ggtagacataatattttccatcgac

SEQ ID NO: 127447 - DNA, 25 bp, Artificial
  probe
  misc_feature (1)..(25): SEQ ID NO: 1578; WAN024CP4_at; Start 87; Stop 111
gagaccttgctacagcaacattaga

SEQ ID NO: 127448 - DNA, 25 bp, Artificial
  probe
  misc_feature (1)..(25): SEQ ID NO: 1578; WAN024CP4_at; Start 319; Stop 343
gagggcatcataaggaactttccca

SEQ ID NO: 127449 - DNA, 25 bp, Artificial
  probe
  misc_feature (1)..(25): SEQ ID NO: 1578; WAN024CP4_at; Start 249; Stop 273
tgacttcattgacaatatcagcgtc

SEQ ID NO: 127450 - DNA, 25 bp, Artificial
  probe
  misc_feature (1)..(25): SEQ ID NO: 1578; WAN024CP4_at; Start 290; Stop 314
ggatccttcatcaagagttcttcac

SEQ ID NO: 127451 - DNA, 25 bp, Artificial
  probe
  misc_feature (1)..(25): SEQ ID NO: 1578; WAN024CP4_at; Start 308; Stop 332
tcttcactaaagagggcatcataag

SEQ ID NO: 127452 - DNA, 25 bp, Artificial
  probe
  misc_feature (1)..(25): SEQ ID NO: 1578; WAN024CP4_at; Start 59; Stop 83
taaccatcatttgtcgtatatcgtc

SEQ ID NO: 127453 - DNA, 25 bp, Artificial
  probe
  misc_feature (1)..(25): SEQ ID NO: 1578; WAN024CP4_at; Start 47; Stop 71
ggattaaagacataaccatcatttg

SEQ ID NO: 127454 - DNA, 25 bp, Artificial
  probe
  misc_feature (1)..(25): SEQ ID NO: 1578; WAN024CP4_at; Start 348; Stop 372
agtaatgatagtggtcaccgtgtga

SEQ ID NO: 127455 - DNA, 25 bp, Artificial
  probe
  misc_feature (1)..(25): SEQ ID NO: 1578; WAN024CP4_at; Start 110; Stop 134
gagttaaccttctcattatctttga

SEQ ID NO: 127456 - DNA, 25 bp, Artificial
  probe
  misc_feature (1)..(25): SEQ ID NO: 1578; WAN024CP4_at; Start 224; Stop 248
tcgaccttgatgatataaccaccct

SEQ ID NO: 127457 - DNA, 25 bp, Artificial
  probe
  misc_feature (1)..(25): SEQ ID NO: 1578; WAN024CP4_at; Start 77; Stop 101
tatcgtccctgagaccttgctacag

SEQ ID NO: 127458 - DNA, 25 bp, Artificial
  probe
  misc_feature (1)..(25): SEQ ID NO: 1578; WAN024CP4_at; Start 120; Stop 144
tctcattatctttgacatgttcttg

SEQ ID NO: 127459 - DNA, 25 bp, Artificial
  probe
  misc_feature (1)..(25): SEQ ID NO: 1578; WAN024CP4_at; Start 212; Stop 236
taatattttccatcgaccttgatga

SEQ ID NO: 127460 - DNA, 25 bp, Artificial
  probe
  misc_feature (1)..(25): SEQ ID NO: 1578; WAN024CP4_at; Start 171; Stop 195
ttcgaacattatcagcatgagctgc

SEQ ID NO: 127461 - DNA, 25 bp, Artificial
  probe
  misc_feature (1)..(25): SEQ ID NO: 1578; WAN024CP4_at; Start 228; Stop 252
ccttgatgatataaccacccttgac

SEQ ID NO: 127462 - DNA, 25 bp, Artificial
  probe
  misc_feature (1)..(25): SEQ ID NO: 1578; WAN024CP4_at; Start 267; Stop 291
cagcgtctttaagttgatagtttgg

SEQ ID NO: 127463 - DNA, 25 bp, Artificial
  probe
  misc_feature (1)..(25): SEQ ID NO: 1578; WAN024CP4_at; Start 345; Stop 369
tatagtaatgatagtggtcaccgtg

SEQ ID NO: 127464 - DNA, 25 bp, Artificial
  probe
  misc_feature (1)..(25): SEQ ID NO: 1578; WAN024CP4_at; Start 10; Stop 34
gatataagcattacccgtatcttcg

SEQ ID NO: 127465 - DNA, 25 bp, Artificial
  probe
  misc_feature (1)..(25): SEQ ID NO: 1578; WAN024CP4_at; Start 150; Stop 174
gacgattgatttcatctttagttcg

SEQ ID NO: 127466 - DNA, 25 bp, Artificial
  probe
  misc_feature (1)..(25): SEQ ID NO: 2076; WAN024CP5_at; Start 287; Stop 311
ccagttggatttgctttaacatctg

SEQ ID NO: 127467 - DNA, 25 bp, Artificial
  probe
  misc_feature (1)..(25): SEQ ID NO: 2076; WAN024CP5_at; Start 298; Stop 322
tgctttaacatctgcgtctggagat

SEQ ID NO: 127468 - DNA, 25 bp, Artificial
  probe
  misc_feature (1)..(25): SEQ ID NO: 2076; WAN024CP5_at; Start 133; Stop 157
ccaagcaaatttaatattatggtaa

SEQ ID NO: 127469 - DNA, 25 bp, Artificial
  probe
  misc_feature (1)..(25): SEQ ID NO: 2076; WAN024CP5_at; Start 220; Stop 244
tggaagtcgaacgagtggaattcgt

SEQ ID NO: 127470 - DNA, 25 bp, Artificial
  probe
  misc_feature (1)..(25): SEQ ID NO: 2076; WAN024CP5_at; Start 60; Stop 84
cgtagtacttaatcgtcgcaaacaa

SEQ ID NO: 127471 - DNA, 25 bp, Artificial
  probe
  misc_feature (1)..(25): SEQ ID NO: 2076; WAN024CP5_at; Start 47; Stop 71
tcagggtgttctacgtagtacttaa

SEQ ID NO: 127472 - DNA, 25 bp, Artificial
  probe
  misc_feature (1)..(25): SEQ ID NO: 2076; WAN024CP5_at; Start 192; Stop 216
taacctcaactgtatgctcaaccat

SEQ ID NO: 127473 - DNA, 25 bp, Artificial
  probe
  misc_feature (1)..(25): SEQ ID NO: 2076; WAN024CP5_at; Start 24; Stop 48
catcattagaatgtggacgttcgtc

SEQ ID NO: 127474 - DNA, 25 bp, Artificial
  probe
  misc_feature (1)..(25): SEQ ID NO: 2076; WAN024CP5_at; Start 258; Stop 282
cacgattgtaaatagctgctgcact

SEQ ID NO: 127475 - DNA, 25 bp, Artificial
  probe
  misc_feature (1)..(25): SEQ ID NO: 2076; WAN024CP5_at; Start 255; Stop 279
tcacacgattgtaaatagctgctgc

SEQ ID NO: 127476 - DNA, 25 bp, Artificial
  probe
  misc_feature (1)..(25): SEQ ID NO: 2076; WAN024CP5_at; Start 102; Stop 126
catttggagctttgtatgtgtgatc

SEQ ID NO: 127477 - DNA, 25 bp, Artificial
  probe
  misc_feature (1)..(25): SEQ ID NO: 2076; WAN024CP5_at; Start 43; Stop 67
ttcgtcagggtgttctacgtagtac

SEQ ID NO: 127478 - DNA, 25 bp, Artificial
  probe
  misc_feature (1)..(25): SEQ ID NO: 2076; WAN024CP5_at; Start 210; Stop 234
caaccatatatggaagtcgaacgag

SEQ ID NO: 127479 - DNA, 25 bp, Artificial
  probe
  misc_feature (1)..(25): SEQ ID NO: 2076; WAN024CP5_at; Start 79; Stop 103
aaacaaatcttccaaggtatagcca

SEQ ID NO: 127480 - DNA, 25 bp, Artificial
  probe
  misc_feature (1)..(25): SEQ ID NO: 2076; WAN024CP5_at; Start 305; Stop 329
acatctgcgtctggagatggaggta

SEQ ID NO: 127481 - DNA, 25 bp, Artificial
  probe
  misc_feature (1)..(25): SEQ ID NO: 2076; WAN024CP5_at; Start 114; Stop 138
tgtatgtgtgatcatcaaaccaagc

SEQ ID NO: 127482 - DNA, 25 bp, Artificial
  probe
  misc_feature (1)..(25): SEQ ID NO: 2076; WAN024CP5_at; Start 204; Stop 228
tatgctcaaccatatatggaagtcg

SEQ ID NO: 127483 - DNA, 25 bp, Artificial
  probe
  misc_feature (1)..(25): SEQ ID NO: 2076; WAN024CP5_at; Start 162; Stop 186
ccttatgaggaataatcaaattacc

SEQ ID NO: 127484 - DNA, 25 bp, Artificial
  probe
  misc_feature (1)..(25): SEQ ID NO: 2076; WAN024CP5_at; Start 91; Stop 115
caaggtatagccatttggagctttg

SEQ ID NO: 127485 - DNA, 25 bp, Artificial
  probe
  misc_feature (1)..(25): SEQ ID NO: 2076; WAN024CP5_at; Start 119; Stop 143
gtgtgatcatcaaaccaagcaaatt

SEQ ID NO: 127486 - DNA, 25 bp, Artificial
  probe
  misc_feature (1)..(25): SEQ ID NO: 2076; WAN024CP5_at; Start 275; Stop 299
gctgcactatctccagttggatttg

SEQ ID NO: 127487 - DNA, 25 bp, Artificial
  probe
  misc_feature (1)..(25): SEQ ID NO: 2076; WAN024CP5_at; Start 37; Stop 61
tggacgttcgtcagggtgttctacg

SEQ ID NO: 127488 - DNA, 25 bp, Artificial
  probe
  misc_feature (1)..(25): SEQ ID NO: 2076; WAN024CP5_at; Start 185; Stop 209
ccgtttttaacctcaactgtatgct

SEQ ID NO: 127489 - DNA, 25 bp, Artificial
  probe
  misc_feature (1)..(25): SEQ ID NO: 2076; WAN024CP5_at; Start 147; Stop 171
tattatggtaatgatccttatgagg

SEQ ID NO: 127490 - DNA, 25 bp, Artificial
  probe
  misc_feature (1)..(25): SEQ ID NO: 2076; WAN024CP5_at; Start 27; Stop 51
cattagaatgtggacgttcgtcagg

SEQ ID NO: 127491 - DNA, 25 bp, Artificial
  probe
  misc_feature (1)..(25): SEQ ID NO: 2076; WAN024CP5_at; Start 270; Stop 294
tagctgctgcactatctccagttgg

SEQ ID NO: 127492 - DNA, 25 bp, Artificial
  probe
  misc_feature (1)..(25): SEQ ID NO: 2076; WAN024CP5_at; Start 214; Stop 238
catatatggaagtcgaacgagtgga

SEQ ID NO: 127493 - DNA, 25 bp, Artificial
  probe
  misc_feature (1)..(25): SEQ ID NO: 2076; WAN024CP5_at; Start 56; Stop 80
tctacgtagtacttaatcgtcgcaa

SEQ ID NO: 127494 - DNA, 25 bp, Artificial
  probe
  misc_feature (1)..(25): SEQ ID NO: 2076; WAN024CP5_at; Start 10; Stop 34
ggcattgccccatccatcattagaa

SEQ ID NO: 127495 - DNA, 25 bp, Artificial
  probe
  misc_feature (1)..(25): SEQ ID NO: 2076; WAN024CP5_at; Start 294; Stop 318
gatttgctttaacatctgcgtctgg

SEQ ID NO: 127496 - DNA, 25 bp, Artificial
  probe
  misc_feature (1)..(25): SEQ ID NO: 2076; WAN024CP5_at; Start 165; Stop 189
tatgaggaataatcaaattaccgtt

SEQ ID NO: 127497 - DNA, 25 bp, Artificial
  probe
  misc_feature (1)..(25): SEQ ID NO: 2076; WAN024CP5_at; Start 248; Stop 272
tcccctttcacacgattgtaaatag

SEQ ID NO: 127498 - DNA, 25 bp, Artificial
  probe
  misc_feature (1)..(25): SEQ ID NO: 2076; WAN024CP5_at; Start 72; Stop 96
tcgtcgcaaacaaatcttccaaggt

SEQ ID NO: 127499 - DNA, 25 bp, Artificial
  probe
  misc_feature (1)..(25): SEQ ID NO: 2076; WAN024CP5_at; Start 15; Stop 39
tgccccatccatcattagaatgtgg

SEQ ID NO: 127500 - DNA, 25 bp, Artificial
  probe
  misc_feature (1)..(25): SEQ ID NO: 2667; WAN024CP6_at; Start 32; Stop 56
tctttagcataagcctgggctgccg

SEQ ID NO: 127501 - DNA, 25 bp, Artificial
  probe
  misc_feature (1)..(25): SEQ ID NO: 2667; WAN024CP6_at; Start 231; Stop 255
taatttgcgcatttggttttcctaa

SEQ ID NO: 127502 - DNA, 25 bp, Artificial
  probe
  misc_feature (1)..(25): SEQ ID NO: 2667; WAN024CP6_at; Start 135; Stop 159
catcactggttatatcacgaggatc

SEQ ID NO: 127503 - DNA, 25 bp, Artificial
  probe
  misc_feature (1)..(25): SEQ ID NO: 2667; WAN024CP6_at; Start 131; Stop 155
ccctcatcactggttatatcacgag

SEQ ID NO: 127504 - DNA, 25 bp, Artificial
  probe
  misc_feature (1)..(25): SEQ ID NO: 2667; WAN024CP6_at; Start 196; Stop 220
caacttggctacttgaatctcatca

SEQ ID NO: 127505 - DNA, 25 bp, Artificial
  probe
  misc_feature (1)..(25): SEQ ID NO: 2667; WAN024CP6_at; Start 18; Stop 42
gggtcaaacctttctctttagcata

SEQ ID NO: 127506 - DNA, 25 bp, Artificial
  probe
  misc_feature (1)..(25): SEQ ID NO: 2667; WAN024CP6_at; Start 26; Stop 50
cctttctctttagcataagcctggg

SEQ ID NO: 127507 - DNA, 25 bp, Artificial
  probe
  misc_feature (1)..(25): SEQ ID NO: 2667; WAN024CP6_at; Start 216; Stop 240
catcatcagtgtaggtaatttgcgc

SEQ ID NO: 127508 - DNA, 25 bp, Artificial
  probe
  misc_feature (1)..(25): SEQ ID NO: 2667; WAN024CP6_at; Start 60; Stop 84
tctcagcttcagacaaactatcttt

SEQ ID NO: 127509 - DNA, 25 bp, Artificial
  probe
  misc_feature (1)..(25): SEQ ID NO: 2667; WAN024CP6_at; Start 222; Stop 246
cagtgtaggtaatttgcgcatttgg

SEQ ID NO: 127510 - DNA, 25 bp, Artificial
  probe
  misc_feature (1)..(25): SEQ ID NO: 2667; WAN024CP6_at; Start 181; Stop 205
tgtgtacttgcctgccaacttggct

SEQ ID NO: 127511 - DNA, 25 bp, Artificial
  probe
  misc_feature (1)..(25): SEQ ID NO: 2667; WAN024CP6_at; Start 168; Stop 192
aaccgtcttctgttgtgtacttgcc

SEQ ID NO: 127512 - DNA, 25 bp, Artificial
  probe
  misc_feature (1)..(25): SEQ ID NO: 2667; WAN024CP6_at; Start 52; Stop 76
tgccgctctctcagcttcagacaaa

SEQ ID NO: 127513 - DNA, 25 bp, Artificial
  probe
  misc_feature (1)..(25): SEQ ID NO: 2667; WAN024CP6_at; Start 210; Stop 234
gaatctcatcatcagtgtaggtaat

SEQ ID NO: 127514 - DNA, 25 bp, Artificial
  probe
  misc_feature (1)..(25): SEQ ID NO: 2667; WAN024CP6_at; Start 87; Stop 111
taatccagtggctatgggtcatatg

SEQ ID NO: 127515 - DNA, 25 bp, Artificial
  probe
  misc_feature (1)..(25): SEQ ID NO: 2667; WAN024CP6_at; Start 202; Stop 226
ggctacttgaatctcatcatcagtg

SEQ ID NO: 127516 - DNA, 25 bp, Artificial
  probe
  misc_feature (1)..(25): SEQ ID NO: 2667; WAN024CP6_at; Start 80; Stop 104
tcttttttaatccagtggctatggg

SEQ ID NO: 127517 - DNA, 25 bp, Artificial
  probe
  misc_feature (1)..(25): SEQ ID NO: 2667; WAN024CP6_at; Start 40; Stop 64
ataagcctgggctgccgctctctca

SEQ ID NO: 127518 - DNA, 25 bp, Artificial
  probe
  misc_feature (1)..(25): SEQ ID NO: 2667; WAN024CP6_at; Start 163; Stop 187
gatataaccgtcttctgttgtgtac

SEQ ID NO: 127519 - DNA, 25 bp, Artificial
  probe
  misc_feature (1)..(25): SEQ ID NO: 2667; WAN024CP6_at; Start 155; Stop 179
ggatcaaagatataaccgtcttctg

SEQ ID NO: 127520 - DNA, 25 bp, Artificial
  probe
  misc_feature (1)..(25): SEQ ID NO: 2667; WAN024CP6_at; Start 73; Stop 97
caaactatcttttttaatccagtgg

SEQ ID NO: 127521 - DNA, 25 bp, Artificial
  probe
  misc_feature (1)..(25): SEQ ID NO: 2667; WAN024CP6_at; Start 138; Stop 162
cactggttatatcacgaggatcaaa

SEQ ID NO: 127522 - DNA, 25 bp, Artificial
  probe
  misc_feature (1)..(25): SEQ ID NO: 2667; WAN024CP6_at; Start 48; Stop 72
gggctgccgctctctcagcttcaga

SEQ ID NO: 127523 - DNA, 25 bp, Artificial
  probe
  misc_feature (1)..(25): SEQ ID NO: 2667; WAN024CP6_at; Start 219; Stop 243
catcagtgtaggtaatttgcgcatt

SEQ ID NO: 127524 - DNA, 25 bp, Artificial
  probe
  misc_feature (1)..(25): SEQ ID NO: 2667; WAN024CP6_at; Start 56; Stop 80
gctctctcagcttcagacaaactat

SEQ ID NO: 127525 - DNA, 25 bp, Artificial
  probe
  misc_feature (1)..(25): SEQ ID NO: 2667; WAN024CP6_at; Start 97; Stop 121
gctatgggtcatatgtggagttaca

SEQ ID NO: 127526 - DNA, 25 bp, Artificial
  probe
  misc_feature (1)..(25): SEQ ID NO: 2667; WAN024CP6_at; Start 30; Stop 54
tctctttagcataagcctgggctgc

SEQ ID NO: 127527 - DNA, 25 bp, Artificial
  probe
  misc_feature (1)..(25): SEQ ID NO: 2667; WAN024CP6_at; Start 150; Stop 174
cacgaggatcaaagatataaccgtc

SEQ ID NO: 127528 - DNA, 25 bp, Artificial
  probe
  misc_feature (1)..(25): SEQ ID NO: 2667; WAN024CP6_at; Start 206; Stop 230
acttgaatctcatcatcagtgtagg

SEQ ID NO: 127529 - DNA, 25 bp, Artificial
  probe
  misc_feature (1)..(25): SEQ ID NO: 2667; WAN024CP6_at; Start 108; Stop 132
tatgtggagttacataggcatcccc

SEQ ID NO: 127530 - DNA, 25 bp, Artificial
  probe
  misc_feature (1)..(25): SEQ ID NO: 2667; WAN024CP6_at; Start 36; Stop 60
tagcataagcctgggctgccgctct

SEQ ID NO: 127531 - DNA, 25 bp, Artificial
  probe
  misc_feature (1)..(25): SEQ ID NO: 2667; WAN024CP6_at; Start 173; Stop 197
tcttctgttgtgtacttgcctgcca

SEQ ID NO: 127532 - DNA, 25 bp, Artificial
  probe
  misc_feature (1)..(25): SEQ ID NO: 2667; WAN024CP6_at; Start 193; Stop 217
tgccaacttggctacttgaatctca

SEQ ID NO: 127533 - DNA, 25 bp, Artificial
  probe
  misc_feature (1)..(25): SEQ ID NO: 2667; WAN024CP6_at; Start 114; Stop 138
gagttacataggcatccccctcatc

SEQ ID NO: 127534 - DNA, 25 bp, Artificial
  probe
  misc_feature (1)..(25): SEQ ID NO: 5095; WAN024CP7_at; Start 132; Stop 156
tgtagagctgtttcaagagactatc

SEQ ID NO: 127535 - DNA, 25 bp, Artificial
  probe
  misc_feature (1)..(25): SEQ ID NO: 5095; WAN024CP7_at; Start 138; Stop 162
gctgtttcaagagactatcaatgtc

SEQ ID NO: 127536 - DNA, 25 bp, Artificial
  probe
  misc_feature (1)..(25): SEQ ID NO: 5095; WAN024CP7_at; Start 205; Stop 229
tgtgttagtatttgtagttcctgga

SEQ ID NO: 127537 - DNA, 25 bp, Artificial
  probe
  misc_feature (1)..(25): SEQ ID NO: 5095; WAN024CP7_at; Start 127; Stop 151
cagtttgtagagctgtttcaagaga

SEQ ID NO: 127538 - DNA, 25 bp, Artificial
  probe
  misc_feature (1)..(25): SEQ ID NO: 5095; WAN024CP7_at; Start 219; Stop 243
tagttcctggattgcttacagaagg

SEQ ID NO: 127539 - DNA, 25 bp, Artificial
  probe
  misc_feature (1)..(25): SEQ ID NO: 5095; WAN024CP7_at; Start 117; Stop 141
gactcaaaggcagtttgtagagctg

SEQ ID NO: 127540 - DNA, 25 bp, Artificial
  probe
  misc_feature (1)..(25): SEQ ID NO: 5095; WAN024CP7_at; Start 121; Stop 145
caaaggcagtttgtagagctgtttc

SEQ ID NO: 127541 - DNA, 25 bp, Artificial
  probe
  misc_feature (1)..(25): SEQ ID NO: 5095; WAN024CP7_at; Start 228; Stop 252
gattgcttacagaaggtacccagtt

SEQ ID NO: 127542 - DNA, 25 bp, Artificial
  probe
  misc_feature (1)..(25): SEQ ID NO: 5095; WAN024CP7_at; Start 224; Stop 248
cctggattgcttacagaaggtaccc

SEQ ID NO: 127543 - DNA, 25 bp, Artificial
  probe
  misc_feature (1)..(25): SEQ ID NO: 5095; WAN024CP7_at; Start 156; Stop 180
caatgtcattactttgacttgcttg

SEQ ID NO: 127544 - DNA, 25 bp, Artificial
  probe
  misc_feature (1)..(25): SEQ ID NO: 5095; WAN024CP7_at; Start 166; Stop 190
actttgacttgcttgactgttagtg

SEQ ID NO: 127545 - DNA, 25 bp, Artificial
  probe
  misc_feature (1)..(25): SEQ ID NO: 5095; WAN024CP7_at; Start 140; Stop 164
tgtttcaagagactatcaatgtcat

SEQ ID NO: 127546 - DNA, 25 bp, Artificial
  probe
  misc_feature (1)..(25): SEQ ID NO: 5095; WAN024CP7_at; Start 162; Stop 186
cattactttgacttgcttgactgtt

SEQ ID NO: 127547 - DNA, 25 bp, Artificial
  probe
  misc_feature (1)..(25): SEQ ID NO: 5095; WAN024CP7_at; Start 231; Stop 255
tgcttacagaaggtacccagtttgt

SEQ ID NO: 127548 - DNA, 25 bp, Artificial
  probe
  misc_feature (1)..(25): SEQ ID NO: 5095; WAN024CP7_at; Start 113; Stop 137
cgttgactcaaaggcagtttgtaga

SEQ ID NO: 127549 - DNA, 25 bp, Artificial
  probe
  misc_feature (1)..(25): SEQ ID NO: 5095; WAN024CP7_at; Start 213; Stop 237
tatttgtagttcctggattgcttac

SEQ ID NO: 127550 - DNA, 25 bp, Artificial
  probe
  misc_feature (1)..(25): SEQ ID NO: 5095; WAN024CP7_at; Start 230; Stop 254
ttgcttacagaaggtacccagtttg

SEQ ID NO: 127551 - DNA, 25 bp, Artificial
  probe
  misc_feature (1)..(25): SEQ ID NO: 5095; WAN024CP7_at; Start 223; Stop 247
tcctggattgcttacagaaggtacc

SEQ ID NO: 127552 - DNA, 25 bp, Artificial
  probe
  misc_feature (1)..(25): SEQ ID NO: 5095; WAN024CP7_at; Start 144; Stop 168
tcaagagactatcaatgtcattact

SEQ ID NO: 127553 - DNA, 25 bp, Artificial
  probe
  misc_feature (1)..(25): SEQ ID NO: 5095; WAN024CP7_at; Start 134; Stop 158
tagagctgtttcaagagactatcaa

SEQ ID NO: 127554 - DNA, 25 bp, Artificial
  probe
  misc_feature (1)..(25): SEQ ID NO: 5095; WAN024CP7_at; Start 210; Stop 234
tagtatttgtagttcctggattgct

SEQ ID NO: 127555 - DNA, 25 bp, Artificial
  probe
  misc_feature (1)..(25): SEQ ID NO: 5095; WAN024CP7_at; Start 201; Stop 225
tgcttgtgttagtatttgtagttcc

SEQ ID NO: 127556 - DNA, 25 bp, Artificial
  probe
  misc_feature (1)..(25): SEQ ID NO: 5095; WAN024CP7_at; Start 226; Stop 250
tggattgcttacagaaggtacccag

SEQ ID NO: 127557 - DNA, 25 bp, Artificial
  probe
  misc_feature (1)..(25): SEQ ID NO: 5095; WAN024CP7_at; Start 175; Stop 199
tgcttgactgttagtgttgctgttg

SEQ ID NO: 127558 - DNA, 25 bp, Artificial
  probe
  misc_feature (1)..(25): SEQ ID NO: 5095; WAN024CP7_at; Start 148; Stop 172
gagactatcaatgtcattactttga

SEQ ID NO: 127559 - DNA, 25 bp, Artificial
  probe
  misc_feature (1)..(25): SEQ ID NO: 5095; WAN024CP7_at; Start 237; Stop 261
cagaaggtacccagtttgttcttga

SEQ ID NO: 127560 - DNA, 25 bp, Artificial
  probe
  misc_feature (1)..(25): SEQ ID NO: 5095; WAN024CP7_at; Start 136; Stop 160
gagctgtttcaagagactatcaatg

SEQ ID NO: 127561 - DNA, 25 bp, Artificial
  probe
  misc_feature (1)..(25): SEQ ID NO: 5095; WAN024CP7_at; Start 130; Stop 154
tttgtagagctgtttcaagagacta

SEQ ID NO: 127562 - DNA, 25 bp, Artificial
  probe
  misc_feature (1)..(25): SEQ ID NO: 5095; WAN024CP7_at; Start 182; Stop 206
ctgttagtgttgctgttgttgcttg

SEQ ID NO: 127563 - DNA, 25 bp, Artificial
  probe
  misc_feature (1)..(25): SEQ ID NO: 5095; WAN024CP7_at; Start 190; Stop 214
gttgctgttgttgcttgtgttagta

SEQ ID NO: 127564 - DNA, 25 bp, Artificial
  probe
  misc_feature (1)..(25): SEQ ID NO: 5095; WAN024CP7_at; Start 172; Stop 196
acttgcttgactgttagtgttgctg

SEQ ID NO: 127565 - DNA, 25 bp, Artificial
  probe
  misc_feature (1)..(25): SEQ ID NO: 5095; WAN024CP7_at; Start 179; Stop 203
tgactgttagtgttgctgttgttgc

SEQ ID NO: 127566 - DNA, 25 bp, Artificial
  probe
  misc_feature (1)..(25): SEQ ID NO: 5095; WAN024CP7_at; Start 125; Stop 149
ggcagtttgtagagctgtttcaaga

SEQ ID NO: 127567 - DNA, 25 bp, Artificial
  probe
  misc_feature (1)..(25): SEQ ID NO: 5095; WAN024CP7_at; Start 170; Stop 194
tgacttgcttgactgttagtgttgc

SEQ ID NO: 127568 - DNA, 25 bp, Artificial
  probe
  misc_feature (1)..(25): SEQ ID NO: 757; WAN024CP8_at; Start 525; Stop 549
cagagcccaaggacgttatacaacg

SEQ ID NO: 127569 - DNA, 25 bp, Artificial
  probe
  misc_feature (1)..(25): SEQ ID NO: 757; WAN024CP8_at; Start 531; Stop 555
ccaaggacgttatacaacggatgat

SEQ ID NO: 127570 - DNA, 25 bp, Artificial
  probe
  misc_feature (1)..(25): SEQ ID NO: 757; WAN024CP8_at; Start 548; Stop 572
cggatgatgggtatatcttcaatgc

SEQ ID NO: 127571 - DNA, 25 bp, Artificial
  probe
  misc_feature (1)..(25): SEQ ID NO: 757; WAN024CP8_at; Start 649; Stop 673
gatttgtctgccagtgaattagctg

SEQ ID NO: 127572 - DNA, 25 bp, Artificial
  probe
  misc_feature (1)..(25): SEQ ID NO: 757; WAN024CP8_at; Start 915; Stop 939
aaccgccaatggtgttgctgtaccg

SEQ ID NO: 127573 - DNA, 25 bp, Artificial
  probe
  misc_feature (1)..(25): SEQ ID NO: 757; WAN024CP8_at; Start 406; Stop 430
gtttaccttaaagatgcggcccatg

SEQ ID NO: 127574 - DNA, 25 bp, Artificial
  probe
  misc_feature (1)..(25): SEQ ID NO: 757; WAN024CP8_at; Start 659; Stop 683
ccagtgaattagctgctgcccaagc

SEQ ID NO: 127575 - DNA, 25 bp, Artificial
  probe
  misc_feature (1)..(25): SEQ ID NO: 757; WAN024CP8_at; Start 472; Stop 496
caggaacgcagtcataatcacaact

SEQ ID NO: 127576 - DNA, 25 bp, Artificial
  probe
  misc_feature (1)..(25): SEQ ID NO: 757; WAN024CP8_at; Start 366; Stop 390
caagggtggctatgtgattaaggta

SEQ ID NO: 127577 - DNA, 25 bp, Artificial
  probe
  misc_feature (1)..(25): SEQ ID NO: 757; WAN024CP8_at; Start 374; Stop 398
gctatgtgattaaggtagacggaaa

SEQ ID NO: 127578 - DNA, 25 bp, Artificial
  probe
  misc_feature (1)..(25): SEQ ID NO: 757; WAN024CP8_at; Start 418; Stop 442
gatgcggcccatgcggacaatattc

SEQ ID NO: 127579 - DNA, 25 bp, Artificial
  probe
  misc_feature (1)..(25): SEQ ID NO: 757; WAN024CP8_at; Start 917; Stop 941
ccgccaatggtgttgctgtaccgca

SEQ ID NO: 127580 - DNA, 25 bp, Artificial
  probe
  misc_feature (1)..(25): SEQ ID NO: 757; WAN024CP8_at; Start 489; Stop 513
tcacaactcaagagcagataatgct

SEQ ID NO: 127581 - DNA, 25 bp, Artificial
  probe
  misc_feature (1)..(25): SEQ ID NO: 757; WAN024CP8_at; Start 579; Stop 603
tatcattgaagatactggtgatgct

SEQ ID NO: 127582 - DNA, 25 bp, Artificial
  probe
  misc_feature (1)..(25): SEQ ID NO: 757; WAN024CP8_at; Start 606; Stop 630
tatcgttcctcacggcgaccattac

SEQ ID NO: 127583 - DNA, 25 bp, Artificial
  probe
  misc_feature (1)..(25): SEQ ID NO: 757; WAN024CP8_at; Start 662; Stop 686
gtgaattagctgctgcccaagccta

SEQ ID NO: 127584 - DNA, 25 bp, Artificial
  probe
  misc_feature (1)..(25): SEQ ID NO: 757; WAN024CP8_at; Start 507; Stop 531
taatgctgttgctgcagccagagcc

SEQ ID NO: 127585 - DNA, 25 bp, Artificial
  probe
  misc_feature (1)..(25): SEQ ID NO: 757; WAN024CP8_at; Start 655; Stop 679
tctgccagtgaattagctgctgccc

SEQ ID NO: 127586 - DNA, 25 bp, Artificial
  probe
  misc_feature (1)..(25): SEQ ID NO: 757; WAN024CP8_at; Start 543; Stop 567
tacaacggatgatgggtatatcttc

SEQ ID NO: 127587 - DNA, 25 bp, Artificial
  probe
  misc_feature (1)..(25): SEQ ID NO: 757; WAN024CP8_at; Start 536; Stop 560
gacgttatacaacggatgatgggta

SEQ ID NO: 127588 - DNA, 25 bp, Artificial
  probe
  misc_feature (1)..(25): SEQ ID NO: 757; WAN024CP8_at; Start 571; Stop 595
gcttctgatatcattgaagatactg

SEQ ID NO: 127589 - DNA, 25 bp, Artificial
  probe
  misc_feature (1)..(25): SEQ ID NO: 757; WAN024CP8_at; Start 492; Stop 516
caactcaagagcagataatgctgtt

SEQ ID NO: 127590 - DNA, 25 bp, Artificial
  probe
  misc_feature (1)..(25): SEQ ID NO: 757; WAN024CP8_at; Start 503; Stop 527
cagataatgctgttgctgcagccag

SEQ ID NO: 127591 - DNA, 25 bp, Artificial
  probe
  misc_feature (1)..(25): SEQ ID NO: 757; WAN024CP8_at; Start 422; Stop 446
cggcccatgcggacaatattcggac

SEQ ID NO: 127592 - DNA, 25 bp, Artificial
  probe
  misc_feature (1)..(25): SEQ ID NO: 757; WAN024CP8_at; Start 380; Stop 404
tgattaaggtagacggaaaatacta

SEQ ID NO: 127593 - DNA, 25 bp, Artificial
  probe
  misc_feature (1)..(25): SEQ ID NO: 757; WAN024CP8_at; Start 664; Stop 688
gaattagctgctgcccaagcctatt

SEQ ID NO: 127594 - DNA, 25 bp, Artificial
  probe
  misc_feature (1)..(25): SEQ ID NO: 757; WAN024CP8_at; Start 509; Stop 533
atgctgttgctgcagccagagccca

SEQ ID NO: 127595 - DNA, 25 bp, Artificial
  probe
  misc_feature (1)..(25): SEQ ID NO: 757; WAN024CP8_at; Start 636; Stop 660
cattcctaagagtgatttgtctgcc

SEQ ID NO: 127596 - DNA, 25 bp, Artificial
  probe
  misc_feature (1)..(25): SEQ ID NO: 757; WAN024CP8_at; Start 409; Stop 433
taccttaaagatgcggcccatgcgg

SEQ ID NO: 127597 - DNA, 25 bp, Artificial
  probe
  misc_feature (1)..(25): SEQ ID NO: 757; WAN024CP8_at; Start 603; Stop 627
ttatatcgttcctcacggcgaccat

SEQ ID NO: 127598 - DNA, 25 bp, Artificial
  probe
  misc_feature (1)..(25): SEQ ID NO: 757; WAN024CP8_at; Start 642; Stop 666
taagagtgatttgtctgccagtgaa

SEQ ID NO: 127599 - DNA, 25 bp, Artificial
  probe
  misc_feature (1)..(25): SEQ ID NO: 757; WAN024CP8_at; Start 909; Stop 933
aagtcgaaccgccaatggtgttgct

SEQ ID NO: 127600 - DNA, 25 bp, Artificial
  probe
  misc_feature (1)..(25): SEQ ID NO: 757; WAN024CP8_at; Start 585; Stop 609
tgaagatactggtgatgcttatatc

SEQ ID NO: 127601 - DNA, 25 bp, Artificial
  probe
  misc_feature (1)..(25): SEQ ID NO: 757; WAN024CP8_at; Start 482; Stop 506
gtcataatcacaactcaagagcaga

SEQ ID NO: 127602 - DNA, 25 bp, Artificial
  probe
  misc_feature (1)..(25): SEQ ID NO: 5792; WAN024CP9_at; Start 239; Stop 263
catcacactctaacacggaagaggt

SEQ ID NO: 127603 - DNA, 25 bp, Artificial
  probe
  misc_feature (1)..(25): SEQ ID NO: 5792; WAN024CP9_at; Start 383; Stop 407
ttcctcatggcgaccacaatcacta

SEQ ID NO: 127604 - DNA, 25 bp, Artificial
  probe
  misc_feature (1)..(25): SEQ ID NO: 5792; WAN024CP9_at; Start 502; Stop 526
gcagtcttggcaaaagtagatcaac

SEQ ID NO: 127605 - DNA, 25 bp, Artificial
  probe
  misc_feature (1)..(25): SEQ ID NO: 5792; WAN024CP9_at; Start 62; Stop 86
tagtaccacatggtggtcactatca

SEQ ID NO: 127606 - DNA, 25 bp, Artificial
  probe
  misc_feature (1)..(25): SEQ ID NO: 5792; WAN024CP9_at; Start 480; Stop 504
acctggaacttttgatgagaaggca

SEQ ID NO: 127607 - DNA, 25 bp, Artificial
  probe
  misc_feature (1)..(25): SEQ ID NO: 5792; WAN024CP9_at; Start 444; Stop 468
gaaaaacaagattccatccctgcaa

SEQ ID NO: 127608 - DNA, 25 bp, Artificial
  probe
  misc_feature (1)..(25): SEQ ID NO: 5792; WAN024CP9_at; Start 213; Stop 237
tcctaagtcatctcttaacaatccc

SEQ ID NO: 127609 - DNA, 25 bp, Artificial
  probe
  misc_feature (1)..(25): SEQ ID NO: 5792; WAN024CP9_at; Start 159; Stop 183
cagagatacaggtgatgcttatata

SEQ ID NO: 127610 - DNA, 25 bp, Artificial
  probe
  misc_feature (1)..(25): SEQ ID NO: 5792; WAN024CP9_at; Start 328; Stop 352
ggtcatggttttgatgccaatcgaa

SEQ ID NO: 127611 - DNA, 25 bp, Artificial
  probe
  misc_feature (1)..(25): SEQ ID NO: 5792; WAN024CP9_at; Start 266; Stop 290
gaagttcttctagttctgtattaag

SEQ ID NO: 127612 - DNA, 25 bp, Artificial
  probe
  misc_feature (1)..(25): SEQ ID NO: 5792; WAN024CP9_at; Start 402; Stop 426
tcactacatcaaggttcaaactaag

SEQ ID NO: 127613 - DNA, 25 bp, Artificial
  probe
  misc_feature (1)..(25): SEQ ID NO: 5792; WAN024CP9_at; Start 244; Stop 268
cactctaacacggaagaggtaggaa

SEQ ID NO: 127614 - DNA, 25 bp, Artificial
  probe
  misc_feature (1)..(25): SEQ ID NO: 5792; WAN024CP9_at; Start 391; Stop 415
ggcgaccacaatcactacatcaagg

SEQ ID NO: 127615 - DNA, 25 bp, Artificial
  probe
  misc_feature (1)..(25): SEQ ID NO: 5792; WAN024CP9_at; Start 595; Stop 619
taggtcagtttactgaaagtttgaa

SEQ ID NO: 127616 - DNA, 25 bp, Artificial
  probe
  misc_feature (1)..(25): SEQ ID NO: 5792; WAN024CP9_at; Start 488; Stop 512
cttttgatgagaaggcagtcttggc

SEQ ID NO: 127617 - DNA, 25 bp, Artificial
  probe
  misc_feature (1)..(25): SEQ ID NO: 5792; WAN024CP9_at; Start 520; Stop 544
gatcaacttctagctgatagcagaa

SEQ ID NO: 127618 - DNA, 25 bp, Artificial
  probe
  misc_feature (1)..(25): SEQ ID NO: 5792; WAN024CP9_at; Start 585; Stop 609
gagttagctttaggtcagtttactg

SEQ ID NO: 127619 - DNA, 25 bp, Artificial
  probe
  misc_feature (1)..(25): SEQ ID NO: 5792; WAN024CP9_at; Start 537; Stop 561
tagcagaagcatctacaaagacaag

SEQ ID NO: 127620 - DNA, 25 bp, Artificial
  probe
  misc_feature (1)..(25): SEQ ID NO: 5792; WAN024CP9_at; Start 417; Stop 441
tcaaactaagggatatgaagcggct

SEQ ID NO: 127621 - DNA, 25 bp, Artificial
  probe
  misc_feature (1)..(25): SEQ ID NO: 5792; WAN024CP9_at; Start 340; Stop 364
gatgccaatcgaattataagtgaag

SEQ ID NO: 127622 - DNA, 25 bp, Artificial
  probe
  misc_feature (1)..(25): SEQ ID NO: 5792; WAN024CP9_at; Start 356; Stop 380
taagtgaagattcagaaggttttgt

SEQ ID NO: 127623 - DNA, 25 bp, Artificial
  probe
  misc_feature (1)..(25): SEQ ID NO: 5792; WAN024CP9_at; Start 73; Stop 97
ggtggtcactatcatttcattcctg

SEQ ID NO: 127624 - DNA, 25 bp, Artificial
  probe
  misc_feature (1)..(25): SEQ ID NO: 5792; WAN024CP9_at; Start 528; Stop 552
tctagctgatagcagaagcatctac

SEQ ID NO: 127625 - DNA, 25 bp, Artificial
  probe
  misc_feature (1)..(25): SEQ ID NO: 5792; WAN024CP9_at; Start 436; Stop 460
gcggctttgaaaaacaagattccat

SEQ ID NO: 127626 - DNA, 25 bp, Artificial
  probe
  misc_feature (1)..(25): SEQ ID NO: 5792; WAN024CP9_at; Start 430; Stop 454
tatgaagcggctttgaaaaacaaga

SEQ ID NO: 127627 - DNA, 25 bp, Artificial
  probe
  misc_feature (1)..(25): SEQ ID NO: 5792; WAN024CP9_at; Start 171; Stop 195
tgatgcttatatagtaagacatggg

SEQ ID NO: 127628 - DNA, 25 bp, Artificial
  probe
  misc_feature (1)..(25): SEQ ID NO: 5792; WAN024CP9_at; Start 509; Stop 533
tggcaaaagtagatcaacttctagc

SEQ ID NO: 127629 - DNA, 25 bp, Artificial
  probe
  misc_feature (1)..(25): SEQ ID NO: 5792; WAN024CP9_at; Start 144; Stop 168
ccctaatgatattgtcagagataca

SEQ ID NO: 127630 - DNA, 25 bp, Artificial
  probe
  misc_feature (1)..(25): SEQ ID NO: 5792; WAN024CP9_at; Start 153; Stop 177
tattgtcagagatacaggtgatgct

SEQ ID NO: 127631 - DNA, 25 bp, Artificial
  probe
  misc_feature (1)..(25): SEQ ID NO: 5792; WAN024CP9_at; Start 252; Stop 276
cacggaagaggtaggaagttcttct

SEQ ID NO: 127632 - DNA, 25 bp, Artificial
  probe
  misc_feature (1)..(25): SEQ ID NO: 5792; WAN024CP9_at; Start 313; Stop 337
catgaggaagaagatggtcatggtt

SEQ ID NO: 127633 - DNA, 25 bp, Artificial
  probe
  misc_feature (1)..(25): SEQ ID NO: 5792; WAN024CP9_at; Start 195; Stop 219
ggatcactatcactatattcctaag

SEQ ID NO: 127634 - DNA, 25 bp, Artificial
  probe
  misc_feature (1)..(25): SEQ ID NO: 5792; WAN024CP9_at; Start 578; Stop 602
acagattgagttagctttaggtcag

SEQ ID NO: 127635 - DNA, 25 bp, Artificial
  probe
  misc_feature (1)..(25): SEQ ID NO: 5792; WAN024CP9_at; Start 452; Stop 476
agattccatccctgcaatccaacta

SEQ ID NO: 127636 - DNA, 25 bp, Artificial
  probe
  misc_feature (1)..(25): SEQ ID NO: 3906; WAN024CPA_at; Start 2152; Stop 2176
caagacagtaaacctgatgaagata

SEQ ID NO: 127637 - DNA, 25 bp, Artificial
  probe
  misc_feature (1)..(25): SEQ ID NO: 3906; WAN024CPA_at; Start 2154; Stop 2178
agacagtaaacctgatgaagataag

SEQ ID NO: 127638 - DNA, 25 bp, Artificial
  probe
  misc_feature (1)..(25): SEQ ID NO: 3906; WAN024CPA_at; Start 2122; Stop 2146
agcgaccatgttcgtaaaaataagg

SEQ ID NO: 127639 - DNA, 25 bp, Artificial
  probe
  misc_feature (1)..(25): SEQ ID NO: 3906; WAN024CPA_at; Start 2148; Stop 2172
agaccaagacagtaaacctgatgaa

SEQ ID NO: 127640 - DNA, 25 bp, Artificial
  probe
  misc_feature (1)..(25): SEQ ID NO: 3906; WAN024CPA_at; Start 2150; Stop 2174
accaagacagtaaacctgatgaaga

SEQ ID NO: 127641 - DNA, 25 bp, Artificial
  probe
  misc_feature (1)..(25): SEQ ID NO: 3906; WAN024CPA_at; Start 2121; Stop 2145
tagcgaccatgttcgtaaaaataag

SEQ ID NO: 127642 - DNA, 25 bp, Artificial
  probe
  misc_feature (1)..(25): SEQ ID NO: 3906; WAN024CPA_at; Start 2149; Stop 2173
gaccaagacagtaaacctgatgaag

SEQ ID NO: 127643 - DNA, 25 bp, Artificial
  probe
  misc_feature (1)..(25): SEQ ID NO: 3906; WAN024CPA_at; Start 2153; Stop 2177
aagacagtaaacctgatgaagataa

SEQ ID NO: 127644 - DNA, 25 bp, Artificial
  probe
  misc_feature (1)..(25): SEQ ID NO: 3906; WAN024CPA_at; Start 2151; Stop 2175
ccaagacagtaaacctgatgaagat

SEQ ID NO: 127645 - DNA, 25 bp, Artificial
  probe
  misc_feature (1)..(25): SEQ ID NO: 3906; WAN024CPA_at; Start 2155; Stop 2179
gacagtaaacctgatgaagataagg

SEQ ID NO: 127646 - DNA, 25 bp, Artificial
  probe
  misc_feature (1)..(25): SEQ ID NO: 3906; WAN024CPA_at; Start 2120; Stop 2144
ctagcgaccatgttcgtaaaaataa

SEQ ID NO: 127647 - DNA, 25 bp, Artificial
  probe
  misc_feature (1)..(25): SEQ ID NO: 991; WAN024CPB_at; Start 224; Stop 248
cagatcagggctatgtaacgtcaca

SEQ ID NO: 127648 - DNA, 25 bp, Artificial
  probe
  misc_feature (1)..(25): SEQ ID NO: 991; WAN024CPB_at; Start 727; Stop 751
tcaacagctagtgacaataacacgc

SEQ ID NO: 127649 - DNA, 25 bp, Artificial
  probe
  misc_feature (1)..(25): SEQ ID NO: 991; WAN024CPB_at; Start 403; Stop 427
tatgtctacctgaaagatgcagctc

SEQ ID NO: 127650 - DNA, 25 bp, Artificial
  probe
  misc_feature (1)..(25): SEQ ID NO: 991; WAN024CPB_at; Start 74; Stop 98
taaaccagcatcgttcgcaggaaaa

SEQ ID NO: 127651 - DNA, 25 bp, Artificial
  probe
  misc_feature (1)..(25): SEQ ID NO: 991; WAN024CPB_at; Start 1407; Stop 1431
caagaaggacttgacagaagagcaa

SEQ ID NO: 127652 - DNA, 25 bp, Artificial
  probe
  misc_feature (1)..(25): SEQ ID NO: 991; WAN024CPB_at; Start 1845; Stop 1869
tctagccaatggtcaaaaacgcgtt

SEQ ID NO: 127653 - DNA, 25 bp, Artificial
  probe
  misc_feature (1)..(25): SEQ ID NO: 991; WAN024CPB_at; Start 690; Stop 714
tggaaaaaatatgcaaccgagtcag

SEQ ID NO: 127654 - DNA, 25 bp, Artificial
  probe
  misc_feature (1)..(25): SEQ ID NO: 991; WAN024CPB_at; Start 762; Stop 786
aaaaggatcaactagcaagccagca

SEQ ID NO: 127655 - DNA, 25 bp, Artificial
  probe
  misc_feature (1)..(25): SEQ ID NO: 991; WAN024CPB_at; Start 817; Stop 841
aaggaactctatgattcacctagcg

SEQ ID NO: 127656 - DNA, 25 bp, Artificial
  probe
  misc_feature (1)..(25): SEQ ID NO: 991; WAN024CPB_at; Start 2139; Stop 2163
gattttctatcctttccatgcaggg

SEQ ID NO: 127657 - DNA, 25 bp, Artificial
  probe
  misc_feature (1)..(25): SEQ ID NO: 991; WAN024CPB_at; Start 900; Stop 924
tacaccaaatggagttgcgattccg

SEQ ID NO: 127658 - DNA, 25 bp, Artificial
  probe
  misc_feature (1)..(25): SEQ ID NO: 991; WAN024CPB_at; Start 964; Stop 988
tctgccttagaagaaaagattgcca

SEQ ID NO: 127659 - DNA, 25 bp, Artificial
  probe
  misc_feature (1)..(25): SEQ ID NO: 991; WAN024CPB_at; Start 366; Stop 390
caagggtggttatatcatcaaggtc

SEQ ID NO: 127660 - DNA, 25 bp, Artificial
  probe
  misc_feature (1)..(25): SEQ ID NO: 991; WAN024CPB_at; Start 609; Stop 633
tcctcatggaggtcactatcactac

SEQ ID NO: 127661 - DNA, 25 bp, Artificial
  probe
  misc_feature (1)..(25): SEQ ID NO: 991; WAN024CPB_at; Start 421; Stop 445
gcagctcatgctgataatgttcgaa

SEQ ID NO: 127662 - DNA, 25 bp, Artificial
  probe
  misc_feature (1)..(25): SEQ ID NO: 991; WAN024CPB_at; Start 526; Stop 550
tctcagggacgatatacgacaaatg

SEQ ID NO: 127663 - DNA, 25 bp, Artificial
  probe
  misc_feature (1)..(25): SEQ ID NO: 991; WAN024CPB_at; Start 512; Stop 536
ttgctgtagcaaggtctcagggacg

SEQ ID NO: 127664 - DNA, 25 bp, Artificial
  probe
  misc_feature (1)..(25): SEQ ID NO: 991; WAN024CPB_at; Start 49; Stop 73
tccttgagtctatgtgcctatgcac

SEQ ID NO: 127665 - DNA, 25 bp, Artificial
  probe
  misc_feature (1)..(25): SEQ ID NO: 991; WAN024CPB_at; Start 304; Stop 328
gaagaactcttgatgaaggatccaa

SEQ ID NO: 127666 - DNA, 25 bp, Artificial
  probe
  misc_feature (1)..(25): SEQ ID NO: 991; WAN024CPB_at; Start 2177; Stop 2201
gagtgaaccctcaatttgcagtgcc

SEQ ID NO: 127667 - DNA, 25 bp, Artificial
  probe
  misc_feature (1)..(25): SEQ ID NO: 991; WAN024CPB_at; Start 837; Stop 861
tagcgcccaacgttacagtgaatca

SEQ ID NO: 127668 - DNA, 25 bp, Artificial
  probe
  misc_feature (1)..(25): SEQ ID NO: 991; WAN024CPB_at; Start 1149; Stop 1173
tatcgttgaagaaacggctacagct

SEQ ID NO: 127669 - DNA, 25 bp, Artificial
  probe
  misc_feature (1)..(25): SEQ ID NO: 991; WAN024CPB_at; Start 167; Stop 191
cagaccaggttagccagaaagaagg

SEQ ID NO: 127670 - DNA, 25 bp, Artificial
  probe
  misc_feature (1)..(25): SEQ ID NO: 991; WAN024CPB_at; Start 2111; Stop 2135
ctttagcttacaaaatggccagtca

SEQ ID NO: 127671 - DNA, 25 bp, Artificial
  probe
  misc_feature (1)..(25): SEQ ID NO: 991; WAN024CPB_at; Start 747; Stop 771
cacgcaatctgtagcaaaaggatca

SEQ ID NO: 127672 - DNA, 25 bp, Artificial
  probe
  misc_feature (1)..(25): SEQ ID NO: 991; WAN024CPB_at; Start 665; Stop 689
tagcagcagctaaagcacatctggc

SEQ ID NO: 127673 - DNA, 25 bp, Artificial
  probe
  misc_feature (1)..(25): SEQ ID NO: 991; WAN024CPB_at; Start 915; Stop 939
tgcgattccgcatggcgaccattac

SEQ ID NO: 127674 - DNA, 25 bp, Artificial
  probe
  misc_feature (1)..(25): SEQ ID NO: 991; WAN024CPB_at; Start 1216; Stop 1240
tcaaatcaaattgggcaaccgactc

SEQ ID NO: 127675 - DNA, 25 bp, Artificial
  probe
  misc_feature (1)..(25): SEQ ID NO: 991; WAN024CPB_at; Start 286; Stop 310
tatgatgccctctttagtgaagaac

SEQ ID NO: 127676 - DNA, 25 bp, Artificial
  probe
  misc_feature (1)..(25): SEQ ID NO: 991; WAN024CPB_at; Start 883; Stop 907
gctaagattatcagtcgtacaccaa

SEQ ID NO: 127677 - DNA, 25 bp, Artificial
  probe
  misc_feature (1)..(25): SEQ ID NO: 991; WAN024CPB_at; Start 152; Stop 176
gtgaaaacttgacaccagaccaggt

SEQ ID NO: 127678 - DNA, 25 bp, Artificial
  probe
  misc_feature (1)..(25): SEQ ID NO: 991; WAN024CPB_at; Start 857; Stop 881
aatcagatggcctggtctttgaccc

SEQ ID NO: 127679 - DNA, 25 bp, Artificial
  probe
  misc_feature (1)..(25): SEQ ID NO: 991; WAN024CPB_at; Start 129; Stop 153
tggcagccagtcaagtcagaaaagt

SEQ ID NO: 127680 - DNA, 25 bp, Artificial
  probe
  misc_feature (1)..(25): SEQ ID NO: 991; WAN024CPB_at; Start 1056; Stop 1080
tagtctaggcagtctttcaagcaat

SEQ ID NO: 127681 - DNA, 25 bp, Artificial
  probe
  misc_feature (1)..(25): SEQ ID NO: 3386; WAN024CPC_at; Start 935; Stop 959
gctctacaaactgcctttgagtcaa

SEQ ID NO: 127682 - DNA, 25 bp, Artificial
  probe
  misc_feature (1)..(25): SEQ ID NO: 3386; WAN024CPC_at; Start 192; Stop 216
gcgacgcaaaaaacggagaatttga

SEQ ID NO: 127683 - DNA, 25 bp, Artificial
  probe
  misc_feature (1)..(25): SEQ ID NO: 3386; WAN024CPC_at; Start 918; Stop 942
gatagtctcttgaaacagctctaca

SEQ ID NO: 127684 - DNA, 25 bp, Artificial
  probe
  misc_feature (1)..(25): SEQ ID NO: 3386; WAN024CPC_at; Start 933; Stop 957
cagctctacaaactgcctttgagtc

SEQ ID NO: 127685 - DNA, 25 bp, Artificial
  probe
  misc_feature (1)..(25): SEQ ID NO: 3386; WAN024CPC_at; Start 2333; Stop 2357
aacagaggaaccagaagaagaatca

SEQ ID NO: 127686 - DNA, 25 bp, Artificial
  probe
  misc_feature (1)..(25): SEQ ID NO: 3386; WAN024CPC_at; Start 2332; Stop 2356
caacagaggaaccagaagaagaatc

SEQ ID NO: 127687 - DNA, 25 bp, Artificial
  probe
  misc_feature (1)..(25): SEQ ID NO: 3386; WAN024CPC_at; Start 2341; Stop 2365
aaccagaagaagaatcaccagaaga

SEQ ID NO: 127688 - DNA, 25 bp, Artificial
  probe
  misc_feature (1)..(25): SEQ ID NO: 3386; WAN024CPC_at; Start 217; Stop 241
ctcctgatgaggttagcaagcgtga

SEQ ID NO: 127689 - DNA, 25 bp, Artificial
  probe
  misc_feature (1)..(25): SEQ ID NO: 3386; WAN024CPC_at; Start 927; Stop 951
ttgaaacagctctacaaactgcctt

SEQ ID NO: 127690 - DNA, 25 bp, Artificial
  probe
  misc_feature (1)..(25): SEQ ID NO: 3386; WAN024CPC_at; Start 176; Stop 200
tatagatggaaaacaagcgacgcaa

SEQ ID NO: 127691 - DNA, 25 bp, Artificial
  probe
  misc_feature (1)..(25): SEQ ID NO: 3386; WAN024CPC_at; Start 925; Stop 949
tcttgaaacagctctacaaactgcc

SEQ ID NO: 127692 - DNA, 25 bp, Artificial
  probe
  misc_feature (1)..(25): SEQ ID NO: 3386; WAN024CPC_at; Start 911; Stop 935
tgacattgatagtctcttgaaacag

SEQ ID NO: 127693 - DNA, 25 bp, Artificial
  probe
  misc_feature (1)..(25): SEQ ID NO: 3386; WAN024CPC_at; Start 931; Stop 955
aacagctctacaaactgcctttgag

SEQ ID NO: 127694 - DNA, 25 bp, Artificial
  probe
  misc_feature (1)..(25): SEQ ID NO: 3386; WAN024CPC_at; Start 218; Stop 242
tcctgatgaggttagcaagcgtgaa

SEQ ID NO: 127695 - DNA, 25 bp, Artificial
  probe
  misc_feature (1)..(25): SEQ ID NO: 3386; WAN024CPC_at; Start 2347; Stop 2371
aagaagaatcaccagaagaatcacc

SEQ ID NO: 127696 - DNA, 25 bp, Artificial
  probe
  misc_feature (1)..(25): SEQ ID NO: 3386; WAN024CPC_at; Start 920; Stop 944
tagtctcttgaaacagctctacaaa

SEQ ID NO: 127697 - DNA, 25 bp, Artificial
  probe
  misc_feature (1)..(25): SEQ ID NO: 3386; WAN024CPC_at; Start 178; Stop 202
tagatggaaaacaagcgacgcaaaa

SEQ ID NO: 127698 - DNA, 25 bp, Artificial
  probe
  misc_feature (1)..(25): SEQ ID NO: 3386; WAN024CPC_at; Start 189; Stop 213
caagcgacgcaaaaaacggagaatt

SEQ ID NO: 127699 - DNA, 25 bp, Artificial
  probe
  misc_feature (1)..(25): SEQ ID NO: 3386; WAN024CPC_at; Start 180; Stop 204
gatggaaaacaagcgacgcaaaaaa

SEQ ID NO: 127700 - DNA, 25 bp, Artificial
  probe
  misc_feature (1)..(25): SEQ ID NO: 3386; WAN024CPC_at; Start 224; Stop 248
tgaggttagcaagcgtgaaggaatc

SEQ ID NO: 127701 - DNA, 25 bp, Artificial
  probe
  misc_feature (1)..(25): SEQ ID NO: 3386; WAN024CPC_at; Start 905; Stop 929
aagtaatgacattgatagtctcttg

SEQ ID NO: 127702 - DNA, 25 bp, Artificial
  probe
  misc_feature (1)..(25): SEQ ID NO: 3386; WAN024CPC_at; Start 939; Stop 963
tacaaactgcctttgagtcaacgcc

SEQ ID NO: 127703 - DNA, 25 bp, Artificial
  probe
  misc_feature (1)..(25): SEQ ID NO: 3386; WAN024CPC_at; Start 2344; Stop 2368
cagaagaagaatcaccagaagaatc

SEQ ID NO: 127704 - DNA, 25 bp, Artificial
  probe
  misc_feature (1)..(25): SEQ ID NO: 3386; WAN024CPC_at; Start 226; Stop 250
aggttagcaagcgtgaaggaatcaa

SEQ ID NO: 127705 - DNA, 25 bp, Artificial
  probe
  misc_feature (1)..(25): SEQ ID NO: 3386; WAN024CPC_at; Start 937; Stop 961
tctacaaactgcctttgagtcaacg

SEQ ID NO: 127706 - DNA, 25 bp, Artificial
  probe
  misc_feature (1)..(25): SEQ ID NO: 3386; WAN024CPC_at; Start 941; Stop 965
caaactgcctttgagtcaacgccat

SEQ ID NO: 127707 - DNA, 25 bp, Artificial
  probe
  misc_feature (1)..(25): SEQ ID NO: 3386; WAN024CPC_at; Start 929; Stop 953
gaaacagctctacaaactgcctttg

SEQ ID NO: 127708 - DNA, 25 bp, Artificial
  probe
  misc_feature (1)..(25): SEQ ID NO: 3386; WAN024CPC_at; Start 2346; Stop 2370
gaagaagaatcaccagaagaatcac

SEQ ID NO: 127709 - DNA, 25 bp, Artificial
  probe
  misc_feature (1)..(25): SEQ ID NO: 3386; WAN024CPC_at; Start 215; Stop 239
gactcctgatgaggttagcaagcgt

SEQ ID NO: 127710 - DNA, 25 bp, Artificial
  probe
  misc_feature (1)..(25): SEQ ID NO: 3386; WAN024CPC_at; Start 917; Stop 941
tgatagtctcttgaaacagctctac

SEQ ID NO: 127711 - DNA, 25 bp, Artificial
  probe
  misc_feature (1)..(25): SEQ ID NO: 3386; WAN024CPC_at; Start 219; Stop 243
cctgatgaggttagcaagcgtgaag

SEQ ID NO: 127712 - DNA, 25 bp, Artificial
  probe
  misc_feature (1)..(25): SEQ ID NO: 3386; WAN024CPC_at; Start 914; Stop 938
cattgatagtctcttgaaacagctc

SEQ ID NO: 127713 - DNA, 25 bp, Artificial
  probe
  misc_feature (1)..(25): SEQ ID NO: 3386; WAN024CPC_at; Start 943; Stop 967
aactgcctttgagtcaacgccatgt

SEQ ID NO: 127714 - DNA, 25 bp, Artificial
  probe
  misc_feature (1)..(25): SEQ ID NO: 3386; WAN024CPC_at; Start 174; Stop 198
tatatagatggaaaacaagcgacgc

SEQ ID NO: 127715 - DNA, 25 bp, Artificial
  probe
  misc_feature (1)..(25): SEQ ID NO: 3385; WAN024CPD_at; Start 1870; Stop 1894
gatgttaaagcaaatccaactggag

SEQ ID NO: 127716 - DNA, 25 bp, Artificial
  probe
  misc_feature (1)..(25): SEQ ID NO: 3385; WAN024CPD_at; Start 1402; Stop 1426
gaaaatgttgctcctcgtgaccaag

SEQ ID NO: 127717 - DNA, 25 bp, Artificial
  probe
  misc_feature (1)..(25): SEQ ID NO: 3385; WAN024CPD_at; Start 1242; Stop 1266
tagtcagctggtacgaaaagttggg

SEQ ID NO: 127718 - DNA, 25 bp, Artificial
  probe
  misc_feature (1)..(25): SEQ ID NO: 3385; WAN024CPD_at; Start 2168; Stop 2192
ccagtgagcatgtgttaggcaagaa

SEQ ID NO: 127719 - DNA, 25 bp, Artificial
  probe
  misc_feature (1)..(25): SEQ ID NO: 3385; WAN024CPD_at; Start 1637; Stop 1661
ttgagtatactgaagacgaagttcg

SEQ ID NO: 127720 - DNA, 25 bp, Artificial
  probe
  misc_feature (1)..(25): SEQ ID NO: 3385; WAN024CPD_at; Start 2183; Stop 2207
taggcaagaaagaccacagtgaaga

SEQ ID NO: 127721 - DNA, 25 bp, Artificial
  probe
  misc_feature (1)..(25): SEQ ID NO: 3385; WAN024CPD_at; Start 2340; Stop 2364
ggattctagtctgaaagccaatgca

SEQ ID NO: 127722 - DNA, 25 bp, Artificial
  probe
  misc_feature (1)..(25): SEQ ID NO: 3385; WAN024CPD_at; Start 1749; Stop 1773
tgtaacgcctcatatgggccatagt

SEQ ID NO: 127723 - DNA, 25 bp, Artificial
  probe
  misc_feature (1)..(25): SEQ ID NO: 3385; WAN024CPD_at; Start 2082; Stop 2106
taccttggaagatttgtttgcgacg

SEQ ID NO: 127724 - DNA, 25 bp, Artificial
  probe
  misc_feature (1)..(25): SEQ ID NO: 3385; WAN024CPD_at; Start 474; Stop 498
tgcccacgcggataacgtccgtaca

SEQ ID NO: 127725 - DNA, 25 bp, Artificial
  probe
  misc_feature (1)..(25): SEQ ID NO: 3385; WAN024CPD_at; Start 284; Stop 308
gctatgtcacttcacatggcgacca

SEQ ID NO: 127726 - DNA, 25 bp, Artificial
  probe
  misc_feature (1)..(25): SEQ ID NO: 3385; WAN024CPD_at; Start 1885; Stop 1909
ccaactggagatagtgcagcagcta

SEQ ID NO: 127727 - DNA, 25 bp, Artificial
  probe
  misc_feature (1)..(25): SEQ ID NO: 3385; WAN024CPD_at; Start 1573; Stop 1597
gatttattggcattcctagcaccaa

SEQ ID NO: 127728 - DNA, 25 bp, Artificial
  probe
  misc_feature (1)..(25): SEQ ID NO: 3385; WAN024CPD_at; Start 2109; Stop 2133
taagtactacgtagaacaccctgac

SEQ ID NO: 127729 - DNA, 25 bp, Artificial
  probe
  misc_feature (1)..(25): SEQ ID NO: 3385; WAN024CPD_at; Start 2131; Stop 2155
gacgaacgtccacattctaatgatg

SEQ ID NO: 127730 - DNA, 25 bp, Artificial
  probe
  misc_feature (1)..(25): SEQ ID NO: 3385; WAN024CPD_at; Start 1803; Stop 1827
taaggaaaaagttgcagctcaagcc

SEQ ID NO: 127731 - DNA, 25 bp, Artificial
  probe
  misc_feature (1)..(25): SEQ ID NO: 3385; WAN024CPD_at; Start 1485; Stop 1509
taagggtcgtaattctgatttccaa

SEQ ID NO: 127732 - DNA, 25 bp, Artificial
  probe
  misc_feature (1)..(25): SEQ ID NO: 3385; WAN024CPD_at; Start 2232; Stop 2256
tgaagagccagtagaggaaacacct

SEQ ID NO: 127733 - DNA, 25 bp, Artificial
  probe
  misc_feature (1)..(25): SEQ ID NO: 3385; WAN024CPD_at; Start 2358; Stop 2382
caatgcaacagaaactctagctggt

SEQ ID NO: 127734 - DNA, 25 bp, Artificial
  probe
  misc_feature (1)..(25): SEQ ID NO: 3385; WAN024CPD_at; Start 2050; Stop 2074
gatgatcacacatacaaagctccaa

SEQ ID NO: 127735 - DNA, 25 bp, Artificial
  probe
  misc_feature (1)..(25): SEQ ID NO: 3385; WAN024CPD_at; Start 2206; Stop 2230
gatccaaataagaacttcaaagcgg

SEQ ID NO: 127736 - DNA, 25 bp, Artificial
  probe
  misc_feature (1)..(25): SEQ ID NO: 3385; WAN024CPD_at; Start 2294; Stop 2318
tagaagcccaactcaaagaagcaga

SEQ ID NO: 127737 - DNA, 25 bp, Artificial
  probe
  misc_feature (1)..(25): SEQ ID NO: 3385; WAN024CPD_at; Start 1277; Stop 1301
tattcgaagaaaagggcatctctcg

SEQ ID NO: 127738 - DNA, 25 bp, Artificial
  probe
  misc_feature (1)..(25): SEQ ID NO: 3385; WAN024CPD_at; Start 2065; Stop 2089
aaagctccaaatggctataccttgg

SEQ ID NO: 127739 - DNA, 25 bp, Artificial
  probe
  misc_feature (1)..(25): SEQ ID NO: 3385; WAN024CPD_at; Start 1589; Stop 1613
tagcaccaattacccatccagagcg

SEQ ID NO: 127740 - DNA, 25 bp, Artificial
  probe
  misc_feature (1)..(25): SEQ ID NO: 3385; WAN024CPD_at; Start 1526; Stop 1550
tagaacgcttgaatgatgaatcgac

SEQ ID NO: 127741 - DNA, 25 bp, Artificial
  probe
  misc_feature (1)..(25): SEQ ID NO: 3385; WAN024CPD_at; Start 1442; Stop 1466
catataatctgttaactgaggctca

SEQ ID NO: 127742 - DNA, 25 bp, Artificial
  probe
  misc_feature (1)..(25): SEQ ID NO: 3385; WAN024CPD_at; Start 2415; Stop 2439
taacaatagtatcatggcagaagca

SEQ ID NO: 127743 - DNA, 25 bp, Artificial
  probe
  misc_feature (1)..(25): SEQ ID NO: 3385; WAN024CPD_at; Start 2248; Stop 2272
gaaacacctgctgagccagaagtcc

SEQ ID NO: 127744 - DNA, 25 bp, Artificial
  probe
  misc_feature (1)..(25): SEQ ID NO: 3385; WAN024CPD_at; Start 1734; Stop 1758
tgaaggagatgcatatgtaacgcct

SEQ ID NO: 127745 - DNA, 25 bp, Artificial
  probe
  misc_feature (1)..(25): SEQ ID NO: 3385; WAN024CPD_at; Start 2279; Stop 2303
tagagactgaaaaagtagaagccca

SEQ ID NO: 127746 - DNA, 25 bp, Artificial
  probe
  misc_feature (1)..(25): SEQ ID NO: 3385; WAN024CPD_at; Start 1900; Stop 1924
gcagcagctatttacaatcgtgtga

SEQ ID NO: 127747 - DNA, 25 bp, Artificial
  probe
  misc_feature (1)..(25): SEQ ID NO: 3385; WAN024CPD_at; Start 1943; Stop 1967
cactcgttcgacttccatatatggt

SEQ ID NO: 127748 - DNA, 25 bp, Artificial
  probe
  misc_feature (1)..(25): SEQ ID NO: 3385; WAN024CPD_at; Start 263; Stop 287
tcatcaagataacagaccaaggcta

SEQ ID NO: 127749 - DNA, 25 bp, Artificial
  probe
  misc_feature (1)..(25): SEQ ID NO: 3907; WAN024CPE_at; Start 963; Stop 987
agctgtccctcatggtaaccattac

SEQ ID NO: 127750 - DNA, 25 bp, Artificial
  probe
  misc_feature (1)..(25): SEQ ID NO: 3907; WAN024CPE_at; Start 2206; Stop 2230
cctgaggaagaaacccctcgagaag

SEQ ID NO: 127751 - DNA, 25 bp, Artificial
  probe
  misc_feature (1)..(25): SEQ ID NO: 3907; WAN024CPE_at; Start 948; Stop 972
aaccgccagaggtgtagctgtccct

SEQ ID NO: 127752 - DNA, 25 bp, Artificial
  probe
  misc_feature (1)..(25): SEQ ID NO: 3907; WAN024CPE_at; Start 992; Stop 1016
ttatcccttatgaacaaatgtctga

SEQ ID NO: 127753 - DNA, 25 bp, Artificial
  probe
  misc_feature (1)..(25): SEQ ID NO: 3907; WAN024CPE_at; Start 2207; Stop 2231
ctgaggaagaaacccctcgagaaga

SEQ ID NO: 127754 - DNA, 25 bp, Artificial
  probe
  misc_feature (1)..(25): SEQ ID NO: 3907; WAN024CPE_at; Start 959; Stop 983
gtgtagctgtccctcatggtaacca

SEQ ID NO: 127755 - DNA, 25 bp, Artificial
  probe
  misc_feature (1)..(25): SEQ ID NO: 3907; WAN024CPE_at; Start 2220; Stop 2244
ccctcgagaagagaaaccgcaaagc

SEQ ID NO: 127756 - DNA, 25 bp, Artificial
  probe
  misc_feature (1)..(25): SEQ ID NO: 3907; WAN024CPE_at; Start 2229; Stop 2253
agagaaaccgcaaagcgagaaacca

SEQ ID NO: 127757 - DNA, 25 bp, Artificial
  probe
  misc_feature (1)..(25): SEQ ID NO: 3907; WAN024CPE_at; Start 987; Stop 1011
ccactttatcccttatgaacaaatg

SEQ ID NO: 127758 - DNA, 25 bp, Artificial
  probe
  misc_feature (1)..(25): SEQ ID NO: 3907; WAN024CPE_at; Start 950; Stop 974
ccgccagaggtgtagctgtccctca

SEQ ID NO: 127759 - DNA, 25 bp, Artificial
  probe
  misc_feature (1)..(25): SEQ ID NO: 3907; WAN024CPE_at; Start 945; Stop 969
tcgaaccgccagaggtgtagctgtc

SEQ ID NO: 127760 - DNA, 25 bp, Artificial
  probe
  misc_feature (1)..(25): SEQ ID NO: 3907; WAN024CPE_at; Start 966; Stop 990
tgtccctcatggtaaccattaccac

SEQ ID NO: 127761 - DNA, 25 bp, Artificial
  probe
  misc_feature (1)..(25): SEQ ID NO: 3907; WAN024CPE_at; Start 991; Stop 1015
tttatcccttatgaacaaatgtctg

SEQ ID NO: 127762 - DNA, 25 bp, Artificial
  probe
  misc_feature (1)..(25): SEQ ID NO: 3907; WAN024CPE_at; Start 944; Stop 968
gtcgaaccgccagaggtgtagctgt

SEQ ID NO: 127763 - DNA, 25 bp, Artificial
  probe
  misc_feature (1)..(25): SEQ ID NO: 3907; WAN024CPE_at; Start 952; Stop 976
gccagaggtgtagctgtccctcatg

SEQ ID NO: 127764 - DNA, 25 bp, Artificial
  probe
  misc_feature (1)..(25): SEQ ID NO: 3907; WAN024CPE_at; Start 2227; Stop 2251
gaagagaaaccgcaaagcgagaaac

SEQ ID NO: 127765 - DNA, 25 bp, Artificial
  probe
  misc_feature (1)..(25): SEQ ID NO: 3907; WAN024CPE_at; Start 981; Stop 1005
ccattaccactttatcccttatgaa

SEQ ID NO: 127766 - DNA, 25 bp, Artificial
  probe
  misc_feature (1)..(25): SEQ ID NO: 3907; WAN024CPE_at; Start 2492; Stop 2516
tattaaaggagagtaagctaactaa

SEQ ID NO: 127767 - DNA, 25 bp, Artificial
  probe
  misc_feature (1)..(25): SEQ ID NO: 3907; WAN024CPE_at; Start 947; Stop 971
gaaccgccagaggtgtagctgtccc

SEQ ID NO: 127768 - DNA, 25 bp, Artificial
  probe
  misc_feature (1)..(25): SEQ ID NO: 3907; WAN024CPE_at; Start 962; Stop 986
tagctgtccctcatggtaaccatta

SEQ ID NO: 127769 - DNA, 25 bp, Artificial
  probe
  misc_feature (1)..(25): SEQ ID NO: 3907; WAN024CPE_at; Start 960; Stop 984
tgtagctgtccctcatggtaaccat

SEQ ID NO: 127770 - DNA, 25 bp, Artificial
  probe
  misc_feature (1)..(25): SEQ ID NO: 3907; WAN024CPE_at; Start 954; Stop 978
cagaggtgtagctgtccctcatggt

SEQ ID NO: 127771 - DNA, 25 bp, Artificial
  probe
  misc_feature (1)..(25): SEQ ID NO: 3907; WAN024CPE_at; Start 2224; Stop 2248
cgagaagagaaaccgcaaagcgaga

SEQ ID NO: 127772 - DNA, 25 bp, Artificial
  probe
  misc_feature (1)..(25): SEQ ID NO: 3907; WAN024CPE_at; Start 2223; Stop 2247
tcgagaagagaaaccgcaaagcgag

SEQ ID NO: 127773 - DNA, 25 bp, Artificial
  probe
  misc_feature (1)..(25): SEQ ID NO: 3907; WAN024CPE_at; Start 970; Stop 994
cctcatggtaaccattaccacttta

SEQ ID NO: 127774 - DNA, 25 bp, Artificial
  probe
  misc_feature (1)..(25): SEQ ID NO: 3907; WAN024CPE_at; Start 946; Stop 970
cgaaccgccagaggtgtagctgtcc

SEQ ID NO: 127775 - DNA, 25 bp, Artificial
  probe
  misc_feature (1)..(25): SEQ ID NO: 3907; WAN024CPE_at; Start 984; Stop 1008
ttaccactttatcccttatgaacaa

SEQ ID NO: 127776 - DNA, 25 bp, Artificial
  probe
  misc_feature (1)..(25): SEQ ID NO: 3907; WAN024CPE_at; Start 2219; Stop 2243
cccctcgagaagagaaaccgcaaag

SEQ ID NO: 127777 - DNA, 25 bp, Artificial
  probe
  misc_feature (1)..(25): SEQ ID NO: 3907; WAN024CPE_at; Start 961; Stop 985
gtagctgtccctcatggtaaccatt

SEQ ID NO: 127778 - DNA, 25 bp, Artificial
  probe
  misc_feature (1)..(25): SEQ ID NO: 3907; WAN024CPE_at; Start 942; Stop 966
aagtcgaaccgccagaggtgtagct

SEQ ID NO: 127779 - DNA, 25 bp, Artificial
  probe
  misc_feature (1)..(25): SEQ ID NO: 3907; WAN024CPE_at; Start 956; Stop 980
gaggtgtagctgtccctcatggtaa

SEQ ID NO: 127780 - DNA, 25 bp, Artificial
  probe
  misc_feature (1)..(25): SEQ ID NO: 3907; WAN024CPE_at; Start 2221; Stop 2245
cctcgagaagagaaaccgcaaagcg

SEQ ID NO: 127781 - DNA, 25 bp, Artificial
  probe
  misc_feature (1)..(25): SEQ ID NO: 3907; WAN024CPE_at; Start 996; Stop 1020
cccttatgaacaaatgtctgaattg

SEQ ID NO: 127782 - DNA, 25 bp, Artificial
  probe
  misc_feature (1)..(25): SEQ ID NO: 3907; WAN024CPE_at; Start 957; Stop 981
aggtgtagctgtccctcatggtaac

SEQ ID NO: 127783 - DNA, 25 bp, Artificial
  probe
  misc_feature (1)..(25): SEQ ID NO: 5362; WAN024CPF_at; Start 137; Stop 161
taaacaggacgaaggtaaggatcca

SEQ ID NO: 127784 - DNA, 25 bp, Artificial
  probe
  misc_feature (1)..(25): SEQ ID NO: 5362; WAN024CPF_at; Start 65; Stop 89
gcaatttcgataatttcacgctcca

SEQ ID NO: 127785 - DNA, 25 bp, Artificial
  probe
  misc_feature (1)..(25): SEQ ID NO: 5362; WAN024CPF_at; Start 111; Stop 135
tcccaagaatttgatacaaggcatc

SEQ ID NO: 127786 - DNA, 25 bp, Artificial
  probe
  misc_feature (1)..(25): SEQ ID NO: 5362; WAN024CPF_at; Start 114; Stop 138
caagaatttgatacaaggcatcgta

SEQ ID NO: 127787 - DNA, 25 bp, Artificial
  probe
  misc_feature (1)..(25): SEQ ID NO: 5362; WAN024CPF_at; Start 167; Stop 191
tccttaagatcacccggaagaaatc

SEQ ID NO: 127788 - DNA, 25 bp, Artificial
  probe
  misc_feature (1)..(25): SEQ ID NO: 5362; WAN024CPF_at; Start 61; Stop 85
gggcgcaatttcgataatttcacgc

SEQ ID NO: 127789 - DNA, 25 bp, Artificial
  probe
  misc_feature (1)..(25): SEQ ID NO: 5362; WAN024CPF_at; Start 75; Stop 99
taatttcacgctccatgagacgagt

SEQ ID NO: 127790 - DNA, 25 bp, Artificial
  probe
  misc_feature (1)..(25): SEQ ID NO: 5362; WAN024CPF_at; Start 103; Stop 127
ttggtctttcccaagaatttgatac

SEQ ID NO: 127791 - DNA, 25 bp, Artificial
  probe
  misc_feature (1)..(25): SEQ ID NO: 5362; WAN024CPF_at; Start 91; Stop 115
gagacgagtcgtttggtctttccca

SEQ ID NO: 127792 - DNA, 25 bp, Artificial
  probe
  misc_feature (1)..(25): SEQ ID NO: 5362; WAN024CPF_at; Start 122; Stop 146
tgatacaaggcatcgtaaacaggac

SEQ ID NO: 127793 - DNA, 25 bp, Artificial
  probe
  misc_feature (1)..(25): SEQ ID NO: 5362; WAN024CPF_at; Start 130; Stop 154
ggcatcgtaaacaggacgaaggtaa

SEQ ID NO: 127794 - DNA, 25 bp, Artificial
  probe
  misc_feature (1)..(25): SEQ ID NO: 5362; WAN024CPF_at; Start 38; Stop 62
gtccggccacgcatataggcaaggg

SEQ ID NO: 127795 - DNA, 25 bp, Artificial
  probe
  misc_feature (1)..(25): SEQ ID NO: 5362; WAN024CPF_at; Start 73; Stop 97
gataatttcacgctccatgagacga

SEQ ID NO: 127796 - DNA, 25 bp, Artificial
  probe
  misc_feature (1)..(25): SEQ ID NO: 5362; WAN024CPF_at; Start 171; Stop 195
taagatcacccggaagaaatccaag

SEQ ID NO: 127797 - DNA, 25 bp, Artificial
  probe
  misc_feature (1)..(25): SEQ ID NO: 5362; WAN024CPF_at; Start 125; Stop 149
tacaaggcatcgtaaacaggacgaa

SEQ ID NO: 127798 - DNA, 25 bp, Artificial
  probe
  misc_feature (1)..(25): SEQ ID NO: 5362; WAN024CPF_at; Start 185; Stop 209
agaaatccaagactctctcccgctt

SEQ ID NO: 127799 - DNA, 25 bp, Artificial
  probe
  misc_feature (1)..(25): SEQ ID NO: 5362; WAN024CPF_at; Start 20; Stop 44
acaaaggcatcatccaaggtccggc

SEQ ID NO: 127800 - DNA, 25 bp, Artificial
  probe
  misc_feature (1)..(25): SEQ ID NO: 5362; WAN024CPF_at; Start 23; Stop 47
aaggcatcatccaaggtccggccac

SEQ ID NO: 127801 - DNA, 25 bp, Artificial
  probe
  misc_feature (1)..(25): SEQ ID NO: 5362; WAN024CPF_at; Start 83; Stop 107
cgctccatgagacgagtcgtttggt

SEQ ID NO: 127802 - DNA, 25 bp, Artificial
  probe
  misc_feature (1)..(25): SEQ ID NO: 5362; WAN024CPF_at; Start 18; Stop 42
tgacaaaggcatcatccaaggtccg

SEQ ID NO: 127803 - DNA, 25 bp, Artificial
  probe
  misc_feature (1)..(25): SEQ ID NO: 5362; WAN024CPF_at; Start 45; Stop 69
cacgcatataggcaaggggcgcaat

SEQ ID NO: 127804 - DNA, 25 bp, Artificial
  probe
  misc_feature (1)..(25): SEQ ID NO: 5362; WAN024CPF_at; Start 35; Stop 59
aaggtccggccacgcatataggcaa

SEQ ID NO: 127805 - DNA, 25 bp, Artificial
  probe
  misc_feature (1)..(25): SEQ ID NO: 5362; WAN024CPF_at; Start 2; Stop 26
tgcgcctcatcgagaatgacaaagg

SEQ ID NO: 127806 - DNA, 25 bp, Artificial
  probe
  misc_feature (1)..(25): SEQ ID NO: 5362; WAN024CPF_at; Start 141; Stop 165
caggacgaaggtaaggatccacctt

SEQ ID NO: 127807 - DNA, 25 bp, Artificial
  probe
  misc_feature (1)..(25): SEQ ID NO: 5362; WAN024CPF_at; Start 146; Stop 170
cgaaggtaaggatccaccttctcct

SEQ ID NO: 127808 - DNA, 25 bp, Artificial
  probe
  misc_feature (1)..(25): SEQ ID NO: 5362; WAN024CPF_at; Start 77; Stop 101
atttcacgctccatgagacgagtcg

SEQ ID NO: 127809 - DNA, 25 bp, Artificial
  probe
  misc_feature (1)..(25): SEQ ID NO: 5362; WAN024CPF_at; Start 165; Stop 189
tctccttaagatcacccggaagaaa

SEQ ID NO: 127810 - DNA, 25 bp, Artificial
  probe
  misc_feature (1)..(25): SEQ ID NO: 5362; WAN024CPF_at; Start 174; Stop 198
gatcacccggaagaaatccaagact

SEQ ID NO: 127811 - DNA, 25 bp, Artificial
  probe
  misc_feature (1)..(25): SEQ ID NO: 5362; WAN024CPF_at; Start 182; Stop 206
ggaagaaatccaagactctctcccg

SEQ ID NO: 127812 - DNA, 25 bp, Artificial
  probe
  misc_feature (1)..(25): SEQ ID NO: 5362; WAN024CPF_at; Start 204; Stop 228
ccgcttccaccgctggacgagttag

SEQ ID NO: 127813 - DNA, 25 bp, Artificial
  probe
  misc_feature (1)..(25): SEQ ID NO: 5362; WAN024CPF_at; Start 154; Stop 178
aggatccaccttctccttaagatca

SEQ ID NO: 127814 - DNA, 25 bp, Artificial
  probe
  misc_feature (1)..(25): SEQ ID NO: 5362; WAN024CPF_at; Start 4; Stop 28
cgcctcatcgagaatgacaaaggca

SEQ ID NO: 127815 - DNA, 25 bp, Artificial
  probe
  misc_feature (1)..(25): SEQ ID NO: 5362; WAN024CPF_at; Start 80; Stop 104
tcacgctccatgagacgagtcgttt

SEQ ID NO: 127816 - DNA, 25 bp, Artificial
  probe
  misc_feature (1)..(25): SEQ ID NO: 5362; WAN024CPF_at; Start 176; Stop 200
tcacccggaagaaatccaagactct

SEQ ID NO: 127817 - DNA, 25 bp, Artificial
  probe
  misc_feature (1)..(25): SEQ ID NO: 4958; WAN024CPG_at; Start 763; Stop 787
cattctaagatgattgtcaatggag

SEQ ID NO: 127818 - DNA, 25 bp, Artificial
  probe
  misc_feature (1)..(25): SEQ ID NO: 4958; WAN024CPG_at; Start 644; Stop 668
aaattgcgccccttgcctatatgcg

SEQ ID NO: 127819 - DNA, 25 bp, Artificial
  probe
  misc_feature (1)..(25): SEQ ID NO: 4958; WAN024CPG_at; Start 976; Stop 1000
agagtctcaacctctgtctgaagga

SEQ ID NO: 127820 - DNA, 25 bp, Artificial
  probe
  misc_feature (1)..(25): SEQ ID NO: 4958; WAN024CPG_at; Start 673; Stop 697
cggaccttggatgatgcctttgtca

SEQ ID NO: 127821 - DNA, 25 bp, Artificial
  probe
  misc_feature (1)..(25): SEQ ID NO: 4958; WAN024CPG_at; Start 121; Stop 145
cgtacggagattgtccaggttttgg

SEQ ID NO: 127822 - DNA, 25 bp, Artificial
  probe
  misc_feature (1)..(25): SEQ ID NO: 4958; WAN024CPG_at; Start 109; Stop 133
gtgattcatgctcgtacggagattg

SEQ ID NO: 127823 - DNA, 25 bp, Artificial
  probe
  misc_feature (1)..(25): SEQ ID NO: 4958; WAN024CPG_at; Start 805; Stop 829
ctgccacgtaatgtcaagtccggtt

SEQ ID NO: 127824 - DNA, 25 bp, Artificial
  probe
  misc_feature (1)..(25): SEQ ID NO: 4958; WAN024CPG_at; Start 73; Stop 97
cgccatcttcgtttgatggaagaag

SEQ ID NO: 127825 - DNA, 25 bp, Artificial
  probe
  misc_feature (1)..(25): SEQ ID NO: 4958; WAN024CPG_at; Start 452; Stop 476
ctgcccttaaacgtgggcaagtcaa

SEQ ID NO: 127826 - DNA, 25 bp, Artificial
  probe
  misc_feature (1)..(25): SEQ ID NO: 4958; WAN024CPG_at; Start 719; Stop 743
cgaccatcatgcagatgaagatgtt

SEQ ID NO: 127827 - DNA, 25 bp, Artificial
  probe
  misc_feature (1)..(25): SEQ ID NO: 4958; WAN024CPG_at; Start 134; Stop 158
tccaggttttgggagaagagtctgc

SEQ ID NO: 127828 - DNA, 25 bp, Artificial
  probe
  misc_feature (1)..(25): SEQ ID NO: 4958; WAN024CPG_at; Start 442; Stop 466
ttggcagtgactgcccttaaacgtg

SEQ ID NO: 127829 - DNA, 25 bp, Artificial
  probe
  misc_feature (1)..(25): SEQ ID NO: 4958; WAN024CPG_at; Start 725; Stop 749
tcatgcagatgaagatgttcttgac

SEQ ID NO: 127830 - DNA, 25 bp, Artificial
  probe
  misc_feature (1)..(25): SEQ ID NO: 4958; WAN024CPG_at; Start 45; Stop 69
cctgtttcatctttttggttccaat

SEQ ID NO: 127831 - DNA, 25 bp, Artificial
  probe
  misc_feature (1)..(25): SEQ ID NO: 4958; WAN024CPG_at; Start 972; Stop 996
aattagagtctcaacctctgtctga

SEQ ID NO: 127832 - DNA, 25 bp, Artificial
  probe
  misc_feature (1)..(25): SEQ ID NO: 4958; WAN024CPG_at; Start 526; Stop 550
tttcttccgggtgatcttaaggaga

SEQ ID NO: 127833 - DNA, 25 bp, Artificial
  probe
  misc_feature (1)..(25): SEQ ID NO: 4958; WAN024CPG_at; Start 646; Stop 670
attgcgccccttgcctatatgcgtg

SEQ ID NO: 127834 - DNA, 25 bp, Artificial
  probe
  misc_feature (1)..(25): SEQ ID NO: 4958; WAN024CPG_at; Start 3; Stop 27
gaaggaacattcaatagacattcaa

SEQ ID NO: 127835 - DNA, 25 bp, Artificial
  probe
  misc_feature (1)..(25): SEQ ID NO: 4958; WAN024CPG_at; Start 21; Stop 45
cattcaactgagtcatccagatgac

SEQ ID NO: 127836 - DNA, 25 bp, Artificial
  probe
  misc_feature (1)..(25): SEQ ID NO: 4958; WAN024CPG_at; Start 363; Stop 387
tgtggacagtgtcaaacagcatgat

SEQ ID NO: 127837 - DNA, 25 bp, Artificial
  probe
  misc_feature (1)..(25): SEQ ID NO: 4958; WAN024CPG_at; Start 17; Stop 41
tagacattcaactgagtcatccaga

SEQ ID NO: 127838 - DNA, 25 bp, Artificial
  probe
  misc_feature (1)..(25): SEQ ID NO: 4958; WAN024CPG_at; Start 369; Stop 393
cagtgtcaaacagcatgatgtgacc

SEQ ID NO: 127839 - DNA, 25 bp, Artificial
  probe
  misc_feature (1)..(25): SEQ ID NO: 4958; WAN024CPG_at; Start 358; Stop 382
ctttatgtggacagtgtcaaacagc

SEQ ID NO: 127840 - DNA, 25 bp, Artificial
  probe
  misc_feature (1)..(25): SEQ ID NO: 4958; WAN024CPG_at; Start 767; Stop 791
ctaagatgattgtcaatggagatat

SEQ ID NO: 127841 - DNA, 25 bp, Artificial
  probe
  misc_feature (1)..(25): SEQ ID NO: 4958; WAN024CPG_at; Start 115; Stop 139
catgctcgtacggagattgtccagg

SEQ ID NO: 127842 - DNA, 25 bp, Artificial
  probe
  misc_feature (1)..(25): SEQ ID NO: 4958; WAN024CPG_at; Start 212; Stop 236
ggatgaccgttggtacgccagatgt

SEQ ID NO: 127843 - DNA, 25 bp, Artificial
  probe
  misc_feature (1)..(25): SEQ ID NO: 4958; WAN024CPG_at; Start 815; Stop 839
atgtcaagtccggtttgattgatgc

SEQ ID NO: 127844 - DNA, 25 bp, Artificial
  probe
  misc_feature (1)..(25): SEQ ID NO: 4958; WAN024CPG_at; Start 82; Stop 106
cgtttgatggaagaagagcttgatg

SEQ ID NO: 127845 - DNA, 25 bp, Artificial
  probe
  misc_feature (1)..(25): SEQ ID NO: 4958; WAN024CPG_at; Start 377; Stop 401
aacagcatgatgtgacctttggaat

SEQ ID NO: 127846 - DNA, 25 bp, Artificial
  probe
  misc_feature (1)..(25): SEQ ID NO: 4958; WAN024CPG_at; Start 809; Stop 833
cacgtaatgtcaagtccggtttgat

SEQ ID NO: 127847 - DNA, 25 bp, Artificial
  probe
  misc_feature (1)..(25): SEQ ID NO: 4958; WAN024CPG_at; Start 31; Stop 55
agtcatccagatgacctgtttcatc

SEQ ID NO: 127848 - DNA, 25 bp, Artificial
  probe
  misc_feature (1)..(25): SEQ ID NO: 4958; WAN024CPG_at; Start 210; Stop 234
tgggatgaccgttggtacgccagat

SEQ ID NO: 127849 - DNA, 25 bp, Artificial
  probe
  misc_feature (1)..(25): SEQ ID NO: 4958; WAN024CPG_at; Start 446; Stop 470
cagtgactgcccttaaacgtgggca

SEQ ID NO: 127850 - DNA, 25 bp, Artificial
  probe
  misc_feature (1)..(25): SEQ ID NO: 4958; WAN024CPG_at; Start 528; Stop 552
tcttccgggtgatcttaaggagaag

SEQ ID NO: 127851 - DNA, 25 bp, Artificial
  probe
  misc_feature (1)..(25): SEQ ID NO: 5112; WAN024CPH_at; Start 308; Stop 332
aagcgaccagcccaatgggtctgtt

SEQ ID NO: 127852 - DNA, 25 bp, Artificial
  probe
  misc_feature (1)..(25): SEQ ID NO: 5112; WAN024CPH_at; Start 346; Stop 370
tacagcctgttcatcaacagcttcc

SEQ ID NO: 127853 - DNA, 25 bp, Artificial
  probe
  misc_feature (1)..(25): SEQ ID NO: 5112; WAN024CPH_at; Start 419; Stop 443
ttctcctgctgatagactccttcta

SEQ ID NO: 127854 - DNA, 25 bp, Artificial
  probe
  misc_feature (1)..(25): SEQ ID NO: 5112; WAN024CPH_at; Start 285; Stop 309
aaatctgtgggcgaatacgctccaa

SEQ ID NO: 127855 - DNA, 25 bp, Artificial
  probe
  misc_feature (1)..(25): SEQ ID NO: 5112; WAN024CPH_at; Start 216; Stop 240
cctgctctttttctttgataaactc

SEQ ID NO: 127856 - DNA, 25 bp, Artificial
  probe
  misc_feature (1)..(25): SEQ ID NO: 5112; WAN024CPH_at; Start 390; Stop 414
gaagaaaagtttgcaacgccaaggc

SEQ ID NO: 127857 - DNA, 25 bp, Artificial
  probe
  misc_feature (1)..(25): SEQ ID NO: 5112; WAN024CPH_at; Start 165; Stop 189
gataatccttacgtttcaaggatcc

SEQ ID NO: 127858 - DNA, 25 bp, Artificial
  probe
  misc_feature (1)..(25): SEQ ID NO: 5112; WAN024CPH_at; Start 23; Stop 47
aaatcgctgataaattctcggtaag

SEQ ID NO: 127859 - DNA, 25 bp, Artificial
  probe
  misc_feature (1)..(25): SEQ ID NO: 5112; WAN024CPH_at; Start 196; Stop 220
gatttgaggtcgatagccttcctgc

SEQ ID NO: 127860 - DNA, 25 bp, Artificial
  probe
  misc_feature (1)..(25): SEQ ID NO: 5112; WAN024CPH_at; Start 143; Stop 167
gtcagataacccaacatcccttgat

SEQ ID NO: 127861 - DNA, 25 bp, Artificial
  probe
  misc_feature (1)..(25): SEQ ID NO: 5112; WAN024CPH_at; Start 131; Stop 155
ggcaatttttcagtcagataaccca

SEQ ID NO: 127862 - DNA, 25 bp, Artificial
  probe
  misc_feature (1)..(25): SEQ ID NO: 5112; WAN024CPH_at; Start 258; Stop 282
cagggaggttatgagcaccatccaa

SEQ ID NO: 127863 - DNA, 25 bp, Artificial
  probe
  misc_feature (1)..(25): SEQ ID NO: 5112; WAN024CPH_at; Start 2; Stop 26
tgagcgtctgccctttcttcaaaat

SEQ ID NO: 127864 - DNA, 25 bp, Artificial
  probe
  misc_feature (1)..(25): SEQ ID NO: 5112; WAN024CPH_at; Start 38; Stop 62
tctcggtaagaagaaactatatcgt

SEQ ID NO: 127865 - DNA, 25 bp, Artificial
  probe
  misc_feature (1)..(25): SEQ ID NO: 5112; WAN024CPH_at; Start 174; Stop 198
tacgtttcaaggatccaaagaggat

SEQ ID NO: 127866 - DNA, 25 bp, Artificial
  probe
  misc_feature (1)..(25): SEQ ID NO: 5112; WAN024CPH_at; Start 252; Stop 276
tcaaggcagggaggttatgagcacc

SEQ ID NO: 127867 - DNA, 25 bp, Artificial
  probe
  misc_feature (1)..(25): SEQ ID NO: 5112; WAN024CPH_at; Start 317; Stop 341
gcccaatgggtctgttccaaggcct

SEQ ID NO: 127868 - DNA, 25 bp, Artificial
  probe
  misc_feature (1)..(25): SEQ ID NO: 5112; WAN024CPH_at; Start 201; Stop 225
gaggtcgatagccttcctgctcttt

SEQ ID NO: 127869 - DNA, 25 bp, Artificial
  probe
  misc_feature (1)..(25): SEQ ID NO: 5112; WAN024CPH_at; Start 47; Stop 71
gaagaaactatatcgtaacctgtca

SEQ ID NO: 127870 - DNA, 25 bp, Artificial
  probe
  misc_feature (1)..(25): SEQ ID NO: 5112; WAN024CPH_at; Start 189; Stop 213
caaagaggatttgaggtcgatagcc

SEQ ID NO: 127871 - DNA, 25 bp, Artificial
  probe
  misc_feature (1)..(25): SEQ ID NO: 5112; WAN024CPH_at; Start 399; Stop 423
tttgcaacgccaaggctgcattctc

SEQ ID NO: 127872 - DNA, 25 bp, Artificial
  probe
  misc_feature (1)..(25): SEQ ID NO: 5112; WAN024CPH_at; Start 82; Stop 106
gtccaaagccccctgatagtcaaag

SEQ ID NO: 127873 - DNA, 25 bp, Artificial
  probe
  misc_feature (1)..(25): SEQ ID NO: 5112; WAN024CPH_at; Start 59; Stop 83
tcgtaacctgtcacatccctttcgt

SEQ ID NO: 127874 - DNA, 25 bp, Artificial
  probe
  misc_feature (1)..(25): SEQ ID NO: 5112; WAN024CPH_at; Start 111; Stop 135
tcaccttgagttccacctgaggcaa

SEQ ID NO: 127875 - DNA, 25 bp, Artificial
  probe
  misc_feature (1)..(25): SEQ ID NO: 5112; WAN024CPH_at; Start 118; Stop 142
gagttccacctgaggcaatttttca

SEQ ID NO: 127876 - DNA, 25 bp, Artificial
  probe
  misc_feature (1)..(25): SEQ ID NO: 5112; WAN024CPH_at; Start 394; Stop 418
aaaagtttgcaacgccaaggctgca

SEQ ID NO: 127877 - DNA, 25 bp, Artificial
  probe
  misc_feature (1)..(25): SEQ ID NO: 5112; WAN024CPH_at; Start 293; Stop 317
gggcgaatacgctccaagcgaccag

SEQ ID NO: 127878 - DNA, 25 bp, Artificial
  probe
  misc_feature (1)..(25): SEQ ID NO: 5112; WAN024CPH_at; Start 102; Stop 126
caaagccggtcaccttgagttccac

SEQ ID NO: 127879 - DNA, 25 bp, Artificial
  probe
  misc_feature (1)..(25): SEQ ID NO: 5112; WAN024CPH_at; Start 410; Stop 434
aaggctgcattctcctgctgataga

SEQ ID NO: 127880 - DNA, 25 bp, Artificial
  probe
  misc_feature (1)..(25): SEQ ID NO: 5112; WAN024CPH_at; Start 334; Stop 358
caaggcctttcttacagcctgttca

SEQ ID NO: 127881 - DNA, 25 bp, Artificial
  probe
  misc_feature (1)..(25): SEQ ID NO: 5112; WAN024CPH_at; Start 154; Stop 178
caacatcccttgataatccttacgt

SEQ ID NO: 127882 - DNA, 25 bp, Artificial
  probe
  misc_feature (1)..(25): SEQ ID NO: 5112; WAN024CPH_at; Start 93; Stop 117
cctgatagtcaaagccggtcacctt

SEQ ID NO: 127883 - DNA, 25 bp, Artificial
  probe
  misc_feature (1)..(25): SEQ ID NO: 5112; WAN024CPH_at; Start 325; Stop 349
ggtctgttccaaggcctttcttaca

SEQ ID NO: 127884 - DNA, 25 bp, Artificial
  probe
  misc_feature (1)..(25): SEQ ID NO: 5112; WAN024CPH_at; Start 11; Stop 35
gccctttcttcaaaatcgctgataa

SEQ ID NO: 127885 - DNA, 25 bp, Artificial
  probe
  misc_feature (1)..(25): SEQ ID NO: 5595; WAN024CPI_at; Start 26; Stop 50
tggaagcgaccttgtctgacagcac

SEQ ID NO: 127886 - DNA, 25 bp, Artificial
  probe
  misc_feature (1)..(25): SEQ ID NO: 5595; WAN024CPI_at; Start 5; Stop 29
tacaaaccaagcaggctagtctgga

SEQ ID NO: 127887 - DNA, 25 bp, Artificial
  probe
  misc_feature (1)..(25): SEQ ID NO: 5595; WAN024CPI_at; Start 217; Stop 241
aatacctgccttctgctctgctatg

SEQ ID NO: 127888 - DNA, 25 bp, Artificial
  probe
  misc_feature (1)..(25): SEQ ID NO: 5595; WAN024CPI_at; Start 151; Stop 175
gcggtcaatcacagccaaggcttct

SEQ ID NO: 127889 - DNA, 25 bp, Artificial
  probe
  misc_feature (1)..(25): SEQ ID NO: 5595; WAN024CPI_at; Start 166; Stop 190
caaggcttctggagcaatacgccct

SEQ ID NO: 127890 - DNA, 25 bp, Artificial
  probe
  misc_feature (1)..(25): SEQ ID NO: 5595; WAN024CPI_at; Start 99; Stop 123
cctgataatctgtcccgtaggcaag

SEQ ID NO: 127891 - DNA, 25 bp, Artificial
  probe
  misc_feature (1)..(25): SEQ ID NO: 5595; WAN024CPI_at; Start 186; Stop 210
gccctgttaccaagggcatcccttg

SEQ ID NO: 127892 - DNA, 25 bp, Artificial
  probe
  misc_feature (1)..(25): SEQ ID NO: 5595; WAN024CPI_at; Start 131; Stop 155
gcatctttcccttccgcaatgcggt

SEQ ID NO: 127893 - DNA, 25 bp, Artificial
  probe
  misc_feature (1)..(25): SEQ ID NO: 5595; WAN024CPI_at; Start 162; Stop 186
cagccaaggcttctggagcaatacg

SEQ ID NO: 127894 - DNA, 25 bp, Artificial
  probe
  misc_feature (1)..(25): SEQ ID NO: 5595; WAN024CPI_at; Start 86; Stop 110
tcttgatgacgaacctgataatctg

SEQ ID NO: 127895 - DNA, 25 bp, Artificial
  probe
  misc_feature (1)..(25): SEQ ID NO: 5595; WAN024CPI_at; Start 1; Stop 25
ttggtacaaaccaagcaggctagtc

SEQ ID NO: 127896 - DNA, 25 bp, Artificial
  probe
  misc_feature (1)..(25): SEQ ID NO: 5595; WAN024CPI_at; Start 109; Stop 133
tgtcccgtaggcaagtctcggcgca

SEQ ID NO: 127897 - DNA, 25 bp, Artificial
  probe
  misc_feature (1)..(25): SEQ ID NO: 5595; WAN024CPI_at; Start 157; Stop 181
aatcacagccaaggcttctggagca

SEQ ID NO: 127898 - DNA, 25 bp, Artificial
  probe
  misc_feature (1)..(25): SEQ ID NO: 5595; WAN024CPI_at; Start 173; Stop 197
tctggagcaatacgccctgttacca

SEQ ID NO: 127899 - DNA, 25 bp, Artificial
  probe
  misc_feature (1)..(25): SEQ ID NO: 5595; WAN024CPI_at; Start 209; Stop 233
tgtttgataatacctgccttctgct

SEQ ID NO: 127900 - DNA, 25 bp, Artificial
  probe
  misc_feature (1)..(25): SEQ ID NO: 5595; WAN024CPI_at; Start 177; Stop 201
gagcaatacgccctgttaccaaggg

SEQ ID NO: 127901 - DNA, 25 bp, Artificial
  probe
  misc_feature (1)..(25): SEQ ID NO: 5595; WAN024CPI_at; Start 202; Stop 226
catcccttgtttgataatacctgcc

SEQ ID NO: 127902 - DNA, 25 bp, Artificial
  probe
  misc_feature (1)..(25): SEQ ID NO: 5595; WAN024CPI_at; Start 43; Stop 67
gacagcacttgtatagtcaaagact

SEQ ID NO: 127903 - DNA, 25 bp, Artificial
  probe
  misc_feature (1)..(25): SEQ ID NO: 5595; WAN024CPI_at; Start 31; Stop 55
gcgaccttgtctgacagcacttgta

SEQ ID NO: 127904 - DNA, 25 bp, Artificial
  probe
  misc_feature (1)..(25): SEQ ID NO: 5595; WAN024CPI_at; Start 170; Stop 194
gcttctggagcaatacgccctgtta

SEQ ID NO: 127905 - DNA, 25 bp, Artificial
  probe
  misc_feature (1)..(25): SEQ ID NO: 5595; WAN024CPI_at; Start 214; Stop 238
gataatacctgccttctgctctgct

SEQ ID NO: 127906 - DNA, 25 bp, Artificial
  probe
  misc_feature (1)..(25): SEQ ID NO: 5595; WAN024CPI_at; Start 52; Stop 76
tgtatagtcaaagacttcccctgtc

SEQ ID NO: 127907 - DNA, 25 bp, Artificial
  probe
  misc_feature (1)..(25): SEQ ID NO: 5595; WAN024CPI_at; Start 90; Stop 114
gatgacgaacctgataatctgtccc

SEQ ID NO: 127908 - DNA, 25 bp, Artificial
  probe
  misc_feature (1)..(25): SEQ ID NO: 5595; WAN024CPI_at; Start 96; Stop 120
gaacctgataatctgtcccgtaggc

SEQ ID NO: 127909 - DNA, 25 bp, Artificial
  probe
  misc_feature (1)..(25): SEQ ID NO: 5595; WAN024CPI_at; Start 21; Stop 45
tagtctggaagcgaccttgtctgac

SEQ ID NO: 127910 - DNA, 25 bp, Artificial
  probe
  misc_feature (1)..(25): SEQ ID NO: 5595; WAN024CPI_at; Start 70; Stop 94
ccctgtcaccacactttcttgatga

SEQ ID NO: 127911 - DNA, 25 bp, Artificial
  probe
  misc_feature (1)..(25): SEQ ID NO: 5595; WAN024CPI_at; Start 146; Stop 170
gcaatgcggtcaatcacagccaagg

SEQ ID NO: 127912 - DNA, 25 bp, Artificial
  probe
  misc_feature (1)..(25): SEQ ID NO: 5595; WAN024CPI_at; Start 12; Stop 36
caagcaggctagtctggaagcgacc

SEQ ID NO: 127913 - DNA, 25 bp, Artificial
  probe
  misc_feature (1)..(25): SEQ ID NO: 5595; WAN024CPI_at; Start 16; Stop 40
caggctagtctggaagcgaccttgt

SEQ ID NO: 127914 - DNA, 25 bp, Artificial
  probe
  misc_feature (1)..(25): SEQ ID NO: 5595; WAN024CPI_at; Start 197; Stop 221
aagggcatcccttgtttgataatac

SEQ ID NO: 127915 - DNA, 25 bp, Artificial
  probe
  misc_feature (1)..(25): SEQ ID NO: 5595; WAN024CPI_at; Start 115; Stop 139
gtaggcaagtctcggcgcatctttc

SEQ ID NO: 127916 - DNA, 25 bp, Artificial
  probe
  misc_feature (1)..(25): SEQ ID NO: 5595; WAN024CPI_at; Start 104; Stop 128
taatctgtcccgtaggcaagtctcg

SEQ ID NO: 127917 - DNA, 25 bp, Artificial
  probe
  misc_feature (1)..(25): SEQ ID NO: 5595; WAN024CPI_at; Start 56; Stop 80
tagtcaaagacttcccctgtcacca

SEQ ID NO: 127918 - DNA, 25 bp, Artificial
  probe
  misc_feature (1)..(25): SEQ ID NO: 5595; WAN024CPI_at; Start 79; Stop 103
cacactttcttgatgacgaacctga

SEQ ID NO: 127919 - DNA, 25 bp, Artificial
  probe
  misc_feature (1)..(25): SEQ ID NO: 2964; WAN024CPJ_at; Start 763; Stop 787
gccttggcgttgcaaacttttcttc

SEQ ID NO: 127920 - DNA, 25 bp, Artificial
  probe
  misc_feature (1)..(25): SEQ ID NO: 2964; WAN024CPJ_at; Start 1181; Stop 1205
tgctgttcgttacagggtctctcta

SEQ ID NO: 127921 - DNA, 25 bp, Artificial
  probe
  misc_feature (1)..(25): SEQ ID NO: 2964; WAN024CPJ_at; Start 105; Stop 129
tgagcagtcttaccctattatccac

SEQ ID NO: 127922 - DNA, 25 bp, Artificial
  probe
  misc_feature (1)..(25): SEQ ID NO: 2964; WAN024CPJ_at; Start 533; Stop 557
caattgcagagcagaaagctggtat

SEQ ID NO: 127923 - DNA, 25 bp, Artificial
  probe
  misc_feature (1)..(25): SEQ ID NO: 2964; WAN024CPJ_at; Start 520; Stop 544
gatagtctagaagcaattgcagagc

SEQ ID NO: 127924 - DNA, 25 bp, Artificial
  probe
  misc_feature (1)..(25): SEQ ID NO: 2964; WAN024CPJ_at; Start 1226; Stop 1250
gctacctgctggaccgtgagcagat

SEQ ID NO: 127925 - DNA, 25 bp, Artificial
  probe
  misc_feature (1)..(25): SEQ ID NO: 2964; WAN024CPJ_at; Start 414; Stop 438
tttattagaagtgggaattggtggc

SEQ ID NO: 127926 - DNA, 25 bp, Artificial
  probe
  misc_feature (1)..(25): SEQ ID NO: 2964; WAN024CPJ_at; Start 850; Stop 874
acccattgggctggtcgcttggagc

SEQ ID NO: 127927 - DNA, 25 bp, Artificial
  probe
  misc_feature (1)..(25): SEQ ID NO: 2964; WAN024CPJ_at; Start 189; Stop 213
gcatggcaaaaaagttgcgaccttt

SEQ ID NO: 127928 - DNA, 25 bp, Artificial
  probe
  misc_feature (1)..(25): SEQ ID NO: 2964; WAN024CPJ_at; Start 1201; Stop 1225
ctctattttatctcagaagtacggg

SEQ ID NO: 127929 - DNA, 25 bp, Artificial
  probe
  misc_feature (1)..(25): SEQ ID NO: 2964; WAN024CPJ_at; Start 152; Stop 176
gatctaccattgcttttatgaggga

SEQ ID NO: 127930 - DNA, 25 bp, Artificial
  probe
  misc_feature (1)..(25): SEQ ID NO: 2964; WAN024CPJ_at; Start 475; Stop 499
gctgtcatcacctccattgggcttg

SEQ ID NO: 127931 - DNA, 25 bp, Artificial
  probe
  misc_feature (1)..(25): SEQ ID NO: 2964; WAN024CPJ_at; Start 301; Stop 325
caggtcaaggagatggagaaaacgc

SEQ ID NO: 127932 - DNA, 25 bp, Artificial
  probe
  misc_feature (1)..(25): SEQ ID NO: 2964; WAN024CPJ_at; Start 76; Stop 100
cagcaagcggtggatttgttaggaa

SEQ ID NO: 127933 - DNA, 25 bp, Artificial
  probe
  misc_feature (1)..(25): SEQ ID NO: 2964; WAN024CPJ_at; Start 267; Stop 291
tatagcagacgcagactttatccgt

SEQ ID NO: 127934 - DNA, 25 bp, Artificial
  probe
  misc_feature (1)..(25): SEQ ID NO: 2964; WAN024CPJ_at; Start 708; Stop 732
aaatctttcacagctgaacataggc

SEQ ID NO: 127935 - DNA, 25 bp, Artificial
  probe
  misc_feature (1)..(25): SEQ ID NO: 2964; WAN024CPJ_at; Start 123; Stop 147
tatccacgtaacagggactaatggg

SEQ ID NO: 127936 - DNA, 25 bp, Artificial
  probe
  misc_feature (1)..(25): SEQ ID NO: 2964; WAN024CPJ_at; Start 648; Stop 672
cctttatcaggcaggtcaagatttt

SEQ ID NO: 127937 - DNA, 25 bp, Artificial
  probe
  misc_feature (1)..(25): SEQ ID NO: 2964; WAN024CPJ_at; Start 445; Stop 469
gacacgaccaatgtggtaactggag

SEQ ID NO: 127938 - DNA, 25 bp, Artificial
  probe
  misc_feature (1)..(25): SEQ ID NO: 2964; WAN024CPJ_at; Start 494; Stop 518
ggcttgaccatcaagaaaccttggg

SEQ ID NO: 127939 - DNA, 25 bp, Artificial
  probe
  misc_feature (1)..(25): SEQ ID NO: 2964; WAN024CPJ_at; Start 896; Stop 920
tggatggtgctcataacctccctgc

SEQ ID NO: 127940 - DNA, 25 bp, Artificial
  probe
  misc_feature (1)..(25): SEQ ID NO: 2964; WAN024CPJ_at; Start 816; Stop 840
tgatgaacaggctgtaagaaaggcc

SEQ ID NO: 127941 - DNA, 25 bp, Artificial
  probe
  misc_feature (1)..(25): SEQ ID NO: 2964; WAN024CPJ_at; Start 941; Stop 965
ttatcaaagaaaaagagcaggaagg

SEQ ID NO: 127942 - DNA, 25 bp, Artificial
  probe
  misc_feature (1)..(25): SEQ ID NO: 2964; WAN024CPJ_at; Start 316; Stop 340
gagaaaacgcttctgcaaactcctg

SEQ ID NO: 127943 - DNA, 25 bp, Artificial
  probe
  misc_feature (1)..(25): SEQ ID NO: 2964; WAN024CPJ_at; Start 833; Stop 857
gaaaggccttggaacagacccattg

SEQ ID NO: 127944 - DNA, 25 bp, Artificial
  probe
  misc_feature (1)..(25): SEQ ID NO: 2964; WAN024CPJ_at; Start 866; Stop 890
gcttggagcgtattcgcccacagat

SEQ ID NO: 127945 - DNA, 25 bp, Artificial
  probe
  misc_feature (1)..(25): SEQ ID NO: 2964; WAN024CPJ_at; Start 509; Stop 533
aaaccttgggtgatagtctagaagc

SEQ ID NO: 127946 - DNA, 25 bp, Artificial
  probe
  misc_feature (1)..(25): SEQ ID NO: 2964; WAN024CPJ_at; Start 547; Stop 571
aaagctggtattttcaaggctggta

SEQ ID NO: 127947 - DNA, 25 bp, Artificial
  probe
  misc_feature (1)..(25): SEQ ID NO: 2964; WAN024CPJ_at; Start 137; Stop 161
ggactaatgggaaaggatctaccat

SEQ ID NO: 127948 - DNA, 25 bp, Artificial
  probe
  misc_feature (1)..(25): SEQ ID NO: 2964; WAN024CPJ_at; Start 718; Stop 742
cagctgaacataggcttagaaggag

SEQ ID NO: 127949 - DNA, 25 bp, Artificial
  probe
  misc_feature (1)..(25): SEQ ID NO: 2964; WAN024CPJ_at; Start 31; Stop 55
catagtcggattggtttgaattttc

SEQ ID NO: 127950 - DNA, 25 bp, Artificial
  probe
  misc_feature (1)..(25): SEQ ID NO: 2964; WAN024CPJ_at; Start 429; Stop 453
aattggtggcttacttgacacgacc

SEQ ID NO: 127951 - DNA, 25 bp, Artificial
  probe
  misc_feature (1)..(25): SEQ ID NO: 2964; WAN024CPJ_at; Start 678; Stop 702
gctgaatggtgatttttcaagctct

SEQ ID NO: 127952 - DNA, 25 bp, Artificial
  probe
  misc_feature (1)..(25): SEQ ID NO: 2964; WAN024CPJ_at; Start 582; Stop 606
gattgcgaaattgcctccagaagct

SEQ ID NO: 127953 - DNA, 25 bp, Artificial
  probe
  misc_feature (1)..(25): SEQ ID NO: 875; WAN024CPK_at; Start 911; Stop 935
caagagatcccttgatgattttgga

SEQ ID NO: 127954 - DNA, 25 bp, Artificial
  probe
  misc_feature (1)..(25): SEQ ID NO: 875; WAN024CPK_at; Start 1242; Stop 1266
cacaggttccttgtatttcttgagc

SEQ ID NO: 127955 - DNA, 25 bp, Artificial
  probe
  misc_feature (1)..(25): SEQ ID NO: 875; WAN024CPK_at; Start 795; Stop 819
ggccatagctttacttgatactttt

SEQ ID NO: 127956 - DNA, 25 bp, Artificial
  probe
  misc_feature (1)..(25): SEQ ID NO: 875; WAN024CPK_at; Start 1223; Stop 1247
aacaaacagttaggattgtcacagg

SEQ ID NO: 127957 - DNA, 25 bp, Artificial
  probe
  misc_feature (1)..(25): SEQ ID NO: 875; WAN024CPK_at; Start 167; Stop 191
ttttgaaaaagatgctagaaaagct

SEQ ID NO: 127958 - DNA, 25 bp, Artificial
  probe
  misc_feature (1)..(25): SEQ ID NO: 875; WAN024CPK_at; Start 919; Stop 943
cccttgatgattttggatggagccc

SEQ ID NO: 127959 - DNA, 25 bp, Artificial
  probe
  misc_feature (1)..(25): SEQ ID NO: 875; WAN024CPK_at; Start 171; Stop 195
gaaaaagatgctagaaaagctaggg

SEQ ID NO: 127960 - DNA, 25 bp, Artificial
  probe
  misc_feature (1)..(25): SEQ ID NO: 875; WAN024CPK_at; Start 642; Stop 666
agatgcgccgagacttgcctacggg

SEQ ID NO: 127961 - DNA, 25 bp, Artificial
  probe
  misc_feature (1)..(25): SEQ ID NO: 875; WAN024CPK_at; Start 791; Stop 815
ggatggccatagctttacttgatac

SEQ ID NO: 127962 - DNA, 25 bp, Artificial
  probe
  misc_feature (1)..(25): SEQ ID NO: 875; WAN024CPK_at; Start 895; Stop 919
cgtttggaaatcgtgtcaagagatc

SEQ ID NO: 127963 - DNA, 25 bp, Artificial
  probe
  misc_feature (1)..(25): SEQ ID NO: 875; WAN024CPK_at; Start 899; Stop 923
tggaaatcgtgtcaagagatccctt

SEQ ID NO: 127964 - DNA, 25 bp, Artificial
  probe
  misc_feature (1)..(25): SEQ ID NO: 875; WAN024CPK_at; Start 920; Stop 944
ccttgatgattttggatggagccca

SEQ ID NO: 127965 - DNA, 25 bp, Artificial
  probe
  misc_feature (1)..(25): SEQ ID NO: 875; WAN024CPK_at; Start 97; Stop 121
ggcaatccccatctcaaactcaagg

SEQ ID NO: 127966 - DNA, 25 bp, Artificial
  probe
  misc_feature (1)..(25): SEQ ID NO: 875; WAN024CPK_at; Start 239; Stop 263
cagaccagattagcatcaatgggga

SEQ ID NO: 127967 - DNA, 25 bp, Artificial
  probe
  misc_feature (1)..(25): SEQ ID NO: 875; WAN024CPK_at; Start 890; Stop 914
cagggcgtttggaaatcgtgtcaag

SEQ ID NO: 127968 - DNA, 25 bp, Artificial
  probe
  misc_feature (1)..(25): SEQ ID NO: 875; WAN024CPK_at; Start 888; Stop 912
gccagggcgtttggaaatcgtgtca

SEQ ID NO: 127969 - DNA, 25 bp, Artificial
  probe
  misc_feature (1)..(25): SEQ ID NO: 875; WAN024CPK_at; Start 88; Stop 112
gctttgcgtggcaatccccatctca

SEQ ID NO: 127970 - DNA, 25 bp, Artificial
  probe
  misc_feature (1)..(25): SEQ ID NO: 875; WAN024CPK_at; Start 1233; Stop 1257
taggattgtcacaggttccttgtat

SEQ ID NO: 127971 - DNA, 25 bp, Artificial
  probe
  misc_feature (1)..(25): SEQ ID NO: 875; WAN024CPK_at; Start 815; Stop 839
ctttttgtcaagaagatggtcgaga

SEQ ID NO: 127972 - DNA, 25 bp, Artificial
  probe
  misc_feature (1)..(25): SEQ ID NO: 875; WAN024CPK_at; Start 905; Stop 929
tcgtgtcaagagatcccttgatgat

SEQ ID NO: 127973 - DNA, 25 bp, Artificial
  probe
  misc_feature (1)..(25): SEQ ID NO: 875; WAN024CPK_at; Start 1250; Stop 1274
ccttgtatttcttgagccaagtgag

SEQ ID NO: 127974 - DNA, 25 bp, Artificial
  probe
  misc_feature (1)..(25): SEQ ID NO: 875; WAN024CPK_at; Start 778; Stop 802
atagagaatgctgggatggccatag

SEQ ID NO: 127975 - DNA, 25 bp, Artificial
  probe
  misc_feature (1)..(25): SEQ ID NO: 875; WAN024CPK_at; Start 98; Stop 122
gcaatccccatctcaaactcaaggt

SEQ ID NO: 127976 - DNA, 25 bp, Artificial
  probe
  misc_feature (1)..(25): SEQ ID NO: 875; WAN024CPK_at; Start 811; Stop 835
gatactttttgtcaagaagatggtc

SEQ ID NO: 127977 - DNA, 25 bp, Artificial
  probe
  misc_feature (1)..(25): SEQ ID NO: 875; WAN024CPK_at; Start 787; Stop 811
gctgggatggccatagctttacttg

SEQ ID NO: 127978 - DNA, 25 bp, Artificial
  probe
  misc_feature (1)..(25): SEQ ID NO: 875; WAN024CPK_at; Start 732; Stop 756
tgtcagacaaggtcgcttccagact

SEQ ID NO: 127979 - DNA, 25 bp, Artificial
  probe
  misc_feature (1)..(25): SEQ ID NO: 875; WAN024CPK_at; Start 85; Stop 109
ttagctttgcgtggcaatccccatc

SEQ ID NO: 127980 - DNA, 25 bp, Artificial
  probe
  misc_feature (1)..(25): SEQ ID NO: 875; WAN024CPK_at; Start 871; Stop 895
ttggaagaaacaagttggccagggc

SEQ ID NO: 127981 - DNA, 25 bp, Artificial
  probe
  misc_feature (1)..(25): SEQ ID NO: 875; WAN024CPK_at; Start 783; Stop 807
gaatgctgggatggccatagcttta

SEQ ID NO: 127982 - DNA, 25 bp, Artificial
  probe
  misc_feature (1)..(25): SEQ ID NO: 875; WAN024CPK_at; Start 1202; Stop 1226
tgacagataaaaaagaagagaaaca

SEQ ID NO: 127983 - DNA, 25 bp, Artificial
  probe
  misc_feature (1)..(25): SEQ ID NO: 875; WAN024CPK_at; Start 1227; Stop 1251
aacagttaggattgtcacaggttcc

SEQ ID NO: 127984 - DNA, 25 bp, Artificial
  probe
  misc_feature (1)..(25): SEQ ID NO: 875; WAN024CPK_at; Start 639; Stop 663
gaaagatgcgccgagacttgcctac

SEQ ID NO: 127985 - DNA, 25 bp, Artificial
  probe
  misc_feature (1)..(25): SEQ ID NO: 875; WAN024CPK_at; Start 1216; Stop 1240
gaagagaaacaaacagttaggattg

SEQ ID NO: 127986 - DNA, 25 bp, Artificial
  probe
  misc_feature (1)..(25): SEQ ID NO: 875; WAN024CPK_at; Start 1244; Stop 1268
caggttccttgtatttcttgagcca

SEQ ID NO: 127987 - DNA, 25 bp, Artificial
  probe
  misc_feature (1)..(25): SEQ ID NO: 7553; WAN024CPL_at; Start 159; Stop 183
tctcctcaccttggtagatataagg

SEQ ID NO: 127988 - DNA, 25 bp, Artificial
  probe
  misc_feature (1)..(25): SEQ ID NO: 7553; WAN024CPL_at; Start 127; Stop 151
cagtgtttcaaacggatagttggtc

SEQ ID NO: 127989 - DNA, 25 bp, Artificial
  probe
  misc_feature (1)..(25): SEQ ID NO: 7553; WAN024CPL_at; Start 87; Stop 111
cacgcgcatagttgagagattcaat

SEQ ID NO: 127990 - DNA, 25 bp, Artificial
  probe
  misc_feature (1)..(25): SEQ ID NO: 7553; WAN024CPL_at; Start 17; Stop 41
gcattgtcacgtccaataacacgga

SEQ ID NO: 127991 - DNA, 25 bp, Artificial
  probe
  misc_feature (1)..(25): SEQ ID NO: 7553; WAN024CPL_at; Start 201; Stop 225
gaagcaagattgcaaaggctttggc

SEQ ID NO: 127992 - DNA, 25 bp, Artificial
  probe
  misc_feature (1)..(25): SEQ ID NO: 7553; WAN024CPL_at; Start 182; Stop 206
ggagttcctctcataagatgaagca

SEQ ID NO: 127993 - DNA, 25 bp, Artificial
  probe
  misc_feature (1)..(25): SEQ ID NO: 7553; WAN024CPL_at; Start 81; Stop 105
gagcctcacgcgcatagttgagaga

SEQ ID NO: 127994 - DNA, 25 bp, Artificial
  probe
  misc_feature (1)..(25): SEQ ID NO: 7553; WAN024CPL_at; Start 235; Stop 259
gcggtattcttggtcatttccccag

SEQ ID NO: 127995 - DNA, 25 bp, Artificial
  probe
  misc_feature (1)..(25): SEQ ID NO: 7553; WAN024CPL_at; Start 153; Stop 177
tcccaatctcctcaccttggtagat

SEQ ID NO: 127996 - DNA, 25 bp, Artificial
  probe
  misc_feature (1)..(25): SEQ ID NO: 7553; WAN024CPL_at; Start 22; Stop 46
gtcacgtccaataacacggatactg

SEQ ID NO: 127997 - DNA, 25 bp, Artificial
  probe
  misc_feature (1)..(25): SEQ ID NO: 7553; WAN024CPL_at; Start 60; Stop 84
caatcggaacacctttttcaagagc

SEQ ID NO: 127998 - DNA, 25 bp, Artificial
  probe
  misc_feature (1)..(25): SEQ ID NO: 7553; WAN024CPL_at; Start 9; Stop 33
gggtacgggcattgtcacgtccaat

SEQ ID NO: 127999 - DNA, 25 bp, Artificial
  probe
  misc_feature (1)..(25): SEQ ID NO: 7553; WAN024CPL_at; Start 134; Stop 158
tcaaacggatagttggtcatcccaa

SEQ ID NO: 128000 - DNA, 25 bp, Artificial
  probe
  misc_feature (1)..(25): SEQ ID NO: 7553; WAN024CPL_at; Start 118; Stop 142
tacttgatccagtgtttcaaacgga

SEQ ID NO: 128001 - DNA, 25 bp, Artificial
  probe
  misc_feature (1)..(25): SEQ ID NO: 7553; WAN024CPL_at; Start 76; Stop 100
ttcaagagcctcacgcgcatagttg

SEQ ID NO: 128002 - DNA, 25 bp, Artificial
  probe
  misc_feature (1)..(25): SEQ ID NO: 7553; WAN024CPL_at; Start 219; Stop 243
ctttggcagatttttcgcggtattc

SEQ ID NO: 128003 - DNA, 25 bp, Artificial
  probe
  misc_feature (1)..(25): SEQ ID NO: 7553; WAN024CPL_at; Start 108; Stop 132
caatatcttctacttgatccagtgt

SEQ ID NO: 128004 - DNA, 25 bp, Artificial
  probe
  misc_feature (1)..(25): SEQ ID NO: 7553; WAN024CPL_at; Start 213; Stop 237
caaaggctttggcagatttttcgcg

SEQ ID NO: 128005 - DNA, 25 bp, Artificial
  probe
  misc_feature (1)..(25): SEQ ID NO: 7553; WAN024CPL_at; Start 139; Stop 163
cggatagttggtcatcccaatctcc

SEQ ID NO: 128006 - DNA, 25 bp, Artificial
  probe
  misc_feature (1)..(25): SEQ ID NO: 7553; WAN024CPL_at; Start 227; Stop 251
gatttttcgcggtattcttggtcat

SEQ ID NO: 128007 - DNA, 25 bp, Artificial
  probe
  misc_feature (1)..(25): SEQ ID NO: 7553; WAN024CPL_at; Start 48; Stop 72
ccatgatttcttcaatcggaacacc

SEQ ID NO: 128008 - DNA, 25 bp, Artificial
  probe
  misc_feature (1)..(25): SEQ ID NO: 7553; WAN024CPL_at; Start 38; Stop 62
cggatactgtccatgatttcttcaa

SEQ ID NO: 128009 - DNA, 25 bp, Artificial
  probe
  misc_feature (1)..(25): SEQ ID NO: 7553; WAN024CPL_at; Start 42; Stop 66
tactgtccatgatttcttcaatcgg

SEQ ID NO: 128010 - DNA, 25 bp, Artificial
  probe
  misc_feature (1)..(25): SEQ ID NO: 7553; WAN024CPL_at; Start 93; Stop 117
catagttgagagattcaatatcttc

SEQ ID NO: 128011 - DNA, 25 bp, Artificial
  probe
  misc_feature (1)..(25): SEQ ID NO: 7553; WAN024CPL_at; Start 240; Stop 264
attcttggtcatttccccagattga

SEQ ID NO: 128012 - DNA, 25 bp, Artificial
  probe
  misc_feature (1)..(25): SEQ ID NO: 7553; WAN024CPL_at; Start 167; Stop 191
ccttggtagatataaggagttcctc

SEQ ID NO: 128013 - DNA, 25 bp, Artificial
  probe
  misc_feature (1)..(25): SEQ ID NO: 7553; WAN024CPL_at; Start 73; Stop 97
tttttcaagagcctcacgcgcatag

SEQ ID NO: 128014 - DNA, 25 bp, Artificial
  probe
  misc_feature (1)..(25): SEQ ID NO: 7553; WAN024CPL_at; Start 195; Stop 219
taagatgaagcaagattgcaaaggc

SEQ ID NO: 128015 - DNA, 25 bp, Artificial
  probe
  misc_feature (1)..(25): SEQ ID NO: 7553; WAN024CPL_at; Start 12; Stop 36
tacgggcattgtcacgtccaataac

SEQ ID NO: 128016 - DNA, 25 bp, Artificial
  probe
  misc_feature (1)..(25): SEQ ID NO: 7553; WAN024CPL_at; Start 66; Stop 90
gaacacctttttcaagagcctcacg

SEQ ID NO: 128017 - DNA, 25 bp, Artificial
  probe
  misc_feature (1)..(25): SEQ ID NO: 7553; WAN024CPL_at; Start 190; Stop 214
tctcataagatgaagcaagattgca

SEQ ID NO: 128018 - DNA, 25 bp, Artificial
  probe
  misc_feature (1)..(25): SEQ ID NO: 7553; WAN024CPL_at; Start 171; Stop 195
ggtagatataaggagttcctctcat

SEQ ID NO: 128019 - DNA, 25 bp, Artificial
  probe
  misc_feature (1)..(25): SEQ ID NO: 7553; WAN024CPL_at; Start 33; Stop 57
taacacggatactgtccatgatttc

SEQ ID NO: 128020 - DNA, 25 bp, Artificial
  probe
  misc_feature (1)..(25): SEQ ID NO: 7553; WAN024CPL_at; Start 28; Stop 52
tccaataacacggatactgtccatg

SEQ ID NO: 128021 - DNA, 25 bp, Artificial
  probe
  misc_feature (1)..(25): SEQ ID NO: 5191; WAN024CPM_at; Start 196; Stop 220
gagcataggaccattattgactacc

SEQ ID NO: 128022 - DNA, 25 bp, Artificial
  probe
  misc_feature (1)..(25): SEQ ID NO: 5191; WAN024CPM_at; Start 404; Stop 428
tcccaagcagatccactaaaaatag

SEQ ID NO: 128023 - DNA, 25 bp, Artificial
  probe
  misc_feature (1)..(25): SEQ ID NO: 5191; WAN024CPM_at; Start 300; Stop 324
tcatctcataaattttctggcgaag

SEQ ID NO: 128024 - DNA, 25 bp, Artificial
  probe
  misc_feature (1)..(25): SEQ ID NO: 5191; WAN024CPM_at; Start 140; Stop 164
gtcaagagatccttatctccaaagg

SEQ ID NO: 128025 - DNA, 25 bp, Artificial
  probe
  misc_feature (1)..(25): SEQ ID NO: 5191; WAN024CPM_at; Start 51; Stop 75
caaactggaagaccatagacaattc

SEQ ID NO: 128026 - DNA, 25 bp, Artificial
  probe
  misc_feature (1)..(25): SEQ ID NO: 5191; WAN024CPM_at; Start 70; Stop 94
caattcttgcccctttggatcagag

SEQ ID NO: 128027 - DNA, 25 bp, Artificial
  probe
  misc_feature (1)..(25): SEQ ID NO: 5191; WAN024CPM_at; Start 74; Stop 98
tcttgcccctttggatcagagtaga

SEQ ID NO: 128028 - DNA, 25 bp, Artificial
  probe
  misc_feature (1)..(25): SEQ ID NO: 5191; WAN024CPM_at; Start 186; Stop 210
gatagggatggagcataggaccatt

SEQ ID NO: 128029 - DNA, 25 bp, Artificial
  probe
  misc_feature (1)..(25): SEQ ID NO: 5191; WAN024CPM_at; Start 147; Stop 171
gatccttatctccaaaggtcgcctg

SEQ ID NO: 128030 - DNA, 25 bp, Artificial
  probe
  misc_feature (1)..(25): SEQ ID NO: 5191; WAN024CPM_at; Start 153; Stop 177
tatctccaaaggtcgcctgattcat

SEQ ID NO: 128031 - DNA, 25 bp, Artificial
  probe
  misc_feature (1)..(25): SEQ ID NO: 5191; WAN024CPM_at; Start 26; Stop 50
tcctgatactgaagaccgatatgtt

SEQ ID NO: 128032 - DNA, 25 bp, Artificial
  probe
  misc_feature (1)..(25): SEQ ID NO: 5191; WAN024CPM_at; Start 36; Stop 60
gaagaccgatatgttcaaactggaa

SEQ ID NO: 128033 - DNA, 25 bp, Artificial
  probe
  misc_feature (1)..(25): SEQ ID NO: 5191; WAN024CPM_at; Start 41; Stop 65
ccgatatgttcaaactggaagacca

SEQ ID NO: 128034 - DNA, 25 bp, Artificial
  probe
  misc_feature (1)..(25): SEQ ID NO: 5191; WAN024CPM_at; Start 389; Stop 413
gatttttcatcgtattcccaagcag

SEQ ID NO: 128035 - DNA, 25 bp, Artificial
  probe
  misc_feature (1)..(25): SEQ ID NO: 5191; WAN024CPM_at; Start 124; Stop 148
ccaagtctcccctactgtcaagaga

SEQ ID NO: 128036 - DNA, 25 bp, Artificial
  probe
  misc_feature (1)..(25): SEQ ID NO: 5191; WAN024CPM_at; Start 350; Stop 374
ggctgtttcttgctgaaaaagtgga

SEQ ID NO: 128037 - DNA, 25 bp, Artificial
  probe
  misc_feature (1)..(25): SEQ ID NO: 5191; WAN024CPM_at; Start 1; Stop 25
ttgatagtgccatttaggctgacct

SEQ ID NO: 128038 - DNA, 25 bp, Artificial
  probe
  misc_feature (1)..(25): SEQ ID NO: 5191; WAN024CPM_at; Start 231; Stop 255
gaattttgccaatcatgtcaataac

SEQ ID NO: 128039 - DNA, 25 bp, Artificial
  probe
  misc_feature (1)..(25): SEQ ID NO: 5191; WAN024CPM_at; Start 9; Stop 33
gccatttaggctgaccttcctgata

SEQ ID NO: 128040 - DNA, 25 bp, Artificial
  probe
  misc_feature (1)..(25): SEQ ID NO: 5191; WAN024CPM_at; Start 363; Stop 387
tgaaaaagtggagatagtattgacc

SEQ ID NO: 128041 - DNA, 25 bp, Artificial
  probe
  misc_feature (1)..(25): SEQ ID NO: 5191; WAN024CPM_at; Start 315; Stop 339
tctggcgaagtttttcattttccca

SEQ ID NO: 128042 - DNA, 25 bp, Artificial
  probe
  misc_feature (1)..(25): SEQ ID NO: 5191; WAN024CPM_at; Start 246; Stop 270
tgtcaataacatccatacggaaacc

SEQ ID NO: 128043 - DNA, 25 bp, Artificial
  probe
  misc_feature (1)..(25): SEQ ID NO: 5191; WAN024CPM_at; Start 398; Stop 422
tcgtattcccaagcagatccactaa

SEQ ID NO: 128044 - DNA, 25 bp, Artificial
  probe
  misc_feature (1)..(25): SEQ ID NO: 5191; WAN024CPM_at; Start 20; Stop 44
tgaccttcctgatactgaagaccga

SEQ ID NO: 128045 - DNA, 25 bp, Artificial
  probe
  misc_feature (1)..(25): SEQ ID NO: 5191; WAN024CPM_at; Start 207; Stop 231
cattattgactaccttctcgtcagg

SEQ ID NO: 128046 - DNA, 25 bp, Artificial
  probe
  misc_feature (1)..(25): SEQ ID NO: 5191; WAN024CPM_at; Start 256; Stop 280
atccatacggaaaccaccaatacct

SEQ ID NO: 128047 - DNA, 25 bp, Artificial
  probe
  misc_feature (1)..(25): SEQ ID NO: 5191; WAN024CPM_at; Start 175; Stop 199
catttccttgagatagggatggagc

SEQ ID NO: 128048 - DNA, 25 bp, Artificial
  probe
  misc_feature (1)..(25): SEQ ID NO: 5191; WAN024CPM_at; Start 224; Stop 248
tcgtcaggaattttgccaatcatgt

SEQ ID NO: 128049 - DNA, 25 bp, Artificial
  probe
  misc_feature (1)..(25): SEQ ID NO: 5191; WAN024CPM_at; Start 343; Stop 367
gagatccggctgtttcttgctgaaa

SEQ ID NO: 128050 - DNA, 25 bp, Artificial
  probe
  misc_feature (1)..(25): SEQ ID NO: 5191; WAN024CPM_at; Start 15; Stop 39
taggctgaccttcctgatactgaag

SEQ ID NO: 128051 - DNA, 25 bp, Artificial
  probe
  misc_feature (1)..(25): SEQ ID NO: 5191; WAN024CPM_at; Start 64; Stop 88
catagacaattcttgcccctttgga

SEQ ID NO: 128052 - DNA, 25 bp, Artificial
  probe
  misc_feature (1)..(25): SEQ ID NO: 5191; WAN024CPM_at; Start 217; Stop 241
taccttctcgtcaggaattttgcca

SEQ ID NO: 128053 - DNA, 25 bp, Artificial
  probe
  misc_feature (1)..(25): SEQ ID NO: 5191; WAN024CPM_at; Start 163; Stop 187
ggtcgcctgattcatttccttgaga

SEQ ID NO: 128054 - DNA, 25 bp, Artificial
  probe
  misc_feature (1)..(25): SEQ ID NO: 5191; WAN024CPM_at; Start 410; Stop 434
gcagatccactaaaaatagaatcta

SEQ ID NO: 128055 - DNA, 25 bp, Artificial
  probe
  misc_feature (1)..(25): SEQ ID NO: 2129; WAN024CPN_at; Start 68; Stop 92
acaagggaggactgtataaaaagca

SEQ ID NO: 128056 - DNA, 25 bp, Artificial
  probe
  misc_feature (1)..(25): SEQ ID NO: 2129; WAN024CPN_at; Start 77; Stop 101
gactgtataaaaagcagaaatcctt

SEQ ID NO: 128057 - DNA, 25 bp, Artificial
  probe
  misc_feature (1)..(25): SEQ ID NO: 2129; WAN024CPN_at; Start 6; Stop 30
ttctgtgtggaattactataaatat

SEQ ID NO: 128058 - DNA, 25 bp, Artificial
  probe
  misc_feature (1)..(25): SEQ ID NO: 2129; WAN024CPN_at; Start 7; Stop 31
tctgtgtggaattactataaatatt

SEQ ID NO: 128059 - DNA, 25 bp, Artificial
  probe
  misc_feature (1)..(25): SEQ ID NO: 2129; WAN024CPN_at; Start 80; Stop 104
tgtataaaaagcagaaatcctttgt

SEQ ID NO: 128060 - DNA, 25 bp, Artificial
  probe
  misc_feature (1)..(25): SEQ ID NO: 2129; WAN024CPN_at; Start 5; Stop 29
tttctgtgtggaattactataaata

SEQ ID NO: 128061 - DNA, 25 bp, Artificial
  probe
  misc_feature (1)..(25): SEQ ID NO: 2129; WAN024CPN_at; Start 15; Stop 39
gaattactataaatattttttgcag

SEQ ID NO: 128062 - DNA, 25 bp, Artificial
  probe
  misc_feature (1)..(25): SEQ ID NO: 2129; WAN024CPN_at; Start 60; Stop 84
atataaaaacaagggaggactgtat

SEQ ID NO: 128063 - DNA, 25 bp, Artificial
  probe
  misc_feature (1)..(25): SEQ ID NO: 2129; WAN024CPN_at; Start 3; Stop 27
gctttctgtgtggaattactataaa

SEQ ID NO: 128064 - DNA, 25 bp, Artificial
  probe
  misc_feature (1)..(25): SEQ ID NO: 2129; WAN024CPN_at; Start 69; Stop 93
caagggaggactgtataaaaagcag

SEQ ID NO: 128065 - DNA, 25 bp, Artificial
  probe
  misc_feature (1)..(25): SEQ ID NO: 2129; WAN024CPN_at; Start 16; Stop 40
aattactataaatattttttgcaga

SEQ ID NO: 128066 - DNA, 25 bp, Artificial
  probe
  misc_feature (1)..(25): SEQ ID NO: 2129; WAN024CPN_at; Start 14; Stop 38
ggaattactataaatattttttgca

SEQ ID NO: 128067 - DNA, 25 bp, Artificial
  probe
  misc_feature (1)..(25): SEQ ID NO: 2129; WAN024CPN_at; Start 61; Stop 85
tataaaaacaagggaggactgtata

SEQ ID NO: 128068 - DNA, 25 bp, Artificial
  probe
  misc_feature (1)..(25): SEQ ID NO: 2129; WAN024CPN_at; Start 79; Stop 103
ctgtataaaaagcagaaatcctttg

SEQ ID NO: 128069 - DNA, 25 bp, Artificial
  probe
  misc_feature (1)..(25): SEQ ID NO: 2129; WAN024CPN_at; Start 74; Stop 98
gaggactgtataaaaagcagaaatc

SEQ ID NO: 128070 - DNA, 25 bp, Artificial
  probe
  misc_feature (1)..(25): SEQ ID NO: 2129; WAN024CPN_at; Start 8; Stop 32
ctgtgtggaattactataaatattt

SEQ ID NO: 128071 - DNA, 25 bp, Artificial
  probe
  misc_feature (1)..(25): SEQ ID NO: 2129; WAN024CPN_at; Start 52; Stop 76
ttgaaatcatataaaaacaagggag

SEQ ID NO: 128072 - DNA, 25 bp, Artificial
  probe
  misc_feature (1)..(25): SEQ ID NO: 2129; WAN024CPN_at; Start 71; Stop 95
agggaggactgtataaaaagcagaa

SEQ ID NO: 128073 - DNA, 25 bp, Artificial
  probe
  misc_feature (1)..(25): SEQ ID NO: 2129; WAN024CPN_at; Start 70; Stop 94
aagggaggactgtataaaaagcaga

SEQ ID NO: 128074 - DNA, 25 bp, Artificial
  probe
  misc_feature (1)..(25): SEQ ID NO: 2129; WAN024CPN_at; Start 9; Stop 33
tgtgtggaattactataaatatttt

SEQ ID NO: 128075 - DNA, 25 bp, Artificial
  probe
  misc_feature (1)..(25): SEQ ID NO: 2129; WAN024CPN_at; Start 76; Stop 100
ggactgtataaaaagcagaaatcct

SEQ ID NO: 128076 - DNA, 25 bp, Artificial
  probe
  misc_feature (1)..(25): SEQ ID NO: 2129; WAN024CPN_at; Start 19; Stop 43
tactataaatattttttgcagaaaa

SEQ ID NO: 128077 - DNA, 25 bp, Artificial
  probe
  misc_feature (1)..(25): SEQ ID NO: 2129; WAN024CPN_at; Start 73; Stop 97
ggaggactgtataaaaagcagaaat

SEQ ID NO: 128078 - DNA, 25 bp, Artificial
  probe
  misc_feature (1)..(25): SEQ ID NO: 2129; WAN024CPN_at; Start 13; Stop 37
tggaattactataaatattttttgc

SEQ ID NO: 128079 - DNA, 25 bp, Artificial
  probe
  misc_feature (1)..(25): SEQ ID NO: 2129; WAN024CPN_at; Start 50; Stop 74
aattgaaatcatataaaaacaaggg

SEQ ID NO: 128080 - DNA, 25 bp, Artificial
  probe
  misc_feature (1)..(25): SEQ ID NO: 2129; WAN024CPN_at; Start 4; Stop 28
ctttctgtgtggaattactataaat

SEQ ID NO: 128081 - DNA, 25 bp, Artificial
  probe
  misc_feature (1)..(25): SEQ ID NO: 2129; WAN024CPN_at; Start 58; Stop 82
tcatataaaaacaagggaggactgt

SEQ ID NO: 128082 - DNA, 25 bp, Artificial
  probe
  misc_feature (1)..(25): SEQ ID NO: 2129; WAN024CPN_at; Start 75; Stop 99
aggactgtataaaaagcagaaatcc

SEQ ID NO: 128083 - DNA, 25 bp, Artificial
  probe
  misc_feature (1)..(25): SEQ ID NO: 2129; WAN024CPN_at; Start 59; Stop 83
catataaaaacaagggaggactgta

SEQ ID NO: 128084 - DNA, 25 bp, Artificial
  probe
  misc_feature (1)..(25): SEQ ID NO: 2129; WAN024CPN_at; Start 56; Stop 80
aatcatataaaaacaagggaggact

SEQ ID NO: 128085 - DNA, 25 bp, Artificial
  probe
  misc_feature (1)..(25): SEQ ID NO: 2129; WAN024CPN_at; Start 78; Stop 102
actgtataaaaagcagaaatccttt

SEQ ID NO: 128086 - DNA, 25 bp, Artificial
  probe
  misc_feature (1)..(25): SEQ ID NO: 2129; WAN024CPN_at; Start 53; Stop 77
tgaaatcatataaaaacaagggagg

SEQ ID NO: 128087 - DNA, 25 bp, Artificial
  probe
  misc_feature (1)..(25): SEQ ID NO: 2129; WAN024CPN_at; Start 54; Stop 78
gaaatcatataaaaacaagggagga

SEQ ID NO: 128088 - DNA, 25 bp, Artificial
  probe
  misc_feature (1)..(25): SEQ ID NO: 2129; WAN024CPN_at; Start 57; Stop 81
atcatataaaaacaagggaggactg

SEQ ID NO: 128089 - DNA, 25 bp, Artificial
  probe
  misc_feature (1)..(25): SEQ ID NO: 1917; WAN024CPO_at; Start 162; Stop 186
tgacagccctatggatgataatggc

SEQ ID NO: 128090 - DNA, 25 bp, Artificial
  probe
  misc_feature (1)..(25): SEQ ID NO: 1917; WAN024CPO_at; Start 979; Stop 1003
taccgcgaaaaatctgccaaagcct

SEQ ID NO: 128091 - DNA, 25 bp, Artificial
  probe
  misc_feature (1)..(25): SEQ ID NO: 1917; WAN024CPO_at; Start 1043; Stop 1067
tctaccaaggtgaggagattgggat

SEQ ID NO: 128092 - DNA, 25 bp, Artificial
  probe
  misc_feature (1)..(25): SEQ ID NO: 1917; WAN024CPO_at; Start 666; Stop 690
tcaggcgacctttggagataaggat

SEQ ID NO: 128093 - DNA, 25 bp, Artificial
  probe
  misc_feature (1)..(25): SEQ ID NO: 1917; WAN024CPO_at; Start 620; Stop 644
tagtcaataatggtcctatgctcca

SEQ ID NO: 128094 - DNA, 25 bp, Artificial
  probe
  misc_feature (1)..(25): SEQ ID NO: 1917; WAN024CPO_at; Start 606; Stop 630
tcctgacgagaaggtagtcaataat

SEQ ID NO: 128095 - DNA, 25 bp, Artificial
  probe
  misc_feature (1)..(25): SEQ ID NO: 1917; WAN024CPO_at; Start 1132; Stop 1156
gaggctcttgaaaaaggtgttccga

SEQ ID NO: 128096 - DNA, 25 bp, Artificial
  probe
  misc_feature (1)..(25): SEQ ID NO: 1917; WAN024CPO_at; Start 29; Stop 53
tagtctatcaagtctatccaaagag

SEQ ID NO: 128097 - DNA, 25 bp, Artificial
  probe
  misc_feature (1)..(25): SEQ ID NO: 1917; WAN024CPO_at; Start 822; Stop 846
taaatggcactatcaaaaagagctg

SEQ ID NO: 128098 - DNA, 25 bp, Artificial
  probe
  misc_feature (1)..(25): SEQ ID NO: 1917; WAN024CPO_at; Start 1178; Stop 1202
tccgtgttattggacgtgacaatgc

SEQ ID NO: 128099 - DNA, 25 bp, Artificial
  probe
  misc_feature (1)..(25): SEQ ID NO: 1917; WAN024CPO_at; Start 963; Stop 987
gggaaatgaccaagaataccgcgaa

SEQ ID NO: 128100 - DNA, 25 bp, Artificial
  probe
  misc_feature (1)..(25): SEQ ID NO: 1917; WAN024CPO_at; Start 835; Stop 859
caaaaagagctgaatatcgctaagt

SEQ ID NO: 128101 - DNA, 25 bp, Artificial
  probe
  misc_feature (1)..(25): SEQ ID NO: 1917; WAN024CPO_at; Start 251; Stop 275
tgattgcagaagctaagaagcgtga

SEQ ID NO: 128102 - DNA, 25 bp, Artificial
  probe
  misc_feature (1)..(25): SEQ ID NO: 1917; WAN024CPO_at; Start 514; Stop 538
cttcgccagaaaatttatgagatga

SEQ ID NO: 128103 - DNA, 25 bp, Artificial
  probe
  misc_feature (1)..(25): SEQ ID NO: 1917; WAN024CPO_at; Start 876; Stop 900
caaatggcagacagagttaggagtt

SEQ ID NO: 128104 - DNA, 25 bp, Artificial
  probe
  misc_feature (1)..(25): SEQ ID NO: 1917; WAN024CPO_at; Start 1345; Stop 1369
aaactggtccaaattcgcaaggaga

SEQ ID NO: 128105 - DNA, 25 bp, Artificial
  probe
  misc_feature (1)..(25): SEQ ID NO: 1917; WAN024CPO_at; Start 499; Stop 523
tgggaaaatgaaaaacttcgccaga

SEQ ID NO: 128106 - DNA, 25 bp, Artificial
  probe
  misc_feature (1)..(25): SEQ ID NO: 1917; WAN024CPO_at; Start 651; Stop 675
tctcaaggaaatgaatcaggcgacc

SEQ ID NO: 128107 - DNA, 25 bp, Artificial
  probe
  misc_feature (1)..(25): SEQ ID NO: 1917; WAN024CPO_at; Start 217; Stop 241
gctatttttggaaccatggaggaca

SEQ ID NO: 128108 - DNA, 25 bp, Artificial
  probe
  misc_feature (1)..(25): SEQ ID NO: 1917; WAN024CPO_at; Start 805; Stop 829
tatcaggaaggtcagcctaaatggc

SEQ ID NO: 128109 - DNA, 25 bp, Artificial
  probe
  misc_feature (1)..(25): SEQ ID NO: 1917; WAN024CPO_at; Start 591; Stop 615
catgattggcaaaattcctgacgag

SEQ ID NO: 128110 - DNA, 25 bp, Artificial
  probe
  misc_feature (1)..(25): SEQ ID NO: 1917; WAN024CPO_at; Start 1162; Stop 1186
gaaatcatggacagtatccgtgtta

SEQ ID NO: 128111 - DNA, 25 bp, Artificial
  probe
  misc_feature (1)..(25): SEQ ID NO: 1917; WAN024CPO_at; Start 1028; Stop 1052
gaggaactccttatatctaccaagg

SEQ ID NO: 128112 - DNA, 25 bp, Artificial
  probe
  misc_feature (1)..(25): SEQ ID NO: 1917; WAN024CPO_at; Start 787; Stop 811
gaacatatcggtcttcagtatcagg

SEQ ID NO: 128113 - DNA, 25 bp, Artificial
  probe
  misc_feature (1)..(25): SEQ ID NO: 1917; WAN024CPO_at; Start 568; Stop 592
ggtttccgtatggatgttattgaca

SEQ ID NO: 128114 - DNA, 25 bp, Artificial
  probe
  misc_feature (1)..(25): SEQ ID NO: 1917; WAN024CPO_at; Start 98; Stop 122
ttaccagtaagttggactatctagc

SEQ ID NO: 128115 - DNA, 25 bp, Artificial
  probe
  misc_feature (1)..(25): SEQ ID NO: 1917; WAN024CPO_at; Start 636; Stop 660
tatgctccatccctatctcaaggaa

SEQ ID NO: 128116 - DNA, 25 bp, Artificial
  probe
  misc_feature (1)..(25): SEQ ID NO: 1917; WAN024CPO_at; Start 1062; Stop 1086
tgggatgaccaactatccgtttgaa

SEQ ID NO: 128117 - DNA, 25 bp, Artificial
  probe
  misc_feature (1)..(25): SEQ ID NO: 1917; WAN024CPO_at; Start 359; Stop 383
gccctgagcgagactactatatctg

SEQ ID NO: 128118 - DNA, 25 bp, Artificial
  probe
  misc_feature (1)..(25): SEQ ID NO: 1917; WAN024CPO_at; Start 759; Stop 783
gcaagaattgtctatggtcttccag

SEQ ID NO: 128119 - DNA, 25 bp, Artificial
  probe
  misc_feature (1)..(25): SEQ ID NO: 1917; WAN024CPO_at; Start 1431; Stop 1455
tatacgtaaggatggcgaccgtcgc

SEQ ID NO: 128120 - DNA, 25 bp, Artificial
  probe
  misc_feature (1)..(25): SEQ ID NO: 1917; WAN024CPO_at; Start 773; Stop 797
tggtcttccagtttgaacatatcgg

SEQ ID NO: 128121 - DNA, 25 bp, Artificial
  probe
  misc_feature (1)..(25): SEQ ID NO: 1917; WAN024CPO_at; Start 196; Stop 220
gctgattatcaagcgattgcggcta

SEQ ID NO: 128122 - DNA, 25 bp, Artificial
  probe
  misc_feature (1)..(25): SEQ ID NO: 1917; WAN024CPO_at; Start 865; Stop 889
gaaatcttcaacaaatggcagacag

SEQ ID NO: 128123 - DNA, 25 bp, Artificial
  probe
  misc_feature (1)..(25): SEQ ID NO: 7057; WAN024CPP_at; Start 577; Stop 601
gcagctatcttgaagagcaaggccg

SEQ ID NO: 128124 - DNA, 25 bp, Artificial
  probe
  misc_feature (1)..(25): SEQ ID NO: 7057; WAN024CPP_at; Start 549; Stop 573
agatcctgttaaggcctgggaagag

SEQ ID NO: 128125 - DNA, 25 bp, Artificial
  probe
  misc_feature (1)..(25): SEQ ID NO: 7057; WAN024CPP_at; Start 748; Stop 772
gaagaggtcttcacagcgcctgact

SEQ ID NO: 128126 - DNA, 25 bp, Artificial
  probe
  misc_feature (1)..(25): SEQ ID NO: 7057; WAN024CPP_at; Start 437; Stop 461
ccgctgctggacttgaatgggctaa

SEQ ID NO: 128127 - DNA, 25 bp, Artificial
  probe
  misc_feature (1)..(25): SEQ ID NO: 7057; WAN024CPP_at; Start 496; Stop 520
gcagtcgatctcctttgggaccaaa

SEQ ID NO: 128128 - DNA, 25 bp, Artificial
  probe
  misc_feature (1)..(25): SEQ ID NO: 7057; WAN024CPP_at; Start 828; Stop 852
tatcatcgaaggtattaaggtaacc

SEQ ID NO: 128129 - DNA, 25 bp, Artificial
  probe
  misc_feature (1)..(25): SEQ ID NO: 7057; WAN024CPP_at; Start 851; Stop 875
cctttaaggatggacaaatcgtaga

SEQ ID NO: 128130 - DNA, 25 bp, Artificial
  probe
  misc_feature (1)..(25): SEQ ID NO: 7057; WAN024CPP_at; Start 116; Stop 140
tggcacatctaatcgtgaaagaagc

SEQ ID NO: 128131 - DNA, 25 bp, Artificial
  probe
  misc_feature (1)..(25): SEQ ID NO: 7057; WAN024CPP_at; Start 1032; Stop 1056
aaaccacttggctattggtgcagcc

SEQ ID NO: 128132 - DNA, 25 bp, Artificial
  probe
  misc_feature (1)..(25): SEQ ID NO: 7057; WAN024CPP_at; Start 816; Stop 840
ctacaacggaaatatcatcgaaggt

SEQ ID NO: 128133 - DNA, 25 bp, Artificial
  probe
  misc_feature (1)..(25): SEQ ID NO: 7057; WAN024CPP_at; Start 411; Stop 435
taacaaggttagctggactgtagca

SEQ ID NO: 128134 - DNA, 25 bp, Artificial
  probe
  misc_feature (1)..(25): SEQ ID NO: 7057; WAN024CPP_at; Start 380; Stop 404
ccatgaagccaatgcgaatcgcaac

SEQ ID NO: 128135 - DNA, 25 bp, Artificial
  probe
  misc_feature (1)..(25): SEQ ID NO: 7057; WAN024CPP_at; Start 129; Stop 153
cgtgaaagaagcttatgccttgggt

SEQ ID NO: 128136 - DNA, 25 bp, Artificial
  probe
  misc_feature (1)..(25): SEQ ID NO: 7057; WAN024CPP_at; Start 300; Stop 324
agttcgttcatctgatccaggtgcc

SEQ ID NO: 128137 - DNA, 25 bp, Artificial
  probe
  misc_feature (1)..(25): SEQ ID NO: 7057; WAN024CPP_at; Start 639; Stop 663
cacagcgccaggaacagatttaaca

SEQ ID NO: 128138 - DNA, 25 bp, Artificial
  probe
  misc_feature (1)..(25): SEQ ID NO: 7057; WAN024CPP_at; Start 486; Stop 510
cgatgaagaagcagtcgatctcctt

SEQ ID NO: 128139 - DNA, 25 bp, Artificial
  probe
  misc_feature (1)..(25): SEQ ID NO: 7057; WAN024CPP_at; Start 659; Stop 683
taacacttggtttgccaaagaacca

SEQ ID NO: 128140 - DNA, 25 bp, Artificial
  probe
  misc_feature (1)..(25): SEQ ID NO: 7057; WAN024CPP_at; Start 1139; Stop 1163
tagactttatgattggttctaacca

SEQ ID NO: 128141 - DNA, 25 bp, Artificial
  probe
  misc_feature (1)..(25): SEQ ID NO: 7057; WAN024CPP_at; Start 465; Stop 489
agtcttcccaaatgctacgagcgat

SEQ ID NO: 128142 - DNA, 25 bp, Artificial
  probe
  misc_feature (1)..(25): SEQ ID NO: 7057; WAN024CPP_at; Start 1211; Stop 1235
tccgtaatgggaattgggcaaatta

SEQ ID NO: 128143 - DNA, 25 bp, Artificial
  probe
  misc_feature (1)..(25): SEQ ID NO: 7057; WAN024CPP_at; Start 1058; Stop 1082
atgcgactagcgttgttgatggagc

SEQ ID NO: 128144 - DNA, 25 bp, Artificial
  probe
  misc_feature (1)..(25): SEQ ID NO: 7057; WAN024CPP_at; Start 1181; Stop 1205
ttcgtgaggatggaacgcgagtact

SEQ ID NO: 128145 - DNA, 25 bp, Artificial
  probe
  misc_feature (1)..(25): SEQ ID NO: 7057; WAN024CPP_at; Start 1152; Stop 1176
tggttctaaccaaatggatatcgat

SEQ ID NO: 128146 - DNA, 25 bp, Artificial
  probe
  misc_feature (1)..(25): SEQ ID NO: 7057; WAN024CPP_at; Start 291; Stop 315
ccgtcttggagttcgttcatctgat

SEQ ID NO: 128147 - DNA, 25 bp, Artificial
  probe
  misc_feature (1)..(25): SEQ ID NO: 7057; WAN024CPP_at; Start 35; Stop 59
cgataagcttgattgcgaacggaat

SEQ ID NO: 128148 - DNA, 25 bp, Artificial
  probe
  misc_feature (1)..(25): SEQ ID NO: 7057; WAN024CPP_at; Start 1196; Stop 1220
cgcgagtacttcttttccgtaatgg

SEQ ID NO: 128149 - DNA, 25 bp, Artificial
  probe
  misc_feature (1)..(25): SEQ ID NO: 7057; WAN024CPP_at; Start 372; Stop 396
gggacttgccatgaagccaatgcga

SEQ ID NO: 128150 - DNA, 25 bp, Artificial
  probe
  misc_feature (1)..(25): SEQ ID NO: 7057; WAN024CPP_at; Start 521; Stop 545
ttttcaaaacttgccgtgtctacga

SEQ ID NO: 128151 - DNA, 25 bp, Artificial
  probe
  misc_feature (1)..(25): SEQ ID NO: 7057; WAN024CPP_at; Start 562; Stop 586
gcctgggaagagcatgcagctatct

SEQ ID NO: 128152 - DNA, 25 bp, Artificial
  probe
  misc_feature (1)..(25): SEQ ID NO: 7057; WAN024CPP_at; Start 420; Stop 444
tagctggactgtagcagccgctgct

SEQ ID NO: 128153 - DNA, 25 bp, Artificial
  probe
  misc_feature (1)..(25): SEQ ID NO: 7057; WAN024CPP_at; Start 101; Stop 125
tggagcaacgtgaattggcacatct

SEQ ID NO: 128154 - DNA, 25 bp, Artificial
  probe
  misc_feature (1)..(25): SEQ ID NO: 7057; WAN024CPP_at; Start 733; Stop 757
ccaaatatgccgacagaagaggtct

SEQ ID NO: 128155 - DNA, 25 bp, Artificial
  probe
  misc_feature (1)..(25): SEQ ID NO: 7057; WAN024CPP_at; Start 1050; Stop 1074
tgcagcctatgcgactagcgttgtt

SEQ ID NO: 128156 - DNA, 25 bp, Artificial
  probe
  misc_feature (1)..(25): SEQ ID NO: 7057; WAN024CPP_at; Start 395; Stop 419
gaatcgcaactcaatctaacaaggt

SEQ ID NO: 128157 - DNA, 25 bp, Artificial
  probe
  misc_feature (1)..(25): SEQ ID NO: 3127; WAN024CPQ_at; Start 82; Stop 106
ttcttcgtcgctcgcagcatttggg

SEQ ID NO: 128158 - DNA, 25 bp, Artificial
  probe
  misc_feature (1)..(25): SEQ ID NO: 3127; WAN024CPQ_at; Start 84; Stop 108
cttcgtcgctcgcagcatttgggaa

SEQ ID NO: 128159 - DNA, 25 bp, Artificial
  probe
  misc_feature (1)..(25): SEQ ID NO: 3127; WAN024CPQ_at; Start 196; Stop 220
ggcaagtcccatagctttagcagaa

SEQ ID NO: 128160 - DNA, 25 bp, Artificial
  probe
  misc_feature (1)..(25): SEQ ID NO: 3127; WAN024CPQ_at; Start 188; Stop 212
ggcttcatggcaagtcccatagctt

SEQ ID NO: 128161 - DNA, 25 bp, Artificial
  probe
  misc_feature (1)..(25): SEQ ID NO: 3127; WAN024CPQ_at; Start 24; Stop 48
gatctgcttcgtagacacggcaagt

SEQ ID NO: 128162 - DNA, 25 bp, Artificial
  probe
  misc_feature (1)..(25): SEQ ID NO: 3127; WAN024CPQ_at; Start 105; Stop 129
ggaagactttcttagcccactcaag

SEQ ID NO: 128163 - DNA, 25 bp, Artificial
  probe
  misc_feature (1)..(25): SEQ ID NO: 3127; WAN024CPQ_at; Start 191; Stop 215
ttcatggcaagtcccatagctttag

SEQ ID NO: 128164 - DNA, 25 bp, Artificial
  probe
  misc_feature (1)..(25): SEQ ID NO: 3127; WAN024CPQ_at; Start 98; Stop 122
gcatttgggaagactttcttagccc

SEQ ID NO: 128165 - DNA, 25 bp, Artificial
  probe
  misc_feature (1)..(25): SEQ ID NO: 3127; WAN024CPQ_at; Start 26; Stop 50
tctgcttcgtagacacggcaagttt

SEQ ID NO: 128166 - DNA, 25 bp, Artificial
  probe
  misc_feature (1)..(25): SEQ ID NO: 3127; WAN024CPQ_at; Start 92; Stop 116
ctcgcagcatttgggaagactttct

SEQ ID NO: 128167 - DNA, 25 bp, Artificial
  probe
  misc_feature (1)..(25): SEQ ID NO: 3127; WAN024CPQ_at; Start 86; Stop 110
tcgtcgctcgcagcatttgggaaga

SEQ ID NO: 128168 - DNA, 25 bp, Artificial
  probe
  misc_feature (1)..(25): SEQ ID NO: 3127; WAN024CPQ_at; Start 19; Stop 43
aacaggatctgcttcgtagacacgg

SEQ ID NO: 128169 - DNA, 25 bp, Artificial
  probe
  misc_feature (1)..(25): SEQ ID NO: 3127; WAN024CPQ_at; Start 107; Stop 131
aagactttcttagcccactcaagtc

SEQ ID NO: 128170 - DNA, 25 bp, Artificial
  probe
  misc_feature (1)..(25): SEQ ID NO: 3127; WAN024CPQ_at; Start 80; Stop 104
gcttcttcgtcgctcgcagcatttg

SEQ ID NO: 128171 - DNA, 25 bp, Artificial
  probe
  misc_feature (1)..(25): SEQ ID NO: 3127; WAN024CPQ_at; Start 143; Stop 167
gctacagtccagctaaccttgttag

SEQ ID NO: 128172 - DNA, 25 bp, Artificial
  probe
  misc_feature (1)..(25): SEQ ID NO: 3127; WAN024CPQ_at; Start 198; Stop 222
caagtcccatagctttagcagaagc

SEQ ID NO: 128173 - DNA, 25 bp, Artificial
  probe
  misc_feature (1)..(25): SEQ ID NO: 3127; WAN024CPQ_at; Start 201; Stop 225
gtcccatagctttagcagaagctga

SEQ ID NO: 128174 - DNA, 25 bp, Artificial
  probe
  misc_feature (1)..(25): SEQ ID NO: 3127; WAN024CPQ_at; Start 140; Stop 164
gctgctacagtccagctaaccttgt

SEQ ID NO: 128175 - DNA, 25 bp, Artificial
  probe
  misc_feature (1)..(25): SEQ ID NO: 3127; WAN024CPQ_at; Start 14; Stop 38
gccttaacaggatctgcttcgtaga

SEQ ID NO: 128176 - DNA, 25 bp, Artificial
  probe
  misc_feature (1)..(25): SEQ ID NO: 3127; WAN024CPQ_at; Start 21; Stop 45
caggatctgcttcgtagacacggca

SEQ ID NO: 128177 - DNA, 25 bp, Artificial
  probe
  misc_feature (1)..(25): SEQ ID NO: 3127; WAN024CPQ_at; Start 77; Stop 101
actgcttcttcgtcgctcgcagcat

SEQ ID NO: 128178 - DNA, 25 bp, Artificial
  probe
  misc_feature (1)..(25): SEQ ID NO: 3127; WAN024CPQ_at; Start 29; Stop 53
gcttcgtagacacggcaagttttga

SEQ ID NO: 128179 - DNA, 25 bp, Artificial
  probe
  misc_feature (1)..(25): SEQ ID NO: 3127; WAN024CPQ_at; Start 91; Stop 115
gctcgcagcatttgggaagactttc

SEQ ID NO: 128180 - DNA, 25 bp, Artificial
  probe
  misc_feature (1)..(25): SEQ ID NO: 3127; WAN024CPQ_at; Start 145; Stop 169
tacagtccagctaaccttgttagat

SEQ ID NO: 128181 - DNA, 25 bp, Artificial
  probe
  misc_feature (1)..(25): SEQ ID NO: 3127; WAN024CPQ_at; Start 96; Stop 120
cagcatttgggaagactttcttagc

SEQ ID NO: 128182 - DNA, 25 bp, Artificial
  probe
  misc_feature (1)..(25): SEQ ID NO: 3127; WAN024CPQ_at; Start 18; Stop 42
taacaggatctgcttcgtagacacg

SEQ ID NO: 128183 - DNA, 25 bp, Artificial
  probe
  misc_feature (1)..(25): SEQ ID NO: 3127; WAN024CPQ_at; Start 195; Stop 219
tggcaagtcccatagctttagcaga

SEQ ID NO: 128184 - DNA, 25 bp, Artificial
  probe
  misc_feature (1)..(25): SEQ ID NO: 3127; WAN024CPQ_at; Start 154; Stop 178
gctaaccttgttagattgagttgcg

SEQ ID NO: 128185 - DNA, 25 bp, Artificial
  probe
  misc_feature (1)..(25): SEQ ID NO: 3127; WAN024CPQ_at; Start 193; Stop 217
catggcaagtcccatagctttagca

SEQ ID NO: 128186 - DNA, 25 bp, Artificial
  probe
  misc_feature (1)..(25): SEQ ID NO: 3127; WAN024CPQ_at; Start 156; Stop 180
taaccttgttagattgagttgcgat

SEQ ID NO: 128187 - DNA, 25 bp, Artificial
  probe
  misc_feature (1)..(25): SEQ ID NO: 3127; WAN024CPQ_at; Start 94; Stop 118
cgcagcatttgggaagactttctta

SEQ ID NO: 128188 - DNA, 25 bp, Artificial
  probe
  misc_feature (1)..(25): SEQ ID NO: 3127; WAN024CPQ_at; Start 89; Stop 113
tcgctcgcagcatttgggaagactt

SEQ ID NO: 128189 - DNA, 25 bp, Artificial
  probe
  misc_feature (1)..(25): SEQ ID NO: 3127; WAN024CPQ_at; Start 23; Stop 47
ggatctgcttcgtagacacggcaag

SEQ ID NO: 128190 - DNA, 25 bp, Artificial
  probe
  misc_feature (1)..(25): SEQ ID NO: 3127; WAN024CPQ_at; Start 149; Stop 173
gtccagctaaccttgttagattgag

SEQ ID NO: 128191 - DNA, 25 bp, Artificial
  probe
  misc_feature (1)..(25): SEQ ID NO: 2728; WAN024CPR_s_at; Start 335; Stop 359
acggagtggacgctgacaagctttc

SEQ ID NO: 128192 - DNA, 25 bp, Artificial
  probe
  misc_feature (1)..(25): SEQ ID NO: 2728; WAN024CPR_s_at; Start 243; Stop 267
tgtgccagaatacaagattgctgag

SEQ ID NO: 128193 - DNA, 25 bp, Artificial
  probe
  misc_feature (1)..(25): SEQ ID NO: 2728; WAN024CPR_s_at; Start 253; Stop 277
tacaagattgctgagatgaactatc

SEQ ID NO: 128194 - DNA, 25 bp, Artificial
  probe
  misc_feature (1)..(25): SEQ ID NO: 2728; WAN024CPR_s_at; Start 1094; Stop 1118
tgagcgaagaggagcttgaagctgc

SEQ ID NO: 128195 - DNA, 25 bp, Artificial
  probe
  misc_feature (1)..(25): SEQ ID NO: 2728; WAN024CPR_s_at; Start 1011; Stop 1035
taacacccttttcgatgaaaatgcg

SEQ ID NO: 128196 - DNA, 25 bp, Artificial
  probe
  misc_feature (1)..(25): SEQ ID NO: 2728; WAN024CPR_s_at; Start 878; Stop 902
tagatatcactgctgagaagggtga

SEQ ID NO: 128197 - DNA, 25 bp, Artificial
  probe
  misc_feature (1)..(25): SEQ ID NO: 2728; WAN024CPR_s_at; Start 327; Stop 351
tgccttgaacggagtggacgctgac

SEQ ID NO: 128198 - DNA, 25 bp, Artificial
  probe
  misc_feature (1)..(25): SEQ ID NO: 2728; WAN024CPR_s_at; Start 331; Stop 355
ttgaacggagtggacgctgacaagc

SEQ ID NO: 128199 - DNA, 25 bp, Artificial
  probe
  misc_feature (1)..(25): SEQ ID NO: 2728; WAN024CPR_s_at; Start 223; Stop 247
ccgatggagcgtttggacaatgtgc

SEQ ID NO: 128200 - DNA, 25 bp, Artificial
  probe
  misc_feature (1)..(25): SEQ ID NO: 2728; WAN024CPR_s_at; Start 71; Stop 95
tgcaacctggtcacactttggctct

SEQ ID NO: 128201 - DNA, 25 bp, Artificial
  probe
  misc_feature (1)..(25): SEQ ID NO: 2728; WAN024CPR_s_at; Start 884; Stop 908
tcactgctgagaagggtgatcaggt

SEQ ID NO: 128202 - DNA, 25 bp, Artificial
  probe
  misc_feature (1)..(25): SEQ ID NO: 2728; WAN024CPR_s_at; Start 596; Stop 620
agagcaaggccgatatgcttaataa

SEQ ID NO: 128203 - DNA, 25 bp, Artificial
  probe
  misc_feature (1)..(25): SEQ ID NO: 2728; WAN024CPR_s_at; Start 545; Stop 569
tctacgaagcagatcctgttaaggc

SEQ ID NO: 128204 - DNA, 25 bp, Artificial
  probe
  misc_feature (1)..(25): SEQ ID NO: 2728; WAN024CPR_s_at; Start 73; Stop 97
caacctggtcacactttggctctct

SEQ ID NO: 128205 - DNA, 25 bp, Artificial
  probe
  misc_feature (1)..(25): SEQ ID NO: 2728; WAN024CPR_s_at; Start 362; Stop 386
cttctgctaaagctatgggacttgc

SEQ ID NO: 128206 - DNA, 25 bp, Artificial
  probe
  misc_feature (1)..(25): SEQ ID NO: 2728; WAN024CPR_s_at; Start 983; Stop 1007
caatttctcagtcaggcattacctt

SEQ ID NO: 128207 - DNA, 25 bp, Artificial
  probe
  misc_feature (1)..(25): SEQ ID NO: 2728; WAN024CPR_s_at; Start 1084; Stop 1108
ggagcggagatgagcgaagaggagc

SEQ ID NO: 128208 - DNA, 25 bp, Artificial
  probe
  misc_feature (1)..(25): SEQ ID NO: 2728; WAN024CPR_s_at; Start 67; Stop 91
aacgtgcaacctggtcacactttgg

SEQ ID NO: 128209 - DNA, 25 bp, Artificial
  probe
  misc_feature (1)..(25): SEQ ID NO: 2728; WAN024CPR_s_at; Start 236; Stop 260
tggacaatgtgccagaatacaagat

SEQ ID NO: 128210 - DNA, 25 bp, Artificial
  probe
  misc_feature (1)..(25): SEQ ID NO: 2728; WAN024CPR_s_at; Start 227; Stop 251
tggagcgtttggacaatgtgccaga

SEQ ID NO: 128211 - DNA, 25 bp, Artificial
  probe
  misc_feature (1)..(25): SEQ ID NO: 2728; WAN024CPR_s_at; Start 329; Stop 353
ccttgaacggagtggacgctgacaa

SEQ ID NO: 128212 - DNA, 25 bp, Artificial
  probe
  misc_feature (1)..(25): SEQ ID NO: 2728; WAN024CPR_s_at; Start 197; Stop 221
ttaaccgtgagaaattcctccatgc

SEQ ID NO: 128213 - DNA, 25 bp, Artificial
  probe
  misc_feature (1)..(25): SEQ ID NO: 2728; WAN024CPR_s_at; Start 1121; Stop 1145
ggcttaaccgttcagatgttcacgt

SEQ ID NO: 128214 - DNA, 25 bp, Artificial
  probe
  misc_feature (1)..(25): SEQ ID NO: 2728; WAN024CPR_s_at; Start 77; Stop 101
ctggtcacactttggctctctctat

SEQ ID NO: 128215 - DNA, 25 bp, Artificial
  probe
  misc_feature (1)..(25): SEQ ID NO: 2728; WAN024CPR_s_at; Start 240; Stop 264
caatgtgccagaatacaagattgct

SEQ ID NO: 128216 - DNA, 25 bp, Artificial
  probe
  misc_feature (1)..(25): SEQ ID NO: 2728; WAN024CPR_s_at; Start 231; Stop 255
gcgtttggacaatgtgccagaatac

SEQ ID NO: 128217 - DNA, 25 bp, Artificial
  probe
  misc_feature (1)..(25): SEQ ID NO: 2728; WAN024CPR_s_at; Start 1016; Stop 1040
cccttttcgatgaaaatgcgtcaaa

SEQ ID NO: 128218 - DNA, 25 bp, Artificial
  probe
  misc_feature (1)..(25): SEQ ID NO: 2728; WAN024CPR_s_at; Start 1120; Stop 1144
gggcttaaccgttcagatgttcacg

SEQ ID NO: 128219 - DNA, 25 bp, Artificial
  probe
  misc_feature (1)..(25): SEQ ID NO: 2728; WAN024CPR_s_at; Start 687; Stop 711
ccacgtttgggaatcagctggtgct

SEQ ID NO: 128220 - DNA, 25 bp, Artificial
  probe
  misc_feature (1)..(25): SEQ ID NO: 2728; WAN024CPR_s_at; Start 982; Stop 1006
ccaatttctcagtcaggcattacct

SEQ ID NO: 128221 - DNA, 25 bp, Artificial
  probe
  misc_feature (1)..(25): SEQ ID NO: 2728; WAN024CPR_s_at; Start 246; Stop 270
gccagaatacaagattgctgagatg

SEQ ID NO: 128222 - DNA, 25 bp, Artificial
  probe
  misc_feature (1)..(25): SEQ ID NO: 2728; WAN024CPR_s_at; Start 875; Stop 899
tcgtagatatcactgctgagaaggg

SEQ ID NO: 128223 - DNA, 25 bp, Artificial
  probe
  misc_feature (1)..(25): SEQ ID NO: 2728; WAN024CPR_s_at; Start 871; Stop 895
caaatcgtagatatcactgctgaga

SEQ ID NO: 128224 - DNA, 25 bp, Artificial
  probe
  misc_feature (1)..(25): SEQ ID NO: 2728; WAN024CPR_s_at; Start 938; Stop 962
gtgcgcgtgccttgggtgaatgtgc

SEQ ID NO: 128225 - DNA, 25 bp, Artificial
  probe
  misc_feature (1)..(25): SEQ ID NO: 5039; WAN024CPS_at; Start 101; Stop 125
gctgtcagataagcataggcttctt

SEQ ID NO: 128226 - DNA, 25 bp, Artificial
  probe
  misc_feature (1)..(25): SEQ ID NO: 5039; WAN024CPS_at; Start 1; Stop 25
ttgaccataaggacgaagggagatg

SEQ ID NO: 128227 - DNA, 25 bp, Artificial
  probe
  misc_feature (1)..(25): SEQ ID NO: 5039; WAN024CPS_at; Start 151; Stop 175
tacaatctcaatcaagggaacccct

SEQ ID NO: 128228 - DNA, 25 bp, Artificial
  probe
  misc_feature (1)..(25): SEQ ID NO: 5039; WAN024CPS_at; Start 213; Stop 237
catgggtgtttttaccagcgtcttc

SEQ ID NO: 128229 - DNA, 25 bp, Artificial
  probe
  misc_feature (1)..(25): SEQ ID NO: 5039; WAN024CPS_at; Start 128; Stop 152
ggagaacgcatatctgcctcagata

SEQ ID NO: 128230 - DNA, 25 bp, Artificial
  probe
  misc_feature (1)..(25): SEQ ID NO: 5039; WAN024CPS_at; Start 170; Stop 194
accccttggcggttgaggtcaacat

SEQ ID NO: 128231 - DNA, 25 bp, Artificial
  probe
  misc_feature (1)..(25): SEQ ID NO: 5039; WAN024CPS_at; Start 44; Stop 68
gaaccttcctccatcttaacgtcag

SEQ ID NO: 128232 - DNA, 25 bp, Artificial
  probe
  misc_feature (1)..(25): SEQ ID NO: 5039; WAN024CPS_at; Start 12; Stop 36
gacgaagggagatgttggcatccac

SEQ ID NO: 128233 - DNA, 25 bp, Artificial
  probe
  misc_feature (1)..(25): SEQ ID NO: 5039; WAN024CPS_at; Start 131; Stop 155
gaacgcatatctgcctcagatacaa

SEQ ID NO: 128234 - DNA, 25 bp, Artificial
  probe
  misc_feature (1)..(25): SEQ ID NO: 5039; WAN024CPS_at; Start 204; Stop 228
catctgtaccatgggtgtttttacc

SEQ ID NO: 128235 - DNA, 25 bp, Artificial
  probe
  misc_feature (1)..(25): SEQ ID NO: 5039; WAN024CPS_at; Start 26; Stop 50
ttggcatccacacgcatcgaacctt

SEQ ID NO: 128236 - DNA, 25 bp, Artificial
  probe
  misc_feature (1)..(25): SEQ ID NO: 5039; WAN024CPS_at; Start 218; Stop 242
gtgtttttaccagcgtcttcctcta

SEQ ID NO: 128237 - DNA, 25 bp, Artificial
  probe
  misc_feature (1)..(25): SEQ ID NO: 5039; WAN024CPS_at; Start 146; Stop 170
tcagatacaatctcaatcaagggaa

SEQ ID NO: 128238 - DNA, 25 bp, Artificial
  probe
  misc_feature (1)..(25): SEQ ID NO: 5039; WAN024CPS_at; Start 85; Stop 109
gataacttccttgagggctgtcaga

SEQ ID NO: 128239 - DNA, 25 bp, Artificial
  probe
  misc_feature (1)..(25): SEQ ID NO: 5039; WAN024CPS_at; Start 60; Stop 84
taacgtcagaaatgccagcgtactg

SEQ ID NO: 128240 - DNA, 25 bp, Artificial
  probe
  misc_feature (1)..(25): SEQ ID NO: 5039; WAN024CPS_at; Start 22; Stop 46
gatgttggcatccacacgcatcgaa

SEQ ID NO: 128241 - DNA, 25 bp, Artificial
  probe
  misc_feature (1)..(25): SEQ ID NO: 5039; WAN024CPS_at; Start 97; Stop 121
gagggctgtcagataagcataggct

SEQ ID NO: 128242 - DNA, 25 bp, Artificial
  probe
  misc_feature (1)..(25): SEQ ID NO: 5039; WAN024CPS_at; Start 80; Stop 104
tactggataacttccttgagggctg

SEQ ID NO: 128243 - DNA, 25 bp, Artificial
  probe
  misc_feature (1)..(25): SEQ ID NO: 5039; WAN024CPS_at; Start 197; Stop 221
gagtagccatctgtaccatgggtgt

SEQ ID NO: 128244 - DNA, 25 bp, Artificial
  probe
  misc_feature (1)..(25): SEQ ID NO: 5039; WAN024CPS_at; Start 93; Stop 117
ccttgagggctgtcagataagcata

SEQ ID NO: 128245 - DNA, 25 bp, Artificial
  probe
  misc_feature (1)..(25): SEQ ID NO: 5039; WAN024CPS_at; Start 73; Stop 97
gccagcgtactggataacttccttg

SEQ ID NO: 128246 - DNA, 25 bp, Artificial
  probe
  misc_feature (1)..(25): SEQ ID NO: 5039; WAN024CPS_at; Start 181; Stop 205
gttgaggtcaacataagagtagcca

SEQ ID NO: 128247 - DNA, 25 bp, Artificial
  probe
  misc_feature (1)..(25): SEQ ID NO: 5039; WAN024CPS_at; Start 65; Stop 89
tcagaaatgccagcgtactggataa

SEQ ID NO: 128248 - DNA, 25 bp, Artificial
  probe
  misc_feature (1)..(25): SEQ ID NO: 5039; WAN024CPS_at; Start 194; Stop 218
taagagtagccatctgtaccatggg

SEQ ID NO: 128249 - DNA, 25 bp, Artificial
  probe
  misc_feature (1)..(25): SEQ ID NO: 5039; WAN024CPS_at; Start 125; Stop 149
tcaggagaacgcatatctgcctcag

SEQ ID NO: 128250 - DNA, 25 bp, Artificial
  probe
  misc_feature (1)..(25): SEQ ID NO: 5039; WAN024CPS_at; Start 110; Stop 134
taagcataggcttcttcaggagaac

SEQ ID NO: 128251 - DNA, 25 bp, Artificial
  probe
  misc_feature (1)..(25): SEQ ID NO: 5039; WAN024CPS_at; Start 186; Stop 210
ggtcaacataagagtagccatctgt

SEQ ID NO: 128252 - DNA, 25 bp, Artificial
  probe
  misc_feature (1)..(25): SEQ ID NO: 5039; WAN024CPS_at; Start 4; Stop 28
accataaggacgaagggagatgttg

SEQ ID NO: 128253 - DNA, 25 bp, Artificial
  probe
  misc_feature (1)..(25): SEQ ID NO: 5039; WAN024CPS_at; Start 113; Stop 137
gcataggcttcttcaggagaacgca

SEQ ID NO: 128254 - DNA, 25 bp, Artificial
  probe
  misc_feature (1)..(25): SEQ ID NO: 5039; WAN024CPS_at; Start 121; Stop 145
ttcttcaggagaacgcatatctgcc

SEQ ID NO: 128255 - DNA, 25 bp, Artificial
  probe
  misc_feature (1)..(25): SEQ ID NO: 5039; WAN024CPS_at; Start 156; Stop 180
tctcaatcaagggaaccccttggcg

SEQ ID NO: 128256 - DNA, 25 bp, Artificial
  probe
  misc_feature (1)..(25): SEQ ID NO: 5039; WAN024CPS_at; Start 18; Stop 42
gggagatgttggcatccacacgcat

SEQ ID NO: 128257 - DNA, 25 bp, Artificial
  probe
  misc_feature (1)..(25): SEQ ID NO: 5039; WAN024CPS_at; Start 55; Stop 79
catcttaacgtcagaaatgccagcg

SEQ ID NO: 128258 - DNA, 25 bp, Artificial
  probe
  misc_feature (1)..(25): SEQ ID NO: 5039; WAN024CPS_at; Start 208; Stop 232
tgtaccatgggtgtttttaccagcg

SEQ ID NO: 128259 - DNA, 25 bp, Artificial
  probe
  misc_feature (1)..(25): SEQ ID NO: 5521; WAN024CPT_at; Start 194; Stop 218
taacagtaggagcaaaaggtccaat

SEQ ID NO: 128260 - DNA, 25 bp, Artificial
  probe
  misc_feature (1)..(25): SEQ ID NO: 5521; WAN024CPT_at; Start 149; Stop 173
tagcatcttcgctggcaatagcgtt

SEQ ID NO: 128261 - DNA, 25 bp, Artificial
  probe
  misc_feature (1)..(25): SEQ ID NO: 5521; WAN024CPT_at; Start 218; Stop 242
tctggtctaatgagctaccaaaggc

SEQ ID NO: 128262 - DNA, 25 bp, Artificial
  probe
  misc_feature (1)..(25): SEQ ID NO: 5521; WAN024CPT_at; Start 167; Stop 191
tagcgttgagcaagagggcattttc

SEQ ID NO: 128263 - DNA, 25 bp, Artificial
  probe
  misc_feature (1)..(25): SEQ ID NO: 5521; WAN024CPT_at; Start 47; Stop 71
cgcctaggtattccttaggcaaagc

SEQ ID NO: 128264 - DNA, 25 bp, Artificial
  probe
  misc_feature (1)..(25): SEQ ID NO: 5521; WAN024CPT_at; Start 124; Stop 148
cggacaggagcagaagtagagtctt

SEQ ID NO: 128265 - DNA, 25 bp, Artificial
  probe
  misc_feature (1)..(25): SEQ ID NO: 5521; WAN024CPT_at; Start 12; Stop 36
taagattgtttccttaacctctgga

SEQ ID NO: 128266 - DNA, 25 bp, Artificial
  probe
  misc_feature (1)..(25): SEQ ID NO: 5521; WAN024CPT_at; Start 200; Stop 224
taggagcaaaaggtccaatctggtc

SEQ ID NO: 128267 - DNA, 25 bp, Artificial
  probe
  misc_feature (1)..(25): SEQ ID NO: 5521; WAN024CPT_at; Start 176; Stop 200
gcaagagggcattttccttaacagt

SEQ ID NO: 128268 - DNA, 25 bp, Artificial
  probe
  misc_feature (1)..(25): SEQ ID NO: 5521; WAN024CPT_at; Start 154; Stop 178
tcttcgctggcaatagcgttgagca

SEQ ID NO: 128269 - DNA, 25 bp, Artificial
  probe
  misc_feature (1)..(25): SEQ ID NO: 5521; WAN024CPT_at; Start 183; Stop 207
ggcattttccttaacagtaggagca

SEQ ID NO: 128270 - DNA, 25 bp, Artificial
  probe
  misc_feature (1)..(25): SEQ ID NO: 5521; WAN024CPT_at; Start 103; Stop 127
tttgaagtaaagtcggcgatgcgga

SEQ ID NO: 128271 - DNA, 25 bp, Artificial
  probe
  misc_feature (1)..(25): SEQ ID NO: 5521; WAN024CPT_at; Start 33; Stop 57
tggatcaattccttcgcctaggtat

SEQ ID NO: 128272 - DNA, 25 bp, Artificial
  probe
  misc_feature (1)..(25): SEQ ID NO: 5521; WAN024CPT_at; Start 236; Stop 260
caaaggcaatgagaccgaaacgtga

SEQ ID NO: 128273 - DNA, 25 bp, Artificial
  probe
  misc_feature (1)..(25): SEQ ID NO: 5521; WAN024CPT_at; Start 40; Stop 64
attccttcgcctaggtattccttag

SEQ ID NO: 128274 - DNA, 25 bp, Artificial
  probe
  misc_feature (1)..(25): SEQ ID NO: 5521; WAN024CPT_at; Start 110; Stop 134
taaagtcggcgatgcggacaggagc

SEQ ID NO: 128275 - DNA, 25 bp, Artificial
  probe
  misc_feature (1)..(25): SEQ ID NO: 5521; WAN024CPT_at; Start 128; Stop 152
caggagcagaagtagagtctttagc

SEQ ID NO: 128276 - DNA, 25 bp, Artificial
  probe
  misc_feature (1)..(25): SEQ ID NO: 5521; WAN024CPT_at; Start 101; Stop 125
tttttgaagtaaagtcggcgatgcg

SEQ ID NO: 128277 - DNA, 25 bp, Artificial
  probe
  misc_feature (1)..(25): SEQ ID NO: 5521; WAN024CPT_at; Start 89; Stop 113
tgtcttggccgatttttgaagtaaa

SEQ ID NO: 128278 - DNA, 25 bp, Artificial
  probe
  misc_feature (1)..(25): SEQ ID NO: 5521; WAN024CPT_at; Start 180; Stop 204
gagggcattttccttaacagtagga

SEQ ID NO: 128279 - DNA, 25 bp, Artificial
  probe
  misc_feature (1)..(25): SEQ ID NO: 5521; WAN024CPT_at; Start 163; Stop 187
gcaatagcgttgagcaagagggcat

SEQ ID NO: 128280 - DNA, 25 bp, Artificial
  probe
  misc_feature (1)..(25): SEQ ID NO: 5521; WAN024CPT_at; Start 136; Stop 160
gaagtagagtctttagcatcttcgc

SEQ ID NO: 128281 - DNA, 25 bp, Artificial
  probe
  misc_feature (1)..(25): SEQ ID NO: 5521; WAN024CPT_at; Start 205; Stop 229
gcaaaaggtccaatctggtctaatg

SEQ ID NO: 128282 - DNA, 25 bp, Artificial
  probe
  misc_feature (1)..(25): SEQ ID NO: 5521; WAN024CPT_at; Start 170; Stop 194
cgttgagcaagagggcattttcctt

SEQ ID NO: 128283 - DNA, 25 bp, Artificial
  probe
  misc_feature (1)..(25): SEQ ID NO: 5521; WAN024CPT_at; Start 241; Stop 265
gcaatgagaccgaaacgtgaaactg

SEQ ID NO: 128284 - DNA, 25 bp, Artificial
  probe
  misc_feature (1)..(25): SEQ ID NO: 5521; WAN024CPT_at; Start 211; Stop 235
ggtccaatctggtctaatgagctac

SEQ ID NO: 128285 - DNA, 25 bp, Artificial
  probe
  misc_feature (1)..(25): SEQ ID NO: 5521; WAN024CPT_at; Start 26; Stop 50
taacctctggatcaattccttcgcc

SEQ ID NO: 128286 - DNA, 25 bp, Artificial
  probe
  misc_feature (1)..(25): SEQ ID NO: 5521; WAN024CPT_at; Start 233; Stop 257
taccaaaggcaatgagaccgaaacg

SEQ ID NO: 128287 - DNA, 25 bp, Artificial
  probe
  misc_feature (1)..(25): SEQ ID NO: 5521; WAN024CPT_at; Start 190; Stop 214
tccttaacagtaggagcaaaaggtc

SEQ ID NO: 128288 - DNA, 25 bp, Artificial
  probe
  misc_feature (1)..(25): SEQ ID NO: 5521; WAN024CPT_at; Start 245; Stop 269
tgagaccgaaacgtgaaactgttcc

SEQ ID NO: 128289 - DNA, 25 bp, Artificial
  probe
  misc_feature (1)..(25): SEQ ID NO: 5521; WAN024CPT_at; Start 15; Stop 39
gattgtttccttaacctctggatca

SEQ ID NO: 128290 - DNA, 25 bp, Artificial
  probe
  misc_feature (1)..(25): SEQ ID NO: 5521; WAN024CPT_at; Start 142; Stop 166
gagtctttagcatcttcgctggcaa

SEQ ID NO: 128291 - DNA, 25 bp, Artificial
  probe
  misc_feature (1)..(25): SEQ ID NO: 5521; WAN024CPT_at; Start 228; Stop 252
tgagctaccaaaggcaatgagaccg

SEQ ID NO: 128292 - DNA, 25 bp, Artificial
  probe
  misc_feature (1)..(25): SEQ ID NO: 5521; WAN024CPT_at; Start 222; Stop 246
gtctaatgagctaccaaaggcaatg

SEQ ID NO: 128293 - DNA, 25 bp, Artificial
  probe
  misc_feature (1)..(25): SEQ ID NO: 2885; WAN024CPU_at; Start 78; Stop 102
gaaagaccagtcaatcacgttagtg

SEQ ID NO: 128294 - DNA, 25 bp, Artificial
  probe
  misc_feature (1)..(25): SEQ ID NO: 2885; WAN024CPU_at; Start 2; Stop 26
tgtccatgttgagggcaagagcagc

SEQ ID NO: 128295 - DNA, 25 bp, Artificial
  probe
  misc_feature (1)..(25): SEQ ID NO: 2885; WAN024CPU_at; Start 363; Stop 387
gaaattccaggcagtcctgccaagt

SEQ ID NO: 128296 - DNA, 25 bp, Artificial
  probe
  misc_feature (1)..(25): SEQ ID NO: 2885; WAN024CPU_at; Start 410; Stop 434
ggctaagtacatggcaactgggtca

SEQ ID NO: 128297 - DNA, 25 bp, Artificial
  probe
  misc_feature (1)..(25): SEQ ID NO: 2885; WAN024CPU_at; Start 93; Stop 117
cacgttagtgttggcattttggtca

SEQ ID NO: 128298 - DNA, 25 bp, Artificial
  probe
  misc_feature (1)..(25): SEQ ID NO: 2885; WAN024CPU_at; Start 112; Stop 136
tggtcatttccaaagtgggcagaag

SEQ ID NO: 128299 - DNA, 25 bp, Artificial
  probe
  misc_feature (1)..(25): SEQ ID NO: 2885; WAN024CPU_at; Start 18; Stop 42
aagagcagccttgataccggcatca

SEQ ID NO: 128300 - DNA, 25 bp, Artificial
  probe
  misc_feature (1)..(25): SEQ ID NO: 2885; WAN024CPU_at; Start 155; Stop 179
aattggtgttgagctctacgtggac

SEQ ID NO: 128301 - DNA, 25 bp, Artificial
  probe
  misc_feature (1)..(25): SEQ ID NO: 2885; WAN024CPU_at; Start 339; Stop 363
ccttgagagaatccagcaggaatcg

SEQ ID NO: 128302 - DNA, 25 bp, Artificial
  probe
  misc_feature (1)..(25): SEQ ID NO: 2885; WAN024CPU_at; Start 227; Stop 251
aatcacgggttgttgtttgtggtag

SEQ ID NO: 128303 - DNA, 25 bp, Artificial
  probe
  misc_feature (1)..(25): SEQ ID NO: 2885; WAN024CPU_at; Start 372; Stop 396
ggcagtcctgccaagtttacaggta

SEQ ID NO: 128304 - DNA, 25 bp, Artificial
  probe
  misc_feature (1)..(25): SEQ ID NO: 2885; WAN024CPU_at; Start 406; Stop 430
ggtcggctaagtacatggcaactgg

SEQ ID NO: 128305 - DNA, 25 bp, Artificial
  probe
  misc_feature (1)..(25): SEQ ID NO: 2885; WAN024CPU_at; Start 217; Stop 241
cacctccaaaaatcacgggttgttg

SEQ ID NO: 128306 - DNA, 25 bp, Artificial
  probe
  misc_feature (1)..(25): SEQ ID NO: 2885; WAN024CPU_at; Start 84; Stop 108
ccagtcaatcacgttagtgttggca

SEQ ID NO: 128307 - DNA, 25 bp, Artificial
  probe
  misc_feature (1)..(25): SEQ ID NO: 2885; WAN024CPU_at; Start 59; Stop 83
gaactggtagaactcctgggaaaga

SEQ ID NO: 128308 - DNA, 25 bp, Artificial
  probe
  misc_feature (1)..(25): SEQ ID NO: 2885; WAN024CPU_at; Start 66; Stop 90
tagaactcctgggaaagaccagtca

SEQ ID NO: 128309 - DNA, 25 bp, Artificial
  probe
  misc_feature (1)..(25): SEQ ID NO: 2885; WAN024CPU_at; Start 53; Stop 77
tattgagaactggtagaactcctgg

SEQ ID NO: 128310 - DNA, 25 bp, Artificial
  probe
  misc_feature (1)..(25): SEQ ID NO: 2885; WAN024CPU_at; Start 192; Stop 216
gactgtttcaaagttcattagttgt

SEQ ID NO: 128311 - DNA, 25 bp, Artificial
  probe
  misc_feature (1)..(25): SEQ ID NO: 2885; WAN024CPU_at; Start 8; Stop 32
tgttgagggcaagagcagccttgat

SEQ ID NO: 128312 - DNA, 25 bp, Artificial
  probe
  misc_feature (1)..(25): SEQ ID NO: 2885; WAN024CPU_at; Start 333; Stop 357
ggtagaccttgagagaatccagcag

SEQ ID NO: 128313 - DNA, 25 bp, Artificial
  probe
  misc_feature (1)..(25): SEQ ID NO: 2885; WAN024CPU_at; Start 131; Stop 155
cagaagtaggtgagaagatttttga

SEQ ID NO: 128314 - DNA, 25 bp, Artificial
  probe
  misc_feature (1)..(25): SEQ ID NO: 2885; WAN024CPU_at; Start 379; Stop 403
ctgccaagtttacaggtatggtcaa

SEQ ID NO: 128315 - DNA, 25 bp, Artificial
  probe
  misc_feature (1)..(25): SEQ ID NO: 2885; WAN024CPU_at; Start 350; Stop 374
tccagcaggaatcgaaattccaggc

SEQ ID NO: 128316 - DNA, 25 bp, Artificial
  probe
  misc_feature (1)..(25): SEQ ID NO: 2885; WAN024CPU_at; Start 417; Stop 441
tacatggcaactgggtcatggttga

SEQ ID NO: 128317 - DNA, 25 bp, Artificial
  probe
  misc_feature (1)..(25): SEQ ID NO: 2885; WAN024CPU_at; Start 146; Stop 170
agatttttgaattggtgttgagctc

SEQ ID NO: 128318 - DNA, 25 bp, Artificial
  probe
  misc_feature (1)..(25): SEQ ID NO: 2885; WAN024CPU_at; Start 116; Stop 140
catttccaaagtgggcagaagtagg

SEQ ID NO: 128319 - DNA, 25 bp, Artificial
  probe
  misc_feature (1)..(25): SEQ ID NO: 2885; WAN024CPU_at; Start 98; Stop 122
tagtgttggcattttggtcatttcc

SEQ ID NO: 128320 - DNA, 25 bp, Artificial
  probe
  misc_feature (1)..(25): SEQ ID NO: 2885; WAN024CPU_at; Start 329; Stop 353
gacaggtagaccttgagagaatcca

SEQ ID NO: 128321 - DNA, 25 bp, Artificial
  probe
  misc_feature (1)..(25): SEQ ID NO: 2885; WAN024CPU_at; Start 164; Stop 188
tgagctctacgtggacttcaagtcc

SEQ ID NO: 128322 - DNA, 25 bp, Artificial
  probe
  misc_feature (1)..(25): SEQ ID NO: 2885; WAN024CPU_at; Start 41; Stop 65
caacaacccctttattgagaactgg

SEQ ID NO: 128323 - DNA, 25 bp, Artificial
  probe
  misc_feature (1)..(25): SEQ ID NO: 2885; WAN024CPU_at; Start 200; Stop 224
caaagttcattagttgtcacctcca

SEQ ID NO: 128324 - DNA, 25 bp, Artificial
  probe
  misc_feature (1)..(25): SEQ ID NO: 2885; WAN024CPU_at; Start 211; Stop 235
agttgtcacctccaaaaatcacggg

SEQ ID NO: 128325 - DNA, 25 bp, Artificial
  probe
  misc_feature (1)..(25): SEQ ID NO: 2885; WAN024CPU_at; Start 358; Stop 382
gaatcgaaattccaggcagtcctgc

SEQ ID NO: 128326 - DNA, 25 bp, Artificial
  probe
  misc_feature (1)..(25): SEQ ID NO: 2885; WAN024CPU_at; Start 30; Stop 54
gataccggcatcaacaaccccttta

SEQ ID NO: 128327 - DNA, 25 bp, Artificial
  probe
  misc_feature (1)..(25): SEQ ID NO: 3364; WAN024CPV_at; Start 1324; Stop 1348
gctggattctctcaaggtctacctg

SEQ ID NO: 128328 - DNA, 25 bp, Artificial
  probe
  misc_feature (1)..(25): SEQ ID NO: 3364; WAN024CPV_at; Start 500; Stop 524
gcttgtcacttggttctgatactgg

SEQ ID NO: 128329 - DNA, 25 bp, Artificial
  probe
  misc_feature (1)..(25): SEQ ID NO: 3364; WAN024CPV_at; Start 341; Stop 365
gcatgattgtcgttggaaagaccaa

SEQ ID NO: 128330 - DNA, 25 bp, Artificial
  probe
  misc_feature (1)..(25): SEQ ID NO: 3364; WAN024CPV_at; Start 231; Stop 255
taaggataacatctctacagacggt

SEQ ID NO: 128331 - DNA, 25 bp, Artificial
  probe
  misc_feature (1)..(25): SEQ ID NO: 3364; WAN024CPV_at; Start 408; Stop 432
ctacggagcaactaaaaacgcttgg

SEQ ID NO: 128332 - DNA, 25 bp, Artificial
  probe
  misc_feature (1)..(25): SEQ ID NO: 3364; WAN024CPV_at; Start 727; Stop 751
cgcatcgccgactttacttcaaaaa

SEQ ID NO: 128333 - DNA, 25 bp, Artificial
  probe
  misc_feature (1)..(25): SEQ ID NO: 3364; WAN024CPV_at; Start 687; Stop 711
tgccagcgaagatgctaaagactct

SEQ ID NO: 128334 - DNA, 25 bp, Artificial
  probe
  misc_feature (1)..(25): SEQ ID NO: 3364; WAN024CPV_at; Start 646; Stop 670
gctcctactgttaaggaaaatgccc

SEQ ID NO: 128335 - DNA, 25 bp, Artificial
  probe
  misc_feature (1)..(25): SEQ ID NO: 3364; WAN024CPV_at; Start 1190; Stop 1214
tgattttgggtccaactgctccaag

SEQ ID NO: 128336 - DNA, 25 bp, Artificial
  probe
  misc_feature (1)..(25): SEQ ID NO: 3364; WAN024CPV_at; Start 441; Stop 465
caaggttcctggtgggtcatcaagt

SEQ ID NO: 128337 - DNA, 25 bp, Artificial
  probe
  misc_feature (1)..(25): SEQ ID NO: 3364; WAN024CPV_at; Start 538; Stop 562
caacctgctgccttcaacggaatcg

SEQ ID NO: 128338 - DNA, 25 bp, Artificial
  probe
  misc_feature (1)..(25): SEQ ID NO: 3364; WAN024CPV_at; Start 457; Stop 481
tcatcaagtggttctgccgcagctg

SEQ ID NO: 128339 - DNA, 25 bp, Artificial
  probe
  misc_feature (1)..(25): SEQ ID NO: 3364; WAN024CPV_at; Start 626; Stop 650
tagaccagattggaccttttgctcc

SEQ ID NO: 128340 - DNA, 25 bp, Artificial
  probe
  misc_feature (1)..(25): SEQ ID NO: 3364; WAN024CPV_at; Start 1203; Stop 1227
aactgctccaagtgttgcctatgac

SEQ ID NO: 128341 - DNA, 25 bp, Artificial
  probe
  misc_feature (1)..(25): SEQ ID NO: 3364; WAN024CPV_at; Start 166; Stop 190
gctaaagccattgatgaagctggaa

SEQ ID NO: 128342 - DNA, 25 bp, Artificial
  probe
  misc_feature (1)..(25): SEQ ID NO: 3364; WAN024CPV_at; Start 212; Stop 236
caggaattccacttgctgttaagga

SEQ ID NO: 128343 - DNA, 25 bp, Artificial
  probe
  misc_feature (1)..(25): SEQ ID NO: 3364; WAN024CPV_at; Start 606; Stop 630
cattgcctttggtagctcattagac

SEQ ID NO: 128344 - DNA, 25 bp, Artificial
  probe
  misc_feature (1)..(25): SEQ ID NO: 3364; WAN024CPV_at; Start 516; Stop 540
tgatactggtggttccatccgccaa

SEQ ID NO: 128345 - DNA, 25 bp, Artificial
  probe
  misc_feature (1)..(25): SEQ ID NO: 3364; WAN024CPV_at; Start 250; Stop 274
gacggtattctcacaactgctgcct

SEQ ID NO: 128346 - DNA, 25 bp, Artificial
  probe
  misc_feature (1)..(25): SEQ ID NO: 3364; WAN024CPV_at; Start 883; Stop 907
gaagtcagccttcctcactctaaat

SEQ ID NO: 128347 - DNA, 25 bp, Artificial
  probe
  misc_feature (1)..(25): SEQ ID NO: 3364; WAN024CPV_at; Start 307; Stop 331
gatgcgacagctgttgccaatgcaa

SEQ ID NO: 128348 - DNA, 25 bp, Artificial
  probe
  misc_feature (1)..(25): SEQ ID NO: 3364; WAN024CPV_at; Start 480; Stop 504
tgtagcctcaggacaagttcgcttg

SEQ ID NO: 128349 - DNA, 25 bp, Artificial
  probe
  misc_feature (1)..(25): SEQ ID NO: 3364; WAN024CPV_at; Start 64; Stop 88
tctgcaacagaattgacccaagcaa

SEQ ID NO: 128350 - DNA, 25 bp, Artificial
  probe
  misc_feature (1)..(25): SEQ ID NO: 3364; WAN024CPV_at; Start 360; Stop 384
gaccaacatggacgaatttgctatg

SEQ ID NO: 128351 - DNA, 25 bp, Artificial
  probe
  misc_feature (1)..(25): SEQ ID NO: 3364; WAN024CPV_at; Start 1156; Stop 1180
caagatttcgaaaaagtcttcgcgg

SEQ ID NO: 128352 - DNA, 25 bp, Artificial
  probe
  misc_feature (1)..(25): SEQ ID NO: 3364; WAN024CPV_at; Start 292; Stop 316
tatgagccaatctttgatgcgacag

SEQ ID NO: 128353 - DNA, 25 bp, Artificial
  probe
  misc_feature (1)..(25): SEQ ID NO: 3364; WAN024CPV_at; Start 1441; Stop 1465
caacccgtgatttttggaggtgaca

SEQ ID NO: 128354 - DNA, 25 bp, Artificial
  probe
  misc_feature (1)..(25): SEQ ID NO: 3364; WAN024CPV_at; Start 94; Stop 118
gaaaatatcaagtctcgtgaggaag

SEQ ID NO: 128355 - DNA, 25 bp, Artificial
  probe
  misc_feature (1)..(25): SEQ ID NO: 3364; WAN024CPV_at; Start 1013; Stop 1037
ttgatgaaatctatgtaaacagccg

SEQ ID NO: 128356 - DNA, 25 bp, Artificial
  probe
  misc_feature (1)..(25): SEQ ID NO: 3364; WAN024CPV_at; Start 127; Stop 151
tcatttgtcaccatcgctgaggagc

SEQ ID NO: 128357 - DNA, 25 bp, Artificial
  probe
  misc_feature (1)..(25): SEQ ID NO: 3364; WAN024CPV_at; Start 661; Stop 685
gaaaatgccctcttgctcaacgcta

SEQ ID NO: 128358 - DNA, 25 bp, Artificial
  probe
  misc_feature (1)..(25): SEQ ID NO: 3364; WAN024CPV_at; Start 564; Stop 588
tggtctcaaaccaacctacggaaca

SEQ ID NO: 128359 - DNA, 25 bp, Artificial
  probe
  misc_feature (1)..(25): SEQ ID NO: 3364; WAN024CPV_at; Start 148; Stop 172
gagcaagctcttgttcaagctaaag

SEQ ID NO: 128360 - DNA, 25 bp, Artificial
  probe
  misc_feature (1)..(25): SEQ ID NO: 3364; WAN024CPV_at; Start 583; Stop 607
ggaacagtttcacgtttcggtctca

SEQ ID NO: 128361 - DNA, 25 bp, Artificial
  probe
  misc_feature (1)..(25): SEQ ID NO: 1052; WAN024CPW_at; Start 417; Stop 441
ttatgttgacctcaaccgccaaggg

SEQ ID NO: 128362 - DNA, 25 bp, Artificial
  probe
  misc_feature (1)..(25): SEQ ID NO: 1052; WAN024CPW_at; Start 1079; Stop 1103
cactggaacaaatcgaattgacacc

SEQ ID NO: 128363 - DNA, 25 bp, Artificial
  probe
  misc_feature (1)..(25): SEQ ID NO: 1052; WAN024CPW_at; Start 624; Stop 648
taccaagactgaattgaagaacctc

SEQ ID NO: 128364 - DNA, 25 bp, Artificial
  probe
  misc_feature (1)..(25): SEQ ID NO: 1052; WAN024CPW_at; Start 1205; Stop 1229
cgcgtgaatacgtggaaaaagcagg

SEQ ID NO: 128365 - DNA, 25 bp, Artificial
  probe
  misc_feature (1)..(25): SEQ ID NO: 1052; WAN024CPW_at; Start 903; Stop 927
tcgtgcgcgttatgtatctgacctt

SEQ ID NO: 128366 - DNA, 25 bp, Artificial
  probe
  misc_feature (1)..(25): SEQ ID NO: 1052; WAN024CPW_at; Start 532; Stop 556
tacgctggcatttctgacgttaaga

SEQ ID NO: 128367 - DNA, 25 bp, Artificial
  probe
  misc_feature (1)..(25): SEQ ID NO: 1052; WAN024CPW_at; Start 938; Stop 962
actacgatgctagtcagttgactgc

SEQ ID NO: 128368 - DNA, 25 bp, Artificial
  probe
  misc_feature (1)..(25): SEQ ID NO: 1052; WAN024CPW_at; Start 1233; Stop 1257
ggttcaaatttcagatccagctatc

SEQ ID NO: 128369 - DNA, 25 bp, Artificial
  probe
  misc_feature (1)..(25): SEQ ID NO: 1052; WAN024CPW_at; Start 496; Stop 520
tatgcttatctgacagccctcaagg

SEQ ID NO: 128370 - DNA, 25 bp, Artificial
  probe
  misc_feature (1)..(25): SEQ ID NO: 1052; WAN024CPW_at; Start 886; Stop 910
gagtttccaaaagaacgtcgtgcgc

SEQ ID NO: 128371 - DNA, 25 bp, Artificial
  probe
  misc_feature (1)..(25): SEQ ID NO: 1052; WAN024CPW_at; Start 117; Stop 141
gattgactggtctttcccaggagtt

SEQ ID NO: 128372 - DNA, 25 bp, Artificial
  probe
  misc_feature (1)..(25): SEQ ID NO: 1052; WAN024CPW_at; Start 713; Stop 737
gctcaggtggtcaaatccgccaaga

SEQ ID NO: 128373 - DNA, 25 bp, Artificial
  probe
  misc_feature (1)..(25): SEQ ID NO: 1052; WAN024CPW_at; Start 36; Stop 60
cgtagagctcaacaccaattcaaaa

SEQ ID NO: 128374 - DNA, 25 bp, Artificial
  probe
  misc_feature (1)..(25): SEQ ID NO: 1052; WAN024CPW_at; Start 1150; Stop 1174
tcatctaagattgccaagaaagtct

SEQ ID NO: 128375 - DNA, 25 bp, Artificial
  probe
  misc_feature (1)..(25): SEQ ID NO: 1052; WAN024CPW_at; Start 1280; Stop 1304
tctttgccgataacgaagctgctgt

SEQ ID NO: 128376 - DNA, 25 bp, Artificial
  probe
  misc_feature (1)..(25): SEQ ID NO: 1052; WAN024CPW_at; Start 1008; Stop 1032
tggtgatgccaaacaagtctctaac

SEQ ID NO: 128377 - DNA, 25 bp, Artificial
  probe
  misc_feature (1)..(25): SEQ ID NO: 1052; WAN024CPW_at; Start 1020; Stop 1044
acaagtctctaactggctccaaggg

SEQ ID NO: 128378 - DNA, 25 bp, Artificial
  probe
  misc_feature (1)..(25): SEQ ID NO: 1052; WAN024CPW_at; Start 181; Stop 205
aaggctgctcttgccctcaacatgg

SEQ ID NO: 128379 - DNA, 25 bp, Artificial
  probe
  misc_feature (1)..(25): SEQ ID NO: 1052; WAN024CPW_at; Start 922; Stop 946
gaccttggtttatcagactacgatg

SEQ ID NO: 128380 - DNA, 25 bp, Artificial
  probe
  misc_feature (1)..(25): SEQ ID NO: 1052; WAN024CPW_at; Start 102; Stop 126
tgccaacactaacgtgattgactgg

SEQ ID NO: 128381 - DNA, 25 bp, Artificial
  probe
  misc_feature (1)..(25): SEQ ID NO: 1052; WAN024CPW_at; Start 516; Stop 540
caaggaagttatccagtacgctggc

SEQ ID NO: 128382 - DNA, 25 bp, Artificial
  probe
  misc_feature (1)..(25): SEQ ID NO: 1052; WAN024CPW_at; Start 1128; Stop 1152
catcatcgaagacggtactatttca

SEQ ID NO: 128383 - DNA, 25 bp, Artificial
  probe
  misc_feature (1)..(25): SEQ ID NO: 1052; WAN024CPW_at; Start 1372; Stop 1396
aaaggccaagccaacccacaagttg

SEQ ID NO: 128384 - DNA, 25 bp, Artificial
  probe
  misc_feature (1)..(25): SEQ ID NO: 1052; WAN024CPW_at; Start 1182; Stop 1206
tctagctaaaaatggcggtggcgcg

SEQ ID NO: 128385 - DNA, 25 bp, Artificial
  probe
  misc_feature (1)..(25): SEQ ID NO: 1052; WAN024CPW_at; Start 734; Stop 758
aagaaacacgccgttacgatgaagc

SEQ ID NO: 128386 - DNA, 25 bp, Artificial
  probe
  misc_feature (1)..(25): SEQ ID NO: 1052; WAN024CPW_at; Start 376; Stop 400
gaagacgctggtaaaaacacccatg

SEQ ID NO: 128387 - DNA, 25 bp, Artificial
  probe
  misc_feature (1)..(25): SEQ ID NO: 1052; WAN024CPW_at; Start 222; Stop 246
gcactttgaccgcaagaactacttc

SEQ ID NO: 128388 - DNA, 25 bp, Artificial
  probe
  misc_feature (1)..(25): SEQ ID NO: 1052; WAN024CPW_at; Start 575; Stop 599
gtgtggatgccaacatctcccttcg

SEQ ID NO: 128389 - DNA, 25 bp, Artificial
  probe
  misc_feature (1)..(25): SEQ ID NO: 1052; WAN024CPW_at; Start 1265; Stop 1289
caatcatccaccaagtctttgccga

SEQ ID NO: 128390 - DNA, 25 bp, Artificial
  probe
  misc_feature (1)..(25): SEQ ID NO: 1052; WAN024CPW_at; Start 22; Stop 46
ggacttgaagtccacgtagagctca

SEQ ID NO: 128391 - DNA, 25 bp, Artificial
  probe
  misc_feature (1)..(25): SEQ ID NO: 1052; WAN024CPW_at; Start 1045; Stop 1069
gaagtcgctcagttcttgaatgctg

SEQ ID NO: 128392 - DNA, 25 bp, Artificial
  probe
  misc_feature (1)..(25): SEQ ID NO: 1052; WAN024CPW_at; Start 1167; Stop 1191
gaaagtctttgtccatctagctaaa

SEQ ID NO: 128393 - DNA, 25 bp, Artificial
  probe
  misc_feature (1)..(25): SEQ ID NO: 1052; WAN024CPW_at; Start 1061; Stop 1085
tgaatgctgaaggtaaaacactgga

SEQ ID NO: 128394 - DNA, 25 bp, Artificial
  probe
  misc_feature (1)..(25): SEQ ID NO: 1052; WAN024CPW_at; Start 1401; Stop 1425
taaactacttgcacaggaattggcg

SEQ ID NO: 128395 - DNA, 25 bp, Artificial
  probe
  misc_feature (1)..(25): SEQ ID NO: 4930; WAN024CPX_at; Start 299; Stop 323
tctttgagaaactcaatttggtact

SEQ ID NO: 128396 - DNA, 25 bp, Artificial
  probe
  misc_feature (1)..(25): SEQ ID NO: 4930; WAN024CPX_at; Start 374; Stop 398
gtcataggacgcaagcgagttccca

SEQ ID NO: 128397 - DNA, 25 bp, Artificial
  probe
  misc_feature (1)..(25): SEQ ID NO: 4930; WAN024CPX_at; Start 245; Stop 269
tcgaattgttctttaagataaccaa

SEQ ID NO: 128398 - DNA, 25 bp, Artificial
  probe
  misc_feature (1)..(25): SEQ ID NO: 4930; WAN024CPX_at; Start 387; Stop 411
agcgagttcccaatcccgctgctaa

SEQ ID NO: 128399 - DNA, 25 bp, Artificial
  probe
  misc_feature (1)..(25): SEQ ID NO: 4930; WAN024CPX_at; Start 204; Stop 228
cattgaaaacgagacgaacaccgta

SEQ ID NO: 128400 - DNA, 25 bp, Artificial
  probe
  misc_feature (1)..(25): SEQ ID NO: 4930; WAN024CPX_at; Start 160; Stop 184
tacaagatagagagagtaaaagtta

SEQ ID NO: 128401 - DNA, 25 bp, Artificial
  probe
  misc_feature (1)..(25): SEQ ID NO: 4930; WAN024CPX_at; Start 306; Stop 330
gaaactcaatttggtactcaatcaa

SEQ ID NO: 128402 - DNA, 25 bp, Artificial
  probe
  misc_feature (1)..(25): SEQ ID NO: 4930; WAN024CPX_at; Start 261; Stop 285
gataaccaacaatgatgatgatgtc

SEQ ID NO: 128403 - DNA, 25 bp, Artificial
  probe
  misc_feature (1)..(25): SEQ ID NO: 4930; WAN024CPX_at; Start 324; Stop 348
caatcaaaggtttttgattaacctg

SEQ ID NO: 128404 - DNA, 25 bp, Artificial
  probe
  misc_feature (1)..(25): SEQ ID NO: 4930; WAN024CPX_at; Start 285; Stop 309
cattgattcctttttctttgagaaa

SEQ ID NO: 128405 - DNA, 25 bp, Artificial
  probe
  misc_feature (1)..(25): SEQ ID NO: 4930; WAN024CPX_at; Start 175; Stop 199
gtaaaagttattgtagtcagcgtat

SEQ ID NO: 128406 - DNA, 25 bp, Artificial
  probe
  misc_feature (1)..(25): SEQ ID NO: 4930; WAN024CPX_at; Start 27; Stop 51
ccaagaaccattcgttggtacaatc

SEQ ID NO: 128407 - DNA, 25 bp, Artificial
  probe
  misc_feature (1)..(25): SEQ ID NO: 4930; WAN024CPX_at; Start 270; Stop 294
caatgatgatgatgtcattgattcc

SEQ ID NO: 128408 - DNA, 25 bp, Artificial
  probe
  misc_feature (1)..(25): SEQ ID NO: 4930; WAN024CPX_at; Start 338; Stop 362
tgattaacctgaaccaaggctttag

SEQ ID NO: 128409 - DNA, 25 bp, Artificial
  probe
  misc_feature (1)..(25): SEQ ID NO: 4930; WAN024CPX_at; Start 211; Stop 235
aacgagacgaacaccgtatttctct

SEQ ID NO: 128410 - DNA, 25 bp, Artificial
  probe
  misc_feature (1)..(25): SEQ ID NO: 4930; WAN024CPX_at; Start 186; Stop 210
tgtagtcagcgtatttatcattgaa

SEQ ID NO: 128411 - DNA, 25 bp, Artificial
  probe
  misc_feature (1)..(25): SEQ ID NO: 4930; WAN024CPX_at; Start 256; Stop 280
tttaagataaccaacaatgatgatg

SEQ ID NO: 128412 - DNA, 25 bp, Artificial
  probe
  misc_feature (1)..(25): SEQ ID NO: 4930; WAN024CPX_at; Start 378; Stop 402
taggacgcaagcgagttcccaatcc

SEQ ID NO: 128413 - DNA, 25 bp, Artificial
  probe
  misc_feature (1)..(25): SEQ ID NO: 4930; WAN024CPX_at; Start 366; Stop 390
tattttcagtcataggacgcaagcg

SEQ ID NO: 128414 - DNA, 25 bp, Artificial
  probe
  misc_feature (1)..(25): SEQ ID NO: 4930; WAN024CPX_at; Start 43; Stop 67
ggtacaatcttcacgataaacacta

SEQ ID NO: 128415 - DNA, 25 bp, Artificial
  probe
  misc_feature (1)..(25): SEQ ID NO: 4930; WAN024CPX_at; Start 33; Stop 57
accattcgttggtacaatcttcacg

SEQ ID NO: 128416 - DNA, 25 bp, Artificial
  probe
  misc_feature (1)..(25): SEQ ID NO: 4930; WAN024CPX_at; Start 152; Stop 176
tcttcttttacaagatagagagagt

SEQ ID NO: 128417 - DNA, 25 bp, Artificial
  probe
  misc_feature (1)..(25): SEQ ID NO: 4930; WAN024CPX_at; Start 145; Stop 169
ggccaattcttcttttacaagatag

SEQ ID NO: 128418 - DNA, 25 bp, Artificial
  probe
  misc_feature (1)..(25): SEQ ID NO: 4930; WAN024CPX_at; Start 219; Stop 243
gaacaccgtatttctctttcaagta

SEQ ID NO: 128419 - DNA, 25 bp, Artificial
  probe
  misc_feature (1)..(25): SEQ ID NO: 4930; WAN024CPX_at; Start 231; Stop 255
tctctttcaagtaatcgaattgttc

SEQ ID NO: 128420 - DNA, 25 bp, Artificial
  probe
  misc_feature (1)..(25): SEQ ID NO: 4930; WAN024CPX_at; Start 39; Stop 63
cgttggtacaatcttcacgataaac

SEQ ID NO: 128421 - DNA, 25 bp, Artificial
  probe
  misc_feature (1)..(25): SEQ ID NO: 4930; WAN024CPX_at; Start 132; Stop 156
taacatagctgttggccaattcttc

SEQ ID NO: 128422 - DNA, 25 bp, Artificial
  probe
  misc_feature (1)..(25): SEQ ID NO: 4930; WAN024CPX_at; Start 363; Stop 387
gggtattttcagtcataggacgcaa

SEQ ID NO: 128423 - DNA, 25 bp, Artificial
  probe
  misc_feature (1)..(25): SEQ ID NO: 4930; WAN024CPX_at; Start 201; Stop 225
tatcattgaaaacgagacgaacacc

SEQ ID NO: 128424 - DNA, 25 bp, Artificial
  probe
  misc_feature (1)..(25): SEQ ID NO: 4930; WAN024CPX_at; Start 371; Stop 395
tcagtcataggacgcaagcgagttc

SEQ ID NO: 128425 - DNA, 25 bp, Artificial
  probe
  misc_feature (1)..(25): SEQ ID NO: 4930; WAN024CPX_at; Start 53; Stop 77
tcacgataaacactaaaataagtcg

SEQ ID NO: 128426 - DNA, 25 bp, Artificial
  probe
  misc_feature (1)..(25): SEQ ID NO: 4930; WAN024CPX_at; Start 316; Stop 340
ttggtactcaatcaaaggtttttga

SEQ ID NO: 128427 - DNA, 25 bp, Artificial
  probe
  misc_feature (1)..(25): SEQ ID NO: 4930; WAN024CPX_at; Start 90; Stop 114
cattgcggaacatatttttaaagag

SEQ ID NO: 128428 - DNA, 25 bp, Artificial
  probe
  misc_feature (1)..(25): SEQ ID NO: 4930; WAN024CPX_at; Start 125; Stop 149
gcatcaataacatagctgttggcca

SEQ ID NO: 128429 - DNA, 25 bp, Artificial
  probe
  misc_feature (1)..(25): SEQ ID NO: 3863; WAN024CPY_at; Start 14; Stop 38
tcttagcagcgggattgggaactcg

SEQ ID NO: 128430 - DNA, 25 bp, Artificial
  probe
  misc_feature (1)..(25): SEQ ID NO: 3863; WAN024CPY_at; Start 235; Stop 259
gactacaataacttttactctctct

SEQ ID NO: 128431 - DNA, 25 bp, Artificial
  probe
  misc_feature (1)..(25): SEQ ID NO: 3863; WAN024CPY_at; Start 250; Stop 274
tactctctctatcttgtaaaagaag

SEQ ID NO: 128432 - DNA, 25 bp, Artificial
  probe
  misc_feature (1)..(25): SEQ ID NO: 3863; WAN024CPY_at; Start 628; Stop 652
tatgagatcgatagtgtccaagact

SEQ ID NO: 128433 - DNA, 25 bp, Artificial
  probe
  misc_feature (1)..(25): SEQ ID NO: 3863; WAN024CPY_at; Start 159; Stop 183
tggttatcttaaagaacaattcgat

SEQ ID NO: 128434 - DNA, 25 bp, Artificial
  probe
  misc_feature (1)..(25): SEQ ID NO: 3863; WAN024CPY_at; Start 643; Stop 667
gtccaagactatcgtaaattagaag

SEQ ID NO: 128435 - DNA, 25 bp, Artificial
  probe
  misc_feature (1)..(25): SEQ ID NO: 3863; WAN024CPY_at; Start 33; Stop 57
aactcgcttgcgtcctatgactgaa

SEQ ID NO: 128436 - DNA, 25 bp, Artificial
  probe
  misc_feature (1)..(25): SEQ ID NO: 3863; WAN024CPY_at; Start 472; Stop 496
tccttctgggatgctccaactgcag

SEQ ID NO: 128437 - DNA, 25 bp, Artificial
  probe
  misc_feature (1)..(25): SEQ ID NO: 3863; WAN024CPY_at; Start 483; Stop 507
tgctccaactgcagaaaagattgtc

SEQ ID NO: 128438 - DNA, 25 bp, Artificial
  probe
  misc_feature (1)..(25): SEQ ID NO: 3863; WAN024CPY_at; Start 261; Stop 285
tcttgtaaaagaagaattggccaac

SEQ ID NO: 128439 - DNA, 25 bp, Artificial
  probe
  misc_feature (1)..(25): SEQ ID NO: 3863; WAN024CPY_at; Start 613; Stop 637
gaaggcaatagcatttatgagatcg

SEQ ID NO: 128440 - DNA, 25 bp, Artificial
  probe
  misc_feature (1)..(25): SEQ ID NO: 3863; WAN024CPY_at; Start 494; Stop 518
cagaaaagattgtcagctttatcga

SEQ ID NO: 128441 - DNA, 25 bp, Artificial
  probe
  misc_feature (1)..(25): SEQ ID NO: 3863; WAN024CPY_at; Start 582; Stop 606
caaagagctagatgtctatgttgaa

SEQ ID NO: 128442 - DNA, 25 bp, Artificial
  probe
  misc_feature (1)..(25): SEQ ID NO: 3863; WAN024CPY_at; Start 403; Stop 427
tatggagatgactacaaggttcaag

SEQ ID NO: 128443 - DNA, 25 bp, Artificial
  probe
  misc_feature (1)..(25): SEQ ID NO: 3863; WAN024CPY_at; Start 412; Stop 436
gactacaaggttcaagacattattg

SEQ ID NO: 128444 - DNA, 25 bp, Artificial
  probe
  misc_feature (1)..(25): SEQ ID NO: 3863; WAN024CPY_at; Start 444; Stop 468
caaggcaggtcgcatccttagtggt

SEQ ID NO: 128445 - DNA, 25 bp, Artificial
  probe
  misc_feature (1)..(25): SEQ ID NO: 3863; WAN024CPY_at; Start 130; Stop 154
aaaggaatcaatgacatcatcatca

SEQ ID NO: 128446 - DNA, 25 bp, Artificial
  probe
  misc_feature (1)..(25): SEQ ID NO: 3863; WAN024CPY_at; Start 271; Stop 295
gaagaattggccaacagctatgtta

SEQ ID NO: 128447 - DNA, 25 bp, Artificial
  probe
  misc_feature (1)..(25): SEQ ID NO: 3863; WAN024CPY_at; Start 573; Stop 597
ggataatatcaaagagctagatgtc

SEQ ID NO: 128448 - DNA, 25 bp, Artificial
  probe
  misc_feature (1)..(25): SEQ ID NO: 3863; WAN024CPY_at; Start 278; Stop 302
tggccaacagctatgttattgatgc

SEQ ID NO: 128449 - DNA, 25 bp, Artificial
  probe
  misc_feature (1)..(25): SEQ ID NO: 3863; WAN024CPY_at; Start 456; Stop 480
catccttagtggtgtatccttctgg

SEQ ID NO: 128450 - DNA, 25 bp, Artificial
  probe
  misc_feature (1)..(25): SEQ ID NO: 3863; WAN024CPY_at; Start 213; Stop 237
cgttttcaatgataaatacgctgac

SEQ ID NO: 128451 - DNA, 25 bp, Artificial
  probe
  misc_feature (1)..(25): SEQ ID NO: 3863; WAN024CPY_at; Start 556; Stop 580
tgggacaatatggttaaggataata

SEQ ID NO: 128452 - DNA, 25 bp, Artificial
  probe
  misc_feature (1)..(25): SEQ ID NO: 3863; WAN024CPY_at; Start 25; Stop 49
ggattgggaactcgcttgcgtccta

SEQ ID NO: 128453 - DNA, 25 bp, Artificial
  probe
  misc_feature (1)..(25): SEQ ID NO: 3863; WAN024CPY_at; Start 600; Stop 624
tgttgaagaattagaaggcaatagc

SEQ ID NO: 128454 - DNA, 25 bp, Artificial
  probe
  misc_feature (1)..(25): SEQ ID NO: 3863; WAN024CPY_at; Start 48; Stop 72
tatgactgaaaatacccctaaagcc

SEQ ID NO: 128455 - DNA, 25 bp, Artificial
  probe
  misc_feature (1)..(25): SEQ ID NO: 3863; WAN024CPY_at; Start 223; Stop 247
gataaatacgctgactacaataact

SEQ ID NO: 128456 - DNA, 25 bp, Artificial
  probe
  misc_feature (1)..(25): SEQ ID NO: 3863; WAN024CPY_at; Start 432; Stop 456
tattgttgatagcaaggcaggtcgc

SEQ ID NO: 128457 - DNA, 25 bp, Artificial
  probe
  misc_feature (1)..(25): SEQ ID NO: 3863; WAN024CPY_at; Start 313; Stop 337
ctctttaaaaatatgttccgcaatg

SEQ ID NO: 128458 - DNA, 25 bp, Artificial
  probe
  misc_feature (1)..(25): SEQ ID NO: 3863; WAN024CPY_at; Start 120; Stop 144
tctcaaagaaaaaggaatcaatgac

SEQ ID NO: 128459 - DNA, 25 bp, Artificial
  probe
  misc_feature (1)..(25): SEQ ID NO: 3863; WAN024CPY_at; Start 376; Stop 400
gattgtaccaacgaatggttcttgg

SEQ ID NO: 128460 - DNA, 25 bp, Artificial
  probe
  misc_feature (1)..(25): SEQ ID NO: 3863; WAN024CPY_at; Start 66; Stop 90
taaagccttggttcaggttaatcaa

SEQ ID NO: 128461 - DNA, 25 bp, Artificial
  probe
  misc_feature (1)..(25): SEQ ID NO: 3863; WAN024CPY_at; Start 360; Stop 384
tagtgtttatcgtgaagattgtacc

SEQ ID NO: 128462 - DNA, 25 bp, Artificial
  probe
  misc_feature (1)..(25): SEQ ID NO: 3863; WAN024CPY_at; Start 106; Stop 130
taccaaattgagtttctcaaagaaa

SEQ ID NO: 128463 - DNA, 25 bp, Artificial
  probe
  misc_feature (1)..(25): SEQ ID NO: 7354; WAN024CPZ_at; Start 983; Stop 1007
cgtcagctcagcatcaaccagtgct

SEQ ID NO: 128464 - DNA, 25 bp, Artificial
  probe
  misc_feature (1)..(25): SEQ ID NO: 7354; WAN024CPZ_at; Start 280; Stop 304
tgcgtcacttcagcgtcaaccagtg

SEQ ID NO: 128465 - DNA, 25 bp, Artificial
  probe
  misc_feature (1)..(25): SEQ ID NO: 7354; WAN024CPZ_at; Start 109; Stop 133
catcagcttctgagtcagcgtcaac

SEQ ID NO: 128466 - DNA, 25 bp, Artificial
  probe
  misc_feature (1)..(25): SEQ ID NO: 7354; WAN024CPZ_at; Start 74; Stop 98
ttcagcatcaacaagtgcatcagcc

SEQ ID NO: 128467 - DNA, 25 bp, Artificial
  probe
  misc_feature (1)..(25): SEQ ID NO: 7354; WAN024CPZ_at; Start 471; Stop 495
tacaagtgcctcagcctcaacgagt

SEQ ID NO: 128468 - DNA, 25 bp, Artificial
  probe
  misc_feature (1)..(25): SEQ ID NO: 7354; WAN024CPZ_at; Start 118; Stop 142
ctgagtcagcgtcaaccagtgcgtc

SEQ ID NO: 128469 - DNA, 25 bp, Artificial
  probe
  misc_feature (1)..(25): SEQ ID NO: 7354; WAN024CPZ_at; Start 1174; Stop 1198
cgtctgaatcggcctcaacgagtgc

SEQ ID NO: 128470 - DNA, 25 bp, Artificial
  probe
  misc_feature (1)..(25): SEQ ID NO: 7354; WAN024CPZ_at; Start 258; Stop 282
cgtcagcttccgcatcaacgagtgc

SEQ ID NO: 128471 - DNA, 25 bp, Artificial
  probe
  misc_feature (1)..(25): SEQ ID NO: 7354; WAN024CPZ_at; Start 501; Stop 525
ggcttcagcaagcacctcagcgtct

SEQ ID NO: 128472 - DNA, 25 bp, Artificial
  probe
  misc_feature (1)..(25): SEQ ID NO: 7354; WAN024CPZ_at; Start 830; Stop 854
caaccagcgcctcggcctcagcatc

SEQ ID NO: 128473 - DNA, 25 bp, Artificial
  probe
  misc_feature (1)..(25): SEQ ID NO: 7354; WAN024CPZ_at; Start 255; Stop 279
gtgcgtcagcttccgcatcaacgag

SEQ ID NO: 128474 - DNA, 25 bp, Artificial
  probe
  misc_feature (1)..(25): SEQ ID NO: 7354; WAN024CPZ_at; Start 404; Stop 428
gtgcctcagcttccgcatcaacgag

SEQ ID NO: 128475 - DNA, 25 bp, Artificial
  probe
  misc_feature (1)..(25): SEQ ID NO: 7354; WAN024CPZ_at; Start 403; Stop 427
agtgcctcagcttccgcatcaacga

SEQ ID NO: 128476 - DNA, 25 bp, Artificial
  probe
  misc_feature (1)..(25): SEQ ID NO: 7354; WAN024CPZ_at; Start 534; Stop 558
atcaacgtctgcctcagcctcagca

SEQ ID NO: 128477 - DNA, 25 bp, Artificial
  probe
  misc_feature (1)..(25): SEQ ID NO: 7354; WAN024CPZ_at; Start 71; Stop 95
ggcttcagcatcaacaagtgcatca

SEQ ID NO: 128478 - DNA, 25 bp, Artificial
  probe
  misc_feature (1)..(25): SEQ ID NO: 7354; WAN024CPZ_at; Start 570; Stop 594
gtcagcttcagcgtcaaccagtgcg

SEQ ID NO: 128479 - DNA, 25 bp, Artificial
  probe
  misc_feature (1)..(25): SEQ ID NO: 7354; WAN024CPZ_at; Start 283; Stop 307
gtcacttcagcgtcaaccagtgcgt

SEQ ID NO: 128480 - DNA, 25 bp, Artificial
  probe
  misc_feature (1)..(25): SEQ ID NO: 7354; WAN024CPZ_at; Start 2; Stop 26
atctgcaagcacatcagcatctgaa

SEQ ID NO: 128481 - DNA, 25 bp, Artificial
  probe
  misc_feature (1)..(25): SEQ ID NO: 7354; WAN024CPZ_at; Start 1121; Stop 1145
ctcagcttctgaatcggcctcaacg

SEQ ID NO: 128482 - DNA, 25 bp, Artificial
  probe
  misc_feature (1)..(25): SEQ ID NO: 7354; WAN024CPZ_at; Start 525; Stop 549
tgaatctgcatcaacgtctgcctca

SEQ ID NO: 128483 - DNA, 25 bp, Artificial
  probe
  misc_feature (1)..(25): SEQ ID NO: 7354; WAN024CPZ_at; Start 527; Stop 551
aatctgcatcaacgtctgcctcagc

SEQ ID NO: 128484 - DNA, 25 bp, Artificial
  probe
  misc_feature (1)..(25): SEQ ID NO: 7354; WAN024CPZ_at; Start 1123; Stop 1147
cagcttctgaatcggcctcaacgag

SEQ ID NO: 128485 - DNA, 25 bp, Artificial
  probe
  misc_feature (1)..(25): SEQ ID NO: 7354; WAN024CPZ_at; Start 1171; Stop 1195
cagcgtctgaatcggcctcaacgag

SEQ ID NO: 128486 - DNA, 25 bp, Artificial
  probe
  misc_feature (1)..(25): SEQ ID NO: 7354; WAN024CPZ_at; Start 107; Stop 131
cacatcagcttctgagtcagcgtca

SEQ ID NO: 128487 - DNA, 25 bp, Artificial
  probe
  misc_feature (1)..(25): SEQ ID NO: 7354; WAN024CPZ_at; Start 66; Stop 90
gcatcggcttcagcatcaacaagtg

SEQ ID NO: 128488 - DNA, 25 bp, Artificial
  probe
  misc_feature (1)..(25): SEQ ID NO: 7354; WAN024CPZ_at; Start 14; Stop 38
atcagcatctgaatccgcatcaaca

SEQ ID NO: 128489 - DNA, 25 bp, Artificial
  probe
  misc_feature (1)..(25): SEQ ID NO: 7354; WAN024CPZ_at; Start 1170; Stop 1194
tcagcgtctgaatcggcctcaacga

SEQ ID NO: 128490 - DNA, 25 bp, Artificial
  probe
  misc_feature (1)..(25): SEQ ID NO: 7354; WAN024CPZ_at; Start 499; Stop 523
tcggcttcagcaagcacctcagcgt

SEQ ID NO: 128491 - DNA, 25 bp, Artificial
  probe
  misc_feature (1)..(25): SEQ ID NO: 7354; WAN024CPZ_at; Start 773; Stop 797
aatcagcgtcaaccagtgcgtctga

SEQ ID NO: 128492 - DNA, 25 bp, Artificial
  probe
  misc_feature (1)..(25): SEQ ID NO: 7354; WAN024CPZ_at; Start 469; Stop 493
agtacaagtgcctcagcctcaacga

SEQ ID NO: 128493 - DNA, 25 bp, Artificial
  probe
  misc_feature (1)..(25): SEQ ID NO: 7354; WAN024CPZ_at; Start 259; Stop 283
gtcagcttccgcatcaacgagtgcg

SEQ ID NO: 128494 - DNA, 25 bp, Artificial
  probe
  misc_feature (1)..(25): SEQ ID NO: 7354; WAN024CPZ_at; Start 117; Stop 141
tctgagtcagcgtcaaccagtgcgt

SEQ ID NO: 128495 - DNA, 25 bp, Artificial
  probe
  misc_feature (1)..(25): SEQ ID NO: 7354; WAN024CPZ_at; Start 1; Stop 25
tatctgcaagcacatcagcatctga

SEQ ID NO: 128496 - DNA, 25 bp, Artificial
  probe
  misc_feature (1)..(25): SEQ ID NO: 7354; WAN024CPZ_at; Start 1136; Stop 1160
ggcctcaacgagtgcatcagcttca

SEQ ID NO: 128497 - DNA, 25 bp, Artificial
  probe
  misc_feature (1)..(25): SEQ ID NO: 7060; WAN024CQ2_at; Start 318; Stop 342
agtgcgtcggcctcaaccagtgcat

SEQ ID NO: 128498 - DNA, 25 bp, Artificial
  probe
  misc_feature (1)..(25): SEQ ID NO: 7060; WAN024CQ2_at; Start 87; Stop 111
gcttcagcatgtactgctgcctcag

SEQ ID NO: 128499 - DNA, 25 bp, Artificial
  probe
  misc_feature (1)..(25): SEQ ID NO: 7060; WAN024CQ2_at; Start 312; Stop 336
tcgacaagtgcgtcggcctcaacca

SEQ ID NO: 128500 - DNA, 25 bp, Artificial
  probe
  misc_feature (1)..(25): SEQ ID NO: 7060; WAN024CQ2_at; Start 17; Stop 41
ttcagcatgcacaagtgcttcagct

SEQ ID NO: 128501 - DNA, 25 bp, Artificial
  probe
  misc_feature (1)..(25): SEQ ID NO: 7060; WAN024CQ2_at; Start 101; Stop 125
tgctgcctcagcatcagcgtcaaca

SEQ ID NO: 128502 - DNA, 25 bp, Artificial
  probe
  misc_feature (1)..(25): SEQ ID NO: 7060; WAN024CQ2_at; Start 416; Stop 440
cgcttcagcaagtactagtgcatca

SEQ ID NO: 128503 - DNA, 25 bp, Artificial
  probe
  misc_feature (1)..(25): SEQ ID NO: 7060; WAN024CQ2_at; Start 63; Stop 87
gaatcagcatcaacgtgtgcgtccg

SEQ ID NO: 128504 - DNA, 25 bp, Artificial
  probe
  misc_feature (1)..(25): SEQ ID NO: 7060; WAN024CQ2_at; Start 330; Stop 354
tcaaccagtgcatctgaatcggcat

SEQ ID NO: 128505 - DNA, 25 bp, Artificial
  probe
  misc_feature (1)..(25): SEQ ID NO: 7060; WAN024CQ2_at; Start 45; Stop 69
gcatgtacctgagcgtctgaatcag

SEQ ID NO: 128506 - DNA, 25 bp, Artificial
  probe
  misc_feature (1)..(25): SEQ ID NO: 7060; WAN024CQ2_at; Start 288; Stop 312
agtaccagtgcttcagcctcagcgt

SEQ ID NO: 128507 - DNA, 25 bp, Artificial
  probe
  misc_feature (1)..(25): SEQ ID NO: 7060; WAN024CQ2_at; Start 309; Stop 333
gcgtcgacaagtgcgtcggcctcaa

SEQ ID NO: 128508 - DNA, 25 bp, Artificial
  probe
  misc_feature (1)..(25): SEQ ID NO: 7060; WAN024CQ2_at; Start 90; Stop 114
tcagcatgtactgctgcctcagcat

SEQ ID NO: 128509 - DNA, 25 bp, Artificial
  probe
  misc_feature (1)..(25): SEQ ID NO: 7060; WAN024CQ2_at; Start 78; Stop 102
tgtgcgtccgcttcagcatgtactg

SEQ ID NO: 128510 - DNA, 25 bp, Artificial
  probe
  misc_feature (1)..(25): SEQ ID NO: 7060; WAN024CQ2_at; Start 42; Stop 66
tcagcatgtacctgagcgtctgaat

SEQ ID NO: 128511 - DNA, 25 bp, Artificial
  probe
  misc_feature (1)..(25): SEQ ID NO: 7060; WAN024CQ2_at; Start 35; Stop 59
ttcagcttcagcatgtacctgagcg

SEQ ID NO: 128512 - DNA, 25 bp, Artificial
  probe
  misc_feature (1)..(25): SEQ ID NO: 7060; WAN024CQ2_at; Start 419; Stop 443
ttcagcaagtactagtgcatcagca

SEQ ID NO: 128513 - DNA, 25 bp, Artificial
  probe
  misc_feature (1)..(25): SEQ ID NO: 7060; WAN024CQ2_at; Start 82; Stop 106
cgtccgcttcagcatgtactgctgc

SEQ ID NO: 128514 - DNA, 25 bp, Artificial
  probe
  misc_feature (1)..(25): SEQ ID NO: 7060; WAN024CQ2_at; Start 50; Stop 74
tacctgagcgtctgaatcagcatca

SEQ ID NO: 128515 - DNA, 25 bp, Artificial
  probe
  misc_feature (1)..(25): SEQ ID NO: 7060; WAN024CQ2_at; Start 428; Stop 452
tactagtgcatcagcatcagcatca

SEQ ID NO: 128516 - DNA, 25 bp, Artificial
  probe
  misc_feature (1)..(25): SEQ ID NO: 7060; WAN024CQ2_at; Start 290; Stop 314
taccagtgcttcagcctcagcgtcg

SEQ ID NO: 128517 - DNA, 25 bp, Artificial
  probe
  misc_feature (1)..(25): SEQ ID NO: 7060; WAN024CQ2_at; Start 14; Stop 38
ggcttcagcatgcacaagtgcttca

SEQ ID NO: 128518 - DNA, 25 bp, Artificial
  probe
  misc_feature (1)..(25): SEQ ID NO: 7060; WAN024CQ2_at; Start 8; Stop 32
tgcctcggcttcagcatgcacaagt

SEQ ID NO: 128519 - DNA, 25 bp, Artificial
  probe
  misc_feature (1)..(25): SEQ ID NO: 7060; WAN024CQ2_at; Start 71; Stop 95
atcaacgtgtgcgtccgcttcagca

SEQ ID NO: 128520 - DNA, 25 bp, Artificial
  probe
  misc_feature (1)..(25): SEQ ID NO: 7060; WAN024CQ2_at; Start 332; Stop 356
aaccagtgcatctgaatcggcatca

SEQ ID NO: 128521 - DNA, 25 bp, Artificial
  probe
  misc_feature (1)..(25): SEQ ID NO: 7060; WAN024CQ2_at; Start 411; Stop 435
gcgtccgcttcagcaagtactagtg

SEQ ID NO: 128522 - DNA, 25 bp, Artificial
  probe
  misc_feature (1)..(25): SEQ ID NO: 7060; WAN024CQ2_at; Start 414; Stop 438
tccgcttcagcaagtactagtgcat

SEQ ID NO: 128523 - DNA, 25 bp, Artificial
  probe
  misc_feature (1)..(25): SEQ ID NO: 7060; WAN024CQ2_at; Start 431; Stop 455
tagtgcatcagcatcagcatcaacg

SEQ ID NO: 128524 - DNA, 25 bp, Artificial
  probe
  misc_feature (1)..(25): SEQ ID NO: 7060; WAN024CQ2_at; Start 4; Stop 28
caagtgcctcggcttcagcatgcac

SEQ ID NO: 128525 - DNA, 25 bp, Artificial
  probe
  misc_feature (1)..(25): SEQ ID NO: 7060; WAN024CQ2_at; Start 39; Stop 63
gcttcagcatgtacctgagcgtctg

SEQ ID NO: 128526 - DNA, 25 bp, Artificial
  probe
  misc_feature (1)..(25): SEQ ID NO: 7060; WAN024CQ2_at; Start 96; Stop 120
tgtactgctgcctcagcatcagcgt

SEQ ID NO: 128527 - DNA, 25 bp, Artificial
  probe
  misc_feature (1)..(25): SEQ ID NO: 7060; WAN024CQ2_at; Start 326; Stop 350
ggcctcaaccagtgcatctgaatcg

SEQ ID NO: 128528 - DNA, 25 bp, Artificial
  probe
  misc_feature (1)..(25): SEQ ID NO: 7060; WAN024CQ2_at; Start 371; Stop 395
ctcagcaagtactagcgcctcagcc

SEQ ID NO: 128529 - DNA, 25 bp, Artificial
  probe
  misc_feature (1)..(25): SEQ ID NO: 7060; WAN024CQ2_at; Start 323; Stop 347
gtcggcctcaaccagtgcatctgaa

SEQ ID NO: 128530 - DNA, 25 bp, Artificial
  probe
  misc_feature (1)..(25): SEQ ID NO: 7060; WAN024CQ2_at; Start 433; Stop 457
gtgcatcagcatcagcatcaacgag

SEQ ID NO: 128531 - DNA, 25 bp, Artificial
  probe
  misc_feature (1)..(25): SEQ ID NO: 7690; WAN024CQ3_at; Start 276; Stop 300
tgtgcttgcagatactgaagccgaa

SEQ ID NO: 128532 - DNA, 25 bp, Artificial
  probe
  misc_feature (1)..(25): SEQ ID NO: 7690; WAN024CQ3_at; Start 241; Stop 265
gctgaggcacttgttgatgcggatt

SEQ ID NO: 128533 - DNA, 25 bp, Artificial
  probe
  misc_feature (1)..(25): SEQ ID NO: 7690; WAN024CQ3_at; Start 127; Stop 151
tgggatttacctgtcgatccagaag

SEQ ID NO: 128534 - DNA, 25 bp, Artificial
  probe
  misc_feature (1)..(25): SEQ ID NO: 7690; WAN024CQ3_at; Start 121; Stop 145
tctttttgggatttacctgtcgatc

SEQ ID NO: 128535 - DNA, 25 bp, Artificial
  probe
  misc_feature (1)..(25): SEQ ID NO: 7690; WAN024CQ3_at; Start 266; Stop 290
cagatgctgatgtgcttgcagatac

SEQ ID NO: 128536 - DNA, 25 bp, Artificial
  probe
  misc_feature (1)..(25): SEQ ID NO: 7690; WAN024CQ3_at; Start 184; Stop 208
gaatttgaaactgatgtacttgctg

SEQ ID NO: 128537 - DNA, 25 bp, Artificial
  probe
  misc_feature (1)..(25): SEQ ID NO: 7690; WAN024CQ3_at; Start 37; Stop 61
gcaaccaatccaatacctgtaacag

SEQ ID NO: 128538 - DNA, 25 bp, Artificial
  probe
  misc_feature (1)..(25): SEQ ID NO: 7690; WAN024CQ3_at; Start 97; Stop 121
gactcagtacctgtattaggcaatt

SEQ ID NO: 128539 - DNA, 25 bp, Artificial
  probe
  misc_feature (1)..(25): SEQ ID NO: 7690; WAN024CQ3_at; Start 8; Stop 32
actcttcttcatcacgtttacggcg

SEQ ID NO: 128540 - DNA, 25 bp, Artificial
  probe
  misc_feature (1)..(25): SEQ ID NO: 7690; WAN024CQ3_at; Start 245; Stop 269
aggcacttgttgatgcggattcaga

SEQ ID NO: 128541 - DNA, 25 bp, Artificial
  probe
  misc_feature (1)..(25): SEQ ID NO: 7690; WAN024CQ3_at; Start 68; Stop 92
gaactccaagtaacacagatccaat

SEQ ID NO: 128542 - DNA, 25 bp, Artificial
  probe
  misc_feature (1)..(25): SEQ ID NO: 7690; WAN024CQ3_at; Start 106; Stop 130
cctgtattaggcaattctttttggg

SEQ ID NO: 128543 - DNA, 25 bp, Artificial
  probe
  misc_feature (1)..(25): SEQ ID NO: 7690; WAN024CQ3_at; Start 1; Stop 25
ttgtcttactcttcttcatcacgtt

SEQ ID NO: 128544 - DNA, 25 bp, Artificial
  probe
  misc_feature (1)..(25): SEQ ID NO: 7690; WAN024CQ3_at; Start 26; Stop 50
tacggcgtttcgcaaccaatccaat

SEQ ID NO: 128545 - DNA, 25 bp, Artificial
  probe
  misc_feature (1)..(25): SEQ ID NO: 7690; WAN024CQ3_at; Start 231; Stop 255
taaagctgaggctgaggcacttgtt

SEQ ID NO: 128546 - DNA, 25 bp, Artificial
  probe
  misc_feature (1)..(25): SEQ ID NO: 7690; WAN024CQ3_at; Start 273; Stop 297
tgatgtgcttgcagatactgaagcc

SEQ ID NO: 128547 - DNA, 25 bp, Artificial
  probe
  misc_feature (1)..(25): SEQ ID NO: 7690; WAN024CQ3_at; Start 77; Stop 101
gtaacacagatccaattgacgactc

SEQ ID NO: 128548 - DNA, 25 bp, Artificial
  probe
  misc_feature (1)..(25): SEQ ID NO: 7690; WAN024CQ3_at; Start 50; Stop 74
tacctgtaacagctgctagaactcc

SEQ ID NO: 128549 - DNA, 25 bp, Artificial
  probe
  misc_feature (1)..(25): SEQ ID NO: 7690; WAN024CQ3_at; Start 252; Stop 276
tgttgatgcggattcagatgctgat

SEQ ID NO: 128550 - DNA, 25 bp, Artificial
  probe
  misc_feature (1)..(25): SEQ ID NO: 7690; WAN024CQ3_at; Start 225; Stop 249
gcttgctaaagctgaggctgaggca

SEQ ID NO: 128551 - DNA, 25 bp, Artificial
  probe
  misc_feature (1)..(25): SEQ ID NO: 7690; WAN024CQ3_at; Start 94; Stop 118
gacgactcagtacctgtattaggca

SEQ ID NO: 128552 - DNA, 25 bp, Artificial
  probe
  misc_feature (1)..(25): SEQ ID NO: 7690; WAN024CQ3_at; Start 211; Stop 235
gctgaggcgcttgtgcttgctaaag

SEQ ID NO: 128553 - DNA, 25 bp, Artificial
  probe
  misc_feature (1)..(25): SEQ ID NO: 7690; WAN024CQ3_at; Start 134; Stop 158
tacctgtcgatccagaagtatttcc

SEQ ID NO: 128554 - DNA, 25 bp, Artificial
  probe
  misc_feature (1)..(25): SEQ ID NO: 7690; WAN024CQ3_at; Start 142; Stop 166
gatccagaagtatttccaacttgtg

SEQ ID NO: 128555 - DNA, 25 bp, Artificial
  probe
  misc_feature (1)..(25): SEQ ID NO: 7690; WAN024CQ3_at; Start 148; Stop 172
gaagtatttccaacttgtgagttcg

SEQ ID NO: 128556 - DNA, 25 bp, Artificial
  probe
  misc_feature (1)..(25): SEQ ID NO: 7690; WAN024CQ3_at; Start 219; Stop 243
gcttgtgcttgctaaagctgaggct

SEQ ID NO: 128557 - DNA, 25 bp, Artificial
  probe
  misc_feature (1)..(25): SEQ ID NO: 7690; WAN024CQ3_at; Start 170; Stop 194
tcgaatggtttgctgaatttgaaac

SEQ ID NO: 128558 - DNA, 25 bp, Artificial
  probe
  misc_feature (1)..(25): SEQ ID NO: 7690; WAN024CQ3_at; Start 158; Stop 182
caacttgtgagttcgaatggtttgc

SEQ ID NO: 128559 - DNA, 25 bp, Artificial
  probe
  misc_feature (1)..(25): SEQ ID NO: 7690; WAN024CQ3_at; Start 187; Stop 211
tttgaaactgatgtacttgctgaag

SEQ ID NO: 128560 - DNA, 25 bp, Artificial
  probe
  misc_feature (1)..(25): SEQ ID NO: 7690; WAN024CQ3_at; Start 56; Stop 80
taacagctgctagaactccaagtaa

SEQ ID NO: 128561 - DNA, 25 bp, Artificial
  probe
  misc_feature (1)..(25): SEQ ID NO: 7690; WAN024CQ3_at; Start 63; Stop 87
tgctagaactccaagtaacacagat

SEQ ID NO: 128562 - DNA, 25 bp, Artificial
  probe
  misc_feature (1)..(25): SEQ ID NO: 7690; WAN024CQ3_at; Start 16; Stop 40
tcatcacgtttacggcgtttcgcaa

SEQ ID NO: 128563 - DNA, 25 bp, Artificial
  probe
  misc_feature (1)..(25): SEQ ID NO: 7690; WAN024CQ3_at; Start 85; Stop 109
gatccaattgacgactcagtacctg

SEQ ID NO: 128564 - DNA, 25 bp, Artificial
  probe
  misc_feature (1)..(25): SEQ ID NO: 7690; WAN024CQ3_at; Start 32; Stop 56
gtttcgcaaccaatccaatacctgt

SEQ ID NO: 128565 - DNA, 25 bp, Artificial
  probe
  misc_feature (1)..(25): SEQ ID NO: 2005; WAN024CQ4_at; Start 122; Stop 146
ggctgacgcactggttgatgcagat

SEQ ID NO: 128566 - DNA, 25 bp, Artificial
  probe
  misc_feature (1)..(25): SEQ ID NO: 2005; WAN024CQ4_at; Start 197; Stop 221
agacgcactcgttgacgctgaagcc

SEQ ID NO: 128567 - DNA, 25 bp, Artificial
  probe
  misc_feature (1)..(25): SEQ ID NO: 2005; WAN024CQ4_at; Start 2; Stop 26
tgccgattcagatgcactggttgag

SEQ ID NO: 128568 - DNA, 25 bp, Artificial
  probe
  misc_feature (1)..(25): SEQ ID NO: 2005; WAN024CQ4_at; Start 202; Stop 226
cactcgttgacgctgaagccgaagc

SEQ ID NO: 128569 - DNA, 25 bp, Artificial
  probe
  misc_feature (1)..(25): SEQ ID NO: 2005; WAN024CQ4_at; Start 67; Stop 91
ttgctgaggctgacgcactggtact

SEQ ID NO: 128570 - DNA, 25 bp, Artificial
  probe
  misc_feature (1)..(25): SEQ ID NO: 2005; WAN024CQ4_at; Start 23; Stop 47
tgaggccgacgcacttgtcgacgct

SEQ ID NO: 128571 - DNA, 25 bp, Artificial
  probe
  misc_feature (1)..(25): SEQ ID NO: 2005; WAN024CQ4_at; Start 130; Stop 154
cactggttgatgcagattcagaagc

SEQ ID NO: 128572 - DNA, 25 bp, Artificial
  probe
  misc_feature (1)..(25): SEQ ID NO: 2005; WAN024CQ4_at; Start 161; Stop 185
gcttgctgaggctgacgtactcgtt

SEQ ID NO: 128573 - DNA, 25 bp, Artificial
  probe
  misc_feature (1)..(25): SEQ ID NO: 2005; WAN024CQ4_at; Start 192; Stop 216
gactcagacgcactcgttgacgctg

SEQ ID NO: 128574 - DNA, 25 bp, Artificial
  probe
  misc_feature (1)..(25): SEQ ID NO: 2005; WAN024CQ4_at; Start 183; Stop 207
gttgatgctgactcagacgcactcg

SEQ ID NO: 128575 - DNA, 25 bp, Artificial
  probe
  misc_feature (1)..(25): SEQ ID NO: 2005; WAN024CQ4_at; Start 188; Stop 212
tgctgactcagacgcactcgttgac

SEQ ID NO: 128576 - DNA, 25 bp, Artificial
  probe
  misc_feature (1)..(25): SEQ ID NO: 2005; WAN024CQ4_at; Start 226; Stop 250
cacttgttgacgctgatgctgaggc

SEQ ID NO: 128577 - DNA, 25 bp, Artificial
  probe
  misc_feature (1)..(25): SEQ ID NO: 2005; WAN024CQ4_at; Start 178; Stop 202
tactcgttgatgctgactcagacgc

SEQ ID NO: 128578 - DNA, 25 bp, Artificial
  probe
  misc_feature (1)..(25): SEQ ID NO: 2005; WAN024CQ4_at; Start 220; Stop 244
ccgaagcacttgttgacgctgatgc

SEQ ID NO: 128579 - DNA, 25 bp, Artificial
  probe
  misc_feature (1)..(25): SEQ ID NO: 2005; WAN024CQ4_at; Start 206; Stop 230
cgttgacgctgaagccgaagcactt

SEQ ID NO: 128580 - DNA, 25 bp, Artificial
  probe
  misc_feature (1)..(25): SEQ ID NO: 2005; WAN024CQ4_at; Start 62; Stop 86
ggtacttgctgaggctgacgcactg

SEQ ID NO: 128581 - DNA, 25 bp, Artificial
  probe
  misc_feature (1)..(25): SEQ ID NO: 2005; WAN024CQ4_at; Start 32; Stop 56
cgcacttgtcgacgctgaggctgaa

SEQ ID NO: 128582 - DNA, 25 bp, Artificial
  probe
  misc_feature (1)..(25): SEQ ID NO: 2005; WAN024CQ4_at; Start 56; Stop 80
agcactggtacttgctgaggctgac

SEQ ID NO: 128583 - DNA, 25 bp, Artificial
  probe
  misc_feature (1)..(25): SEQ ID NO: 2005; WAN024CQ4_at; Start 210; Stop 234
gacgctgaagccgaagcacttgttg

SEQ ID NO: 128584 - DNA, 25 bp, Artificial
  probe
  misc_feature (1)..(25): SEQ ID NO: 2005; WAN024CQ4_at; Start 41; Stop 65
cgacgctgaggctgaagcactggta

SEQ ID NO: 128585 - DNA, 25 bp, Artificial
  probe
  misc_feature (1)..(25): SEQ ID NO: 2005; WAN024CQ4_at; Start 19; Stop 43
tggttgaggccgacgcacttgtcga

SEQ ID NO: 128586 - DNA, 25 bp, Artificial
  probe
  misc_feature (1)..(25): SEQ ID NO: 2005; WAN024CQ4_at; Start 13; Stop 37
atgcactggttgaggccgacgcact

SEQ ID NO: 128587 - DNA, 25 bp, Artificial
  probe
  misc_feature (1)..(25): SEQ ID NO: 2005; WAN024CQ4_at; Start 126; Stop 150
gacgcactggttgatgcagattcag

SEQ ID NO: 128588 - DNA, 25 bp, Artificial
  probe
  misc_feature (1)..(25): SEQ ID NO: 2005; WAN024CQ4_at; Start 215; Stop 239
tgaagccgaagcacttgttgacgct

SEQ ID NO: 128589 - DNA, 25 bp, Artificial
  probe
  misc_feature (1)..(25): SEQ ID NO: 2005; WAN024CQ4_at; Start 134; Stop 158
ggttgatgcagattcagaagctgat

SEQ ID NO: 128590 - DNA, 25 bp, Artificial
  probe
  misc_feature (1)..(25): SEQ ID NO: 2005; WAN024CQ4_at; Start 9; Stop 33
tcagatgcactggttgaggccgacg

SEQ ID NO: 128591 - DNA, 25 bp, Artificial
  probe
  misc_feature (1)..(25): SEQ ID NO: 2005; WAN024CQ4_at; Start 107; Stop 131
gcttgtcgatgctgaggctgacgca

SEQ ID NO: 128592 - DNA, 25 bp, Artificial
  probe
  misc_feature (1)..(25): SEQ ID NO: 2005; WAN024CQ4_at; Start 230; Stop 254
tgttgacgctgatgctgaggcgcta

SEQ ID NO: 128593 - DNA, 25 bp, Artificial
  probe
  misc_feature (1)..(25): SEQ ID NO: 2005; WAN024CQ4_at; Start 174; Stop 198
gacgtactcgttgatgctgactcag

SEQ ID NO: 128594 - DNA, 25 bp, Artificial
  probe
  misc_feature (1)..(25): SEQ ID NO: 2005; WAN024CQ4_at; Start 167; Stop 191
tgaggctgacgtactcgttgatgct

SEQ ID NO: 128595 - DNA, 25 bp, Artificial
  probe
  misc_feature (1)..(25): SEQ ID NO: 2005; WAN024CQ4_at; Start 113; Stop 137
cgatgctgaggctgacgcactggtt

SEQ ID NO: 128596 - DNA, 25 bp, Artificial
  probe
  misc_feature (1)..(25): SEQ ID NO: 2005; WAN024CQ4_at; Start 148; Stop 172
cagaagctgatgtgcttgctgaggc

SEQ ID NO: 128597 - DNA, 25 bp, Artificial
  probe
  misc_feature (1)..(25): SEQ ID NO: 2005; WAN024CQ4_at; Start 156; Stop 180
gatgtgcttgctgaggctgacgtac

SEQ ID NO: 128598 - DNA, 25 bp, Artificial
  probe
  misc_feature (1)..(25): SEQ ID NO: 2005; WAN024CQ4_at; Start 35; Stop 59
acttgtcgacgctgaggctgaagca

SEQ ID NO: 128599 - DNA, 25 bp, Artificial
  probe
  misc_feature (1)..(25): SEQ ID NO: 3931; WAN024CQ5_at; Start 68; Stop 92
cttcaacttccttccagcggctgaa

SEQ ID NO: 128600 - DNA, 25 bp, Artificial
  probe
  misc_feature (1)..(25): SEQ ID NO: 3931; WAN024CQ5_at; Start 31; Stop 55
gaggcaagcaagctcaagtcacttc

SEQ ID NO: 128601 - DNA, 25 bp, Artificial
  probe
  misc_feature (1)..(25): SEQ ID NO: 3931; WAN024CQ5_at; Start 33; Stop 57
ggcaagcaagctcaagtcacttcca

SEQ ID NO: 128602 - DNA, 25 bp, Artificial
  probe
  misc_feature (1)..(25): SEQ ID NO: 3931; WAN024CQ5_at; Start 3; Stop 27
gaccctacttcctcaatcggcggta

SEQ ID NO: 128603 - DNA, 25 bp, Artificial
  probe
  misc_feature (1)..(25): SEQ ID NO: 3931; WAN024CQ5_at; Start 30; Stop 54
ggaggcaagcaagctcaagtcactt

SEQ ID NO: 128604 - DNA, 25 bp, Artificial
  probe
  misc_feature (1)..(25): SEQ ID NO: 3931; WAN024CQ5_at; Start 35; Stop 59
caagcaagctcaagtcacttccatt

SEQ ID NO: 128605 - DNA, 25 bp, Artificial
  probe
  misc_feature (1)..(25): SEQ ID NO: 3931; WAN024CQ5_at; Start 66; Stop 90
aacttcaacttccttccagcggctg

SEQ ID NO: 128606 - DNA, 25 bp, Artificial
  probe
  misc_feature (1)..(25): SEQ ID NO: 3931; WAN024CQ5_at; Start 13; Stop 37
cctcaatcggcggtactggaggcaa

SEQ ID NO: 128607 - DNA, 25 bp, Artificial
  probe
  misc_feature (1)..(25): SEQ ID NO: 3931; WAN024CQ5_at; Start 65; Stop 89
aaacttcaacttccttccagcggct

SEQ ID NO: 128608 - DNA, 25 bp, Artificial
  probe
  misc_feature (1)..(25): SEQ ID NO: 3931; WAN024CQ5_at; Start 72; Stop 96
aacttccttccagcggctgaatatt

SEQ ID NO: 128609 - DNA, 25 bp, Artificial
  probe
  misc_feature (1)..(25): SEQ ID NO: 3931; WAN024CQ5_at; Start 42; Stop 66
gctcaagtcacttccatttcaggaa

SEQ ID NO: 128610 - DNA, 25 bp, Artificial
  probe
  misc_feature (1)..(25): SEQ ID NO: 3931; WAN024CQ5_at; Start 6; Stop 30
cctacttcctcaatcggcggtactg

SEQ ID NO: 128611 - DNA, 25 bp, Artificial
  probe
  misc_feature (1)..(25): SEQ ID NO: 3931; WAN024CQ5_at; Start 8; Stop 32
tacttcctcaatcggcggtactgga

SEQ ID NO: 128612 - DNA, 25 bp, Artificial
  probe
  misc_feature (1)..(25): SEQ ID NO: 3931; WAN024CQ5_at; Start 70; Stop 94
tcaacttccttccagcggctgaata

SEQ ID NO: 128613 - DNA, 25 bp, Artificial
  probe
  misc_feature (1)..(25): SEQ ID NO: 3931; WAN024CQ5_at; Start 38; Stop 62
gcaagctcaagtcacttccatttca

SEQ ID NO: 128614 - DNA, 25 bp, Artificial
  probe
  misc_feature (1)..(25): SEQ ID NO: 3931; WAN024CQ5_at; Start 34; Stop 58
gcaagcaagctcaagtcacttccat

SEQ ID NO: 128615 - DNA, 25 bp, Artificial
  probe
  misc_feature (1)..(25): SEQ ID NO: 3931; WAN024CQ5_at; Start 15; Stop 39
tcaatcggcggtactggaggcaagc

SEQ ID NO: 128616 - DNA, 25 bp, Artificial
  probe
  misc_feature (1)..(25): SEQ ID NO: 3931; WAN024CQ5_at; Start 23; Stop 47
cggtactggaggcaagcaagctcaa

SEQ ID NO: 128617 - DNA, 25 bp, Artificial
  probe
  misc_feature (1)..(25): SEQ ID NO: 3931; WAN024CQ5_at; Start 2; Stop 26
tgaccctacttcctcaatcggcggt

SEQ ID NO: 128618 - DNA, 25 bp, Artificial
  probe
  misc_feature (1)..(25): SEQ ID NO: 3931; WAN024CQ5_at; Start 64; Stop 88
gaaacttcaacttccttccagcggc

SEQ ID NO: 128619 - DNA, 25 bp, Artificial
  probe
  misc_feature (1)..(25): SEQ ID NO: 3931; WAN024CQ5_at; Start 17; Stop 41
aatcggcggtactggaggcaagcaa

SEQ ID NO: 128620 - DNA, 25 bp, Artificial
  probe
  misc_feature (1)..(25): SEQ ID NO: 3931; WAN024CQ5_at; Start 14; Stop 38
ctcaatcggcggtactggaggcaag

SEQ ID NO: 128621 - DNA, 25 bp, Artificial
  probe
  misc_feature (1)..(25): SEQ ID NO: 3931; WAN024CQ5_at; Start 29; Stop 53
tggaggcaagcaagctcaagtcact

SEQ ID NO: 128622 - DNA, 25 bp, Artificial
  probe
  misc_feature (1)..(25): SEQ ID NO: 3931; WAN024CQ5_at; Start 1; Stop 25
gtgaccctacttcctcaatcggcgg

SEQ ID NO: 128623 - DNA, 25 bp, Artificial
  probe
  misc_feature (1)..(25): SEQ ID NO: 3931; WAN024CQ5_at; Start 54; Stop 78
tccatttcaggaaacttcaacttcc

SEQ ID NO: 128624 - DNA, 25 bp, Artificial
  probe
  misc_feature (1)..(25): SEQ ID NO: 3931; WAN024CQ5_at; Start 28; Stop 52
ctggaggcaagcaagctcaagtcac

SEQ ID NO: 128625 - DNA, 25 bp, Artificial
  probe
  misc_feature (1)..(25): SEQ ID NO: 3931; WAN024CQ5_at; Start 24; Stop 48
ggtactggaggcaagcaagctcaag

SEQ ID NO: 128626 - DNA, 25 bp, Artificial
  probe
  misc_feature (1)..(25): SEQ ID NO: 3931; WAN024CQ5_at; Start 78; Stop 102
cttccagcggctgaatattatttag

SEQ ID NO: 128627 - DNA, 25 bp, Artificial
  probe
  misc_feature (1)..(25): SEQ ID NO: 3931; WAN024CQ5_at; Start 45; Stop 69
caagtcacttccatttcaggaaact

SEQ ID NO: 128628 - DNA, 25 bp, Artificial
  probe
  misc_feature (1)..(25): SEQ ID NO: 3931; WAN024CQ5_at; Start 26; Stop 50
tactggaggcaagcaagctcaagtc

SEQ ID NO: 128629 - DNA, 25 bp, Artificial
  probe
  misc_feature (1)..(25): SEQ ID NO: 3931; WAN024CQ5_at; Start 48; Stop 72
gtcacttccatttcaggaaacttca

SEQ ID NO: 128630 - DNA, 25 bp, Artificial
  probe
  misc_feature (1)..(25): SEQ ID NO: 3931; WAN024CQ5_at; Start 67; Stop 91
acttcaacttccttccagcggctga

SEQ ID NO: 128631 - DNA, 25 bp, Artificial
  probe
  misc_feature (1)..(25): SEQ ID NO: 3931; WAN024CQ5_at; Start 50; Stop 74
cacttccatttcaggaaacttcaac

SEQ ID NO: 128632 - DNA, 25 bp, Artificial
  probe
  misc_feature (1)..(25): SEQ ID NO: 3931; WAN024CQ5_at; Start 40; Stop 64
aagctcaagtcacttccatttcagg

SEQ ID NO: 128633 - DNA, 25 bp, Artificial
  probe
  misc_feature (1)..(25): SEQ ID NO: 7232; WAN024CQ6_at; Start 92; Stop 116
tcaacatcgttcctagagacacatg

SEQ ID NO: 128634 - DNA, 25 bp, Artificial
  probe
  misc_feature (1)..(25): SEQ ID NO: 7232; WAN024CQ6_at; Start 7; Stop 31
gtcgcaggagcgaaaatcagcccca

SEQ ID NO: 128635 - DNA, 25 bp, Artificial
  probe
  misc_feature (1)..(25): SEQ ID NO: 7232; WAN024CQ6_at; Start 61; Stop 85
gacaaaccattgataataatagcct

SEQ ID NO: 128636 - DNA, 25 bp, Artificial
  probe
  misc_feature (1)..(25): SEQ ID NO: 7232; WAN024CQ6_at; Start 31; Stop 55
aaacgccaacctgtcatggcatgcg

SEQ ID NO: 128637 - DNA, 25 bp, Artificial
  probe
  misc_feature (1)..(25): SEQ ID NO: 7232; WAN024CQ6_at; Start 157; Stop 181
agacaacaaaaatttcgtacttgcg

SEQ ID NO: 128638 - DNA, 25 bp, Artificial
  probe
  misc_feature (1)..(25): SEQ ID NO: 7232; WAN024CQ6_at; Start 179; Stop 203
gcgtaaaacagctgccaaggcctct

SEQ ID NO: 128639 - DNA, 25 bp, Artificial
  probe
  misc_feature (1)..(25): SEQ ID NO: 7232; WAN024CQ6_at; Start 112; Stop 136
acatggcttcgcctgtgtaggtcaa

SEQ ID NO: 128640 - DNA, 25 bp, Artificial
  probe
  misc_feature (1)..(25): SEQ ID NO: 7232; WAN024CQ6_at; Start 44; Stop 68
tcatggcatgcgatttagacaaacc

SEQ ID NO: 128641 - DNA, 25 bp, Artificial
  probe
  misc_feature (1)..(25): SEQ ID NO: 7232; WAN024CQ6_at; Start 85; Stop 109
tggtctctcaacatcgttcctagag

SEQ ID NO: 128642 - DNA, 25 bp, Artificial
  probe
  misc_feature (1)..(25): SEQ ID NO: 7232; WAN024CQ6_at; Start 125; Stop 149
tgtgtaggtcaattctgagtaaacc

SEQ ID NO: 128643 - DNA, 25 bp, Artificial
  probe
  misc_feature (1)..(25): SEQ ID NO: 7232; WAN024CQ6_at; Start 177; Stop 201
ttgcgtaaaacagctgccaaggcct

SEQ ID NO: 128644 - DNA, 25 bp, Artificial
  probe
  misc_feature (1)..(25): SEQ ID NO: 7232; WAN024CQ6_at; Start 197; Stop 221
ggcctctaactgctctcgactgtag

SEQ ID NO: 128645 - DNA, 25 bp, Artificial
  probe
  misc_feature (1)..(25): SEQ ID NO: 7232; WAN024CQ6_at; Start 80; Stop 104
tagcctggtctctcaacatcgttcc

SEQ ID NO: 128646 - DNA, 25 bp, Artificial
  probe
  misc_feature (1)..(25): SEQ ID NO: 7232; WAN024CQ6_at; Start 117; Stop 141
gcttcgcctgtgtaggtcaattctg

SEQ ID NO: 128647 - DNA, 25 bp, Artificial
  probe
  misc_feature (1)..(25): SEQ ID NO: 7232; WAN024CQ6_at; Start 184; Stop 208
aaacagctgccaaggcctctaactg

SEQ ID NO: 128648 - DNA, 25 bp, Artificial
  probe
  misc_feature (1)..(25): SEQ ID NO: 7232; WAN024CQ6_at; Start 13; Stop 37
ggagcgaaaatcagccccaaacgcc

SEQ ID NO: 128649 - DNA, 25 bp, Artificial
  probe
  misc_feature (1)..(25): SEQ ID NO: 7232; WAN024CQ6_at; Start 150; Stop 174
tcatcacagacaacaaaaatttcgt

SEQ ID NO: 128650 - DNA, 25 bp, Artificial
  probe
  misc_feature (1)..(25): SEQ ID NO: 7232; WAN024CQ6_at; Start 48; Stop 72
ggcatgcgatttagacaaaccattg

SEQ ID NO: 128651 - DNA, 25 bp, Artificial
  probe
  misc_feature (1)..(25): SEQ ID NO: 7232; WAN024CQ6_at; Start 36; Stop 60
ccaacctgtcatggcatgcgattta

SEQ ID NO: 128652 - DNA, 25 bp, Artificial
  probe
  misc_feature (1)..(25): SEQ ID NO: 7232; WAN024CQ6_at; Start 107; Stop 131
gagacacatggcttcgcctgtgtag

SEQ ID NO: 128653 - DNA, 25 bp, Artificial
  probe
  misc_feature (1)..(25): SEQ ID NO: 7232; WAN024CQ6_at; Start 3; Stop 27
gaaggtcgcaggagcgaaaatcagc

SEQ ID NO: 128654 - DNA, 25 bp, Artificial
  probe
  misc_feature (1)..(25): SEQ ID NO: 7232; WAN024CQ6_at; Start 172; Stop 196
cgtacttgcgtaaaacagctgccaa

SEQ ID NO: 128655 - DNA, 25 bp, Artificial
  probe
  misc_feature (1)..(25): SEQ ID NO: 7232; WAN024CQ6_at; Start 98; Stop 122
tcgttcctagagacacatggcttcg

SEQ ID NO: 128656 - DNA, 25 bp, Artificial
  probe
  misc_feature (1)..(25): SEQ ID NO: 7232; WAN024CQ6_at; Start 102; Stop 126
tcctagagacacatggcttcgcctg

SEQ ID NO: 128657 - DNA, 25 bp, Artificial
  probe
  misc_feature (1)..(25): SEQ ID NO: 7232; WAN024CQ6_at; Start 141; Stop 165
gagtaaacctcatcacagacaacaa

SEQ ID NO: 128658 - DNA, 25 bp, Artificial
  probe
  misc_feature (1)..(25): SEQ ID NO: 7232; WAN024CQ6_at; Start 191; Stop 215
tgccaaggcctctaactgctctcga

SEQ ID NO: 128659 - DNA, 25 bp, Artificial
  probe
  misc_feature (1)..(25): SEQ ID NO: 7232; WAN024CQ6_at; Start 72; Stop 96
gataataatagcctggtctctcaac

SEQ ID NO: 128660 - DNA, 25 bp, Artificial
  probe
  misc_feature (1)..(25): SEQ ID NO: 7232; WAN024CQ6_at; Start 169; Stop 193
tttcgtacttgcgtaaaacagctgc

SEQ ID NO: 128661 - DNA, 25 bp, Artificial
  probe
  misc_feature (1)..(25): SEQ ID NO: 7232; WAN024CQ6_at; Start 201; Stop 225
tctaactgctctcgactgtaggtaa

SEQ ID NO: 128662 - DNA, 25 bp, Artificial
  probe
  misc_feature (1)..(25): SEQ ID NO: 7232; WAN024CQ6_at; Start 52; Stop 76
tgcgatttagacaaaccattgataa

SEQ ID NO: 128663 - DNA, 25 bp, Artificial
  probe
  misc_feature (1)..(25): SEQ ID NO: 7232; WAN024CQ6_at; Start 77; Stop 101
taatagcctggtctctcaacatcgt

SEQ ID NO: 128664 - DNA, 25 bp, Artificial
  probe
  misc_feature (1)..(25): SEQ ID NO: 7232; WAN024CQ6_at; Start 131; Stop 155
ggtcaattctgagtaaacctcatca

SEQ ID NO: 128665 - DNA, 25 bp, Artificial
  probe
  misc_feature (1)..(25): SEQ ID NO: 7232; WAN024CQ6_at; Start 68; Stop 92
cattgataataatagcctggtctct

SEQ ID NO: 128666 - DNA, 25 bp, Artificial
  probe
  misc_feature (1)..(25): SEQ ID NO: 7232; WAN024CQ6_at; Start 121; Stop 145
cgcctgtgtaggtcaattctgagta

SEQ ID NO: 128667 - DNA, 25 bp, Artificial
  probe
  misc_feature (1)..(25): SEQ ID NO: 5118; WAN024CQ7_at; Start 39; Stop 63
aaggagggcacctagtttcgctcga

SEQ ID NO: 128668 - DNA, 25 bp, Artificial
  probe
  misc_feature (1)..(25): SEQ ID NO: 5118; WAN024CQ7_at; Start 27; Stop 51
gctgtccttgagaaggagggcacct

SEQ ID NO: 128669 - DNA, 25 bp, Artificial
  probe
  misc_feature (1)..(25): SEQ ID NO: 5118; WAN024CQ7_at; Start 141; Stop 165
gtttcccgtgaaaccatctgccaca

SEQ ID NO: 128670 - DNA, 25 bp, Artificial
  probe
  misc_feature (1)..(25): SEQ ID NO: 5118; WAN024CQ7_at; Start 218; Stop 242
agttcaaactttcatcagccgccag

SEQ ID NO: 128671 - DNA, 25 bp, Artificial
  probe
  misc_feature (1)..(25): SEQ ID NO: 5118; WAN024CQ7_at; Start 31; Stop 55
tccttgagaaggagggcacctagtt

SEQ ID NO: 128672 - DNA, 25 bp, Artificial
  probe
  misc_feature (1)..(25): SEQ ID NO: 5118; WAN024CQ7_at; Start 89; Stop 113
tgagcaagcccatgattcccatagc

SEQ ID NO: 128673 - DNA, 25 bp, Artificial
  probe
  misc_feature (1)..(25): SEQ ID NO: 5118; WAN024CQ7_at; Start 183; Stop 207
attcatcaaatcacgcgcttccacg

SEQ ID NO: 128674 - DNA, 25 bp, Artificial
  probe
  misc_feature (1)..(25): SEQ ID NO: 5118; WAN024CQ7_at; Start 80; Stop 104
tagctgtcttgagcaagcccatgat

SEQ ID NO: 128675 - DNA, 25 bp, Artificial
  probe
  misc_feature (1)..(25): SEQ ID NO: 5118; WAN024CQ7_at; Start 116; Stop 140
tcccttcgatggatttgagcacagc

SEQ ID NO: 128676 - DNA, 25 bp, Artificial
  probe
  misc_feature (1)..(25): SEQ ID NO: 5118; WAN024CQ7_at; Start 164; Stop 188
caacaacatctgcaacgccattcat

SEQ ID NO: 128677 - DNA, 25 bp, Artificial
  probe
  misc_feature (1)..(25): SEQ ID NO: 5118; WAN024CQ7_at; Start 41; Stop 65
ggagggcacctagtttcgctcgaag

SEQ ID NO: 128678 - DNA, 25 bp, Artificial
  probe
  misc_feature (1)..(25): SEQ ID NO: 5118; WAN024CQ7_at; Start 195; Stop 219
acgcgcttccacgtttccgataaag

SEQ ID NO: 128679 - DNA, 25 bp, Artificial
  probe
  misc_feature (1)..(25): SEQ ID NO: 5118; WAN024CQ7_at; Start 92; Stop 116
gcaagcccatgattcccatagctgt

SEQ ID NO: 128680 - DNA, 25 bp, Artificial
  probe
  misc_feature (1)..(25): SEQ ID NO: 5118; WAN024CQ7_at; Start 84; Stop 108
tgtcttgagcaagcccatgattccc

SEQ ID NO: 128681 - DNA, 25 bp, Artificial
  probe
  misc_feature (1)..(25): SEQ ID NO: 5118; WAN024CQ7_at; Start 167; Stop 191
caacatctgcaacgccattcatcaa

SEQ ID NO: 128682 - DNA, 25 bp, Artificial
  probe
  misc_feature (1)..(25): SEQ ID NO: 5118; WAN024CQ7_at; Start 127; Stop 151
gatttgagcacagcgtttcccgtga

SEQ ID NO: 128683 - DNA, 25 bp, Artificial
  probe
  misc_feature (1)..(25): SEQ ID NO: 5118; WAN024CQ7_at; Start 99; Stop 123
catgattcccatagctgtcccttcg

SEQ ID NO: 128684 - DNA, 25 bp, Artificial
  probe
  misc_feature (1)..(25): SEQ ID NO: 5118; WAN024CQ7_at; Start 215; Stop 239
taaagttcaaactttcatcagccgc

SEQ ID NO: 128685 - DNA, 25 bp, Artificial
  probe
  misc_feature (1)..(25): SEQ ID NO: 5118; WAN024CQ7_at; Start 123; Stop 147
gatggatttgagcacagcgtttccc

SEQ ID NO: 128686 - DNA, 25 bp, Artificial
  probe
  misc_feature (1)..(25): SEQ ID NO: 5118; WAN024CQ7_at; Start 221; Stop 245
tcaaactttcatcagccgccagtaa

SEQ ID NO: 128687 - DNA, 25 bp, Artificial
  probe
  misc_feature (1)..(25): SEQ ID NO: 5118; WAN024CQ7_at; Start 75; Stop 99
tgtaatagctgtcttgagcaagccc

SEQ ID NO: 128688 - DNA, 25 bp, Artificial
  probe
  misc_feature (1)..(25): SEQ ID NO: 5118; WAN024CQ7_at; Start 150; Stop 174
gaaaccatctgccacaacaacatct

SEQ ID NO: 128689 - DNA, 25 bp, Artificial
  probe
  misc_feature (1)..(25): SEQ ID NO: 5118; WAN024CQ7_at; Start 118; Stop 142
ccttcgatggatttgagcacagcgt

SEQ ID NO: 128690 - DNA, 25 bp, Artificial
  probe
  misc_feature (1)..(25): SEQ ID NO: 5118; WAN024CQ7_at; Start 175; Stop 199
gcaacgccattcatcaaatcacgcg

SEQ ID NO: 128691 - DNA, 25 bp, Artificial
  probe
  misc_feature (1)..(25): SEQ ID NO: 5118; WAN024CQ7_at; Start 156; Stop 180
atctgccacaacaacatctgcaacg

SEQ ID NO: 128692 - DNA, 25 bp, Artificial
  probe
  misc_feature (1)..(25): SEQ ID NO: 5118; WAN024CQ7_at; Start 199; Stop 223
gcttccacgtttccgataaagttca

SEQ ID NO: 128693 - DNA, 25 bp, Artificial
  probe
  misc_feature (1)..(25): SEQ ID NO: 5118; WAN024CQ7_at; Start 132; Stop 156
gagcacagcgtttcccgtgaaacca

SEQ ID NO: 128694 - DNA, 25 bp, Artificial
  probe
  misc_feature (1)..(25): SEQ ID NO: 5118; WAN024CQ7_at; Start 68; Stop 92
caccacctgtaatagctgtcttgag

SEQ ID NO: 128695 - DNA, 25 bp, Artificial
  probe
  misc_feature (1)..(25): SEQ ID NO: 5118; WAN024CQ7_at; Start 36; Stop 60
gagaaggagggcacctagtttcgct

SEQ ID NO: 128696 - DNA, 25 bp, Artificial
  probe
  misc_feature (1)..(25): SEQ ID NO: 5118; WAN024CQ7_at; Start 190; Stop 214
aaatcacgcgcttccacgtttccga

SEQ ID NO: 128697 - DNA, 25 bp, Artificial
  probe
  misc_feature (1)..(25): SEQ ID NO: 5118; WAN024CQ7_at; Start 102; Stop 126
gattcccatagctgtcccttcgatg

SEQ ID NO: 128698 - DNA, 25 bp, Artificial
  probe
  misc_feature (1)..(25): SEQ ID NO: 5118; WAN024CQ7_at; Start 228; Stop 252
ttcatcagccgccagtaattcataa

SEQ ID NO: 128699 - DNA, 25 bp, Artificial
  probe
  misc_feature (1)..(25): SEQ ID NO: 5118; WAN024CQ7_at; Start 121; Stop 145
tcgatggatttgagcacagcgtttc

SEQ ID NO: 128700 - DNA, 25 bp, Artificial
  probe
  misc_feature (1)..(25): SEQ ID NO: 5118; WAN024CQ7_at; Start 110; Stop 134
tagctgtcccttcgatggatttgag

SEQ ID NO: 128701 - DNA, 25 bp, Artificial
  probe
  misc_feature (1)..(25): SEQ ID NO: 2816; WAN024CQ8_at; Start 26; Stop 50
taggcaaggtagacatgagtccagg

SEQ ID NO: 128702 - DNA, 25 bp, Artificial
  probe
  misc_feature (1)..(25): SEQ ID NO: 2816; WAN024CQ8_at; Start 220; Stop 244
gaatcaatcttctcatccgtatgga

SEQ ID NO: 128703 - DNA, 25 bp, Artificial
  probe
  misc_feature (1)..(25): SEQ ID NO: 2816; WAN024CQ8_at; Start 197; Stop 221
tagctctcgtaggttcatcatccga

SEQ ID NO: 128704 - DNA, 25 bp, Artificial
  probe
  misc_feature (1)..(25): SEQ ID NO: 2816; WAN024CQ8_at; Start 20; Stop 44
caacggtaggcaaggtagacatgag

SEQ ID NO: 128705 - DNA, 25 bp, Artificial
  probe
  misc_feature (1)..(25): SEQ ID NO: 2816; WAN024CQ8_at; Start 136; Stop 160
gcttcaccatctttgacagccttgg

SEQ ID NO: 128706 - DNA, 25 bp, Artificial
  probe
  misc_feature (1)..(25): SEQ ID NO: 2816; WAN024CQ8_at; Start 205; Stop 229
gtaggttcatcatccgaatcaatct

SEQ ID NO: 128707 - DNA, 25 bp, Artificial
  probe
  misc_feature (1)..(25): SEQ ID NO: 2816; WAN024CQ8_at; Start 116; Stop 140
cagccgaaaggacagcgtctgcttc

SEQ ID NO: 128708 - DNA, 25 bp, Artificial
  probe
  misc_feature (1)..(25): SEQ ID NO: 2816; WAN024CQ8_at; Start 259; Stop 283
tctgtcgctgtcagatattgcttga

SEQ ID NO: 128709 - DNA, 25 bp, Artificial
  probe
  misc_feature (1)..(25): SEQ ID NO: 2816; WAN024CQ8_at; Start 42; Stop 66
gagtccaggacggtcgatattcttg

SEQ ID NO: 128710 - DNA, 25 bp, Artificial
  probe
  misc_feature (1)..(25): SEQ ID NO: 2816; WAN024CQ8_at; Start 239; Stop 263
tatggataatgctgacgcgctctgt

SEQ ID NO: 128711 - DNA, 25 bp, Artificial
  probe
  misc_feature (1)..(25): SEQ ID NO: 2816; WAN024CQ8_at; Start 57; Stop 81
gatattcttgatacgacccacgatg

SEQ ID NO: 128712 - DNA, 25 bp, Artificial
  probe
  misc_feature (1)..(25): SEQ ID NO: 2816; WAN024CQ8_at; Start 242; Stop 266
ggataatgctgacgcgctctgtcgc

SEQ ID NO: 128713 - DNA, 25 bp, Artificial
  probe
  misc_feature (1)..(25): SEQ ID NO: 2816; WAN024CQ8_at; Start 110; Stop 134
tattcccagccgaaaggacagcgtc

SEQ ID NO: 128714 - DNA, 25 bp, Artificial
  probe
  misc_feature (1)..(25): SEQ ID NO: 2816; WAN024CQ8_at; Start 1; Stop 25
atgtcaaaaccttttccatcaacgg

SEQ ID NO: 128715 - DNA, 25 bp, Artificial
  probe
  misc_feature (1)..(25): SEQ ID NO: 2816; WAN024CQ8_at; Start 252; Stop 276
gacgcgctctgtcgctgtcagatat

SEQ ID NO: 128716 - DNA, 25 bp, Artificial
  probe
  misc_feature (1)..(25): SEQ ID NO: 2816; WAN024CQ8_at; Start 150; Stop 174
gacagccttggctgccaataccata

SEQ ID NO: 128717 - DNA, 25 bp, Artificial
  probe
  misc_feature (1)..(25): SEQ ID NO: 2816; WAN024CQ8_at; Start 140; Stop 164
caccatctttgacagccttggctgc

SEQ ID NO: 128718 - DNA, 25 bp, Artificial
  probe
  misc_feature (1)..(25): SEQ ID NO: 2816; WAN024CQ8_at; Start 126; Stop 150
gacagcgtctgcttcaccatctttg

SEQ ID NO: 128719 - DNA, 25 bp, Artificial
  probe
  misc_feature (1)..(25): SEQ ID NO: 2816; WAN024CQ8_at; Start 158; Stop 182
tggctgccaataccatactggcatt

SEQ ID NO: 128720 - DNA, 25 bp, Artificial
  probe
  misc_feature (1)..(25): SEQ ID NO: 2816; WAN024CQ8_at; Start 16; Stop 40
ccatcaacggtaggcaaggtagaca

SEQ ID NO: 128721 - DNA, 25 bp, Artificial
  probe
  misc_feature (1)..(25): SEQ ID NO: 2816; WAN024CQ8_at; Start 233; Stop 257
catccgtatggataatgctgacgcg

SEQ ID NO: 128722 - DNA, 25 bp, Artificial
  probe
  misc_feature (1)..(25): SEQ ID NO: 2816; WAN024CQ8_at; Start 264; Stop 288
cgctgtcagatattgcttgatttta

SEQ ID NO: 128723 - DNA, 25 bp, Artificial
  probe
  misc_feature (1)..(25): SEQ ID NO: 2816; WAN024CQ8_at; Start 65; Stop 89
tgatacgacccacgatgaagaatcc

SEQ ID NO: 128724 - DNA, 25 bp, Artificial
  probe
  misc_feature (1)..(25): SEQ ID NO: 2816; WAN024CQ8_at; Start 191; Stop 215
tccgaatagctctcgtaggttcatc

SEQ ID NO: 128725 - DNA, 25 bp, Artificial
  probe
  misc_feature (1)..(25): SEQ ID NO: 2816; WAN024CQ8_at; Start 104; Stop 128
cacctgtattcccagccgaaaggac

SEQ ID NO: 128726 - DNA, 25 bp, Artificial
  probe
  misc_feature (1)..(25): SEQ ID NO: 2816; WAN024CQ8_at; Start 47; Stop 71
caggacggtcgatattcttgatacg

SEQ ID NO: 128727 - DNA, 25 bp, Artificial
  probe
  misc_feature (1)..(25): SEQ ID NO: 2816; WAN024CQ8_at; Start 246; Stop 270
aatgctgacgcgctctgtcgctgtc

SEQ ID NO: 128728 - DNA, 25 bp, Artificial
  probe
  misc_feature (1)..(25): SEQ ID NO: 2816; WAN024CQ8_at; Start 35; Stop 59
tagacatgagtccaggacggtcgat

SEQ ID NO: 128729 - DNA, 25 bp, Artificial
  probe
  misc_feature (1)..(25): SEQ ID NO: 2816; WAN024CQ8_at; Start 121; Stop 145
gaaaggacagcgtctgcttcaccat

SEQ ID NO: 128730 - DNA, 25 bp, Artificial
  probe
  misc_feature (1)..(25): SEQ ID NO: 2816; WAN024CQ8_at; Start 278; Stop 302
gcttgattttagcttcatctccgta

SEQ ID NO: 128731 - DNA, 25 bp, Artificial
  probe
  misc_feature (1)..(25): SEQ ID NO: 2816; WAN024CQ8_at; Start 30; Stop 54
caaggtagacatgagtccaggacgg

SEQ ID NO: 128732 - DNA, 25 bp, Artificial
  probe
  misc_feature (1)..(25): SEQ ID NO: 2816; WAN024CQ8_at; Start 9; Stop 33
accttttccatcaacggtaggcaag

SEQ ID NO: 128733 - DNA, 25 bp, Artificial
  probe
  misc_feature (1)..(25): SEQ ID NO: 2816; WAN024CQ8_at; Start 171; Stop 195
catactggcatttttcttattccga

SEQ ID NO: 128734 - DNA, 25 bp, Artificial
  probe
  misc_feature (1)..(25): SEQ ID NO: 2816; WAN024CQ8_at; Start 185; Stop 209
tcttattccgaatagctctcgtagg

SEQ ID NO: 128735 - DNA, 25 bp, Artificial
  probe
  misc_feature (1)..(25): SEQ ID NO: 5253; WAN024CQ9_at; Start 85; Stop 109
ttcgatgatatagtcccgacgttgg

SEQ ID NO: 128736 - DNA, 25 bp, Artificial
  probe
  misc_feature (1)..(25): SEQ ID NO: 5253; WAN024CQ9_at; Start 79; Stop 103
cattttttcgatgatatagtcccga

SEQ ID NO: 128737 - DNA, 25 bp, Artificial
  probe
  misc_feature (1)..(25): SEQ ID NO: 5253; WAN024CQ9_at; Start 111; Stop 135
tatattccttcttcatgggctccgc

SEQ ID NO: 128738 - DNA, 25 bp, Artificial
  probe
  misc_feature (1)..(25): SEQ ID NO: 5253; WAN024CQ9_at; Start 27; Stop 51
caaaaatatagaaggcaccgtctgg

SEQ ID NO: 128739 - DNA, 25 bp, Artificial
  probe
  misc_feature (1)..(25): SEQ ID NO: 5253; WAN024CQ9_at; Start 95; Stop 119
tagtcccgacgttggatatattcct

SEQ ID NO: 128740 - DNA, 25 bp, Artificial
  probe
  misc_feature (1)..(25): SEQ ID NO: 5253; WAN024CQ9_at; Start 3; Stop 27
gattgtagcccgctggaattttagc

SEQ ID NO: 128741 - DNA, 25 bp, Artificial
  probe
  misc_feature (1)..(25): SEQ ID NO: 5253; WAN024CQ9_at; Start 126; Stop 150
tgggctccgcatcgtttttaccagc

SEQ ID NO: 128742 - DNA, 25 bp, Artificial
  probe
  misc_feature (1)..(25): SEQ ID NO: 5253; WAN024CQ9_at; Start 195; Stop 219
cagtgaccaagtactggtgactctt

SEQ ID NO: 128743 - DNA, 25 bp, Artificial
  probe
  misc_feature (1)..(25): SEQ ID NO: 5253; WAN024CQ9_at; Start 35; Stop 59
tagaaggcaccgtctggtttgataa

SEQ ID NO: 128744 - DNA, 25 bp, Artificial
  probe
  misc_feature (1)..(25): SEQ ID NO: 5253; WAN024CQ9_at; Start 143; Stop 167
ttaccagccgtcaaggcttctaccg

SEQ ID NO: 128745 - DNA, 25 bp, Artificial
  probe
  misc_feature (1)..(25): SEQ ID NO: 5253; WAN024CQ9_at; Start 54; Stop 78
tgataatctcaaaaccaagagcagt

SEQ ID NO: 128746 - DNA, 25 bp, Artificial
  probe
  misc_feature (1)..(25): SEQ ID NO: 5253; WAN024CQ9_at; Start 98; Stop 122
tcccgacgttggatatattccttct

SEQ ID NO: 128747 - DNA, 25 bp, Artificial
  probe
  misc_feature (1)..(25): SEQ ID NO: 5253; WAN024CQ9_at; Start 6; Stop 30
tgtagcccgctggaattttagcaaa

SEQ ID NO: 128748 - DNA, 25 bp, Artificial
  probe
  misc_feature (1)..(25): SEQ ID NO: 5253; WAN024CQ9_at; Start 107; Stop 131
tggatatattccttcttcatgggct

SEQ ID NO: 128749 - DNA, 25 bp, Artificial
  probe
  misc_feature (1)..(25): SEQ ID NO: 5253; WAN024CQ9_at; Start 10; Stop 34
gcccgctggaattttagcaaaaata

SEQ ID NO: 128750 - DNA, 25 bp, Artificial
  probe
  misc_feature (1)..(25): SEQ ID NO: 5253; WAN024CQ9_at; Start 60; Stop 84
tctcaaaaccaagagcagtcatttt

SEQ ID NO: 128751 - DNA, 25 bp, Artificial
  probe
  misc_feature (1)..(25): SEQ ID NO: 5253; WAN024CQ9_at; Start 31; Stop 55
aatatagaaggcaccgtctggtttg

SEQ ID NO: 128752 - DNA, 25 bp, Artificial
  probe
  misc_feature (1)..(25): SEQ ID NO: 5253; WAN024CQ9_at; Start 69; Stop 93
caagagcagtcattttttcgatgat

SEQ ID NO: 128753 - DNA, 25 bp, Artificial
  probe
  misc_feature (1)..(25): SEQ ID NO: 5253; WAN024CQ9_at; Start 171; Stop 195
catgttgcgccatggtatttgcggc

SEQ ID NO: 128754 - DNA, 25 bp, Artificial
  probe
  misc_feature (1)..(25): SEQ ID NO: 5253; WAN024CQ9_at; Start 87; Stop 111
cgatgatatagtcccgacgttggat

SEQ ID NO: 128755 - DNA, 25 bp, Artificial
  probe
  misc_feature (1)..(25): SEQ ID NO: 5253; WAN024CQ9_at; Start 165; Stop 189
ccgcagcatgttgcgccatggtatt
